United States Patent Application Publication US 2007/0067865 A1 - sequence listing, part 36

SEQ ID NO: 222138 - DNA, 401 bp, Gossypium hirsutum
cccacgcgtccgattccttcaccaccacagccgaacgggaaattgtgagagatgttaaggaaaagctgtcttacattgcccttgactatgaacaggagctagagacctcaaaaacaagttcatcagtagagaagagctatgagttacctgatggtcaggttattaccattggtgctgaacgtttcagatgccccgaagtgcttttccaaccatccttgattggtatggaagctgcaggcatccatgagactacatacaattcaataatgaagtgtgatgtggatatcaggaaggacttgtatggtaacattgtccttagtggtggtacaaccatgttcccgggtattgcggacagaatgagcaaggagctttctgcactcgctcctagcagcatgaaaatc

SEQ ID NO: 222139 - DNA, 306 bp, Gossypium hirsutum
cccacgcgtccgagaggttacatgttcaccaccactgctgaacgggaaattgtccgtgacatgaaagagaagcttgcttatgttgccctggactatgagcaggaactggagactgccaagagcagctcatctgttgggaagaactatgaggtgcctgacggacaaggcattactattggagctgagagaatcccgtggccggaagttcttttccaaccatcttttatcgggatggaagctgctggaatccattgaactacctacaactttatcatggagtgcgatgtggatattaagaaagatctt

SEQ ID NO: 222140 - DNA, 361 bp, Gossypium hirsutum
gaaaaccgggcccgacccacgcgtacggttgcctcttcatcaacgatctcgactttggatccggtcgtatgggaggaaccagcgcagggcacattgaacaaccaaatggtgaacgccacactcatgaacatcgctgataaccccaccaacgttcagctccccggtatgtacaacaaggaagagaaccctcgtgttccgatcatcgtcaccggtaacgatttctcgacgctgtacgcgcctctcatccgtgacggtcgtatggagaagttatactgggcacccaccagggaagataggatcggtgtttgcacaggtatttttcaggaccgaccatgttcccgttgatgaccttgataagctt

SEQ ID NO: 222141 - DNA, 424 bp, Gossypium hirsutum
acccacgccgtccggccatggcaacaaaagctgctttagctccttcatgaatccctgccaacaccaggcttccgtctaagaccactcactctttccccactcaatgctcttccaagagactggaagtgactgaattctctggacttcgatccagctcatgcgtcacctttgccaagaatgttagagatacttccttttttcgacgtgctggctgcccaacttactcccaagagtgaaggtgtaccatcagcatctgttaggggagaaacagttgccaaactgaaggttgcaatcaatggatttggacgcattggcaggaacttcctcagatgctggcatggcaggaaggactcacccctcgaggttgttgttgtaaatgacagtggtggtgtcaagaatgcttcacacttgctgaaatatgact

SEQ ID NO: 222142 - DNA, 387 bp, Gossypium hirsutum
cggcccgccccacgcgtccggcgtgagccgttatagttacgagtccctccacttttttttcttataattgtgcttccccgctgcaaaggctttattcttcattcgcttcgccgaatttttatctactttttatctgaacggagtttggtaatccagttttcgtcttcggttgattcatgaaatcttagtttttgaattgcgtgactgaatgatctaatggagtctaaaggtgggaaaaagaagtctagtagttgtaagtctttattctacgaagctcctctttgttacagcattgaagacgtgcggcccaactgtggaatcaagaagttcaaatctgctgcttactccacctgcgctcgcaagccatcctgatatactcacaagcgt

SEQ ID NO: 222143 - DNA, 360 bp, Gossypium hirsutum
  unsure (1)..(360): unsure at all n locations
ggaaanaccggcgcgacccacgcgttcgcccactcgttcgcccacgcgttcgaggtcgctttttgtctgccacaatttcggttgaaaagggacaattaaatgggaattgtctaagaagctcacaacatgaaggtactgggttcaggcgatcgagtcattgatttggctcatgggttcggtactgaccaatctgtttggaagcacttggtccctcacttagtcgactatttccgtgtcgtatagtacgacaacatgggtgccggaaccaccaaccccgaatactttgatattaattgttatgcttactctcggaaggatatgcttatgattttgcttgcgtaccttgaatgaaaatccact

SEQ ID NO: 222144 - DNA, 432 bp, Gossypium hirsutum
gaccacgcgtccgcccacgcgtccgaaagcactgaaaaagcaaaaccatgttctctgcttctctcctcaagactgcaccagttttagacaagtctgagtgggttaagggtcacacccttcgccaaccttccacttctgtggtgaggtgccaccctgttgcaccctccggactaactgtgcgtgcaagctcatatgccgatgagcttgtcaagactgctaaagctattgcttctcctggccgtggaattttggccatggatgagtccaacgctacctgtgggaaacgtttggcctcaatcgggctagaaaacacggaggctaaccgccaagcctacaggacgttgcttgtttcagctcctggccttggtcagtacatctcaggtgccatcctctttgaggaaaccctctatcaaaccacaattgatggcaaga

SEQ ID NO: 222145 - DNA, 368 bp, Gossypium hirsutum
cccacgcgtccgactgtagcatatagtactagttagcagaatagcaatggcctgctccgtgatctatcggcaaccattgccaccgtaactgctcctccccggcacaggccaacatggtggcccccttcaccggcctaagtctgccttgtttcccagtcactaggaaggccaacaacgacatcacttctcttgcaagcaatggtgggagagtgcaatgcatgcaggtgtggcctcctcttgggaagaagaagttcgagacactctcataccttcccgatcttacacccgtacagttggctaaggaagtagattaccttcttcgctttaaaagggattcttgtttggaattgaattagaggagggattcg

SEQ ID NO: 222146 - DNA, 407 bp, Gossypium hirsutum
cccacgcgtccgaaagataaacataaccaaaattaattatggcttctgcttccgctactgtgctgaagtcttcacctattatcgacaagtccgagtggattaagggccaaaacctccgtcacccttcggtttgttttgtacggtcacaccctacatcggccgcctttaccgtccgtgctagttcatatgccgatgagcttgttaagaccgcgaaaactgttgcatttccaggtcgtggtattttggccatggatgaatcaaatgctacatgtgggaagcggcttgcctcgattggtctcgagaataccgtggcaaaccggcaagcttaccgtacccttctcgtgtctgcccctggccatggtaactacattttgggagctatccttttcgaggtgactctttaccaa

SEQ ID NO: 222147 - DNA, 388 bp, Gossypium hirsutum
gcagtttttgataagaaaagagagggaaaaaggaaattaaagatgtcaacagcttcttcattttgttcatcaactcaagttaatggctttggagggggacttaggcttctaagaacccatctttctcaacccaagtccttttcttttactaggaggagaactgctacagtagtgaaggcaactgctcgagtcgataaattttcgaaaagcgatatcattgtttccccatctatactctctgctaatttcgctaagttgggggagcaggtgaaagccgtagaagtggcaggctgtgattggatccatgttgatgtaatggatggccgatttgttccaaacattacgattggaccctctgtggttgatgccttacgacctgtgacagatc

SEQ ID NO: 222148 - DNA, 385 bp, Gossypium hirsutum
cccacgcgtccgctttcatttatttatttgtttaaactcacacaagtttaggaagaagaagaagatgtcgtggcaaacgtatgttgatgatcacctgttgtgtgatatcgaaggcaaccatctctctgccgctgctatcatcggccaagacggcagcgtttgggctcagagctccaatttccctcagtttaagcaagaagaaatcaatggcatcatgaatgacttttctgaacccggatcacttgccccaaccggattgtaccttggtggcactaaatacatggtgattcaaggtgaaccaggagctgttattcgagggaagaagggccctggaggtgttactgttaaaaagaccaatcaggccttgatcatcggcatttatgat

SEQ ID NO: 222149 - DNA, 417 bp, Gossypium hirsutum
cccacgcgtccggacaccaagaaaagcctcaccacaagcctctcatcgacaatggcggctgccacttcgaactccgctttgcctaagctttctacgttaacttcgtccttcaaatcttccatacccatttccaaatccagccttcccttctccacaacccctcaaaagcccaccccttaccgctccttcgacgtttcctgctctctttctcatgcaagctccaaccccagatccgctgccgcatccgttacccaaaaaactgctcctccccattatttcatttccaggtatgcggatgatgagccccggaaaggcgctgatatcctggtggaagccctggaacgtgaaggggtcaaggatgtgtttgcctacccaggtggagcttcaatggagatccaccaggctttaaccccggtc

SEQ ID NO: 222150 - DNA, 330 bp, Gossypium hirsutum
agctccttcacaccctccattttttgagatgtttttttatgcaatcgtttcgttgaaagagagggcaggatcgagccaatatgcgattgcgaaattcattgaagagaagcataagcaattaccggcgaatttccgcatagtcttacttgttcagacgaggaagtttgttgcttccggaaagcttcgaaaagtgaaagcctttattaagctgccttcggcttatgccgtaactaagaaaccagccgccgtagctaagaaacctgccgccgcgaagcctaaatctgcaactaccactaccgtcgcaaagttcaagccgaaggctactaaaac

SEQ ID NO: 222151 - DNA, 417 bp, Gossypium hirsutum
  unsure (1)..(417): unsure at all n locations
gtgagactctnttgtataactgtagcatatagtactagtaagcagtaatagcaatggccggctgcatgatctcatcggcaaccattgccaccgtgaactgctcctccccggcacaggccaacatggtggcccccttcaccggcctcaagtctgcctctgctttcccagtcactaggaaggccaacaacgacatcacttctcttgcaagcaatggtgggagagtgcaatgcatgcaggtgtggcctcctcttgggaagaagaagttcgagacactctcatacctccccgatcttacacccgtacagttggctaaggaagtagattaccttcttcgctctaaatggattccttgcttggaattcgaattagaggagggattcgtgcaccgtaagtactcgagcttacccacgtactacg

SEQ ID NO: 222152 - DNA, 314 bp, Gossypium hirsutum
cccactcttccggaaaaatggcatccttttcatgtacaccacaatcccttaccacggtgagcttacaaaaggttcttcaaggattacccaaccgagactcttgggtggcaaagcttcttaaggagctcaagtggagagtgtccagatgagcggcgagaggaaaacatagggcaacactggcatgagggagatgatgttttcagctgcagctgctgctatttgctctgttgcgggggttgcaacggcggagcctaaacgtggtagcgcagaggccaagaaggcgtatgcttctttttgtgtttctatgccaactg

SEQ ID NO: 222153 - DNA, 401 bp, Gossypium hirsutum
gctcttaaaaggttgatagacataagcatgggtgtcattacacctttatcggaacagctagacaaagccattgccaaatgctatggctctagtaaaccttaaggaattatcaactggagcttacaagcttttgcccgaaggtacacgcttggttgtatctgtacgtggtgacgagccctatgaagagctggaaatcctgaaagacattgatgctacaatgcttcttcataatataccttttgatgaagaaaagattggtcgagtgcatgcagcaaggaggttatttgagtatctatcggagaacagtcttgatttccctgtaatccatcatattcagtttccaaatgggactcacagggatgacttagtcattaatgctggcaccaatgctggagcccttc

SEQ ID NO: 222154 - DNA, 266 bp, Gossypium hirsutum
  unsure (1)..(266): unsure at all n locations
cggacacttgttcatatctactgctactgattccctttcttgctctgaaaccaanccgcgcgtggttaaattgtataagcgtcccattccccacagtgttcatcactgctattgccagagctgtttgtgcagcaacatttgttgaggtacaagatgacgtatcgatactatgcctgtttcggccttggattccttactgtctatgatcagctgttggaaggttacccgggtgatgaaggtctagattccacctttcaagcttatat

SEQ ID NO: 222155 - DNA, 431 bp, Gossypium hirsutum
gggccggacccacgcgtccgcccacgcgttcgaaataccaactggaaggatttttttataacgatgctggatgtttaccgggagcttatacatgaaggacttcgcatatggatattcagtggtgacacagatgctgtaatcccaattacatccacccgctacagtatagatgctctcaagcttgcaactatgaaaccatggcgtgcctggtatgatgatggccaggtaggaggatggacccaagagtatgaaggactgaagtttgtatcagtgaggggagctggacatgaagtccctttgcatagacccaaacaagctctcaccctcttcaaagctttcttatcaggaacctccatgcctgcctcttcctctgcccctgctcatgtccatgcttctcagctactcatctccgactgctgaacttttgggtt

SEQ ID NO: 222156 - DNA, 397 bp, Gossypium hirsutum
catccttgttttgaatggttctggtggtgttggaagcttagttattcagttagcaaaacgagtattcggtgcttcaaaagttgcggccacttccagtactggaaaactggagttactgaagagcttaggtgccgatttggctattgattacacaaaggagaactttgaagatttgccagaaaaattcgatgtagtctttgatgccattggacaatgtgatagggctgtgaaggcagtgaaagaaggcggcagcgtcgtggccttaaccggtgctgtgacaccgcccggttttaggtttgttgttacttctaagggagaggttcttaagaagctaaaattatatttagagagtgggaaaggtgaaccggttgtggatcccggggaccattcccattta

SEQ ID NO: 222157 - DNA, 236 bp, Gossypium hirsutum
gtcatctgtctgtctctctgttttacttcacattcactatcactaccattatggctgcgggtactgtttctgtagccaaacccaaccttcagattcaggcaaaaggaaagggtgttggttttgcagatttctcaggcctacacaactcctctactagccttccctttgccaggaaaacctctgatgactttcattcactcgttgcttttcagacatctgctctaggaagcaataat

SEQ ID NO: 222158 - DNA, 406 bp, Gossypium hirsutum
cccacgcgtccgattcctctcagagctcactatagatcttctctgttaaccatgggggcggacggatttgtaggagatgaacgcaaagttcaaaagaattactggattgaacactcggttgatctgacggtggaggctatgatgctcgactccaaagccgctgatattgacaaagaagaacgtcccgaagtgctctccttactccctccatatgaagggaaaaccattttggaactaggagctggcattggccgatttactggtgacttagctaagaaggctggtcatgttatagcattagacttcattgagaatgttataaagaagaatgaaaccatcaatggacattataagaacgtcaaattcctctgtgcggatgtcactttccctgatttggcttttacag

SEQ ID NO: 222159 - DNA, 414 bp, Gossypium hirsutum
cccacgcgtccgtccacgcgtccggttttgcttgaacccgacatccatggctacacacgcggggcgtagctccttcaaggatccctgcaacaaccaggcttccttctaagaccacacactctttcccctctcaaattcaatgctcttccacgagattacaagttactgaattctctggactgcgctccgcctcatgcgtcacattcgtcaacaatgctagagatgcgtcctttttcgatgtggtggctgctcaacttactccaaagactgcaggtggagcaacacctgttaggggcgaaacagttgccaaattgaaggttgctatcaacggatttggacgcatcggcaggaactttcttcgatgttggcatggcaggaagaactcttccctcgacgtgattgttgtatatgaca

SEQ ID NO: 222160 - DNA, 402 bp, Gossypium hirsutum
actggccttgctagtaagagacaaatggttcagttttttaacgggaaacccatgcctcgtgttcaaaggaaactcaatcttcaagttcgctgtttggcagaggacggtgatcaaaaggagccaatgccagcagcaagaacgcccgaacctaagcagagccctccacggatatcacccaaagtgagcacgaaaatcttcgatgtgtttgcctttagtgggcctgcaccggagaggatcaacggcaggttggcgatggttgggtttgtggcagcgctggcaatggagttatccaaatggcaagatgtgttgacccaaatatccaacggtgggatcccgttgttcgttgggactagtattgagttattcgcttgcatctttgataccgatgtttttaggtgagac

SEQ ID NO: 222161 - DNA, 352 bp, Gossypium hirsutum
ggaaaacccggcccgacccacgcgtccgcccacgcgttcgcccacgcgtccggaataaattatggtaaagagagaaccaaacagcaggggcaggaacagtgcaaaagttttctcaagaaaaagtggagatatataaaggttgataccttaactcaagaaaaaaaaatggcgttttacgtcgacgaagaagaggtctggaaatgtccgagtcatccttctaagcgtcgccgtactggtatctgcccgtgttgtcttctagacaaacttgctttttttttgctcgacttgcgcccacgcgcgttcttgtttatgtattacaaccttttcttctttttccttcttttacttcttt

SEQ ID NO: 222162 - DNA, 225 bp, Gossypium hirsutum
  unsure (1)..(225): unsure at all n locations
cccacgcgtccgcccacgcgttcgagactcttttgtatacctgttttattttttaataggaagcagtaatagcgggggccttctccatgatctcattggcaaccattgccaccgngaaccgatcctacccagaacaggccaacatgttggtcctcttcaccgtcctcaaatctgcctctgctttcccagtcaccaggaaggttttctacgactttactttttctt

SEQ ID NO: 222163 - DNA, 415 bp, Gossypium hirsutum
  unsure (1)..(415): unsure at all n locations
cccacgcgtncgcccacgcgtncgcccacgcgttcgctccatttaccatctaccccttggggtcccttcgttgtcctccaagccccaagtttccaaatggtacctcctctttatgtggcccgtcacggtttggtctttgctcttaacttgggttttaggccatgcgtttatttcagagcggaacgcctttaagaaactcaaacttcaagcttgggttgttcccaaatacaatatgcaatattcttcaaaatggcaaagagaaactatcagtaaattgattggacaagccattcgagatgcagacaagaaaggagctaagtggctgagtttaggccttctgaatcagcatgaggtgtttagcagaaacgttgagctttatatgaaaaggaaccctcagcttaaaataaaagtcgta

SEQ ID NO: 222164 - DNA, 410 bp, Gossypium hirsutum
ctctccacaaaacccgaaggaaaaaggaaaattcttttttcctctgtccttccctttcaacgcagaccgaaagagaaggcggagtcctcccacaatttcttgtggccaccaatcacgctctactcttaagggaagtcagcatggatcaggctcaacacccaactgtcatgcagaaggtagcagggcagctcactcgttttagcaattcccaagattttcaagggtatgatgggtctttccgtaggcctgctctctaccaaagaaatgttgcatatcaaaattgctccaatgctgcactgcagtaccctattgtccgagcttgtggagttaccagtgacatgcctatggttccatcaacagcatctgctatttgtattcaagctcctgctgagaaagggtttaccggcttt

SEQ ID NO: 222165 - DNA, 388 bp, Gossypium hirsutum
ctgaatctaaaatccaattccgccgacaaaaataaattttttagaaaaaaattacggctgggatgggattctcaacggaaaaaatcagaagagctaagcatgcatgatcttggtacactgataacccgaacaagttatcgtaagagcttgatggatggatcagggcggttgtctagccaaaatcgtctgaagtaagaggagtcattactctggatgccggctaaacatcttcaggtcgtgctgctgcaaatgcttttggaaacatagaccccacaaacatgacttggcaattccttattggtccttctcaccaggataacacttcaaaatgctctttctggaccgctacagggtacatgacaccaataggggacctaaccattgatgt

SEQ ID NO: 222166 - DNA, 408 bp, Gossypium hirsutum
  unsure (1)..(408): unsure at all n locations
ggtgctcatcaaagagagcaatggcnaaccacttttatctttcgattccaatatactctgggctggaaccgttgtacggagaaggatcacagcttgaagaagctaagctttgattcggtaaactgaagtccaggtttttcgaagtattcggtcacccttccgaagtcttcgctcgatctccagggagagtgaacttgattggagaacatattgactatgaaggatactcggtcttgccgatggcattccggcaagacacgattgttgcatttcgaaagcgtgacaaaggagaggctgaaaagcttcttcgaatagctaacgtcaatgataagtacactacttgtacttatcctgttgatcctaaccaggtaattgacttgaaaaaccatatatggagtcattatttta

SEQ ID NO: 222167 - DNA, 347 bp, Gossypium hirsutum
cccacgcgtccgttttcataggatgttgttcattaaatctccaaagagttgcaagggaagccagatctgatcatctgaaactacaccgacggcaatatcgtcgccttcttgctcgcacataaattaggtgtcacacagagcaccatcgcccatgctgtggagaatacataatatccagactcagatatctattggaagaagcttgaagacaaataccatttctcttgccacattactgctgatcttttagcagtgaaccatacagatgttatcatcaccagtactttccaggatattgcaggaagcaagggcacttgttgttcaatactatggccacactgcttttc

SEQ ID NO: 222168 - DNA, 404 bp, Gossypium hirsutum
cttttgtatacctgtagcatatagtaatagttttcagtaatagcaatggcctcctggatgatctcatcggcaaccattgccaccgtgaaccgctcctccccggcacaggccaacatggtggcccccttcaccggcctcaaatctgcctctgctttcccagtcaccaggaaggccaacaacgacatcacttctcttgcaagcaacggtgggagagtgcaatgcatgcaggtgtggccgcctcttgggaagaagaagttcgagactctctcatacctgcccgatcttactcccgtacagttggctaaggaagtagattaccttcttcgctctaaatggattccttgcttggaattcgaattagaggagggattcgtgcaccgtaagtactcgagcttacccacgta

SEQ ID NO: 222169 - DNA, 362 bp, Gossypium hirsutum
cacccgtccggacttttttgtatacctgtagcatatagtaatagtaagcagtaatagcaatggcctcctggtgatctcatcggcaaccattgccaccgtgaaccgctcctccccggcacaggccaacatggtggcccccttcaccggcctcaaatctgcctctgctttcccagtcaccaggaaggccaacaacgacatcacttctcttgcaagcaacggtgggagagtgcaatgcatgcaggtgtggcccgctcttgggaagaagagttcgagactctctcatacctgcccgatcttactcccgtacagttggctaaggaagtagattaccttcttcgctctaaatggattccttgcttgga

SEQ ID NO: 222170 - DNA, 400 bp, Gossypium hirsutum
cccacgcgtccggcttctgcctaacttccaacttcacctttccttctaactcactccggcggcccacattgcggcggccgtctatcgtcgccaacctcaactcttccacttctcctcctactctcattcgaaatcaacccgttttcgcagcacctactcctttgctcactccttccaattggaaagaaaacatgggagaccagtcatacgaggaagccattgaagctctcaagaaactgctcaatgagaaaggagaatggaagagtgcagcgacggcaaaggtagagcaagtgacagctgagttgaagactgctgcttcttccgatgagtctgttgaccgcttgaaacaaggcttcattaacttcaagactgaaaaatacgaaaagaatcctgctctgta

SEQ ID NO: 222171 - DNA, 379 bp, Gossypium hirsutum
cccacgcgtccgcccacgcgtccgcccacgcgttcggagccatgctccttcatttctgtcctgcttcttctacttctccaccttccccttcttctttcacctccaattatttcctccacagattatcaatttccagaccaccgtacttggagttcccgttaaaacccagagcccatctctttaaatctacctctcctcccgtttcttactcgaccaagaccaagttgttgtatccttctgccaacagggctgatttcaggtcatacgctcttcctggatttgatttcgggagcgttgaatctgtgttggaggcagctggcgttttgactgccatcattgttgttcatgagacgggtcacttcctcgctgcttatctcca

SEQ ID NO: 222172 - DNA, 408 bp, Gossypium hirsutum
cccacgcgtccggtttttcaaaaatatatgcaatttaaaaaaaaacacacacacacataaacaattttattcgtggcggttgggaaaatgttatatgaaaactctctggtgtccgacttgttcgccgccgtggtttgctgcggcgttatattcgcgtttctcttactctggcaagtaaccgccaaatgcggcgtagatcagaaactgaataggaagcttgtgcatataagtattgggctagttttcatgctttgctggccattattcagtgcagggtatcgcggagcaattttagcagctatcactcctggtgtcaatattatacgaatgcttcttatcggttctggaatttggaaagatgaagccactgtgaagtcaatgagcagatacggaaactacagggaactt

SEQ ID NO: 222173 - DNA, 267 bp, Gossypium hirsutum
ccaaacgacgccctaaaccaaaagtcatggccaccccttccgcacgtgaggaaaacgtttacctggcgaaactcgccgagcaagccgagcgctacgaggaaatggtcaagttcatggagaacgtcgtctccgccgtccctgcccccgacgaactcaccgtcgaggaacggaacctcctctctgtcgcctacaaaaacgtgatcggcgctcgccgtgcctcttggcggatcgtttcctccatcgagcaaaaagaggaaggacgtggca

SEQ ID NO: 222174 - DNA, 383 bp, Gossypium hirsutum
agagtacctttatgaggaggctaacaagtgtgttcggtggtgcagctgagccaccaaagggaggcaaccctgattccaacacactgatcagcgacatgaccactgtgatatgtttagatgattatcattcacttgacagaactggaaggaaagagaagggagtgacagcacttgacccaagagccaatgactttgacctcatgtatgaacaagttaaggctctcaagagtggtattgctgtcggcaagcctatctacaaccatgttactggtctcttggatcctcctgagctaattaagcctccaaagatccttgtcatcgaaggactgcaccccatgtttgatgaacgtgtgagggatctcgtagacttaagtatctatttt

SEQ ID NO: 222175 - DNA, 401 bp, Gossypium hirsutum
ggcaaagattgtggatatctcagaacattcactaactattgaggtaacaggagatccagggaagatggttgctgtgcaaagaaatttaagcaagtttgggatcaaagaaattgctagaacaggaaagattgctcttagaagggaaaaaatgggtgcatctgctccattctggcgattttcagcagcttcatatcctgatcttgaagaaacagtacctgataacgctcttgcaggggctagaaagcaatcagtatttagcgaggccgatgtttctggagggggagacgtctatccggtggagtcgcctgatggctttacaatcaatcaagttcttgatgctcattggggtgttctcactgatgaagatacaagtggacatcaatctcatactttatccatgc

SEQ ID NO: 222176 - DNA, 407 bp, Gossypium hirsutum
ctccctattctcaatggcaatggcaacccaagcctccctcttcactccatcaaccgggtggaccccaaaatccggcgaccgcatcgccgccgtgttacggaaacaaccaccgttcctaaccgtccctagcttcaagtccccaaaaagcatcatcgccccacgcaccatcaaagcccaagcaaccgaagagaaagccgagacaaccgccacaaaggaagcaccagtcggtttcaccccaccagagctggacccaaacaccccatcaccgatcttcggcggcagcaccggcgggcttttacgcaaagcacaattggaagagttttacgtcatcacatgggagtcacccaaggaacaaatcttcgagatgccaacaggtggtgcagccatcatgagacaaggtccgaacc

SEQ ID NO: 222177 - DNA, 392 bp, Gossypium hirsutum
cccacgcgtccgctcatccgtgacggtcgtatggagaaattttactgggcaccaactagggacgaccgtgtcggtgtttgcaaaggtattttcaggaccgacggcatcccagatgaagacattgttaagctcgtcgacaccttccccggccaatccatcgatttcttcggtgccttgagggctcgggtttacgatgacgaagtgaggaaatggatcagtgatgtcggagttgcaggcgtagggaagaagttagtgaactcaagggacggacctccaacatttgagcaaccgaaaatgaccattgaaaagctattggaatatggaaacatgcttgttgctgagcaagagaatgttaagagagtccaattggctgacaaatacttgagtgaagc

SEQ ID NO: 222178 - DNA, 404 bp, Gossypium hirsutum
cccacgcgtccgtaatgagggtgctggtctgggagcatcaattttccctggacttaatctgcttggtggtaacggaggtagttttggtttgtttggatcaggacttcctgaatttgaacaagtacagcaacaactaactcaaaatcccaacatgatgagggaaataatgaatacacctgctattcaaagtttggtgaataacccagagttaatgcgcactttgattatgagcaatccccaaatgcgtgagattattgaccggaatccagagcttgggcatatacttaatgatcctagcattctgcgacagactttggaagctgctaggaatcctgaactcatgcgtgaaatgatgcgaaacactgacagggctatgagtaatattgaatcctctcctgagggat

SEQ ID NO: 222179 - DNA, 357 bp, Gossypium hirsutum
  unsure (1)..(357): unsure at all n locations
gtattaacccagctcgtagtcttggtgcagccatcattttcaacaaggacaagggctgggatgaccattggattttctgggtgggtccattcattggagcagcactagcagcactctaccacgttgttgttatcagggccattcctttcaagtcaaaatgatcaaaatcgacggtccaaatgatcatatgatctcaaaaaaatgaaaaatttcacccatgcaccctttcagtttgtgtatttcccatttgatccctttgtttttgtatatgtaagaatgtgtgtaatatatattatttacttcaatggggggagagccttggtnctttttttacttgctttttttttaagctaaaaa

SEQ ID NO: 222180 - DNA, 358 bp, Gossypium hirsutum
gttttcctccacaaccactatcactaccattatggcttcggctactgtttctgtagccaaacccaaccttcagattcaggcaaaaggaaagggtgttggttttgcagatttctcaggcctacacaactcctctactagccttccctttgccaggaaaacctctgatgacttccattcactcgttgcttttcagacatctgctctaggaagcaataatggcgggtacaggaaagggatggcagaagcaaagctaaaggtggctataaatgggtttggtaggattggcaggaacttcttaaggtgctggcatggccgtaaagactccccacttgatgtcattgccatcaatgacactggt

SEQ ID NO: 222181 - DNA, 407 bp, Gossypium hirsutum
gtgagactcttttgtatacctgtagcatatagtaatagtaagcagtaatagcaatggcctgctccatgatctcatcggcaaccattgccaccgtgaaccgctcctccccggcacaggccaacatggtggcccccttcaccggcctcaaatctgcctctgctttcccagtcaccaggaaggccaacaacgacatcacttctcttgcaagcaacggtgggagagtgcaatgcatgcaggtgtggccgcctcttgggaagaagaagttcgagactctctcatacctgcccgatcttactcccgtacagttggctaaggaagtagattaccttcttcgctctaaatggattccttgcttggaattcgaattagaggagggattcgtgcaccgtaagtactcgagcttaccc

SEQ ID NO: 222182 - DNA, 300 bp, Gossypium hirsutum
gttccttaatctcaaatctcatctgcaccagccgacgacatggggaggagacctgcaaggtgttatcgccaaatcaagaataagccataccccaaatctcgatactgccgtggtgtcccagatcctaagatcagaatttatgatgttgggatgaagaaaaaaggtgttgatgagtttcctttctgtgtccatcttgtgagttgggagaaggagaacgtctcaagtgaggcattggaagctgcccgtattgcctgcaacaagtacatggccaagtttgcagggaaggatgctttccatttg

SEQ ID NO: 222183 - DNA, 399 bp, Gossypium hirsutum
tatagcttccaaaaaccctaagcctgctcacttatttgcccgtttcatctttctttggctagctacttattaggtgcctgcattaaattgttagctgcattaaagaacgctatcatcagcttgtggtaatggacaaggtaagagacctggcatcgaagaaggctgctgtgatattcacaaagagctcatgctacatgtgttacagcatcaagacacttttttatgagcttggtgctagcccagctatccatgagctcgaccatgatcctagcgggagagatatggagtgggctctaagagggttagggtgtgacccctcagtcccagccgtgttcattggtggaagatttgtaggctcagccaaagatgtcatatcccttcatgtagatggatcactga

SEQ ID NO: 222184 - DNA, 404 bp, Gossypium hirsutum
cgattctcttccctttcatgaccacgagtatgtctcgtagctgctctcactgtggaaacagcggccacaactctcgtacgtgcggtgaagttgttgccggtgatgcaagcaatggcagcggtggaagtggaggaggagaagagaagggtatcatgttattcggtgttcgagtcatggaagggtcgttcaggaaaagtgttagcatgaataatctttctcagttcgatcaacctcaggtttctaacgccgatgctggctatgcttctgatgacgttcttcatggatctggaataggaagaagccgtgaacgcaagagaggtgtaccatggacggaagaggaacataaattatttttattggggttgcaaaaagtagggaaaggggattggagaggaatttcaaga

SEQ ID NO: 222185 - DNA, 404 bp, Gossypium hirsutum
gttttacaatagttcgtaacaatggcggtctcacttcaagctgcagctaccctgatgcaaccaatcaaggttgctgcaccatcaaggaccaatgtgccgctcaggtcctaccagagcgtttctaaggccttcggtttggagcctgttggtgctaggcttacctgctctttgcaaactgacctcaaggacttggctctgaagtgtgttgatgctaccaagctcgctggtttcgctcttgctacatctgctcttgttggctcgggagcaagcgctgaaggagtttcaaagcggctaacctacgctgaaatgcaaagcaagacatacatggaagtcaaaggaacacgaactgctaaccagtgcccaaccatcgatggtggtgacgactgctatgccttcaagcctgg

SEQ ID NO: 222186 - DNA, 395 bp, Gossypium hirsutum
gaattttccatgccttgtccaagcggaatccttctcttcctcatcctaatctcctcccagcttttattcgccgtagccgatgacgacaatctatccgcgtaccaagctcttaacagtacgacttcccagtaggcatccttcccaatggcgtggttgggtacgaattgaacagggaaacgggcgagttttcagcttatttgagtggaacctgcaagtttgacattgattcataccaactcagttacgaatccaccataaaaggagtgatctccccaggcaggataacaaatttgaagggagtgagcgttaagatcctcttcttctggcttaacatcggtgaagtgatacataatggggaccagatggagttctccgttgggattgcgtcggctaac

SEQ ID NO: 222187 - DNA, 408 bp, Gossypium hirsutum
  unsure (1)..(408): unsure at all n locations
cccacgcgtncgnggacgcgtgggttgaattctttatttcacacaccaactcaacaatcaacctagtgaatacccataccatcccatagtaagaggatctgattgtctcccctctcatttaccgccatcaatggctaactctctgctctcttctaacttctttggtactcaacttttactgtctcctccaacaccaaaaactacaagaaagttgcaggttactcaatctatcctcaacaagaaacccaactctagccacactgttaaaaccctccaatctcatgccactcttgctgccttactcttctctgccgtagccccacaagcactagccgttgacaacgccccacccactccgtcacctgtaattgaagcccagcctacgaagccaagcccatcgaaccagtc

SEQ ID NO: 222188 - DNA, 406 bp, Gossypium hirsutum
acaaatttatcgtcgtcgagttttacgctccttggtgtgggcactgtaagaatcttgctgcagagtatgagaaagcagcatctatattgagtaaacacgaccctccagtcattcttgccaaagttgacgccaatgaggaagcaaacaaatatctagcaaatgaatatgaagtcaggggttaccctacacttaaaattttgagaaatggaggaaagaatgttcaggaatacaaaggtccacgtgaagctgatggtattgtggagtatttgaagaaacaaagtggtcctgcttctgctgaactaaagtcagcagaagatgccagtaatcttattgatggcaagaagatagtagttgttggggtgttcccaaaattctctggcgaagagtttgagagttatatggcact

SEQ ID NO: 222189 - DNA, 400 bp, Gossypium hirsutum
gtttttggcaggccttggattatgtcattgcatatgcaaggcaacaaggaattaggctgcggctcagcttggtaaataacttgcaaccatatggcggaaagacgcagtatgtcaactgggcatggcaagaaggcgttggtttgagctcttctaatgattccttcttctttgatccatctatccgcaaatatttcaagaattatgtcctgactgtccttaccaggaagaacactatcactggaattcaatatcggaatgatcccaccatctttgcttgggagttgataaatgaaccccgttgcatgactgatccttctggggatactcttcaagattgggtagaagagatgtcggctttcataaaatcaatcgacaaaaaccatcttttgaccattggctt

SEQ ID NO: 222190 - DNA, 383 bp, Gossypium hirsutum
cttcaatttaaaattttctttgttagacacaaaaagcgatctagcttgaaaatttctatttgttttaataaaattttgtttgttttagggtttaggtgatggcttcgaagcggatcttgaaggagctcaaggatctccagaaagatcctcctacctcttgcagcgcaggccctgttgctgaagacatgtttcattggcaagcaactattatgggtcctcctgacagtccatatgctggtggagtgtttctagtcaccattcatttccctccggactatccatttaaaccaccaaaggttgcattcaggacaaaggtctttcacccaaatattaacagcaacggtagcatttgccttgatattttgaaggagcagtggagccct

SEQ ID NO: 222191 - DNA, 399 bp, Gossypium hirsutum
cccacgcgtccgagagttctttttttcacagcaatggcagccatgaactccagtgttttgggatgcaactatgctatctcaggcactggatcatctgagcttaatgccaagcttgcttcagcaccatcagttgcttccccagttatgtgcggtggtcacaagttgcctgtgatcagagcccagcaggctaaattttctgattccaaaggatcaggtgccagtgaaggaagaagagctgctatgctctacttggcagctggccttttcaccacagctgttgcttcttctgcaaatgctggggtcattgacgagtaccttgaaaagagcaaagctaacaaggaattgaatgacaagaagaggttggcaacaagtggagcaaacttttccagagcatacact

SEQ ID NO: 222192 - DNA, 381 bp, Gossypium hirsutum
gacggggaaaaaaaacaaacaaactatgaccatgggtgctgcagagaagagggaggaagtgattcaagcatggtacatggatgatagtgatgaagatcagaggcttccccatcaccgtgaacctaaggaatatgtatccttggataaactttctgagcttggagtactcagctggcgattggatgctgataactatgaaaatgatgaagagttgaagaaaattcgtgaagaacgaggttactcctacatggacttctgtgaggtttgccctgagaagcttccaaattatgaggagaagataaaaaatttctttgaagaacatcttcatactgatgaggagatccgttactgtgtggcaggaagtggttattttgatgtacg

SEQ ID NO: 222193 - DNA, 405 bp, Gossypium hirsutum
gtgagactcttttgtatacctgtagcatatagtaatagtaagcagtaatagcaatggcctcctccatgatctcatcggcaaccattgccaccgtgaaccgctcctccccggcacaggccaacatggtggcccccttcaccggcctcaaatctgcctctgctttcccagtcaccaggaaggccaacaacgacatcacttctcttgcaagcaacggtgggagagtgcaatgcatgcaggtgtggccgcctcttgggaagaagaagttcgagactctctcatacctgcccgatcttactcccgtacagttggctaaggaagtagattaccttcttcgctctaaatggattccttgcttggaattcgaattagaggagggattcgtgcaccgtaagtactcgagcttac

SEQ ID NO: 222194 - DNA, 399 bp, Gossypium hirsutum
cccacgcgtccgcgatgattcaattgataggatcgtggctggaatggaaggaacagggatgactgatggaaagagcaaaagcttggttgcataccacgaggttggccatgccatttgcggaactttgacaccgggtcacgatcctgttcaaaaagtcaccttgattccacgtggccaggcacgtggtcttacctggttcattccttcagatgaccctaccttgatctccaagcaacaactctttgcaagaattgttggtggacttggtggcagagccgcagaggaaatcatcttcggtgaacctgaggtgacaacaggtgcagctggtgatttgcagcagattactggtttggctaaacagatggtggtgacattcggaatgtctgaaattggtccatg

SEQ ID NO: 222195 - DNA, 405 bp, Gossypium hirsutum
cccacgcgtccgaatatatcatgtcctaccagcaaggggaggatttctattacatggatgaagattttgtagatgacatggatgaagacaactacggtcaagctggtggagatgtggatgctgatgaatatgacatgctgaccaaggtgaccgatacgacttctgcgcaagcgcggaaggggaaagacattcaggggattccgtgggaaagactgaacataactagagaaaaatataggttgacaaggcttgagcagtataagaactatgagaatatgccttcttccggtgaagctgttgacaaggaatttaaacatataaagaagggtgggaactactatgaattcttctacaatactagattaattaaacctacgatccttcattttcagctcagaaacttgg

SEQ ID NO: 222196 - DNA, 291 bp, Gossypium hirsutum
gacccgagaacgttaaggctgctcaggatgcactccttgtccgtgccaaagccaactcactcgctcagctcgggaaagacaccggcgagggagaatcagaagaggccaagaaaggaatgttcgtaaagggctacgtctactaagctgctgcaaacaaagctttagctgagatgatggagatttcatgatatggtttctttctctttgtgttgaatgttttataggctctggagactactttttgttctggattgcaatgtactgttaaataaacttcttgctgatgagatt

SEQ ID NO: 222197 - DNA, 401 bp, Gossypium hirsutum
ctgcttcacaatggcctctacaaccatggctctttcttccccatcattcgccggtaaggcagggaagttctccccttccacccctgaaatccagggaactggccgtgtttccatgaggaaaaccaccaagcctgttccttctggtagcccatggtacggtcctgaccgagttttgtacttgggtccactttccggtgagccaccatcttacttgaccggtgagttccctggtgactatggttgggacactgctggactctcagctgatcccgagacctttgctaggaaccgtgagctcgaagtcattcactgcagatgggccatgttgggagctcttgggtgtgttttccctgagctgttggctaggaacggtgtcaagttcggtgaagctgtatggttca

SEQ ID NO: 222198 - DNA, 404 bp, Gossypium hirsutum
ctaaattccccagaatttgcttcagtaatggctgcctcagttatggcttcttcagttaccctcaagccttcattcaatgttgagaaatctggtgtaagaggggttccttcccttgctagttcccttcttctttcaaggttgaagccagtggtggcaagaagatcaagaccgacaagccttatggaatcaatggtggtatgaacttgagggatggtcttgatgcctctggaaggaagggtaagggaaagggtgtttaccaatatgttgacaaatatggtgctaacgtcgatgggtacagtcctatctacaacaccaacgactggtctcccagtggtgatgtttatgttggcggtactaccggattggcaatctgggcggttaccctagccggaattcttgccggt

SEQ ID NO: 222199 - DNA, 421 bp, Gossypium hirsutum
cttttagcttacagcttccattgtttttcagtagtgaagagctaaaaaagaagggaaaccaatggaggggaaagaagaagatgttagattgggagcgaacaagttctcagagaggcaacctattgggacagcagcccagtcccaagatgataaggattacactgagccacccccagcacccttgtttgagcccagtgagttgacttcatggtcgttttaccgagctggaatcgctgagttcgttgctactttcctattcttgtacatctcggtgttgactgtgatgggagtccttaaggacaaaaccaagtgtacaactgttgggattcaagggattgcttgggcttttggtggaatgatctttgctcttgtttactgcactgctgggatctcaggtggtcatatcaatccagcggtgaca

SEQ ID NO: 222200 - DNA, 404 bp, Gossypium hirsutum
cccacgcgtccgggaggagaaaacataacttctagcaaactgggttgttgaaatggcatcgaaggggtgtgactcgtgcaaatcagcgacggcgactcttttctgccgggctgactcggcgtttctatgctccaactgtgactccaaaatccacgcggccaacaagctcgcctcgcgtcacgctcgagtttgggtctgcgaagtctgcgagcaagcgcccgctcacgtcacttgcaaggccgatgcagccgctctctgtattacctgcgaccgtgacatccactccgccaaccctcttgctcgccgacacgagcgcctccctgtaacccccttctacgactccgtcaattcagtcccagccgtcaaacccaacggagttgttacctttctggaggagcgttact

SEQ ID NO: 222201 - DNA, 410 bp, Gossypium hirsutum
tgtatattgaagtttcctttctcgattttctatttagccaaacaagatgcagatcttcggggagacgtctaaccggcaagacgatcactctcgaggtcgagagctccgatacgatcgacaacgtgaaggccaaaatccaagataaggaaggcatccctccagaccagcagcgtctgatcttcgccggaaaacagctcgaagacggccggaccttggccgattacaacatccaaaaggagtcaactctccacctcgtcctccgtctgcgcggtgggatgcaaatcttcgtgaaaaccttgactggcaagacaatcactctcgaggtcgagagctccgacacgatcgacaacgttaaagcgaagatccaagacaaggaaggcatcctcccagaccagcaacgtcttatcttt

SEQ ID NO: 222202 - DNA, 400 bp, Gossypium hirsutum
cccacgcgtccgcccacgcgtccgctcgtgtcatcaattaactggtctttgtttcaagctggcttcaatttgaagtcctgtaatcaagccgccacaatggcgcctgtaagaaccacaggcgctattgttgcttccactgccgccatctccatttccatggcgatcttctcttacttcctcttcttcaaaaagaccaattcgacccttcattccaacaagaagaaaaaacccagaaatggagtcgtcgatgccattggtaacacccctttgatccgcatcaatagcctctctgaagccactggctgtgagattctcggcaagtgtgagttcctgaatcctggaggaagtgtgaaagatagggttgctttgaaagtcattgaggaggctcttgaatcaagtg

SEQ ID NO: 222203 - DNA, 401 bp, Gossypium hirsutum
gtgagactcttttgtataactgcagcatatatttctagtaagcagtaatagcaatgggctgctccatgatctcatcggcaaccattgccaccatgaactgctcctccccggcacaggccaacatggtggcccccttcaccggcctcaagtctgcctctgctttcccagtcactaggaaggccaacaacgacatcacttctcttgcaagcaatggtgggagagtgcaatgcatgcaggtgtggcctgctcttgggaagaagaagttcgagacactctcatacctccccgatcttacacccgtacagttggctaaggaagcagattaccttcttcgctctaaatggattccttgcttggaattcgaattagaggagggattcgtgcaccgtaagtactcgagc

SEQ ID NO: 222204 - DNA, 401 bp, Gossypium hirsutum
gtctttccctccctccctctcagatcaaagcttcaaaatggttggttttattttgatgacaattttagcagatccaacggctaatccctgtttttctccggttcaaattcggcttcatttttcgctacctttgtaaattgccgcgaaaaaccgtaaccctaaccctaaagctcctcaacttttctcaatgacgaaggttcatggaaccggcgtttacgacttcaagcgctgccatgtggcggagtacctggttgagttagccgacaaaccgaaaatgaaacctcctcacagttcatcccttcggagctctattactttgtctgaaatctagcgggaccagctgactagaatagcagccgcgaattggctgaggagcggtggttcgaagcctgaaaagccat

SEQ ID NO: 222205 - DNA, 407 bp, Gossypium hirsutum
agatcgcgagcggccccttttttttttttttttttttttttttaagacaagaacagggcggggattttataacacaaaaatagaggatgcaaatccacttaaaacacaaaaggaaaacaacattcaattaagacacaaaggggggatttcctttgtttgtgcccaaaatagatttttttcttcccttagagcttaatttcccatttagaaagctcctcttttgatagcatcgtcattagcatttccaagggcagcttcactcaaatatttgtcagccaattgaaccctctttacattctcttgctcagcaacaagcatgtatccatattccaacagcttttcaatggtcattttctgttgctcgaaagatggtggtccttccttgttgtacataccggggagctgaa

SEQ ID NO: 222206 - DNA, 410 bp, Gossypium hirsutum
cccttatttcctgccttagtttcattgaaggcgggactctcagactactctttcgaaccagctccaccatcacccccaaaaaacaaagcaaattgtagaagatggcaacacaagcacttgtatcatcgtctcttacctactcagtggagactgcaaggcagattcttggagctaaacgacaaattgggccttcaaggaaaggatcctttgttgttaaggcagcttcgactccacccgttaagcaaggagctgatagacctttatggtttgcatctaaacaaagcctttcatacttggatggcagccttccaggtgattatggatttgaccccttgggactctcagaccctgaaggtccaggagggttcatcgagcctaaatggctagcctacggtgagatcatcaacggg

SEQ ID NO: 222207 - DNA, 398 bp, Gossypium hirsutum
gttcatttcaatggctgctcttgcttcttcttcgtccttctctctcctcttctcatctccacctacgaagttcccttcaccttctctatgtcctcctctacacttgtctcttcccacttcttcttttctctcttcttctctttcactttctccttccttccatgcctaccccaccagctctagacgattctctgcttcttctttcactatcagggcctctgctgcagagaagaagaaggtccttatagttaatacaaacagtggcggccatgcagttatcggtttctactttgccaaagagcttctgggttctggccatgaggttaccatcttcactgttggagaagagggctctgataaaatgaagaagccccccttcaacagattctctgaaatta

SEQ ID NO: 222208 - DNA, 410 bp, Gossypium hirsutum
cggacgcgtgggtggtgccttacctcctcttcttcctccaccaccacctcctctttttccggtcgtcgacgacctacattgcggccttcggtcgtcgctagccttaactcttctccttctcctccgactcttatccaagaccgcccggttttcgctgcccctgttcctttgctcaccccgagagaagagatgggaaacaagtcctacgacgaagccattgaagctctcaagaaacttctcagtgagaaaggagaactgaaagctgaagcagctgcaagggtagatcaaataacagcagagttaaacacaacatcagctgacggcaaaccatctgactcttctgttgagagactgaaagaaggcttcgtttacttcaagaaagaaaaatatgaaaagaatcctgctctgta

SEQ ID NO: 222209 - DNA, 398 bp, Gossypium hirsutum
ccggtattgaagagataagattatagtgtaaatttagacataataaagcccctcataacatgcttcgacttgcttcattgattagccctctgaaagcccaagaaaaatggcttctgcttccgctactctcctcaagtcttcacctattatcgacaagtccgagtggattaagggccaaaacctccgccacccttcggtttgttttgtacggtcacaccctacatcggccgcctttaccgtccgtgctagttcatatgccgatgagcttgttaagaccgcgaaaactgttgcatctccaggtcgtggtattttggccatggatgaatcaaatgctacatgtgggaagcggcttgcctcgattggtctcgagaataccgaggcaaaccggcaagcttacc

SEQ ID NO: 222210 - DNA, 402 bp, Gossypium hirsutum
cccacgcgtccgcccacgcgtccgcccacgcgtccgcttgaattatactgaaccaaagaaagtctctgctgtaaatggcggtggcagagttatcgacttcctgtaccaaaaatcactcttcacagctctcgctctcatcttcatcttcttctcgtttctctcatcattttcgtcgttcctttcgacccctacccacaaccaggaatcctaccatctcatgctctgttgcatcagatcaagttcaaacgccaatacctgtacaagctcaggatctcaaggggaagagtgaatgctatggtgtcttctgcctcacttatgatctccaagctgaagaggagacaaaatcatggaagaaactaattaatatagctgtttctggtgctgctgggatgatatctaacc

SEQ ID NO: 222211 - DNA, 410 bp, Gossypium hirsutum
cttctctagaggtctggtctactcaacactctctcctccctcttagcaaccaaagactcagggccgctcggatttctttgtcccagaactagaatggagacctttctattcacatcagagtccgtaaacgagggacaccctgacaagctttgcgaccaggtctctgatgctgttctcgatgcctgccttgcccaggaccctgacagcaaggttgcctgtgaaacatgcacgaagactaacatggtcatggtctttggagagattaccaccaaagccaacgtagactatgagaagattgttcgtgatacatgccgctccattggatttgtttctgatgatgttggtcttgatgctgacaattgcaaggtcttggttaacattgagcagcagagccctgatattgcccaagg

SEQ ID NO: 222212 - DNA, 408 bp, Gossypium hirsutum
cgatcctcaacggtgttttgtgattaaaaaaacgaccaagattgtggcaaaacaagagggcttccctgcatgaaccatggctagtggagaacgggttgaagggatctagcaaggagattcgccatggcaggactgcacacaacatgtcgtcttcgtcattgcggaaaaaatcggacctgacgctagtttccaaggttcggtatgcaatgcttaggcagttcctcgccaatcttcaagaggtcatattagggaccaagctctccgttctcttccctgctattccattggccattgttgctgagtgttatggatttggaagaccctgggtgtttgcattaagtttacttggacttacaccattggctgaacgagtcagctttctcaccgagcaaattgcttattacactg

SEQ ID NO: 222213 - DNA, 408 bp, Gossypium hirsutum
gctaaactttaacccctttcccttttgcaacagagagtgaatacatggctacctccagcatggcatgagctgcttcagggttcttgctcacacccaatgtcgcagcgaattcaagctccacttctaagaccaccaccgtgtttttcccttcaaagaacaacaacaattccaggcttgtggtgacgagggcagctgacgaggctgctgcaccagcaccagctaccaccactgcagcatcagaaggcggtgaagcccctaaacctaagccaccaccaattggaccaaaaagaggaaccagggtcaagattcttagaagagagtcctactggtacaacagctttgggtcagttgttacagtcgaccaggaccctaagactcggtatccagtggtggttcgattcaacaaag

SEQ ID NO: 222214 - DNA, 410 bp, Gossypium hirsutum
  unsure (1)..(410): unsure at all n locations
cccacgcgtncgtgaaaccctcaaaattccactaaaaaatggcctccacagcttccctctccaccgccgtagccaccacctctttcctccgcggccatccggcgccgaaaaccctaaactcccttcctttcaaccaatctcttttcgggctaaaaccccaacgaaatggccgtctcaccatggcagcatacaaggtgacactgttaacacccgaaggaccccaagaattcgtgtgccccgacgacgtatacatcgttgaccaagctgaggaagaaggcattgatcttccgttctcgtgtagggctgggtcttgttcttcgtgtgccggagtgattaagcaaggctccgtcgatcaatccgacggtaatttccttgatgatgaccagattgctgcaggttttgtcctcact

SEQ ID NO: 222215 - DNA, 414 bp, Gossypium hirsutum
cgcgccgccacctcaagtcctctcctctcatccacagcctaggcttctcctccgctgcttctggggactctctgctttccctccatgtctcctccaaagttcgatctttcaagggaaaagggtcaagaggggttgtttcaatggccaagaagagtgttggggacttgactgccgctgatttgaaagggaagaaagtgtttgtgagggctgacttgaatgttccattggatgatagccagaacatcactgatgacaccaggattcgtgctgctattcccaccatcaagcatttgattcagaatggagctaaagtcattctctctagccacttggggcggccaaagggtgttactccaaaattcagcttggctcctcttgtacccaggctttctgaattacttggcattcaggttg

SEQ ID NO: 222216 - DNA, 406 bp, Gossypium hirsutum
ctcactatgctgtcatgagttcctatgaatacattagccaaggtcttaaaacgtacaattgggacaacaacatggatggtttctacatcgctcctgcattcatggacaagcttgttgttcacatcagcaagaacttcatgtccctccctaacattaaggttcctctaatcctgggtatttggggaggcaaaggtcaaggaaaatctttccaatgtgagcttgtgtttgccaagatgggtatcaaccccatcatgatgagtgccggagaactggaaagtggaaacgccggtgaaccagccaagttgatcaggcataggtaccgtgaagccgccgacataatcaaaaagggcaaaatgtgcgccttgttcattaatgatctcgatgctggtgccggtcgtatgggagg

SEQ ID NO: 222217 - DNA, 401 bp, Gossypium hirsutum
cccacgcgtccgcttttgcagataaccggctttctttaaacttagttttcttgattgcccgacacaccgttatcccttgttaaatgctctttgcccttttctcctgttctcttattttttctctctgaaaatggaaggagtgaaattggatagatggggttatgaagttaaaacctcttccgattcttgcatatctgtaatcaacgcttactatcaccaggtgctttcctatggaagaaataggaaagtgatcttagaagctcctgttcttgacaaagactgcgttttagccaacattttggccgcccattttctctcttcctctgacccttcaaaggctccttcactcatagaagctgccaacgctggaattgagcaagcctcgtcttatgagaaagccg

SEQ ID NO: 222218 - DNA, 289 bp, Gossypium hirsutum
  unsure (1)..(289): unsure at all n locations
ttggttaatggaanaatgtaagnaagggaagttgggaaaatggattngtaantttgggaaaaggattggatttgaggggtgggtatgggggtattagttatgaaattgttgggtgttggggtaatgttagagttgattttgaggtgagagagggttgttgtgtgtagagagggggatggattgggaatggtttttttgggggtgttaattgggggatgaaaagtagatttagaattggtaaggataaggggaatttgattgtttaattaaaanaaagtattgtgatggt

SEQ ID NO: 222219 - DNA, 331 bp, Gossypium hirsutum
gagaaatggcattgacgtatccacgagaagtaaaggtcgatagggaggaatctggagccctaagggtcagaaagtcagtggagactaggagagccaaccaaacgcatggccttttcaggactcttactgacaatatggtggtgggagtatcaaagggttttgagaagagacttcaactaattggtgtcggatatcgtgcaacgttagaaggaaaagacttggtgttgagtcttgggttttcccatccagtcaggatggcaatccctgatggcattcaagtaaaggtggaagagaacacgaggatcgtcataagtggatacgacaaaagtga

SEQ ID NO: 222220 - DNA, 361 bp, Gossypium hirsutum
aaaaccacgtataggagggaacagccgcaggatctgagatacaacggctgaaagtcggcaaatactaacatataaagagtctccatgggatctctggacctaagctcaggatcagaagttgttaccattcatgttaatgaagcaaaaaacttactgcagtcaggctaccgttacatcgatgtcaggacagtggaagaattcgagaagggacatgtggaagcagcgaatattcttaacatcccatacttgttcatcacaccagaaggtagggtgaagaatcctgagttcttgaaggaggtttcatctctctgcaaggaggaagatcgtctcatagtgggctgccaaagtggggcgagatccc

SEQ ID NO: 222221 - DNA, 326 bp, Gossypium hirsutum
gcgattctgtttaaccaaaattgattctttctctcccaatttgtgagatcttgttctttggcagtgatgagtaagggaccgggactgttcgtcgatatcggcaagagagccaaagatctcttgaccaaagattatacgtcggatcagaagttcacggtttccacttatactggcgctggagtggccatcacatcaacttctctaaagaaaggaggactttctactggggatgttgctgcactatacaagtacaagaacactcaatttgatgtcaaagtcgataccgactctaatatctcgacgacgatgacattcactgatattct

SEQ ID NO: 222222 - DNA, 365 bp, Gossypium hirsutum
cccacgcgtccgcccacgcgtccgtccacgcgtccgggagtttaaagaagctgctgatgagattgatggtcctttgagacaaatcttcgttgagttcttggagaggtcttgtactgctgagttctctggttttctcctctacaaagaacttggaaggaggctcaagaaaaccaatccagttgtggctgagattttctctcttatgtcaagggatgaagccaggcatgccgggtttcttaacaagggtttatccgatttcaatttggcattagaccttggcttcttgacaaaagctaggaagtacacttttttcaagccaaagttcattttctatgccacttatttatctgagaaaattgggtact

SEQ ID NO: 222223 - DNA, 363 bp, Gossypium hirsutum
gccattctttcaagctcctttttttggtctccatcgaccacacagtttaactcaccgcgtcgcccatggaagctctcagctctcaacccctcgcccttctctccatcttctctcctaaaccaaaagatttcccggctagaatcatccgctttcccacccattccaaaaaggacggtaacgattccgatatccaatatgatcctaacaacacaagcatcgttcctcttgtcggcaatcaaactttctcccaggatgcagcgatgggattggttctaagcgcggcgtctgtaagaggatggacaacaagatcgggcatggagggtccatctgtacccgcccgaaccgatgatgaccaatctaata

SEQ ID NO: 222224 - DNA, 340 bp, Gossypium hirsutum
acgggcattatcttcaatcggtgaatataaaagggcagaggatgcacatgtgaaatcaatccaacttgaccgaagttttgttgaggcctgggctcatcttacccagttctatcaagatctagcaaactctaaaaaggcttttgattgccttcaacaagttatacaaattgatccaaggtatgctaaagcatatcacttacgtgggttactacttcatgggatgggggagcacaggaaggctattaaggatttatcagttggattgagcattgaaaactcgaatattgagtgcttgtacttacgagcttcatgctatcatgctattggagaatatgcagat

SEQ ID NO: 222225 - DNA, 375 bp, Gossypium hirsutum
gttttgagcttgagataaaatcatcagataatcgtatcctgcaagagagaactgcaaaacaagtgttctgagaatgaagaattgcaagcaaaggtaactctcctggagcagcagttggcatctctctctggcgataaactatcatcttctgcacatggaatatcagaagaacatgctgatgagttacgaaaaaagattcaatctcaggagatcgagaatgaaaaactaaaactggaacaggtgcaactttcagaggagaacagtgggttatgtgtccaaaatcaaaaactggctgaagaagcttcatatgcgaaagaattggcatctgcagctgctgttgagttaaagaatttagctggtgaggtgaccaggctt

SEQ ID NO: 222226 - DNA, 375 bp, Gossypium hirsutum
cacactctcaaattcagttaacaatttcacagttgttttcttcagtctctctgtcagccatggctgcagccatctccaccgtcgctgccgctgccgccgccaaccgagctctgggagtgtcagtcccaacctcagctttcatggggaagaaagtgagctcaagattcaacagcaccaggcaggttccttcgggaagttttaaggtgatggcggcggagaaagagatagacgaagagacacagaccgaaaaggaccgatggaaagggttggcttacgatatttcggacgaccaacaagacattactcgagggaaagggatggtggattccttgttccaagctcccatgaatgatggaactcactatgctgtcatga

SEQ ID NO: 222227 - DNA, 257 bp, Gossypium hirsutum
  unsure (1)..(257): unsure at all n locations
acgaaaaaaaaaacagtntaacaatttttttactagtcagtaaactctctcaaattgaggtgggggcttccgccgttgcttccgccgctaaaaagaaaaccgctgtctccaagaggcctaaatcagctacttcacacccttcattgattgagatgatttcagacgcactcgattcgttgaacgagaggaccggatcgagccaatatgcgattgcgtgatctatcgccgagaagcataagcccttaccggctactttc

SEQ ID NO: 222228 - DNA, 380 bp, Gossypium hirsutum
gaagaactaaattccccagaatttgcttcagtaatggctgcctcagttatgggttcttcagttaccctcaagccttcattcaatgttgagaaatctggtgtaagaggggttccttcccttgctaggtccccttcttctttcaaggttgaagccagtggtggcaagaagatcaagaccgacaagccttatggaatcaatggtggtatgaacttgagggatggtcttgatgcctctggaaggaagggtaagggaaagggtgtttaccaatatgttgacaaatatggtgctaacgtcgatgggtacagtcctatctacaacaccaacgactggtcttccagtggtgatgtttatgttggcggtactaccggattggcaatctg

SEQ ID NO: 222229 - DNA, 321 bp, Gossypium hirsutum
gtcttgctttcatcaatctggtgattgcaagagaaagaacaacccaactcactatcgcgagcccagattttacactaaggtctttaaagaatgccaagcaactgatgattctggaaattcatttgaactttctcttgttggctgcaagtgcattggagcttatgttaagaacaaaaagaatcagaatcagatttgctggatcttccaaaaagttgtttcagataatgataagggattccagcgcttcttggattctgttcagtacaaatctaatagcattctccgttatgagcgtgtctttggaccaggatatgtgagcac

SEQ ID NO: 222230 - DNA, 330 bp, Gossypium hirsutum
  unsure (1)..(330): unsure at all n locations
cggagctgttcaacccggggaacgtgcctaatttatcgacaatttggtggctacagggggtaccctttctgctgcaatacgcttactagaacgagccggggctcatgtggttgaatgtgcatgcgttgttggcctgcgtgaggttaagggacaacatggactaaatggaaagccattgtatatacttgtggagccacggcagcagattaattgttctgcaccttctgttaatggagttgaaacatgcagacacgacgatctgattctgggagcaagctttggttccncactcaatcccacttcaaaaagtgattagtgttttttttttgg

SEQ ID NO: 222231 - DNA, 370 bp, Gossypium hirsutum
caccattgttccaagtttgttgttaaccaagttagaaccagcagccagcatggcctcattagcagcctccaccgctgccgcctcccttggcgtctctgaaatgcttggtaaccctctgaatttcagtggtggagctaggtcatcggctccaacaccatccaactcatccactttcaagaccgttgctcttttctccaagaagaaggccgctcctccaaagcccaaggctgctgctgtcgccccggccgatgaagagctggctaagtggtacggtccggacagaaagattttcttgcctgaaggtctgttagacagatcggagatcccagagtacttgaacggagaagttcccggagactatggatacgat

SEQ ID NO: 222232 - DNA, 343 bp, Gossypium hirsutum
tctggtctactcaacactctctcctccctctgagcagccaaagactcagatccgctcggatttctttgtcccagaactagaatggagacctttctattcacatcagagtccgtaaacgagggacaccctgacaagctttgcgaccaggtctctgatgctgttctcgatgcctgccttgcccaggaccctgacagcaaggttgcctgtgaaacatgcacgaagactaacatggtcatggtctttggagagattaccaccaaagccaacgtagactatgagaagattgttcgtgatacatgccgctccattggatttgtttctgatgatgttggtcttgatgctg

SEQ ID NO: 222233 - DNA, 355 bp, Gossypium hirsutum
cccacgcgtccgaaatccgtaaatggctaccactgcttctccaatggcgactgagctgaagagcagctttacgtcgtctgttacaagaggactggtagtccccaggggcatttcgggatccccgttcaaagtatcttccggaaagaccaggaccccttgcttcactgtcaaagctgttcaatccgacaagtcaacatttcaagtaatccaacccatcaacggcgaccccttcattggaagcctggagactccaatcacctcaagccccttaattgcatggtacctttccaacctcccagcctataggacggcagtgaacccacttctgaggggaatcgaagtgggtctggctcac

SEQ ID NO: 222234 - DNA, 332 bp, Gossypium hirsutum
actacctcttgagtcagaccaagttcttctgaaagtcatttatgctggtgtagacgcaggtgatgtgaactttagcgcaggccgttattttcaaggaaccaagaaagaccctggatttgaggcagtgggaataattgctgccattggagattctgtaagaaatttgaaagtgggaactcctgctgcagtcatgactattggatgttatgctgaattcatgaaggttccttcaaagcatacttccaattccaagacctgacccggaagttgttgctttgcttacttcaggattaacagcatcaatcgctttggaagaagctggtcagatgaaa

SEQ ID NO: 222235 - DNA, 254 bp, Gossypium hirsutum
  unsure (1)..(254): unsure at all n locations
gggaagaaagccaactttttattcattagttctcangattaaaacccggaaatcgagaaacaaaggccaataactcaaagaaaaggaaaagcaaaagtaaagaacatgattttttctgagtacaaattcaaacaaatggagagacaaagttaataaaaagcttaaaagcctggaggcttgtaggcaatgaaactaatgcactgcacttgacgcacgttgtcgaagccaatgattctaatgaatgcattggggta

SEQ ID NO: 222236 - DNA, 336 bp, Gossypium hirsutum
cccacgcgtccgttagctatagcatacactactagtacccactactagcaagggcttcctcaatgatctcatcggctaccattgccactgcctctccggcacaggctaacatggtcgctcctttcaccggcctcaagtctgcctctgctttcccagtcaccaggaaggccaacaacgacattacttctctcgcaagcaatggcggcagagtgcaatgcatgcaggtgtggcctcctactggaaagaagaagttcgagactctctcatacctccccgatcttacacccgtgcagttggctaaagaagtggattaccttcttcgctcaaaatgggttc

SEQ ID NO: 222237 - DNA, 299 bp, Gossypium hirsutum
agaggttttcgattacgctgatcgtagaatttaaagggataagtaaacaagactggtagaatggctctagttgcgggtggatcgtcaacattgaaccccaatgcccctctgtttgttccggctgtttatcgccaagtggaggatttctcacccgaatggtggaaactggttacgacaacaacatggtaccgtgactattggatcagccagaaccaggatgaagatggcttttacgacaacacaaaggatgatatatttgatgtcaatgacattgttgatttgcttgcagatccccttga

SEQ ID NO: 222238 - DNA, 318 bp, Gossypium hirsutum
  unsure (1)..(318): unsure at all n locations
ctcaccaccaatggcagatcatcatcatttccgccgtccctgccccaggtttgaaacaggaagcctaaccagcaggtggtgtgcaaggctcaaaagcaggaagatgatggaagccttgtgtcccgtaggttggctctcactgtactcattggtgctgccgctgttggctctaaggtttctcctgctgatgctgcctatggtgaagctgcaaatgtatntggaaagccaaaaacagacacagaattcatgccatacnaatgggatggattcaagctgtcgataccatcgaaatggaacccaagcaaagaggtggagttt

SEQ ID NO: 222239 - DNA, 332 bp, Gossypium hirsutum
ttcaaatcccagatctctttttgttttctccttgaaacccaaatttgggcaggtaagaaaagcttctgagaaaatggtgcccaaatcattgatctatgcatttgtatctcgtggaggagttatattagctgagtatactgaatacagtgggaatttcaattccatagctcttcaatgcctccaaaagcttccttcttcaaacaacaagttcacttacaactgtgatggccataccttcaattatcttgttgacaatggatacacttattgcgttgttgcagatgagtcagctggaaagcaagcgccgattgcttttttggagcgtatcaagg

SEQ ID NO: 222240 - DNA, 301 bp, Gossypium hirsutum
  unsure (1)..(301): unsure at all n locations
cccacgcgtnncgccacgcgttctatcaaatataacattttctcctttcttcgtatggcttcattataaaaaaagaaaagaaaagacatggctgctgttactgctgcagtctcttttccttctaccaagtccacctctctccctgctagaacctctattgtctctcctgataggatcaccttcaagaaggtgcctgtttactacagagatgtttgcagtggggggagagtggtttctgtcagggcccaggttacaactgaagctcctgccaaagttgtaaaggaatccaagaaaaatgatg

SEQ ID NO: 222241 - DNA, 349 bp, Gossypium hirsutum
cccacgcgtccgaacattttcagtgagcctagttgaaattgtatacaggttgggggttttgtttggtgccgcatgtcaaattcagaggctgctgctaaaaacggagcaacaatggatacccagagacaacaagcgccggggaacggtgcccttgccgtcaagaaacctccctccaaagaccgtcacagtaaagtagacggtcgtggacggaggataaggatgcccatcatttgcgccgctcgtgttttccagttgactcgcgagttgggtcataagtccgacggtcagaccatcgagtggctgttacgccaggccgagccttccatcatagccgctacaagtaccggga

SEQ ID NO: 222242 - DNA, 377 bp, Gossypium hirsutum
tcaggcatcaccatggcaacctctgctatccaacaatctgctttcgctggccgaacagctttgaagcagtccaatgagctcgtctgcaagatcggtgccgtcggtggtggtcgcgtttccatgcgtagaaccgtcaaaagtgctccaaccagcatctggtatggccctgaccgcccaaagtacttgggtccattctctgaccaaatcccatcatacctgaccggtgaattccctggggactacgggtgggatactgctggattatcagctgacccagagacatttgccaagaaccgtgagcttgaggtgatccactgtaggtgggctatgcttggtgcccttggctgtgttttccctgaaattctttcaaagaatgg

SEQ ID NO: 222243 - DNA, 361 bp, Gossypium hirsutum
cccacgcgtccgaattcccataaattctctcagcttccattgttttctttcctcttaggtcagtggaggcattgagcttctctcttgatcacaatgactatcctcattgatcaacccgagcttggtgttgaagcaggggttaacaagctcgataatgcagacaatgaactggtgttggatgggggatttgtggtgccacagacaaactcttttggccaaacttttagagattatcatgttgaaagtgagaggcaacagggtgtggagaacttctaccggaccaatcatattaatcagacttctgactttgtcaagagaatgagaacagagtatggtaaactgaacaagatggagatgggca

SEQ ID NO: 222244 - DNA, 356 bp, Gossypium hirsutum
ataagcctgaccttaacattgtcttcaatgctagttgcaccaccaactgtcttgcccgattggctaaggtgatcaacgataaatttggcattgttgagggtcttatgaccaccgtccattctattactgctacacaaaagactgttgatggtccttccatgaaggactggagaggtggtagagctgcttccttcaatatcattcctagcagcactggagctgccaaggctgtcggcaaagttttgccagcactgaatggcaagctgactggaatggctttccgtgttcccactgttgatgtctctgtggttgacctcactgtgagacttgagaagaaggctacatatgatgaaatt

SEQ ID NO: 222245 - DNA, 367 bp, Gossypium hirsutum
aagacaatggctaccattagaattgctcttcgtaacgtccaccgcagggttgatacctacgccgttgccggccgtacaacgaccgttttcaggccacagtatggttgggtttcaacatatttttcaactaatattagtaacactcagccattaaacatcgatctttctaacgaagaaagcaaaaggcgtctttataacagattgttgtataggagcaaacaaagagggtttctggagctggatttggttttgggaaaatgggttgaagaacatatccattccatggatgaaaatggaattaaagctcttgttaatgtcctcgatttggaaaaccccgacctttggaaatggctaaccggtcaagaac

SEQ ID NO: 222246 - DNA, 374 bp, Gossypium hirsutum
ctcaccaaccaggattcaacatgttagggaggaaaatccaagtcagatgctaagagtgccaagctatccgtgaaatccaaagctggaaagaaatcggggaaggctgccaaggatccaaacaagccaaagaggcctgctagtgccttctttgttttcatggaggagttccgtgagcaatacaagaaggatcaccctaaaaacaaatccgttgcggctgtcggcaaagctggtggagataaatggaagagcttgtctgaagctgaaaaggcaccttatgtagctaaggcagaaaagcggaaggttgagtatgaaaagaacatgaaggcctacaataagagacaggctgagggtcccaaagacgaagatgttgagtc

SEQ ID NO: 222247 - DNA, 365 bp, Gossypium hirsutum
aaaatcagttgcttcacattggcctctacaaccatggctctttcttcgccatgattcgccggtaaggcagtgaagttctccccttccacccctgaaatccggggaactggccgtgtttccatgaggaaaaccaccaagcctgttccttctggtagcccatggtacggtcctgaccgagttttgtacttgggtccactttccggtgagccaccatcttacttgaccggtgagttccctggtgactatggttgggacactgctggactctcagctgatcccgagacctttgctaggaaccgtgagctcgaagtcattcactgcagatgggccatgttgggagctcttgggtgtgttttccctgagct

SEQ ID NO: 222248 - DNA, 333 bp, Gossypium hirsutum
gctctgtatagattcttctagtttcgaccaaaaaaacaattgctcagctttcgttcagagaatatttgttttgagtgaaaaaaaaaatgttgggagtattcagcggagcgatagtgtccccgccggacgagctggtggcggccggttgcaggacgccgtcgcctaagataacggcggacgctcttgtgaaacggttcatcgaggcaaacccctccaccgtgtccttgcagatcggagatcatgtccaattcgcgtattctcaccgtaacgagtctgctttacttcccaggtcattcgcggtgaaagatgaaatattctgcatgtttgaggggg

SEQ ID NO: 222249 - DNA, 308 bp, Gossypium hirsutum
cacactctcaaattcagttaacaatttcacagttgttttcttcagggtctcggtcagccatggctgcagccatctccaccgtcgctgccgctgccgccgccaaccgagctctgggagtgtcagtcccaacctcagctttcatggggaagaaagtgagctcaagattcaacagcaccaggcaggttccttcgggaagttttaaggtgatggcggcggagaaagagatagacgaagagacacagaccgaaaaggaccgatggaaaggggtggcttacgatatttcggacgaccaaacaggacatactcga

SEQ ID NO: 222250 - DNA, 375 bp, Gossypium hirsutum
  unsure (1)..(375): unsure at all n locations
cccacgcgtccgcccacgcgtncttatggtttctacattgctcctgcattcagggacaagcttgttgttcacatcaccaagaacttcatgtccctccctaacattaaggttcctctaatcttgggtatttggggaggcaaaggtcaaggaaaatctttccaatgtgagcttgtgtttgccaagatgggtatcaaccccatcatgatgagtgccggagaactggaaagtggaaacgccggtgaaccagccaagttgatcaggcaaaggtaccgtgaagctgccgacataatcaaaaagggcaaaatgtgcgccctcttcattaacgatctcgatgctggtgccggtcgtatgggaggaaccacccaatacaccgtc

SEQ ID NO: 222251 - DNA, 358 bp, Gossypium hirsutum
tttagctatagcatacactactagtacccactactagcaagggcttcctcagtgatctgatcggctaccattgccactgcctctccggcacaggctaacatggtcgctcctttcaccggcctcaagtctgcctctgctttcccagtcaccaggaaggccaacaacgacattacttctctcgcaagcaatggcggcagagtgcaatgcatgcaggtgtggcctcctactggaaagaagaagttcgagactctctcatacctccccgatcttacacccgtgcagttggctaaggaagtggattaccttcttcgctcaaaatgggttccttgcttggaattcgaattagaggagggattcg

SEQ ID NO: 222252 - DNA, 363 bp, Gossypium hirsutum
gaaagcactgaaaacgcaaaaccatggcctctgcttctctcctcaagacttcggcagtgttagacaagtctgagtgggttaagggtcacacccttcgccaaccttccacttctgcggtgaggtgccaccctgttgcaccctctggactaactgtgcgtgcaagctcatatgccgatgagcttgtcaagactgctaaagctattgcttctcctggccgtggaattttggccatggatgagtccaacgctacctgtgggaaacgtttggcctcaatcgggctagaaaacacagaggctaaccgccaagcctacaggacgttgcttgtttcagctcctggccttggtcagtacatctctggtgcca

SEQ ID NO: 222253 - DNA, 364 bp, Gossypium hirsutum
cccacgcgtccgtccacgcgtccttccactcgttcgaaaaaaaaaaccacccagacaggcaatagactaggacaggaggatctctcagggtttaggtgatggcttcgaagcggatcttgaaggagctcaaggatctccagaaagatcctcctacctcttgcagcgcaggccctgttgctgaagacatgtttcattggcaagcaactattatgggtcctcctgacagtccatatgctggtggagtgtttctagtcaccattcatttccctccggactatccatttaaaccaccaaaggttgcattcaggacaaaggtctttcacccaaatattaacagcaacggtagcattttgcttgatatttt

SEQ ID NO: 222254 - DNA, 358 bp, Gossypium hirsutum
cccacgcgtccgcccactcgtactgtaattattaaccctgggaacccgactggtcagtgtctcagtgaagctaatttaagagaaatattgaacttctgttaccaagaaaacttggtattacttggagatgaggtttaccaacagaatatataccaggatgagcgcccctttatcaggtctagaaaggtgttgatggatatggggcctccaattagcaaggaagtccagcttgtttctttccacactgtgtctaaaggatattggagtgaatgtgggcagcgagggggatactttgagatgaccaacattccttcaaagacagttgacgagatatacaagattgcatcaatattcctta

SEQ ID NO: 222255 - DNA, 374 bp, Gossypium hirsutum
  unsure (1)..(374): unsure at all n locations
cgctctctctaaaggccaatcaacattttaaaagagagagaaagtgtcctttctgtctctagaactctaaagggtcaaagctttaaagccttcaaatatatacatataaatcgagagagagggagggaaacatttttttttaaattattttttgggagagattttgaatcatgggtggtgagaagaaattcggngttcttctatgcgcggaggactcggactacattaagaagaggtacggagggtattttggtgtgtttgtggaaatgctggcggaggaaggggagacgtgggacgttttcagggtggcgaacggcgagttccccgacgacgatgagatcgccgaattcgacggattcgttataaccggcagt

SEQ ID NO: 222256 - DNA, 303 bp, Gossypium hirsutum
cccacgcgtccgcattgttccagaagtagaaaagttagttgctgcacttcctgaaggtggtgttcttcttcttgaaaatgttagattttacaaggaagaggaaaagaatgaacctgaatttgcaaagaagcttgcttcgttagctgatctctttgtcaatgatgcatttgggactgcacatcgagcacatgcatcaacagagggtgttacaaaattcttgaagccatcagttgctggtttccttttacagaaggaactagactaccttgttggtgctgtttcaagccccaaaaggccttttgc

SEQ ID NO: 222257 - DNA, 345 bp, Gossypium hirsutum
ctttgccaagatgggaattaactttattatgatgagtgccggagaagtggagggtgggaacgccggagaaccagccaagttgatcaggcaaaggtaccgtgaggccgccgacattatcaagaaagggaaaatgtgttgcctctttatcaacgatctcgacgctggagccggtcgtatgggaggaaccacacaatacacagtgaacaaccaaatggtgaacgccacactcatgaacatcgctgataaccccaccaacgttcagctccccggtatgtacaacaaggaagagaaccctcgtgttccgatcattgtcaccggtaacgatttctcgacgctgtacgcgcc

SEQ ID NO: 222258 - DNA, 303 bp, Gossypium hirsutum
aaatatgctgccgatgaggatgccttctttgctgactacaccgaagctcacgtgaagctctctgagctaggatttgctgatgcataagctgatggttgcggaatagaatgaagccaacaacatttgcctccacaaaatgaatgtattgggttttgtcatctctcagtagtttatgggcagttgttgcttgatgaatatgggtatttgcagttttattttgttgaacatgttgaattgagtttgtgggagatttcgatggactaaaaagctctttcgtaataaataatatacaatttattccat

SEQ ID NO: 222259 - DNA, 358 bp, Gossypium hirsutum
ggagctttttcctttccaagactgttgggtggttcctgcaaaagtagctttcgaccaaactgcgtgggctgcagtttggaacagcatttacttcgtgattttgggatttctgcgtcttgaatctccgatcagtatttttaacgaatggaaggcaacattcttgcctatgttgacagccggatggaaactttggccatttgctcatcttatcacttatggttttattccggtagaacaaaggcttctttgggtggactgcgtagaacttatttgggtgacgattctctcaacttattcgaatgaaaaatcggaagcaagaatctccgaggcagcaccagcagaagcaagttcaattttt

SEQ ID NO: 222260 - DNA, 365 bp, Gossypium hirsutum
cccacgcgtccggttgcttcacattggcctctacaaccatggctctttcttcggcatcgttcgccggtaaggcagtgaagttctccccttccacccctgaaatccggggaactggccgtgtttccatgaggaaaaccaccaagcctgttccttctggtagcccatggtacggtcctgaccgagttttgtacttgggtccactttccggtgagccaccatcttacttgaccggtgagttccctggtgactatggttgggacactgctggactctcagctgatcccgagacctttgctaggaaccgtgagctcgaagtcattcactgcagatgggccatgttgggagctcttgggtgtgttttccct

SEQ ID NO: 222261 - DNA, 359 bp, Gossypium hirsutum
ctctttcaaaccccggaccgctgtcttctttaaacgcgtccatatccgagctggtttggtcgaaccggacggtggtaaactcgtcgacctccacgtgtcggaaccggagcgggagttgaagaagcgggaagcggcttcgttgcccaaggtgaagcttactccgatcgacgtgcaatgggttcacgttttgagtgaaggctgggctagcccgttaaccgggttcatgagggaatctgagttcctccaaactcttcattttaactcgctccggctcgacggtggttccttcgtcaatatgtcggtcccgattatattggctatcgacgatttgcaaaagcgagtatcggtgagttcgacag

SEQ ID NO: 222262 - DNA, 359 bp, Gossypium hirsutum
ctatagcatacactactagtacccactactagcaatggcttcctcaatgatctcatcggctaccattgccactgcctctccggcacaggctaacatggtcgctcctttcaccggtctcaagtctgcctctgctttcccagtcaccaggaaggccaacaacgacattacttctctcgcaagcaatggcggtagagtgcaatgcatgcaggtgtggcctcctactgggaagaagaagtttgagactctctcatacctccccgatcttacacccgtgcagttggctaaggaagtagattaccttcttcgctcaaaatgggttccttgcttggaattcgaattggaggagggattcgtgcacc

SEQ ID NO: 222263 - DNA, 336 bp, Gossypium hirsutum
  unsure (1)..(336): unsure at all n locations
gccaaagtcaagctaaacttttaaaattaatcaatggcggaaaaaagtttcaggtgcgtcatcctcggtgggtggtgtcgctgccgggtatgcggcgagggagtttgccaaacagggagttcagcctggtgagctagccattatttccaaggaagcggttgctccatatgaacgtcctgctctgagtaaggcgtatctcttccctgagggagctgcaagacttcctggtttcatgtctgtgttggaagtggtggagagagattgcttnctgagtgggacaatgaaaaaangatttcagttgatccttagcactgaaatagtgaaagcagatctttc

SEQ ID NO: 222264 - DNA, 363 bp, Gossypium hirsutum
cttttgtataactgtagcatatagtactagtaagcagtaatagcaatggcctcctccatgatctcatcggcaaccattgccaccgtgaactgctcctccccggcacaggccaacatggtggcccccttcaccggcctcaagtctgcctctgctttcccagtcactaggaaggccaacaacgacatcacttctcttgcaagcaatggtgggagagtgcaatgcatgcaggtgtggcctcctcttgggaagaagaagttcgagacactctcatacctccccgatcttacacccgtacagttggctaaagaagtagattaccttcttcgctctaaatggattccttgcttggaattcgaattagag

SEQ ID NO: 222265 - DNA, 339 bp, Gossypium hirsutum
atttcttctcgcctactcaacacctcctccgccgccgccgcaactgcgctactaaagtccaagtccagagttcataatagacatacctcaatccctcttcttcctctcaaacacccattctcccctctcactttgaaacaaatgagtaacaattcccagtcaacgctttcttgttcctctcttccccaaaacaacccatcttccccttcaaccgcatcaggtcggattggagaagtgaaaagggtaacgaaagagacgaatgtgtgggttaagataaacttggatggcaccggagttgctaattctagtacaagtattccctttctcgatcatatgttg

SEQ ID NO: 222266 - DNA, 348 bp, Gossypium hirsutum
gttcgagactctctcatacctcctcgatcttacacccgtgcagttggctaaggaagtagattaccttcttcgctcaaaatgggttccttgcttggaattcgaattagaggagggattcgtgcaccgtaaatactcgagcctacccacgtactacgatggacgctactggaccatgtggaagctgcctatgttcgggtgcaccgactcggctcaggtattgaaggagcttgaggaatgcaagaaggaataccccaatgcattcattagaatcattggcttcgacaacgtgcgtcaagtgcagtgcattagtttcattgcctacaagcctccaggcttctaagcttttta

SEQ ID NO: 222267 - DNA, 367 bp, Gossypium hirsutum
cccacgcgttcgcaatgacactggtggtgttaagcaggcttctcacgttctggaatatgattccacccttggcatcttcgctgccgatgtcaagcctgtcggcactgatggcatctctgttgatggcaaggttatcaaggttgtttctgaccgcaacccttccaacctgccatggggggacctaggaatagatctagtcatcgaaggaaccggtgtgttcgtcgatagagaaggtgcaggtaagcacattcaagcaggagccaagaaagtgctgattactgctccaggtaagggtgacatccccacctatgttgttggagtgaatgctgacacctacaactcaaatgagcctatcatcagcaatgct

SEQ ID NO: 222268 - DNA, 365 bp, Gossypium hirsutum
gtatttggggaggcaaaggtcaaggaaaatctttccaatgtgagcttgtgtttgccaagatgggtatcaaccccatcatgatgagtgccggagaactggaaagtggaaacgccggtgaaccagccaagttgatcaggcaaaggtaccgtgaagctgccgacataatcaaaaagggcaaaatgtgcgccctcttcattaacgatctcgatgctggtgccggtcgtatgggaggaaccacccaatacaccgtcaacaaccagatggttaatgctaccctcatgaacatcgccgataaccccaccaacgtccagctccccggtatgtacaacaaggaagagaacccccgtgtccccattatcgtcact

SEQ ID NO: 222269 - DNA, 366 bp, Gossypium hirsutum
agcaattgtcctcaaatatctcatacaaggaattaaattgaatcaatggctcaaaccatgttgctcatgtctagccatgcagtgagcttgaagagagatcaccctttactccatttccaagctcaagggctcaagcctaaacctgtctctcatctcttcttcaatccattgtctaacggtgtccatacttcatccaaagctttcaccactttagctatctttaaatcaaagaccaaagcagctcccaagagggttgagccaaagtcaaagccaaaggttgaagatgggatctttggcacctctggagggattggttttaccaagcaaaatgagctctttgtgggacgtgttgccatgcttggtttt

SEQ ID NO: 222270 - DNA, 336 bp, Gossypium hirsutum
  unsure (1)..(336): unsure at all n locations
agcaattgtactcaaatatttnattcaaggaagagcacggaatcaatggatggcgcgatatcgaagatgcatgacaaagcaggaatctcaccaaatcagcaaaggttgatttttgctgggaaacaactggaagacggaaggactttggctgattacaatattcaaaaggagtccactcttcaccttgttcttcgacttcgtggtgggttctaagccttaaggtctcccttaatgagggcttttctggatttacgttgaggcactgtcaaatgcaaaggtcgaagatgggatctttggcacctgtggagggattggatttacctatggaatcttctt

SEQ ID NO: 222271 - DNA, 285 bp, Gossypium hirsutum
ctgagctcaaggtgaaagcgatctttaacgttaggttggctatgttctcaagggtcggggtgttcgttcaggccatcgtgaccggaaagggaccattggagaacttggctgaccaccttgctgacccagtcaacaacaatgcttgggcctatgccaccaactttgtccccggaaagtgaacttagagagtgaaaagggatttgtcttgttcatgtttttatttgttggtgtgaatgtaaatttgttgcacaatcaatgaaagcagaatgtgaattttgtgtgctc

SEQ ID NO: 222272 - DNA, 349 bp, Gossypium hirsutum
ctctctctctttgctacgccgcctttgcttccctttctctgaataaaaaatcccaaactgaccaaaaaaaacagagcatttagttttttctttcaattaagagttcaagctggcgatcgaaaatcgagaatccattgtccgtgaaatcaagcccaagaacagaagaatcatgggtgctggtgggcctgatgaagaagacaacaggtggccgccatggttaaaacctttgttaagggaacatttctttgttcaatgcaagcttcatgttgattctcacaagagtgaatgcaatatgtactgcttagattgtatgaatggcgctctctgctctttttgcttagctgatcac

SEQ ID NO: 222273 - DNA, 383 bp, Gossypium hirsutum
ccacgcgtccgcccacgcgtccgctcaaattcagttaacaatttcacagttgttttcttcagtctgtctctcagccatggctgcagccatctccaccgtcgctgccgctgccgccgccaaccgagctctgggagtgtcagtcccaacctcagctttcatggggaagaaagtgagctcaagattcaacagcaccaggcaggttccttcgggaagttttaaggtgatggcggcggagaaagagatagacgaagagacacagaccgaaaaggaccgatggaaagggttggcttacgatatttcggacgaccaacaggacattactcgagggaaagggatggtggattccttgtccaagctcccatgaatgatggaactcactatgc

SEQ ID NO: 222274 - DNA, 398 bp, Gossypium hirsutum
cccacgcgtccggtacatcttccgttcgagattagatacatagttatgctttgctcttatttgcggttccccaattgttcctggaaccctaatcctaattccagattgctcctgtctacatcgattagcaaatggcacccgaggacccggcagtcgtggcagaccccgcacccgcgacggcggacgacaagactgctgacaccaaagctacttcaaaatccggcagagcaaagaaggccaaagaacccagaaccaagaaagctgcagctcctaggaaaccacgggctgcttctactcatccttcttacgaagagatgatcaaagatgcgatcgttactttgaaagagaggacaggttcaagtcagtacgccattgctaagttcattgaagagaagcag

SEQ ID NO: 222275 - DNA, 397 bp, Gossypium hirsutum
cccacgcgtccgatcaaactgaaaagctctgaaatgtttgatatggttttttgtacctgtgaagaggaccaatcacacattttgcggcttatctttcaatctgattgcctcgggatgacaactttaccatcaattcgaacgcaaggtatgtgggaaatctttgaccactctcgtcctttatcgcttgagcactcttctttcagcaatggacaattgaaaatgtgtaaaacatcaagacagagaagcatgtctttttccggaagagatgttagcttgggacaattatcgatcatcaattcttgaagagaggcgaggtcttgaaagcccccggagaacatgaattccagattctcaaaatctgaaaggcggataaaggtgagagaaggaggcacatcat

SEQ ID NO: 222276 - DNA, 332 bp, Gossypium hirsutum
cgtttcttcccaacatgatcattttctatgtagaagaaaactccttcgcaagaattcgaaccttaaaccggcctaagcagctgaatgccctttcatttcagatgatttctcggttactagaactttttcttgcctacgaggaggatcctaatgtcaagctggtaatgctgaagggagaaggaagagcattttgtgctggtggagatgttgtagctgttgtacatgatatttgggcaggcggatggagagcaggtgccaacttttttatgaaggaattctccttaaactatttgatggcgacctatagcaaaccacaagtttcaattcttaat

SEQ ID NO: 222277 - DNA, 283 bp, Gossypium hirsutum
cgcgccacgcgtccgcccacgctttctaagaagaaaaacaaaaatggccagtgcaggggcgcttcgacgactctcctcttccattgacaagcctctccgtcctttcttcaatgccccttccctctattacatgtcgtctttgccaaatgaagctgtgtacgagaaggagaaacctggcgtcacttggccaaagcaactgaatgctccacttgaaaccgtcgatcctgaaattgctcacatcatcgaacttgaaaaagcgcgccaatggaagggacttgaactt

SEQ ID NO: 222278 - DNA, 343 bp, Gossypium hirsutum
cggccgcctgcgtctctctcttcatttctctgaacctaaaagtctttagcttttggcttcgagagagaccatgttggtttaccaggatctcatctccggtgacgagcttctttctgactcattcccctacaaggaaatcgagaatgggatgctgtgggaagttgagggaaagtgggttgtgcaaggagctattgatgttgacattggtgccaatccttcagccgaagatgctgatgaggatgaaggtgttgatgaccaatctgtgaaggttgttgacaattgtgacactttcaggctttaagagcaaccccctttcgacaagaagcagtttgtcgtggtcatg

SEQ ID NO: 222279 - DNA, 397 bp, Gossypium hirsutum
agcaaaatcctatgttccgagttggtcttgatgtctttgaggatgaaccttggtgaaacctgggcttgctgagatgaagaatgctgtcatcgtaccacacattgcttctgcttccaagtggactcgtgagggaatggcaacgttagctgctctaaacgtcttgggcaagatcaaaggatatccaatttggggtgattcaaatcgcgtcgaaccattcttgaatgagagtgttccacctcctgctgcatgtccaagcatcgttaatgcgaaagcattaggtttacctgtttcaaagctataagcaccaacggtcggtctgggttgcagtccgagtagtttctcctatgaatgtgaagtttggggttgtactgagtttagtttatgctagactgacaat

SEQ ID NO: 222280 - DNA, 398 bp, Gossypium hirsutum
tctgccattgcagccgttgccatctcatcccctagttcccagaggagtggatcagtagtgaggaggacaaaggcttctttccttacagggaagaaacttcgatcagtcaaaaagtacacaaaaccagcagcagcccgaacagttccggtgtgtgcagtggctgaccccgaccgacctctttggttcccaggcagtactcctcctccatggctcgatggcagcctccctggagacttcggttttgatcctctaggccttggatcagaccctgagaccttgagatggaacgtacaggcagagctcgtccattgcagatgggcaatgttaggagccgctgggattttcatcccagagttcctaaccaaaattggcattttaaacactccatcatggtactc

SEQ ID NO: 222281 - DNA, 393 bp, Gossypium hirsutum
acccacgcgtccgcccacgcgtccggtttttcgtcatcggaatgggacccatcgctgggatttacacgtcgaagattttccctttgaagcttcttgcacaaggaattagtttaggagtggcagtgaatagggtgacgagtgggatcatttcgatgactttcctttcgttataccaagcgattaccatcggcggtgcttttttcttatttgctggcatcgccgccgttggatggttgtttttcaatatatgtttgccagagacacgtgggaaaacattggaggaaactgaacggctttttggcaatttggtaggttggagggaagtggataagaagatgaaggaagataatactaaaggagccactcatggccaataaggtagtgaaggatagt

SEQ ID NO: 222282 - DNA, 399 bp, Gossypium hirsutum
cacgcgtccggaacaatgtctgtctcacttcaagctgcagctaccctgatgcagccaatcaaggttgctgcaccatcaaggaccaatgtgctgctcaggtcctcccagagcgtttctaaggccttcggtttggagcctgttggtgctaggctcacctgctctttgcaaactgacctcaaggacttggctcagacgtgtgttgatgctaccaagctcgctggtttcgctcttgctacatctgctcttgttgtctcgggagcaagcgctgaaggagttccaaagcggctaacctacgatgaaatccaaagcaagacatacatggaagtcaaaggaacaggaactgctaaccagtgcccaaccatcgatggtggtgtcgactcttttgccttcaaagcctgc

SEQ ID NO: 222283 - DNA, 398 bp, Gossypium hirsutum
cgcgtccgatggcatacactactagtccccactactagcaatggcttcctcaatgatctcatcggctaccattgccactgcctctccggcacaggctaacatggtcgctcctttcaccggcctcaagtctgcctctgctttcccagtcaccaggaaggccaacaacgacattacttctctcgcaagcaatggcggcagagtgcaatgcatgcaggtgtggcctcctactggaaagaagaagttcgagactctctcatacctccccgatcttacacccgtgcagttggctaaggaagtggattaccttcttcgctcaaaatgggttccttgcttggaattcgaattagaggagggattcgtgcaccgtaaatactcgagcctacccacgtactacgatg

SEQ ID NO: 222284 - DNA, 386 bp, Gossypium hirsutum
gtccgcccacgcttccgaaggtccccctttaataatcgaccaaaacagaaaacccagaggtaaaaggctccctaaaatgttgagtgaaacattgaagaacaagtaccaattatgtgaagagatcggaagagggcggtttggggttatctctcgagtgttttgcccttcaacccaatcctccttcgcctgtaaatccatcgacaaacgcctcctttccgaccccaccgatcgagaatgtctggagaacgaacccaaaatcatgacccttttgtctcctcactccaacatcgttcaaatctacgacatgtttgaatccgatgatacccttcaactcatcatcgatctctgccagccttttaccctctacgacaagattctggaacccg

SEQ ID NO: 222285 - DNA, 401 bp, Gossypium hirsutum
tccgtttttttttttttttttttttacataagcatcatagttgatttttcaagatcagctcatccatccccaatactcaaaactctagtgctcaaaaagtagaagagatgtgtgagatgatacatacaaagcacaaaggggttgaaaagataaatgtataactcagttaactgtgacttttccaaccatacctgcaccctggtgaggagaacagtagaaactgtaggttcctttctcagtcaaggtaacagcgtaagtctcgtctttggcattgagtagctcttcttcaggcatggagattttggatacgtcgacgccgcttgggatttcgtcctcatcgaacacaacattgtgtgggaatccggcattgttcttgaacacaatcttcttccctgggctta

SEQ ID NO: 222286 - DNA, 374 bp, Gossypium hirsutum
ccgcaaaatccgtaaatggctaccactgcttctccaatggcgactcagctgaagagcagctttacgtcgtctgttacaagaggactggtagtccccaggggcatttcgggatccccgttcaaagtatcttccggaaagaccaggaccccttgcttcactgtcaaagctgttcaatccgacaagtcaacatttcaagtaatccaacccatcaacggcgaccccttcattggaagcctggagactccaatcacctcaagccccttaattgcatggtacctttccaacctcccagcctataggacggcagtgaacccacttctgaggggaatcgaagtgggtctggctcacggcttcctcctggtgggtccattcgt

SEQ ID NO: 222287 - DNA, 393 bp, Gossypium hirsutum
cacgtgtgcgcacacgcgtctttttttaaaggcgagtggcgcgagcaattggacttcaaggccgacaacaaataatctaagaacctttagggaaatgaatcaaggatgtttaatcttggttgggattttggtgacactgagtttaccatattcacatgcctttgggagaaatgaaaataagatacaaactgctgtttttctatcacctaagttcgtgctcggaccaggatctgtggaaaataggttctattacaacgtcgactttccgaaaggtcatattgcggtgaaaagttttgatgcagaagtaattgacgaggccgggaatcctattccactgcacgagacgtatttgcatcattgggttggtgttagatactatgtacgtaaaggtgt

SEQ ID NO: 222288 - DNA, 400 bp, Gossypium hirsutum
acccacgcgtccggagatagcaattgtcctcaaatatttcatacaaggaattaaattgaattaatggctcaaaccatgttgctcatgtctagccatgcagtgagcttgaagagagatcaccctttactccatttccaagctcaaggactcaagcctaaacctgcctctcatctcttcttcaatccattgtctaatggtgtccatacttcacccaaagctttcaccactttagctgtctttaaatcaaagaccaaagcagctcccaagagggttgagccaaagccaaaggttgaagatgggatctttggcacctctggagggattggttttaccaagcaaaatgagctctttgtgggacgtgttgccatgcttggttttgctgcatcattgctaggcgaag

SEQ ID NO: 222289 - DNA, 402 bp, Gossypium hirsutum
gaaaaaagcagagaatcacaataatggtttcggcagtggcagcaacagcatcatctcagctactggtatcaagttcccgctctttgtcacggctgtcaccatttcagctatgcgtatttgattccaagtccctcgtgtcatgccccagcaatggcaatggcattaacaacagtatcaagagaaggcatgttaggtgcctggctgtggggacagcaccagaggcagaaaccaagaaaagtgggttcgaaatccagacactaacaggttggttgttgaagcaggaacaggcgggtactattgatgctgagctcactattgtcctttccagcatttccatggcctgtaagcaaattgcttctttggttcaaagggctagtatttcaaacttgactggtgttcaag

SEQ ID NO: 222290 - DNA, 389 bp, Gossypium hirsutum
acgcgtccggctagtcgtaaaacagacacgaaagagtcttcaagccgatgccttgatactcaacaccgccgaagagctcgatgggcctatactatctcaaatacgcaccaaatgccctcgtgtctatgccgttggacccttacatgctcaattaaacactagactcaatgcaaaacatggagagtcatatgatcacatctcgaatacactttgggaagtggataaaagctgcatcttttggctcaataagcaaccgaatcgatctgttatctatgtaagttttggtagcattacgagcacgtcaagggagcaacttttagagctttggtatggacttcttaacagtaaaacgaagttcttgcttcttgtaaggccaaattccgtgattg

SEQ ID NO: 222291 - DNA, 384 bp, Gossypium hirsutum
tgaaaaacgcgaagagaaccctgctctgtagggtgttcttgccaggggtaaaagcccaacgtgtgtgatagtggcatgctcggactcaagggtgtgcccctctcatgttctaaacatacaaccaggtgaagctttcgtggtccgcaatgtcgccaatatggtgccaccatatgatcagaataagtactctggaaccggatctgctatcgaatacgcagttttgcatctcaaggtgaaagagatcgtggtcatcggacacagtgcctgcggtggaatcaaggggctgatgtcattcccgtacgacggaaccacttcaactgatttcatagaagattgggttaaaattgggatgcctgcaaggaagaaggttaatgcagaaaatcg

SEQ ID NO: 222292 - DNA, 328 bp, Gossypium hirsutum
gtccgggacccggcagtcgtggcagtcctcgcacccgagacggaggaggacaagactggtgagaccaaagctacttcaaaatccggcagagcaaagaaagccaaagaacccaaaaccaagaaagctgcagctcctaggaaaccacgggctgctcctactcatcctccttacgaagagatgatcaaagatgcgatcgttactttgaaagagaggacaggttcaagtcagtacgccattgctaagttcattgaagagaagcagaagaatcttcctggaaatttcaagaagcttctgcttgtccatttgaagaagcttgtggctgctggga

SEQ ID NO: 222293 - DNA, 400 bp, Gossypium hirsutum
cgtccgggcggctgccgtctccaccatcgtgtgctgtcaaccgagcaccgttgagtgggaatggatcaggtgccggagcttctgctccaagctcagctttcatggggaacagcttgaagaaagtgagcgctaggttcaacaacaacggcaaggctccagtgggaagtttcatgattgtggctgccaaagaaatcgacgaagacacacagaccgaccaggaccgatggaagggtcttgcttatgatatctccgatgaccaacaagacattaccagagggaaaggtatggtcgactcattgttccaagctcccatgaacgatggtactcactatgctgtcatgagctcctatgagtacattagccaaggccttcgcacatacgacttggacaacaacatgga

SEQ ID NO: 222294 - DNA, 389 bp, Gossypium hirsutum
cccacgcgtccggtagcctctgtgaagaacccaatcaaggaaaaaaacaaaaaagccaactccaaatctgttcagagagagaaaacactagagacaaacaaacaagctcttatcaatgggggaggaagagaagaaacctgcagacgagaagaaaacggaagagcaagtatctgaaaaagatggaaagaaaggagatgaagaggaagtaaagcaggctgagaagccagttgaggaaaagaaagctgaagaatccaaggaagaaacgccgccgcctcctccgcaagagattatcttgaaggtttacatgcattgtgaagggtgtgcacggaaagttcgccggtgcctcaagggctttcaaggggtcgaagatgtaatgactgattacaaga

SEQ ID NO: 222295 - DNA, 397 bp, Gossypium hirsutum
gacccacgcgtccgcccacgcgtccgcccacgcgtccgttggaaaaaaaaatcccgagcttcaacacggcagtcgctcactgattaatttcaataaaaagaagaaaaagacagttgctcactgatattggtgtagtggcagagcagtgaagagaatcagttgagatatgtctaagcaaggagaagtggtctgcgtaaccggtgccagcggcagcattgggtcttgggttgtcaaactcctccttgctcgcggctacaccgtccacgggaccgtcagaaatctcaaggacgagaaagaaacgaagcatctagaagctctagaaggagcagactcacgtctccgcctcttccagatcgatctcctcgattatgattcactcgccgccgcaatcaatggc

SEQ ID NO: 222296 - DNA, 328 bp, Gossypium hirsutum
cgcccacgcgtccgattttctttttatggttccttccttcgccgtctactgcactggtgacatcgatttcaagtgaatcagaatgggtaaggaaaagagtcacattaacattgtggtcattggccacgtcgattccggaaaatcgaccaccactggccacctgatctacaagcttggtggtattgacaagcgtgtgattgaaaggtttgagaaagaagctgcggagatgaacaagaggtcattcaagtatgcttgggtgcttgacaagctcaaggctgaacgtgagcgtggtatcaccattgatattgccttgtggaaatttgagacg

SEQ ID NO: 222297 - DNA, 343 bp, Gossypium hirsutum
ccgctgggagtgtcagtccaacctattttatgggaaaaagggctcggataacaacccagcaggttccttcgggaagttttaaggtgatggcggccgaaaaagagatagacgaagagacacagaccgaaaaggaccgatggaaagggttggcttacgatatttcggacgaccaacaagacattactcgagggaaagggatggtggattccttgttccaagctcccatgaatgatggaactcactatgctgtcatgagttcctatgaatacatcagccaaggtcttaaaacgtacaatttggacaacaacatggatgggttctacatcgctcctgcattcatgga

SEQ ID NO: 222298 - DNA, 398 bp, Gossypium hirsutum; identical to SEQ ID NO: 198226

SEQ ID NO: 222299 - DNA, 404 bp, Gossypium hirsutum
cgcgtccgggcgggattacccgctgagtttattcatatcaataagcggaggaaaagagactgaccaggattcccctagtaacggcgagcgaaccgggaaaagcccagcttgagaatcggtcgccatcggcgttcgaattgtagtctggagaagcgtcctcagcgacggaccgggcccaagtcccctggaaaggggcgccggagagggtgagagccccgtcgtgcccggaccctgtcgcaccaagaggcgctgtctacgagtcgggttgtttgggaatgcagccctaatcgggcggtaaattccgtccaaggctaaatacgggcgagagaccgatagcgaacaagtaccgcgagggaaagatgaaaaggactttgaaaagagagtcaaagagtgcttgaaattgg

SEQ ID NO: 222300 - DNA, 383 bp, Gossypium hirsutum
cccacgcgtccggtgctccatagttttggaacccaaggacagaagactcttttagcatttcaccgcaaagatggagataacaaatgtgaccgagtatcaagaaattgcaaagcaaaagttgccaaagatggtgtatgactactacgcatctggtgctgaggaccaatggacattgcatgagaatagatttgctttcactaagatactgtttcgtcctcgtattctcatcgatgtaagcaagatagacatgaccacaactgtgttgggtttcaatatatcaatgcctatcatgattgccccaactgcctttcaaaaaatggctcatcctgaaggggagtatgcaacagttagggctgcatctgctgctggaactatcatgacat

SEQ ID NO: 222301 - DNA, 386 bp, Gossypium hirsutum
gtccggcggaatgatataccaaagtcaacattatctacttgattccaaattagatttatgggttcacaaaccggtgagggtagttctagatctggtccaagacgaactgttgtaggggattttttgaaaccattgaattcggaatatggtaaggtagcccctggatggggaacgactcctttgatgggtgtcgcaatggctttatttgcgatattcttatctattattttggagatttataattcttccgttttactggatggaatttcaatgaattagattcacaagaatcacgaagcctcgcgtttcaatacaaaaatggaaacttttagttctcggattttttagccccattctatttcggtagttcgaccgcgaaatttatt

SEQ ID NO: 222302 - DNA, 392 bp, Gossypium hirsutum
cacgcgtccgcagcgactaacaaacaatagcgggtcggtaggatctctcagggtttaggtgatggctgcaaagcggatattgaaggagctcaaggatctccagaaagatcctcctacctcttgcagcgctggccctgttgctgaagacatgtttcattggcaagcaactattatgggtcctccagatagcccgtatgccggtggggtgtttctagtcaccattcatttccctccggattatccatttaaaccacccaaggttgcattcaggacaaaggtatttcaccctaatattaacagcaacggtagcatttgccttgatattttaaaggaacagtggagccctgccctcaccatatccaaagtgttgctgtcaatctgctcactcctga

SEQ ID NO: 222303 - DNA, 393 bp, Gossypium hirsutum
acgcgtccgattcagataacaatttcacagttgttttcttcactctctctctcagccatggctgcaggcatctccaccgtcgccgccgctgccgccgccaaccgagctctgggagtgtcagtcccaacctcagctttcatggggaagaaagtgagctcgagattcaacaacaccaggcaggttccttcgggaagttttaaggtgatggcggccgaaaaagagatagacgaagagacacagaccgaaaaggaccgatggaaagggttggcttacgatatttcggacgaccaacaagacattactcgagggaaagggatggtggattccttgttccaagctcccatgaatgatggaactcactatgctgtcatgagttcctatgaatacatcagc

SEQ ID NO: 222304 - DNA, 377 bp, Gossypium hirsutum
acgcgtccggcaatggcatcgatgactggtttatcgtggctcttcacaagctgtgttggaaggtggtctccaactcagcggccaaacccggttgaacgttgctagcaccaacagggtggctgtggctagacctggttttaccgttagagctcaacaggtccctgccgagcctgaaactggacgcagagctgtgctgggtcttgttgctgctggtttggctactggctcctttgttcaagctgtgcttgctgatgcacgaagcatcaaggttggcccgcctccaccaccctccggtggattgcccggaactttgaattccgatgagccaagagaccttgatctggcgtacaaagatcggtttttcctcaaccattgac

SEQ ID NO: 222305 - DNA, 386 bp, Gossypium hirsutum
cacgaaggtagttttcgtaattaatcggagaatttcagtgaatatcgagctccgcagggataaactcatggcaactgcaactatggctaccgcagctggtgcagctgctcttctgtactatacattgaatcgtaaattgcagacagataggtctggtaacgatgacaatgaaaatggaagtgatttgtccaataatccttcttcagggcttgatcgcgtttcgcataggttagttcaagctcctgcaacgtgggtagagacgatttctactttgtctgaaactcttaggtttacatactctgagactctagggaagtggcccattggagatttggcatttgggatcaacttcttattgaagaggcagggacatttacatgttgcga

SEQ ID NO: 222306 - DNA, 385 bp, Gossypium hirsutum
cccacgcgtccgtgcttcttgattatgctttacaaacttatggcatattggtttgtggagctcttggtggttcttttctgcataggtggtgtggagggccttcaaacttgcttggttgctttattgtcaaggtggttcaagcgcattgcagaatcatacgttaaaattcctttgtttggagctgtctcataccttacattggctgtttcccccttctgcattgcgtttgctgttgtttgggctgtttaccgcaatgtttcctttgcttggataggtcaagatatactcggaattgcattgataatcacagttctgcaaattgtccatgttcctaatctcaaggtgggaacagttctactcagttgtgctttcttatatgacatct

SEQ ID NO: 222307 - DNA, 357 bp, Gossypium hirsutum
cccacgcgtccgcccacgcgtccgtataatggttcgctggaccatccatggcattgcacgagtcccatgggaaagtcgtggtcgatttgatggcacttctgaatacaaactcgacaagaagggaaaaatatatgagcaccgagtcgacaacaccgcactgaattcaccccctaagtttcacgttctagctgtggaagatctaatccgatccataggttgcccctcaaccccaaggccaacttacttcgagatttcatcggcttcacctccagaaaaaccatattaaacccaccttaggttcttaataaattttggtaaataatgggtctaatggttggtggggctatatatagcatg

SEQ ID NO: 222308 - DNA, 369 bp, Gossypium hirsutum
  unsure (1)..(369): unsure at all n locations
ccgcccacccgtccaaaaatcttccttttttttaatgcatccaatgagacctgagcctgggcttcatgtctttctggtttcatttccaggccaaggccatgtaaaccctcttcttagattcggcaagcgcctcgcttccaagggtttgcttgtcacactatctacacccaaaggcttcggcaaacagatggctaaagccaacaacatcactgacgaccagcttatccctgtgggcgatggctttctccgatttgaatcgttccaggatggttgggacgacgacgacccgagacgcgcacacctngaccaatacatgcaccaactggagctcgcaggcaaaccagcgatttcagcgatgataaagagata

SEQ ID NO: 222309 - DNA, 386 bp, Gossypium hirsutum
ccgtgggttttacatcaccttttaagcttttcatcaatggcttcccttcaacaggcttaaatcttttttcaacccaagcttctttcatcttctcaacaccccagatcccttccctctctcaacctctctttttcagccactttcccttccctcaaactctccaccactcgccctcttcatggcggtgccaaaatgtcagcctccgccgcttccagctacgccaccgctttagccgatgtagccaagtccaacaacacccttgatgccaccagctccgacgttgaaaaagtcgagacaatcttctccgacccacaagtcctcgaattcttcaccaaccccaccattgatgtcctcaaaaaacgtcaggttttggatgagattgttag

SEQ ID NO: 222310 - DNA, 398 bp, Gossypium hirsutum
cgcgtccgcccacgcgtccggcatcagctctctctcttgctaagcaagattgctctccgatgtctcctttacagcctcccttgtcggtggatgaagctaaggctctaatgaagaaggttgttggatggaggctgttagatgaagaaggtggacttaaactgcagtgttcatggaaattacgagatttcaaatccggagttgaactcatcaatcggatttataaggctacggaagctaccgatcatttcccgagcctccatttggaaggaccgaatcaagtccgagctgaactgtggactgcttcgattggagggttgagcatgaatgatttcattgtagctgccaagatagatgaaataaaaacatcggatcttgcgcctcgtaaacggatttgggca

SEQ ID NO: 222311 - DNA, 401 bp, Gossypium hirsutum
cacgcgtccgctcatctctctcctttgttttcccttttgtctctctctctctttttccaacccgaaccctacctcaccaaccaggattcaacatgaagggaggaaaatccaagtcagatactaagagtgccaagctatccgtgaaatccaaagctggaaagaaatcggggaaggctgccaaggatccaaacaagccaaagaggcctgctagtgccttctttgttttcatggaggagttccgtgagcaatacaagaaggatcaccctaaaaacaaatccgttgcggctgtcggcaaagctggtggagataaatggaagagcttgtctgaagctgaaaaggcaccttatgtagctaaggcagaaaagcggaaggttgagtatgaaaagaacatgaaggcctac

SEQ ID NO: 222312 - DNA, 399 bp, Gossypium hirsutum
acgcgtccggcgtttgaacacttctgtatccattctggtggacgagcagtcatagatgaactgcaaaagaacctgcaactttcagcagagcacgtagaggcatcaaggatgacattgcataggtttggaaacacatcgtcttcatcgctgtggtacgagatgagctacattgaggcaaaggggaggatgaaaaaaggggacagggtttggcaaatagctttcggaagtggattcaagtgtaacagtgcagtatggaagtgcaacagaaccatcaaaacaccaaaagatggaccatgggcggattgcattcataggtacccagttcatatccctgaagttgtcaagctctaggctaaaagcaacaaacaaatatggttgattcatggctttgtcaaactc

SEQ ID NO: 222313 - DNA, 399 bp, Gossypium hirsutum
cgtccgaaggatgaaggttatgacggggcttctgcggacctctggtcgtgtggcgtgatgctctttgtgttgcttgcaggttacttgccttttgatgattccaatattatgaatctctataaaaagatttcagcagctgaattcacttgccccccttggctatcttttagtgcgatgaaattgataactcaaatcttggatccgaacccaattacccgcattaccattcccgaaattttgcaagacgaatggtttaagaaagattacaaacctcccatgtttgaggagaaagacgatacgaacttagatgacgtagaagctgtatttagggattctgaagagcaccatgttacggaaaagcgagaagagcaaccaacgcctatgaatgcattcgagtta

SEQ ID NO: 222314 - DNA, 410 bp, Gossypium hirsutum
  unsure (1)..(410): unsure at all n locations
aanntaccccacgccgtccgcttttgtataanctgtagcatatagtactagtaagcagtaatagcaatggcctcgtccatgatctcatcggcaaccattgccaccgtgaactgctcctccccggcacaggccaacatggtggcccccttcaccggcctcaagtctgcctctgctttcccagtcactaggaaggccaacaacgacatcacttctcttgcaagcaatggtgggagagtgcaatgcatgcaggtgtggcctcctcttgggaagaagaagttcgagacactctcatacctccccgatcttacacccgtacagttggctaaggaagtagattaccttcttcgctctaaatggattccttgcttggaattcgaattagaggagggattcgtgcaccgtaagtactc

SEQ ID NO: 222315 - DNA, 389 bp, Gossypium hirsutum
gaaggccaacattgaagagataagattatggtgaaaaactaaacataataaagtgcctcataacattcttcgacttgcttcattgattagcccaaagataaacataaccaaaaagaaaaatggcttctgcttccgctactctcctcaagtcttcacctattatcgacaagtccgagtggattaagggccaaaacctccgccacccttcggtttgttttgtacggtcacaccctacatcggccgcctttaccgtccgtgctagttcatatgccgatgagcttgttaagaccgcgaaaactgttgcatctccaggtcgtggtattttggccatggatgaatcaaatgctacatgtgggaagcggcttgcctcgattggtctcgagaatacc

SEQ ID NO: 222316 - DNA, 409 bp, Gossypium hirsutum
  unsure (1)..(409): unsure at all n locations
cgtgaatnatctcgttccccatcttacgttctctnngcttatcgcatcaaatcagccatgtgcgggggagaatatggttaggtgagccaaaggtaagaagactaccaacccttgggncctgctgtancgagacggagagcatgttnttcggtgttgcccacatttttgcatcttttaatgacactttcattcatgtgactgatttgtctggaagagagactatggttcgtattacaggtggtatgaaggtgaaagccgacagggatgaatcttcaccttatgctgctatgcttgcagcacaagatgtttcccagagatgcaaggaacttggaatcacggccctccacatcaaattacgtgccacaggaggtaacaaaaccaagacccctggtccgggtgctcagtcagc

SEQ ID NO: 222317 - DNA, 389 bp, Gossypium hirsutum
caatcctcttatcgtcctacttacaaatggctttaaccttagcttatccaccgtttctcaacgatagaaacgttgaatacatcaaatcttcatgcagcaccacaacatatcccaaattatgttaccggtccctctcagtctatgcgaccagcatcaacaccagccccaaattgttagtccacactgcactcaatgtaactcttagagccagcaaagcgacttcgaggttgatggtaaagatctcgagattccacggtttggaaccaagggtagcagccgccatggctgattgtatcgaggtgatcggggactcggtggatgagctgcaacagtcgttaggggaactcggtcacattagtcgctcgaacatttcactaacgatgagcgat

SEQ ID NO: 222318 - DNA, 400 bp, Gossypium hirsutum
ttcagggctaagaaagagaaaaaaaaaatggctttgcaaaaggcgaaggacatcgtatctaccaatgctgtcgtcgttttcagcaagtcctactgtccgttctgtgtggatgtgaagcaattgcttcaacaacttggagcttctttcaaggccattgagctcgacagagaaagtgatggatctgatattcaagcagctctggctgagtggaccggccagcggactgtgccaaacgttttcattggtgggaaacacattggtggctgtgattctacaatggccttgcacaaggaaggtaagctggttcctctgctaactgaagctggagctattacaaaatcatctgtttagaatagagttaagctgcttgtctcccctaaaattaataaacgaataccaa

SEQ ID NO: 222319 - DNA, 398 bp, Gossypium hirsutum
gcgtccgatcggttatgccgtttatcaaacgtcactaccggacattcaagcttacagatccggcgcccgagcattgccctcccggcgaattcgttagagaaatcccattgtcaactcaatccctgaagatgcccacatagaagcatatcacgatgggccaggatccgtgcttgagattatggttccgaaactacgaatggtgcccgaagaacacgaaatccgggtttgtcttcggcctaaacatgtggggaatgatctcatgttgacatgaattataaaagggtagttgctatggttggtgctgcattgtttttactgacttttgtaccatacaatgtaatctataaaaacaaaaatatgggtcctacattttatgtttttaccatttttgccccact

SEQ ID NO: 222320 - DNA, 398 bp, Gossypium hirsutum
cgcgtccggaggaagtgaaagagtagtttttcttttccagaaactcttcaccatggcgggtgacgtcgataatcgacagttcaggcgccttgaaccggctttgaacggtgtttttgccccgttgaagctcggtccaagtacccaaatccaccgccctgtcaaacatgttttcatcgaccatgaatatgatgactcttccagtgatgatgaaggaaatgagatcaacgggcattacaaagagttgattatcaagtccggtaacgagcttgaaccttccatcttggaccctagagatgaagcaacggccgataactgggtcgagcgtaacgcttccatggttcgtctcaccggcaaacaccctttcaactctgaacctcccttgaaccgccttatgcacc

SEQ ID NO: 222321 - DNA, 389 bp, Gossypium hirsutum
ccacgcgtccgcccacgcgtccgcccacgcgttcgttcaattcatgcaaacccaaacctccaccatgccctccaccttcttgccctaaggacacattgaagctcggtgtctgtgctgacgtgcttggacttgtcaacgtgattgttggaacccctccttccagcaaatgctgtgctttgcttcaaggattggctgatttggaagctgccctttgcctttgcactgccattaaagccaatgtacttggaatcaacctcaacatcccagtttctcttagtctaatccttagtgcatgtcagaaggaggttcctccaggcttcaaatgtgaataaaaaagatatattatcatgttgttggctaaagtttggtctaaagtactttcatttcta

SEQ ID NO: 222322 - DNA, 402 bp, Gossypium hirsutum
ccacgcgtccggtcgacggcttccatcaacggttgttgccttacctcctcttcttcctccagcaggcacctcctctttttccgctcgtcgacgacctacattgcggccttcggtcgtcgctagccttaactcttctccttctcctccgactcttatccaagaccgcccggttttcgctgcccctgttcctttgctcaccccgagagaagagatgggaaacaagtcctacgacgaagccattgaagctctcaagaaacttctcagtgagaaaggagaactgaaagctgaagcagctgcaagggtagatcaaataacagcagagttaaacacaacatcagctgacggcaaaccatctgactcttctgttgagagactgaaagaaggcttcgtttacttcaagaa

SEQ ID NO: 222323 - DNA, 367 bp, Gossypium hirsutum
tttccaaagcttccaaatggttttaaacaagactcttaggttaagccttcaggggcgtcgatccaagtcttttagctcctccaccttcacctctcctgcttcatcaccttcctctccttgtgaaagacccaaaaggcctcaccaagtggacgagatgaaacaagtgtttcgctatttcgatggcgatgatgatgggaaaatctcggctctcgaacttagggcatgcttcggctccatcggagagtacatgtcacatgaagatgctcaaatggtgatcaacgaactagattccgacggggatagcatgttggactatgaagatttcttggagctaatgaaaatagaaaagcgggatgatgatgatgat

SEQ ID NO: 222324 - DNA, 417 bp, Gossypium hirsutum
  unsure (1)..(417): unsure at all n locations
antcacgccacgtctgtccgtcccacgcgtccgcaanccccttctatctcctttttcactaangctctctctccccatgggccgcctccaagagaagacagagaggtctcctcacaaccaccgtaatgggtcgtgtcattcgagctcaacgtaagggtgccggttcggtcttcaaggcccataccaaccaccggaagggtcccgcccgtttccgcagcctcgacttcggtgaacggaacggttacctcaaaggtgtcgtcaccgacgtcattcacgaccctggccgtggcgctccgttagcccgcgtcgttttccgccaccctttccgttacaagaaacagaaggaattgttcgtcgccgccgagggtatgtacaccggacagttcgtgtattgtggtaagaaagctacccttatgg

SEQ ID NO: 222325 - DNA, 392 bp, Gossypium hirsutum
cccacgcgtccgctcttctctcatttctcatcaatattcaagcttctgctttgggctcctttgccgtcaaaaaaaataaacaaaaatgtttggcaaagactttttcaccgaatatggcgaagcaagtcaatatgaaataaaggaagtagtaggcacaggaagttatggtgtggttgcctctgcaattgatactcacactggagagaaggtagctattaagaagatagccaatatctttgagcacacatctgaagccacacgtattcttagagagatcaaacttctacggctgctgcgtcaccctgacatagttcagataaaacacataatgcttcctccatgtcaaagagaattcaaagacatatttgttgtttttgagttgatggaatctg

SEQ ID NO: 222326 - DNA, 388 bp, Gossypium hirsutum
cgcgtccgcccacgcgtccgtttggtcgtctgtagtaagaacgcctaaagattgatgctttgaagcgtgagcttcccctttgcatgcaacttctcactaatgctgtggaggcttcgaggcagcaactacatgcatgccgagcaaatcaaggatcaaggcctgttcttgaagaattcatacccctaaaaaattcaagctcagagaattcagacaaatcgcaaaacatatctgataaagcaaactggatgacgagtgcacagctatggagccaagcgggaaacgaaacgaaaccaccacaatcctcagttgcgtcccctaaagaagctgatattggtttcaatgttagtcccaagttggggttagataccaagcagagaaatggaggagc

SEQ ID NO: 222327 - DNA, 395 bp, Gossypium hirsutum
catctccctattctcaatggcaatggcaatccaagcctccctcttcactccatcaaccgtctgcaccccaaaatccggcgaccgcatcgccgccgtgttacggaaacaaccaccgttcctaaccgtccctagcttcaagtccccaaaaagcatcatcgccccacgcaccatcaaagcccaagcaaccgaagagaaagccgagacaaccgccacaaaggaagcaccagtcggtttcaccccaccagagctggacccaaacaccccatcaccgatcttcggcggcagcaccggcgggcttttacgcaaagcacaattggaagagttttacgtcatcacatgggagtcacccaaggaacaaatcttcgagatgccaacaggtggtgcagccatcatga

SEQ ID NO: 222328 - DNA, 367 bp, Gossypium hirsutum
ccacgcgtccggggatgctaaaaggtttaactttaagcattaaaatccacttcttttaggcgaagtgcagctttgtgtgtgtctatccaacgaaagcaagaagatgggtaaaggagggaaatctcacgaagaaaccaaaagtggagaagatgaaaacatggctgcttggcttgtgggtctcaacaccctcaagattcaaccattcaagctccctccactgggaccccatgatgccagagttaggatgaaggctgttggtatctgtggaagtgatgttcactacctaaagacaatgaggtgtgctgattttggggtgaaagaaccaatggtgattgggcttgagtgtgctggaatcataaaggaggtt

SEQ ID NO: 222329 - DNA, 396 bp, Gossypium hirsutum
ccacgcgtccgggaagagagacggttcaccaactgtacggcacaagagtagccatactggctggggacttcatgtttgctcagtcatcatggtaccttgcaaatcttgaaaaccttgaagtcattaagctcattagccaggttattaaggattttgcaagtggtgagattaagcaggcatcgagtttgtttgactgtgatgtcaaacttgaggactatttgctaaagagttattacaaaacagcttcattgattgcagctagtaccaagggagccgccattttcagtggagctgatcgtagtgtaacagagcaaatgtatgaatatggaaagaatcttggcctatcattccaagttgttgatgacatattggattttacacaatcagcagagcagc

SEQ ID NO: 222330 - DNA, 403 bp, Gossypium hirsutum
cccacgcgtccggctcagtaaggctcatcaaagtccattcactcccaatactttcataacatttcacgaacttcactctccagtctccaatggcggctgccgtctccaccatcggtgctgtcaaccgagcaccgttgagtttgaatggatcaggtgccggagcttctgctccaagctcagctttcatggggaacagcttgaagaaagtgagcgctaggttcaacaacaacggcaaggctccagtgggaagtttcatgattgtggctgccaaagaaatcgacgaagacacacagaccgaccaggaccgatggaagggtcttgcttatgatatctccgatgaccaacaagacattaccagagggaaaggtatggtcgactcattgttccaagctcccatgaacga

SEQ ID NO: 222331 - DNA, 355 bp, Gossypium hirsutum
attgttctcaaatatctcatacaatgaattaaattgaatcaatggctcaaaccgtgttgctcatgtctagccatgcagtgagcttgaagagagatcaccctttactccatttccaagctcaagggctcaagcctaaacctgtctctcatctcttcttcaatccattgtctaacggtgtccatacttcatccaaagctttcaccactttagctatctttaaatcaaagaccaaagcagctcccaagagggttgagccaaagtcaaagccaaaggttgaagatgggatctttggcacctctggagggattggttttaccaagcaaaatgagctctttgtgggacgtgttgccatgct

SEQ ID NO: 222332 - DNA, 358 bp, Gossypium hirsutum
ggacgttaaggttgcattggccgtttatattgttgctcttgcaggtctaaaggggactattacaggtgaaactcttagcgaccctgaccatcctattgtacttgaacgaatggacttccccgatcccgtgattaaggttgctattgaacctaagactaaagctgatgtcgataaaatggctaatggtttgatcaagcttgctcaagaagacccttctttccacttctcacgggatgaagagatcaaccagaccgtaattgaaggaatgggagaattacatctcgagattatcgttgatcgtttgaagagagagttcaaggtcgaagccaatgtcggtgcaccacatgttaattaccgg

SEQ ID NO: 222333 - DNA, 343 bp, Gossypium hirsutum
cccacgcgtccggcttgacattgatgtcctggttcatggagagcctgagagaaatgatatggttgagtactttggtgagcaattatctggttttgctttcactgttaacggatgggttcaatcttatgggtctcgctgcgtcctccccaccacaaccattggatccttccctcaaactttggagctcaggagagttcgtcgtgaatacaaggctaacaagatctcagaggatgattacgttaaagccattaaagaggaaattaagaaagttattgctgagcttaaggctgctggtgccttatgggttcagtttgatgaaccgacccttgtcttggatctcgac

SEQ ID NO: 222334 - DNA, 295 bp, Gossypium hirsutum
tacaaatgaaactctcacccaccctgaccattctattgtacttgaaccaatacacttccccgatcccataataaaagttattattgaacctaatactaaaacttatgtctataaaatagctaattttttgatcaaacttgctcaataagacccttctttccacttctcactgtatgaatagatcaaccataccgtaatttaattaattgtacaattacatttcgagattatctttcatcgtttcaagagagagttcaaggtcgaagccaatgtcggtgcaccacaagttaattac

SEQ ID NO: 222335 - DNA, 358 bp, Gossypium hirsutum
aaaaaatgatgcttggagaaactcatcgttcaaatccaaccgtccacgtaccaccttggcctgatcttgacgatgatcagacggatgtagtttactctcctatccattacaatgcaaccgacaacaacttgagcagtaacggcaacccgttttacctccatgaagcgttatcagctttacaacgttatttgccatcgaacggcccggatgttgagttggattccgagtttccgggtttggatagtccggattcaccggtcgatgcttattcctgtgaccatttcaggatgtacgagttcaaaatccggaggtgtgctcgtgggcggtctcatgactggaccgagtgtccgtacgccca

SEQ ID NO: 222336 - DNA, 356 bp, Gossypium hirsutum
  unsure (1)..(356): unsure at all n locations
cccacacgtccggcctttgctttattcaaggggcttatgtctttcccatgagggggaaacaactcaactgatttcatanacgattgggttaagattggaatccctgctaaggccaaggtgctagctgaacatggtggtgagcctttgggagtccaatgtacacactgcgagaaggaagcagtgaatgtatcccttggaaacctgctgagttatccatttgtgagagatggattggtgaagaaaaccctgggaatcaagggcggttactatgacttcgttaaaggaagtttcgagctatggagtcttcagttccaactttcaagctctctctctgtaaaagatgtggccaccatact

SEQ ID NO: 222337 - DNA, 358 bp, Gossypium hirsutum
cggaccgggcgggccgacgcgtccggccggccacccgttcaacaaatgtttactctatcgagacagtgtctaccccaggagagtgcgtttaggtaacgggtttccaacaaacggctccaaaaattcagactgccgagacaacctccctggagaaggcaagcgctgacactgccgatgatgtcaaatccaacatccatgacaagtgtggtatctcgactgaccaagaaggcgtgtaggaagtgactaacaaccggagggttgccgaacactgaatgactacaacatccagaatgagtataccctgcacctaggacgtgggctaaagggaggcatgcagatcttagcaacaacgctgact

SEQ ID NO: 222338 - DNA, 356 bp, Gossypium hirsutum
cccacgcatccgtccacgctttcgtcctctcgttctcccacacgtccgggcgtggttgctcatcattctcgggtaagacactcaagatctaccattacacccctcaaatccagcgaactggccgcgtttccatgatgaaaaccaccaagcctctttgttgttgtagcccatggcacggtcctaaccgcgttctgtacttgcaaccactttgcggtgagccaccatcttacttgaccggtgagttacctggtgactatagttagcacactgcttgactctgagctggtcccaagacctttgctaggaaccgtgagctctaaatcatgcactgcatatgggccatgttgggagctttt

SEQ ID NO: 222339 - DNA, 343 bp, Gossypium hirsutum
cccactcgtccgcccacacttacttttacgtctctctgttttactccacaaccgctgtgactaccattatggcttcagctactgtttctgtagccaaacccaaccttcagattcaggcaaaaggaaagggtgttggttttgcagatttctcatgcctacacaactcctctactagccttacctttgccaggaaaacctctgatgacttccattcactcgttgcttttcagacatctgctctatgaagcaataatggcgggtacaggaaatggatggcagaggcaaagctaaaggtggctataaatgggttttgtaggattggcaggaactttcttaagatgct

SEQ ID NO: 222340 - DNA, 364 bp, Gossypium hirsutum
cccactcgtccgctatcactaccattattgcttcggctactgtttctgtagccggacccaaccttcagattcaggcaaaaggaaagggtgttggttttgcagatttctcaggcctacacaactcctctactagccttccctttgccaggaaaacctctgatgacttccattcactcgttgcttttcagacatctgctctaggaagcaataatggcgggtacaggaaagggatggcagaggcaaagctaaaggtggctataaatgggtttggtaggattggcaggaatttcttaagatgctggcatggccgtaaggactccccacttgatgtcattgccatcaatgacactggtggtgttaagca

SEQ ID NO: 222341 - DNA, 346 bp, Gossypium hirsutum
ctctactatctttccttcttatagatactctctactacccagtataaaccgggagtcgtcatcctgaggtgaaatgggcacaaagaaccgataaggttttcattacggtgctattacctgattcaaagaatgcaaaagttaaccttgagccggaaggagtatttaatttctctgctactgctggaactgacaataacacatatgagttgaagttggatctttttgataaggtcaatgtggaggaaagcaaaattaatgtcggagttaggagcatattctgcatcttggagaaggctgaaaaagtgtggtggaaaaaattattgcgcggggatggcaaagcccccca

SEQ ID NO: 222342 - DNA, 228 bp, Gossypium hirsutum
cttttgtataactgtagcatatagttcttgtaagcagtaatagcaatggcctgctcgatgatctcatcggcaaccattgccaccgtgaactgctcctccccggcacaggccaacatggtggcccccttcaccggcctcaagtctgcctctgctttcccagtcactaggaaggccaacaacgacatcacttctcttgcaagcaagggtgggagagtgcaatgcatgcag

SEQ ID NO: 222343 - DNA, 215 bp, Gossypium hirsutum
gctatccatctctgcctcttttttttctctaattatagaggaaatccacgcgaggcgaagttgttcaaatcgcgggtgaaagtcaaccgaaactaaaatggcgcccacattcagcggcgatgaaactgctccgctctttggctgccttgcagccgatgctgctctcgttatctcctgtatgggagcggcgtacggtacggccaaaagcggggtct

SEQ ID NO: 222344 - DNA, 366 bp, Gossypium hirsutum
gtaagatatgtcccacccttgctgtttatttcattcaaaaagagtctaccctccacctggtgcttcgtctcaagggtggcatgcaaatatttgtcaaaactcttactggcaagacaatcacccttgaagtggaaagctccgacacaattgataatgtcaaggccaagatccaagacaaagaaggtatccctcctgaccaacagaggcttatctttgctggaaaacaattggaggatggccgcacccttgctgactacaacatccagaaagagtctaccctccaccttgtccttcgtcttaggggtggcatgcagatctttgtaaaaacgctcactggaaaaaccatcactttagaggtggagagtt

SEQ ID NO: 222345 - DNA, 356 bp, Gossypium hirsutum
gatagccaacaagttcacagtgagtctaaccaattgggaccgcggctcagagtcaagatgacgggaaagactacactgaaccaccaccggctccatttttcgagcctggcgagttaacctcatggtctttttatagggctgggattgccgagtttgtggcgactttccttttcttgtatatcactattttgactgttatgggagttgttaaggaaaaaactaagtgcccaactgttgggattcaaggaattgcttgggcttttggtggtatgatctttgctcttgtttactgcactgctggcatttcaggtggccatatcaacccggcagtgacttttggactgttcttggcgagg

SEQ ID NO: 222346 - DNA, 359 bp, Gossypium hirsutum
cccacgcgtccgatcctcaactgttttttgtgattaaaaaaaacgaccaagagggtggcaaaacaagatggcttccctgcatgaaccatggctagtggagaacgggttgaagggatctagcaaggagattcgccatggcaggactgcacacaacatgtcgtcttcgtcattgcggaaaaaatcggacctgacgctagtttccaaggttcggtatgcaatgcttaggcagttcctcgccaatcttcaagaggtcatattagggaccaagctctccgttctcttccctgctattccattggccattgttgctgagtgttatggatttggaagaccctgggtgtttgcattaagtttacttg

SEQ ID NO: 222347 - DNA, 361 bp, Gossypium hirsutum
acaccacccaaaacagaaagaaatttattctcggagaaactcatcgttttaatgcagcagtccacgttccaccttggcccagctttgatgatgatcaaattgctgaggttcactctcctctcaactacaatgcaccctgcaaccacttcaacaacaacagtaacccgttttacttgcaggaagcgttaggaatgctacgacgttacttgccatcaaacgaactggatatcgagtcagactctgagctttcgttccacccggattctccggttgatgcttgctcttgtgatcatttccggatgtttgagttcaaagtacggagatgtggacgtggccgtgcgcatgactggactgactgtcc

SEQ ID NO: 222348 - DNA, 363 bp, Gossypium hirsutum
caacagcctaagctacatgcattatgtaaatccaagggagttcatttaactgggtactcaccgctgggctctccaggcacaggtttcgtgaagaaagaagttttaaagaatccagttgtgaatatggtagcagagaaattgggcaagtcccctgctcaagttgcccttcgttgggggctgcaaaagggtcatagtgttttgcctaagagtacaaatgaagtgaggatcaaacaaaactttgatgttttcgattggtccatacccgaagacttgttggctaagtttgctgaaatagagcaggagaggctgatcaaaggctccgttttcgtacacgaaacattgggtgcatatagaagcattgac

SEQ ID NO: 222349 - DNA, 352 bp, Gossypium hirsutum
ctcaaattcacattacaattttactgttgttgacttcactcactctctgagccggggctgtagccatctgcaccgcctccaccactgccgcctccaaccgagctctgggagtgacactcccaacctcagcttccatggcgaagaaacgcagctcgagattcaacaacaccaggcatgttccttcgggaagtttcaaggtgatggcgtccgaaaaagatatagacgaagagacacagaccgaaaaggaccgatggaaagggtggccttactatatttcggtcgaccaacaagacattactcgagggaaagggatggtggattccttgttccaagctcccatgaatgatttaac

SEQ ID NO: 222350 - DNA, 362 bp, Gossypium hirsutum
aattaataaaatcttgatatagtttctcttcttttgcttctcttatactgagtgccaagcaaaacccctttttgtttttcgtctgattcagctaaggtcttctttgggtagtttgagatttgagttattcatcatactatggcttctcaaccttctaagggatcagttcatgatttcactgttaaggatgcaagagggaatgatgttgatttaagtatttacaagggcaaggttttgttgattgtcaatgttgcatcacaatgtggcttgaccaattccaactacactgagctgagtaaattgtatgagcaatataaagatcaaggttttgagattcttgcattcccatgtaaccagtttgg

SEQ ID NO: 222351 - DNA, 369 bp, Gossypium hirsutum
  unsure (1)..(369): unsure at all n locations
aagggcccgcccacgcgtccgcccacgcgtccggacatggctgcttttttagctgcagnctcttttccttctacgaaggccacctctctccctgctagaacctctattgtctctcctgataggatcaccttcaagaaggtgcctgtttactacagagatgtttgcagtggggggagagtggtttctgtcagggcccaggttacaactgaagctcctgccaaagttgtaaaggaatccaagaaaaatgatgaaggtgttgtggttaacaagttcaggcctatcaacccttacattggtagatgccttctaaacactaagatcactggcgatgatgctcctggagagacttggcacatggtcttcaacacc

SEQ ID NO: 222352 - DNA, 358 bp, Gossypium hirsutum
ctcaaattcagataacaatttcactgttgttttcttcactctctctctcagccggggctgcagccatctccaccgtcgccgccgctgccgccgccaaccgagctctgggagtgtcagtcccaacctcagctttcatggggaagaaagtgagctcgagattcaacaacaccaggcaggttccttcgggaagttttaaggtgatggcggccgaaaaagagatagacgaagagacacagaccgaaaaggaccgatggaaagggttggcttacgatatttcggacgaccaacaagacattactcgagggaaagggatggtggattccttgttccaagctcccatgaatgatggaactcacta

SEQ ID NO: 222353 - DNA, 361 bp, Gossypium hirsutum
tttcagttttaatccaaaattcattttcctcaatcctgaaaatgccactctcagagcccagttccatctcaagccctttccttctcaaaatctcttgtttccccaattccccttttcctttacactaaactttcaaccctctccctccacaactcagccccaccacccaacaccataatccgcatggggggtggccccagaacttacccaggtggagtctcgaaatggcaatggaaacgcatgcaagccaagaaagccaagcagctactcaaaactcgacttgcccgtgaacgtcacatctatgaaatgcgcaaaagggccgagctcaaagccgccgtatctgaacttgaacgcccttggg

SEQ ID NO: 222354 - DNA, 363 bp, Gossypium hirsutum
cccacgcgtccgtttttttttttttttgtcaagaacaaagtggagattttatagcagaaaaatagaggatgcaaatccacttaaaacacaaaaggaaaacaacattcaattaagacacaaaggggggatttcctttgtttgtgcccaatatagatttttttcttcccttagagcttaatttcccatttagaaagctcctctcttgatagcatcgtcattagcatttccaagggcagcttcactcaaatatttgtcagccaattgaaccctcttcacattctcttgctcagcaacaagcatgtatccatattccaacagcttctcaatggtcatcttcggttgctcgaaagatggtggcccttc

SEQ ID NO: 222355 - DNA, 362 bp, Gossypium hirsutum
ctacgatcataatggtgtcgttttttgtttctgcaaatgcaaagggttttgcggaattctcaggtctgcgcaactcagctagccttacctttgccaggaaaacctcggatgactttcaatcagtcattgctttccagacatctgctttgggaatcaataatggtggataccggaaaggcgtagtagaggcaaagctaaaggtcgctattaatgggtttggtaggattggcaggaacttcttaagatgctggcatggccgtaaggactccccacttgatgtcattgcaatcaatgacactggtggtgttaagcaggcttctcaccttctcaagtatgactctacccttgggatatttgaagcc

SEQ ID NO: 222356 - DNA, 343 bp, Gossypium hirsutum
gctcatcacaataatcacctttaatgttttatgaatatgatgcatagagagggggaggtttactacttcgcttcgaggtacgatcctgttcgccacgctgagaagcaccctattcctagcaccgcttacagtggcaaacgagtgatgtgcgttatcagtaaggagaacaactttaagcagcctgaggaacgataccggtccttttcagctgacaggcaagaacggtttattaatccctggattgatgcattgtctgatccaagggacacacaactgatccgcagcatatggatctcatacttggctcaggctgacaaatcttcgcgtcaaaagattgcttctc

SEQ ID NO: 222357 - DNA, 359 bp, Gossypium hirsutum
caaagaaaggccttaccacaagctttttttagacaaaggcggctgccactgcgagctgggatttgcctaagctttctacgttaacttactccttgaaatcttccatacccatttacaaatccaggctttccttcttcacaacccctcaaaagcccaccccttaccgctccttggacgtttcctgctctctttctcatgcaagctgtaaccccagatccgtcgacacatacggtaccccaaaaaatgctacttcccatgatttcatttccaggtatgctgatgatgagccccggcaaggcgctgatattctggtggaagccctggatcgtgaaggggtcaaggatgtgtttgcctaccca

SEQ ID NO: 222358 - DNA, 267 bp, Gossypium hirsutum
catagacaggccttaccacaagctttttatatacaagggcaggcgccactgcgagactggggttttgcccagcgtttttccttaacttacacctttaaaacttccatacccatatacaaaaaggggctttttttcttcacaaacccgtaaaaagccacccctgacccctccatggacaattcctgctctttttttcaagcgggctgttagcccagatcctccgccacatccggggcccccaaaaatggtccttcccaagatttcatt

SEQ ID NO: 222359 - DNA, 379 bp, Gossypium hirsutum
cccacgcgtccgccggtaacgagcttgaaccttccatcttggaccctagagatgaagcaacggccgataactgggtcgagcgtaacgcttccatggttcgtctcaccggcaaacaccctttcaactctgaacctcccttgaaccgcctcatgcaccatggtttcatcactcctgttcctcttcactacgttcgtaaccatggtcaagtccctaaagcttcttgggatgactggaccgttgaagtcgccggtttagttaaaagaccggtgaagttaaccatggatcaactgtttaacgagttccaaagccgtgagttcccggttaccctggtttgtgctgggaatcgacgtaaagaacaaaacatgatcaaacaaaccat

SEQ ID NO: 222360 - DNA, 382 bp, Gossypium hirsutum
caacgacattacttctctcgcaagcaatggcggcagagtgcaatgcatgcaggtgtggcctcctactggaaagaagaagttcgagactctctcatacctccccgatcttacacccgtgcagttggctaaggaagtggattaccttcttcgctcaaaatgggttccttgcttggaattcgaattagaggagggattcgtgcaccgtaaatactcgagcctacccacgtactacgatggacgctactggaccatgtggaagctgcctatgttcgggtgcaccgactcggctcaggtattgaaggagcttgaggaatgcaagaaggaataccccaatgcattcattagaatcattggcttcgacaacgtgcgtcaagtgcagtgc

SEQ ID NO: 222361 - DNA, 400 bp, Gossypium hirsutum
ctttaatcatcttattttggtataccctcttcttttttttttttttctcagttcctcttcttgcaaagatggcagcatcgtcagcatgcttgctaggaaacggtctgtctactcacagaactaaatcgaagttgagtaaagacttttatgggaggaatattgtatttacccccgccatttcatcgttgggtcggaaatcgaatgccgtacttgtaaaggcatctttaaaacttaaacaacatgaaggaagaaggggattcttgaagtcattactcggaactgctggaattggagttccggctttactaggaaatggtaaagcgtatgctgatgaacaaggggtttcttcctcgagaatgtcgtattctaggtttttggagtatttggacaaggacagggt

SEQ ID NO: 222362 - DNA, 364 bp, Gossypium hirsutum
cctgaagtaaaccctattggtgcacgagctgtgaggctttaccttcgtgaagttggtgatttgcagtcaaaggcaagacggattagttatgagaagaagaagcgtaagcgaccaccaactcaacagatcccgactctaccaatgccgccgccaccaccaccaggtgcaagtttaactataaaaagaagcgtaagcgaccaccagcttaacagatcccgactctaccattgccgccaccaccaccaccaggtgcaagttaaactatatatatgcatcaccaaaacaaaacaaaacaaaaccccatatgcaagctagcatttcactctatttaatactacatatatgggataattttctgtacttt

SEQ ID NO: 222363 - DNA, 329 bp, Gossypium hirsutum; identical to SEQ ID NO: 198233

SEQ ID NO: 222364 - DNA, 377 bp, Gossypium hirsutum
cggacgcgtgggttgggttgcaatggcacaagcaatggcatcgatgactggtttacgtggctcttcacaagctgcgttggaaggtagtctccaactcagcggccaaactcggttgaacgttgctagcaccaacaggttggctgtggctagacccggttttaccgttagagctcaacaggtccctgccgagcctgaaactggacgcagagctgtgctgggtcttgttgctgctggtttggctactggctcctttgttcaagctgtgcttgctgatgcacgaagcatcaaggttggcccgccttcaccgccctccggtggattgcccggaactttgaattccgatgagccaagagaccttgatctgccgtacaaagatc

SEQ ID NO: 222365 - DNA, 384 bp, Gossypium hirsutum
cccacgcgtccggaaaaagcaaaaccatggcctctgcttctctcctcaagacttcaccagttttagacaagtctgagtgggttaagggtcacacccttcgccaaccttccacttctgtggtgaggtgccaccctgttgcaccctccggactaactgtgcgtgcaagctcatatgccgatgagcttgtcaagactgctaaagctattgcttctcctggccgtggaattttggccatggatgagtccaacgctacctgtgggaaacgtttggcctcaatcgggctagaaaacacggaggctaaccgccaagcctacaggacgttgcttgtttcagctcctggccttggtcagtacatctcaggtgccatcctctttgaggaaaccc

SEQ ID NO: 222366 - DNA, 374 bp, Gossypium hirsutum
cccacgcgtccgcccacgcgtccgtcacaaccactatcactaccattatggcttcggctactgtttctgtagccaaacccaaccttcagattcaggcaaaaggaaagggtgttggttttgcagatttctcaggcctacacaactcctctactagccttccctttgccaggaaaacctctgatgacttccattcactcgttgcttttcagacatctgctctaggaagcaataatggcgggtacaggaaagggatggcagaggcaaagctaaaggtggctataaatgggtttggtaggattgtcaggaacttcttaaggtgctggcatggccgtaaagactccccacttgatgtcattgccatcaatgacactggt

SEQ ID NO: 222367 - DNA, 374 bp, Gossypium hirsutum
cttgaactctcatggcttcaagtgctgcaacccttccatctaaaatgaaagcatggacttaccctgagtacggaaaatcatctgatgttctgaaactacaatccgatgttgttgttccccaacccagggatgatcaagttcttctccaagtcgtagctgctgggattaaccccattgatttcaaaagaatgcttggaatgttcaaaaacattgattcccctttacccatcattccagggtatgatgtagcaggcgtggtggtgaaagtggggagccaagttaagaaattcaaggaaggggatcaggtgtatggagatataaatgaaaaggccgtggatcacccaacacaatttggcactatagctgaattcact

SEQ ID NO: 222368 - DNA, 383 bp, Gossypium hirsutum
cgaaaacccattttcctcccatggccgccaccaacacattgatgagctgtggcgtcgcggccgctttcccttcagtgctttcctcttcaaagtccaagttctccaccgctacgccgttgcctagctttggcgccaatgttggtcaccgtgttagcatgtcggctgactggatgcctggtcagcctaggcctccttatcttgatggttcagcacctggtgactttggatttgatccacttagacttggtgaggtgccggagaaccttgagagatacaaggaatctgagttgattcactgcagatgggctatgcttgctgttcctggtatattggtgccagaggcattggggtatggaaactgggtaaaggcacaagaatgggca

SEQ ID NO: 222369 - DNA, 385 bp, Gossypium hirsutum
  unsure (1)..(385): unsure at all n locations
cccacgcgtncgnccacgcgtncgatcactcccaatactttcataacatttcacgaacttcactctccagtctccaatggcggctgccgtctccaccatcggtgctgtcaaccgagcaccgttgagtttgaatggatcaggtgccggagcttctgctccaagctcagctttcatggggaacagcttgaagaaagtgagcgctaggttcaacaacaacggcaaggctccagtgggaagtttcatgattgtggctgccaaagaaatcgacgaagacacacagaccgaccaggaccgatggaagggtcttgcttatgatatctccgatgaccaacaagacattaccagagggaaaggtatggtcgactcattgttccaagctcccatg

SEQ ID NO: 222370 - DNA, 378 bp, Gossypium hirsutum
cccacgcgtccgcccacgcgtccgtttgaattgaaaccctcaaaattccactaaaaaatggcctccacagcttccctctccaccgccgtagccaccacctctttcctccgcggccatccggcgccgaaaaccctaaactcccttcctttcaaccaatctcttttcgggctaaaaccccaacgaaatggccgtctcaccatggcagcatacaaggtgacactgttaacacccgaaggaccccaagaattcgtgtgccccgacgacgtatacatcgttgaccaagctgaggaagaaggcattgatcttccgttctcgtgtagggctgggtcttgttcttcgtgtgccggagtgattaagcaaggctccgtcgatcaatcc

SEQ ID NO: 222371 - DNA, 380 bp, Gossypium hirsutum
gcagcaaccaatagactgctgctgacaagatttcctgatccacaacatcttctgatttccattataaccccttcctctcctccaaaccaaaatagactacaataaccatcggcaaacaaaccaagtcaacctaaagccttaggcaccatggcaacctctgctatccaacaatctgctttcgttggccagaccgctttgaagcagtccaatgagctcttacgcaaagtcggagctttcgatggtggtcgtgttaccatgcgcagaactgtgaaaagtgcccctaccagcatctggtacggccctgaccgcccaaagtacttgggtccattctcagaccaaatcccatcatacctgacaggtgaattccctggtgactatgg

SEQ ID NO: 222372 - DNA, 381 bp, Gossypium hirsutum
ttttaaagacacaaaatcccagatgggtttcggttgcaaaacactgttgtgtttgtttttcacagttgtggttgtgttattgcaagaagcaagtgcaaggcagcagcaatattattacaatgtgagtgggttaagaaaccgaaagcaagtgagtggatgtaatttgtttcaaggccaatgggtgtttgatccttcttatccttactatgattcctcgggatgtcccttcatagatgctgaatttgattgccttaaatatggcagaccagacaaacagtaccttaagtactcttggaaacctgacggctgtaacttgccaagatttgatggggcgagttttctggcaaaatggaggggaaagaaaataatgtttgtaggtga

SEQ ID NO: 222373 - DNA, 375 bp, Gossypium hirsutum
ccgctgttccggctcctgcatgaaaaccgtaaaaggacttatttcacctttgctgttcacttcgtacccatgattattccggagaagaaccgtatagaaatctgcaaatactttttccaagagggagtttgccatgcaaagaaagattacaatcttgcaaaacacccggagatcggtttgccgaatttgcaggtgattaagctgatgcaaagcttcaagtccaaggaatatgtccgcgagacatttgcttggatgcactattactggtaccttactaatgatgggattgagtttctaagaacttacctcaatcttccatcagaaattgtgcctgctactttgaagaaatcaacaaaaccccctggtaggctaggc

SEQ ID NO: 222374 - DNA, 379 bp, Gossypium hirsutum
agagtttctctcatcatcctctcaaaaccgaaactcgggaatttcaactcatctgccactttgactagcggttcacttcactgagtcaactaaaagttatggcgttacctactcatcagttacagagattccttgcaatcgagttcaatttcatctccaatcccaaaatcgcttacaggaaccaactaaccgcaacaacggcagtaagatctagtccaagaagcccctgccgttgctccgcgattgcaataaacgctccttcttcgctaacggatgtttccgggatccgttgggggtcgacgagtgtgcagggcaggcgcgaagagatggaggatgatttagttatacgatcggacggtcttgatggattctcgttcgc

SEQ ID NO: 222375 - DNA, 383 bp, Gossypium hirsutum
atacactactagtacccactactagcaatggcttcctcaatgatctcatcggctaccagtgccactgcctctccggcacaggctaacatggtcacccctttcaccggcctcaagtctgcctctgctttcccagtcaccaggaaggccaacaacgacattacttctctcgcaagcaatggcggcagagtgcaatgcatgcaggtgtggcctcctactggaaagaagaagttcgagactctctcatacctccccgatcttacacccgtgcagttggctaaggaagtagattaccttcttcgctcaaaatgggttccttgcttggagttcgaattggaggagggattcgtgcaccgtaagtactcgagcttacccacgtactacga

SEQ ID NO: 222376 - DNA, 384 bp, Gossypium hirsutum
atttttattccaccgaatcgaacatggccatatgagttgataccatcactatgtatagaaagatatcgtgtgtgaacctataggtcaatctatttatctgtatatatagatagatgaaatgcataatctagcatgcctatttgtgaacgtgaaataaaaaaatcaccctcgaccccatgtccgaataaaagcggttggttaaagggttggaaataagtcatatagaatcaatcgattcatggtaaaatccctctaccttgcattttattaattttttttggtcaatatcatagagggatcaaatggtatagttcttttgttggtagcttggaggattagaaacatgactattgctttccaattggctgtttttgcattaattgc

SEQ ID NO: 222377 - DNA, 388 bp, Gossypium hirsutum
cccacgcgtccgatttttcgtccttttcaaccatggtggattctcaagaatacagtctgtctcttccttatctggtgcataaccatcctctttctccgagccatccttagcaactcacgagggaaaaaaccccatcttccacccaccccacgtgcccttccagttattggacacatgcacctccttggccccatacctcaccaagctcttaacaaactttcagaccgctttggacctttggtctacttctacatcggatcaaagccttgtctgcttgtgtcttcccaagaaaccgctaaagaagtatttaaaaaccatgaaactactttcttaaaccgcccaaaaatggccaatcttgattaccttacatatggtactgctgatatgg

SEQ ID NO: 222378 - DNA, 379 bp, Gossypium hirsutum
gaaatgaaaaaaaagggaatatagatggaaaaaggggggagaggttggacttagggtaaaaaaaaatcgatatgctaaaataaaatatgaaatgaaattgaaacaaggctaatgagatagaaataaggaatcataaatagagttcgggttcgaattccatagataatatggatggtgttgcctataatgatggacaaatgaaagactctcccaaaatttttatttatccacttcctattttgaaaataggttggttgaacttaaaaattccttcattgaataaggaaacaatccaattgcatgcacttgaattggatgggaccaacgaaatcgagcgctaacccccatttcttattgaattaaccgatcaaccttctgt

SEQ ID NO: 222379 - DNA, 382 bp, Gossypium hirsutum
cccacgcgtccgtaaatacccaagtatctataaatttaaatatataaattaatgagcaccaatctatggctcaactagggtcgtctctgtcagcagaaaccgagacactgagcaatgtcctaagcctggtggaggccttcagagcatttgattcagacaacgatggcgcaatcaatgctgcagagctagggggaatcctgagttcgctggggtacaacgctagcgagcaagacgtgagggccatgatgcgagaaggggacaccaacaaggacggattgctgagcatggaagagttcctagagatgaacaccaaggacatggagcttggggagcttgccaatttcctcaggaccgctttccaagcttttgaagtcgaagggga

SEQ ID NO: 222380 - DNA, 398 bp, Gossypium hirsutum
caaaaaccccctcaattcccccacctcattgtaggcaaaatggcctctgtttgtgcttcttctgccattgcagccgttgccatctcatcccccagttcccagaggagtggatcagtagtgaggacaacaaaggcttctttccttacagggaagaaacttcgatcagtcaaaaagtacacaaaaccagcagcagcccgaacagttccggtgtgtgcagtggctgaccccgaccgacctctttggttcccaggcagtactcctcctccatggctcgatggcagcctccctggagacttcggttttgatcctctaggccttggatcagaccctgagaccttgagatggaacgtacaggcagagctcgtccattgcagatgggcaatgttaggagccgctgg

SEQ ID NO: 222381 - DNA, 381 bp, Gossypium hirsutum
cccacgcgtccgcccacgcgtccgcccacgcgtccgacggctttggtctccggggtctgcctcacttccaactccacctctccttctaactcactccggcaacccacattgcggcggccgtctatcgtcgccaacctcaactcttccacttctcctcctactctcattcgaaatcaacccgttttcgcagcacctactcctttgctcactccttccaattggaaagaaaacatgggagaccagtcatacgaggaagccattgaagctctcaagaaactgctcaatgagaaaggagaattgaagagtgcagcgacggcaaaggtagagcaagtgacagctgagttgaagactgctgcttcttccgatgagtctgttgaccgc

SEQ ID NO: 222382 - DNA, 379 bp, Gossypium hirsutum
ctactctgctctgctctcttctacttattcaatctaaaacctctgtcatctggccgggtctctgttttactccacaaccactatcactaccattatggcttcggctactgtttctgtagccaaacccaaccttcagattcaggcaaaaggaaagggtgttggttttgcagatttctcaggcctacacaactcctctactagccttccctttgccaggaaaacctctgatgacttccattcactcgttgcttttcagacatctgctctaggaagcaataatggcgggtacaggaaagggatggcagaggcaaagctaaaggtggctataaatgggtttggtaggattggcaggaatttcttaagatgctggcatggccgt

SEQ ID NO: 222383 - DNA, 384 bp, Gossypium hirsutum
cccacgcgtccgaaaatcagttgcttaacaatggcctctacaaccatggctctttcttgcccatcattcgccggtaaggcagtgaagttctccccttccacccctgaaatccggggaactggccgtgtttccatgaggaaaaccaccaagcctgttccttctggtagcccatggtacggtcctgaccgagttttgtacttgggtccactttccggtgagccaccatcttacttgaccggtgagttccctggtgactatggttgggacactgctggactctcagctgatcccgagacctttgctaggaaccgtgagctcgaagtcattcactgcagatgggccatgttgggagctcttgggtgtgttttccctgagcctgtggct

SEQ ID NO: 222384 - DNA, 384 bp, Gossypium hirsutum
atttccataactggttaaattcctttaatgcactgggctccatagtcttggaacccagggacagaagactcttttagcatttcaccgcaaagatggagataacaaatgtgagcgagtatcaagaaattgcgaagcaaaagttgccaaagatggtgtatgactactacgcatctggtgctgaggaccaatggacattgcatgagaatagatttgctttcaccaagatactgtttcgtcctcgtattctcattgatgtaaacaagatagacatgaccacaactgtgttgggtttcaagatatcaatgcctatcatgattgccccaactgccatgcaaaaaatggctcatcctgaaggggagtatgcaacagctagggctgcatctg

SEQ ID NO: 222385 - DNA, 384 bp, Gossypium hirsutum
gaacgccacactcatgaacatcgctgataaccccaccaacgttcagctccccggtatggacaacaaggaagagaaccctcgtgttccgatcatcgtcaccggtaacgatttctcgacgctgtacgcgcctctcatccgtgacggtcgtatggagaagttttactgggcacccaccagggaagataggatcggtgtttgcacaggtattttcaggaccgacaatgttcccgttgatgaccttgttaagcttgttgacaccttcccgggccaatccattgactttttcggtgctctgagggccagagtttacgatgacgaagtgaggaaatggatcggagaggtcggagtcaatggtgtcgggaaaaagctcgtgaactcgaggga

SEQ ID NO: 222386 - DNA, 376 bp, Gossypium hirsutum
cccacgcgtccggttagctatagcatacactactagtacccactactagcaatggcttcctcaatgatctcatcggctaccattgccactgcctctccggcacaggctaacatggtcgctcctttcaccggcctcaagtctgcctctgctttcccagtcatcaggaaggccaacaacgacattacttctctcgcaagcaatggcggcagagtgcaatgcatgcaggtgtggcctcctactggaaagaagaagttcgagactctctcatacctccccgatcttacacccgtgcagttggctaaggaagtagattaccttcttcgctcaaaatgggttccttgcttggaattcgaattagaggagggattcgtgcacc

SEQ ID NO: 222387 - DNA, 382 bp, Gossypium hirsutum
caaaagttaaaaaaccttctgttttgttagcgtagcaaatagcaatacaaccatggctttggctcccaccacttatccctcctatctctgctctaacacttgctcacccttacacagagccactcaacctctcctttcttcaaccaggcatgtaggagttagatttaacagcaagtgttcagcgtctttctgcagtggcaaggagcagctaaagccatggattttggtagcgaaagcatcggaaggtgagtcccaaaccacagagcaggaagagcagcagtacgaggagtatgaggtagagattgagcagccttatgggctcaaattcagaaaaggcagagatggtgggacttacattgatgctattcagcctggtggagct

SEQ ID NO: 222388 - DNA, 385 bp, Gossypium hirsutum
  unsure (1)..(385): unsure at all n locations
cccacgcgttcgcccacgcgtncgtccacgcgtncgaaatcagttgcttcacaatggccgctacaaccatggctctttcttccccatcattcgccggtaaggcagtgaagttctccccttccacccctgaaatccggggaactggccgtgtttccatgaggaaaaccaccaagcctgttccttctggtagcccatggtacggtcctgaccgagttttgtacttgggtccactttccggtgagccaccatcttacttgaccggtgagttccctggtgactatggttgggacactgctggactctcagctgatcccgagacctttgctaggaaccgtgagctcgaagtcattcactgcagatgggccatgttgggagctcttgggtg

SEQ ID NO: 222389 - DNA, 380 bp, Gossypium hirsutum
agcagccaacatggcctcattagcagcctccaccgctgccgcctcccttggcgtctctgaaatgctcggtaaccctctgaatttcagtggtggagctaggtcatcggctccaacaccatccaactcatccattttcaagaccgttgctcttttctccaagaagaaggccgctcctccaaagcccaaggctgctgctgtcgccccggccgatgaagagctggctaagtggtacggtccggacagaaggattttcttgcctgaaggtctgttagacagatcggagatcccagagtacttgaacggagaagttcccggagactatggatacgatccgtttggtctgagcaagaagccagaagactttgcaaaatatcaagcat

SEQ ID NO: 222390 - DNA, 377 bp, Gossypium hirsutum
aaattcttgaagccatcagttgctggtttccttttacagaaggaactagactaccttgttggtgctgtttcaagccccaaaaggccttttgctgccattgtgggtggctcaaaggtctcttccaagattggagtcattgaatcactccttgagaaatgtgacattctccttcttggtggtggtatgattttcacattttacaaggcacaaggcctatcagtcggttcatccctggtagaggaggataagcttgaacttgcaacatcacttcttgtaaaggccaaggcaaaaggagtgtctcttttgttacccactgatgtggttatcgctgacaagtttgcccctgacgcaaacagcaagattgtgccggcatctgc

SEQ ID NO: 222391 - DNA, 378 bp, Gossypium hirsutum
ctcaaattcagataacaatttcacagttgttttcttcactctctctctcagccatggctgcagccatctgcaccgtcgccgccgctgccgccgccaaccgagctctgggagtgtcagtcccaacctcagctttcatggggaagaaagtgagctcgagattcaacaacaccaggcaggttccttcgggaagttttaaggtgatggcggccgaaaaagagatagacgaagagacacagaccgaaaaggaccgatggaaagggttggcttacgatatttcggacgaccaacaagacattactcgagggaaagggatggtggattccttgttccaagctcccatgaatgatggaactcactatgctgtcatgagttcctatg

SEQ ID NO: 222392 - DNA, 383 bp, Gossypium hirsutum
cccacgcgtccgagagtagagcatatgcatagagcagcactgaccaacaaatgcttatgcttttaaatactccatacgctctctccctttctcgctcattagcctcttcctctttcccttctcctcccacgcgccgccttctttccatttcttccacttttgcccttcctccccctcgattcccccattcctccctcgtttcctcgagggtatccccgtcttttcgcacccaagcttcagccgccaccgcgaccatgggtgacgctcccgacgttggtatggacgctgtccaaagacgcctcatgtttgaggatgaatgtattttagtggacgagagtgataatgttgttggccatgaatcgaagtacaactgtcatttgtgg

SEQ ID NO: 222393 - DNA, 384 bp, Gossypium hirsutum
tttatctccttcaattgtttgtttttgggttagaaagctctgtttttttattaccctgttcatcaaaaagcttcaatctttcaaccatgttgcttaaagcttcccctgctttttctttgttgaagaatccccaagttgaaactcgggttcctctgttttcaagaaacggttctggggttgggtctggggctgttgttgtttgtgctaccaaaggagccaataataagccattaacaggtgtgatttttgagccttttgaggaagttaagaaggaacttaatcttgtcccaactgtgcctcaaatgtccttggctcgtcaaaagtttgctgatgagtgtgaagctgccatcaacgaacaaatcaatgtggagtacaatgtttcat

SEQ ID NO: 222394 - DNA, 72 bp, Gossypium hirsutum
atcgggtaaagccaatgattagagtcatctggggcgcaacgccctcgacctattctcgaactttaaataggt

SEQ ID NO: 222395 - DNA, 383 bp, Gossypium hirsutum
  unsure (1)..(383): unsure at all n locations
cccacgcgtncggttcctggtgatggacgcacaatcacccaatcttgacattgtggcagccgtgaagctgccccgtagggttccctacggttttcatggactatttgtgagggaaagtgatctaaataagctgtagaagtagattcacttcctctcggtcgggttcaggtggatgatcattcattaaacacatataatagcagtgaataccatagcagatgaaagttacaaggcgtttacaacatattgtataaacatatagtattttgttacagatgattgaagtcccaatatcataatcattgcatgtaatccttgtatctacattttacctttataaaataaccaattatataatccagtgaattatttatcggtcaaaa

SEQ ID NO: 222396 - DNA, 441 bp, Gossypium hirsutum
  unsure (1)..(441): unsure at all n locations
aacggaccgggtcgagcccgacgcgatccggagacctcattttgtataacctgtagctatatatgtacctagtannagcagtaatagcaatgggccgtcctccatgatnctcatcnggcaacccattnngccaccgttgaacctgcnntcctccccggcacaaggccaacatngtgtggcccccttcaaccggcctcaagtncttgcctctgtctttctccagtcacttaggaagggccaaccaacgacatcancttctcttgcaagcaatggtgggagagtgcaatgcatgcaggtgtggcctcctcttgggaagaagaagttcgagacactctcatacctccccgatcttacacccgtacagttggctaaggaagtagattaccttcttcgctctaaatggattccttgcttggaattcgaattagaggagggattcgt

SEQ ID NO: 222397 - DNA, 383 bp, Gossypium hirsutum
cccacgcgtccgcccacgcgtccgctcaaattcagataacaatttcacaggtgggttcttcactctctctctcagccatggctgcagccatctccaccgtcgccgccgctgccgccgccaaccgagctctgggagtgtcagtcccaacctcagctttcatggggaagaaagtgagctcgagattcaacaacaccaggcaggttccttcgggaagttttaaggtgatggcggccgaaaaagagatagacgaagagacacagaccgaaaaggaccgatggaaagggttggcttacgatatttcggacgaccaacaagacattactcgagggaaagggatggtggattccttgttccaagctcccatgaatgatggaactcactat

SEQ ID NO: 222398 - DNA, 378 bp, Gossypium hirsutum
ctgacggctgttttatatagacattttccaaatcttttccactagaaatggaagagcttgaaagccccttttaagggtattgcaaatgatgttaaaggaagagcaggttgctataaacaagattggattactggtcttcgttcaggactggggatattagccccaactacctatatcttctttgcttctgctctccccgttatcgcctttggcgagcaactgagccgagatacagatgggagcctaagcacggttgaaacgttggcatcgactgccctttgcggtattctacactcgatattcggtggccaaccacttttgattcttggagttgcagagccaactgttatcatgtatacatattttgataactttgca

SEQ ID NO: 222399 - DNA, 366 bp, Gossypium hirsutum
cccacgcgtccggtgggaacgccggagaaccagccaagttgatcaggcaaaggtgccgtgaggccgccgacattatcaagaaagggaaaatgtgttgcctctttatcaacgatctcgacgctggagccggtcgtatgggaggaaccacacaatacacagtgaacaaccaaatggtgaacgccacactcatgaacatcgctgataaccccaccaacgttcagctccccggtatgtacaacaaggaagagaaccctcgtgttccgatcattgtcaccggtaacgatttctcgacgctgtacgcgccgctcatccgtgacggtcgtatggagaagttttactgggcacccaccagggaagataggatcg

SEQ ID NO: 222400 - DNA, 330 bp, Gossypium hirsutum
gttcgtaacaatggcggtctcacttcaagctgcagctaccctgatgcaaccaatcaaggttgctgcaccatcaaggaccaatgtgccgctcaggtcctcccagagcgtttctaaggccttcggtttggagcctgttggtgctaggcttacctgctctttgcaaactgacctcaaggacttggctctgaagtgtgttgatgctaccaagctcgctggtttcgctcttgctacatctgctcttgttgtctcgggagcaagcgctgaaggagtttcaaagcggctaacctacgctgaaatccaaagcaagacatacatggaagtcaaaggaac

SEQ ID NO: 222401 - DNA, 357 bp, Gossypium hirsutum
cccacgcgtccgcccacgcgtccgcccacgcgtccgggcttcttcatctcttgtgccggttttcttcatcacgattccattccttttttttccgtttctcctcctttctatcttctcttcttcctctccttattcctcttcttctaaccctagttgctgtcaccatgagtcgccaccatcaatggcctttccgacaaattcgaccatcaaaacacttctcttttcctcgtcttctcaaattttgccttgtattttcaagaaaatctctttaaagccaaaaaaaaatcaatgcttgatccttgagttttctaaactatactcttcgcttgttgatgaaaggcaaaggaggcttctaat

SEQ ID NO: 222402 - DNA, 370 bp, Gossypium hirsutum
cttttatgatcccaacaacaggaaccggtgcatgggagagtgcacttactaatacgtgatcccccggtgaccgaatcgtatcgttcctcattggacaattcagtcttctttggatcgatcaacaacaacgtctcaaattcaacgtcgacgttgtcgaaagtgagtggggacaaggtgctaacctcgacgttttggccgaaaaactcgcggccgatcgtacgcacaccattaaggctatttgtattgttcacaacgaaaccgcgactggagttaccaacaacttggccacagtgagaaaactactagatcattacgggcacccagcactgcttctcgtcgatggagtttcctcgatttgtgctctcgattt

SEQ ID NO: 222403 - DNA, 378 bp, Gossypium hirsutum
cgctgagtttaagcatatcaataagcggaggaaaagaaacttaccaggattcccctagtgacggcgagcgaacacgggaaaagcccagcttgagaatcggtcgccatcggcgtccgaattgtagtctggagaagcgtactcagcgacggaccgggcccaagtcccctggaaaggggcgccggagagggtgagagccccgtcctgcccggaccctgtcgcaccaagaggcgctgtctacgagtcgggttgtttgggaatgcagccctaatctggcggtaaattccgtccaaggctaaatacgggcgagagaccgatagcgaacaagtaccgcgagggaaagatgaaaaggactttgaaaagagagtcaaagagtgcttg

SEQ ID NO: 222404 - DNA, 382 bp, Gossypium hirsutum
gacaaagaaagcggccatggagaattaaagagagcaacaagtttacttggcaaggctcgctgagcaagctgaaagatacgatgagatggttgaggccatgaagagtgttgctaagttggatgttgagctgactgtggaggagaggaatctgttatctgtgggatataagaatgtgattggagcaagaagggcatcctggcggatactgtcttcaattgaacagaaggaggaggccaaaggtaatgaacaaaatgtgaagaggataaaggattataggcaaagggttgaagatgagctctcaaaaatatgcaatgacattctctcagtcattgataagcacctcattccatcttcctccaccggggaatcaactgttttttac

SEQ ID NO: 222405 - DNA, 383 bp, Gossypium hirsutum
  unsure (1)..(383): unsure at all n locations
ccacgcgtncgncacgcgtncggtagcatatagtactagtaagcagtaatagcaatggcctcctccatgatctcatcggcaaccattgccaccgtgaactgctcctccccggcacaggccaacatggtggcccccttcaccggcctcaagtctgcctctgctttcccagtcactaggaaggccaacaacgacatcacttctcttgcaagcaatggtgggagagtgcaatgcatgcaggtgtggcctcctcttgggaagaagaagttcgagacactctcataccttcccgatcttacacccgtacagttggctaaggaagtagattaccttcttcgctctaaatggattccttgcttggaattcgaattagaggagggattcgt

SEQ ID NO: 222406 - DNA, 379 bp, Gossypium hirsutum
cccacgcgtccgccaaggcaatggccgtgtttccatgaggaaaaccgctaccagaggctgctccctctggaagtccatggtacggtcctgaccgagtcttgtacttgggtccactatctggtgagcctccatcttacttgaccggagaattccctggtgactacggttgggacactgctggactctcggcggacccagagacatttgccaggaaccgtgagctcgaagtcatccactgtaggtgggctatgttgggtgctcttgggtgtgttttccctgagcttttggctaggaatggagtcaaattcggtgaggctgtgtggttcaaggccggatctcagatcttcagcgaaggtgggcttgactacttgggaaacct

SEQ ID NO: 222407 - DNA, 352 bp, Gossypium hirsutum
gactacttgggtaacccaagcttgtatccatgctcaaagcattttggccatctgggcttgccaagttatcttgatgggagccatctagggctaccgtattgccggtggaccactcggtgaagtgactgacccattgtacccaggtggcagctttgacccattgggtcttgctgatgacccagaggcattcgctgagctcaaggtgaaagagatcaagaacggtaggttggctatgttctcaatgttcgggttcttcgttcaggccatcgtgaccggaaagggaccattggagaacttggctgaccaccttgctgacccagtcaacaacaatgcttgggcctatgccaccaac

SEQ ID NO: 222408 - DNA, 379 bp, Gossypium hirsutum
cttgggttgagtgtaaagatgaggaaaatcatgggtgccaaagttctcttcttctttgctttgctttccttttcagctgtgtcggcatttgcacaggatgaggaagaccaaggtcttgttatgaacttctacaaggattcttgtcctcaggctgaagacattatcaaggagcaagttaagctactgtacaagcgacacaaaaacactgctttttcttggctgagaaacattttccatgactgtgctgtccagtcatgtgatgcttcactgctgctggactccacaagaaggagcttgtctgagaaggagacagacaggagctttggcctaagggaattcaagtacattgagaccatcaaagaagctgtagaaagggaat

SEQ ID NO: 222409 - DNA, 375 bp, Gossypium hirsutum
cttccttgtatctttattttctcgcctttgacgaggagccgacgctaccatggttcacgtcagtttctaccgcaactatgggaagacctttaagaagccacgacgtccgtatgagaaggaacgattggatgctgagttgaggcttgtaggagagtatgggctccgatgcaagagggagctgtggagggttcagtatgctttgagccgcatccgtaatgctgctagggaccttctcactcttgatgagaagaaccctcgtcgtatttttgaaggtgaagcccttcttcgtaggatgaacaggtatggacttttggatgagagccagaacaagcttgattatgtcttggctttgacttgtgaaaactttcttgagcg

SEQ ID NO: 222410 - DNA, 377 bp, Gossypium hirsutum
agataacaatttcacagttgttttcttcactctctctctcagccatggctgcaggcatctccaccgtcgccgccgctgccgccgccaaccgagctctgggagtgtcagtcccaacctcagctttcatggggaagaaagtgagctcgagattcaacaacaccaggcaggttccttcgggaagttttaaggtgatggcggccgaaaaagagatagacgaagagacacagaccgaaaaggaccgatggaaagggttggcttacgatatttcggacgaccaacaagacattactcgagggaaagggatggtggattccttgttccaagctcccatgaatgatggaactcactatgctgtcatgagttcctatgaatacatc

SEQ ID NO: 222411 - DNA, 322 bp, Gossypium hirsutum
ctctcttatcttaccatggatccttacaagtgtcgtccttcaaggccctttggggtcccgttctggaccaccaattatggtgctccagtttggaacaataactcatcacttactgagggagcaagaggttcaattctgcttgaagactatcatttggtggagaagctcgctaatttcgatcgagaacgcatacctgaacgtgttgttcatgctagaggagccagcgcgaaagggttcttgcaggacactcatgatatatctcagctgacatgtgcttatttacttcgggcccctggagttcagacccctgtcatagctagat

SEQ ID NO: 222412 - DNA, 241 bp, Gossypium hirsutum
  unsure (1)..(241): unsure at all n locations
ggcaggccttacgtaaaaacagttttaatttaaatgtttaatttaaattgggaaataaaaantaagggccggtaaattttttagttgggggcgatggatcaacctcttaatcgagcaagattgccgtgtcgaaatatgtactgagaagaaaacaattttgtccgttgaggattatcatttctttgattggcaataaatgcgatggggggattggacagttgacttaaaacttgggggagac

SEQ ID NO: 222413 - DNA, 414 bp, Gossypium hirsutum
gaattccggggcggccacgcgtccggttagctttagcatacactactagtacccactactagcaatggcttcctcaatgagctgatcggctaccattgccactgcctctccggcacaggctaacatggtcacccctttcaccggcctcaagtctgcctctgctttcccagtcaccaggaaggccaacaacgacattacttctctcgcaagcaatggcggcagagtgcaatgcatgcaggtgtggcctcctactggaaagaagaagttcgagactctctcatacctccccgatcttacacccgtgcagttggctaaggaagtagattaccttcttcgctcaaaatgggttccttgcttggagttcgaattggaggagggattcgtgcaccgtaagtactcgagcttacccacgtt

SEQ ID NO: 222414 - DNA, 388 bp, Gossypium hirsutum
cccacgcgtccgtgaaacgaggagatttctacagaaggtgaaaaagaaagcgttggtttgtctctgtaatttatgcaaacgggaaatctgccacaatctctctcgatgaattcgccttttggaggaccgagcgcgtcgaatccaactgctgccggagctccggcgaataaggatcggaaaatggcaacggctgagcatttagttctcgatctcagcaaccctgatctccgagaaaacgctcttctggaactatcgaagaagagagaattatttcaagatttggctccattgttgtggaattcttttggtactattgctgcacttttacaggagatagtttcaatttatcctgttctctcaccaccaaatctgactccagctcaatcaa

SEQ ID NO: 222415 - DNA, 302 bp, Gossypium hirsutum
  unsure (1)..(302): unsure at all n locations
gaannncagggccgggccgagccacccgtaaaaccagtttaaattgaagtgtggatcccaaatgggaaataaagagttatgagcggcaaacctatgcctggagctcgatggatcaacctcttaatcgagcaagattgccgtgtcgaaatatgtactgagaagaaaacaattttgtccgttgaggatatcatttctttgattggcaataagtgcgatggggtgattggacagttgactgaagactggggggagactttatttgcagctttaagcagagcaggaggcaaagcatttagtaacat

SEQ ID NO: 222416 - DNA, 381 bp, Gossypium hirsutum
cccacgcgtccggtgagactcttttgtatacctgtagcatatagtaatagtaagcagtaatagcaatggcctcctccatgatctcatcggcaaccattgccaccgtgaaccgctcctccccggcacaggccaacatggtggcccccttcaccggcctcaaatctgcctctgctttcccagtcaccaggaaggccaacaacgacatcacttctcttgcaagcaacggtgggagagtgcaatgcatgcaggtgtggccgcctcttgggaagaagaagttcgagactctctcatacctgcccgatcttactcccgtacagttggctaaggaagtagattaccttcttcgctctaaatggattccttgcttggaaattcgaatag

SEQ ID NO: 222417 - DNA, 386 bp, Gossypium hirsutum
cccacgcgtccggacggcttctattaacggttggtgccttacctcctcttcttgcaccactaccacctgctctttttccgctcgtcgacgacctacattgcggccttcagtcgtcgctagccttaactcttctccttctcctccgactcttatccaagaccgcccggtttttgctgcccctattcctttgctcaccccgagagaagagatgggaaacaagtcctacgacgaagccattgaagctctcaagaaacttctcagtgagaaaggagaactgaaagctgaagcagctgcaagggtagatcaaataacagcagagttaaacacagcatcagctgatggcaaaccatctgactcttctgttgagagactgaaagaaggcttcg

SEQ ID NO: 222418 - DNA, 390 bp, Gossypium hirsutum
tgccacttttgtagtgcctgtccatcatagcgagagaaaagtaggatgacagtggaagaagccattgatttagttgataaatgcataatggagatcagatctagactggttgtggcaccaccaaactttgtcatcaagattgtcgataaagatggagcaagagaatatgcctggcgtgaatccgtcaaggatgctgcagttccttcggcctgagattttatcacgtacttgctctcccgttctggatgttttaatttgcatttaccgataggaaacaatgtgtgacggcagtgaaaattagtatatgaaaaactatttactttgatttgattatgttctgaagtggaaatttgatgatattttatcttggaatggaaacctttttatgtg

SEQ ID NO: 222419 - DNA, 363 bp, Gossypium hirsutum
  unsure (1)..(363): unsure at all n locations
ggaaanaacggggtggacccacccttccgcaatgctggtaatgtcaagtaccagcgtttcaaccagccatgttgtgaacttgaagagagatcaccctttactccattttcaagctcaagggttaaagcctaaaccctcctctcatttcttattcaatccacactctaacactgttgctgcttcatcatctaaagctttcaccacttttgcactcttcaaaccaaagaccaaagcagctcctaagaaggctgcacctaaaccaaagccaaaggttgaagatggaatctttggcacctctggagggattggttttaccaagcaaaatgagctctttgttggacgtgttgccatgattggctttgc

SEQ ID NO: 222420 - DNA, 369 bp, Gossypium hirsutum
gggcggccaacccgtccgttgacccattgtacccaggtggtagttttgacccattgggtcttgctgatgacccagaggcattcgctgagctcaaggtgaaagagatcaagaacggtaggttggctatgttctcaatgttcgggttcttcgttcaggccatcgtgaccggaaagggaccattggagaacttggctgaccaccttgctgacccagtcaacaacaatgcttgggcctatgccaccaactttgtccccggaaagtgaacttagagagtgaaaagggatttgtcttgttcatgtttttatttgttggtgtgaatgtaaatttgttgcacaatcaatgaaagcagaatgtgaattttgtgtgctc

SEQ ID NO: 222421 - DNA, 391 bp, Gossypium hirsutum
cccacgcgtccgcccacgcgtccgtccacgcgtccgctcttttgtataactgtagcatatagtactagtaagcagtaatagcaatggcctcctccatgatctcatcggcaaccattgccaccgtgaactgctcctccccggcacaggccaacatggtggcccccttcaccggcctcaagtctgcctctgctttcccagtcactaggaaggccaacaacgacatcacttctcttgcaagcaatggtgggagagtgcaatgcatgcaggtgtggcctcctcttgggaagaagaagttcgagacactctcatacctccccgatcttacacccgtacagttggctaaggaagtagattaccttcttcgctctaaatggattccttgcttggaatt

SEQ ID NO: 222422 - DNA, 386 bp, Gossypium hirsutum
cccacgcgtccgtatctatttaccaacatataaaagaaagtggtattagtcctgatgtggttacttatagtacactcatgaaagcttttattcgagccaagaagtttgataaggttcctgaaatatacaaggaaatggaatcttatggatgcactcctgatagaaaagctaggcaaatgctgcaaactgccttgatggtacttgaacggagacattgagtcttagactgatgttgctaatacctggtgacctgatattatcttcactttgctgtggcttttgctaagctgactaaatttgtaaagtgcatagatttgcttttaagaattgaagaccttgttaatatttcttctactggcattattgcatggattggatttgcaaaa

SEQ ID NO: 222423 - DNA, 388 bp, Gossypium hirsutum
actcccaatactttcataacatttcacgaacttcactctccagtctccaatggcggctgccgtctccaccatcggtgctgtcaaccgagcaccgttgagtttgaatggatcaggtgccggagcttctgctccaagctcagctttcatggggaacagcttgaagaaagtgagcgctaggttcaacaacaacggcaaggctccagtgggaagtttcatgattgtggctgccaaagaaatcgacgaagacacacagaccgaccaggaccgatggaagggtcttgcttatgatatcttccatgaccaacaagacattaccagagggaaagggatggtcgactcattgttccaagctcccatgaacgatggtacttactatgctgtcatgagc

SEQ ID NO: 222424 - DNA, 391 bp, Gossypium hirsutum
agccaacatggcctcattagcagcctccaccgctgccgcctcccttggcgtctctgaaatgctcggtaaccctctgaatttcagtggtggagctaggtcatcggctccaacaccatccaactcatccattttcaagaccgttgctcttttctccaagaagaaggccgctcctccaaagcccaaggctgctgctgtcgccccggccgatgaagagctggctaagtggtacggtccggacagaaggattttcttgcctgaaggtctgttagacagatcggagatcccagagtacttgaacggagaagttcccggagactatggatacgatccgtttggtctgagcaagaagccagaagactttgcaaaatatcaagcatatgagttgatacac

SEQ ID NO: 222425 - DNA, 388 bp, Gossypium hirsutum
ggagtcaccaacaacctggctactgtgagaaaattacttgatcattataggcacccagcattacttcttgttgatggagtttcctctatttgtgcccttgattttcgtatggatgagtggggagtagacgtcgcactaaccggttctcagaaggcactttctcttcccacaggactgggtattgtttgtgcaagccccaaagctttggaggcattcaaaagtgcaaaatcagttagagttttcttcgactggaatgactacctcaagttctacaaactgggaacattttggccatacaccccttcaatccagctattgtatgggctaaaagccgctcttgatcttatattcgaggaaagactcggcaatgtgattgcaaggcataccc

SEQ ID NO: 222426 - DNA, 374 bp, Gossypium hirsutum
gggttaggccttttggctttttcagagatagaaacgatccttcaacttttaggctcagctgctattgtgcagcttgtaagcaagaaattcctgtatgcagagaaccgaaagcaaacacttaaacaagttgatgaattcttaaacacgaaggtggctcctacggaacttgtcgatgatgtaaagcaaattggagcagcccttttaccaacaactaccactagcaaggctcttcctgcacctacggaggcaaaacctgaacccaaagtcgaagcagtggcagaagcccctcctcaaacaaattcagttcccgaaacagtacccaaggcagttggaatcactggattttcaagaccactttcaccctatgcttttta

SEQ ID NO: 222427 - DNA, 394 bp, Gossypium hirsutum
gtccgtttaaggaagtcctccccaagagtgactaacgaggctgttcaaaaggctgctgctggtttgaagggctctgatcaccgtcgtgcaactaatgttagtgctagactcgatgcccagcagaaaaagcttgaccttccaatcctccccaccacaaccattggatctttccctcaaaccttggagctcaggagagttcgtcgtgaattcaaggctaacaagatctctgaggatgattacattaaagccattaaggaggaaattaagaaggttgttgaccttcaggaagagcttgacattgatgtcttggttcatggagagcctgagagaaacgatatggttgagtactttggtgagcagttgtctggttttgcattcactgttaatggatggg

SEQ ID NO: 222428 - DNA, 394 bp, Gossypium hirsutum
atcactcccaatactttcataacatttcacgaacttcactctccagtctccaatggcggctgccgtctccaccatcggtgctgtcaaccgagcaccgttgagtttgaatggatcaggtgccggagcttctgctccaagctcagctttcatggggaacagcttgaagaaagtgagcgctaggttcaacaacaacggcaaggctccagtgggaagtttcatgattgtggctgccaaagaaatcgacgaagacacacagaccgaccaggaccgatggaagggtcttgcttatgatatctccgatgaccaacaagacattaccagagggaaaggtatggtcgactcattgttccaagctcccatgaacgatggtactcactatgctgtcatgagctcc

SEQ ID NO: 222429 - DNA, 350 bp, Gossypium hirsutum
cctgtgcttgtacacaatggctatgactgtaaatgcagcagtggctcttccatcttccaagtcatctaccctgtcatttaaaaactcagtcactgtccctgaaagaatcaacttcaacaagagtgttttgtacccaaaaaatgtcagccttggtggaaatgtggtttccattagagctcaggtcactacagaagctcctgcaaaagcaccaaaaatttccaagaaagatgacgagggtattgttgtgaacaagttcaaaccaaaggaaccctacattggaaagtgcctcctcaacaccaaaattaccggagatgatgctccaggggagacttggcacatgggtttttagt

SEQ ID NO: 222430 - DNA, 385 bp, Gossypium hirsutum
atccactttcaagaccgttgctcttttctccaagaagaaggccgctcctccaaagcccaaggctgctgctgtcgccccggccgatgaagagctggctaagtggtacggtccggacagaaggattttcttgcctgaaggtctgttagacagatcggagatcccagagtacttgaacggagaagttcccggagactatggatacgatccgtttggtctgagcaagaagccagaagactttgcaaaatatcaagcatatgagttgatacacgcaaggtgggcaatgcttggtgctgcagggttcatcatccctgaagcctttaacaaatttggtgccaactgtggccctgaagccgtttggttcaagaccggagctcttctcttggac

SEQ ID NO: 222431 - DNA, 392 bp, Gossypium hirsutum
cccacgcgtccggcatacactactagtacccactactagcaatggcttcctcaaggatctcatcggctaccattgccactgcctctccggcacaggctaacatggtcgctcctttcaccggcctcaagtctgcctctgctttcccagtcatcaggaaggccaacaacgacattacttctctcgcaagcaatggcggcagagtgcaatgcatgcaggtgtggcctcctactggaaagaagaagttcgagactctctcatacctccccgatcttacacccgtgcagttggctaaggaagtagattaccttcttcgctcaaaatgggttccttgcttggaattcgaattagaggagggattcgtgcaccgtaaatactcgagcctacccacgtac

SEQ ID NO: 222432 - DNA, 392 bp, Gossypium hirsutum
gctttagcatacactactagtacccactactagcaatggcttcctcaatgatctgatgggctaccattgccactgcctctccggcacaggctaacatggtcacccctttcaccggcctcaagtctgcctctgctttcccagtcaccaggaaggccaacaacgacattacttctctcgcaagcaatggcggcagagtgcaatgcatgcaggtgtggcctcctactggaaagaagaagttcgagactctctcatacctccccgatcttacacccgtgcagttggctaaggaagtagattaccttcttcgctcaaaatgggttccttgcttggagttcgaattggaggagggattcgtgcaccgtaagtactcgagcttacccacgtactacgat

SEQ ID NO: 222433 - DNA, 389 bp, Gossypium hirsutum
cccacgcgtccgcccacgcgtccgcggacgcgtgggaatctctctccattcaccgtggcaacttctacttcttctttgctccaatccaacactttgaacttgaaacactatttcccccttcatttgcctcttccttctcctcctcgcctatctcatttcactggaactttggctttcaacggtcaacgttcggcaaagttcactgttaaatgcttcttctcgtcggagcagaggaaacatttgacgagctcgagtttgggctccaacaaccagttgagttccagctcaaatgacaaaaacccattcgagattatttctcaaacaatgttaaaagctttgaacgcgttaaaaaagcccgctatagccgcggttttatcgcgtttgttgct

SEQ ID NO: 222434 - DNA, 392 bp, Gossypium hirsutum
gttttccatctctgtctctctttcttttctaattattgaggaaatccaccgatcaaagttgttcaaatcgtgggtgaaagtcttgagaaactaaaatggcgtccacattcagcggcgatgaaactgctccgttctttggcttccttggggccgctgctgctctcgttttctcctgtatgggagcggcgtacggaacggccaagagcggtgtcggagtggcgtcgatgggagtgatgaggccagagctggtaatgaaatcgatcgtccccgttgttatggctggtgttttaggtatttatgggttgattattgcggttattataagcaccgggattaacccaaaggccaaatcttactaccttttcgatggctatgctcatctttcctctggt

SEQ ID NO: 222435 - DNA, 386 bp, Gossypium hirsutum
caaattcagttaacaatttcacagttgttttcttcagtctctctctcagccatggctgcagccatctccaccgtcgctgccgctgccgccgccaaccgagctctgggagtgtcagtcccaacctcagctttcatggggaagaaagtgagctcaagattcaacagcaccaggcaggttccttcgggaagttttaaggtgatggcggcggagaaagagatagacgaagagacacagaccgaaaaggaccgatggaaagggttggcttacgatatttcggacgaccaacaggacattactcgagggaaagggatggtggattccttgttccaagctcccatgaatgatggaactcactatgctgtcatgagttcctatgaatacctcag

SEQ ID NO: 222436 - DNA, 147 bp, Gossypium hirsutum
atcagactcactttgtaaggaacatggagttcaaagaagctgctgataagattgatggtcctttgagacaaatcttcgttgagttcttggagaggtcttgtactgctgagttctctggttttctcctctacaaagagagtctgattg

SEQ ID NO: 222437 - DNA, 392 bp, Gossypium hirsutum
cttaacgctataatcattgaagaaaaatgggtttgaaggaggaattcgaggagtgtgcggagaaagctaagacccttccccagaacactaccaacgacgacaagctcattctctatggactctacaagcaagctactgttggaccagtgaacaccagccgtcctggaatgttcaacatgaaggaaaagtacaagtgggatgcatggaaggctgttgaagggaaatcgaaggaggaagcaatgaacgattatatcactaatgtaaaacagctgcaagaggctgctgctgcatcttcttgacgtgtgtgtgagaatagaaaatggtgtaattttcaagccctttgatacctatgggtttgaaaaggtctataactatgaataagcaatgtacta

SEQ ID NO: 222438 - DNA, 393 bp, Gossypium hirsutum
gtccaatcactcccaatactttcataacatttcacgaacttcactctccagtctgcaatggcggctgccgtctccaccatcggtgctgtcaaccgagcaccgttgagtttgaatggatcaggtgccggagcttctgctccaagctcagctttcatggggaacagcttgaagaaagtgagcgctaggttcaacaacaacggcaaggctccagtgggaagtttcatgattgtggctgccaaagaaatcgacgaagacacacagaccgaccaggaccgatggaagggtcttgcttatgatatctccgatgaccaacaagacattaccagagggaaaggtatggtcgactcattgttccaagctcccatgaacgatggtactcactatgctgtcatg

SEQ ID NO: 222439 - DNA, 391 bp, Gossypium hirsutum
cggacgcgtgggcggacgcgtgggtataggatcggtgtttgcacaggtattttgaggaccgacaatgttcccgttgatgaccttgttaagcttgttgacaccttcccgggccaatccattgactttttcggtgctctgagggccagagtttacgatgacgaagtgaggaaatggatcggagaggtcggagtcaatggtgtcgggaaaaagctcgtgaactcgagggaagggccaccatctttcgagcaaccgaagatgaccattgagaagctgttggaatatggatacatgcttgttgctgagcaagagaatgtgaagagggttcaattggctgacaaatatttgagtgaagctgcccttggaaatgctaatgacgatgctatcaagagag

SEQ ID NO: 222440 - DNA, 391 bp, Gossypium hirsutum
cttctcttttgggttctaaagatcgtgattatcttctctgctccactgcagcaggtgctgaaactgatcaggtgaaaatttcggatctagagggcaaggtgatcggaatttacttctcagctaactggtacccaccatgtagaaatttcaaccgagtattgattggtgtgtatgagcagctgaagagcaatggatctaactttgagattgtatttgtgtcatctgatgaagacttggatgccttcaacagctaccgtgaaaacatgccatggctttcgattcccttttctgatttggagacaaagaaggccttgaatcgaaaatatgacgtggaaagcattccttgcttagttattttgcagcctgacaacaccaaggatgatgatactta

SEQ ID NO: 222441 - DNA, 391 bp, Gossypium hirsutum
cccacgcgtccgggtcattcgttgtttataaaatcattcatctccccaatttctggcgcttctttccttcctttcttccttaacctccaaccagtagaactcctctcacttatctccttattgtaaacattttcctctattcttttgttcctttcattttcctatctacaaatttttcttagcctaaaatttttcttctctttttgttatccatttgagtagatttttctttcttcgccttcatcggagtcttcttcagataactggagtgttaaggcaatccgaaaaaagaccactggaactggtaggatgatgtatcttcgccatgttcctcgtaggttcaagattggtttcagagaaagtactgaagcagcaccgaagaagaaggttg

SEQ ID NO: 222442 - DNA, 386 bp, Gossypium hirsutum
cgtctgtatattgcgaattttctttcttctgattttctctttagctcaaaaaagatgcagtggggtcgtcaagactctaaccggcaagacgatcactctcgaggtcgagagctccgacacgatcgacaacgtgaagaccaaaatccaagataaggaaggcatccctccagaccagcagcgtctgatcttcgccggaaaacagcttgaggacggccggaccttggccgattacaacatccaaaaggagtcaactctccacctcgtcctccgtttgcgcggtgggatgcaaatcttcgtggaaaccttgaccggcaagacaatcactctcgaggtcgagagctccgacacgatcgacaacgttaaggcgaagatccaagacaaggaag

SEQ ID NO: 222443 - DNA, 394 bp, Gossypium hirsutum
gttgccaaggagccacaaaatcctgaggcagacgaggatgatggatatgtggttgggtatgtccacaatgaaaacacaggagagtcaaggttcctggtgatggacgcacaatcacccaatcttgacattgtggcagccgtgaagctgccccgtagggttccctacggttttcatggactatttgtgagggaaagtgatctaaataagctgtagaagtagattcacttcctctcggtcgggttcaggtggatgatcattcattaaacacatataatagcagtgaataccatagcagatgaaagttacaaggcgtttacaacatattgtataaacatatagtattttgttacagatgattgaagtcccaatatcataatcattgcatgtaatcctt

SEQ ID NO: 222444 - DNA, 387 bp, Gossypium hirsutum
gcgggatgaagcttcccggaaacctcttttacctcttttttaacaacaatgcgggataccatgatgtccaccatcagctttatggtaccaaatacaacttctctgtctactttgacatatgggacagaattctaggaacctatatgccttattcacttgagaagagacctgatggcggccttgaagtacgacgtgctgatcaagaacacaagaaggattgattgattaattacttgattaatcagccaattatgataactagtgagcatggattgatgaatgttccattaggttttatatatgtatctaatgtgtatgtattatgtgtactactatgcttcactaggagtaaaggcaaatctggtgtgaaactaagtcaattatgat

SEQ ID NO: 222445 - DNA, 387 bp, Gossypium hirsutum
gttagctatagcatacactactagttcccactactagcaatggcttcctcaaggatctcatcggctaccattgccactgcctctccggcacaggctaacatggtcgctcctttcaccggcctcaagtctgcctctgctttcccagtcatcaggaaggccaacaacgacattacttctctcgcaagcaatggcggcagagtgcaatgcatgcaggtgtggcctcctactggaaagaagaagttcgagactctctcatacctccccgatcttacacccgtgcagttggctaaggaagtagattaccttcttcgctcaaaatgggttccttgcttggaattcgaattagaggagggattcgtgcaccgtaaatactcgagcctacccacg

SEQ ID NO: 222446 - DNA, 377 bp, Gossypium hirsutum
cccacgcgtccgcagacatctgctctaggaagcaataatggcgggtacaggaaagggatggcagaggcaaagctaaaggtggctataaatgggtttggtaggattggcaggaacttcttaaggtgctggcatggccgtaaagactccccacttgatgtcattgccatcaatgacactggtggtgttaagcaggcttctcaccttctcaaatatgattccacccttggcatcttcgctgccgatgtcaagcctgtcggcactgatggcatctctgttgatggcaaggttatcaaggttgtttctgaccgcaacccttccaacctcccatggggggacctaggaatagatctagtcatcgaaggaaccggtgtgttcgt

SEQ ID NO: 222447 - DNA, 392 bp, Gossypium hirsutum
gatatatttagctatagcatacactactagtacccactactagcaatggcttccgcaatgatctcatcggctaccattgccactgcctctccggcacaggctaacatggtcgctcctttcaccggcctcaagtctgcctctgctttcccagtcaccaggaaggccaacaacgacattacttctctcgcaagcaatggcggcagagtgcaatgcatgcaggtgtggcctcctactggaaagaagaagttcgagactctctcatacctccccgatcttacacccgtgcagttggctaaggaagtggattaccttcttcgctcaaaatgggttccttgcttggaattcgaattagaggagggattcgtgcaccgtaaatactcgagcctacccac

SEQ ID NO: 222448 - DNA, 392 bp, Gossypium hirsutum
gccagtttgccaccactaatggcgacatccatagcagctcgcatctccaggaaggccgcggcctctgctttctccgctcaccgtcacgtaatctcatcccgttgtttcgccacggagtcggcgaaaacgatctcgccgtcgtcggatcgagtcaagtgggactacaggggccaaaggaagataatccctctcggacagtgggtccctaaggtcgccgtcgacgcttatgtggcacctaatgtcgtcttggccggtcaagtaaccgtctacgacggagcgtcggtgtggaacggctgcgtcctacgtggagatctcaacaagatcaccgttggattctgctctaatgtccaggaacgctgcgtcattcacgccgcttggtcctcacctaccgg

SEQ ID NO: 222449 - DNA, 387 bp, Gossypium hirsutum
cttactaacaacaaaaaccctgaaatgtcggacgacgatcatcatttcgaatccaaggctgatgccggcgcctccaaaacctatcctcagcaagccggtactatccgtaagaacggctatatcgtcattaaaggccgtccctgcaaggttgtggaagtttccacctccaagacggggaagcacggtcatgctaagtgtcacttcgttgggatcgatatcttcactggcaagaagttggaagatattgttccctcctcccataactgtgatgttccgcatgtcaatcgtactgactaccaattgattgacatttctgaggatggatttgtgagcttgctgactgatagtggtgatactaaggacgatctcaggcttccaactgatgag

SEQ ID NO: 222450 - DNA, 392 bp, Gossypium hirsutum
cccacgcgtccgttttttttcttaatttcaaagaaatggccaacataactgttagcaactttgctgcagtgttgactaaggcaactttgaagggttcaaacaaagttcaatcatccaaagttcttggattgcctgtgatggcaacaaatggtagggctaggtgcagtctagagcagaagtcttcttcaaacgggctgagctcgaaccccagcatggtggcatcaatgatggcggcagcagcagcagcggtgacaacggctgctgcaccggcaacggcgttggtggatgagagactttccacggaaggaacaggacttccttttggctaaagtaacaaccttctgggatggatcctttttggagtgtttggtttgatttgggcattgtatttt

SEQ ID NO: 222451 - DNA, 408 bp, Gossypium hirsutum
ggcggaccacacccgtccgcggacccgtgggtgcgatcaaggaatttttggcatcaaagataagaaaggccaagcgtgcactccatatggctggcaagggtcaatgtccggcagtagttgacgaattattgttcgccaatcactccattctgaacgaacgtgacaaaaaggggaatacggcattgcacatcgctacgaggaaatctcgcgcgcagattgtgagcttgctgctaacttatagatctaccgatgtcaacgccataaataatcaacacgaaaccgcgatggatttggctgataaactccagtacggtgaatccgcgttcgaaattaaagaagctctaacggaggccggtgctaaacatgctaggtccgttggtcaagtagatgaagcaatggaacttaaga

SEQ ID NO: 222452 - DNA, 388 bp, Gossypium hirsutum
cccacgcgtccgcttctattcagttttgtaagagctatggctaaggacattgaggttggtggtgagttccaggccaaggactaccatgatcctccacccgctccattggtcgacgctcaggagttagccaagtggtctttttacagggctgtcatagctgagttcattgccactctcctctttctctacatcactgtcttgactgtgatcggttacaagacccagaccgaccctgctaagggcggtgaagattgtggcggcgttggcattctcggcattgcttgggcttttggtggcatgatctttatccttgtttactgcactgccggtatctctgggggacacatcaacccagcagtaacctttggacttttcttggctaggaagg

SEQ ID NO: 222453 - DNA, 388 bp, Gossypium hirsutum
ccaaaataagaagaaaaacaaaaatggccatggcaatggcgcttcgacgactctgctcttccattgacaagcctctccgtcctttcttcaatgccccttccctctattacatgtcgtctttgccaaatgaagctgtgtacgagaaggagaaacctggcgtcacttggccaaagcaactgaatgctccacttgaaaccgttgatcctgaaattgctgacatcatcgagcttgaaaaagcgcgccaatggaagggacttgaactcattccatcggagaacttcacttcggtgtcagtgatgcaagcagttgggtctatcatgaccaacaagtacagtgaagggtatcccggtgctagatactatggagggaatgagtacatcgacatggc

SEQ ID NO: 222454 - DNA, 391 bp, Gossypium hirsutum
ccacgcgttcggaaaaaatctctttctttttttttattccttcctttttggttgcatccaatcgaccaaattcagagcttacaaaagaaaaatggccggaatcggacctttaactcaagactgggagcccgtcgttattcggaaaaagcccccaaacgctgccaccaagaaggatgagaaagtcgttaacgccgcccgtcgagccggtgccgagatcgaatccgtcaagaaatcgaatgctgggacgaacaaggcagcatcgagtagcactactttgaatacaaggaaacttgatgaggaaactgaaaatcttgctcatgaacgagtgccaactgaactgaagaaagccatcatgcatgctcgaatggagaagaaactcacccagtctcaa

SEQ ID NO: 222455 - DNA, 389 bp, Gossypium hirsutum
gtgagactcttttgtatacctgtatcatatagtaatagtaagcagtaatagcgggggcctcctccatgatctcatcggcaaccattgccaccgtgaaccgctcctccccggcacaggccaacatggtggcccccttcaccggcctcaaatctgcctctgctttcccagtcaccaggaaggccaacaacgacatcacttctcttgcaagcaacggtgggagagtgcaatgcatgcaggtgtggccgcctcttgggaagaagaagttcgagactctctcatacctgcccgatcttactcccgtacagttggctaaggaagtagattaccttcttcgctctaaatggattccttgcttggaattcgaattagaggagggattcgtgcaccgt

SEQ ID NO: 222456 - DNA, 385 bp, Gossypium hirsutum
tgctgccatgtgtctgtaccaggattctcttctcccacttgggtttttccatacagttaagaccctccctcctcacttcaatgtgctgtgctaatacactcctagttagtttgagcttttgagagctaaagtgtaagagatgttgaaagaagagattagtgatgctggtggtggaaacgattgggcgcgtgtctgcgacacatgccgctccgcagcttgcaccgtgtactgtcgagccgactcggcgtacctctgtgctggatgtgatgcccgagtgcatgctgcgaaccgggtcgcctcgcgccatgaacgcgtatgggtgtgcgaggtatgtgagcgtgcccctgctgccctgttgtgcaaggcagacgctgcatccttatgc

SEQ ID NO: 222457 - DNA, 404 bp, Gossypium hirsutum
ccacccgtccggttccaagtttgttgtaaaccaagttttaaccagcagccaacatggcctcattagcagcctccaccgctgccgcctcccttggcgtctctgaaatgcttggtaaccctctgaatttcagtggtggagctaggtcatcggctccaacaccatccaactcatccactttcaagaccgttgctcttttctccaagaagaaggccgctcctccaaagcccaaggctgctgctgtcgccccggccgatgaagagctggctaagtggtacggtccggacagaaggattttcttgcctgaaggtctgttagacagatcggagatcccagagtacttgaacggagaagttcccggagactatggatacgatccgtttggtctgagcaagaagccagaagac

SEQ ID NO: 222458 - DNA, 393 bp, Gossypium hirsutum
gaaggttcagagattttagagagaacaaacaacaatggctgctacatctggggctgtgctaaatggattaggctcttcatttctttgtgggggaaagaggagccaagcccttttgggtgctagcattggggccaaaggctcgccctcccctgctgctggaactagaaagttgatcgttgtggcagccgccgcacctaaaaagtcttggatccctgctgttaaaggtggtggcaacttcattgacccagagtggctcgatggatcgctccctggagactacggatttgacccactaggtcttggaaaagacccagcattcctcaaatggtaccgagaagctgagctgatccatggacgttgggccatggctgctgtcgtcggcatcttcgtcgg

SEQ ID NO: 222459 - DNA, 381 bp, Gossypium hirsutum
gcaaaaggcaaaaaagccatgtcaaagctggtggtgttgcagccaacaaagcagggtcccatctccctcctctcttcctctctttcccacttcaatggcaccaagctctgccaaatccagtacaaaagaaaggtatatcagccaaaaggtgcattgcatgttgcagcatccagcaccaagaagattctcataatgggtggcactaggttcattggtgtgtttttatcaagactccttgtaaaagagggtcatcaggttactttgtttactagaggtaaagcaccagttactcaacaattgcctggtgaatcagacagtgactacgctgagtttaaatccaagattttgcatttgaaaggagatagaatggacttcgatttt

SEQ ID NO: 222460 - DNA, 386 bp, Gossypium hirsutum
gaaaagagtggtggagcaacatggttagtaaaccaggcattctcagtgattggcgatggaagtcaatggggaacttcaagtatgcgcttgtggttccgggggcaatttacagcacctactcgttcataatgtgcaaagatgaaaacgagaggaactggttcatgtttttggtcttaccatttctggtgtttagattgattcactatcaactatggatttcatactctcgctatcgcactgccaaagggaacaaccggatacttgacaagagcatcgacttcgaccaagttgaccgagagagaagctgggacgatcagataatactgaacggaatattgttctacggggcggggatagtgttaaaagatcaatttaacatgcctttc

SEQ ID NO: 222461 - DNA, 389 bp, Gossypium hirsutum
ctttctcggcccattttcctgttaccagtaaaactgaagctaaaagggttgattgattgattctcttaaacttcaattcaatccaccaacatatatagataaactccataattattccatcaaaaggatcgaacatcaagagcattaatatgttggataaaactgctactgtttctgcacttccattctcctctgatcttctcagtctcactcctcttgataatggcaaaagaaaaagaaagccacccggtaccccagatccagaagcagaagtggtttctttatctccgcaaacattgcttgaatcggacaggtatgtatgtgagatctgcaaccaagggtttcaacgagaccagaaccttcaaatgcataagagaaggcacaaagtg

SEQ ID NO: 222462 - DNA, 248 bp, Gossypium hirsutum
gtggatgctgacggcaacgttagattgttctgagacgtcatcggggccctgggggggagctatatcttctgtttaacagcctccccaccctgtaaacggctcatgctgcggtagggtccactggccggaagagcaccgcacgtgctgtggtgatcgatgcgccacccccagcccttgaaatttctgaggaccgagtgccttccgagcccgggcgtactcataaccgcatcacgtctacaaggtgaaca

SEQ ID NO: 222463 - DNA, 385 bp, Gossypium hirsutum
gacggaccttttttcgccgaggtcgacatgggtggcgatgcctccgtccccaccgtgcgagctaccgtggtccaagcttctaccattttctatgacacccccgctactttagacaaagcggagaggttgttggctgaagccgccggatatgggtctcagctagtggtgttccctgaagcgtttatcggcggatatccacgcggctccaacttcggcgttaccattgggaaccgcactgctaaagggaaggaagagttccggaaatatcacgctccagccattgatgttcctggtcctgaaatcgagcgtttggcggccatggctggaaagtataaggtttacttggtgatgggtgtgatagagagagatggatacactctatatt

SEQ ID NO: 222464 - DNA, 338 bp, Gossypium hirsutum
ctcaaacttccgaccacgcgtccgttaataagcaaaaccatggcctatgcttctgtggcaagacttcaccagttgtagacaagtctgagtgggttaagggtcacacccttcgccaaccttccacttctgaggtgaggtgccaccctgttgcaccctccggactaactgtgcgtgcaagctcatatgccgatgagcttgtcaagactgctaaagctattgcttctcctggccgtggaatataggacatggatgagtccaaccctacctagtggaaacgtttgacctcaagcgggctagaaaacacggacgctcaccgccaagcctacaggacgttgatt

SEQ ID NO: 222465 - DNA, 419 bp, Gossypium hirsutum
  unsure (1)..(419): unsure at all n locations
ccgggaaggaangggtcgaccacgcgtccggagaaagcactgaaaaagcaaaaccattgcctctgcttctctcctcaagacttcaccagttttagacaagtctgagtgggttaagggtcacacccttcgccaaccttccacttctgtggtgaggtgccaccctgttgcaccctccggactaactgtgcgtgcaagctcatatgccgatgagcttgtcaagactgctaaagctattgcttctcctggccgtggaattttggccatggatgagtccaacgctacctgtgggaaacgtttggcctcaatcgggctagaaaacacggaggctaaccgccaagcctacaggacgttgcttgcttcagctcctggccttggtcagtacatctcatgtgccatactttttggggcaaccctttatc

SEQ ID NO: 222466 - DNA, 341 bp, Gossypium hirsutum
cccacgcgtccgcccacgcgtccgtccacgcgtccgcggcacttgcacatgggtgagtcgatcctaagagacgggggaagcccgtccgacagcgcgtccagcgcgagcttcgaaagggaatcgggttaaaattcctgaaccgggacgcggcggctgacggcaacgttagggagtccggagacgtcggcgggggcctcgggaagagttatcttttctgtttaacggcctgcccaccctggaaacggctcagccggaggtagggtccagcggtcggaagagcaccgcacgtcgcgtggtgtccggtgcgccccccgcggcccttgaaaatccagaggaccgag

SEQ ID NO: 222467 - DNA, 390 bp, Gossypium hirsutum
cccacgcgtccgcagttaacaatttcacagttgttttcttcagtctctctctcaggcatggctgcagccatctccaccgtcgctgccgctgccgccgccaaccgagctctgggagtgtcagtcccaacctcagctttcatggggaagaaagtgagctcaagattcaacagcaccaggcaggttccttcgggaagttttaaggtgatggcggcggagaaagagatagacgaagagacacagaccgaaaaggaccgatggaaagggttggcttacgatatttcggacgaccaacaggacattactcgagggaaagggatggtggattccttgttccaagctcccatgaatgatggaactcactatgctgtcatgagttcctatgaatacctc

SEQ ID NO: 222468 - DNA, 398 bp, Gossypium hirsutum
cacgcgtccgtcaatttctacctccaaatgctttttcacttaaacttgtaatttaatataatgggtataaatatatactcgtgacttgttttaatatggatcccatttttttaatataaaaccttttttttttaaatatttttcattgccaatcagtcccttattaataagtagagtatttgcataactggtttaattcccttcatgcactgtgctccatagtcttggaacccaaggacagaagactcttttagcatttcaccgcaaagatggagataacaaatgtgagcgagtatcaagaaattgctaagcaaaagttgccaaagatggtgtatgactactacgcatctggtgctgaggaccaatggacattgcatgagaatagatttgctttcacc

SEQ ID NO: 222469 - DNA, 384 bp, Gossypium hirsutum
cccacgcgttcgcccacgcgttcgtagatcattaaagaagaagaagaagaagaagcactatctttctatttgtgtggtccttttgattttaaactttcttttttattcatcctttttgggtttctttttggctttccatttttcttatttccggtgaagctaataccgccggaatctgaaaatgtcggtgtacgacgcggcgtttgttaactcggagctatcgaaaccaacttcggttttcgggttaaagctatgggtagtgatcggaatccttttcggtactttcatagttttatctctgttccttctctccctttgtctgacagcccgccgcaaatctcggagacaccgacagcttgaccccgcgccgccaatctgcaaaga

SEQ ID NO: 222470 - DNA, 316 bp, Gossypium hirsutum
gtgcaatgcatgcacgtgagactactttactgggaagaaaaaaaaaaaatcaggggggataaactatgtggaaggctccctccaatgcacttaaaatcatatcaaacaaatttatgttgaaactgtgatttcaaggttcatggaaccaatttcctcgtatctaagcataatcgaaccctcctttgccatgtttgtcaaagtcctactccttggctcgcatttattcaaaatcacgtctccgcggttaataattgtgattcatgcgttgtaaacggcaacaataagtgtgagtcatctaatagagagtatggttaat

SEQ ID NO: 222471 - DNA, 392 bp, Gossypium hirsutum
ttttgagattagatccaaaattcccttttcatcatatttccgattccccaatttggggtgaaaccctaatcctaatcccggattcttctcgtctacatcgtctagcaaatggcaaccgaggagccggcagtcgtggcagaccccgcaccggagacggaggaggacaagactgctgagaccaaagctacttcaaaatctggcagagcaaataaaaccaaagaacccaaaaccaagaaagctgcagctcctcggaaaccacgggctgctcctactcatccaccttacgaagagatgatcaaagatgcgatcgttactttgaaagagaggacaggttcaagtcagtacgccattgctaagttcattgaagagaaacagaagaatcttcctgggaa

SEQ ID NO: 222472 - DNA, 391 bp, Gossypium hirsutum
cccacgcgtccgaaacattaaacgcataactcgaaaatctatcaccatgcggcaggggaaaaaggagtacaagcagccattcaagttcacccgagttcgagttctggatggtccgaaacccgccttttcccgaacccgacctcatctctgccgatgaactattcgttaatggcgttctccgtcctctccatctcttacccaacaaacaacccgaagagaacccacaaatagactcaaatcaacccgcatcacaacctcctatacccgaccctgaccctattataacatcggatccggttcctgtattgtcagcttcgaaacggtggagagatatctttaagaaagaaaaaggaaaaaacggtaaacaaagtaaaaaagacaaggataaaga

SEQ ID NO: 222473 - DNA, 394 bp, Gossypium hirsutum
ctttttgcctcttagctagctcattatctttttcatacaaagtaaccgaatttggggtcttattcgtgataacgactacttccatggattaaattgcatttgttttaacttctttctcttcacctggttaaaaatcttttcaaaaatgcaaaacccttctacggttacccaagaatctggccctgctgccttcgatctcgtcacacaattgggtcacttagcattcaacaagagctttcgcagctcaaacactgatgggttttgttcatttaagccaaatcacgtgtatttttcaggcttcagagactcaatttctcagaaaaagcgcagagttgctgctgctgcttcactcagtttgggtgctcgaaacagcgtttcttcgagcgttaggagg

SEQ ID NO: 222474 - DNA, 387 bp, Gossypium hirsutum
gcagcttcctctacgatcataatggtgtcggttactgcttctgtagccaaaccggcccttcaggcaaatgcaaagggttttgcggaattctcaggtctgcgcaactcagctagccttacctttgccaggaaaacctcggatgactttcaatcagtcattgcttttcagacttctgctttgggaatcaataatggtggataccggaaaggcgtggtagaggcaaagctaaaggtcgctattaatgggtttggtaggattggcaggaactttttaaggtgctggcacggtcgtaaggacttcccacttgatgtcattgcaatcaatgacactggtggcgttaagcaggctactcaccttgtgaagtatgactatacccttgggatattt

SEQ ID NO: 222475 - DNA, 386 bp, Gossypium hirsutum
aacaaaatcaactgcttcacaatggtctctacaaccatggctctttcttccccatgcattcgccggtaaggcagtgaagttctccccttccacccctgaaatccagggaactggccgtgtttccatgaggaaaaccaccaagcctgttccttctggtagcccatggtacggtcctgaccgagttttgtacttgggtccactttccggtgagccaccatcttacttgaccggtgagttccctggtgactatggttgggacactgctggactctcagctgatcccgagacctttgctaggaaccgtgagctcgaagtcattcactgcagatgggccatgttgggagctcttgggtgtgttttccctgagctgttggctaggaacggtg

SEQ ID NO: 222476 - DNA, 302 bp, Gossypium hirsutum
cccacgcgtccgattcgctgagctcaaggtgaaagagatcaagaacggtaggttggctatgttctcaatgttcgggttcttcgttcaggccatcgtgaccggaaagggaccattggagaacttggctgaccaccttgctgacccagtcaacaacaatgcttgggcctatgccaccaactttgtccccggaaagtgaacttagagagtgagaagggatttgtcttgtttatgtttttatttgctggtgtgaatttaaatttgttgcacaatcaatgaaagtataatgtgaattttgtgtgctc

SEQ ID NO: 222477 - DNA, 335 bp, Gossypium hirsutum
ttccacttttcctcctacactcattctaaatcaaccagttttcgcagcacctacggctttgctcactccttccaattggaaagaaaccatgggagacgagtcatacgaggaagccattgaagctctcaagaaactgctcaatgagaaaggagaattgaagagtgcagcgacggcaaaggtagagcaagtgacagctgagttgaagactgctgcttcctccgatgagtctgttgaccgcttgaaacaaggcttcatttacttcaagactgaaaaatacgaaaagaatcctgctctgtatggtgagcttgccaagggtcaaagcccaacgtatatga

SEQ ID NO: 222478 - DNA, 356 bp, Gossypium hirsutum
caaatatgggttccatttccaagagtttccttctccttgctcttctagctgctggtgttcttctcatttcttcggaagtggcagctcgagatcttgctgaaactaccactgaaaacaacaatggtgaggtgcgctaccgaaacaacccagcctgagctagaagataaacgctcagcttataatggaagaggacacggaggtaaaggagggtatggaggtgggcacggagggtatggaggcgaccactgagggtatggcggcggacacagcgggtctgcgggtgccgcccgacggactgactgggaacggctcccttgggggccttacccgggcgacgaacagtcgacttagaactg

SEQ ID NO: 222479 - DNA, 371 bp, Gossypium hirsutum
  unsure (1)..(371): unsure at all n locations
ggagttgggtacaaggtactggctggcgggcacaagttgtangaaggtattcgcgagacaactctcgaggcggaggggaaaaatacgacggtacctttattcggcttagtttggcttttatggaacgctttaacaatttatcgggctggttgtagcatntggcaccttcttatttgcgaatccctttgtttaaatcctataaacatgagnaattttgtatttttttttcttattttatggcttgggacttactcctcgctttttcgaattctatcaagatttcacccctacaattaattattcgttgggacaataatccatgggaaggattaatttgaggatgaggaattatcacaccgactcgctttctt

SEQ ID NO: 222480 - DNA, 308 bp, Gossypium hirsutum
gatggtttctacatcgttcctgcatttattgacaagcttgttgttcacatcagcaggagctttatgaccctccctaacattaaggatccattaatactgggtatttagagaggcaaaggtcaaggaaaatctttccaccgtgagcttgtgttagccaagaaggggattaaccccatcatgatgagtgccagggaactggaaagtgcaaacgccggtgaaccagacaagttgttcaggacaaggctccttgaagacacccacatcctcaaaaatgacaaactgagcgccatgttcaataatgatcttga

SEQ ID NO: 222481 - DNA, 404 bp, Gossypium hirsutum
cggggcggaccaacgcgtccggttttctgttctgtttttcagggacaagtttcaatggcaaaaccagtttcaattgaagtgtggaacccaaatgggaaatacagagttattagcaccaaacctatgcctggaactcgatggatcaacctcttaatcgagcaagattgccgtgtcgaaatatgtactgagaagaaaacaattttgtccgttgaggatatcatttctttgattggcaataagtgcgatggggtgattggacagttgactgaagactggggggagactttatttgcagctttaagcagagcaggaggcaaagcatttagtaacatggctgttggttacaacaatgttgatgttaatgctgccaacaagtatggcgttgctgatgaatacactcctgg

SEQ ID NO: 222482 - DNA, 398 bp, Gossypium hirsutum
caacccgtccgaaaaataaactgtttaacaagggcctttacaaccatggctctttcttccccatcattcgccggtaaggcagtgaagttctccccttccacccctgaaatccagggaactggccgtgtttccatgaggaaaaccaccaagcctgttccttctggtagcccatggtacggtcctgaccgagttttgtacttgggtccactttccggtgagccaccatcttacttgaccggtgagttccctggtgactatggttgggacactgctggactctcagctgatcccgagacctttgctaggaaccgtgagctcgaagtcattcactgcagatgggccatgttgggagctcttgggtgtgttttccctgagctgttggctaggaacggtgtcaa

SEQ ID NO: 222483 - DNA, 387 bp, Gossypium hirsutum
cccacgcgtccggagagatcgactaaaccgagagctgtagccatctttgtcgtcggattttggatcctcgacgtggctaacaacatgttgcaaggtccgtgtcgagctctcctcgcggacctctcggctaatgaccacaaaaagatgagaaccgcaaacgggtggttctcgtttttcatggcggtcggcaacgtgttgggttacgccgccggttcttactcccacctttacaagatcttccctttcaccaaaaccacagcctgcgacatttactgtgcaaatctcaaatcatgcttcaccatagatatcatgatcctcttgttagtaacagtaaccgcggtcacaaccgtgaaggaagatcccttcaccaagcaaatccaagatgat

SEQ ID NO: 222484 - DNA, 377 bp, Gossypium hirsutum
cccacgcgtccgcccacgcgtccgaaaaaacactctggttgtggagatggcacaggcaatggcatcaatggctggtttacgtggctcttcacaggctgtcctggacggcagccttcaactcagtggccaaacccgcttcaacattcctagcaacaaccgagtggctgtgggtaggtctggtttcactgtcagagctcatcagacaccggccgagcctgagactggacgcagagccatgttgggtcttgttgctgctggtttggccactggctcctttgttcaagctgtgcttgccgatgccagaagcatcaaggttggcccacctccccctccctctggtggactgcctggaactctgaactctgatgagccaagag

SEQ ID NO: 222485 - DNA, 388 bp, Gossypium hirsutum
cccacgcgtccgcccacgcgttcgtccacgcgtccgaacacacaggaaacccaaagtctttctcctttttttccccctctttttttatacacaaaggtaataattttcgaaaatggcgtttgctgttacctcttccccggctgcaatttctggttccagcttttctcgttcaagtgcctcctctgacctcaaaattccgcaaattggttcatttcggctagcggatcgccatgcaacggtgaatctatctcaaaagcgttgcgcagtgaagcccgtgaatgcggagccaaagaggaacgattccatgctttctcatgctgcaaccacctctgctcctgaagtgtcggaaaaagttgaggtggaggattttgagcaattggccaaagaa

SEQ ID NO: 222486 - DNA, 356 bp, Gossypium hirsutum
acacagcaaacccacggcgtttcttttttttttcccctccctccccatacacacaaatattaatggcttaaagttcacaccctttattacctccttccactttttgcaatcacttcgtcacatttttgcacccttctaaactaactgtgcgtgcaagctcattattatatcttttatttaaacttgcttaaactatttctattcctgaacctataattaatagctcatgcataatttacaaccttacctgtgggaaacgtttggcctcaatccggctagaaaacacagaggctaacctccaagcctacaagacgttgcttgtttcagctcctggccttggtcagtacatctctggt

SEQ ID NO: 222487 - DNA, 390 bp, Gossypium hirsutum
gcgtttttaataacagagcaaccatgagctccatcattcaaagctttcaaaagaacagctccctccccgtctcccaaactgaatcaaaagaccactttccaccaccagctggcccagggcggctgcgaagaaggctttcatctctgtctctaaaactacaacccacttcttcaccggcgacgtcatggacattccccagatccaagtccttgtcttccatgggagaatatgccggtagctccatcaggaaatggtgggactggggttggtcttgggttctctccaaaaagccctcgttcgctaaagacattgaaatgaacgaagaagaaaccaggatccttgggtgccacaacaaaggcagttggaggcatgtgttttacaaagtcagat

SEQ ID NO: 222488 - DNA, 387 bp, Gossypium hirsutum
cccacgcgtccgcttttgcaatcctttgtagagctccgggatccattgtcaccatgtcttgctcaaatctgacaatgtgggtgtcctcaaaaccctctctttctgacacttcttcactctctttccgttctttcatcagcccttttcagctcccatctcagagctcaacccccggtaacccttccaggtcctcatctgtaaccccagttcactgtggtcttcgtgagcttagagaccgtattgattcagtaaagaacacgcagaagatcactgaagccatgaaacttgtggctgctgctaaagttaggagagcacaagaagctgttgtcaatggcagacctttctctgagtccctggttgaagttctttacaacatcaatgaacagc

SEQ ID NO: 222489 - DNA, 391 bp, Gossypium hirsutum
cttccccaaatcagcaccgatcggaaatggcttcaattgctggaatctggttaaccaaaaacctaattttctcttctccgcaaaccctaacaaaaccccttcaaatcccacaattcttatccctaaatcaacgcatacggttcccttctggaagaacccaccagaaaacagccgtaaaagcgtcgagctcgagcttcagcccaagcgcaccctccggctcgtcgtctaccggactgtactcttcaaagaaattcgagctcaccgctcaaaacgtggaccttgttcttgatgacgtgaggccttacttgattgccgatggcggaaacgtcgacgttttgtccgttgaagatggcatcatctcgcttaaactccaaggagcatgtgagagttg

SEQ ID NO: 222490 - DNA, 386 bp, Gossypium hirsutum
aaaaaagcttgagctgagagataagagaaagcactgaaaacgcaaaaccatggcctctgcttctctcctcaagacttcaccagttttagacaagtctgagtgggttaagggtcacacccttcgccaaccttccacttctgcggtgaggtgccaccctgttgcaccctctggactaactgtgcgtgcaagctcatatgccgatgagcttgtcaagactgctaaagctattgcttctcctggccgtggaattttggccatggatgagtccaacgctacctgtgggaaacgtttggcctcaatcgggctagaaaacacagaggctaaccgccaagcctacaggacgttgcttgtttcagctcctggccttggtcagtacatctctggtg

SEQ ID NO: 222491 - DNA, 407 bp, Gossypium hirsutum
acccgggcggcccaacccgtccgtttttaaggaccgacggcatcccagttgaagacattgttaagctcgtcgacaccttccccggccaatccatcgatttcttcggtgccttgagggctcgggtttacgatgacgaagtgaggaaatggatcagtgatgtcggagttgcaggcgtagggaagaagttagtgaactcaagggacggacctccaacatttgagcaaccgaaaatgaccattgaaaagctattggaatatggaaacatgcttgttgctgagcaagagaatgttaagagagtccaattggctgacaaatacttgagtgaagctgcccttggtgaagctaatgaagattctatcaacagaggaactttctatggcaaagcagcacaacaagttggggttcca

SEQ ID NO: 222492 - DNA, 292 bp, Gossypium hirsutum
cccacgcgtccgacaaaatcagttgcttcacaatggcctctacaaccatggctctttcttccccatcattcgccggtaaggcagtgaagttctccccttccacccctgaaatccggggaactggccgtgtttccatgaggaaaaccaccaagcctgttccttctggtagcccatggtacggtcctgaccgagttttgtacttgggtccactttccggtgagccaccatcttacttgaccggtgagttccctggtgactatggttgggacactgctggactctcagctgatcc

SEQ ID NO: 222493 - DNA, 388 bp, Gossypium hirsutum
gtttcattgaaggcgggactctcagactactctttcgaaccagctccaccatcacccccaaaaaacaaagcaaattgtagaagatggcaacacaagcacttgtatcatcgtctcttacctactcagtggagactgcaaggcagattcttggagctaaacgacaaattgggccttcaaggaaaggatcctttgttgttaaggcagcttcgactccacccgttaagcaaggagctgatagacctttatggtttgcatctaaacaaagcctttcatacttggatggcagccttccaggtgattatggatttgaccccttgggactctcagaccctgaaggtccaggagggttcatcgagcctaaatggctagcctacggtgagatcatcaa

SEQ ID NO: 222494 - DNA, 403 bp, Gossypium hirsutum
cttcacttaacaatggttcaaggttggtggtaacccaacctggaaccagcagccaacatggcctaattagcagcctccaccgttgccgcctcccttggcgtctctgaaatgctcggtaaccctctgaatttcagtggtggagctaggtcatcggctccaacaccatccaactcatccattttcaagaccgttgctcttttctccaagaagaaggccgctcctccaaagcccaaggctgctgctgtcgccccggccgatgaagagctggctaagtggtacggtccggacagaaggattttcttgcctgaaggtctgttagacagatcggagatcccagagtacttgaacggagaagttcccggagactatggatacgatccgtttggtctgagcaagaagccag

SEQ ID NO: 222495 - DNA, 217 bp, Gossypium hirsutum
atggcgggttgaagcttcccggaaaccccttttaccggttttttaacaacaattcggcataccatgatgtccaccatcagctttatggtaccaaatacaacttctctgtctactttgacatatgggacagaattctaggaacctatatgccttattcacttgagaagagacctgatggcggccttgaagtacgacgtgctgatcaagaacacaagaa

SEQ ID NO: 222496 - DNA, 387 bp, Gossypium hirsutum
cgagtttttataagcggttgatcctggcattccaaaatttgaattgtgtggctgaatgatctatggagactaagggagggaaaaagaagtctagtagtagtaagtcattattctacgaagctcctctcggttacagcattgaagacgttcgaccaaacggtggaatcaagaagttcagatctgctgcttactccaactgcgctcgcaaaccatcctgatattcgtaacgcaagtgcccccttctgaccactgttaaagtggtcaatttatttttatttgctttattacttagtattaatatctatcttcggccggcttcctccccctctctccttgcaactgttttctttgtatctacgatctcctcacttggcgtctgtctacttt

SEQ ID NO: 222497 - DNA, 390 bp, Gossypium hirsutum
gatttatttagctatagcatacactactagtacccactactagcaatggcttcctcaatgatctcatcggctaccattgccactgcctctccggcacaggctaacatggtcgctcctttcaccggcctcaagtctgcctctgctttcccagtcaccaggaaggccaacaacgacattacttctctcgcaagcaatggcggcagagtgcaatgcatgcaggtgtggcctcctactggaaagaagaagttcgagactctctcatacctccccgatcttacacccgtgcagttggctaaggaagtggattaccttcttcgctcaaaatgggttccttgcttggaattcgaattagaggagggattcgtgcaccgtaaatactcgagcctaccc

SEQ ID NO: 222498 - DNA, 375 bp, Gossypium hirsutum
cttacttacccaacatcagccgacttagatgctggccaaaaaaaccccagggcgaacaccacagcagaagctaccaataccaacaccatcaccggcagcttagaagacgaggatattcaggatgataaagagaaaggcatacgccatttgcttgaagcttctgatgatgagcttgggattcctaatagggaacatgggtttgatgttggagtttttgagtttgaacacggttgtgacaatggtggaaatgggctagctttatgtgataggacgcgggaatttgaagatgacgctgctgattattatactttgttgcagtctgaactttgcctggaattatgagctgagaatgggccttgtgtcaggatgattata

SEQ ID NO: 222499 - DNA, 378 bp, Gossypium hirsutum
ctttagctctccttctctctctctttttgttctctcgcttaagcctgtggaagatggtggcgttagaaaggagcctagaagcagccatgaatgcgaggataatagggagtgggagtgagacgatggtgctagcacatgggtttggaggagaccaatctgtgtgggacaaagtcctcccttgcttgacaaagcattaccaggttgtcctttttgactggactttttcaggggctgtaaaagatcccaacctcttcgatcctttgaaatactcttcttatgatgcctttgctgatgacttgattgctcttttggatgagcttcacttggaatcctccctcgtctttgtcggtcactccatgtctggtatgatcggatgca

SEQ ID NO: 222500 - DNA, 355 bp, Gossypium hirsutum
tgcactcatgcctgaatatgatcctgtggcaaagatttctatcattcctcgtggtcaagctggtggccttaccttttttgctccaagtgaggagaggcttgaatctggtctctacagccgaagttacctacagaaccagatggcagttgcactcggtggaaggattgcggaagaagtaatttttggtgaggaaaatgtgacaacaggagcatcaaatgactttatgcaagtctcacgagtggcaaggcagatggttgaaagatttgggttcagcaaaaagattggacaagttgccattggtggacctggtggaaaacctttcttaggacaacagatgtcttctcaaaaagactac

SEQ ID NO: 222501 - DNA, 388 bp, Gossypium hirsutum
cccactcgtgcgtccacgcgatcgtactctatagaataactgtagcatatagggctagtaagcaggaatagcaatggcctcctccatgatctcatgggcaaccattgccaccgtgaactgctcctacccggcacaggccaacatggtggcccccttcaccggcctcaagtctgcctgtgctttcccagtcactaggaaggccaacaacgacatcacttgtcttgcaagcaatggtgcgagagtgcaatgcatgcaggtgtggactcctcttgagaagaagaagttcgagacactctcatacctgcccgatcttacacccgtacagttggctacggaagtagattaccttcttcgctctaaatggattccttgcttggaattcgaatta

SEQ ID NO: 222502 - DNA, 339 bp, Gossypium hirsutum
ccggggcggcccaacccgtccgaattcccccatggcattaattattttcatgggcttcgacaacgtgcgtcaagtgcagtgcattagtttcattgcctacaagcctccaggcttttaagtttttaataaacttggcctttcaattggttggaattggacctaaaaaaaccaaggtctttacacttggtttctctctctctgagagattgggctctgtgtctcgagatctgggggttaatcctttttggattttcattggaagaaaggctgtgaactaatgtataaaagttggttttcttcccaatttccttcctaacaaaaaaggtgttttttatgaac

SEQ ID NO: 222503 - DNA, 386 bp, Gossypium hirsutum
cccacgcgtccgcctacttaaaatttgtctttataatcacagtcgaagagtccttggagtttgtgaatgacccttattgcatacaggtaaagagtctgttatttacaaacatgtggctgtttggcagaaaagggccatctgggttttcgtcatcttccacagctgaggaagttacacaggggatcgatggcactggtctcactgccattgttacaggagcattcagtggtattggcactgaaaccgcacgtgttcttgctctgcgtggtgttcatgtaattatgggggtcaggaatgtggctgctggtagagatgttaaagaagcaattgtgaaggaaattccaacagctaaagttgatacaatggaattagatctcagatcaatt

SEQ ID NO: 222504 - DNA, 381 bp, Gossypium hirsutum
gttagctatagcatacactactagttcccactactagcaatggcttcctgagcgagctgatcggctaccattgccactgcctatacggcacaggctaacatggtcgctcctttcaccggcctgaagtctgcctctgctttcccagtcatcaggaaggccaacaacgacattacttctctcgcaagcaatggcggcagagtgcaatgcatgcaggtgtggcctcctactggaaagaagaagttcgagactctctcatacctccccgatcttacacccgtgcagttggctaaggaagtagattaccttcttcgctcaaaatgggttccttgcttggaattcgaattagaggagggattcgtgcaccggaaatactcgagccta

SEQ ID NO: 222505 - DNA, 384 bp, Gossypium hirsutum
gttagctttagcatacactactagtacccactactagcaatggcttcctcaatgatctcatcggctaccattgccactgcctctccggcacaggctaacatggtcacccctttcaccggcctcaagtctgcctctgctttcccagtcaccaggaaggccaacaacgacattacttctctcgcaagcaatggcggcagagtgcaatgcatgcaggtgtggcctcctactggaaagaagaagttcgagactctctcatacctccccgatcttacacccgtgcagttggctaaggaagtagattaccttcttcgctcaaaatgggttccttgcttggagttcgaattggaggagggattcgtgcaccgtaagtactcgagcttaccc

SEQ ID NO: 222506 - DNA, 379 bp, Gossypium hirsutum
cccacgcgtccggccgtttctggtagtggacagcaacatggcagtgtttattggaacaaaggtagttctgcattgttatcatcattggaccccaagaagccattagttgatcagctccgcgatgccttttctgttaaggaatcaccgatatggatggactgcagcacaactgctcagtgtagagaaatagagaaagctgtcggtggtgcattggagttgtctaaaattactggttctcgtgctcatgagagatatacaggaccacaaattcggaagatatttgagacacaacaagaaacttatgagaacactgagaggatctctcttgttagctctttcatggcttgtctattcttaggggcttatgcttgtattgata

SEQ ID NO: 222507 - DNA, 385 bp, Gossypium hirsutum
tttatttcctgccttagtttcattgaaggcgggactctcagactactctttcggaccagctccaccatcacccccaaaaaacaaagcaaattgtagaagatggcaacacaagcacttgtatcatcgtctcttacctactcagtggagactgcaaggcagattcttggagctaaacgacaaattgggccttcaaggaaaggatcctttgttgttaaggcagcttcgactccacccgttaagcaaggagctgatagacctttatggtttgcatctaaacaaagcctttcatacttggatggcagccttccaggtgattatggatttgaccccttgggactctcagaccctgaaggtccaggagggttcatcgagcctaaatggctag

SEQ ID NO: 222508 - DNA, 389 bp, Gossypium hirsutum
gcagccatggcaaggatcaaggtgcacgagttaaggagcaaatcaaagacagagctgttgactcagctcaaggatttaaaagccgaactttctctccttcgtgttgccaaggtcactggtggtgcccccaataagctctccaagattaaggtggtgaggctatccattgctcaagtattgacggtgatatcccaaaaacagaaggctgctttgagggaagcttatacgaagaagaagtttttgcctcttgatctccgtcccaagaagaccagagctattcgccgccgccttaccaagcaccagcaatctttgaaaaccgagcgggagaaaaagaaggagatgtactttccgatgaggaagtatgccattaaggtataagcttgaaattt

SEQ ID NO: 222509 - DNA, 385 bp, Gossypium hirsutum
agccgtaaccatgtcttccttcctagccaacggcatttccagcttctcaccacagcctactttcgattcaaccaagttccttaaaggcttcttcccaaagctcgattccgtcaaatccataaccccaaaactccaaagttcaaggcttttgaaggtcagagcagatgttggtttcgatcctcaaactctcacgtcagatcccagctcttcatcaggtaaatcctacgatgacaaaatccaggaaattcttcgaaaccgtgattatgataagaagtttggctttactatggatatcgattcttttgcgatacccaaagggctttctgcagaaacaatccgtttaatttcttctttaaaggaagaacctgattggatggtggagctt

SEQ ID NO: 222510 - DNA, 384 bp, Gossypium hirsutum
ataattccaaatccttcattaccatttaacgaacttaactttccagtctggaatggcggctgccgtctccaccatcggtgctgtcaaccgagcaccgttgagtttgaatggatcaggtgccggagcttctgctccaagctcagctttcatggggaacagcttgaagaaagtgagcgctaggttcaacaacaacggcaaggctccagtgggaagtttcatgattgtggctgccaaagaaatcgacgaagacacacagaccgaccaggaccgatggaagggtcttgcttatgatatctccgatgaccaacaagacattaccagagggaaaggtatggtcgactcattgttccaagctcccatgaacgatggtactcactatgctgt

SEQ ID NO: 222511 - DNA, 375 bp, Gossypium hirsutum
tccgccaacccgtccgttagttcgtaccattggcggcttaacttcaagctgcagctaccctgatgcaaccaatcaaggttgctgcaccatcaaggaccaatgtgccgctcaggtcctcccagagcgtttctaaggccttcggtttggagcctgttggtgctaggcttacctgctctttgcaaactgacctcaaggacttggctctgaagtgtgttgatgctaccaagctcgctggtttcgctcttgctacatctgctcttgttgtctcgggagcaagcgctgaaggagtttcaaagcggctaacctacgctgaaatccaaagcaagacatacatggaagtcaaaggaacaggaactgctaaccagtgcccaacca

SEQ ID NO: 222512 - DNA, 389 bp, Gossypium hirsutum
accctttcttaccattaagggtcatgaagttctgggggatgtgaacaacaagctggtccatgaaagctggggcaatgtagaatccatccatgttgttgtccaagtcgtatgtgcgaaggccttggctaaggtattcataggagctcatgacagcatagtgagtaccatcgttcatgggagcttggaacaatgagtcgaccatacctttccctctggtaatgtcttgttggtcatcggagatatcataagcaagacccttccatcggtcctggtcggtctgcgtgtcttcgtcgatttctttggcagccacaatcttgaaacttcccgctggagccttgccgttgttgttgaacctagcgctcactttcttcaagctgttccccatgaaa

SEQ ID NO: 222513 - DNA, 384 bp, Gossypium hirsutum
cccacgcgtccgtaataatcacaaatatctcgcaccaaaacccaaataaccaacctgcttcctcatgccttattcatcatcatcatcatcatcaatggctagcaaattggctttcactttgatgcctcctcgtttcttcactgcgactattcaaaaacccgtggtttgtttctcttcttcttcttcttcttctatcaggtttcaacccagtgggaagcatctatgttttcgacgccgattgctcttactacccctcaaggctactgccgatcaacaaggtcaggtcgaagaagatgaagttgttgatagtaaaattctgccttactgtagcatagacaagaaagagaagaagtctttgggtgaaatggaacaagagtttcttca

SEQ ID NO: 222514 - DNA, 382 bp, Gossypium hirsutum
cccacgcgtccgcgacttttcctttccttttatatccgcatttctttctttttctcttttcttgttcttgttcttgttccccccttgttgatattctctatttactttgagggattaatataagaaggcaatgtgggatggtggggttttaggcttgatttggcgtttgaagcctgcctcactccctttgttggttttcaggtgctttcgggactaattggttgcctgcttttgacgatgatggagaagcttaattttgtaaagaacggtgtgcttagattgcctcctgggttccgcttccatcctactgatgaagagttagtggttcagtacttgagaagaaaggtgctttcttggcccttacctgcctctatcatacccg

SEQ ID NO: 222515 - DNA, 390 bp, Gossypium hirsutum
ttttgtttagatgaaattctgtttgagtttcctttggtgaatgatcagacttagagagagagcagagtaatttgggtcaagtgtttctgggttttcacaaccatggcttcttcaatgcttagtggagcagccccaacaggggtaggatttgcgaggtccaattttcattttaggagcttgccccagaagagtttattttcttatacaaagaatcagaagactagaatggtggtaacaaccagatgcagtatatcatcctcaaggccggcttctcagcctaggttcatacaacacaagaaagaagcgttttggttttacaggtttttatcaatagtgtatgatcatatcataaaccctggtcattggactgaggatatgcgggatgaggcg

SEQ ID NO: 222516 - DNA, 343 bp, Gossypium hirsutum
ggtaacgaagattggcgagtcccaatcaagtatcttctttgcggatcgttcaggacagcattatcagcaatgtctatcactggctgttgatgatcttgcagttcttgatggaaagactccggttcaagtctaccagggcttttgcgagagctttaagtccacattctcacctttcatgggttctaccatcacgggcatctcaatgggtcttggaccagatggtgaactccggtatccctcacaccacaagcctgccaagagtggcacgattactggagtcggggagttccaatgttatgacacaaacatgcttaaccttcttaagcaatatgctgaagcaaat

SEQ ID NO: 222517 - DNA, 392 bp, Gossypium hirsutum
ccttccgcggccccttgggggaaactgtggatttcaagaacatcagctttactgtctgggaggttggtggccaggacaagattcgtccattgtggaggcattacttccaaaacacacaaggactcatttttgtggttgatagcaatgatcgtgatcgtgtggtcgaagccagggatgagttgcacaggatgttgaacgaggatgagttgagggatgctgtgctactggtatttgcaaacaagcaagatcttccaaatgctatgaatgctgccgagatcactgacaagcttggccttcattctctacgtcagcgccactggtacatacagagcacatgtgccacttccggtgaaggactgtatgagggactggattggctctcaaacaacatt

SEQ ID NO: 222518 - DNA, 380 bp, Gossypium hirsutum
aaaaacagggggggtgtggtagttcgagttatcgacaacgttgggtttcaacacgaaaaaaaatggataacttttacgcaccagggaagaaccatctcttcgttccgggtccggttaacataccggaacccgttattcgagccatgaaccggaacaacgaggattaccgttccccggctattccggcgatgacaaaaacccttctcgaagatgtcaagaagatattcaagactacgaccgggactccttttatgatcccaacaacaggaaccggtgcatgggagagtgcacttactaatacgttatcccccggtgaccgaatcgtatcgttcctcattggacaattcagtcttctttggatcgatcaacaacaacgtctt

SEQ ID NO: 222519 - DNA, 426 bp, Gossypium hirsutum
  unsure (1)..(426): unsure at all n locations
ccggnncggaaannccggggcggcccaacccgtccgaaggctgcagttaccctgatgcaaccaatcaaggttgctgcaccatcaaggaccaatgtgctgctcaggtcctcccagagcgtttctaaggccttcggtttggagcctgttggtgctaggctcacctgctctttgcaaactgacctcaaggacttggctcagacgtgtgttgatgctaccaagctcgctggtttcgctcttgctacatctgctcttgttgtctcgggagcaagcgctgaaggagttccaaagcggctaacctacgatgaaatccaaagcacgacatacatggaagtcaaaggaacaggaactgctaaccagtgcccaaccatcgatggtggtgtcgactcttttgccttcaagcctggcaaatactacgccaagaagttc

SEQ ID NO: 222520 - DNA, 355 bp, Gossypium hirsutum
aatccgacggtcgagatggctctatcacacctcgccgcttctgcttctcgctgctctagtcttcttaaacccctctcgtcggctctttccctccgacgcccgatctccggcgataactctcccttgaccgtcgagacctctgtccctttcacctctcaccagtgcgaagctccctcacgttccgtcgagaccaatccgaaggagctccttacctttttccgagacatggcgctgatgcgtcggatggagatcgctgccgattcactctacaaggctaagcttatccgtggtttctgtcatctatacgacgggcaagaagccgtcgccgttggcatggaagccgccattaccaaaa

SEQ ID NO: 222521 - DNA, 376 bp, Gossypium hirsutum
gtttcctttctcgattttctatttagccaaacaagatgcagatcttcgttaagactctaaccggcaagacgatcactctcgaggtcgagagctccgatacgatcgacaacgtgaaggccaaaatccaagataaggaaggcatccctccagaccagcagcgtctgatcttcgccggaaaacagctcgaagacggccggaccttggccgattacaacatccaaaaggagtcaactctccacctcgtcctccgtctgcgcggtgggatgcaaatcttcgtgaaaaccttgactggcaagacaatcactctcgaggtcgagagctccgacacgatcgacaacgttaaagcgaagatccaagacaaggaaagcatcccccc

SEQ ID NO: 222522 - DNA, 392 bp, Gossypium hirsutum
ggcttctgcttccgctactctcctcaagtcttcacctattatcgacaagtccgagtggattaagggccaaaacctccgccacccttcggtttgttttgtacggtcacaccctacatcggccgcctttgccgtccgtgctagttcatatgccgatgagcttgttaagaccgcgaaaactgttgcatctccaggtcgtggtattttggccatggatgaatcaaatgctacatgtgggaaacggcttgcctcgattggtctcgagaataccgaggcaaaccggcaagcttaccgtacccttctcgtgtctgcccctggcctcggtgactacatctcgggagctatccttttcgaggagactctctaccaatctaccatcgatgggaaaaagatgg

SEQ ID NO: 222523 - DNA, 421 bp, Gossypium hirsutum
  unsure (1)..(421): unsure at all n locations
cggaaannccgggcggcccacgcgtccgcccacgcgtccggccgcgtcgctgttattccccgtcgcatcgtcgacgaaaacgggcgctcctccaacctactcgccacggaaaccagtaccttccggtcaccgtttcttctcattcccttccaaaaccaagcctcttctcaaaatcaccggcaattcaaacaaacatcggtctttcaccgccaaggctatcgaagaaagcaaggagagcacggaagacacgttgaccgccaaggaagtggagacggaaccggaatcgagcgaggaaagcgagctgagtgccattggagcagagataaagacggcgatgaaggagagagaagcgaataatagtgataacagtctcgccggcggagtggctgaggagataagggaaatcgagtggcctgcattt

SEQ ID NO: 222524 - DNA, 346 bp, Gossypium hirsutum
tcgctttggttttatccctttccaccgatggaccgttgatctctaatcttcctcctccggtcctccgtcgttgcttcggccgtcgtctccgacgttaatagcgacggcgatcctctcatccgtcaagttgtttccgatggtggtgtcgaggaggactccgatgaccatctccttaacgcggagcaccacttcacgctgttcaaatccaagtatgggaaaacctacgcatcccaggaggagcacgattaccgactgggagtcttaaggctaacctgcgtcgggccaagcgtcatcagcttctggaccccagtgccgtccatggcgtcacaaaagtttccgatttaac

SEQ ID NO: 222525 - DNA, 376 bp, Gossypium hirsutum
ggagagccttttttttgtgtagcgattctcagttagtcttttctttaagcttacagcttctctccagagttttataatgggtaaggagaaggttcacatcaaccttgttgtcattggccatgtcgactctggcaagtcgaccactactggtcatttgatctacaagctaggtggtattgacaagcgtgtgattgagaggttcgagaaggaggctgctgaaatgaacaaaaggtcattcaagtatgcttgggtgcttgacaagcttaaggctgagcgtgaacgtggtatcaccattgatattgccctgtggaaggttgagaccaccaaatactattgcaccgttattgatgcacctggacaccgtgactttatcaag

SEQ ID NO: 222526 - DNA, 388 bp, Gossypium hirsutum
gggaagacatatggggtgaccatatgcaccatggatattacgacccgggttccggtgtttcgggttcagatcatcgtgccgctcagattcgaatgatcgaagaatcgctccgtttcgctggaatatcggatgacccagcaaacagacccaagagaatagttgatgttgggtgtgggataggaggcagttctaggtatctagcaaggaaatatggagcaaaatgccaaggcattactttgagccctgttcaagctggaagagccaatgctcttgctaatgctcaagtactagcagaccaggtttgttttgaagttgcagatgccttgaaccaaccattccctgatgaccaatttgatcttgtttggtctatggaaagcggagaacacat

SEQ ID NO: 222527 - DNA, 392 bp, Gossypium hirsutum
gcaaaacaaaaatggccatggcaatggcgcttcgacgactctcctcttccattgacaagcctctccgtcctttcttcaatgccccttccctctattacatgtcgtctttgccaaatgaagctgtgtacgagaaggagaaacctggcgtcacttggccaaagcaactgaatgctccacttgaaaccgttgatcctgaaattgctgacatcatcgaacttgaaaaagcgcgccaatggaagggacttgaactcattccatcggagaacttcacgtcggtgtcagtgatgcaagcagttgggtctatcatgaccaacaagtacagtgaagggtatcccggtgctagatactatggagggaatgagtacatcgacatggcagagatattgtgtcag

SEQ ID NO: 222528 - DNA, 371 bp, Gossypium hirsutum
gttttaagaatactgctggaatagagcctgaagatgttgccaaacgtcttatggactatggattccatgctcctacaatgtcgtggcctgttccgggcacgctcatgattgaacctactgaaagtgaaagcaaggcggagctggaccggttctgtgatactcttatctccattagggaagaaattgctgaaatcgagaatggaaaggctgatatccacaacaatgttcttaagggagctcctcatccaccatctttgctcatggccgatgcatggacaaagccgtattctcgggaatacgctgccttccctgcttcctggcttcgaactgctaagttctggcctactacaggacgtgttgacaacgtatat

SEQ ID NO: 222529 - DNA, 383 bp, Gossypium hirsutum
cctttatccccttctattgtactaattggcttggctgccattgaaatggcttgctgcggtgagggccaggaaaaggtttttttggcttcctttgggtcaatccttattgtgacttgcctagtcaccattggcaccaccgggttcattttcaaaaagaaatccagtaatactgtagcagctcactccatcatcaaatcttcatgtagctccacgttgtacccagagttatgctactcaacaatctcttcagcaccagatgctgagaccaaggtcaagaaccccaaggatgtgattgaattgtcgctgaacttgacggtgactgctgttcagagtaactatttgtccatcaaaaagctcattagtacccaaaggaagagcctcac

SEQ ID NO: 222530 - DNA, 400 bp, Gossypium hirsutum
cttagtttcctcttagcaaagacttcagccacccacgcagcccctttaccgatccaaacaatgggacgcgtccgtacgaagactgtgaagaaatcgtctcgtcaggtaatcgagaggtactactctcgcatgacgcttgatttccacaccaacaaaaaggttatcgaagaagtagctattatcccatccaagaggctccggaacaagattgctgggttctcaacccatttgatgaaacggatccagaagggtccggttcgtggcatttctctgaagcttcaggaagaagagcgtgagcgtcgtatggattttgtccccgatgtatcggctattgctgttgattcaatagaagttgataaggaaaccattgatatgctttcacttcttggaatggccgatc

SEQ ID NO: 222531 - DNA, 403 bp, Gossypium hirsutum
tttagctatagcatacactactagtacccactactagcaatggcttcctcaatgatctcatcggctaccattgccactgcctctccggcacaggctaacatggtcgctcctttcaccggcctcaagtctgcctctgctttcccagtcaccaggaaggccaacaacgacattacttctctcgcaagcaatggcggcagagtgcaatgcatgcaggtgtggcctcctactggaaagaagaagttcgagactctctcatacctccccgatcttacacccgtgcagttggctaaggaagtggattaccttcttcgctcaaaatgggttccttgcttggaattcgaattagaggagggattcgtgcaccgtaaatactcgagcctacccacgtactacgatggacgct

SEQ ID NO: 222532 - DNA, 417 bp, Gossypium hirsutum
  unsure (1)..(417): unsure at all n locations
ggaaaggccggggcgggcgacgcgttagttaaacggtttcaaaaactttttcctcccacacatccccttaaccaatgcggccgttggtacgcgtgcgtgctgacaccnacaagaaattgtctcgtcaggtaatcgaaaggtactactctcgcatgactctcgatttccacaccaccaaaatggttatcaaataagtagctattatcccatccaagaggcttcggaacacgatagctgggttctcaacccatttgatgaaacggatccacaagggtacggttcgtggcatttctcttaagcttcacgaagaagagcgtgtgcgctgtatgtattttgtccccaatgtatcagctattgctgttgattaatttaagttgataatgaaaccattgatatgctttcacttcttggaatggg

SEQ ID NO: 222533 - DNA, 390 bp, Gossypium hirsutum
gcctgttagtgtggcatttgaagttgtcactagtttccgtttttacaaaagtggggttgataccagtaaaacatgtggcagcacacccatggatgtgaaccacgctgttcttgcagttgggtatggagtcgaaaatggcgttccatattggctcattaagaactcatggggtgcagaatggggtgacaatggctacttcaagatggagatgggcaaaaacatgtgcggtgtggcaacttgtgcatcatacccaattgttgcttgatccaatcgatgaaccgttttggatcatgtcatttctgtgttatagaaagcttctagttatggtctacaaatgttgttgtaggtgttcggggttatggtctaggtgaaaccgatgggttcatgtac

SEQ ID NO: 222534 - DNA, 387 bp, Gossypium hirsutum
  unsure (1)..(387): unsure at all n locations
agcaaaaccatggcctctgcttctctcctcaagacttcaccagttttagacaagtctgagtgggttaagggtcacacccttcgccaaccttccacttctgtggtgaggtgccaccctgttgcaccctccggactaactgtgcgtgcaagctcatatgccgatgagcttgtcaagactgctaaagctattgcttctcctggccgtggaattttggccatggatgagtccaacgctacctgtgggaaacgtttggcctcaatcgggctagaaaacacggaggctaaccgccaagcctacaggancgtgcttgtttcagctcctggccttggtcagtacatctcaagtgccatcctctttgaggaaaccctctatcaaaccacaattgat

SEQ ID NO: 222535 - DNA, 424 bp, Gossypium hirsutum
  unsure (1)..(424): unsure at all n locations
cgtnctcggtcagtacattctcagngtgctcatcctcttttgagtgaaacccctcttatcaaaccacaatgtgatggcaangaagatgtgttgattgttcttgttgacgcagaacattagtccctggtatcaagcgttgacaacgggtcttgttccacttggctggttcaaacaacgagtcatggtgccaaggtcttgatggcctcgctccacgttcagctgcatactaccaacaaggagctcgttttgcaaaatggcgtactgtggtaagcattcccaatggaccaaccgaacttgctgtgaaggaagcagcctggggacttgctcgctatgccgccatctctcaagacaatggattggttccaattgttgagccagagatcttgcttgatggtgatcacggaattgacaggactttcgaagt

SEQ ID NO: 222536 - DNA, 364 bp, Gossypium hirsutum
gtcgacggcttctatcaacggttggtgccttacctcctcttcttccaccactaccacctcctctttttccgctcgtcgacgacctacattgcggccttcagtcgtcgctagccttaactcttctccttctcctccgactcttatccaagaccgcccggtttttgctgcccctattcctttgctcaccccgagagaagagatgggaaacaagtcctacgacgaagccattgaagctctcaagaaacttctcagtgagaaaggagaactgaaagctgaagcagctgcaagggtagatcaaataacagcagagttaaacacagcatcagctgatggcaaaccatctgactcttctgttgagagactg

SEQ ID NO: 222537 - DNA, 383 bp, Gossypium hirsutum
gagtacttgaacggagaagttcccggagactatggatacgatccgtttggtctgagcaagaagccagaagactttgcaaaatatcaagcatatgagttgatacacgcaaggtgggcaatgcttggtgctgcagggttcatcatccctgaagcctttaacaaatttggtgccaactgtggccccgaagccgtttggttcaagaccggagctcttctcttggacggtaacaccttgaactacttcgggaagaacatccccatcaaccttgtggtggctgtcgttgccgaagtcgtccttgttggtggtgctgaatattacagaatcatcaatggcttggatctggaggacaagcttcaccctgggggaccatttgacccactggg

SEQ ID NO: 222538 - DNA, 362 bp, Gossypium hirsutum
cccacgcgtccgacttttaacccctgccgacactctcaccattttctcagcaaacttagcctatgaaaatcaccattacaagtcccaaagaagacccccgctaattctaaaagaaagaaccagagttttctttctctttagtttacgtttattgtccttttggaatttttgatactaaaaaaaggaagcaacgaagaagggaaatggagggcaaagaagaggatgttagattgggagccaacaagttcacagagaggcaaccaattgggaccgcggctcagagtcaagatgacgggaaagactacactgaaccaccaccggctccatttttcgagcctggcgagttaacctcatgggtcttt

SEQ ID NO: 222539 - DNA, 409 bp, Gossypium hirsutum
  unsure (1)..(409): unsure at all n locations
ttcgctttgagattagatccaaaattcccctttcatcatatttccgattccccaattttgcctgaaaccctaatcctaatcccggattcttctcgtctacatcgtctagcaaatggcaaccgaggagccggcagtcgtggcagaccccgcaccggagacggaggaggacaagactgctgagaccaaagctacttcaaaatctggcagagcaaagaaaaccaaagaacccaaaaccaagaaagctgcagctcctcggaaaccacgggctgctcctactcatccaccttacgaagagatgatcaaagatgcgatcgttactttgaaagagaggacaggttcaagtcagtacgccattgctaagttcattggagagaaacagangaatcttcctgggaatttcaagaagctt

SEQ ID NO: 222540 - DNA, 370 bp, Gossypium hirsutum
ggaccttcaatttttcatcggagagagcatgcacgatgatggatgtttggtatttgcttactacaaggatggtgctgttgacccgacatttttgtactttgcgtatgcattgaaggaggtcaagtgctgaggtttgaagcaaagaaaaaaaaagtggttgctgaagaatttagtcctttttattattgcttttgtctcttattttcagtactctgctaaagacataaattatttatggtttttgatgtttttgatttaattgtttgttgttttatcatggaatggtttctatttttatggggtgactaaacaagaatttaactcttttgttctataactacttaattttattggaaggaggtttttggga

SEQ ID NO: 222541 - DNA, 400 bp, Gossypium hirsutum
ctcagctcagctcaactcaactcacttaaatcttttctgctgcggtggcgatgggggcggcgatgttgtcggagttggcgacggagatcgtggtgccagtgtgcgccgtgattggaatagctttctcgttggtgcagtgggtgatggtgtcgcgcgtgaagcttacctccgagcgccatgcgtcgtcggcgaatagtagcaagaatggttacggtgattacttgattgaggaagaggaaggaatcaatgaccatagcgttgtcaccaagtgcgctgatattcaaaacgctatctctgaaggtgcaacatcctttctttttactgaatatcagtatgttggcatcttcatgattgctttcgctatcctgatttttcttttacctgggctctgttgagggct

SEQ ID NO: 222542 - DNA, 405 bp, Gossypium hirsutum
cccacgcgtccgcccacgcgtccgctttgccaaacatggagactagtgtcacgtgctacgctcgtgggattgttcttcctggtgtctcttctaagcactcctcggcattagtctcccctccatccatatctccttccttcagctctaagagccttaaaacaagttcactatttggagaatcattaagggttgttccaaggtcatcattgaaggtttcaaaggcaaagaacactacttcactagtgacaaaatgtgaaattggagagtctttggaagagtttcttacaaaggcaacaacagataaggcattgattagaataatgatgtgtatgggtgaagcattaagaacaattgcttttaaagttagaacagcttcatgtggtggtactgcttgtgttaattcct

SEQ ID NO: 222543 - DNA, 386 bp, Gossypium hirsutum
tgaaaaaaaaaaataagacatgtatttggatatttcctttcaactacaacaatattctagtatttatttgatatgacatgaatagttgaagggaattccccgaagagaaaatggattatgggagtaacaaaaaaacctgacttgaacgatcctgtattaagagctaaattagctaaaggtatgggtcataattattatggggaacccgcatggcccaatgatcttttatatatttttccagtagtaattctcggtactattgcttgcaacgtgggcttagcggttctagaaccttcaatgattggtgaacccgcggatccatttgcaaactcctttggaaaatataacctgaatggaatttctttcctgtatttcaaatacttcgt

SEQ ID NO: 222544 - DNA, 406 bp, Gossypium hirsutum
ggggaatctatatgagtgccaaggttgctttttgcatccacaatatagcctatcaagggagatttgcctttgaagattactcacttctcaatttgcctgatcaattcaagagttcatttgacttcatggatgggtatgataagcctgtcaagggaaggaaaatcaattggatgaaggctggaattttggaatcacacagggtattgactgtaagtccatactatgcccaggagcttgtttccggtgaagataaaggtgttgaactcgatcacatcattcgtaaaaccggcatcactggaattgtgaatggcatggatgttcaagaatggaaccctaccactgacaaatacatcagtgtcaaaatatgatgcaacaactgtaacgtatgcaaagcgattattaaagg

SEQ ID NO: 222545 - DNA, 390 bp, Gossypium hirsutum
atcatgtacatggccatggcgacttaagcaggtctgttcacctccacaatgacgaccctaaaatctttggccccatggaaaccagcctcatcattttcctttgctacctgttccaagtccctcaacttctgcgtggctcaaagaaccattagagctgcagctgctgatgaggaagcatcatctgctgccgccacaaaggaagctccggttggtttcacccctccagaattggaccccaacaccccatcacccatcttcggaggaagcactggaggactgcttagaaaggctcaagtcgaagaattctacgtcatcacatgggattcacccaaagaacaaatatttgagatgccgactggtggggcggccatcatgaggcaaggacctaac

SEQ ID NO: 222546 - DNA, 403 bp, Gossypium hirsutum
cacgttcttgtttttttcacttctttctctttctcgaaaaccggtcacctgaaactcaaacgcctctctgaatcctcgccggaacctgtcaatctcttacatctccggcggctgtctcacggatctgttcacgatgagcaccggccaacttctcagcatcgagcctcaagagctccagttcccatttgaattgagaaagcagatctcgtgttccctaaacttgtccaacaagaccgacaattatgtggcttttaaggtcaaaacgacaaatccaaagaagtactgtgtaaggccaaatactggagttgtgctgcctaggtctacgtgcaacgttgttgttacaatgcaagctcaaaaggaagcacctactgatatgcaatgcaaagataagtttttacttcag

SEQ ID NO: 222547 - DNA, 335 bp, Gossypium hirsutum
cttcagttcttcacttccccagtcttcagcaatgggagaaaccgattcttgcttgtcgaacaaatcagcgaagatcttcgtagcaggccatcgaggcctagttggttctgccatagttcgtaaacttcagtccctaggctttaccaacctcctactccgcacccatgccgatctggaccttactcgccaatccgacgtcgaatccttcttcgccgatgagaaacctcactatgtcgtactagctgccgctaaagttggtgggatccacgccaacaacacttaccctgccgatttcattgccatcaaccttcaaatccagaccaacgtcatcgatt

SEQ ID NO: 222548 - DNA, 336 bp, Gossypium hirsutum
cccacgcgtccgcccacgcgtccgtccacgcgtccggtccgtctctctgttttactccacaaccactatcactaccattatggcttcggctactgtttctgtagccaaacccaaccttcagattcaggcaaaaggaaagggtgttggttttgcagatttctcaagcctacacaactcctctactagccttccctttgccaggaaaacctctgatgacttccattcactcgttgcttttcagacatctgctctaggaagcaataatggcgggtacaggaaagggatggcagaggcaaaacctaaaggtggctataaatgggttttggtagggattgg

SEQ ID NO: 222549 - DNA, 400 bp, Gossypium hirsutum
cggacgcgtggggcacatatttctatttcccactctcttttttgctctcagttaacaacaaaatccgtaaatggctaccactgcttctccaatggcgactcagctgaagagcagctttacgtcgtctgttacaagaggactggtagtccccaggggcatttcgggatccccgttcaaagtatcttccggaaagaccaggaccccttgcttcactgtcaaagctgttcaatccgacaagtcaacatttcaagtaatccaacccatcaacggcgaccccttcattggaagcctggagactccaatcacctcaagccccttaattgcatggtacctttccaacctcccagcctataagacggcagtgaacccacttcttgagggaatcgaagtgggtctggct

SEQ ID NO: 222550 - DNA, 359 bp, Gossypium hirsutum
cttttaaccaaacactccacaaaattttctcgaaaaaaaaaaaaaaaatgaggaagtgtgaactatgtggaaggctagctcgaatgcactgtgaatcagatcaagcaaatttatgttgggactgtgatttcaaggttcatggagccaatttcctcgtagctaagcataatcgaaccctcctttgccatgtttgtcaaagtcctactccttggctcgcatctggtcggaatctcggctccgcggtttctgtttgtgattcatgcgttgtaaacggcaacaataagtgtgagtcatcggagagagagtatggtgaagaggaggaggaagaagaggaggagggagattatgataatgacgcc

SEQ ID NO: 222551 - DNA, 399 bp, Gossypium hirsutum
gcggttttcatttccccttcgcaagtagccagccgtttcacacactcaagaagagcgagagctcgtaaatcatggcggaacagaccgaaaaagcttttttgaagcaacccaaagtgtttttgagctcgaagaaaggtgggaaagggaagaggccaggaaagggtgggaatcgcttctggaaaagcattggattgggcttcaagactccccgtgaagctattgaaggaacctacatcgataagaaatgccccttcactggcactgtttcaatccggggtcgtatcttagccggtacttgccacagtgccaagatggtcaggacaatcattgttcgacggaactaccttcattatatcaagaaataccaaaagtatgagaagcgccattcaaacattcccg

SEQ ID NO: 222552 - DNA, 401 bp, Gossypium hirsutum
cccacgcgtccggatccacggcgatgatctatggccatgttttggtttttgattgtttcaggtgccttggacactccaatgctgaagttgttccacatgaagttttcaataagttacctttacttaggtatttcatctatacccccacgtatcatagtcttcaccacacagagatggagaccaatttttgtctgttcatgccgctgtttgatgcactggggagtacacttaacaccaaatcattggagctacataagaaaattacctcaaattctggaaaaaacgggagggtaccggattttgtgttcctagcacatgtggtggacataatgtcggcaatgcatacaccgtttgcgttaagatcatttgcgtcgaccccatttcgcatgaagatgtttctg

SEQ ID NO: 222553 - DNA, 400 bp, Gossypium hirsutum
cccacgcgtccgagcatacactactagtacccactactagcaatggcttcctcaatgatctcatcggctaccattgccactgcctctccggcacaggctaacatggtcacccctttcaccggcctcaagtctgcctctgctttcccagtcaccaggaaggccaacaacgacattacttctctcgcaagcaatggcggcagagtgcaatgcatgcaggtgtggcctcctactggaaagaagaagttcgagactctctcatacctccccgatcttacacccgtgcagttggctaaggaagtagattaccttcttcgctcaaaatgggttccttgcttggagttcgaattggaggagggattcgtgcaccgtaagtactcgagcttacccacgtactacgatg

SEQ ID NO: 222554 - DNA, 380 bp, Gossypium hirsutum
cccacgcgtccgtacggagcttgtgttcatattcagattcttcttcttcttcttcttcttcttcatcaaagtgggtttatgcagtgttttggaggatactgcctcgaaattatccaccaccaaagtgggattatggagggagtgcacttgatcgttccaaaggaaacaaaagaaactggattcttgtatgggaagatgggttttgtgatttccatgaatgtgagcgtgctggaagtggttatgtaaagggaaggtttggagctgatattttcttcaaaatgtcacatgaagtttataactatggagaaagattagtagggaaaattgcagcagataacagtcacaaatgggtgcataaagaaatcccaaatgaaaatgat

SEQ ID NO: 222555 - DNA, 399 bp, Gossypium hirsutum
cccacgcgtccgcccacgcgttcgatggcctctgcttctctcctcaagacttcaccagttttagacaagtctgagtgggttaagggtcacacccttcgccaaccttccacttctgtggtgaggtgccaccctgttgcaccctccggactaactgtgcgtgcaagctcatatgccgatgagcttgtcaagactgctaaagctattgcttctcctggccgtggaattttggccatggatgagtccaacgctacctgtgggaaacgtttggcctcaatcgggctagaaaacacggaggctaaccgccaagcctacaggacgttgcttgtttcagctcctggccttggtcagtacatctcaggtgccatcctctttgaaggaaccctctatcaaaccacaatt

SEQ ID NO: 222556 - DNA, 392 bp, Gossypium hirsutum
atcggctaccattgccactgtctctccggcacaggctaacatggtcgctcctttcaccggcctcaagtctgcctctgctttcccagtcaccaggaaggccaacaacgacattacttctctcgcaagcaatggcggcagagtgcaatgcatgcaggtgtggcctcctactggaaagaagaagttcgagactctctcatacctccccgatcttacacccgtgcagttggctaaggaagtggattaccttcttcgctcaaaatgggttccttgcttggaattcgaattagaggagggattcgtgcaccgtaaatactcgagcctacccacgtactacgatggacgctactggaccatgtggaagctgcctatgttcgggtgcaccgactcggctc

SEQ ID NO: 222557 - DNA, 347 bp, Gossypium hirsutum
  unsure (1)..(347): unsure at all n locations
ggcatctcctttcccctcttcttcctccactgtcctctttcgctgcctaacctaaacaaagcaatggctttccttccgcccatcaccactttcgcagccgccctcctactnttnctccacaccccactcgccacgtgatgccccctcaaccttactggggacttccttttaaccctacgaagtcctccaaggctacaacttccccgttgggcttctcccacaaggcgtcttaaagtacgatttagatgaatccaccggtcgggtccatgcctacttagaaggttcgtgtagcttctcactggaagggtcttatcaactcaaatacaaatccacgatcagcgggatca

SEQ ID NO: 222558 - DNA, 403 bp, Gossypium hirsutum
attctctttcactgcaaactgtgagcgagtgagagagatggcttgctcagctacttcatcggccgcggctctcatctcctctaagccaagggctttctcctccaattccaagcccttctcccaatccctttctctccccaatcccttcactggtctccctgcccctctcctttctcgtcccgcctccttttccctctcccgcgcctccccttctcgcaagtctttcgtcgtcaaagccaccagtgagcttccactggtgggaaatcctgcccctgattttgaggctgaggccgtctttgaccaggagttcattaaggtcaagctctctgaatacattgggaagaaaaatgtgattctcttcttttacccgttggacttcacatttgtttgccccacagagatt

SEQ ID NO: 222559 - DNA, 373 bp, Gossypium hirsutum
  unsure (1)..(373): unsure at all n locations
tcatcggcaacccaattgggccacacgtgaacctggctcnnctccccggcaacaagggcacaacatgtgttggggcccccttcacacggcccctcaagtctggcctctggctttcccacgtcacctaggaaaggccaaccaacgaccactcacttctcttgcaaggcaatggtgggaggagtgcnaatgcatgccaagtgtggccctcctcttgggaaggaagaagttcgagacactctcatacctccccgatcttacacccgtacagttggctaaagaagtagattaccttcttcgctctaaatggattccttgcttggaattcgaattagaagagggattcgtgcaccgtaagtactcgagcttacccacg

SEQ ID NO: 222560 - DNA, 400 bp, Gossypium hirsutum
cccacgcgtccgcccacgcgtccgtcttcctccccacccttaaaccatgtcggcttttgttggcaagtatgcaggtgaactcccgtttaggaatttggctttcactgtcttctcctgcatgttttattccattgtatttggggacatgcatgtaaatccttaatgaccacaacacttgatcgatccgtaccataaatgttcaaattttcattacagatatgctattttatgcataattttgttagtcctagctttgactaaaccctgtatgtatattttcccccagaggagttgatcaagaacgccaactacatcgccacgccaggcaaaggtattttggcggcggacgagagcacaagcaccatcgggaagcgtctctcgagcatcaacgtcgagaaca

SEQ ID NO: 222561 - DNA, 401 bp, Gossypium hirsutum
cccacgcgtccgctcagactactctttcgaaccagctccaccatcacccccaaaaaacaaagcaaattgtagaagatggcaacacaagcacttgtatcatcgtctcttacctactcagtggagactgcaaggcagattcttggagctaaacgacaaattgggtcttcaaggaaaggatcctttgttgttaaggcagcttcgactccacccgttaagcaaggagctgatagacctttatggtttgcatctaaacaaagcctttcatacttggatggcagccttccaggtgattatggatttgaccccttgggactctcagaccctgaaggtccaggagggttcatcgagcctaaatggctagcctacggtgagatcatcaacgggcgttatgctatgttggg

SEQ ID NO: 222562 - DNA, 400 bp, Gossypium hirsutum
caacaacgacattacttctctcgcaagcaatggcggcagagtgcaatgcatgcaggtgtggcctcctactggaaagaagaagttcgagactctctcatacctccccgatcttacacccgtgcagttggctaaggaagtagattaccttcttcgctcaaaatgggttccttgcttggaattcgaattagaggagggattcgtgcaccgtaaatactcgagcctacccacgtactacgatggacgctactggaccatgtggaagctgcctatgttcgggtgcaccgactcggctcaggtattgaaggagcttgaggaatgcaagaaggaataccccaatgcattcattagaatcattggcttcgacaacgtgcgtcaagtgcagtgcattagtttcattgcc

SEQ ID NO: 222563 - DNA, 381 bp, Gossypium hirsutum
gtttcctttctcgattttctatttagccaaacaagatgcagatcttcgttaagactctaaccggcaagacgatcactctcgaggtcgagagctccgatacgatcgacaacgtgaaggccaaaatccaagataaggaaggcatccctccagaccagcagcgtctgatcttcgccggaaaacagctcgaagacggccggaccttggccgattacaacatccaaaaggagtcaactctccacctcgtcctccgtctgcgcggtgggatgcaaatcttcgtgaaaaccttgactggcaagacaatcactctcgaggtcgagagctccgacacgatcgacaacgttaaagcgaagatccaagacaaggaaggcatccccccagacc

SEQ ID NO: 222564 - DNA, 384 bp, Gossypium hirsutum
caacattgaagagataagattatggtgaaaaactaaacataataaagtccctcataacattcttcgacttgcttcattgattagcccaaagataaacataaccaaaaagaaaaatggcttctgcttccgctactctcctcaagtcttcacctattatcgacaagtccgagtggattaagggccaaaacctccgccacccttcggtttgttttgtacggtcacaccctacatcggccgcctttaccgtccgtgctagttcatatgccgatgagcttgttaagaccgcgaaaactgctgcatctccaggtcgtggtattttggccatggatgaatcaaatgctacatgtgggaagcggcttgcctcgattggtctcgagaataccg

SEQ ID NO: 222565 - DNA, 400 bp, Gossypium hirsutum
ggaacccaaggacagaagactcttttaacatttcaccgcaaagatggagataacaaatgtgagcgagtatcaagaaattgcgaagcaaaagttgccaaagatggtgtatgactactacgcatctggtgctgaggaccaatggacattgcaagagaatagatttgctttcactaagatactgtttcgtcctcgtattctcatcgatgtaagcaagatagacatgaccacaactgtgttgggtttcaagatatcaatgcctatcatgattgccccaactgccatgcaaaaaatggctcatcctgaaggggagtatgcaacagctagggctgcatctgctgctggaactatcatgacattatcctcatgggcaacttctagtgttgaggaggttgcttcgaca

SEQ ID NO: 222566 - DNA, 384 bp, Gossypium hirsutum
aaggacagggctactcctcaacaagttgctgattacaccctcagcctcctccgccaaagaatccctccagctgtccctggaatcatgtttttgtctggtgggcagtctgaagttgaggctaccttgaacttgaatgcaatgaaccaagctccaaacccatggtatgtgtcattctcatatgcaagagcccttcaaaacacttgcctgaagaagtggggaggcaggcctgagaatgtgaaggatgctcaggaagcgctgctcatccgagcaaaggccaactctcttgctcaactcggaaagtacactggcgaaggagagtcagaggaggccaagcaaggaatgtttgtcaagggttatgtctattagcatgtttgtatcttcaac

SEQ ID NO: 222567 - DNA, 396 bp, Gossypium hirsutum
cccacgcgccgcttattgatgggttaaagagagtagctgtttgcaacccagtcatgctattggacgagattgacaagacaggttctgatgtgcgtggtgatccagcttcagctctactggaggttcttgatccggagcagaataattctttcaacgaccactatttgaatgtgccatatgacctttcaaaggtgatttttgtggctactgcaaatagggtgcagcctattcctcctccactcttggacaggatggaagtcattgagctgcctggatataccgctgaagaaaagctaagaatagccatgcaacatttgattccacgagttttggatcagcatggattgaattctgagtaccttcaaattccggaggccatggttaaacttgttattc

SEQ ID NO: 222568 - DNA, 381 bp, Gossypium hirsutum
cccacgcgtccgggaaaaagaagtccagtagtagtaagtctttattctacgaagctcctctcggttacagcattgaagacgttcgaccaaacggtggaatcaagaagttcagatctgctgcttactccaactgcgctcgcaagccatcctgatatactcacaagcgtgccgtctgaccactagtagtggttaataaaactgttatttgctttgttagttagttttagattatttccccgaccaacttcttcctcttctctcttcgtggctggtttctttacattgcgttctcctgatttggcgactttgtaattcggataaagtttgcagtccttggttgaatcacaatggcagtgtctgcaattggatttgagggttatg

SEQ ID NO: 222569 - DNA, 404 bp, Gossypium hirsutum
ctcatatactctctgtttatttattttttttgttttccttttgtcgtccttttctcacctgttgttcttccattttttaatcaagttccccccaccccgctcaacacctctccctctaacaagccaaaggccccaagcagattctatttgttctaacatggagaaaagccatgaacttgaactgacccagatgaggaaatcagtagagaaacttgggttttcaacagagaaatacggggatccgacactcatgagattcttgattgcaagatcaatggacacagataaagcttcaaagatgtttgtccagtggctgaaatggaggtcttctttagttcctaatgggtgcgttgtagaatctgaagtgcctgaccaattagaagccagaaagatttttttgcaag

SEQ ID NO: 222570 - DNA, 394 bp, Gossypium hirsutum
cccacacgtgcggatgtcatgaagatagacatgggaggttctgcagcagttattggtgcaacgaaagctctcgggcaaatgaaacctactggagttgaggcatattacattgatgcatattgtgaaaacatgataagtggaacgggtatgagacctggagatatcctcacaggatctaatggaaagactattgaggttaataacactgatgcagaaggcaggactacactcgcagatgctttggtatatgcttgcaaccaacgtgtctagaagatagtcgaccaggcaacactaactggggctagtattgacgatcttggaccgacgattgcaggcagtctacacacctagtgatgaacttgcaaaggaggtattcgaagcttcaaagatcagt

SEQ ID NO: 222571 - DNA, 357 bp, Gossypium hirsutum
atttgatgaaaaagggagtgaaggtgagacaaaaggacgccatctgagggggaagagatctacagaaagtgatgggaaagcggataacggtgatgataagatcgtggttcggagccagactaagaagaacagaagattgggccttgataaaaggattgaactgaaaaagaatagagaagaaaagtcggttgtttctggccagagtaaaaagggtatctcgaatgaaagtgagaagatcgataggcttgtccgggactattcggcttcaaccgatttggtcagcctggactggaagaaaatgaagatacctccggttctgccgtccaccgaacatacttggttgtttaagctaatgca

SEQ ID NO: 222572 - DNA, 401 bp, Gossypium hirsutum
cgatggaaccgtcagtgttcttgtggcaacttttttgttcgtaattcccaacaagaagcgaaagggagagaaattgatggactggaacgaatgcaagaagctgccatggaacattattttgttactaggggctggtttcgccatagccgacggagtccagtcaagcggactcgctgatcaattatccaaaactctagattttctcgaagaggctccgtatttagctattgcccccgcggtgtgtttaatctgtgccataattaccgagtttataacatcaaatgatgctactgctacccttgtgcttccacttttgattcaaatggcaaaaaccatgcatgttcacccattactccttatggtccctggagcagtgggatcacaatttgcttttattcttg

SEQ ID NO: 222573 - DNA, 300 bp, Gossypium hirsutum
cccacgcgtccgttaaaacaagggtttcttttcttcttcatgttctcgatcatggctgcttcttcttctttctttgttaggtgtttccctttacttttcttcttcttcttctcacatgtccaagcagtgaaatcaccaattcatcctcgggatgttctacctttattgccgagacaggtttcatggccgatccttaattcacttaacagtgccatcgaccttttaccagcctttgtcggttctgtttcgtcccaaaaccacatcgtgagctggaaaggtgcgtgcttttatgagaacacc

SEQ ID NO: 222574 - DNA, 395 bp, Gossypium hirsutum
cccacgcgtccgaaaacacccaggtacagaagcactaacattttctctttggcttaccaaccttggatctgaaatggcaaagtcacccgaagaagaacaccctgtcaagacctttggctgggctgcaagggacccatctggtcatctctctcctttcaccttctccagaagggtaactggtgaagaagatgtgaggtttaaggtgctgtattgtgggatttgtcattctgaccttcacagtatcaagagtgaatggggctcctccaactaccccatggttcctgggcatgaaatagtaggggaagtgacagaagtaggcagcaaagtggaaaaggttaaggtgggagataaagtgggcgtgggatgcatggtcggagcttgccacagctgcgaca

SEQ ID NO: 222575 - DNA, 402 bp, Gossypium hirsutum
  unsure (1)..(402): unsure at all n locations
gtttcattgaaggcgggactctcagactactctttcgaaccagctccaccatcacccccaaaaaacaaagcaaattgtagaagatggcaacacaagcacttgtatcatcgtctcttacctactcagtggagactgcaaggcagattcttggagctaaacgacaaattgggccttcaaggaaaggatcctttgttgttaaggcagcttcgactccacccgttaagcaaggagctgatagacctttatggtttgcatctaaacaaagcctnncatacttggatggcagccttccaggtgattatggatttgaccccttgggactctcagaccctgaaggtccaggagggttcatcgagcctaaatggctagcctacggtgagatcatcaacgggcgttatgcta

SEQ ID NO: 222576 - DNA, 399 bp, Gossypium hirsutum
cccacgcgtccggtgagatggcttgctcagctacttcatcggccgcggctctcatctgctctaagccaagggctttctcctccaattccaagcccttctcccaatccctttctctccccaatcccttcactggtctccctgcccctctcctttctcgtcccgcctccttttccctctcccgcacctacccttctcgcaagtctttcgtcgtcaaagccaccagtgagcttccattggtgggaaatcctgcccctgattttgaggctgaggccgtctttgaccaggagttcattaaggtcaagctctccgaatacattgggaagaaatatgtgattctcttcttttacccgctggacttcacatttgtttgccccacagagattactgctttcagtgacc

SEQ ID NO: 222577 - DNA, 404 bp, Gossypium hirsutum
ctcttttgtatacctgtagcatatagtaatagtaagcagtaatagcaatggcctgctgcatgatctcatcggcaaccattgccaccgtgaaccgctcctccccggcacaggccaacatggtggcccccttcaccggcctcaaatctgcctctgctttcccagtcaccaggaaggccaacaacgacatcacttctcttgcaagcaacggtgggagagtgcaatgcatgcaagtgtggccgcctcttgggaagaagaagttcgagactctctcatacctgcccgatcttactcccgtacagttggctaaggaagtagattaccttcttcgctctaaatggattccttgcttggaattcgaattagaggagggattcgtgcaccgtaagtactcgagcttacccacg

SEQ ID NO: 222578 - DNA, 385 bp, Gossypium hirsutum
attcaaaactaatcatgtaaaaaaaaaagttgattggaacaaataaagtgaaacatttaagacaagaacaaagtggagattttataacacaaaaatagaggatgcaaatccacttaaaacacaaaaggaaaacaacattcaattaagacacaaaggggggatttcctttgtttgtgcccaatatagatttttttcttcccttagagcttaatttcccatttagaaagctcctctcttgatagcatcgtcattagcatttccaagggcagcttcactcaaatatttgtcagccaattgaaccctcttcacattctcttgctcagcaacaagcatgtatccatattccaacagcttctcaatggtcatcttcggttgctcgaaagat

SEQ ID NO: 222579 - DNA, 405 bp, Gossypium hirsutum
ctcccatcacccgagatcatctttccccttcagaatggcggctgcaaccatggctctctcttccccatctttcgccggaaaggccgtcaagctctctccttccgcccctaaaatccaaggcaatggccgtgtttccatgaggaaaaccgctaccaaggctgctccctctggaagtccatggtacggtcctgaccgagtcttgtacttgggtccactatctggtgagcctccatcttacttgaccggagaattccctggtgactacggatgggacactgctggactctcggcggacccagagacatttgccaggaaccgtgagctcgaagtcatccactgtaggtgggctatgttgggtgctcttgggtgtgttttccctgagcttttggctaggaatggagtcaa

SEQ ID NO: 222580 - DNA, 374 bp, Gossypium hirsutum
cccacgcgtccgaaatcagttgcttcacaatggcctctacaaccatggctctttgttccccatcattcgccggtaaggcagtgaagttctccccttccacccctgaaatccggggaactggccgtgtttccatgaggaaaaccaccaagcctgttccttctggtagcccatggtacggtcctgaccgagttttgtacttgggtccactttccggtgagccaccatcttacttgaccggtgagttccctggtgactatggttgggacactgctggactctcagctgatcccgagacctttgctaggaaccgtgagctcgaagtcattcactgcagatgggccatgttgggagctcttgggtgtgttttccctgag

SEQ ID NO: 222581 - DNA, 202 bp, Gossypium hirsutum
acgatttcgaactctatttagaatcaaaccaccgtacggtattttctttaagtatcttgtaggatactgttgttccagccacatttctcttttcgctctactagtaatttaattggagcttgaacccgagtttcggtgaggttgaatccacttttttcgttctaccttccttatttattttatctaattcttatctaattct

SEQ ID NO: 222582 - DNA, 333 bp, Gossypium hirsutum
gtttcattgaaggcaggactctcagactactctttcgaaccagctccaccatcacccccaaaaaacaaagcaaattgtagaagatggcaacacaagcacttgtatcatcgtctcttacctactcagtggagactgcaaggcagattcttggagctaaacgacaaattgggtcttcaaggaaaggatcctttgttgttaaggcagcttcgactccacccgttaagcaaggagctgatagacctttatggtttgcatctaaacaaagcctttcatacttggatggcagccttccaggtgattatggatttgaccccttgggactctcagaccctg

SEQ ID NO: 222583 - DNA, 401 bp, Gossypium hirsutum
caatctttcagaaagagagaggcaaagagaaaaaagagagagggtattacatatattcatctaattatacaaataaagatggctcttcacctttcctgggtttccgtttttggcgatctcggtactgaaatatatattcatatgcccttcttgtttgcgtattttaatattcactaacattacattatattgtttttaattaggcgtcattgtttcatttatggtcgccttttctcccatgccagcattttatcaaatctataagaagaaaacatcagaaggattccaatcattaccctatgtgatatcgctattcagtgccatgctttggatttactatgcacttcttaagaagaatgaaatgcatctaattatcatcaacattttctgctgtttcattc

SEQ ID NO: 222584 - DNA, 389 bp, Gossypium hirsutum
atggcttcttctctcagtctttcaagccacacagtggcttcattattcccttctcacacttcaaagccgcagttgtcactttctaaatccatcccaattctcaccaaatcatcacagtctcaatttcatggccttaaattctctcacccttcttctcttaaaattcctcgtttttccacttttaaaacctcgatttctgctaaggtgaataaaggtacagttcctccagcatttactttgaaagatcaagatgggaaaaatgtaagcctttcaaagtttaaagggaagcctgttgtggtttatttttaccctgctgatgaaacccctggttgcaccaaacaggcatgtgcttttagagattcttatgagaagtttaagaaagctggagc

SEQ ID NO: 222585 - DNA, 350 bp, Gossypium hirsutum
cagcagctgcaccacaactacagagaagagagtaaaggggaaaaaaagcgtcgtcgcttttgcttcttcttctacttcgctctctctccttctccgaagttcctctttcgttctttcatttattcagcattgtaaaagatggccgacggtgaggatattcaacccctcgtctgtgataatggaactggaatggtgaaagctggttttgctggtgatgatgctccaagggcagtttttcccagtattgttggtcgtccccggcacactggtgttatggttgggatgggtcagaacgatgcctatgtacgagatgaagcacaatctaaacgaggtatccttactttgcaata

SEQ ID NO: 222586 - DNA, 399 bp, Gossypium hirsutum
cttggaaattccaccttactatctctcacaattcaatcgactatggaatccattggagttctcatggcttgccccatgaactcttacctcgagcaacaactcgagaaccgtttcaagctattcagattctggacagtgccggacaaatcatcctttctggcttctcacaaggactcaatccaggcggtcgtcggaaacgcctttgccggtgccgatgctatgctgatcgaggcgttgcccaagctggagattgttgccagcttcagtgtggggcttgataagatagatttggccaagtgtaaagaaaagggtatccgagttaccaacacccctgacgttttgactgaggacgtggcggatttggcgatcggtttgatgttggcggtgttgaggaagctc

SEQ ID NO: 222587 - DNA, 380 bp, Gossypium hirsutum
cccacgcgtccgatggcacccatttcattacccaacaagccccatgcagtatgcatcccctacccagcacaaggtcacgtaaatccgatgctcaaagtggccaaactcctccatttcaaaggcttccacatcacttttgtcaacaccgagtacaaccacaaacgcttgctcaaatccaggggcccccacgccctcaatggcttgcctgacttccggttcgggacaatccccgacggccttcctccgccggacatcgacgccacgcaagacatccccgcgctttgtgactccactagcaagcattgtttggctccctttcgccgactccttgttgagctaaaagctacttccggtgtcccgccggtcacttgtatcgtcgc

SEQ ID NO: 222588 - DNA, 380 bp, Gossypium hirsutum
cccacgcgtccgggaatccattggagttctcatggcttgccccatgaactcttacctcgaacaacaactcgagaaccgtttcaagctattcagattctggacagtgccggacaaatcatcctttctggcttctcacaaggactcaatccaggcggtcgtcggaaacgcctttgccggtgccgatgctaagctgatcgaggcgttgcccaagttggagattgttgccagcttcagtgtggggcttgataagatagatttggccaagtgtaaagaaaagggtatccgagttaccaacacccctgacgttttgactgaggacgtggcggatttggcgatcggtttgatgttggcggtgttgaagaagctctgtgagagtgatc

SEQ ID NO: 222589 - DNA, 278 bp, Gossypium hirsutum
gggatgaggaagagcttgccatggagaacaacaagagtgctgtatcttcatcagggaaaatcaccttgagcgtcacaaagagcaagcacgcagaccggtgaagttatcggtgtgttccagagccttgaatcatctgacactgacttgtgtgccaagactgcaaaggatgtcatgatcactggtgtatggaatgctcatctagattcatgaacatgtgttgtatgaatttgtttattttcagctgagattctgggattttttaacacgtgatggtaaac

SEQ ID NO: 222590 - DNA, 292 bp, Gossypium hirsutum
  unsure (1)..(292): unsure at all n locations
cccacgcgtccgctcgagatgggtgggccagcccgatccgacccaataacctttgatttgattcgggtgcgatcgactttgccggttcaggtgtggttcacatggttggtggcattgcanggttatggggtgcattaatcgagggtccaaggattggccgattcgatcgagctggtcgatctgtggcgttacgtgggcacagtgcctcattagtagtgctcgggacgtttctattgtggttcggatggtatgggttcaacccaggttcattcttgaccatcatgaaaaggta

SEQ ID NO: 222591 - DNA, 350 bp, Gossypium hirsutum
cccacgcgtccggtgagactcttttgtatacctgtagcatatagtaatagtaagcagtaatagcaatggcctcctccatgatctcatcggcaaccattgccaccgtgaaccgctcctccccggcacaggccaacatggtggcccccttcaccggcctcaaatctgcctctgctttcccagtcaccaggaaggccaacaacgacatcacttctcttgcaagcaacggtgggagagtgcaatgcatgcaggtgtggccgcctcttgggaagaagaagttcgagactctctcatacctgcccgatcttactcccgtacagttggctaaggaagtagattaccttcttcgctct

SEQ ID NO: 222592 - DNA, 336 bp, Gossypium hirsutum
taccgaaccggagggtcggggtcgaccgtacgcgtacggctaccactgcttctccaatggcgactcagctgaagagcagctttacgtcgtctgttacaagaggactggtagtccccaggggcatttcgggatccccgttcaaagtatcttccggaaagaccaggaccccttgcttcactgtcaaagctgttcaatccgacaagtcaacatttcaagtaatccaacccatcaacggcgaccccttcattggaagcctggagactccaatcacctcaagccccttaattgcatggtacctttccaacctcccagcctataggacggcagtgaacccac

SEQ ID NO: 222593 - DNA, 326 bp, Gossypium hirsutum
cgaactcccctcccgtcctctttcccgatttgtcttcttcattgccccgccatggcttgtgttagcttcgctaaactcaacgcgccgtcatcctcttggatcggtggccagcagtctctccctcaacgctccggatcatccgctcggctcgccactcgcagagtctcactcccgatccgtgctggcgcttacaccgacgaactcatcaaaaccgccaaaactattgcttcacctggtcgtggaatactggcaattgatgaatcgaatgcaacatgtgggaagagattatcttctattggcttagacaatactgaacccaaccggca

SEQ ID NO: 222594 - DNA, 406 bp, Gossypium hirsutum
caaagtccaatcactcccaatactttcataacatttcacgaacttcactctccagtctgcaatggcggctgccgtctccaccatcggtgctgtcaaccgagcaccgttgagtttgaatggatcaggtgccggagcttctgctccaagctcagctttcatggggaacagcttgaagaaagtgagcgctaggttcaacaacaacggcaaggctccagtgggaagtttcatgattgtggctgccaaagaaatcgacgaagacacacagaccgaccaggaccgatggaagggtcttgcttatgatatctccgatgaccaacaagacattaccagagggaaaggtatggtcgactcattgttccacgctcccatgaacgatggtactcactatgctgtcatgagctcctat

SEQ ID NO: 222595 - DNA, 406 bp, Gossypium hirsutum
  unsure (1)..(406): unsure at all n locations
ctcccatcacccgagatcatctttccccttcagaatggcggctgcaaccatggctgtctgttccccatctttcgccggaaaggccgtcaagctctctccttccgcccctaaaatccaaggcaatggccgtgtttccatgaggaaaaccgctaccaaggctgctccctctggaagtccatggtacggtcctgaccgagtcttgtacttgggtccactatctggtgagcctccatcttacttgaccggagaattccctggtgactacggttgggacactgctggactctcggcggacccagagacatttgccaggaaccgtgagctcgaagtcatccactgtaggtgggctatgttgggtgctcttcngtgtgttttccctgagcttttggctaggaatggagtcaaa

SEQ ID NO: 222596 - DNA, 359 bp, Gossypium hirsutum
atttagctatagcatacactactagtacccactactagcaatggcttcctcaatgatctcatcggctaccattgccactgcctctccggcacaggctaacatggtcgctcctttcaccggcctcaagtctgcctctgctttcccagtcaccaggaaggccaacaacgacattacttctctcgcaagcaatggcggcagagtgcaatgcatgcaggtgtggcctcctactggaaagaagaagttcgagactctctcatacctccccgatcttacacccgtgcagttggctaaggaagtggattaccttcttcgctcaaaatgggtttccttgcttggaattcgaattagaggaaggattc

SEQ ID NO: 222597 - DNA, 376 bp, Gossypium hirsutum
cttagtttcctcttagcaaagacttcagccacccacgcagcccctttaccgatccaaacaatgggacgcgtccgtacgaagactgtgaagaaatcgtctcgtcaggtaatcgagaggtactactctcgcatgacgcttgatttccacaccaacaaaaaggttatcgaagaagtagctattatcccatccaagaggctccggaacaagattgctgggttctcaacccatttgatgaaacggatccagaagggtccggttcgtggcatttctctgaagcttcaggaagaagagcgtgagcgtcgtatggattttgtccccgatgtatcggctattgctgttgattcaatagaagttgataaggaaaccattgatatgc

SEQ ID NO: 222598 - DNA, 281 bp, Gossypium hirsutum
tttagctatagcatacactactagtacccactactagcaatggcttcctcaatgatctcatcggctaccattgccactgcctctccggcacaggctaacatggtcgctcctttcaccggcctcaagtctgcctctgctttcccagtcaccaggaaggccaacaacgacattacttctctcgcaagcaatggcggcagagtgcaatgcatgcaggtgtggcctcctactggaaagaagaagttcgagactctctcatacctccccgatcttacacccgtgca

SEQ ID NO: 222599 - DNA, 254 bp, Gossypium hirsutum
gcctgttagtgtggcatttgaagttgtcactagtttccgtttttacaaaagtggggtttataccagtaaaacatgtggcagcacacccatggatgtgaaccacgctgttcttgcagttgggtatggagtcgaaaatggcgttccatattggctcattaagaactcatggggtgcagaatggggtgacaatggctacttcaagatggagatgggcaaaaacatgtgccgtgtggcaacttgtgcatcatacccaa

SEQ ID NO: 222600 - DNA, 425 bp, Gossypium hirsutum
  unsure (1)..(425): unsure at all n locations
agcaaaaccatggcctctgcttctctcctcaagacttcaccagttttagacaagtctgagtgggttaagggtcacacccttcgccaaccttccacttctgtggtgaggtgccaccctgttgcaccctccggactaactgtgcgtgcaagctcatatgccgatgagcttgtcaagactgctaaagctattgcttctcctggccgtggaattttggccatggatgagtccaacgctacctgtgggaaacgtttggcctcaatcgggctagaaaacacggaggctaacctttaagcctacaggacgttgcttgtttcagctcctggccttggncagnacatntaaagtgccattctntttgaggaaaccctctatcaaaccacaattgatggcaagaagatggttgatgttcttgttgagcagaacat

SEQ ID NO: 222601 - DNA, 395 bp, Gossypium hirsutum
  unsure (1)..(395): unsure at all n locations
gtcagtacatctcaggtgccatcctctttgaggaaaccctctatcaaaccacaattgatggcaagaagatggttgatgttcttgttgagcanaacatagtccctggtatcaaggttgacaagggtcttgttccactggctggttcaaacaacgagtcatggtgccaaggtcttgatggcctcgctccacgttcagctgcatactaccaacaaggagctcgtttgcaaaatggcgtactgtggtaagcattcccaatggaccaaccgaacttgctgtgaaggaagcagcctggggacttgctcgctatgccgccctctttcaggacaatggattggttccaattgttgagccagagatcttgcttgatggtgatcacggaattgacaggactttcg

SEQ ID NO: 222602 - DNA, 207 bp, Gossypium hirsutum
gtcgacggcttctatcaacggttggtgccttacctcctcttcttccaccactaccacctcctctttttccgctcgtcgacgacctacattgcggccttcagtcgtcgctagccttaactcttctccttctcctccgactcttatccaagaccgcccggtttttgctgcccctattcctttgctcaccccgagaggagagatgggaaa

SEQ ID NO: 222603 - DNA, 385 bp, Gossypium hirsutum
gagtacttgaacggagaagttcccggagactatggatacgatccgtttggtctgagcaagaagccagaagactttgcaaaatatcaagcatatgagttgatacacgcaaggtgggcaatgcttggtgctgcagggttcatcatccctgaagcctttaacaaatttggtgccaactgtggccccgaagccgtttggttcaagaccggagctcttctcttggacggtaacaccttgaactacttcgggaagaacatccccatcaaccttgtggtggctgtcgttgccgaagtcgtccttgttggtggtgctgaatattacagaatcatcaatggcttggatctggaggacaagctttaccctgggggaccatttgtcccactggggt

SEQ ID NO: 222604 - DNA, 423 bp, Gossypium hirsutum
cccacgcgtccgacttttaacccctgccgacactctcaccattttctcagcaaacttagcctatgaaaatcaccattacaagtcccaaagaagacccccgctaattctaaaagaaagaaccagagttttctttctctttagtttacgtttattgtccttttggaatttttgatactaaaaaaaggaagcaacgaagaagggaaatggagggcaaagaagaggatgttagattgggagccaacaagttcacagagaggcaaccaattgggaccgcggctcagagtcaagatgacgggaaagactacactgaaccaccaccggctccatttttcgagcctggcgagttaacctcatggtctttttatagggctgggattgccgagtttgtggcgactttccctttcttgatatcactattttgac

SEQ ID NO: 222605 - DNA, 403 bp, Gossypium hirsutum
ttcgctttgagattagatccaaaattcccctttcatcatatttccgattccccaatttttcctgaaaccctaatcctaatcccggattcttctcgtctacatcgtctagcaaatggcaaccgaggagccggcagtcgtggcagaccccgcaccggagacggaggaggacaagactgctgagaccaaagctacttcaaaatctggcagagcaaagaaaaccaaagaacccaaaaccaagaaagctgcagctcctcggaaaccacgggctgctcctactcatccaccttacgaagagatgatcaaagatgcgatcgttactttgaaagagaggacaggttcaagtcagtacgccattgctaagttcattgaagagaaacagaagaatcttcctgggaatttcaag

SEQ ID NO: 222606 - DNA, 350 bp, Gossypium hirsutum
ggaccttcaatttttcatcggagagagcatgcacgatgatggatgtttggtatttgcttactacaaggatggtgctgttgacccgacatttttgtactttgcgtatgcattgaaggaggtcaagtgctgaggtttgaagcaaagaaaaaaaaagtggttgctgaagaatttagtcctttttattattgcttttgtctcttattttcagtactctgctaaagacataaattatttatggtttttgatgtttttgattgaattgactgctgatttatcatggaatggtttctattcttatgggttgactaaacaagaatgtaacccttcgttctattactacttaattttat

SEQ ID NO: 222607 - DNA, 301 bp, Gossypium hirsutum
gattatggtgcagaacttagcataatacagtccctcataacattcttcgactcgctttattgattggcccaaagattaacctaaccataaagataaacggcttgtgctttcgcttctgttctcaagtctttacctatgatcgacacgtccgtgtggattaaggggcggaacctgcgccaccctccgggtcgctttgtacggtgacacgctacatcggacgcctttaccgtccgcgctagctcatatgccgatgagcatgccaagaccgcggaaactgccgcatctacaggtcgaggtattt

SEQ ID NO: 222608 - DNA, 370 bp, Gossypium hirsutum
cccacgcgtccgcccacgcgtccgctttgccaaacatggagactagtgtcacgtgctacgctcgtgggattgttcttcctggtgtctcttctaagcactcctcggcattagtctcccctccatccatatctccttccttcagctctaagagccttaaaacaagttcactatttggagaatcattaagggttgttccaaggtcatcattgaaggtttcaaaggcaaagaacactacttcactagtgacaaaatgtgaaattggagagtctttggaagagtttcttacaaaggcaacaacagataaggcattgattagaataatgatgtgtatgggtgaagcattaagaacaattgcttttaaagttagaac

SEQ ID NO: 222609 - DNA, 354 bp, Gossypium hirsutum
tgaaaaaaaaaaataagacatgtatttggatatttcctttcaactacaacaatattctagtatctatgggatatgacatgaatagtggaagggaattccccgaagagaaaatggattatgggagtaacaaaaaaacctgacttgaacgatcctgtattaagagctaaattagctaaaggtatgggtcataattattatggggaacccgcatggcccaatgatcttttatatatttttccagtagtaattctcggtactattgcttgcaacgtgggcttagcggttctagaaccttcaatgattggggaacccgcggaatcattttgcaactcctttggaaatattacctgaatg

SEQ ID NO: 222610 - DNA, 403 bp, Gossypium hirsutum
ggggaatctatatgagtgccaaggttgctttttgcatccacaatatagcctatcaagggagatttgcctttgaagattactcacttctcaatttgcctgatcaattcaagagttcatttgacttcatggatgggtatgataagcctgtcaagggaaggaaaatcaattggatgaaggctggaattttggaatcacacagggtattgactgtaagtccatactatgcccaggagcttgtttccggtgaagataaaggtgttgaactcgatcacatcattcgtaaaaccggcatcactggaattgtgaatggcatggatgttcaagaatggaaccctaccactgacaaatacatcagtgtcaaatatgatgcaacaactgtaacgtatgcaaagcgatttattaa

SEQ ID NO: 222611 - DNA, 399 bp, Gossypium hirsutum
cacgttcttgtttttttcacttctttctctttctcgaaaaccggtcacctgaaactcaaacgcctgtctgaatcctcgccggaacctgtcaatctcttacatctccggcggctgtctcacggatctgttcacgatgagcaccggccaacttctcagcatcgagcctcaagagctccagttcccatttgaattgagaaagcagatctcgtgttccctaaacttgtccaacaagaccgacaattatgtggcttttaaggtcaaaacgacaaatccaaagaagtactgtgtaaggccaaatactggagttgtgctgcctaggtctacgtgcaacgttgttgttacaatgcaagctcaaaaggaagcacctactgatatgcaatgcaaagataagtttttact

SEQ ID NO: 222612 - DNA, 346 bp, Gossypium hirsutum
cttcagttcttcacttccccagtctccagcaatgggagaaaccgattctttcttctcgaacaggggagcgaagatcttcgtggcaggccatcgaggcctagttggttctgccatagttcgtaaacttcagtccctaggctttaccaacctcctactccgcacccatgccgatctggaccttactcgccaatccgacgtcgaatccttcttcgccgatgagaaacctcactatgtcgtactagctgccgcttaagttggtgggatccacgccaacaacacttaccctgccgatttcattgccatcaacctccaaatgcagaccaacgtcatcgatttccttttaccg

SEQ ID NO: 222613 - DNA, 359 bp, Gossypium hirsutum
cccacgcgtccgcccacgcgtccgcccacgcgtccggtccgtctctctgttttactccacaaccactatcactaccattatggcttcggctactgtttctgtagccaaacccaaccttcagattcaggcaaaaggaaagggtgttggttttgcagatttctcaggcctacacaactcctctactagccttccctttgccaggaaaacctctgatgacttccattcactcgttgcttttcagacatctgctctaggaagcaataatggcgggtacaggaaagggatggcagaggcaaagctaaaggtggctataaatgggttggggaggattggcaggaatttcttaagaagctggcatg

SEQ ID NO: 222614 - DNA, 396 bp, Gossypium hirsutum
cggacgcgtggggcacatatttctatttcccactctcttttttgctctcagttaacaacaaaatgcgtaaatggctaccactgcttctccaatggcgactcagctgaagagcagctttacgtcgtctgttacaagaggactggtagtccccaggggcatttcgggatccccgttcaaagtatcttccggaaagaccaggaccccttgcttcactgtcaaagctgttcaatccgacaagtcaacatttcaagtaatccaacccatcaacggcgaccccttcattggaagcctggagactccaatcacctcaagccccttaattgcatggtacctttccaacctcccagcctatatgacggcagtgaacccacttctgaggggaatcgaagtgggtct

SEQ ID NO: 222615 - DNA, 278 bp, Gossypium hirsutum
cttttaaccaaacactccacaaaattttctcgaattataaaaaaaaaatgaggaagtgtgaactatgtggaaggctagctcgaatgcactgtgaatcagatcaagcaaatttatgttgggactgtgatttcaaggttcatggagccaatttcctcgtagctaagcataatcgaaccctcctttgccatgtttgtcaaagtcctactccttggctcgcatgtggtcggaatctcggctccgcggtttctgtttgtgattcatgccttgtaaacggtaac

SEQ ID NO: 222616 - DNA, 285 bp, Gossypium hirsutum
gcggttttcatttccccttcgaaagtagccagccttttcacacactcaagaagagcgagagctcgtaaatcatggcggaacagaccgtaaaagcttttttgaagcaacccaaagtgtttttgagctcgaagaaaggtgataaagggaagaggccaggaaagggtgggaatcgcttctggaaaagcattggattgggcttcaagactgcccgtgatgctattgatggaacctacatcgataagaaatgccccttcactggcactgcttcaatccgttgtcgtattt

SEQ ID NO: 222617 - DNA, 381 bp, Gossypium hirsutum
cccacgcgtccggatccacggcgatgatctatttccatgttttggtttttgattttttcaggtgccttggacactccaatgctgaagttgttccacatgaagttttcaataagttacctttacttaggtatttcatctatacccccacgtatcatagtcttcaccacacagagatggagaccaatttttgtctgttcatgccgctgtttgatgcactggggagtacacttaacaccaaatcattggagctacataagaaaattacctcaaattctggaaaaaacgggagggtaccggattttgtgttcctagcacatgtggtggacataatgtcggcaatgcatacaccgtttgcgttaagatcatttgcgtcgaccccat

SEQ ID NO: 222618 - DNA, 388 bp, Gossypium hirsutum
cccacgcgtccgagcatacactactagtacccactactagcaatggcttcctcaatgatctgatgggctaccattgccactgggtctccggcacaggctaacatggtcacccctttcaccggcctcaagtctgcctctgctttcccagtcaccaggaaggccaacaacgacattacttctctcgcaagcaatggcggcagagtgcaatgcatgcaggtgtggcctcctactggaaagaagaagttcgagactctctcatacctccccgatcttacacccgtgcagttggctaaggaagtagattaccttcttcgctcaaaatgggttccttgcttggagttcgaattggaagagggattcgtgcaccgtaagtactcgagcttaccca

SEQ ID NO: 222619 - DNA, 439 bp, Gossypium hirsutum
tcccggtcgaggcaggcgtccgcccacgcgtccgtacggagcttgtgttcatattcagattcttcttcttcttcttcttcttcttcaggaaagtgggtttatgcagtgttttggaggatactgcctcgaaattatccaccaccaaagtgggattatggagggagtgcacttgatcgttccaaaggaaacaaaagaaactggattcttgtatgggaagatgggttttgtgatttccatgaatgtgagcgtgctggaagtggttatgtaaagggaaggtttggagctgatattttcttcaaaatgtcacatgaagtttataactatggagaaggattaggagggaaaattgcagcatataacaatcacaaatgggtgcataaagaaatcccaaatgaaaatgatccaggctttatctcctcctggaatatgtctattgaac

SEQ ID NO: 222620 - DNA, 352 bp, Gossypium hirsutum
cccactcgtccgcccacgcgtccgatggcctctgcttctctcctcaagacttcaccagttttagacaagtctgagtgggttaagggtcacacccttcgccaaccttccacttctgtggtgaggtgccaccctgttgcaccctccggactaactgtgcgtgcaagctcatatgccgatgagcttgtcaagactgctaaagctattgcttctcctggccgtggaattttggccatggatgagtccaacgctacctgtgggaaacgtttggcctcaatcgggctagaaaacacggaggctaaccgccaagcctacaggacgttgcttgtttcagctcctggccttggtcagtaca

SEQ ID NO: 222621 - DNA, 418 bp, Gossypium hirsutum
atcggctaccattgccactgcctctccggcacaggctaacatggtcgctcctttcaccggcctggggtctgcctctgcttgccgagtcaccaggaaggccaacaacgacattacttctctcgcaagcaatggcggcagagtgcaatgcatgcaggtgtggcctcctactggaaagaagaagttcgagactctctcatacctccccgatcttacacccgtgcagttggctaaggaagtggattaccttcttcgctcaaaatgggttccttgcttggaattcgaattagaggagggattcgtgcaccgtaaatactcgagcctacccacgtactacgatggacgctactggaccatgtggaagctgcctatgttcgggtgcaccgactcggctcaagtattgaaggaagctgaggaatgc

SEQ ID NO: 222622 - DNA, 373 bp, Gossypium hirsutum
cttttgtataactgtagcatatagtactagtattctagtaatagcaatggcctcctccatgatctgagcggcaaccattgccacggtgaactgctcctccccggcacaggccaacatggtggcccccttcaccggcctcaagtctgcctctgctttcccagtcactaggaaggccaacaacgacatcacttctcttgcaagcaatggtgggagagtgcaatgcatgcaggtgtggcctcctcttgggaagaagaagttcgagacactctcatacctccccgatcttacacccgtacagttggctaaggaagtaggataccttgtgcgctctaaatggattccttgcttggaattcgatatagaggagggattc

SEQ ID NO: 222623 - DNA, 324 bp, Gossypium hirsutum
cccacgcgtccgctcagactactctttcgaaccagctccaccatcacccccaaaaaacaaaggggggtgtagaagatggcggcacaagcacttgtatcatcgtctcttacctactcagtggagactgcaaggcagattcttggagctaaacgacaaattgggtcttcaaggaaaggatcctttgttgttaaggcagcttcgactccacccgttaagcaaggagctgatagacctttatggtttgcatctaaacaaagcctttcatacttggatggcagccttccaagtgattatggatttgaccccttgggactctcagaccct

SEQ ID NO: 222624 - DNA, 426 bp, Gossypium hirsutum
caacaacgacattacttctctcgcaagcaatggcggcagagtgcaatgcatgcaggtgtggcctgctactggaaagaagaagggcgagactctctcatacctccccgatcttacacccgtgcagttggctaaggaagtagattaccttcttcgctcaaaatgggttccttgcttggaattcgaattagaggagggattcgtgcaccgtaaatactcgagcctacccacgtactacgatggacgctactggaccatgtggaagctgcctatgttcgggtgcaccgactcggctcaagtattgaaggagcttgaggaatgcaagaaggaataccccaatgcattcattagaatcattggcttcgacaacgtgcgtcaagtgcagggcattagtttcattgcctacaagccttcaggcttttaagcttt

SEQ ID NO: 222625 - DNA, 424 bp, Gossypium hirsutum
cccacgcgtccggaccttcattcgaccaatggttgaaaatctttaaatgataacatcgtccttttgcggaccactatcaaatttggagatgttccaggaaaaagaaaatcaaaacccccaggtgaagaaggtgaaaaccagcagcggcaaaggcaataaaaggtgaagccaaagagagagagatatatacataataaaaaagacttttcaaaagaacacaactatggctcctcatagagaaggatcagatgcttcagtggaagccatggttgctcaagtcgaaaaacacccaatttcatcgatccttatcatcattgctatgcaaacagaagctttgccggtggtgaataagttccagttgattgaaaaccctcattcttcgtttccaaaaggggtcccttggatccattatcatggtgcatac

SEQ ID NO: 222626 - DNA, 240 bp, Gossypium hirsutum
  unsure (1)..(240): unsure at all n locations
gtttcctttctcgattttctatttagccaaactttatgcagatcttcgttaagactctaaccggggagacgatcactctggaggtcgagagctccnatacgatcgacaacgtgaaagccaaaatccaagataaggaaagcatccctccaaaccaacagcgtctgatcttcgcccgaaaacaacttgaaaaccggccgaccttggccgattaccacattcaaaaagaggtaacttttcaac

SEQ ID NO: 222627 - DNA, 352 bp, Gossypium hirsutum
caacattgaagagataagattatggtgaaaaactaaacataataaagtccctcataacattctgggacttgcttcattgatgtagcccaaagataaacataaccaaaaagaaaaatggcttctgcttccgctactctcctcaagtcttcacctattatcgacaagtccgagtggattaagggccaaaacctccgccacccttcggtttgttttgtacggtcacaccctacatcggccgcctttaccgtccgtgctagttcatatgccgatgagcttgttaagaccgcgaaaactgctgcatctccaggtcgtggtattttggccatggatgaatcaaatgctacatgtggga

SEQ ID NO: 222628 - DNA, 405 bp, Gossypium hirsutum
ggaacccaaggacagaagactcttttaacatttcaccgcaaagatggagataacaaatgtgagcgagtatcaagaaattgcgaagcaaaagttgccaaagatggtgtatgactactacgcatctggtgctgaggaccaatggacattgcaagagaatagatttgctttcactaagatactgtttcgtcctcgtattctcatcgatgtaagcaagatagacatgaccacaactgtgttgggtttcaagatatcaatgcctatcatgattgccccaactgccatgcaaaaaatggctcatcctgaaagggagtatgcaacagctagggctgcatctgctgctggaactatcatgacattatcctcatgggcaacttctagttgtgaggaggttgcttcgacaggacc

SEQ ID NO: 222629 - DNA, 305 bp, Gossypium hirsutum
aaggacagggctactcctcaacaagttgctgattactccctcagcctcctccgccaaagaatccctccagctgtccctggaatcatggttgtgtctggtgggcagtctgaagttgaggctaccttgaacttgaatgcaatgaaccaagctccaaacccatggtatgtgtcattctcatatgcaagagcccttcaaaacacttgcctgaagaagtggggaggcaggcctgagaatgtgaaggatgctcaggaagcgctgctcatccgagcaaaggccaactctcttgctcaactcggaaagtacac

SEQ ID NO: 222630 - DNA, 424 bp, Gossypium hirsutum
cccacgcgccgcttattgatgggttaaagagagtatctgtttgcaacccagtcatgctattggacgagattgacaagacaggttctgatgtgcgtggtgatccagcttcagctctactggaggttcttgatccggagcagaataattctttcaacgaccactatttgaatgtgccatatgacctttcaaaggtgatttttgtggctactgcaaatagggtgcagcctattcctcctccactcttggacaggatggaagtcattgagctgcctggatataccgctgaagaaaagctaagaatagccatgcaacatttgattccacgagttttggatcagcatggattgaattctgagtaccttcaaattccggaggccatggttaaacttgttattcagaggtacaccagggtagctggtgttcg

SEQ ID NO: 222631 - DNA, 407 bp, Gossypium hirsutum
cccacgcgtccgggaaaaagaagtccagtagtagtatgtctttattctacgaagctcctctcgggtggagcattgaagacgttcgagcaaacggtggaatcaagaagttcagatctgctgcttactccaactgcgctcgcaagccatcctgatatactcacaagcgtgccgtctgaccactagtagtggttaataaaactgttatttgctttgttagttagttttagattatttccccgaccaacttcttcctcttctctcttcgtggctggtttctttacattgcgttctcctgatttggcgactttgtaattcggattaagtttgcagtccctggttgaattacaatggccgtgtctgcaattggatttgaggggtatgaaaaaagggctggaaatttctttttt

SEQ ID NO: 222632 - DNA, 403 bp, Gossypium hirsutum
ctcatatctctctgtttatttatttcttttgttttccttttgtcgtccttttctcacctgttggtctggcattttttaatcaagtgccccccaccccgctcaacacctctccctctaacaagccaaaggccccaagcagattctatttgttctaacatggagaaaagccatgaacttgaactgacccagatgaggaaatcagtagagaaacttgggttttcaacagagaaatacggggatccgacactcatgagattcttgattgcaagatcaatggacacagataaagcttcaaagatgtttgtccagtggctgaaatggaggtcttctttagttcctaatgggtgcgttgtagaatctgaagtgcctgaccaattagaagccagaaagatttttttgcaag

SEQ ID NO: 222633 - DNA, 303 bp, Gossypium hirsutum
cccacacgtccggatgtcatgaagatagacatgttaggttctgcagcagttattgatgcaacgaaggctctcaggcaaatgagacctgccgcagttgaagatcattacattgatgcattttgtgaaaacatgacaagtggaacgggtatgagacctgtagatattctcacaggatctaatggaaagaccattgaagtttataacactgatgcagaaagcaagcttacactcgcagatgctttggtatatgcttgcaaccaacgtgtctagaagatagtctaccatgcaacactaactggatct

SEQ ID NO: 222634 - DNA, 416 bp, Gossypium hirsutum
atttgatgaaaaagggagtgaaggtgagacatattgacgccatctgagggggaagagatctacagagagtgatgggaaagcggataacggtgatgataagatcgtggttcggagccagactaagaagaacagaagattgggccttgataaaaggattgaactgaaaaagaatagagaagaaaagtcggttgtttctggccagagtaaaaagggtatctcgaatgaaagtgagaagatcgataggcttgtccgggactattcggcttcaaccgatttggtcagcctgtactggaagaaaatgaacatacctccggttctgccgtgcaccgaacatacttggttgtctaagctaatgcagccaatgaaggcactgcttgaggcaaaagagaacttgcaaaaggatctgggtagagatc

SEQ ID NO: 222635 - DNA, 372 bp, Gossypium hirsutum
cgatggaaccgtcagtgttcttgtggcaacttttttgttcgtaattcccaacaagaagcgaaagggagagaaattgatggactggaacgaatgcaagaagctgccatggaacattattttgttactaggggctggtttcgccatagccgacggagtccagtcaagcggactcgctgatcaattatccaaaactctagattttctcgaagaggctccgtatttagctattgcccccgcggtgtgtttaatctgtgccataattaccgagtttataacatcaaatgatgctactgctacccttgtgcttccacttttgattcaaatggcaaaaaccatgcatgttcacccattactccttatggtccctggagc

SEQ ID NO: 222636 - DNA, 409 bp, Gossypium hirsutum
cccacgcgtccgctaaaacaagtgtttctcttcttcttcatgttctcgatcatggcttcttcttcttctttctttgttaggtgtttccctttacttttcttcttcttcttctcacatgtccaagcagtgaaatcaccaattcatcctcgggatgttctacctttattgccgagacaggtttcatggccgatccttaattcacttaacagtgccatcgaccttttaccagcctttgtcggttctgtttcgtcccaaaaccacatcgtgagctggaaaggtgcgtgcttttatgagaacaccgctaggatggagttccataacaagagtggcagtgagttcggtggtggaactctccatatcaaggttagcaaagcccatagttggacgtgtctggatctttatctctttg

SEQ ID NO: 222637 - DNA, 381 bp, Gossypium hirsutum
tccacgcgtccgaaaacacccaggtacagattcttctaacattttctctttggcttaccaaccttggatctgaaatggcaaagtcacccgaagaagaacaccctgtcaagacctttggctgggctgcaagggacccatctggtcatctctctcctttcaccttctccagaagggtaactggtgaagaagatgtgaggtttaaggtgctgtattgtgggatttgtcattctgaccttcacagtatcaagagtgaatggggctcctccaactaccccatggttcctgggcatgaaatagtaggggaagtgacagaagtaggcagcaaagtggaaaaggttaaggtgggagataaagtgggcgtgggatgcattgtcggagctt

SEQ ID NO: 222638 - DNA, 394 bp, Gossypium hirsutum
gtttcattgaaggcgggactctcagactactctttcgaaccagctccaccatcacccccaaaaaacaaagcaaattgtagaagatggcaacacaagcacttgtatcatcgtctcttacctactcagtggagactgcaaggcagattcttggagctaaacgacaaattgggccttcaaggaaaggatcctttgttgttaaggcagcttcgactccacccgttaagcaaggagctgatagacctttatggtttgcatctaaacaaagcctttcatacttggatggcagccttccaggtgattatggatttgaccccttgggactctcagaccctgaaggtccaggagggttcatcgagcctaaatggcttgcctaccgggagatcatcaacgggcg

SEQ ID NO: 222639 - DNA, 429 bp, Gossypium hirsutum
cccacgcgtccggtgagatggcttgctcagctacttcatcggccgcggctctcatctcctctaagccaagggctttctcctccaattccaagcccttctcccaatccctttctctccccaatcccttcactggtctccctgcccctctcctttctcgtcccgcctccttttccctctcccgcacctccccttctcgcaagtctttcgtcgtcaaagccaccagtgagcttccattggtgggaaatcctgcccctgattttgaggctgaggccgtctttgaccaggagttcattaaggtcaagctctccgaatacattgggaagaaatatgtgattctcttcttttacccgctggacttcacatttgtttgccccacaaagattactgctttcagtgaccgctatgaaaaatttgagaaagctaacaccc

SEQ ID NO: 222640 - DNA, 405 bp, Gossypium hirsutum
ctcttttgtatacctgtagcatatagtaatagtaagcagtaatagcaatggcctcctccatgatctcatcggcaaccattgccaccgtgaaccgctcctccccggcacaggccaacatggtggcccccttcaccggcctcaaatctgcctctgctttcccagtcaccaggaaggccaacaacgacatcacttctcttgcaagcaacggtgggagagtgcaatgcatgcaggtgtggccgcctcttgggaagaagaagttcgagactctctcatacctgcccgatcttactcccgtacagttggctaaggaagtagattaccttcttcgctctaaatggattccttgcttggaattcgaattagaggagggattcgtgcaccgtaagtactcgagcttacccacgt

SEQ ID NO: 222641 - DNA, 416 bp, Gossypium hirsutum
attcaaaactaatcatgtaaaaaaaatagttgattggaacaaataaagtgaaacatttaagacaagaacaaagtggagattttataacacaaaaatagaggatgcaaatccacttaaaacacaaaaggaaaacaacattcaattaagacacaaaggggggatttcctttgtttgtgcccaatatagatttttttcttcccttagagcttaatttcccatttagaaagctcctctcttgatagcatcgtcattagcatttccaagggcagcttcactcaaatatttgtcagccaattgaaccctcttcacattctcttgctcagcaacaagcatgtatccatattccaacagcttctcaatggtcatcttcggttgctcgaaagatggtggcccttccctcgagttcacgagctttt

SEQ ID NO: 222642 - DNA, 406 bp, Gossypium hirsutum
ctcccatcacccgagatcatctttccccttcattatggcggctgcaaccatggctctctcttccccatctttcgccggaaaggccgtcaagctctctccttccgcccctaaaatccaaggcaatggccgtgtttccatgaggaaaaccgctaccaaggctgctccctctggaagtccatggtacggtcctgaccgagtcttgtacttgggtccactatctggtgagcctccatcttacttgaccggagaattccctggtgactacggttgggacactgctggactctcggcggacccagagacatttgccaggaaccgtgagctcgaagtcatccactgtaggtgggctatgttgggtgctcttgggtgtgctttccctgagcttttggctaggaatggagtcaaa

SEQ ID NO: 222643 - DNA, 334 bp, Gossypium hirsutum
gtttcattgaaggcaggactctcagactactctttctaaccagctccaccatcacccccaaaaaagagagcaaattgtagaagatggcaacacaagcacttgtatcatcgtctcttacctactcagtggagactgcaaggcagattcttggagctaaacgacaaattgggtcttcaaggaaaggatcctttgttgttaaggcagcttcgactccacccgttaagcaaggagctgatagacctttatggtttgcatctaaacaaagcctttcatacttggatggcagccttccaggtgattatggatttgaccccctgggactctcagaccctga

SEQ ID NO: 222644 - DNA, 420 bp, Gossypium hirsutum
caatctttcagaaagagagaggcaaagagaaaaaagagagagggtattacatatattcatctaaggatacaaataaagatggctcttcacctttcctgggtttccgtttttggcgatctcggtactgaaatatatattcatatgcccttcttgtttgcgtattttaatattcactaacattacattatattgtttttaattaggcgtcattgtttcatttatggtcgccttttctcccatgccagcattttatcaaatctataagaagaaaacatcagaaggattccaatcattaccctatgtgatatcgctattcagtgccatgctttggatttactatgcacttcttaagaagaatgaaatgcatctaattatcatcaacattttctgctgtttcattcaaagcttttacattgtcac

SEQ ID NO: 222645 - DNA, 415 bp, Gossypium hirsutum
atggcttcttctctcagtctttcaagccacacagtggcttcattattcccttctcacacttgagagccgcagttgtcactgggtaaatccatcccaattctcaccaaatcatcacagtctcaatttcatggccttaaattctctcacccttcttctcttaaaattcctcgtttttccacttttaaaacctcgatttctgctaaggtgaataaaggtacagttcctccagcatttactttgaaagatcaagatgggaaaaatgtaagcctttcaaagtttaaagggaagcctgttgtggtttatttttaccctgctgatgaaacccctggttgcaccaaacaggcatgtgcttttagagattcttatgagaagtttaaaaaagctggagctgaaagtattgggattagtgttgata

SEQ ID NO: 222646 - DNA, 292 bp, Gossypium hirsutum
cagcagctgcaccacaactacagagaagagagttatggggaaaaaaagcgtcgtcgtttttgcttgtggttctacttcgctctgtgcgtcgcttctccgaagttcctctttcgttctttcatttattcagtattgtaaaagatggccgacggtgaggatattcaacccctcgtctgtgataatggaactggaatggtgaaggctggttttgctggtgatgatgctccaagggcagtttttcccagtattgttggtcgtccccggcacactggtgttatggttgggatgggtc

SEQ ID NO: 222647 - DNA, 417 bp, Gossypium hirsutum
cttggaaattccaccttactatctctcacaattcaatcgactatggaatccattggagttctcatggcttgccccatgaactcttacctcgagcaacaactcgagaaccgtttcaagctattcagattctggacagtgccggacaaatcatcctttctggcttctcacaaggactcaatccaggcggtcgtcggaaacgcctttgccggtgccgatgctatgctgatcgaggcgttgcccaagctggagattgttgccagcttcagtgtggggcttgataagatagatttggccaagtgtaaagaaaagggtatccgagttaccaacacccctgacgttttgactgaggacgtggcggatttggcgatcggtttgatgttggcggtgttgaggaagctttgtgagagtgatcgggtt

SEQ ID NO: 222648 - DNA, 348 bp, Gossypium hirsutum
cccacgcgtccgatggcacccatttcattacccaacaagccccatgcagtatgcatcccctaggggagcacaaggtcacgtagatccgatgctcaaagtggccaaactcctccatttcaaaggcttccacatcacttttgtcaacaccgagtacaaccacaaacgcttgctcaaatccaggggcccccacgccctcaatggcttgcctgacttccggttcgggacaatccccgacggccttcctccgccggacatcgacgccacgcaagacatccccgcgctttgtgactccactagcaagcattgtttggctccctttcgccgactccttgttgagctaaaagctac

SEQ ID NO: 222649 - DNA, 387 bp, Gossypium hirsutum
cccacgcgtccgggaatccattggagttctcatggcttgccccatgaactcttacctcgaacggcgagctcgagaaccgtgtgaggctattcagattctggacagtgccggacaaatcatcctttctggcttctcacaaggactcaatccaggcggtcgtcggaaacgcctttgccggtgccgatgctaagctgatcgaggcgttgcccaagttggagattgttgccagcttcagtgtggggcttgataagatagatttggccaagtgtaaagaaaagggtatccgagttaccaacacccctgacgttttgactgaggacgtggcggatttggcgatcggtttgatgttggcggtgttgaagaagctctgtgagagtgatcggtttg

SEQ ID NO: 222650 - DNA, 308 bp, Gossypium hirsutum
tttccggttagaccggcgcgtccgcccacgcgtccgttcgagatgggtgggccagccctatccgacccaataaccttttatttgattcgggtgcgatcgactttgccggttcaggtgtggttcacatggttggtggcattgcagggttatggggtgcattaatcgagggtccaaggattggccgattcgatcgagctggtcgatctgtggcgttacgtgggcacagtgccttattagtagtgctcgctacgtttctatagtggctcggatggcatgggtccaacccaagttcattcttgaccatcatg

SEQ ID NO: 222651 - DNA, 422 bp, Gossypium hirsutum
cccacgcgtccggtgagactcttttgtatacctgtagcatatagtaatagtaagcagtaatagcgagggcctcctccatgatctcatcggcaaccattgccaccgtgaaccgctcctccccggcacaggccaacatggtggcccccttcaccggcctcaaatctgcctctgctttcccagtcaccaggaaggccaacaacgacatcacttatcttgcaagcaacggtgggagagtgcaatgcatgcaggtgtggccgcctcttgggaagaagaagttcgagactctctcatacctgcccgatcttactcccgtacagttggctaaagaagtagattaccttcttcgctctaaatggattccttgcttggaatccgaattagaggagggattcgtgcaccgttagtactcgagcttacccacg

SEQ ID NO: 222652 - DNA, 330 bp, Gossypium hirsutum
gctaccactgcttctgcaatggcgactcatctgaagagcagctttacgtcgtctgttacaagaggactggtagtccccaggggcatttcgggatccccgttcaaagtatcttccggaaagaccaggaccccttgcttcactgtcaaagctgttcaatccgacaagtcaacatttcaagtaatccaacccatcaacggcgaccccttcattggaagcctggagactccaatcacctcaagccccttaattgcatggtacctttccaacctcccagcctataggacggcagtgaacccacttctgaggggaatcgaagtgggtctggctcac

SEQ ID NO: 222653 - DNA, 423 bp, Gossypium hirsutum
cgaactcccctcccgtcctctttcccgatttgtcttcttcattgccccgccatggcttgtgttagcttggctaaactcaacgcgccgtcatcctcttggatcggtggccagcagtctctccctcaacgctccggatcatccgctcggctcgccactcgcagagtctcactcccgatccgtgctggcgcttacaccgacgaactcatcaaaaccgccaaaactattgcttcacctggtcgtggaatactggcaattgatgaatcgaatgcaacatgtgggaagagattatcttctattggcttagacaatactgaacccaaccgccaggcttacagacagcttctgctcacaactcctggcctcggagaatatatttccggtgccattcttttcgaggaaacactttaccagtcaactacagat

SEQ ID NO: 222654 - DNA, 421 bp, Gossypium hirsutum
cccggtcgaccgggcgtccgaaagtccaatcactcccaatactttcataacatttcacgaacttcactctccagtctccaatggcgggtgccgtctccaccatcggtgctgtcaaccgagcaccgttgagtttgaatggatcaagtgccggagcttctgctccaagctcagctttcatggcgaacagcttgaagaaagtgagcagctaggttcaacaacaacggcaaggctccagtgggaagtttcatgattgtggctgccaaagaaatcgacgaagacacacagaccgaccaggaccgatggaagggtcttgcttatgatatctacaatgaccaacaagacattaccagagggaaaggtattgtcgactcattgttccaagctcccatgtacgatggtactcactatgctgtcatgagct

SEQ ID NO: 222655 - DNA, 355 bp, Gossypium hirsutum
cgtccgttcccatcacccgagatcatctttccccttcaaaatgtcggctgcaaccatggctctctcttccggaggtttcgccggaaaggcgcgtcaagctctctccttccgcccctaaaatccaaggcaatggccgcgtttccatgaggaaaaccgctaccaaggctgctccctctggaagtccatggtacggtcctgaccgagtcttgtacttgggtccactatctggtgagcctccatcttacttgaccggagaattccctggtgactacggttggcacactgctggactctcggcggacccagagacatttgtcacgaaccgggagctcccagttatccactgttggtgggc

SEQ ID NO: 222656 - DNA, 292 bp, Gossypium hirsutum
cttttgtataactgtagcatatagtactagtaagcagtaatagcaatggccgcgtccatgatctcatcggcaaccattgccaccgtgaactgctcctccccggcacaggccaacatggtggcccccttcaccggcctcaagtctgcctctgctttcccagtcactaggaaggccaacaacgacatcacttctcttgcaagcaatggtgggagagtgcaatgcatgcaagtgtggcctccttttgggaagaagaagttcgagacactctcatacctccccgatcttacccccg

SEQ ID NO: 222657 - DNA, 339 bp, Gossypium hirsutum
atttagctatagcatacactactagtacccactactagcaatggcttcctcaatgatctcatcggctaccattgccactgcctctccggcacaggctaacatggtcgctcctttcaccggcctcaagtctgcctctgctttcccagtcaccaggaaggccaacaacgacattacttctctcgcaagcaatggcggcagagtgcaatgcatgcaggtgtggcctcctactggaaagaagaagttcgagactctctcatacctccccgatcttacacccgtgcagttggctaaggaagtggattaccttcttcgctcaaaatgggtttccttgcttggaat

SEQ ID NO: 222658 - DNA, 401 bp, Gossypium hirsutum
cttagtttcctcttagcaaagacttcagccacccacgcatcccctttaccgatccaaacaatgggacgcgtccgtacgaagactgtgaagaaatcgtctcgtcaggtaatcgagaggtactactctcgcatgacgcttgatttccacaccaacaaaaaggttatcgaagaagtagctattatcccatccaagaggctccggaacaagattgctgggttctcaacccatttgatgaaacggatccagaagggtccggttcgtggcatttctctgaagcttcaggaagaagagcgtgagcgtcgtatggattttgtccccgatgtatcggctattgctggtgattcaatagaaggtggtaagggaaccattgatatgctttcactttttgggatgggcgatct

SEQ ID NO: 222659 - DNA, 451 bp, Gossypium hirsutum
tttagctatagcatacactactagtacccactactagctatggcttcctcaatgatctcatcggcgtccattgccactgcctgtccggcacaggctaacatggtcgctcctttcaccggcctcaagtctgcctctgctttcccagtcaccaggaaggccaacaacgacattacttctctcgcaagcaatggcggcagagtgcaatgcatgcaggtgtggcctcctactggaaagaagaagttcgagactctctcatacctccccgatcttacacccgtgcagttggctaaggaagtggattaccttcttcgctcaaaatgggttccttgcttggaattcgaattagaggagggattcgtgcaccgtaaatactcgagcctacccacgtactacgatggacgctactggaccatgtggaagctgcctatgttcgggtgcaccgactcggctc

SEQ ID NO: 222660 - DNA, 417 bp, Gossypium hirsutum
  unsure (1)..(417): unsure at all n locations
gcctgttagtgtggcatttgaagttgtcactagtttccgtttttacaaaagtggggtttataccagtaaaacatgtggcagcacacccatggatgtgaaccacgctgttcttgcagttgggtatggagtcgaaaatggcgttccatattggctcattaagaactcatggggtgcagaatggggtgacaatggctacttcaagatggagatgggcaaaaacatgtgcggtgtggcaacttgtgcatcatacccaattgttgcttgatccaatcgatgaaccgttttggatcatgtcatttctgtgttatagaaggcttctagttatggtctacaaatgttgttgtagttgttcggggttatggtctaattgaaaccgatgggttcatgtncaattaggttccaaagacatgtaagatg

SEQ ID NO: 222661 - DNA, 447 bp, Gossypium hirsutum
agcaaaaccatggcctctgcttctctcctcaagacttcaccagttttagacaagtctgagtgggttaagggtcacacccttcgccaaccttccacttctgtggtgaggtgccaccctgttgcaccctccggactaactgtgcgtgcaagctcatatgccgatgagcttgtcaagactgctaaagctattgcttctcctggccgtggaattttggccatggatgagtccaacgctacctgtgggaaacgtttggcctcaatcgggctagaaaacacggaggctaaccgccaagcctacaggacgttgcttgtttcagctcctggccttggtcagtacatctcaggtgccatcctctttgaggaaaccctctatcaaaccacaattgatggcaagaagatggttgatgttcttgttgagcagaacatagtccctggtatcaaggttgac

SEQ ID NO: 222662 - DNA, 455 bp, Gossypium hirsutum
gtcagtacatctcaggtgccatcctctttgaggaaaccctctatcaaaccacaattgatggcaagaagatggttgatgttcttgttgagcagaacatagtccctggtatcaaggttgacaagggtcttgttccactggctggttcaaacaacgagtcatggtgccaaggtcttgatggcctcgctccacgttcagctgcatactaccaacaaggagctcgttttgcaaaatggcgtactgtggtaagcattcccaatggaccaaccgaacttgctgtgaaggaagcagcctggggacttgctcgctatgccgccatctctcaggacaatggattggttccaattgttgagccagagatcttgcttgatggtgatcacggaattgacaggactttcgaagtagccaaaaaggtatgggctgaggttttcttctatcttgcccagaacaatgtgatg

SEQ ID NO: 222663 - DNA, 404 bp, Gossypium hirsutum
gtcgacggcttctatcaacggttggtgccttacctcctcttcttccaccactaccacctcctctttttccgctcgtcgacgacctacattgcggccttcagtcgtcgctagccttaactcttctccttctcctccgactcttatccaagaccgcccggtttttgctgcccctattcctttgctcaccccgagagaagagatgggaaacaagtcctacgacgaagccattgaagctctcaagaaacttctcagtgagaaaggagaactgaaagctgaagcagctgcaagggtagatcaaataacagcagagttaaacacagcatcagctgatggcaaaccatctgactcttctgttgagagactgaaggaagcttcgttactcaaagaagaaaatatgaaagatt

SEQ ID NO: 222664 - DNA, 451 bp, Gossypium hirsutum
gagtacttgaacggagaagttcccggagactatggatacgatccgtttggtctgagcaagaagccagaagactttgcaaaatatcaagcatatgagttgatacacgcaaggtgggcaatgcttggtgctgcagggttcatcatccctgaagccctttacaaattttggtgccaactgtggccccgaaaccgtttggttcaagaacggaacttttctcttggaccggtaccacctggaactacttggggaggaacatcccaataaaccttgtggtggctgtcgttgccgaagtcgtccttgttggtggtgctgaatattacagaatcatcaatggcttggatctggaggacaagcttcaccctgggggaccatttgacccactggggttagccaaggatccagaccaggctgctttgctgaaggtgaaagagataaaaaacggtagactcgc

SEQ ID NO: 222665 - DNA, 414 bp, Gossypium hirsutum
ttcgctttgagattagatccaaaattcccctttcatcatatttccgattccccaatttttcctgaaaccctaatcctaatcccggattcttctcgtctacatcgtctagcaaatggcaaccgaggagccggcagtcgtggcagaccccgcaccggagacggaggaggacaagactgctgagaccaaagctacttcaaaatctggcagagcaaagaaaaccaaagaacccaaaaccaagaaagctgcagctcctcggaaaccacgggctgctcctactcatccaccttacgaagagatgatcaaagatgcgatcgttactttgaaagagaggacaggttcaagtcagtacgccattgctaagttcattgaaaagaaacagaagaatcttcctgggaatttcaagaagcttcttct

SEQ ID NO: 222666 - DNA, 400 bp, Gossypium hirsutum
ggaccttcaatttttcatcggagagagcatgcacgatgatggatgtttggtatttgcttactacaaggatggtgctgttgacccgacatttttgtactttgcgtatgcattgaaggaggtcaagtgctgaggtttgaagcaaagaaaaaaaaagtggttgctgaagaatttagtcctttttattattgcttttgtctcttattttcagtactctgctaaagacataaattatttatggtttttgatgtttttgatttaattgtttgttgttttatcatggaatggtttctatttttatgggttgactaaacaagaatttaactctttgttctattactacttaattttattggaaggaggtttttgggacatattaaataaaaaatttattatttaatat

SEQ ID NO: 222667 - DNA, 448 bp, Gossypium hirsutum
ctcagctcagctcaactcaactcacttaaatcttttctgctgcggtggcgatgggggcggcgatgttgtcggagttggcgacggagatcgtggtgccagtgtgcgccgtgattggaatagctttctcgttggtgcagtgggtgatggtgtcgcgcgtgaagcttacctccgagcgccatgcgtagtcggcgaatagtagcaagaatggttacggcgattacttgattgaggaagaggaaggaatcaatgaccatagcgttgtcaccaagtgcgctgatattcaaaacgctatctctgaaggtgcaacatcctttctttttactgaatatcagaatgctggcatcttcaagattgctgtcgctatcctgattttcctcttcctgggctctgttgagggcttcagcacgaatagccagccttgcacctatgataaggagaagatgtgcaa

SEQ ID NO: 222668 - DNA, 321 bp, Gossypium hirsutum
cccactcgtccgcccacgcgttcgctttgccaaacatggagactagtgtcacgtgctacgctcgtgggattgttcttcctggtgtctcttctaagcactcctcggcattagtcttcccttcattcatattttccttccttaagtctaaaaaccttaaaacaagttcactatttggagaatcattaagggttgttccaaggtcatcattgaaggtttcaaaggcaaagaacactacttcacttgtgacaaaatgtgaaattggagagtctttggaagatttttcacaaaggccacaacatatgggggtttttataaaaataa

SEQ ID NO: 222669 - DNA, 447 bp, Gossypium hirsutum
tgaaaaaaaaaaataagacatgtatttggatatttcctttcaactacaacaatattctagtatttatttgatatgacatgaatagttgaagggaattccccgaagagaaaatggattatgggagtaacaaaaaaacctgacttgaacgatcctgtattaagagctaaattagctaaaggtatgggtcataattattatggggaacccgcatggcccaatgatcttttatatatttttccagtagtaattctcggtactattgcttgcaacgtgggcttagcggttctagaaccttcaatgattggtgaacccgcggatccatttgcaactcctttggaaatattacctgaatggtatttctttcctgtatttcaaatacttcgtacagtacctaacaagttattgggtgttcttttaatggtttcagtacccgcgggattattaaca

SEQ ID NO: 222670 - DNA, 453 bp, Gossypium hirsutum
ggggaatctatatgagtgccaaggttgctttttgcatccacaatatagcctatcaagggagatttgcctttgaagattactcacttctcaatttgcctgatcaattcaagagttcatttgacttcatggatgggtatgataagcctgtcaagggaaggaaaatcaattggatgaaggctggaattttggaatcacacagggtattgactgtaagtccatactatgcccaggagcttgtttccggtgaagataaaggtgttgaactcgatcacatcattcgtaaaaccggcatcactggaattgtgaatggcatggatgttcaagaatggaaccctaccactgacaaatacatcagtgtcaaatatgatgcaacaactgtaacgtatgcaaagcgattattaaaggtagctcttcaagcaaaacttgggttgccttgtgatgagaatgttccat

SEQ ID NO: 222671 - DNA, 270 bp, Gossypium hirsutum
atcatgtacatggccgtggcgactcaagcaggtctgttctcccccacagtgaccaccccaaaatctttggccccatggaaaccagcctcatcattttcctttgctacctgttccaagtccctcaacttctccgtggctcaaagaaccattagagctgcagctgctgatgaggaagcatcatctgctgccgccacataggaagctccggttggtttcacccctccagaattggaccccaacaccccatcacccatcttcggagggagcact

SEQ ID NO: 222672 - DNA, 452 bp, Gossypium hirsutum
cttcagttcttcacttccccagtctccagcaatgggagaaaccgattctttcttctcgaacaaatcagcgaagatcttcgtagcaggccatcgaggcctagttggttctgccatagttcgtaaacttcagtccctaggctttaccaacctcctactccgcacccatgccgatctggaccttactcgccaatccgacgtcgaatccttcttcgccgatgagaaacctcactatgtcgtactagctgccgctaaagttggtgggatccacgccaacaacacttaccctgccgatttcattgccatcaacctccaaatccagaccaacgtcatcgattcctcttaccgccacggcgttaagaaaatcctcttcctcggttcctcttgtatttatcccaaatttgcgccgcaacccatccctgaaaacgcgctcttatccggtcccctggaaccca

SEQ ID NO: 222673 - DNA, 452 bp, Gossypium hirsutum
cccacgcgtccgcccacgcgtccgcccacgcgtccggtccgtctctctgttttactccacaaccactatcactaccattatggcttcggctactgtttctgtagccaaacccaaccttcagattcaggcaaaaggaaagggtgttggttttgcagatttctcaggcctacacaactcctctactagccttccctttgccaggaaaacctctgatgacttccattcactcgttgcttttcagacatctgctctaggaagcaataatggcgggtacaggaaagggatggcagaggcaaagctaaaggtggctataaatgggtttggtaggattggcaggaatttcttaagatgctggcatggccgtaaggactccccacttgatgtcattgccatcaatgacactggtggtgttaagcaggcttctcaccttctcaaatatgattccacccttg

SEQ ID NO: 222674 - DNA, 428 bp, Gossypium hirsutum
cggacgcgtggggcacatatttctatttcccactctcttttttgctctcagttaacaacaaaatccgtaaatggctaccactgcttctccaatggcgactcagctgaagagcagctttacgtcgtctgttacaagaggactggtagtccccaggggcatttcgggatccccgttcaaagtatcttccggaaagaccaggaccccttgcttcactgtcaaagctgttcaatccgacaagtcaacatttcaagtaatccaacccatcaacggcgaccccttcattggaagcctggagactccaatcacctcaagccccttaattgcatggtacctttccaacctcccagcctataggacggcagtgaacccacttctgaggggaatcgaagtgggtctggctcacggcttcctcctggtgggtccattcg

SEQ ID NO: 222675 - DNA, 381 bp, Gossypium hirsutum
cttttaaccaaacactccacaaaattttctcgaaaaaaaaaaaaaaaatgaggaagtgtgaactatgtggaaggctagctcgaatgcactgtgaatcagatcaagcaaatttatgttgggactgtgatttcaaggttcatggagccaatttcctcgtagctaagcataatcgaaccctcctttgccatgtttgtcaaagtcctactccttggctcgcatctggtcggaatctcggctccgcggtttctgtttgtgattcatgcgttgtaaacggcaacaataagtgtgagtcatcggagagagagtatggtgaaaaggaggaggaagaagaggaggagggagatttttataatgacgccgtggaagaatcgggtgaggaga

SEQ ID NO: 222676 - DNA, 456 bp, Gossypium hirsutum
gcggttttcatttccccttcgcaagtagccagccgtttcacacactcaagaagagcgagagctcgtaaatcatggcggaacagaccgaaaaagcttttttgaagcaacccaaagtgtttttgagctcgaagaaaggtgggaaagggaagaggccaggaaagggtgggaatcgcttctggaaaagcattggattgggcttcaagactccccgtgaagctattgaaggaacctacatcgataagaaatgccccttcactggcactgtttcaatccggggtcgtatcttagccggtacttgccacagtgccaagatggtcaggacaatcattgttcgacggaactaccttcattatatcaagaaataccaaaggtatgagaagcgccattcaaacatccccgcacatatttcaccatgcttccgtgtgaaggaaggggatcatgtcattattgggcaat

SEQ ID NO: 222677 - DNA, 449 bp, Gossypium hirsutum
cccacgcgtccgagcatacactactagtacccactactagcaatggcttcctcaatgatctcatcggctaccattgccactgcctctccggcacaggctaacatggtcacccctttcaccggcctcaagtctgcctctgctttcccagtcaccatgaaggccaacaacgacattacttctctcgcaagcaatggcggcagagtgcaatgcatgcaggtgtggcctcctactggaaagaagaagttcgagactctttcatacctccccgatcttacacccgtgcagttggctaaggaagtagattaccttcttcgctcaaaatgggttccttgcttggagttcgaattggaggagggattcgtgcaccgtaagtactcgagcttacccacgtactacgatggacgcttctggaccatgtgtgagctgcccatgtttcggtgcaccgactc

SEQ ID NO: 222678 - DNA, 443 bp, Gossypium hirsutum
cccacgcgtccgtacggagcttgtgttcatattcagattcttcttcttcttcttcttcttcttcatcaaagtgggtttatgcagtgttttggaggatactgcctcgaaattatccaccaccaaagtgggattatggagggagtgcacttgatcgttccaaaggaaacaaaagaaactggattcttgtatgggaagatgggttttgtgatttccatgaatgtgagcgtgctggaagtggttatgtaaagggaaggtttggagctgatattttcttcaaaatgtcacatgaaagttataactatggagaaggattagtagggaaaattgcagcagataacagtcacaaatgggtgcataaagaaatcccatatgaaaatgatccaggcttcatctccctctggaatatgtctattgaaccctaaccaaaggcatggacattacag

SEQ ID NO: 222679 - DNA, 447 bp, Gossypium hirsutum
cccacgcgtccgcccacgcgtccgatggcctctgcttctctcctcaagacttcaccagttttagacaagtctgagtgggttaagggtcacacccttcgccaaccttccacttctgtggtgaggtgccaccctgttgcaccctccggactaactgtgcgtgcaagctcatatgccgatgagcttgtcaagactgctaaagctattgcttctcctggccgtggaattttggccatggatgagtccaacgctacctgtgggaaacgtttggcctcaatcgggctagaaaacacggaggctaaccgccaagcctacaggacgttgcttgtttcagctcctggccttggtcagtacatctcaggtgccatcctctttgaggaaaccctctatcaaaccacaattgatggcaagaagatggttgatgttcttgttgagcagaacatattccct

SEQ ID NO: 222680 - DNA, 444 bp, Gossypium hirsutum
  unsure (1)..(444): unsure at all n locations
atcggctaccattgccactgcctctccggcacaggctaacatggtcgctcctttcaccggcctcaagtctgcctctgctttcccagtcaccaggaaggccaacaacgacattacttctctcgcaagcaatggcggcagagtgcaatgcatgcaggtgtggcctcctactggaaagaagaagttcgagactctctcatacctccccgatcttacacccgtgcagttggctaaggaagtggattaccttcttcgctcaaaatgggttccttgcttggaattcgaattagaggagggattcgtgcaccgtaaatactcgagcctacccacgtactacgatggacgctactggaccatgtggaagctgcctatgttcgggtgcaccgactcggctcacgtattgaaggagnctgaggaatgcaagaaggaataccccaatgcattcat

SEQ ID NO: 222681 - DNA, 452 bp, Gossypium hirsutum
  unsure (1)..(452): unsure at all n locations
ggcatctcctttcccctcttcttcctccactgtcctctttcgctgcctaacctaaacaaagcaatggctttccttccgcccatcaccactttcgcagccgccctcctcctcttcctccacaccccactcgccacgtcatcccccctcaaccttactggcgactccctntcaccctacgaagtcctccaaggctacaacttccccgttgggcttctcccacaaggcgtcttaaagtacgatttagatgaatccaccggtcggttccatgcctacttagagggttcgtgtagcttctcactggaagggtcttatcaactcaaatacaaatccacgatcagcgggatcatcttcaacaacaggctcaaaaacctgagtggaatcagtgtcaaggtcctgtttttatggctcaacatcgtggaggttgttagagatgaagatgagctggaattttc

SEQ ID NO: 222682 - DNA, 449 bp, Gossypium hirsutum
attctctttcactgcaaactgtgagcgagtgagagagatgtcttgctcagctacttcatcggccgcggctctcatctcctctaagccaagggctttctcctccaattccaagcccttctcccaatccctttctctccccaatcccttcactggtctccctgcccctctcctttctcgtcccgcctccttttccctctcccgcgcctccccttctcgcaagtctttcgtcgtcaaagccaccagtgagcttccactggtgggaaatcctgcccctgattttgaggctgaggccgtctttgaccaggagttcattaaggtcaagctctctgaatacattgggaagaaatatgtgattctcttcttttacccgttggacttcacatttgtttgccccacagagattactgctttcagtgaccgctatgaagaatttgagaagctaaacaccg

SEQ ID NO: 222683 - DNA, 475 bp, Gossypium hirsutum
ttttgggtggaccacgcgtccgcttttgtataactgtagcatatagtactagtaagcagtaatagcaatggcctcctccatgatctcatcggcaaccattgccaccgtgaactgctcctccccggcacaggccaacatggtggcccccttcaccggcctcaagtctgcctctgctttcccagtcactaggaaggccaacaacgacatcacttctcttgcaagcaatggtgggagagtgcaatgcatgcaggtgtggcctcctcttgggaagaagaagttcgagacactctcatacctccccgatcttacacccgtacagttggctaaggaagtagattaccttcttcgctctaaatggattccttgcttggaattcgaattagaggagggattcgtgcaccgtaagtactcgagcttacccacgtactacgatggacgctactggaccatgtggaaactgcccatgtttgggtgc

SEQ ID NO: 222684 - DNA, 454 bp, Gossypium hirsutum; identical to SEQ ID NO: 193701

SEQ ID NO: 222685 - DNA, 436 bp, Gossypium hirsutum
cccacgcgtccgctcagactactctttcgaaccagctccaccatcacccccaaaaaacaaagcaaattgtagaagatggcaacacaagcacttgtatcatcgtctcttacctactcagtggagactgcaaggcagattcttggagctaaacgacaaattgggtcttcaaggaaaggatcctttgttgttaaggcagcttcgactccacccgttaagcaaggagctgatagacctttatggtttgcatctaaacaaagcctttcatacttggatggcagccttccaggtgattatggatttgtacccctgggactctcagaccctgaaggtccaggagggttcatcgagcctaaatggctagcctacggtgagatcatcaacgggcgttatgctatggtgggtgcagtaggtgcgattgcccctgaaatacttggga

SEQ ID NO: 222686 - DNA, 428 bp, Gossypium hirsutum
caacaacgacattacttctctcgcaagcaatggcggcagagtgcaatgcatgcaggtgtggcctcctactggaaagaagaagttcgagactctctcatacctccccgatcttacacccgtgcagttggctaaggaagtagattaccttcttcgctcaaaatgggttccttgcttggaattcgaattagaggagggattcgtgcaccgtaaatactcgagcctacccacgtactacgatggacgctactggaccatgtggaagctgcctatgttcgggtgcaccgactcggctcaggtattgaaggagcttgaggaatgcaagaaggaataccccaatgcattcattagaatcattggcttcgacaacgtgcgtcaagtgcagtgcattagtttcattgcctacaagccttcaggcttctaagcttttt

SEQ ID NO: 222687 - DNA, 459 bp, Gossypium hirsutum
cccacgcgtccggaccttcattcgaccaatggttgaaaatctttaaatgataacatcgtccttttgcccaccactatcaaatttccagattttccaggaaaaagaaaatcaaaacccccaggtgaagaaggtgaaaaccagcagcggcaaaggcaataaaaggtgaagccaaagagagagagatatatacataataaaaaagacttttcaaaagaacacaactatggctcctcatagagaaggatcagatgcttcagtggaagccatggttgctcaagtcgaaaaacacccaatttcatcgatccttatcatcattgctatgcaaacagaagctttgccggtggtgaataagttccagttgattgaaaaccctcattcttcgtttccaaaaggggtcccttggatccattatcatggtgcatacaaggacatcataatcaatctagtttggcctggaaa

SEQ ID NO: 222688 - DNA, 444 bp, Gossypium hirsutum
gtttcctttctcgattttctatttagccaaacaagatgcagatcttcgttaagactctaaccggcaagacgatcactctcgaggtcgagagctccgatacgatcgacaacgtgaaggccaaaatccaagataaggaaggcatccctccagaccagcagcgtctgatcttcgccggaaaacagctcgaagacggccggaccttggccgattacaacatccaaaaggagtcaactctccacctcgtcctccgtctgcgcggtgggatgcaaatcttcgtgaaaaccttgactggcaagacaatcactctcgaggtcgagagctccgacacgatcgacaacgttaaagcgaagatccaagacaaggaaggcatccccccagaccagcaacgtctcatctttgccggaaaacaactcgaagacggtcgtaccttggccgactacaaca

SEQ ID NO: 222689 - DNA, 446 bp, Gossypium hirsutum
caacattgaagagataagattatggtgaaaaactaaacataataaagtccctcataacattcttcgacttgcttcattgattagcccaaagataaacataaccaaaaagaaaaatggcttctgcttccgctactctcctcaagtcttcacctattatcgacaagtccgagtggattaagggccaaaacctccgccacccttcggtttgttttgtacggtcacaccctacatcggccgcctttaccgtccgtgctagttcatatgccgatgagcttgttaagaccgcgaaaactgctgcatctccaggtcgtggtattttggccatggatgaatcaaatgctacatgtgggaagcggcttgcctcgattggtctcgagaataccgaggcaaaccggcaagcttaccgtacccttctcgtgtctgcccctggcctcggtaactacatc

SEQ ID NO: 222690 - DNA, 449 bp, Gossypium hirsutum
ggaacccaaggacagaagactcttttaacatttcaccgcaaagatggagataacaaatgtgagcgagtatcaagaaattgcgaagcaaaagttgccaaagatggtgtatgactactacgcatctggtgctgaggaccaatggacattgcaagagaatagatttgctttcactaagatactgtttcgtcctcgtattctcatcgatgtaagcaagatagacatgaccacaactgtgttgggtttcaagatatcaatgcctatcatgattgccccaactgccatgcaaaaaatggctcatcctgaaggggagtatgcaacagctagggctgcatctgctgctggaactatcatgacattatcctcatgggcaacttctagtgttgaggaggttgcttcgacaggacccggcattcggtttttccaactctatgtatacaaggacaggaatg

SEQ ID NO: 222691 - DNA, 425 bp, Gossypium hirsutum
aaggacagggctactcctcaacaagttgctgattacaccctcagcctcctccgccaaagaatccctccagctgtccctggaatcatgtttttgtctggtgggcagtctgaagttgaggctaccttgaacttgaatgcaatgaaccaagctccaaacccatggtatgtgtcattctcatatgcaagagcccttcaaaacacttgcctgaagaagtggggaggcaggcctgagaatgtgaaggatgctcaagaagcgctgctcatccgagcaaaggccaactttcttgctcaactcggaaagtacactggccaatgagagtcagaggaggccaagcaaggaatgtttgtcaagggttatgtctattagcatgtttggatcttcaacaggtcaatgaattttctggactgaaaatttaattgaaagag

SEQ ID NO: 222692 - DNA, 452 bp, Gossypium hirsutum
cccacgcgccgcttattgatgggttaaagagagtagctgtttgcaacccagtcatgctattggacgagattgacaagacaggttctgatgtgcgtggtgatccagcttcagctctactggaggttcttgatccggagcagaataattctttcaacgaccactatttgaatgtgccatatgacctttcaaaggtgatttttgtggctactgcaaatagggtgcagcctattcctcctccactcttggacaggatggaagtcattgagctgcctggatataccgctgaagaaaagctaagaatagccatgcaacatttgattccacgagttttggatcagcatggattgaattctgagtaccttcaaattccggaggccatggttaaacttgttattcagaggtacaccagggaagctggtgttcggaatctcgaaaggaacttggctgctttg

SEQ ID NO: 222693 - DNA, 448 bp, Gossypium hirsutum
  unsure (1)..(448): unsure at all n locations
cccacgcgtccgggaaaaagaagtccagtagtagtaagtctttattctacgaagctcctctcggttacagcattgaagacgttcgaccaaacggtggaatcaagaagttcagatctgctgcttactccaactgcgctcgcaagccatcctgatatactcacatgcgtgccgtctgaccactagtagtggttaataaaactgttatttgctttgttagttagttttagattatttccccgaccaacttcttcctcttctctcttcgtggctggtttctttacattgcgttctcctgatttggcgactttgtaattcggataaagtttgcagtccttggttgaatcacaatggcagtgtctgcaattggatttgagggttatgaaaaaaggcttgaaatttcctttnttgagcctggcatctttgctgatcctgaaggaaagggtcttcg

SEQ ID NO: 222694 - DNA, 452 bp, Gossypium hirsutum
ctcatatctctctgtttatttattttttttgttttccttttgtcgtccttttctcacctgttgttcttccattttttaatcaagttccccccaccccgctcaacacctctccctctaacaagccaaaggccccaagcagattctatttgttctaacatggagaaaagccatgaacttgaactgacccagatgaggaaatcagtagagaaacttgggttttcaacagagaaatacggggatccgacactcatgagattcttgattgcaagatcaatggacacagataaagcttcaaagatgtttgtccagtggctgaaatggaggtcttctttagttcctaatgggtgcgttgtagaatctgaagtgcctgaccaattagaagccagaaagatttttttgcaaggtttgtcaaagacaggatatccagtgatgattgtccaagcttgcaagca

SEQ ID NO: 222695 - DNA, 450 bp, Gossypium hirsutum
cccacgcgtccggatgtcatgaagatagacatgggtggttctggagcagttattggtgcagcgaaagctctcgggcaaatgaaacctcccgcagttgaggatcatttcattgatgcatcttgtgaaaacatgataagtggaacgggtatgagacccgctgatatcctcacaggatctaatggaaagaccattgaggttaattacactgatgccgaaggcaggcttacactcgcagatgctttggtatatgcttgctaccaatgtgtctagaagattgtctaccaggcaacactaactggggcttggattgtcgctcttggaccgtctattgcatgcgtcctcacaccccgtgatgtacttgcaaaggaggtattcgaagcttcagagatcagtggtgagaaattttggaggatgccacttgaggaaagctattgggagtctatgaaatca

SEQ ID NO: 222696 - DNA, 454 bp, Gossypium hirsutum
atttgatgaaaaagggagtgaaggtgagacaaaaggactccatctgagggggaagagatctacagaaagtgatgggaaagcggataacggtgatgataagatcgtggttcggagccagactaagaagaacagaagattgggccttgataaaaggattgaactgaaaaagaatagagaagaaaagtcggttgtttctggccagagtaaaaagggtatctcgaatgaaagtgagaagatcgataggcttgtccgggactattcggcttcaaccgatttggtcagcctggactggaagaaaatgaagataccttcggttctgccgtccaccgaacatacttggttgtttaagctaatgcagccaatgaaggcactgcttgaagcaaaagagaacttgcaaaaggatctgggtagagatcctactgaagatgaattagctgaggcaacaaattcgagt

SEQ ID NO: 222697 - DNA, 445 bp, Gossypium hirsutum
cgatggaaccgtcagtgttcttgtggcaacttttttgttcgtaattcccaacaagaagcgaaagggagagaaattgatggactggaacgaatgcaagaagctgccatggaacattattttgttactaggggctggtttcgccatagccgacggagtccagtcaagcggactcgctgatcaattatccaaaactctagattttctcgaagaggctccgtatttagctattgcccccgcggtgtgtttaatctgtgccataattaccgagtttataacatcaaatgatgctactgctacccttgtgcttccacttttgattcaaatggcaaaaaccatgcatgttcacccattactccttatggtccctggagcagtgggatcacaatttgcttttatttttgcgacggcaacaccttcgaatatcattggattcgcgacgggcata

SEQ ID NO: 222698 - DNA, 476 bp, Gossypium hirsutum
  unsure (1)..(476): unsure at all n locations
tcccacgtcgtctcgcttaaaaccaagtgttnntctcttcttcttcatgtttctcagatcatagagcttcttcttcttcgtgtctttgttaggtagtttgccctttacccttttcttcttcttcttctcacatgtnccaagtcagtgaaatcacccaattcanntcctcgggatgttctaccctttattggccgagaccaggtttcatgtgccgatccttaattcacttaacagtgccatcgaccttttaccagcctttgtcggttctgtttcgtcccaaaaccacatcgtgagctggaaaggtgcgtgcttttatgagaacaccgctaggatggagttccataacaagagtggcagtgagttcggtggtggaactctccatatcaaggttagcatagcccatagttggacgtgtctggatctttatctctttgcaactccatatcgtgtaactggggattattattttctatctc

SEQ ID NO: 222699 - DNA, 272 bp, Gossypium hirsutum
tccacgcgtccgaaaacacccaggtacagaagcacttacattttctctttggcttaccaaccttggatctgaaatggcaaagtcacccgaagaagaacaccctgtcaagacctttggctgggctgcaagggacccatctggtcatctgtcttctttcaccttctccagaagggtaactggtgaagaagattgtgaggtttaaggtgctgtattgtgggatttgtcattttgaccttcacagtatcaagagtgaatggggcttcttcaactac

SEQ ID NO: 222700 - DNA, 425 bp, Gossypium hirsutum
gtttcattgaaggcgggactctcagactactctttctaaccagctccaccatcacccccaaaaaacaaagcaaattgtagaagatggcaacacaagcacttgtatcatcgtctcttacctactcagtggagactgcaaggcagattcttggagctaaacgacaaattgtgccttcaaggaaaggatcctttgttgttaaggcagcttcgactccacccgttaagcaaggagctgatagacctttatggtttgcatctaaacaaagcctttcatacttggatggcagccttccaggtgattatggatttgaccccttgggactctcagaccctgaaggtccaggagggttcatcgagcctaaatggctagcctacggtgagatcatcaacgggcgttatgctatgttgggtgcagtaagtgcgatt

SEQ ID NO: 222701 - DNA, 420 bp, Gossypium hirsutum
cccacgcgtccggtgagatggcttgctcagctacttcatcttccgcggctctcatctcctctaagccaagggctttctcctccaattccaagcccttctcccaatccctttctctccccaatcccttcactggtctccctgcccctctcctttctcgtcccgcctccttttccctctcccgcacctccccttctcgcaagtctttcgtcgtcaaagccaccagtgagcttccattggtgggaaatcctgcccctgattttgaggctgaggccgtctttgaccaggagttcattaaggtcaagctctccgaatacattgggaagaaatatgtgattctcttcttttacccgctggacttcacatttgtttgccccacagagattactgctttcagtgaccgctttgaagaatttgagaagc

SEQ ID NO: 222702 - DNA, 456 bp, Gossypium hirsutum
ctcttttgtatacctgtagcatatagtaatagtaagcagttatagcaatggcctcctccatgatctcatcggcaaccattgccaccgtgaaccgctcctccccggcacaggccaacatggtggcccccttcaccggcctcaaatctgcctctgctttcccagtcaccaggaaggccaacaacgacatcacttctcttgcaagcaacggtgggagagtgcaatgcatgcaggtgtggccgcctcttgggaagaagaagttcgagactctctcatacctgcccgatcttactcccgtacagttggctaaggaagtagattaccttcttcgctctaaatggattccttgcttggaattcgaattagaggagggattcgtgcaccgtaagtactcgagcttacccacgtactacgatggacgctactggaccatgtggaaactgcccatgttcgggtgca

SEQ ID NO: 222703 - DNA, 439 bp, Gossypium hirsutum
attcaaaactaatcatgtaaaaaaaaaagttgattggaacaaataaagtgaaacatttaagacaagaacaaagtggagattttataacacaaaaatagaggatgcaaatccacttaaaacacaaaaggaaaacaacattcaattaagacacaaaggggggatttcctttgtttgtgcccaatatagatttttttcttcccttagagcttaatttcccatttagaaagctcctctcttgatagcatcgtcattagcatttccaagggcagcttcactcaaatatttgtcagccaattgaaccctcttcacattctcttgctcagcaacaagcatgtatccatattccaacagcttctcaatggtcatcttcggttgctcgaaagatggtggcccttccctcgagttcacgagctttttcccgacaccattgactccgacc

SEQ ID NO: 222704 - DNA, 453 bp, Gossypium hirsutum
ctcccatcacccgagatcatctttccccttcagaatggctgctgcaaccatggctctctcttccccatctttcgccggaaaggccgtcaagctctctccttccgcccctaaaatccaaggcaatggccgtgtttccatgaggaaaaccgctaccaaggctgctccctctggaagtccatggtacggtcctgaccgagtcttgtacttgggtccactatctggtgagcctccatcttacttgaccggagaattccctggtgactacggttgggacactgctggactctcggcggacccagagacatttgccaggaaccgtgagctcgaagtcatccactgtaggtgggctatgttgggtgctctgggtgtgttttccctgagcttttggctaggaatggagtcaaattcggtgaggctgtgtggttcaaggccggatctcaaatcttcagcgat

SEQ ID NO: 222705 - DNA, 446 bp, Gossypium hirsutum
cccacgccgtccgaaatcagttgcttcacaatggcctctacaaccatggctctttcttccccatcattcgccggtaaggcagtgaagttctccccttccacccctgaaatccggggaactggccgtgtttccatgaggaaaaccaccaagcctgttccttctggtagcccatggtacggtcctgaccgagttttgtacttgggtccactttccggtgagccaccatcttacttgaccggtgagttccctggtgactatggttgggacactgctggactctcagctgatcccgagacctttgctaggaaccgtgagctcgaagtcattcactgcagatgggccatgttgggagctcttgggtgtgttttccctgagctggtggctaggaacggtgtcaagttcggtgaaactgtatggttcaagggccggtctcaaatcttcagtga

SEQ ID NO: 222706 - DNA, 423 bp, Gossypium hirsutum
gtttcattgaaggcaggactctcagactactctttcgaaccagctccaccatcacccccaaaaaacaaagcaaattgtagaagatggcaacacaagcacttgtatcatcgtctcttacctactcagtggagactgcaaggcagattcttggagctaaacgacaaattgggtcttcaaggaaaggatcctttgttgttaaggcagcttcgactccacccgttaagcaaggagctgatagacctttatggtttgcatctaaacaaagcctttcatacttggatggcagccttccaggtgattatggatttgaccccttgggactctcagaccctgaaggtccaggagggttcatcgagcctaaatggctagcctacggtgagatcatcaacgggcgttatgctatgttgggtgcagtatgtgcga

SEQ ID NO: 222707 - DNA, 449 bp, Gossypium hirsutum
caatctttcagaaagagagaggcaaagagaaaaaagagtgagggtattacatatattcatctaattatacaaataaagatggctcttcacctttcctgggtttccgtttttggcgatctcggtactgaaatatatattcatatgcccttcttgtttgcgtattttaatattcactaacattacattatattgtttttaattaggcgtcattgtttcatttatggtcgccttttctcccatgccagcattttatcaaatctataagaagaaaacatcagaaggattccaatcattaccctatgtgatatcgctattcagtgccatgctttggatttactatgcacttcttaagaagaatgaaatgcatctaattatcatcaacattttctgctgtttcattcaaagcttttacattgtcacttacgtttactacggtcgaaagaaggaaa

SEQ ID NO: 222708 - DNA, 447 bp, Gossypium hirsutum
atggcttcttctctcagtctttcaagccacacagtggcttcattattcccttctcacacttcaaagccgcagttgtcactttctaaatccatcccaattctcaccaaatcatcacagtctcaatttcatggccttaaattctctcacccttcttctcttaaaattcctcgtttttccacttttaaaacctcgatttctgctaaggtgaataaaggtacagttcctccagcatttactttgaaagatcaagatgggaaaaatgtaagcctttcaaagtttaaagggaagcctgttgtggtttatttttaccctgctgatgaaacccctggttgcaccaaacaggcatgtgcttttagagattcttatgagaagtttaagaaagctggagctgaagttattgggattagtgttgatagtgcagaatctcacaagaattttgccaagaaa

SEQ ID NO: 222709 - DNA, 449 bp, Gossypium hirsutum
cagcagctgcaccacaactacagagaagagagtaaaggggaaaaaaagcgtcgtcgtttttgcttcttcttctacttcgctctctctccttctccgaagttcctctttcgttctttcatttattcagtattgtaaaagatggccgacggtgaggatattcaacccctcgtctgtgataatggaactggaatggtgaaggctggttttgctggtgatgatgctccaagggcagtttttcccagtattgttggtcgtccccggcacactggtgttatggttgggatgggtcagaaggatgcctatgtaggagatgaagcacaatctaaaagaggtatccttactttgaaatatcctattgagcatggtattgtgagcaactgggatgatatggaaaagatctggcatcatacattctacaatgaactccgtggtgctcctgaagagcaccc

SEQ ID NO: 222710 - DNA, 429 bp, Gossypium hirsutum
cttggaaattccaccttactatctctcacaattcaatcgactatggaatccattggagttctcatggcttgccccatgaactcttacctcgagcaacaactcgagaaccgtttcaagctattcagattctggacagtgccggacaaatcatcctttctggcttctcacaaggactcaatccaggcggtcgtcggaaacgcctttgccggtgccgatgctatgctgatcgaggcgttgcccaagctggagattgttgccagcttcagtgtggggcttgataagatagatttggccaagtgtaaagaaaagggtatccgagttaccaacacccctgacgttttgactgaggacgtggcggatttggcgatcggtttgatgttggcggtgttgaggaagctctgtgagagtgatcggttcgtgaggagtggc

SEQ ID NO: 222711 - DNA, 454 bp, Gossypium hirsutum
cccacgcgtccgatggcacccatttcattacccaacatgccccatgcagtatgcatcccctacccagcacaaggtcacgtaaatccgatgctcaaagtggccaaactcctccatttcaaaggcttccacatcacttttgtcaacaccgagtacaaccacaaacgcttgctcaaatccaggggcccccacgccctcaatggcttgcctgacttccggttcgggacaatccccgacggccttcctccgccggacatcgacgccacgcaagacatccccgcgctttgtgactccactagcaagcattgtttggctccctttcgccgactccttgttgagctaaaagctacttccggtgtcccgccggtcacttgtatcgtcgccgatgggtgcatgtcgttcactctcgaggcggctaaagagttagggattcccagtgtgttgttttggacaccca

SEQ ID NO: 222712 - DNA, 452 bp, Gossypium hirsutum
cccacgcgtccgggaatccattggagttctcatggcttgccccatgaactcttacctcgaacaacaactcgagaaccgtttcaagctattcagattctggacagtgccggacaaatcatcctttctggcttctcacaaggactcaatccaggcggtcgtcggaaacgcctttgccggtgccgatgctaagctgatcgaggcgttgcccaagttggagattgttgccagcttcagtgtggggcttgataagatagatttggccaagtgtaaagaaaagggtatccgagttaccaacacccctgacgttttgactgatgacgtggcggatttggcgatcggtttgatgttggcggtgttgaggaagctctgtgagagtgatcggtttgtgaggagtggcaagtggaagagagggcaatatgtgttgactactaagtttactggaaaaagagttg

SEQ ID NO: 222713 - DNA, 287 bp, Gossypium hirsutum
gtgatgaggaagagcttgccatggagaacaacaagagtgctgcatcttcatcagggaaaatcaccttgagcgtctcaaagagcaagccgcagaccggtgtagttatcggtgtgtcccagagccttgagtcatctgacactgacttgtgtgccaagactgcaaaggatgtcatgatcactggtctacggtatgctcatctagagtcaggaacatgtgttgtttgagtatgtttatcttcagctgatatgctgggatctttaaacacgtgatggttaacttttcaacaa

SEQ ID NO: 222714 - DNA, 391 bp, Gossypium hirsutum
cccacgcgtccgctcgagatgggtgggccagcccgatccgacccaataaccttttatttgattcgggtgcgatcgactttgccggttcaggtgtggttcacatggttggtggcattgcagggttatggggtgcattaatcgagggtccaaggattggccgattcgatcgagctggtcgatctgtggcgttacgtgggcacagtgcctcattagtagtgctcgggacgtttctattgtggttcggatggtatgggttcaacccaggttcattcttgaccatcatgaaagggtatggtggtggtaggaggttattattggacaatagtagttccgtagtttttttctatatttaccttcttcattttccgttctctataattttaattacata

SEQ ID NO: 222715 - DNA, 436 bp, Gossypium hirsutum
cccacgcgtccggtgagactcttttgtatacctgtagcatatagtaatagtaagcagtaatagcaatggcctcctccatgatctcatcggcaaccattgccaccgtgaaccgctcctccccggcacaggccaacatggtggcccccttcaccggcctcaaatctgcctctgctttcccagtcaccaggaaggccaacaacgacatcacttctcttgcaagcaacggtgggagagtgcaatgcatgcaggtgtggccgcctcttgggaagaagaagttcgagactctctcatacctgcccgatcttactcccgtacagttggctaaggaagtagattaccttcttcgctctaaatggattccttgcttggaattcgaattagaggagggattcgtgcaccgtaagtactcgagcttacccacgtactacgatggacg

SEQ ID NO: 222716 - DNA, 450 bp, Gossypium hirsutum
cgaactcccctcccgtcctctttcccgatttgtcttcttcattgccccgccatggcttgtgttagcttcgctaaactcaacgcgccgtcatcctcttggatcggtggccagcagtctctccctcaacgctccggatcatccgctcggctcgccactcgcagagtctcactcccgatccgtgctggcgcttacaccgacgaactcatcaaaaccgccaaaactattgcttcacctggtcgtggaatactggcaattgatgaatcgaatgcaacatgtgggaagagattatcttctattggcttagacaatactgaacccaaccgccaggcttacagacagcttctgctcacaactcctggcctcggagaatatattttcggtgccattcttttcgaggaaacactttaccagtcaactacagatgggaagaagttgttgatgtcttgcacg

SEQ ID NO: 222717 - DNA, 452 bp, Gossypium hirsutum
caaagtccaatcactcccaatactttcataacatttcacgaacttcactctccagtctccaatggcggctgccgtctccaccatcggtgctgtcaaccgagcaccgttgagtttgaatggatcaggtgccggagcttctgctccaagctcagctttcatggggaacagcttgaagaaagtgagcgctaggttcaacaacaacggcaaggctccagtgggaagtttcatgattgtggctgccaaagaaatcgacgaagacacacagaccgaccaggaccgatggaagggtcttgcttatgatatctccgatgaccaacaagacattaccagagggaaaggtatggtcgactcattgttccaagctcccatgaacgatggtactcactatgctgtcatgagctcctatgagtacattagccaaggccttcgcacatacgacttggacaacaaca

SEQ ID NO: 222718 - DNA, 254 bp, Gossypium hirsutum
ctcccatcacccgagatcatctttccccttcagaatggcggctgcaaccatggctctctcttccccatctttcgccggaaaggccgtcaagctctctccttccgcccctaaaatccaaggcaatggccgcgtttccatgaggaaaaccgctaccaaggctgcttcccttggaaagtcatgggacgggccttgcccgagtcttgtacttgggtccactatctggtgagcctccttcttacttgaccggaaaattc

SEQ ID NO: 222719 - DNA, 449 bp, Gossypium hirsutum
cccacgcgtccgctcttttgtataactgtagcatatagtactagtaagcagtaatagcaatggcctgctccatgatctcatcggcaaccattgccaccgtgaactgctcctccccggcacaggccaacatggtggcccccttcaccggcctcaagtctgcctctgctttcccagtcactaggaaggccaacaacgacatcacttctcttgcaagcaatggtgggagagtgcaatgcatgcaggtgtggcctcctcttgggaagaagaagttcgagacactctcatacctccccgatcttacacccgtacagttggctaaggaagtagattaccttcttcgctctaaatggattccttgcttggaattcgaattagaggagggattcgggcaccgtaagtactcgagcttacccacgtactacgatggacgcttctggaccatgtgggaa

SEQ ID NO: 222720 - DNA, 448 bp, Gossypium hirsutum
atttagctatagcatacactactagtacccactactagcaatggcttcctcaatgatctcatcggctaccattgccactgcctctccggcacaggctaacatggtcgctcctttcaccggcctcaagtctgcctctgctttcccagtcaccaggaaggccaacaacgacattacttctctcgcaagcaatggcggcagagtgcaatgcatgcaggtgtggcctcctactggaaagaagaagttcgagactctctcatacctccccgatcttacacccgtgcagttggctaaggaagtggattaccttcttcgctcaaaatgggtttccttgcttggaattcgatatagaggagggattcgtgcaccgtaaatactcgagcctacccacgtactacgatggacgctactggaccatgtggaagctgcctatgttcgggtgcaccgactc

SEQ ID NO: 222721 - DNA, 384 bp, Gossypium hirsutum
cttagtttcctcttagcaaagacttcagtcacccacgcagcccctttaccgatccaaacaatgggacgcgtccgtacgaagactgtgaagaaatcgtctcgtcaggtaatcgagaggtactactctcgcatgacgcttgatttccacaccaacaaaaaggttatcgaagaagtagctattatcccatccaagaggctccggaacaagattgctgggttctcaacccatttgatgaaacggatccagaagggtccggttcgtggcatttctctgaagcttcaggaagaagagcgtgagcgtcgtatggattttgtccccgatgtatcggctattgctgttgattcaatagaagttgataaggaaaccattgatatgctttcactt

SEQ ID NO: 222722 - DNA, 382 bp, Gossypium hirsutum
tttagctatagcatacactactagtacccactactagcaatggcttcctcaatgagctcatcggctaccattgccactgcctctccggcacaggctaacatggtcgctcctttcaccggcctcaagtctgcctctgctttcccagtcaccaggaaggccaacaacgacattacttctctcgcaagcaatggcggcagagtgcaatgcatgcaggtgtggcctcctactggaaagaagaagttcgagactctctcatacctccccgatcttacacccgtgcagttggctaaggaagtggattaccttcttcgctcaaaatgggttccttgcttggaattcgaattagaggagggattcgtgcaccgtaaatactcgagcctac

SEQ ID NO: 222723 - DNA, 411 bp, Gossypium hirsutum
  unsure (1)..(411): unsure at all n locations
tccggccctgttagtggtggcattttgaaggttgttatcttagttnntccgtttttacccaaaagtggggtgttatactcacgtaaaacatgggtggcagcacaaacccatggatnngtgaaccacgctcgttcttggcagttgggtattgganngtcgaaaatggcgttccatatntggcttcattaagaactcatggggtgcagaatggggtgacaatggctacttcaagatggagatgggcaaaaacatgtgcggtgtggcaacttgtgcatcatacccaattgttgcttgatccaatcgatgaaccgttttggatcatgtcatttctgtgttatagaaggcttctagttatggtctacaaatgttgttgtagttgttcggngttatggtctagttgaaaccgatggg

SEQ ID NO: 222724 - DNA, 384 bp, Gossypium hirsutum
agcaaaaccatggcctctgcttctcttctcaagacttcaccagttttagacaagtctgagtgggttaagggtcacacccttcgccaaccttccacttctgtggtgaggtgccaccctgttgcaccctccggactaactgtgcgtgcaagctcatatgccgatgagcttgtcaagactgctaaagctattgcttctcctggccgtggaattttggccatggatgagtccaacgctacctgtgggaaacgtttggcctcaatcgggctagaaaacacggaggctaaccgccaagcctacaggacgttgcttgtttcagctcctggccttggtcagtacatctcaggtgccatcctctttgaggaaaccctctatcaaaccacaatt

SEQ ID NO: 222725 - DNA, 381 bp, Gossypium hirsutum
gtcagtacatctcaggtgccatcctctttgaggaaaccctctatcaaaccacaattgatggcaagaagatggttgatgttcttgttgagcagaacatagtccctggtatcaaggttgacaagggtcttgttccactggctggttcaaacaacgagtcatggtgccaaggtcttgatggcctcgctccacgttcagctgcatactaccaacaaggagctcgttttgcaaaatggcgtactgtggtaagcattcccaatggaccaaccgaacttgctgtgaaggaagcagcctggggacttgctcgctatgccgccatctctcaggacaatggattggttccaattgttgagccagagatcttgcttgatggtgatcacggaa

SEQ ID NO: 222726 - DNA, 377 bp, Gossypium hirsutum
gtcgacggcttctatcaacggttggtgccttacctcctcttcttccaccactaccacctcctctttttccgctcgtcgacgacctacattgcggccttcagtcgtcgctagccttaactcttctccttctcctccgactcttatccaagaccgcccggtttttgctgcccctattcctttgctcaccccgagagaagagatgggaaacaagtcctacgacgaagccattgaagctctcaagaaacttctcagtgagaaaggagaactgaaagctgaagcagctgcaagggtggatcaaataacagcagagttaaacacagcatcagctgatggcaaaccatctgactcttctgttgagagactgaaagaaggcttcg

SEQ ID NO: 222727 - DNA, 382 bp, Gossypium hirsutum
gagtacttgaacggagaagttcccggtgactatggatacgatccgtttggtctgagcaagaagccagaagactttgcaaaatatcaagcatatgagttgatacacgcaaggtgggcaatgcttggtgctgcagggttcatcatccctgaagcctttaacaaatttggtgccaactgtggccccgaagccgtttggttcaagaccggagctcttctcttggacggtaacaccttgaactacttcgggaagaacatccccatcaaccttgtggtggctgtcgttgccgaagtcgtccttgttggtggtgctgaatattacagaatcatcaatggcttggatctggaggacaagcttcaccctgggggaccatttgacccactgg

SEQ ID NO: 222728 - DNA, 375 bp, Gossypium hirsutum
cccacgcgtccgacttttaacccctgtcgacactctcaccattttctcagcaaacttagcctatgaaaatcaccattacaagtcccaaagaagacccccgctaattctaaaagaaagaaccagagttttctttctctttagtttacgtttattggccttttggaatttttgatactaaaaaaaggaggcaacgaagaaggggaatggggggcaaagaagaggatgttagattgggagccaacacgttcacagagaggcaaccaattgggaccgcggctcagagtcaagatgacgggaaagactacactgaaccaccaccggctccatttttcgagcctggcgagttaacctcatggtctttttatagggctggga

SEQ ID NO: 222729 - DNA, 382 bp, Gossypium hirsutum
ttcgctttgagattagatccaaaattcctctttcatcatatttccgattccccaatttttcctgaaaccctaatcctaatcccggattcttctcgtctacatcgtctagcaaatggcaaccgaggagccggcagtcgtggcagaccccgcaccggagacggaggaggacaagactgctgagaccaaagctacttcaaaatctggcagagcaaagaaaaccaaagaacccaaaaccaagaaagctgcagctcctcggaaaccacgggctgctcctactcatccaccttacgaagagatgatcaaagatgcgatcgttactttgaaagagaggacaggttcaagtcagtacgccattgctaagttcattgaagagaaacagaag

SEQ ID NO: 222730 - DNA, 370 bp, Gossypium hirsutum
ggaccttcaatttttcatcggagagagcatgcacgatgatggatgtttggtatttgcttactacaaggatggtgctgttgacccgacatttttgtactttgcgtatgcattgaaggaggtcaagtgctgaggtttgaagcaaagaaaaaaaaagtggttgctgaagaatttagtcctttttattattgcttttgtctcttattttcagtactctgctaaagacataaattatttatggtttttgatgtttttgatttaattgtttgttgttttatcatggaatggtttctatttttatgggttgactaaacaagaatttaactctttgttctattactacttaattttattggaaggaggtttttgggac

SEQ ID NO: 222731 - DNA, 377 bp, Gossypium hirsutum
ctcagctcagctcaactcaactcacttaaatcttttctgctgcggtggcgatgggggcggcgatgttgtcggagttggcgacggagatcgtggtgccagtgtgcgccgtgattggaatagctttctcgttggtgcagtgggtgatggtgtcgcgcgtgaagcttacctccgagcgccatgcgtcgtcggcgaatagtagcaagaatggttacggtgattacttgattgaggaagaggaaggaatcaatgaccatagcgttgtcaccaagtgcgctgatattcaaaacgctatctctgaaggtgcaacatcctttctttttactgaatatcagtatgttggcatcttcatgattgctttcgctatcctgattttcctc

SEQ ID NO: 222732 - DNA, 370 bp, Gossypium hirsutum
gattatggtgcaaaactaagcataatactttccctcataacattcttcgactcgcttcattgattagcccaaagataaacataaccaaaaagaaaaacggcttgtgcttccgctactgttctcaagactttacctatgatcgacacgaccgagtggatgaagggccagaacctgcgccaccctccgggtcgctttgtacggtgacacgctacatcggacgccataaccgtccgcgctagctcatatgccaatgagcttgctaagaccgtggaaactgccgcatctacaggtcgaggtataggggccatggatgaatcaaatgctacatgtgggacgcggcttgcctcgattggtgtctagaataccgagg

SEQ ID NO: 222733 - DNA, 384 bp, Gossypium hirsutum
cccacgcgtccgcccacgcgtccgctttgccaaacatggagactagtgtcacgtgctacgctcgtgggattgttcttcctggtgtctcttctaagcactcctcggcattagtctcccctccatccatatctccttccttcagctctaagagccttaaaacaagttcactatttggagaatcattaagggttgttccaaggtcatcattgaaggtttcaaaggcaaagaacactacttcactagtgacaaaatgtgaaattggagagtctttggaagagtttcttacaaaggcaacaacagataaggcattgattagaataatgatgtgtatgggtgaagcattaagaacaattgcttttaaagttagaacagcttcatgtggtg

SEQ ID NO: 222734 - DNA, 382 bp, Gossypium hirsutum
tgaaaaaaaaaaataagacatgtatttggatatttcctttcaactacaacaatattgtagtatttatttgatatgacatgaatagttgaagggaattccccgaagagaaaatggattatgggagtaacaaaaaaacctgacttgaacgatcctgtattaagagctaaattagctaaaggtatgggtcataattattatggggaacccgcatggcccaatgatcttttatatatttttccagtagtaattctcggtactattgcttgcaacgtgggcttagcggttctagaaccttcaatgattggtgaacccgcggatccatttgcaactcctttggaaatattacctgaatggtatttctttcctgtatttcaaatacttc

SEQ ID NO: 222735 - DNA, 381 bp, Gossypium hirsutum
ggggaatctatatgagtgccaaggttgttttttgcatccacaatatagcctatcaagggagatttgcctttgaagattactcacttctcaatttgcctgatcaattcaagagttcatttgacttcatggatgggtatgataagcctgtcaagggaaggaaaatcaattggatgaaggctggaattttggaatcacacagggtattgactgtaagtccatactatgcccaggagcttgtttccggtgaagataaaggtgttgaactcgatcacatcattcgtaaaaccggcatcactggaattgtgaatggcatggatgttcaagaatggaaccctaccactgacaaatacatcagtgtcaaatatgatgcaacaactgtaa

SEQ ID NO: 222736 - DNA, 383 bp, Gossypium hirsutum
atcatgtacatggccgtggcgacttattcaggtctcttcacccccacaatgaccaccctaaaatctttggccccatggaaaccagcctcatcattttcctttgctacctgttccaagtccctcaacttctccgtggctcaaagaaccattagagctgcagctgctgatgaggaagcatcatctgctgccgccacaaaggaagctccggttggtttcacccctccagaattggaccccaacaccccatcacccatcttcggaggaagcactggaggactgcttagaaaggctcaagtcgaagaattctacgtcatcacatgggattcacccaaagaacaaatatttgagatgccgactggtggggcggccatcatgaggcaagg

SEQ ID NO: 222737 - DNA, 382 bp, Gossypium hirsutum
cacgttcttgtttttttcacttctttctctttctcgaaaaccggtcacctgaaacgcaaacgcctctctgaatcctcgccggaacctgtcaatctcttacatctccggcggctgtctcacggatctgttcacgatgagcaccggccaacttctcagcatcgagcctcaagagctccagttcccatttgaattgagaaagcagatctcgtgttccctaaacttgtccaacaagaccgacaattatgtggcttttaaggtcaaaacgacaaatccaaagaagtactgtgtaaggccaaatactggagttgtgctgcctaggtctacgtgcaacgttgttgttacaatgcaagctcaaaaggaagcacctactgatatgcaatgc

SEQ ID NO: 222738 - DNA, 374 bp, Gossypium hirsutum
cttcagttcttcacttccccagtctccagcaatgggagaaaccgattctttcttctcgaacaaatcagcgaagatcttcgtagcaggccatcgaggcctagttggttctgccatagttcgtaaacttcagtccctaggctttaccaacctcctactccgcacccatgccgatctggaccttactcgccaatccgacgtcgaatccttcttcgccgatgagaaacctcactatgtcgtactagctgccgctaaagttggtgggatccacgccaacaacacttaccctgccgatttcattgccatcaacctccaaatccagaccaacgtcatcgattcctcttaccgccacggcgttaagaaaatcctcttcctcg

SEQ ID NO: 222739 - DNA, 381 bp, Gossypium hirsutum
cccacgcgtccgcccacgcgtccgcccacgcgtccggtccgtctctctgttttactccacaaccactatcactaccattatggcttcggctactgtttctgtagccaaacccaaccttcagattcaggcaaaaggaaagggtgttggttttgcagatttctcaggcctacacaactcctctactagccttccctttgccaggaaaacctctgatgacttccattcactcgttgcttttcagacatctgctctaggaagcaataatggcgggtacaggaaagggatggcagaggcaaagctaaaggtggctataaatgggtttggtaggattggcaggaatttcttaagatgctggcatggccgtaaggactccccacttga

SEQ ID NO: 222740 - DNA, 381 bp, Gossypium hirsutum
cggacgcgtggggcacatatttctatttcccactctcttttttgctctcagttaacaacaaaatccgtaaatggctaccactgcttctccaatggcgactcagctgaagagcagctttacgtcgtctgttacaagaggactggtagtccccaggggcatttcgggatccccgttcaaagtatcttccggaaagaccaggaccccttgcttcactgtcaaagctgttcaatccgacaagtcaacatttcaagtaatccaacccatcaacggcgaccccttcattggaagcctggagactccaatcacctcaagccccttaattgcatggtacctttccaacctcccagcctataggacggcagtgaacccacttctgagggg

SEQ ID NO: 222741 - DNA, 383 bp, Gossypium hirsutum
cttttaaccaaacactccacaaaattttctcgaaaaaaaaaaaaaaaatgaggaagtgtgaactatgtggaaggctagctcgaatgcactgtgaatcagatcaagcaaatttatgttgggactgtgatttcaaggttcatggagccaatttcctcgtagctaagcataatcgaaccctcctttgccatgtttgtcaaagtcctactccttggctcgcatctggtcggaatctcggctccgcggtttctgtttgtgattcatgcgttgtaaacggcaacaataagtgtgagtcatcggagagagagtatggtgaagaggaggaggaagaagaggaggagggagattatgataatgacgccgtggaagaatcggcggaggaagag

SEQ ID NO: 222742 - DNA, 384 bp, Gossypium hirsutum
gcggttttcatttccccttcgcaagtagccagccgtttcacacactcaagaagagcgagagctcgtaaatcatggcggaacagaccgaaaaagcttttttgaagcaacccaaagtgtttttgagctcgaagaaaggtgggaaagggaagaggccaggaaagggtgggaatcgcttctggaaaagcattggattgggcttcaagactccccgtgaagctattgaaggaacctacatcgataagaaatgccccttcactggcactgtttcaatccggggtcgtatcttagccggtacttgccacagtgccaagatggtcaggacaatcattgttcgacggaactaccttcattatatcaagaaataccaaaggtatgagaagcgct

SEQ ID NO: 222743 - DNA, 380 bp, Gossypium hirsutum
cccacgcgtccggatccacggcgatgatctatggccatgttttggtttttgatttgttcaggtgccttggacactccaatgctgaagttgttccacatgaagttttcaataagttacctttacttaggtatttcatctatacccccacgtatcatagtcttcaccacacagagatggagaccaatttttgtctgttcatgccgctgtttgatgcactggggagtacacttaacaccaaatcattggagctacataagaaaattacctcaaattctggaaaaaacgggagggtaccggattttgtgttcctagcacatgtggtggacataatgtcggcaatgcatacaccgtttgcgttaagatcatttgcgtcgacccca

SEQ ID NO: 222744 - DNA, 381 bp, Gossypium hirsutum
cccacgcgtccgagcatacactactagtacccactactagcaatggcttcctcaatgatctcatcggctaccattgccactgcctctccggcacaggctaacatggtcacccctttcaccggcctcaagtctgcctctgctttcccagtcaccaggaaggccaacaacgacattacttctctcgcaagcaatggcggcagagtgcaatgcatgcaggtgtggcctcctactggaaagaagaagttcgagactctctcatacctccccgatcttacacccgtgcagttggctaaggaagtagattaccttcttcgctcaaaatgggttccttgcttggagttcgaattggaggagggattcgtgcaccgtaagtactcgagc

SEQ ID NO: 222745 - DNA, 368 bp, Gossypium hirsutum
cggagctggggttcatattcagatccttcttcttcttcttctgtcttcttcatcaaagggggtttatgcagtgttttggaggatactgcctcgaaattatccaccaccaaagtgggattatggagggagtgcacttgatcgttccaaaggaaacaaaagaaactggattcttgtatgggaagatgggttttgtgatttccatgaatgtgagcgtgctggaagtggttatgtaaagggaaggtttggagctgatattttcttcaaaatgtcacatgaagtttataactatggagaaggattagtagggaaaattgcagcagataacagtcacaaatgggtgcataaagaaatcccaaatgaaaatgatc

SEQ ID NO: 222746 - DNA, 188 bp, Gossypium hirsutum
gctcatccgagcaaaggccaacttttttgctcaactcggaaagtacactgtcgggggagagtcagaggagggcaggcaaggaatgtttgtcaagggttatgtctattagcatgtttgtatcttcaacaggtcaatgaatttcctgcactgaaaatttaattgaaagagcagaacactgatctttcatt

SEQ ID NO: 222747 - DNA, 377 bp, Gossypium hirsutum
cccacgcgtccgcccacgcgtccgatggcctctgcttctctcctcaagacttcaccagttttagacaagtgtgagtgggttaagggtcacacccttcgccaaccttccacttctgtggtgaggtgccaccctgttgcaccctccggactaactgtgcgtgcaagctcatatgccgatgagcttgtcaagactgctaaagctattgcttctcctggccgtggaattttggccatggatgagtccaacgctacctgtgggaaacgtttggcctcaatcgggctagaaaacacggaggctaaccgccaagcctacaggacgttgcttgtttcagctcctggccttggtcagtacatctcaggtgccatcctctttgagga

SEQ ID NO: 222748 - DNA, 377 bp, Gossypium hirsutum
atcggctaccattgccactgcctctccggcacaggctaacatggtcgctcctttgaccggcctcaagtctgcctctgctttcccagtcaccaggaaggccaacaacgacattacttctctcgcaagcaatggcggcagagtgcaatgcatgcaggtgtggcctcctactggaaagaagaagttcgagactctctcatacctccccgatcttacacccgtgcagttggctaaggaagtggattaccttcttcgctcaaaatgggttccttgcttggaattcgaattagaggagggattcgtgcaccgtaaatactcgagcctacccacgtactacgatggacgctactggaccatgtggaagctgcctatgttcgggt

SEQ ID NO: 222749 - DNA, 419 bp, Gossypium hirsutum
ccgggcccgaaattccgggggggcccgacgcgtccgggcatctcctttcccctcttcttcctccactgtcctctttcgctgcctaacctaaacgaaagcaatggctttcctgccgcccatcaccactttcgcagccgccctcctcctcttcctccacaccccactcgccacgtcatcccccctcaaccttactggcgactccctttcaccctacgaagtcctccaaggctacaacttccccgttgggcttctcccacaaggcgtcttaaagtacgatttagatgaatccaccggtcggttccatgcctacttagagggttcgtgtagcttctcactggaagggtcttatcaactcaaatacaaatccacgatcagcgggatcatctccaacaacaggctcaaaaacctgagtggaatca

SEQ ID NO: 222750 - DNA, 381 bp, Gossypium hirsutum
attctctttcactgcaaactgtgagctagtgagagagatggcttgctcagctacttcatcggccgcggctctcatctcctctaagccaagggctttctcctccaattccaagcccttctcccaatccctttctctccccaatcccttcactggtctccctgcccctctcctttctcgtcccgcctccttttccctctcccgcgcctccccttctcgcaagtctttcgtcgtcaaagccaccagtgagcttccactggtgggaaatcctgcccctgattttgaggctgaggccgtctttgaccaggagttcattaaggtcaagctctctgaatacattgggaagaaatatgtgattctcttcttttaccccgtggacttcac

SEQ ID NO: 222751 - DNA, 362 bp, Gossypium hirsutum
atatagtcttagtaagcagtaatagcaatggcctccggcatgatctcatcggcggccattgccaccgtgaactgctcctccccggcacaggccaacatggtggcccccttcaccggcctcaagtctgcctctgctttcccagtcactaggaaggccaacaacgacatcacttctcttgcaagcaatggtgggagagtgcaatgcatgcaggtgtggcctcctcttgggaagaagaagttcgagacactctcatacctacccgatcttacacccgtacagttggctaaggaagtagattaccttcttcgctctaaatggattccttgcttggaattcgaattagaggagggattcgtgcaccg

SEQ ID NO: 222752 - DNA, 380 bp, Gossypium hirsutum
cccacgcgtccgcccacgcgtccgtctttctccccacccttaaaccatgtcggctttggttggcaagtatgcaggtgaactcccgtttaggaatttggctttcactgtcttctcctgcatgttttattccattgtatttggggacatgcatgtaaatccttaatgaccacaacacttgatcgatccgtaccataaatgttcaaattttcattacagatatgctattttatgcataattttgttagtcctagctttgactaaaccctgtatgtatattttcccccagaggagttgatcaagaacgccaactacatcgccacgccaggcaaaggtattttggcggcggacgagagcacaggcaccatcgggaagcgtctctc

SEQ ID NO: 222753 - DNA, 378 bp, Gossypium hirsutum
cccacgcgtccgctcagactactctttcgaaccagctccaccatcacccccaaaaaacaaagcaaattgtagaagatggcaacacaagcacttgtatcatcgtctcttacctactcagtggagactgcaaggcagattcttggagctaaacgacaaattgggtcttcaaggaaaggatcctttgttgttaaggcagcttcgactccacccgttaagcaaggagctgatagacctttatggtttgcatctaaacaaagcctttcatacttggatggcagccttccaggtgattatggatttgaccccttgggactctcagaccctgaaggtccaggagggttcatcgagcctaaatggctagcctacggtgagatcatc

SEQ ID NO: 222754 - DNA, 379 bp, Gossypium hirsutum
caacaacgacattacttctctcgcaagcaatggcggcagagtgcaatgcatgcaggtgtggcctcctactggaaagaagaagttcgagactctctcatacctccccgatcttacacccgtgcagttggctaaggaagtagattaccttcttcgctcaaaatgggttccttgcttggaattcgaattagaggagggattcgtgcaccgtaaatactcgagcctacccacgtactacgatggacgctactggaccatgtggaagctgcctatgttcgggtgcaccgactcggctcaggtattgaaggagcttgaggaatgcaagaaggaataccccaatgcattcattagaatcattggcttcgacaacgtgcgtcaagtg

SEQ ID NO: 222755 - DNA, 380 bp, Gossypium hirsutum
gtttcctttctcgattttctatttagccaaacaagatgcagatcttcgttaagactctaaccggcaagacgatcactctcgaggtcgagagctccgatacgatcgacaacgtgaaggccaaaatccaagataaggaaggcatccctccagaccagcagcgtctgatcttcgccggaaaacagctcgaagacggccggaccttggccgattacaacatccaaaaggagtcaactctccacctcgtcctccgtctgcgcggtgggatgcaaatcttcgtgaaaaccttgactggcaagacaatcactctcgaggtcgagagctccgacacgatcgacaacgttaaagcgaagatccaagacaaggaaggcatccccccagac

SEQ ID NO: 222756 - DNA, 381 bp, Gossypium hirsutum
caacattgaagagataagattatggtgaaaaactaaacataataaagtccctcataacattcttcgacttgcttcattgattagcccaaagataaacataaccaaaaagaaaaatggcttctgcttccgctactctcctcaagtcttcacctattatcgacaagtccgagtggattaagggccaaaacctccgccacccttcggtttgttttgtacggtcacaccctacatcggccgcctttaccgtccgtgctagttcatatgccgatgagcttgttaagaccgcgaaaactgctgcatctccaggtcgtggtattttggccatggatgaatcaaatgctacatgtgggaagcggcttgcctcgattggtctcgagaata

SEQ ID NO: 222757 - DNA, 380 bp, Gossypium hirsutum
ggaacccaaggacagaagactcttttaacatttcaccgcaaagatggagataacaaatgtgagcgagtatcaagaaattgcgaagcaaaagttgccaaagatggtgtatgactactacgcatctggtgctgaggaccaatggacattgcaagagaatagatttgctttcactaagatactgtttcgtcctcgtattctcatcgatgtaagcaagatagacatgaccacaactgtgttgggtttcaagatatcaatgcctatcatgattgccccaactgccatgcaaaaaatggctcatcctgaaggggagtatgcaacagctagggctgcatctgctgctggaactatcatgacattatcctcatgggcaacttctagtg

SEQ ID NO: 222758 - DNA, 379 bp, Gossypium hirsutum
aaggacagggctactcctcaacaagttgctgattacaccctcagcctcctccgccaaagaatccctccagctgtccctggaatcatgtttttgtctggtgggcagtctgaagttgaggctaccttgaacttgaatgcaatgaaccaagctccaaacccatggtatgtgtcattctcatatgcaagagcccttcaaaacacttgcctgaagaagtggggaggcaggcctgagaatgtgaaggatgctcaggaagcgctgctcatccgagcaaaggccaactctcttgctcaactcggaaagtacactggcgaaggagagtcagaggaggccaagcaaggaatgtttgtcaagggttatgtctattagcatgtttgtatct

SEQ ID NO: 222759 - DNA, 380 bp, Gossypium hirsutum
cccacgcgccgcttattgatgggttaaagagagtagctgtttgcaacccagtcatgctattggacgagattgacaagacaggttctgatgtgcgtggtgatccagcttcagctctactggaggttcttgatccggagcagaataattctttcaacgaccactatttgaatgtgccatatgacctttcaaaggtgatttttgtggctactgcaaatagggtgcagcctattcctcctccactcttggacaggatggaagtcattgagctgcctggatataccgctgaagaaaagctaagaatagccatgcaacatttgattccacgagttttggatcagcatggattgaattctgagtaccttcaaattccggaggccatg

SEQ ID NO: 222760 - DNA, 379 bp, Gossypium hirsutum
ctcatatctctctgtttatttattttttttgttttccttttgtcgtccttttctcacctgttgttcttccattttttaatcaagttccccccaccccgctcaacacctctccctctaacaagccaaaggccccaagcagattctatttgttctaacatggagaaaagccatgaacttgaactgacccagatgaggaaatcagtagagaaacttgggttttcaacagagaaatacggggatccgacactcatgagattcttgattgcaagatcaatggacacagataaagcttcaaagatgtttgtccagtggctgaaatggaggtcttctttagttcctaatgggtgcgttgtagaatctgaagtgcctgaccaattag

SEQ ID NO: 222761 - DNA, 380 bp, Gossypium hirsutum
cccacgcgtgcggatgtcatgaagattgacatgggaggttctgcagcagttattggtgcaacgaaagctctcgggcaaatcaaacctactgcagttgaggatcattacattgatgcatattgtgaaaacatgataagtggaacgggtatgagacctgtagatatcctcacaggatctaatggaaagactattgaggttaataacactgatgcagaaggcaggcttacactcgcagatgctttggtatatgcttgcaaccaaggtgtctagaagatagtcgacctggcaacactaactggggctagtatatgacgctcttggaccgacgattgcaggcagttttcacacctagtgatgaacttgcaaaggaggtattcgaa

SEQ ID NO: 222762 - DNA, 380 bp, Gossypium hirsutum
atttgatgaaaaagggagtgaaggtgtgacaaaaggacgccatctgagggggaagagatctacagaaagtgatgggaaagcggataacggtgatgataagatcgtggttcggagccagactaagaagaacagaagattgggccttgataaaaggattgaactgaaaaagaatagagaagaaaagtcggttgtttctggccagagtaaaaagggtatctcgaatgaaagtgagaagatcgataggcttgtccgggactattcggcttcaaccgatttggtcagcctggactggaagaaaatgaagatacctccggttctgccgtccaccgaacatacttggttgtttaagctaatgcagccaatgaaggcactgcttgagg

SEQ ID NO: 222763 - DNA, 380 bp, Gossypium hirsutum
cgatggaaccgtcagtgttcttgtggcaacttttttgttcgtaattcccaacaagaagcgaaagggagagaaattgatggactggaacgaatgcaagaagctgccatggaacattattttgttactaggggctggtttcgccatagccgacggagtccagtcaagcggactcgctgatcaattatccaaaactctagattttctcgaagaggctccgtatttagctattgcccccgcggtgtgtttaatctgtgccataattaccgagtttataacatcaaatgatgctactgctacccttgtgcttccacttttgattcaaatggcaaaaaccatgcatgttcacccattactccttatggtccctggagcagtgggat

SEQ ID NO: 222764 - DNA, 385 bp, Gossypium hirsutum
cttccgcccacccgtccgttaaaccaggggttttttttcttcttcatgttctcgatcatggcttcttcttcttctttctttgttaggtgtttccctttacttttcttcttcttcttctcacatgtccaagcagtgaaatcaccaattcatcctcgggatgttctacctttattgccgagacaggtttcatggccgatccttaattcacttaacagtgccatcgaccttttaccagcctttgtcggttctgtttcgtcccaaaaccacatcgtgagctggaaaggtgcgtgcttttatgagaacaccgctaggatggagttccataacaagagtggcagtgagttcggtggtggaactctccatatcaaggttagcaaagcccata

SEQ ID NO: 222765 - DNA, 382 bp, Gossypium hirsutum
cccacgcgtccgaaaacacccaggttcagaagcactaacattttctctttggctgtaccaaccttggatctgaaatggcaaagtcacccgaagaagaacaccctgtcaagacctttggctgggctgcaagggacccatctggtcatctctctcctttcaccttctccagaagggtaactggtgaagaagatgtgaggtttaaggtgctgtattgtgggatttgtcattctgaccttcacagtatcaagagtgaatggggctcctccaactaccccatggttcctgggcatgaaatagtaggggaagtgacagaagtaggcagcaaagtggaaaaggttaaggtgggagataaagtgggcgtgggatgcatggtcggagcttg

SEQ ID NO: 222766 - DNA, 381 bp, Gossypium hirsutum
gtttcattgaaggcgggactctcagactactctttcgaaccagctccaccatcacccccaaaaaacaaagcaaattgtagaagatggcaacacaagcacttgtatcatcgtctcttacctactcagtggagactgcaaggcagattcttggagctaaacgacaaattgggccttcaaggaaaggatcctttgttgttaaggcagcttcgactccacccgttaagcaaggagctgatagacctttatggtttgcatctaaacaaagcctttcatacttggatggcagccttccaggtgattatggatttgaccccttgggactctcagaccctgaaggtccaggagggttcatcgagcctaaatggctagcctacggtgaga

SEQ ID NO: 222767 - DNA, 380 bp, Gossypium hirsutum
cccacgcgtccggtgagatggcttgctcagctacttcatcggccgcggctctcatctcctctaagccaagggctttctcctccaattccaagcccttctcccaatccctttctctccccaatcccttcactggtctccctgcccctctcctttctcgtcccgcctccttttccctctcccgcacctccccttctcgcaagtctttcgtcgtcaaagccaccagtgagcttccattggtgggaaatcctgcccctgattttgaggctgaggccgtctttgaccaggagttcattaaggtcaagctctccgaatacattgggaagaaatatgtgattctcttcttttacccgctggacttcacatttgtttgccccacagag

SEQ ID NO: 222768 - DNA, 382 bp, Gossypium hirsutum
ctcttttgtatacctgtagcatatagtaatagtaagcagtaatagcaatggcctcctgcatgatctcatcggcaaccattgccaccgtgaaccgctcctccccggcacaggccaacatggtggcccccttcaccggcctcaaatctgcctctgctttcccagtcaccaggaaggccaacaacgacatcacttctcttgcaagcaacggtgggagagtgcaatgcatgcaggtgtggccgcctcttgggaagaagaagttcgagactctctcatacctgcccgatcttactcccgtacagttggctaaggaagtagattaccttcttcgctctaaatggattccttgcttggaattcgaattagaggagggattcgtgcaccg

SEQ ID NO: 222769 - DNA, 402 bp, Gossypium hirsutum
cgggggggaccaacgcgtccgattttttattcaaaactaatcatgtaaaaaaaaaagttgattggaacaaataaagtgaaacatttaagacaagaacaaagtggagattttataacacaaaaatagaggatgcaaatccacttaaaacacaaaaggaaaacaacattcaattaagacacaaaggggggatttcctttgtttgtgcccaatatagatttttttcttcccttagagcttaatttcccatttagaaagctcctctcttgatagcatcgtcattagcatttccaagggcagcttcactcaaatatttgtcagccaattgaaccctcttcacattctcttgctcagcaacaagcatgtatccatattccaacagcttctcaatggtcatcttcggtt

SEQ ID NO: 222770 - DNA, 380 bp, Gossypium hirsutum
ctcccatcacccgagatcatctttccccttcagaatggcggctgcaaccatggctctctcttccccatctttcgccggaaaggccgtcaagctctctccttccgcccctaaaatccaaggcaatggccgtgtttccatgaggaaaaccgctaccaaggctgctccctctggaagtccatggtacggtcctgaccgagtcttgtacttgggtccactatctggtgagcctccatcttacttgaccggagaattccctggtgactacggttgggacactgctggactctcggcggacccagagacatttgccaggaaccgtgagctcgaagtcatccactgtaggtgggctatgttgggtgctcttgggtgtgttttccctg

SEQ ID NO: 222771 - DNA, 376 bp, Gossypium hirsutum
cccacgcgtccgaaatcagttgcttcacaatggcctctacaaccatggctctttcttccccatcattcgccggtaaggcagtgaagttctccccttccacccctgaaatccggggaactggccgtgtttccatgaggaaaaccaccaagcctgttccttctggtagcccatggtacggtcctgaccgagttttgtacttgggtccactttccggtgagccaccatcttacttgaccggtgagttccctggtgactatggttgggacactgctggactctcagctgatcccgagacctttgctaggaaccgtgagctcgaagtcattcactgcagatgggccatgttgggagctcttgggtgtgttttccctgagct

SEQ ID NO: 222772 - DNA, 380 bp, Gossypium hirsutum
gtttaattgaaggcaggactttaagattactctttcgaaccagctccaccatcacccccaaaaaacaaagcaaagtgtagaagatggcaacacaagcacttgtatcatcgtctcttacctactcagtggagactgcaaggcagattcttggagctaaacgacaaattgggtcttcaaggaaaggatcctttgttgttaaggcagcttcgactccacccgttaagcaaggagctgatagacctttatggtttgcatctaaacaaagcctttcatacttggatggcagccttccaggtgattatggatttgaccccttgggactctcagaccctgaaggtccaggagggttcatcgagcctaaatggctagcctacggtgag

SEQ ID NO: 222773 - DNA, 379 bp, Gossypium hirsutum
caatctttcagaaagagagaggcaaagagaaaaaagagagagggtattacatatattcatctaattatacaaataaagatggctcttcacctttcctgggtttccgtttttggcgatctcggtactgaaatatatattcatatgcccttcttgtttgcgtattttaatattcactaacattacattatattgtttttaattaggcgtcattgtttcatttatggtcgccttttctcccatgccagcattttatcaaatctataagaagaaaacatcagaaggattccaatcattaccctatgtgatatcgctattcagtgccatgctttggatttactatgcacttcttaagaagaatgaaatgcatctaattatcatc

SEQ ID NO: 222774 - DNA, 380 bp, Gossypium hirsutum
atggcttcttctctcagtctttcaagccacacagtggcttcattattcccttctcacacttcaaagccgcagttgtcactttctaaatccatcccaattctcaccaaatcatcacagtctcaatttcatggccttaaattctctcacccttcttctcttaaaattcctcgtttttccacttttaaaacctcgatttctgctaaggtgaataaaggtacagttcctccagcatttactttgaaagatcaagatgggaaaaatgtaagcctttcaaagtttaaagggaagcctgttgtggtttatttttaccctgctgatgaaacccctggttgcaccaaacaggcatgtgcttttagagattcttatgagaagtttaagaa

SEQ ID NO: 222775 - DNA, 382 bp, Gossypium hirsutum
cagcagctgcaccacaactacagagaagagagtaaaggggaaaaaaagcgtcgtcgtttttgcttcttcttctacttcgctctctctccttctccgaagttcctctttcgttctttcatttattcagtattgtaaaagatggccgacggtgaggatattcaacccctcgtctgtgataatggaactggaatggtgaaggctggttttgctggtgatgatgctccaagggcagtttttcccagtattgttggtcgtccccggcacactggtgttatggttgggatgggtcagaaggatgcctatgtaggagatgaagcacaatctaaaagaggtatccttactttgaaatatcctattgagcatggtattgtgagcaactggg

SEQ ID NO: 222776 - DNA, 383 bp, Gossypium hirsutum
cttggaaattccaccttactatctctcacaattcaatcgactatggaatccattggagttctcatggcttgccccatgaactcttacctcgagcaacaactcgagaaccgtttcaagctattcagattctggacagtgccggacaaatcatcctttctggcttctcacaaggactcaatccaggcggtcgtcggaaacgcctttgccggtgccgatgctatgctgatcgaggcgttgcccaagctggagattgttgccagcttcagtgtggggcttgataagatagatttggccaagtgtaaagaaaagggtatccgagttaccaacacccctgacgttttgactgaggacgtggcggatttggcgatcggtttgatgttggc

SEQ ID NO: 222777 - DNA, 380 bp, Gossypium hirsutum
cccacgcgtccgatggcacccatttcattacccaacaagccccatgcagtatgcgggccctacccagcacaaggtcacgtaaatccgatgctcaaagtggccaaactcctccatttcaaaggcttccacatcacttttgtcaacaccgagtacaaccacaaacgcttgctcaaatccaggggcccccacgccctcaatggcttgcctgacttccggttcgggacaatccccgacggccttcctccgccggacatcgacgccacgcaagacatccccgcgctttgtgactccactagcaagcattgtttggctccctttcgccgactccttgttgagctaaaagctacttccggtgtcccgccggtcacttgtatcgtcgc

SEQ ID NO: 222778 - DNA, 380 bp, Gossypium hirsutum
cccacgcgtccgggaatccattggagttctcatggcttgccccatgaactcttacctcgaacaacaactcgagaaccgtttcaagctattcagattctggacagtgccggacaaatcatcctttctggcttctcacaaggactcaatccaggcggtcgtcggaaacgcctttgccggtgccgatgctaagctgatcgaggcgttgcccaagttggagattgttgccagcttcagtgtggggcttgataagatagatttggccaagtgtaaagaaaagggtatccgagttaccaacacccctgacgttttgactgaggacgtggcggatttggcgatcggtttgatgttggcggtgttgaggaagctctgtgagagtgatc

SEQ ID NO: 222779 - DNA, 370 bp, Gossypium hirsutum
cccacgcgtccgttcgagatgggtgggccagcccgatccgacccaataaccttttatttgattcgggtgcgatcgactttgccggttcaggtgtggttcacatggttggtggcattgcagggttatggggtgcattaatcgagggtccaaggattggccgattcgatcgagctggtcgatctgtggcgttacgtgggcacagtgcctcattagtagtgctcgggacgtttctattgtggttcggatggtatgggttcaacccaggttcattcttgaccatcatgaaagggtatggtggtggtggaggttattatggacaatggagtgccgtagggaggacagctgtcacgacgacattggccgggtgcac

SEQ ID NO: 222780 - DNA, 381 bp, Gossypium hirsutum
cccacgcgtccggtgagactcttttgtatacctgtagcatatagtaatagtaagcagtaatagcaatggcctcctccatgatctcatcggcaaccattgccaccgtgaaccgctcctccccggcacaggccaacatggtggcccccttcaccggcctcaaatctgcctctgctttcccagtcaccaggaaggccaacaacgacatcacttctcttgcaagcaacggtgggagagtgcaatgcatgcaggtgtggccgcctcttgggaagaagaagttcgagactctctcatacctgcccgatcttactcccgtacagttggctaaggaagtagattaccttcttcgctctaaatggattccttgcttggaattcgaattag

SEQ ID NO: 222781 - DNA, 380 bp, Gossypium hirsutum
gctaccactgcttctccaatggcgactcagctgaagagcagctttacgtcgtctgttacaagaggactggtagtccccaggggcatttcgggatccccgttcaaagtatcttccggaaagaccaggaccccttgcttcactgtcaaagctgttcaatccgacaagtcaacatttcaagtaatccaacccatcaacggcgaccccttcattggaagcctggagactccaatcacctcaagccccttaattgcatggtacctttccaacctcccagcctataggacggcagtgaacccacttctgaggggaatcgaagtgggtctggctcacggcttcctcctggtgggtccattcgttaaggccggccctctaaggaacac

SEQ ID NO: 222782 - DNA, 384 bp, Gossypium hirsutum
cgaactcccctcccgtcctctttcccgatttgtcttcttcattgccccgccatggcttgtgttagcttcgctaaactcaacgcgccgtcatcctcttggatcggtggccagcagtctctccctcaacgctccggatcatccgctcggctcgccactcgcagagtctcactcccgatccgtgctggcgcttacaccgacgaactcatcaaaaccgccaaaactattgcttcacctggtcgtggaatactggcaattgatgaatcgaatgcaacatgtgggaagagattatcttctattggcttagacaatactgaacccaaccgccaggcttacagacagcttctgctcacaactcctggcctcggagaatatatttccggtgcc

SEQ ID NO: 222783 - DNA, 386 bp, Gossypium hirsutum
caaagtccaatcactcccaatactttcataacatttcacgaacttcactctccagtctccaatggcggctgccgtctccaccatcggtgctgtcaaccgagcaccgttgagtttgaatggatcaggtgccggagcttctgctccaagctcagctttcatggggaacagcttgaagaaagtgagcgctaggttcaacaacaacggcaaggctccagtgggaagtttcatgattgtggctgccaaagaaatcgacgaagacacacagaccgaccaggaccgatggaagggtcttgcttatgatatctccgatgaccaacaagacattaccagagggaaaggtatggtcgactcattgttccaagctcccatgaacgatggtactcact

SEQ ID NO: 222784 - DNA, 384 bp, Gossypium hirsutum
cccacgcgtccgctcttttgtataactgttgcatatagtactagtaagcagtaataggaatggcctcctccatgatctcatcggcaaccattgccaccgtgaactgctcctccccggcacaggccaacatggtggcccccttcaccggcctcaagtctgcctctgctttcccagtcactaggaaggccaacaacgacatcacttctcttgcaagcaatggtgggagagtgcaatgcatgcaggtgtggcctcctcttgggaagaagaagttcgagacactctcatacctccccgatcttacacccgtacagttggctaaggaagtagattaccttcttcgctctaaatggattccttgcttggaattcgaattagaggagggat

SEQ ID NO: 222785 - DNA, 381 bp, Gossypium hirsutum
atttagctatagcatacactactagtacccactactagcaatggcttcctcaatgatctcatcggctaccattgccactgcctctccggcacaggctaacatggtcgctcctttcaccggcctcaagtctgcctctgctttcccagtcaccaggaaggccaacaacgacattacttctctcgcaagcaatggcggcagagtgcaatgcatgcaggtgtggcctcctactggaaagaagaagttcgagactctctcatacctccccgatcttacacccgtgcagttggctaaggaagtggattaccttcttcgctcaaaatgggtttccttgcttggaattcgaattagaggagggattcgtgcaccgtaaatactcgagcc

SEQ ID NO: 222786 - DNA, 269 bp, Gossypium hirsutum
cttagtttcctcttagcaaagacttcagccacccacgcagcccctttaccgatccagacaatgggactcgtccgtacgaagactgtgaagaaatcgtctcgtcaggtaatcgagaggtactactctcgcatgacgcttgatttccacaccaacaaaaaggttatcgaagaagtagctattatcccatccaagaagctccggaacaagattgctgggttctcaacccatttgatgaaacggatccagaagggtccggttcgtggcatttc

SEQ ID NO: 222787 - DNA, 392 bp, Gossypium hirsutum
tttagctatagcatacactactagtacccactactagcaatggcttcctcaatgatctcatcggctaccattgccactgcctctccggcacaggctaacatggtcgctcctttcaccggcctcaagtctgcctctgctttcccagtcaccaggaaggccaacaacgacattacttctctcgcaagcaatggcggcagagtgcaatgcatgcaggtgtggcctcctactggaaagaagaagttcgagactctctcatacctccccgatcttacacccgtgcagttggctaaggaagtggattaccttcttcgctcaaaatgggttccttgcttggaattcgaattagaggagggattcgtgcaccgtaaatactcgagcctacccacgtacta

SEQ ID NO: 222788 - DNA, 392 bp, Gossypium hirsutum
agcaaaaccatggcctctgcttctctcctcaagacttcaccagttttagacaagtctgagtgggttaagggtcacacccttcgccaaccttccacttctgtggtgaggtgccaccctgttgcaccctccggactaactgtgcgtgcaagctcatatgccgatgagcttgtcaagactgctaaagctattgcttctcctggccgtggaattttggccatggatgagtccaacgctacctgtgggaaacgtttggcctcaatcgggctagaaaacacggaggctaaccgccaagcctacaggacgttgcttgtttcagctcctggccttggtcagtacatctcaggtgccatcctctttgaggaaaccctctatcaaccacaattgatggcaag

SEQ ID NO: 222789 - DNA, 393 bp, Gossypium hirsutum
gtcagtacatctcatgtgccatcctgtttgaggaaaccctctatcaaaccacaatagatggcaagaagatggttgatgttcttgttgagcagaacatagtccctggtatcaaggttgacaagggtcttgttccactggctggttcaaacaacgagtcatggtgccaaggtcttgattgcctcgctccacgttcagctgcatactaccaacaaggagctcgttttgcaaaatggcgtactgtggtaagcattcccaatggaccaaccgaacttgctgtgaaggaagcagcctggggacttgctcgctatgccgccatctctcatgacaatggattggttccaattgttgagccagagatcttgcttgatggtgatcacggaattgacaggactt

SEQ ID NO: 222790 - DNA, 367 bp, Gossypium hirsutum
gtcgacggcttctatcaacggttggtgccttacctcctcttcttccaccactaccacctcctctttttccggtcgtcgacgacctacattgcggccttcagtcgtcgctagccttaactcttctccttctcctccgactcttatccaagaccgcccggtttttgctgcccctattcctttgctcaccccgagagaagagatgggaaacaagtcctacgacgaagccattgaagctctcaagaaacttctcagtgagaaaggagaactgaaagctgaagcagctgcaagggtagatcaaataacagcagagttaaacacagcatcagctgatggcaaaccatctgactcttctgttgagagactggaa

SEQ ID NO: 222791 - DNA, 273 bp, Gossypium hirsutum
gagtacttgaacggagaagtttccggagactatggatacgatccgtttggtctgagcaagaagccagaagactttgcaaaatatcaagcatatgagttgatacacgcaaggtgggcaatgcttggtgctgcagggttcatcatccctgaagcctttaacaaatttggtgccaactgtggccccgaagccgtttggttcaagaccggagctctttttttggacggtaacaccttgaactacttctggaagaacatcccaatcaaccttgtggtg

SEQ ID NO: 222792 - DNA, 378 bp, Gossypium hirsutum
cccacgcgtccgacttttaacctttgccgacactctcaccattttctcagcagacttagcctatgaaaatcaccatgacaagtcccaaagaagacccccgctaattctaaaagaaagaaccagagttttctttctctttagtttacgtttattgtccttttggaatttttgatactaaaaaaaggaagcaacgaagaagggaaatggagggcaaagaagaggatgttagattgggagccaacaagttcacagagaggcaaccaattgggaccgcggctcagagtcaagatgacgggaaagactacactgaaccaccaccggctccatttttcgagcctggcgagttaacctcatggtcttttatagggctgggattgc

SEQ ID NO: 222793 - DNA, 370 bp, Gossypium hirsutum
ggaccttaaatttttcatcggagagagcatgcacgatgatggatgtttggtatttgcttactacaaggatggtgctgttgacccgacatttttgtactttgcgtatgcattgaaggaggtcaagtgctgaggtttgaagcaaagaaaaaaaaagtggttgctgaagaatttagtcctttttattattgcttttgtctcttattttcagtactctgctaaagacataaattatttatggtttttgatgtttttgatttaattgtttgctgttttatcatggaatgggttctatttttatgggttgactaaacaagaatgtaactctttgctctattactacttaatcttattggaaggaggcttttggaac

SEQ ID NO: 222794 - DNA, 389 bp, Gossypium hirsutum
ctcagctcagctcaactcaactcacttaaatcttttctgctgcggtggcgatgggggcggctatgttgtcggagttgacgaccgaaatcgtggttccagtgtgcgccgtgattggaatagctttctcgttggtgcaatgggtgatggtgtcacgcgtgaagcttacctccgagcgccatgcgtcgtcggcgaatagtatcaagaatggttacggtgattacttgattgaggaagaggaaggaatcaatgaccatagcgttgtcaccaagtgcgctgatattcaaaacgctatctctgaaagtgcaacatcctttctttttactgaatatcagtatgttggcatcttcatgattgctttcgctatcctgattcttctctttctgggctct

SEQ ID NO: 222795 - DNA, 333 bp, Gossypium hirsutum
gactatcgtgcaaaacttagcataatacagtctcctcataacatccttcgactcgcttcatggattagcccaaagattaacagaaccaaaaagaaaaacggcttgtgcttccgctactgtcctcaagtctttacctatgatcgacacgaccgagtggattaagggccggaacctgcgccaccctccggttcgccttgtacggtcacacgctacatcagacgccatatccgtccgcgctagctcatatgccgatgagcttgccaagaccgctgaaactgccgcatcttcaggtcgaggtatttgggccatggttgaatccaatgctgcatgtag

SEQ ID NO: 222796 - DNA, 383 bp, Gossypium hirsutum
cccacgcgtccgcccacgcgtccgctttgccaaacatggagactagtgtcacgtgctacgctcgtgggattgttcttcctggtgtctcttctaagcactcctcggcattagtctcccctccatccatatctccttccttcagctctaagagccttaaaacaagttcactatttggagaatcattaagggttgttccaaggtcatcattgaaggtttcaaaggcaaagaacactacttcactagtgacaaaatgtgaaattggagagtctttggaagagtttcttacaaaggcaacaacagataaggcattgattagaataatgatgtgtatgggtgaagcattaagaacaattgcttttaaagttagaacagcttcatgtggt

SEQ ID NO: 222797 - DNA, 385 bp, Gossypium hirsutum
tgaaaaaaaaaaataagacatgtatttggatatttcctttcaactacaacaatattctagggtttatttgatatgacatgggtagttgaagggaattccccgaagagaaaatggattatgggagtaacaaaaaaacctgacttgaacgatcctgtattaagagctaaattagctaaaggtatgggtcataattattatggggaacccgcatggcccaatgatcttttatatatttttccagtagtaattctcggtactattgcttgcaacgtgggcttagcggttctagaaccttcaatgattggtgaacccgcggatccatttgcaactcctttggaaatattacctgaatggtatttctttcctgtatttcaaatacttcgta

SEQ ID NO: 222798 - DNA, 393 bp, Gossypium hirsutum
ggggaatctatatgagtgccaaggttgctttttgcatccacaatatagcctatcaagggagatttgcctttgaagattacgcacttctcaatttgcctgatcaattcaagagttcatttgacttcatggatgggtatgataagcctgtcaagggaaggaaaatcaattggatgaaggctggaattttggaatcacacagggtattgactgtaagtccatactatgcccaggagcttgtttccggtgaagataaaggtgttgaactcgatcacatcattcgtaaaaccggcatcactggaattgtgaatggcatggatgttcaagaatggaaccctaccactgacaaatacatcagtgtcaaatatgattgcacaactgtaacgtatgcaaagc

SEQ ID NO: 222799 - DNA, 345 bp, Gossypium hirsutum
ttcatttacattgttttggcatcttatgcagggccgaacacccccacaatgaccaggctaaattttttggccgcatggaaaccatccttatcattttcctttgctacctgttccaagtccctcaacttctccgtggctcaaagaaccattagagctgcagctgctgatgaggaagcatcatctgctgccgtcacaaatgaagctccggttggtttcacccctccagaattggaccccaacaccccatgacccatcttctgaggaagcactggaggactgcttataaaggcttaagtcgaagaattctacttcatcacatgggattcacccaaagtacaaaatttt

SEQ ID NO: 222800 - DNA, 251 bp, Gossypium hirsutum
cacgttcttgtttttttcacttctttctctttctcgaaaaccggtcacctgaaactcaaacgcctctctgaatccgggccggaacctgtcaatctcttacatctccggcggctgtctcacggatctgttcacgatgagcaccggccaacttctcagcatcgagcctcaagagctccagttcccatttgaattgagaaagcagatctcgtgttccctaaacttgtccaacaagaccgacaattatgtggctt

SEQ ID NO: 222801 - DNA, 327 bp, Gossypium hirsutum
cttcagttcttcacttccccagtctccagcaatgggagaaaccgattctttgttcgcgaacaaatcagcgaagatggtcgtagcaggccatcgaggcctagttggttctgccatagttcgtaaacttcagtccctaggctttaccaacctcctactccgcacccatgccgatctggaccttactcgccaatccgacgtcgaatccttcttcgccgatgagaaacctcactatgtcgtactagctgccgctaaagttggtgggatccacgccaacaacacttaccctgccgatttcattgccatcaacctccaaatccagaccaacgt

SEQ ID NO: 222802 - DNA, 378 bp, Gossypium hirsutum
cccacgcgtccgcccacgcgtccgcccacgcgtccggtccgtctctctgttggactgcacaaccactatcagtgaccattatggcttcggctactgtttctgtagccaaacccaaccttcagattcaggcaaaaggaaagggtgttggttttgcagatttctcaggcctacacaactcctctactagccttccctttgccaggaaaacctctgatgacttccattcactcgttgcttttcagacatctgctctaggaagcaataatggcgggtacaggaaagggatggcagaggcaaagctaaaggtggctataaatgggtctggtaggattggcaggaatttcttaagatgctggcatggccgtaaggactccccac

SEQ ID NO: 222803 - DNA, 397 bp, Gossypium hirsutum
cggacgcgtggggcacatatttctatttcccactctcttttttgctctcaggtaacaacaaaatccgtaaatggctgccactgcttctccaatggcgactcagctgaagagcagctttacgtcgtctgttacaagaggactggtagtccccaggggcatttcgggatccccgttcaaagtatcttccggaaagaccaggaccccttgcttcactgtcaaagctgttcaatccgacaagtcaacatttcaagtaatccaacccatcaacggcgaccccttcattggaagcctggagactccaatcacctcaagccccttaattgcatggtacctttccaacctcccagcctatatgacggcagtgaacccacttctgaggggaatcgaagtgggtctg

SEQ ID NO: 222804 - DNA, 361 bp, Gossypium hirsutum
cttttaaccaaacactccacaaaattttctcgaaaaaaaaaaaaaaaatgaggaagggtgggctatgtggaaggctggctggaatgcactgtgaatcagatcaagcaaatttatgttgggactgtgatttcaaggttcatggagccaatttcctcgtagctaagcataatcgaaccctcctttgccatgtttgtcaaagtcctactccttggctcgcatctggtcggaatctcggctccgcggtttctgtttgtgattcatgcgttgtaaacggcaacaataagtgtgagtcatcggagagagagtatggtgaagaggaggaggaagaagaggaggagggagattatgataatgacgccgt

SEQ ID NO: 222805 - DNA, 393 bp, Gossypium hirsutum
gcggttttcatttccccttcgcaagtatccagccgtttcacacactcaagaagagcgagagctcgtaaatcatggcggaacagaccgaaaaagcttttttgaagcaacccaaagtgtttttgagctcgaagaaaggtgggaaagggaagaggccaggaaagggtgggaatcgcttctggaaaagcattggattgggcttcaagactccccgtgaagctattgaaggaacctacatcgataagaaatgccccttcactggcactgtttcaatccggggtcgtatcttagccggtacttgccacagtgccaagatggtcaggacaatcattgttcgacggaactaccttcattatatcaagaaataccaaaggtatgagaagcgccattcaaaca

SEQ ID NO: 222806 - DNA, 301 bp, Gossypium hirsutum
cccacgcgtccggatccacggcgatgatctatggccatgttttggtttttgattttgtcaggtgccttggacactggaatgctgaagttgttccacatgaagttttcaataagttacctttacttaggtatttcatctatacccccacgtatcatagtcttcaccacacagagatggagaccaatttttgtctgttcatgccgctgtttgatgcactggggagtacacttaacaccaaatcattggagctacataagaaaattacctcaaattctggaaaaaaccggagggtaccggattt

SEQ ID NO: 222807 - DNA, 325 bp, Gossypium hirsutum
cccacgcgtccgagcatacactactagtacccactactagcaatggcttccgcaaggatctcatcggctaccggtgccactgcctctccggcacaggctaacatggtcacccctttcaccggcctcaagtctgcctctgctttcccagtcaccaggaaggccaacaacgacattacttctctcgcaagcaatggcggcagagtgcaatgcatgcaagtgtggcctcctactggaaagaagaaagtcgagactctctcatacctccccgatcttaacacccgtgcaattggctaaaggaagtagattaaccttcttcgctcaaaat

SEQ ID NO: 222808 - DNA, 380 bp, Gossypium hirsutum
cccacgcgtccgtacggagcttgtgttcatattcagattcttcttcttcttcttcttctgcttcatcaaagtgggtgtatgcagtgttttggaggatactgcctcgaaattatccaccaccaaagtgggattatggagggagtgcacttgatcgttccaaaggaaacaaaagaaactggattcttgtatgggaagatgggttttgtgatttccatgaatgtgagcgtgctggaagtggttatgtaaagggaaggtttggagctgatattttcttcaaaatgtcacatgaagtttataactatggagaaagattagtagggaaaattgcagcagataacagtcacatatgggtgcataaagatatcccaaatgaaaatgat

SEQ ID NO: 222809 - DNA, 215 bp, Gossypium hirsutum
gctcatccgagcaaaggccatctctcttgctcaactcggaaagtacactgtcgaaggatagtcagaggaggccaagcaaggaatgtttgccaagggttatgtctattagcatgttcgcatcttcaacaggtcaatgaatttcctgcactgaaaatttaattgaaagagcagaacactgatctttcattaaaaaaaattaaaacacaaaaataact

SEQ ID NO: 222810 - DNA, 397 bp, Gossypium hirsutum
cccacgcgtccgcccacgcgtccgatggcctctgcttctctcctcaagacttgaccagttttagacaagtctgagtgggttaagggtcacacccttcgccaaccttccacttctgtggtgaggtgccaccctgttgcaccctccggactaactgtgcgtgcaagctcatatgccgatgagcttgtcaagactgctaaagctattgcttctcctggccgtggaattttggccatggatgagtccaacgctacctgtgggaaacgtttggcctcaatcgggctagaaaacacggaggctaaccgccaagcctacaggacgttgcttgtttcagctcctggccttggtcagtacatctcaggtgccatcctctttgaggaaaccctctatcaaaccacaa

SEQ ID NO: 222811 - DNA, 392 bp, Gossypium hirsutum
atcggctaccattgccactgcctctccggcacaggctaacatggtcgctcctttcaccggcctcaagtctgcctctgctttcccagtcaccaggaaggccaacaacgacattacttctctcgcaagcaatggcggcagagtgcaatgcatgcaggtgtggcctcctactggaaagaagaagttcgagactctctcatacctccccgatcttacacccgtgcagttggctaaggaagtggattaccttcttcgctcaaaatgggttccttgcttggaattcgaattagaggagggattcgtgcaccgtaaatactcgagcctacccacgtactacgatggacgctactggaccatgtggaagctgcctatgttcgggtgcaccgactcggctc

SEQ ID NO: 222812 - DNA, 389 bp, Gossypium hirsutum
ggcatctcctttcccctcttcttcctccactgtcctctttcgctgcctaacctaaacaaagcaatggctttccttccgcccatcaccactttcgcagccgccctcctcctcttcctccacaccccactcgccacgtcatcccccctcaaccttactggcgactccctttcaccctacgaagtcctccaaggctacaacttccccgttgggcttctcccacaaggcgtcttaaagtacgatttagatgaatccaccggtcggttccatgcctacttagagggttcgtgtagcttctcactggaagggtcttatcaactcaaatacaaatccacgatcagcgggatcatctccaacaacaggctcaaaaacctgagtggaatcagtgtcaa

SEQ ID NO: 222813 - DNA, 400 bp, Gossypium hirsutum
attctctttcactgcaaactgtgagcgagtgagagagatggcttgctcagctacttcatcggccgcggctctcatctcctgtaagccaagggctttctcctccaattccaagcccttctcccaatccctttctctccccaatcccttcactggtctccctgcccctctcctttctcgtcccgcctccttttccctctcccgcgcctccccttctcgcaagtctttcgtcgtcaaagccaccagtgagcttccactggtgggaaatcctgcccctgattttgaggctgaggccgtctttgaccaggagttcattaaggtcaagctctctgaatacattgggaagaaatatgtgattctcttcttttaccccgtggacttcacatttgtttgccccacagag

SEQ ID NO: 222814 - DNA, 401 bp, Gossypium hirsutum
cttttgtataactgtagcatatagtactagtaagcagtaatagcaatggcctcctgcatgatctcatcggcaaccattgccaccgtgaactgctcctccccggcacaggccaacatggtggcccccttcaccggcctcaagtctgcctctgctttcccagtcactaggaaggccaacaacgacatcacttctcttgcaagcaatggtgggagagtgcaatgcatgcaggtgtggcctcctcttgggaagaagaagttcgagacactctcatacctccccgatcttacacccgtacagttggctaaggaagtagattaccttcttcgctctaaatggattccttgcttggaattcgaattagaggagggattcgtgcaccgtaagtactcgagcttacccac

SEQ ID NO: 222815 - DNA, 399 bp, Gossypium hirsutum
cccacgcgtccgcccacgcgtccgtcttcctccccacccttaaaccatgtcggcttgtgttggcaagtatgcaggtgaactcccgtttaggaatttggctttcactgtcttctcctgcatgttttattccattgtatttggggacatgcatgtaaatccttaatgaccacaacacttgatcgatccgtaccataaatgttcaaattttcattacagatatgctattttatgcataattttgttagtcctagctttgactaaaccctgtatgtatattttcccccagaggagttgatcaagaacgccaactacatcgccacgccaggcaaaggtattttggcggcggacgagagcacaggcaccatcgggaagcgtctctcgagcatcaacgtcgagaac

SEQ ID NO: 222816 - DNA, 384 bp, Gossypium hirsutum
cccacgcgtccgctcagactactctttcgaaccagctccaccatcacccccaaaaaacaaagcaaattgtagaagatggcaacacaagcacttgtatcatcgtctcttacctactcagtggagactgcaaggcagattcttggagctaaacgacaaattgggtcttcaaggaaaggatcctttgttgttaaggcagcttcgactccacccgttaagcaaggagctgatagacctttatggtttgcatctaaacaaagcctttcatacttggatggcagccttccaggtgattatggatttgaccccttgggactctcagaccctgaaggtccaggagggttcatcgagcctaaatggcttgcctacggtgagatcatcaacggg

SEQ ID NO: 222817 - DNA, 386 bp, Gossypium hirsutum
caacaacgacattacttctctcgcaagcaatggcggcagagtgcaatgcatgcaggtgtggcctcctactggaaagaagaagttcgagactctctcatacctccccgatcttacacccgtgcagttggctaaggaagtagattaccttcttcgctcaaaatgggttccttgcttggaattcgaattagaggagggattcgtgcaccgtaaatactcgagcctacccacgtactacgatggacgctactggaccatgtggaagctgcctatgttcgggtgcaccgactcggctcaggtattgaaggagcttgaggaatgcaagaaggaataccccaatgcattcattagaatcattggcttcgacaacgtgcgtcaagtgcagtgca

SEQ ID NO: 222818 - DNA, 362 bp, Gossypium hirsutum
gtttcctttctcgattttctatttagccaaacaagatgcagatcttcgttaagacgctaaccggcaagacgatcacgctcgaggtcgagagctccgatacgatcgacaacgtgaaggccaaaatccaagataaggaaggcatccctccagaccagcagcgtctgatcttcgccggaaaacagctcgaagacggccggaccttggccgattacaacatccaaaaggagtcaactctccacctcgtcctccgtctgcgcggtgggatgcaaatcttcgtgaaaaccttgactggcaagacaatcactctcgaggtcgagagctccgacacgatcgacaacgttaaagcgaagatccaagacaag

SEQ ID NO: 222819 - DNA, 389 bp, Gossypium hirsutum
caacattgaagagataagattatggtgaaaaactaaacataataaagtccctcataacattcttcgacttgcttcagggattagcccaaagataaacataaccaaaaagaaaaatggcttctgcttccgctactctcctcaagtcttcacctattatcgacaagtccgagtggattaagggccaaaacctccgccacccttcggtttgttttgtacggtcacaccctacatcggccgcctttaccgtccgtgctagttcatatgccgatgagcttgttaagaccgcgaaaactgctgcatctccaggtcgtggtattttggccatggatgaatcaaatgctacatgtgggaagcggcttgcctcgattggtctcgagaataccgaggca

SEQ ID NO: 222820 - DNA, 389 bp, Gossypium hirsutum
ggaacccaaggacagaagactctttttacatttcaccgcaaagatggagataacaaatgtgagcgagtatcaagaaattgcgaagcaaaagttgccaaagatggtgtatgactactacgcatctggtgctgaggaccaatggacattgcaagagaatagatttgctttcactaagatactgtttcgtcctcgtattctcatcgatgtaagcaagatagacatgaccacaactgtgttgggtttcaagatatcaatgcctatcatgattgccccaactgccatgcaaaaaatggctcatcctgaaggggagtatgcaacagctagggctgcatctgctgctggaactatcatgacattatcctcatgggcaacttctagtgttgaggagg

SEQ ID NO: 222821 - DNA, 393 bp, Gossypium hirsutum
aaggacagggctactcctcaacaagttgctgattacaccctcagcctcctccgccaaagaatccctccagctgtccggggagtcatgtttttgtctggtgggcagtctgaagttgaggctaccttgaacttgaatgcaatgaaccaagctccaaacccatggtatgtgtcattctcatatgcaagagcccttcaaaacacttgcctgaagaagtggggaggcaggcctgagaatgtgaaggatgctcaggaagcgctgctcatccgagcaaaggccaactctcttgctcaactcggaaagtacactggcgaatgagagtcagaggaggccaagcaaggaatgtttgtcaagggttatgtctattagcatgtttgtttcttcaacaggtcaatg

SEQ ID NO: 222822 - DNA, 373 bp, Gossypium hirsutum
cccacgcgccgcttattgatgggttaaagagagtagctgtttgcaacccagtcatgctattggactagattgacaagacaggttctgatgtgcgtggtgatccagcttcagctctactggaggttcttgatccggagcagaataattctttcaacgaccactatttgaatgtgccatatgacctttcaaaggtgatttttgtggctactgcaaatagggtgcagcctattcctcctccactcttggacaggatggaagtcattgagctgcctggatataccgctgaagaaaagctaagaatagccatgcaacatttgattccacgagttttggatcagcatggattgaattctgagtaccttcaaattccgga

SEQ ID NO: 222823 - DNA, 381 bp, Gossypium hirsutum
  unsure (1)..(381): unsure at all n locations
cccacgcgtccgggaaaaagaagtccagtagtagtaagtctttattctacgaagctcctctgggttacagcattgaagacggtcgaccaaacggtggaatcaagaagttcagatctgctgcttactccaactgcgctcgcaagccatcctgatatactcacaagcgtgccgtctgaccactagtagtggttaataaaactgttatttgctttgttagttagttttagattatttccccgaccaacttcttcctcttctctcttcgtggctggtttctttacattgcgttctcctgatttggcgactntgtaattcggataaagtttgcagtccttggttgaatcacaatggcagggtctgcaattggatttgagggttatg

SEQ ID NO: 222824 - DNA, 401 bp, Gossypium hirsutum
ctcatatctctctgtttatttattttttttgttttccttttgtcgtccttttctcacctgttgttcttccatttttgaatgaagttccccccaccccgctcaacacctctccctctaacaagccaaaggccccaagcagattctatttgttctaacatggagaaaagccatgaacttgaactgacccagatgaggaaatcagtagagaaacttgggttttcaacagagaaatacggggatccgacactcatgagattcttgattgcaagatcaatggacacagataaagcttcaaagatgtttgtccagtggctgaaatggaggtcttctttagttcctaatgggtgcgttgtagaatctgaagtgcctgaccaattagaagccagaaagatttttttgca

SEQ ID NO: 222825 - DNA, 383 bp, Gossypium hirsutum
cccacacgtccggatgtcatgaagattgacatgggaggttctgcaccatttgttggtgcaacgaaagctctcgggcgaatcaaacctcccgcagttgaagatcattacattgatgcatattgtgaaaacatgataagtggaacgggtatgagacctgtagatatcctcacatcatctaatggaaagactattgaggttaataacactgatgcagaaggcaggcttacactctcagatgctttggtatatgcttgcaaccaacgtgtctatgacatagtctaccaggcaacactaactggggcttgtattgttcgctctctgaccgtctattgcatgcgattttcacacctagcgatgaaccttcaaaggaggtattcgaagct

SEQ ID NO: 222826 - DNA, 372 bp, Gossypium hirsutum
atttgatgaaaaagggagtgaaggtgttacaaaaggacgccatctgagggggaagagatctacagaaagtgatggggaggcggataacggtgatgataagatcgtggttcggagccagactaagaagaacagaagattgggccttgataaaaggattgaactgaaaaagaatagagaagaaaagtcggttgtttctggccagagtaaaaagggtatctcgaatgaaagtgagaagatcgataggcttgtccgggactattcggcttcaaccgatttggtcagcctggactggaagaaaatgaagatacctcccgttctgccgtccaccgaacatacttggttgtttaagctaatgcagccaatgaaagcact

SEQ ID NO: 222827 - DNA, 386 bp, Gossypium hirsutum
cgatggaaccgtcagtgttcttgtggcaacttttttgttcgtaattcccaacaagaggcgaaagggagagaaattgagggactggaacgaatgcaagaagctgccatggaacattattttgttactaggggctggtttcgccatagccgacggagtccagtcaagcggactcgctgatcaattatccaaaactctagattttctcgaagaggctccgtatttagctattgcccccgcggtgtgtttaatctgtgccataattaccgagtttataacatcaaatgatgctactgctacccttgtgcttccacttttgattcaaatggcaaaaaccatgcatgttcacccattactccttatggtccctggagcagtgggatcacaat

SEQ ID NO: 222828 - DNA, 382 bp, Gossypium hirsutum
cccacgcgtccgctaaaacaagtgtttctcttcttcttcatgttctcgatcatggcttcttcttcttctttctttgttaggtgtttccctttacttttcttcttcttcttctcacatgtccaagcagtgaaatcaccaattcatcctcgggatgttctacctttattgccgagacaggtttcatggccgatccttaattcacttaacagtgccatcgaccttttaccagcctttgtcggttctgtttcgtcccaaaaccacatcgtgagctggaaaggtgcgtgcttttatgagaacaccgctaggatggagttccataacaagagtggcagtgagttcggtggtggaactctccatatcaaggttagcaaagcccatagtt

SEQ ID NO: 222829 - DNA, 380 bp, Gossypium hirsutum
cccacgcgtccgaaaacacccaggttcagaagcactaacattttctctttggcttaccaaccttggatctgaaatggcaaagtcacccgaagaagaacaccctgtcaagacctttggctgggctgcaagggacccatctggtcatctctctcctttcaccttctccagaagggtaactggtgaagaagatgtgaggtttaaggtgctgtattgtgggatttgtcattctgaccttcacagtatcaagagtgaatggggctcctccaactaccccatggttcctgggcatgaaatagtaggggaagtgacagaagtaggcagcaaagtggaaaaggttaaggtgggagataaagtgggcgtgggatgcatggtcggagctt

SEQ ID NO: 222830 - DNA, 392 bp, Gossypium hirsutum
gtttcattgaaggcgggactctcagactactctttcgaaccagctccaccatcacccccaaaaaacaaagcaaattgtagaagatggcaacacaagcacttgtatcatcgtctcttacctactcagtggagactgcaaggcagattcttggagctaaacgacaaattgggccttcaaggaaaggatcctttgttgttaaggcagcttcgactccacccgttaagcaaggagctgatagacctttatggtttgcatctaaacatagccttcatacttgattggcagccttcaggtgattattgatttgaccccttgggactctcagaccctgaaggtccaggagggttcatcgagcctaaatggctagcctacggtgagatcatcaacgggcg

SEQ ID NO: 222831 - DNA, 367 bp, Gossypium hirsutum
cccacgcgtccggtgagatggcttgctcagctacttcatcggccgcggctctcatctcctgtaagccaagggctttctcctgcaattccaagcccttctcccaatccctttctctccccaatcccttcactggtctccctgcccctctcctttctcgtcccgcctccttttccctctcccgcacctccccttctcgcaagtctttcgtcgtcaaagccaccagtgagcttccattggtgggaaatcctgcccctgattttgaggctgaggccgtctttgaccaggagttcattaaggtcaagctctccgaatacattgggaagaaatatgtgattctcttcttttacccgctggacttcacatttgt

SEQ ID NO: 222832 - DNA, 396 bp, Gossypium hirsutum
ctcttttgtatacctgtagcatatagtaatagtaagcagtaatagcaatggcctcctccatgatctcatcggcaaccattggcaccgtgaaccgctcctccccggcacaggccaacatggtggcccccttcaccggcctcaaatctgcctctgctttcccagtcaccaggaaggccaacaacgacatcacttctcttgcaagcaacggtgggagagtgcaatgcatgcaggtgtggccgcctcttgggaagaagaagttcgagactctctcatacctgcccgatcttactcccgtacagttggctaaggaagtagattaccttcttcgctctaaatggattccttgcttggaaatcgaattagaggagggattcgtgcacccgaagtactcgagct

SEQ ID NO: 222833 - DNA, 388 bp, Gossypium hirsutum
attcaaaactaatcatgtaaaaaaaaaagttgattggaacaaataaagtgaaacatttaagacaagaacaaagtggagattttataacacaaaaatagaggatgcaaatccacttaaaacacaaaaggaaaacaacattcaattaagacacaaaggggggatttcctttgtttgtgcccaatatagatttttttcttcccttagagcttaatttcccatttagaaagctcctctcttgatagcatcgtcattagcatttccaagggcagcttcactcaaatatttgtcagccaattgaaccctcttcacattctcttgctcagcaacaagcatgtatccatattccaacagcttctcaatggtcatcttcggttgctcgaaagatggt

SEQ ID NO: 222834 - DNA, 401 bp, Gossypium hirsutum
ctcccatcacccgagatcatctttccccttcagaatggcggctgcaaccatggctctctcttccccatctttcgccggaaaggccgtcaagctctctccttccgcccctaaaatccaaggcaatggccgtgtttccatgaggaaaaccgctaccaaggctgctccctctggaagtccatggtacggtcctgaccgagtcttgtacttgggtccactatctggtgagcctccatcttacttgaccggagaattccctggtgactacggttgggacactgctggactctcggcggacccagagacatttgccaggaaccgtgagctcgaagtcatccactgtaggtgggctatgttgggtgctcttgggtgtgttttccctgagcttttggctaggaatggag

SEQ ID NO: 222835 - DNA, 394 bp, Gossypium hirsutum
gtttcattgaaggcaggactctcagactactctttcgaaccagctccaccatcacccccaaaaaacaaagcaaattggggaggatggcaacacaagcacttgtatcatcgtctcttacctactcagtggagactgcaaggcagattcttggagctaaacgacaaattgggtcttcaaggaaaggatcctttgttgttaaggcagcttcgactccacccgttaagcaaggagctgatagacctttatggtttgcatctaaacaaagcctttcatacttggatggcagccttccaggtgattatggatttgaccccttgggactctcagaccctgaaggtccaggagggttcatcgagcctaaatggctagcctacggtgagatcatcaacgggcg

SEQ ID NO: 222836 - DNA, 393 bp, Gossypium hirsutum
caatctttcagaaagagagaggcaaatagaaaaaagagagagggtattacatataggcatctaattatacagggaaggatggctcttcacctttcctgggtttccgtttttggcgatctcggtactgaaatatatattcatatgcccttcttgtttgcgtattttaatattcactaacattacattatattgtttttaattaggcgtcattgtttcatttatggtcgccttttctcccatgccagcattttatcaaatctataagaagaaaacatcagaaggattccaatcattaccctatgtgatatcgctattcagtgccatgctttggatttactatgcacttcttaagaagaatgaaatgcatctaattatcatcaacattttctgctg

SEQ ID NO: 222837 - DNA, 396 bp, Gossypium hirsutum
atggcttcttctctcagtctttcaagccacacagtggcttcattattcccttctcacacttcaaagccgcagttgggactttctaaatccatcccaattctcaccaaatcatcacagtctcaatttcatggccttaaattctctcacccttcttctcttaaaattcctcgtttttccacttttaaaacctcgatttctgctaaggtgaataaaggtacagttcctccagcatttactttgaaagatcaagatgggaaaaatgtaagcctttcaaagtttaaagggaagcctgttgtggtttatttttaccctgctgatgaaacccctggttgcaccaaacaggcatgtgcttttagagattcttatgagaagtttaagaaagctggagctgaagtt

SEQ ID NO: 222838 - DNA, 392 bp, Gossypium hirsutum
cagcagctgcaccacaactacagagaagagagtaaaggggaaaaaaagcgtcctcggttttgcttcttcttctactgggctgtctctccttctccgaagttcctctttcgttctttcatttattcagtattgtaaaagatggccgacggtgaggatattcaacccctcgtctgtgataatggaactggaatggtgaaggctggttttgctggtgatgatgctccaagggcagtttttcccagtattgttggtcgtccccggcacactggtgttatggttgggatgggtcagaaggatgcctatgtaggagatgaagcacaatctaaaagaggtatccttactttgaaatatcctattgagcatggtattgtgagcaactgggatgatatgga

SEQ ID NO: 222839 - DNA, 380 bp, Gossypium hirsutum
cttggaaattccaccttactatctctcacaattcaatcgactatggaatccattggagttctcatggcttgccccatgaacgcttacctcgagcaacaactcgagaaccgtttcaagctattcagattctggacagtgccggacaaatcatcctttctggcttctcacaaggactcaatccaggcggtcgtcggaaacgcctttgccggtgccgatgctatgctgatcgaggcgttgcccaagctggagattgttgccagcttcagtgtggggcttgataagatagatttggccaagtgtaaagaaaagggtatccgagttaccaacacccctgacgttttgactgaggacgtggcggatttggcgatcggtttgatgtt

SEQ ID NO: 222840 - DNA, 368 bp, Gossypium hirsutum
cccactcgtccgatggcacccatttcattacccaacaagccccatgcattatgcatgccctacccagcacaaggtcgcgtaaatcctatgctcaaagtggccaaactcctccatttcaaaggcttccacatcacttttgtcaacaccgagtacaaccacaaacgcttgctcaaatccaggggcccccacgccctcaatggcttgcctgacttccggttcgggacaatccccgacggcctttctccgccggacatcgacgccacgcaagacatccccgcgctttgtgactccactagcaagcattgtttggctccctttcgccgactccttgttgagctaaaagctacttccggtgtcccgccggtcac

SEQ ID NO: 222841 - DNA, 382 bp, Gossypium hirsutum
cccacgcgtccgggaatccattggagttctcatggcttgccccatgaactcttacgtcgaacaacaactcgagaacgcgtttcaagctattcagattctggacagtgccggacaaatcatcctttctggcttctcacaaggactcaatccaggcggtcgtcggaaacgcctttgccggtgccgatgctaagctgatcgaggcgttgcccaagttggagattgttgccagcttcagtgtggggcttgataagatagatttggccaagtgtaaagaaaagggtatccgagttaccaacacccctgacgttttgactgaggacgtggcggatttggcgatcggtttgatgttggcggtgttgaggaagctctgtgagagtgatcg

SEQ ID NO: 222842 - DNA, 310 bp, Gossypium hirsutum
gtgatgagtaatatcttgcctttgtgttcatcaagagtgctgcatcttcatcaggggaaatcaccttgtgcgtgacagggagcaagccatcagaccggtgaagttatcggtgtgttccagagccttcagtcatcttacactgactagtgtgccaagactgcaaaggatgtcatgatcactggtgtacggtatgctcatcttgagtcataaacatgtcttgtttgaatttgtttatcctcggctgttattctgtgatcttttaacacgtgttgctaaacttttcaacaattcactgagaaacccttatctt

SEQ ID NO: 222843 - DNA, 305 bp, Gossypium hirsutum
cccacgcgtccgctcgagatgggtgggccagcccgatccgacccaataaccttttatttgattcgggtgcgatcgactttgccggttcaggtgtggttcacatggttggtggcattgcagggttatggggtgcattaatcgagggtccaaggattggccgattcgatcgagctggtcgatctgtggcgttacgtgggcacagtgcctcattagtagtgctcgggacgtttctattgtggttcggatggtatgggttcaacccaggttcattcttgaccatcatgaaagggtatggtggtggtgga

SEQ ID NO: 222844 - DNA, 378 bp, Gossypium hirsutum
gccactcgtccgatttgattacacacaatcttccgtccatggcatcattcaacgatgcagacttttacagcgcggatgccacattctgaagtctgcctaatggaactactcacgttatgataaaaagcctgcctggccattctaagatcgcatatctatctgcagaccttgttttgaaatatattgcattgtatgatgaacgagctggttaaccacatagcgctttacatgtggactaagaatctgactctggctggactgaaacttcaagagaggactttaataatgcacgcgtagctgctaatactgactgtatacaacactaattgagagctcgttcgtgtgcttgatataagctgaactcattgaacacagaaa

SEQ ID NO: 222845 - DNA, 392 bp, Gossypium hirsutum
cccacgcgtccggtgagactcttttgtatacctgtagcatatagtaatagtaagcagtaatagcaatggcctcctgcatgatctcatcggcaaccattgccaccgtgaaccgctcctccccggcacaggccaacatggtggcccccttcaccggcctcaaatctgcctctgctttcccagtcaccaggaaggccaacaacgacatcacttctcttgcaagcaacggtgggagagtgcaatgcatgcaggtgtggccgcctcttgggaagaagaagttcgagactctctcatacctgcccgatcttactcccgtacagttggctaaagaagtagattaccttcttcgctctaaatggattccttgcttggaatccgaattagaggagggattc

SEQ ID NO: 222846 - DNA, 392 bp, Gossypium hirsutum
gctaccactgcttctccaatggcgactcagctgaagagcagctttacgtcgtctgttacaagaggactggtagtccccaggggcatttcgggatccccgttcaaagtatcttccggaaagaccaggaccccttgcttcactgtcaaagctgttcaatccgacaagtcaacatttcaagtaatccaacccatcaacggcgaccccttcattggaagcctggagactccaatcacctcaagccccttaattgcatggtacctttccaacctcccagcctataggacggcagtgaacccacttctgaggggaatcgaagtgggtctggctcacggcttcctcctggtgggtccattcgttaaggccggccctctaaggaacactgcggtggcggg

SEQ ID NO: 222847 - DNA, 397 bp, Gossypium hirsutum
cgaactcccctcccgtcctctttcccgatttgtcttcttcattgccccgccatggcttgtgttagcttcgctaaactcaacgcgccgtcatcctcttggatcggtggccagcagtctctccctcaacgctccggatcatccgctcggctcgccactcgcagagtctcactcccgatccgtgctggcgcttacaccgacgaactcatcaaaaccgccaaaactattgcttcacctggtcgtggaatactggcaattgatgaatcgaatgcaacatgtgggaagagattatcttctattggcttagacaatactgaacccaaccgccaggcttacagacagcttctgctcacaactcctggcctcggagaatatatttccggtgccattcttttcgagg

SEQ ID NO: 222848 - DNA, 337 bp, Gossypium hirsutum
  unsure (1)..(337): unsure at all n locations
caaagtccaatcactcccaatactttcataacatttcacgaacttcactctccagtctccaatggcggctgccgtctccaccatcggtgctgtcaaccgagcaccgttgagtttgaatggatcaggtgccggagcttctgctccaagctcagctttcatggggaacagcttgaagaaagtgagcgctaggttcaacaacaacggcaaggctccagtgggaagtttcatgattgtggctgccaaagaaatcgacgaagacacacagaccgaccaggaccgatggaagggtcttgcttatgatatctncgatgaccaacaagacattaccagagggaaa

SEQ ID NO: 222849 - DNA, 397 bp, Gossypium hirsutum
ctcccatcacccgagatcatctttccccttcagaatggcggctgcaaccatggctctctcttccccatctttcgccggaaaggccgtcaagctctctccttccgcccctaaaatccaaggcaatggccgtgtttccatgaggaaaaccgctaccaaggctgctccctctggaagtccatggtacggtcctgaccgagtcttgtacttgggtccactatctggtgagcctccatcttacttgaccggagaattccctggtgactacggttgggacactgctggactctcggcggacccagagacatttgccaggaaccgtgagctcgaagtcatccactgtaggtgggctatgttgggtgctcttgggtgtgttttccctgagcctttggctaggaat

SEQ ID NO: 222850 - DNA, 420 bp, Gossypium hirsutum
cagtaccgatatgcgtggcgacccagaccgacccgtcacgcgtccgctgttttgtataactgtagcatatagtactagtaagcagtaatagcagtggcctcctccatgaggtgaggggcaaccattgccaccgtgaactgctcctccccggcacaggccaacatggtggcccccttcaccggcctcaagtctgcctctgctttcccagtcactaggaaggccaacaacgacatcacttctcttgcaagcaatggtgggagagtgcaatgcatgcaggtgtggcctcctcttgggaagaagaagttcgagacactctcatacctccccgatcttacacccgtacagttggctaaggaagtagattaccttcttcgctctaaatggattccttgcttggaattcgaattaaaggagggattc

SEQ ID NO: 222851 - DNA, 359 bp, Gossypium hirsutum
atttagctatagcatacactactagtacccactactagcaatggcttcctcaatgatctcatcggctaccattgccactgcctctccggcacaggctaacatggtcgctcctttcaccggcctcaagtctgcctctgctttcccagtcaccaggaaggccaacaacgacattacttctctcgcaagcaatggcggcagagtgcaatgcatgcaggtgtggcctcctactggaaagaagaagttcgagactctctcatacctccccgatcttacacccgtgcagttggctaaggaagtggattaccttcttcgctcaaaatgggtttccttgcttggaattcgaattagaggagggattc

SEQ ID NO: 222852 - DNA, 415 bp, Gossypium hirsutum
gggcgccacgcgtccgcttagtttcctcttagcaaagactttagccacccacgcagcccctttaccgatgcaaacaatgggacgcgtccgtgcgaagactgtgaagaaatcgtctcgtcaggtaatcgagaggtactactctcgcatgacgcttgatttccacaccaacaaaaaggttatcgaagaagtagctattatcccatccaagaggctccggaacaagattgctgggttctcaacccatttgatgaaacggatccagaagggtccggttcgtggcatttctctgaagcttcaggaagaagagcgtgagcgtcgtatggattttgtccccgatgtatcggctattgctgttgattcaatagaagttgataaggaaaccattgatatgctttcacttcttggaatggccgat

SEQ ID NO: 222853 - DNA, 404 bp, Gossypium hirsutum
  unsure (1)..(404): unsure at all n locations
tagtttcctcttagcaaagactttagtttcccacgcagcccctttaccnatggaaagaattttacgcgtgcggacgaggactgtgaataaatcgtctcgtcaggtaatcgagaggtactactctcgcatgacgcttgatttccacaccaacaaaaaggttatcgaagaagtagctattatcccatccaagaggctccggaacaagattgctgggttctcaacccatttgatgaaacggatccagaagggtccggttcgtggcatttctctgaagcttcaggaagaagagcgtgagcgtcgtatggattttgtccccaacgtatcggctattgctgttgattcaatagaagttgataaggaaaccattgatatgctttcacttcttggaatggccgatcttcctg

SEQ ID NO: 222854 - DNA, 406 bp, Gossypium hirsutum
gcctgttagtgtggcatttgaagttgtcactagtttccgtttttacaaaagtggggtgtataccagtaaaacatgtggcagcacacccatggatgtgaaccacgctgttcttgcagttgggtatggagtcgaaaatggcgttccatattggctcattaagaactcatggggtgcagaatggggtgacaatggctacttcaagatggagatgggcaaaaacatgtgcggtgtggcaacttgtgcatcatacccaattgttgcttgatccaatcgatgaaccgttttggatcatgtcatttctgtgttatagaaggcttctagttatggtctacaaatgttgttgtagttgttcggggttatggtctagttgaaaccgatgggttcatgtacaataaggatccaaaga

SEQ ID NO: 222855 - DNA, 407 bp, Gossypium hirsutum
agcaaaaccatggccctctgcttctttcctcaagacttcaccagttttagacaagtctgagtgggttaagggtcacacccttcgccaaccttccacttctgtggtgaggtgccaccctgttgcaccctccggactaactgtgcgtgcaagctcatatgccgatgagcttgtcaagactgctaaagctattgcttctcctggccgtggaattttggccatggatgagtccaacgctacctgtgggaaacgtttggcctcaatcgggctagaaaacacggaggctaaccgccaagcctacaggacgttgcttgtttcagctcctggccttggtcagtacatctcaggtgccatcctctttgaggaaaccctctatcaaaccacaattgatggcaagaagatggttgatg

SEQ ID NO: 222856 - DNA, 394 bp, Gossypium hirsutum
gtcagtacattctcacagtgccatgcctcttttgaggaaaccctctatcaaaccacaattgatggcaagaagatggttgatgttcttgttgagcaaaacatagtccctggtatcaaggttgacaagggtcttgttccactggctggttcaaacaacgagtcatggtgccaaggtcttgatggcctcgctccacgttcagctgcatactaccaacaaggagctcgttttgcaaaatggcgtactgtggtaagcattcccaatggaccaaccgaacttgctgtgaacgaagcagcctggggacttgctcgctatgccgccatctctcaggacaatggattggttccaattgttgagccagagatcttgcttgatggtgatcacggaattgacagga

SEQ ID NO: 222857 - DNA, 406 bp, Gossypium hirsutum
gtcgacggcttctatcaacggttgttgccttacctcctcttcttccaccactacgacctcctctttttccgctcgtcgacgacctacattgcggccttcagtcgtcgctagccttaactcttctccttctcctccgactcttatccaagaccgcccggtttttgctgcccctattcctttgctcaccccgagagaagagatgggaaacaagtcctacgacgaagccattgaagctctcaagaaacttctcagtgagaaaggagaactgaaagctgaagcagctgcaagggtagatcaaataacagcagagttaaacacagcatcagctgatggcaaaccatctgactcttctgttgagagactgaaagaaggcttcgtttacttcaagaaagaaaaatatgaaaag

SEQ ID NO: 222858 - DNA, 384 bp, Gossypium hirsutum
gagtacttgaacggagaagttcccttagactatggatacgatccgtttggtctgagcaagaagccagaagactttgcaaaatatcaagcatatgagttgatacacgcaaggtgggcaatgcttggtgctgcagggttcatcatacctgaagcctttaacaaatttggtgccaactgtggccccgaagccgtttggttcaagaccggagctcttctcttggacggtaacaccttgaactacttcgggaagaacatccccatcaaccttgtggtggctgtcgttgccgaagtcgtacttgttggtggtgctgaatattacagaatcatcaatggcttggatctggaagacaagcttcaccctgggggaccatgtgacccactgggg

SEQ ID NO: 222859 - DNA, 396 bp, Gossypium hirsutum
cccacgcgtccgacttttaacccctgccgacactctcaccattttctcagcaagcttagcctatgaaaatcaccattacaagtcccaaagaagacccccgctaattctaaaagaaagaaccagagttttctttctctttagtttacgtttattgtccttttggaatttttgatactaaaaaaaggaagcaacgaagaagggaaatggagggcaaagaagaggatgttagattgggagccaacaagttcacagagaggcaaccaattgggaccgcggctcagagtcaagatgacgggaaagactacactgaaccaccaccggctccatttttcgagcctggcgagttaacctcatggtctttttatagggctgggattgccgagtttgtggcgactt

SEQ ID NO: 222860 - DNA, 409 bp, Gossypium hirsutum
ttcgctttgagattagatccaaaattcctttttcatcatatttccgattccccaattgttcctgaaaccctaatcctaatcccggattcttctcgtctacatcgtctagcaaatggcaaccgaggagccggcagtcgtggcagaccccgcaccggagacggaggaggacaagactgctgagaccaaagctacttcaaaatctggcagagcaaagaaaaccaaagaacccaaaaccaagaaagctgcagctcctcggaaaccacgggctgctcctactcatccaccttacgaagagatgatcaaagatgcgatcgttactttgaaagagaggacaggttcaagtcagtacgccattgctaagttcattgaagagaaacagaagaatcttcctgggaatttcaagaagctt

SEQ ID NO: 222861 - DNA, 370 bp, Gossypium hirsutum
  unsure (1)..(370): unsure at all n locations
ggaccttcaatttttcatcggagagagcatgcacgatgatggatgtttggtatttgcttactacaaggatggtgctgttgacccgacatttttgtactttgcgtatgcattgaaggaggtcaagtgctgaggtttgaagcaaagaaaaaaaaagtggttgctgaagaatttagtcctttttattattgcttttgtctcttattttcagtactctgctaaagacataaattatttatggtttttgatgtttttgatttaattgtttgttgttttatcatggaatggtttctatttttatgggttgactaaacaagaatntaactctttgttctattactacttaattttattggaaggaggtttttgggac

SEQ ID NO: 222862 - DNA, 375 bp, Gossypium hirsutum
ctcagctcagctcaactcaactcacttaaatcttttctgctgcggtggcgaggggggcggcgatgttgtcggagttggcgacggagatcgtggtgccagtgtgcgccgtgattggaatagctttctcgttggtgcagtgggtgatggtgtcgcgcgtgaagcttacctccgagcgccatgcgtcgtcggcgaatagtagcaagaatggttacggtgattacttgattgaggaagaggaaggaatcaatgaccatagcgttgtcaccaagtgcgctgatattcaaaacgctatctctgaaggtgcaacatcctttctttttactgaatatcagtatgttggcatcttcatgattgctttcgctatcctgatttttc

SEQ ID NO: 222863 - DNA, 405 bp, Gossypium hirsutum
caaaaactgggatggcttttgtaacttcggaggaattgctggccactttggtgccaattgctgtttattggatatactcaggtatgtatgtgatgtttgagtcaaggtttgagaagtacaagttgcactccaagaaagaagaggaggagaagaatttggtttccagaaaggaagtcttcaaagccgttctttgccatcaagtcatgtcaattgctattaacctcttcacgtatgcggtaacaagagaaaaagatggtgaggcatctccaaagaaatcactaaccttgcttcttctagccaagcaattggtgatagcaatggtggtgatagatacatggtcgttttttgtgcattggtacttgcatcagaacaagtttttatacaaacaccttcatgttccgcatc

SEQ ID NO: 222864 - DNA, 372 bp, Gossypium hirsutum
gattatcgtgcagaacttagcataatactgtccctcataacattcttcgactcgctttattgattagcccaaagattaacataaccaaaaagaaaaatggcttgtgcttccgctactgttctcaagactttacctatgattgacacgaccgagtggatgaaggggcggaacctgcgccaccctccgggtcgtcttgtacggtgacacgctccatcagacgcctttaccgcccgcgctagtggatatgccgatgagcttgccaagaccgtggaaacggccgcatctacaggtggaggtatttgggccagggatgaatcaaatgctgcatgtggggagcggcttgcctcgattggtctctagaataccgaggcg

SEQ ID NO: 222865 - DNA, 380 bp, Gossypium hirsutum
cccacgcgtccgcccacgcgtccgctttgccaaacatggagactagtgtcacgtgctgcgctcgtgggattgtgcttcctggtgtctcttctaagcactcctcggcattagtctcccctccatccatatctccttccttcagctctaagagccttaaaacaagttcactatttggagaatcattaagggttgttccaaggtcatcattgaaggtttcaaaggcaaagaacactacttcactagtgacaaaatgtgaaattggagagtctttggaagagtttcttacaaaggcaacaacagataaggcattgattagaataatgatgtgtatgggtgaagcattaagaacaattgcttttaaagttagaacagcttcatgt

SEQ ID NO: 222866 - DNA, 396 bp, Gossypium hirsutum
tgaaaaaaaaaaataagacatgtatttggatatttcctttcaactacaacaatagtctagtatttatttgatatgacatgaatagttgaagggaattccccgaagagaaaatggattatgggagtaacaaaaaaacctgacttgaacgatcctgtattaagagctaaattagctaaaggtatgggtcataattattatggggaacccgcatggcccaatgatcttttatatatttttccagtagtaattctcggtactattgcttgcaacgtgcgcttagcggttctagaaccttcaatgattggggaacccgcggatccatttgcaactcctttggaaatattacctgaatgggatttctttcctgtatttcaaatacttagtacagtacctaac

SEQ ID NO: 222867 - DNA, 401 bp, Gossypium hirsutum
ggggaatctatatgagtgccaaggttgctttttgcatccacaatatagcctatcaagggagatttgcctttgaagattactcacttctcaatttgcctgatcaattcaagagttcatttgacttcatggatgggtatgataagcctgtcaagggaaggaaaatcaattggatgaaggctggaattttggaatcacacagggtattgactgtaagtccatactatgcccaggagcttgtttccggtgaagataaaggtgttgaactcgatcacatcattcgtaaaaccggcatcactggaattgtgaatggcatggatgttcaagaatggaaccctaccactgacaaatacatcagtgtcaaatatgatgcaacaactgttacgtatgcaaagcgattatta

SEQ ID NO: 222868 - DNA, 391 bp, Gossypium hirsutum
atcatgtatatgggcatggcatcttatagcaggtatgttcaccttcacaatgaccaccctaaaatttttggccgcatggaaaccagcctgataactttcctttgctacctgtaccaagtccctcaacttcttcgtggctcaaagaaccattagagctgcagctgctggtgaggaagcattatgtgctgccgtcacaaaggaagctccggttggtttcacccctccagaattggacctcaacaccccatcacccatcttcggaggaagcactggaggactgcttagaaaggcttaagtcgaagaattctacgtcatcacatgggattcactcaaagcacaaatatttgagatgccgactggtggggcggccatcatgaggcaaggacctaac

SEQ ID NO: 222869 - DNA, 402 bp, Gossypium hirsutum
cacgttcttgtttttttcacttctttctctttctcgaaaaccggtcacctgaggctcaaacgcctctctgaatcctcgccggaacctgtcaatctcttacatctccggcggctgtctcacggatctgttcacgatgagcaccggccaacttctcagcatcgagcctcaagagctccagttcccatttgaattgagaaagcagatctcgtgttccctaaacttgtccaacaagaccgacaattatgtggcttttaaggtcaaaacgacaaatccaaagaagtactgtgtaaggccaaatactggagttgtgctgcctaggtctacgtgcaacgttgttgttacaatgcaagctcaaaaggaagcacctactgatatgcaatgcaaagataagtttttacttca

SEQ ID NO: 222870 - DNA, 408 bp, Gossypium hirsutum
cttcagttcttcacttccccagtctccagcaatgggagaaaccgattctttcttctcgaacaaatcagcgaagatcttcgtagcaggccatcgaggcctagttggttctgccatagttcgtaaacttcagtccctaggctttaccaacctcctactccgcacccatgccgatctggaccttactcgccaatccgacgtcgaatccttcttcgccgatgagaaacctcactatgtcgtactagctgccgctaaagttggtgggatccacgccaacaacacttaccctgccgatttcattgccatcaacctccaaatccagaccaacgtcatcgattcctcttaccgccacggcgttaagaaaatcctcttcctcggttcctctcgtatttatccccaaattgcgccgca

SEQ ID NO: 222871 - DNA, 403 bp, Gossypium hirsutum
cccacgcgtccgcccacgcgtccgtccacgcgtccggtccgtctctctgttttactccacaaccactatcactaccattatggcttcggctactgtttctgtagccaaacccaaccttcagattcaggcaaaaggaaagggtgttggttttgcagatttctcaggcctacacaactcctctactagccttccctttgccaggaaaacctctgatgacttccattcactcgttgcttttcagacatctgctctaggaagcaataatggcgggtacaggaaagggatggcagaggcaaagctaaaggtggctataaatgggtttggtaggattggcaggaatttcttaagatgctggcatgggccgtaggactccccacttgatgtcattgccatcaatgacact

SEQ ID NO: 222872 - DNA, 334 bp, Gossypium hirsutum
cggacgcgtggggcacatatttctatttcccactctcttttttgctctcagttaacaacaaaatccgtaaatggctaccactgcttctccaatggcgactcagctgaagagcagctttacgtcgtctgttacaagaggactggtagtccccaggggcatttcgggatccccgttcaaagtatcttccggaaagaccaggaccccttgcttcactgtcaaagctgttcaatccgacaagtcaacatttcaagtaatccaacccatcaacggcgaccccttcattggaagcctggagactccaatcacctcaagccccttaattgcatggtacctt

SEQ ID NO: 222873 - DNA, 406 bp, Gossypium hirsutum
cttttaaccaaacactccacaaaattttctcgaaaaaaaaaaaaaaaatgaggaagtgtgaactatgtggaaggctagctcgaatgcactgtgaatcagatcaagcaaatttatgttgggactgtgatttcaaggttcatggagccaatttcctcgtagctaagcataatcgaaccctcctttgccatgtttgtcaaagtcctactccttggctcgcatctggtcggaatctcggctccgcggtttctgtttgtgattcatgcgttgtaaacggcaacaataagtgtgagtcatcggagagagagtatggtgaagaggaggaggaagaagaggaggagggagattatgataatgacgccgtggaagaatcgggggaggaagaggaggccgagattgaagatgctta

SEQ ID NO: 222874 - DNA, 407 bp, Gossypium hirsutum
gcggttttcatttcccattcgcaagtagccagccgtttcacacactcaagaagagcgagagctcgtaaatcatggcggaacagaccgaaaaagcttttttgaagcaacccacagtgtttttgagctcgaagaaaggtgggaaagggaagaggccaggaaagggtgggaatcggttttcgaaaaagctttgaattgggcttaaggattcccgtggaggttttggaaggacctaccttggttaggaatgcccctttactggcactgctttaattcggggtcgtattttaaccggcacttgccacagagccaagatggttacgacaatcattggtcgacggaactaccttcattatatcaagaaatacccaaggtatgagaagcgccattcaaacatacgcgcacatatt

SEQ ID NO: 222875 - DNA, 402 bp, Gossypium hirsutum
cccacgcgtccggatccacggcgatgatctatggccatgttttggtttttgatgtgtttcaggtgccttggacactccaatgctgaagttgttccacatgaagttttcaataagttacctttacttaggtatttcatctatacccccacgtatcatagtcttcaccacacagagatggagaccaatttttgtctgttcatgccgctgtttgatgcactggggagtacacttaacaccaaatcattggagctacataagaaaattacctcaaattctggaaaaaacgggagggtaccggattttgtgttcctagcacatgtggtggacataatgtcggcaatgcatacaccgtttgcgttaagatcatttgcgtcgaccccatttcgcatgaggatgtttctg

SEQ ID NO: 222876 - DNA, 399 bp, Gossypium hirsutum
cccacgcgtccgagcatacactactagtacccactactagcaatggcttcctcaatgatctcatcggctaccattgccactgcctctccggcacaggctaacatggtcacccctttcaccggcctcaagtctgcctctgctttcccagtcaccaggaaggccaacaacgacattacttctctcgcaagcaatggcggcagagtgcaatgcatgcaggtgtggcctcctactggaaagaagaagttcgagactctctcataccttcccgatcttacacccgtgcagttggctaaggaagtagattaccttcttcgctcaaaatgggttccttgcttggagttcgaattggaggagggattcgtgcaccgtaagtactcgagcttacccacgtactacgat

SEQ ID NO: 222877 - DNA, 406 bp, Gossypium hirsutum
cccacgcgtccgtacggagcttgtgttcatattcagattcttcttcttcttcttcttcttcttcatcaaagtgggtttatgcagtgttttggaggatactgcctcgaaattatccaccaccaaagtgggattatggagggagtgcacttgatcgttccaaaggaaacaaaagaaactggattcttgtatgggaagatgggttttgtgatttccatgaatgtgagcgtgctggaagtggttatgtaaagggaaggtttggagctgatattttcttcaaaatgtcacatgaagtttataactatggagaaggattagtagggaaaattgcagcagataacagtcacaaatgggtgcataaagaaatcccaaatgaaaatgatccaagcttcatctcctcctggaatat

SEQ ID NO: 222878 - DNA, 408 bp, Gossypium hirsutum
cccacgcgtccgcccacgcgtccgatggcctctgcttctctcctcaagacttcgccagttttagacaagggtgagtgggttaagggtcacacccttcgccaaccttccacttctgtggtgaggtgccaccctgttgcaccctccggactaactgtgcgtgcaagctcatatgccgatgagcttgtcaagactgctaaagctattgcttctcctggccgtggaattttggccatggatgagtccaacgctacctgtgggaaacgtttggcctcaatcgggctagaaaacacggaggctaaccgccaagcctacaggacgttgcttgtttcagctcctggccttggtcagtacatctcaagtgccatcctctttgaggaaaccctctatcaaaccacaattgatggcaag

SEQ ID NO: 222879 - DNA, 400 bp, Gossypium hirsutum
atcggctaccattgccactgcctctccggcacaggctaacatggtcgctccttgcaccggcctcaaggctgcctgtgctttcccagtcaccaggaaggccaacaacgacattacttctctcgcaagcaatggcggcagagtgcaatgcatgcaggtgtggcctcctactggaaagaagaagttcgagactctctcatacctccccgatcttacacccgtgcagttggctaaggaagtggattaccttcttcgctcaaaatgggttccttgcttggaattcgaattagaggagggattcgtgcaccgtaaatactcgagcctacccacgtactacgatggacgctactggaccatgtggaagctgcctatgttcgggtgcaccgactcggctcaggtattg

SEQ ID NO: 222880 - DNA, 372 bp, Gossypium hirsutum
  unsure (1)..(372): unsure at all n locations
ggcatctnctttcccctattctgcctccactgtcctatttcgctgcctaacctaaacgagagcaatggcttgccggccgcccatcaccactttcgcagccggcctcctactcttcctccacaccccactcgccacgtgatgccgcctcaaccttactggcgactgcctttcaccctacgaagtcctccaaggctacaacttccccggtgggcttcttccacaaggcgtcttaaagtacgatttagatgaatccaccggtcgggtccatgcctacttagagggttcgtgtagcttctcactggaagggtcttatcaactcaaatacaaatgcacgatcagcgggatcatctgcaacaacaggctcaaaaacct

SEQ ID NO: 222881 - DNA, 336 bp, Gossypium hirsutum
accacgcatccgtacggagcttgtgttcatattcacatactccttcttttcatgcttgttcttcatgacagtgggtcgatgcagtgatatggaggatactgactcgaaattatccaccaccaaagcgggattatggagggagtgcacttgatcgttccaaaggcaacaaaccaaactgtattcttctatgggacgatggctcctgagattttcatgaatgggagcgtgctggaagacggtatctaaccggacgggttggggctactatctgcttccaagcgtcacatgaaggatattactatcgagaacgattattagagtaaatttgaggagata

SEQ ID NO: 222882 - DNA, 411 bp, Gossypium hirsutum
attctctttcactgcaaactgtgagcgagtgagagagatggcttgctcagctacttcatcggccgcggctctcatctcctctaagccaagggctttctcctccaattccaagcccttctcccaatccctttctctccccaatcccttcactggtctccctgcccctctcctttctcgtcccgcctccttttccctctcccgcgcctccccttctcgcaagtctttcgtcgtcaaagccaccagtgagcttccactggtgggaaatcctgcccctgattttgaggctgaggccgtctttgaccaggagttcattaaggtcaagctctctgaatacattgggaagaaatatgtgattctcttcttttacccgttggacttcacatttgtttgccccacagagattactgcttt

SEQ ID NO: 222883 - DNA, 412 bp, Gossypium hirsutum
cttttgtataactgtagcatatagtactagtaagcagtaatagcaatggcctcgtcgatgatctcatcggcagcgcattgccaccgtgaactgctccttcccggcacaggccaacatggtggcccccttcaccggcctcaagtctgcctctgctttcccaggcactaggaaggccaacaacgacatcacttctcttgcaagcaatggtgggagagtgcaatgcatgcaggtgtggcctcctcttgggaagaagaagttcgagacactctcatacctgcccgatcttacacccgtacagttggctaaggaagtagattaccttcttcgctctaaatggattccttgcttggaattcgaattagaggagggattcgtgcaccgtaagtactcgagcttacccacgtactacgat

SEQ ID NO: 222884 - DNA, 400 bp, Gossypium hirsutum
cccacgcgtacgtccacgcgttcgtctttctccccacccttaaaccatgtctgcttgggttggcaagtatgcaggtgaactcccgtttaggaatttggctttcactgtcttctcctgcatgttttattccattgtatttggggacatgcatgtaaatccttaatgaccacaacacttgatcgatccgtaccataaatggtcaaattttcattacagatatgctattttatgcataattttgttagtcctagctttgactaaaccctgtatgtatattttcccccacaggagttgatcaagaacgccaactacatcgccacgccaggcaaaggtattttggctgcggacgagagcacaggcaccatcgggaagcgtctctcgagcatcaacgtcgagaaca

SEQ ID NO: 222885 - DNA, 402 bp, Gossypium hirsutum
cccacgcgtccgctcagactactctttcgaaccagctccaccatcacccccaaaaaacaaagcaaattgtagaagatggcaacacaagcacttgtatcatcgtctcttacctactcagtggagactgcaaggcagattcttggagctaaacgacaaattgggtcttcaaggaaaggatcctttgttgttaaggcagcttcgactccacccgttaagcaaggagctgatagacctttatggtttgcatctaaacaaagcctttcatacttggatggcagccttccaggtgattatggatttgaccccttgggactctcagaccctgaaggtccaggagggttcatcgagcctaaatggctagcctacggtgagatcatcaacgggcgttatgctatgttgggt

SEQ ID NO: 222886 - DNA, 395 bp, Gossypium hirsutum
caacaacgacattacttctctcgcatgcaatggcggcagagtgcaatgcatgcgggtgtggcctcctactgggaggaagaagttcgagactctctcatacctccccgatcttacacccgtgcagttggctaaggaagtagattaccttcttcgctcaaaatgggttccttgcttggaattcgaattagaggagggattcgtgcaccgtaaatactcgagcctacccacgtactacgatggacgctactggaccatgtggaagctgcctatgttcgggtgcaccgactcggctcaggtattgaaggagcttgaggaatgcaagaaggaataccccaatgcattcattagaatcattggcttcgacaacgtgcgtcaagtgcagtgcattagtttca

SEQ ID NO: 222887 - DNA, 410 bp, Gossypium hirsutum
cccacgcgtccggaccttcattcgaccaatggttgaaaatctttaaatgataacatcggccttttgcccaccactatcaaatttccagattttccaggaaaaagaaaatcaaaacccccaggtgaagaaggtgaaaaccagcagcggcaaaggcaataaaaggtgaagccaaagagagagagatatatacataataaaaaagacttttcaaaagaacacaactatggctcctcatagagaaggatcagatgcttcagtggaagccatggttgctcaagtcgaaaaacacccaatttcatcgatccttatcatcattgctatgcaaacagaagctttgccggtggtgaataagtttcagttgattgaaaaccctcattcttcgtttccaaaaggggtcccttggatccatt

SEQ ID NO: 222888 - DNA, 398 bp, Gossypium hirsutum
gtttcctttctcgattttctatttagccaaacaagatgcagatcttcggtaagactctaaccggcaagacgatcactctcgaggtcgagagctccgatacgatcgacaacgtgaaggccaaaatccaagataaggaaggcatccctccagaccagcagcgtctgatcttcgccggaaaacagctcgaagacggccggaccttggccgattacaacatccaaaaggagtcaactctccacctcgtcctccgtctgcgcggtgggatgcaaatcttcgtgaaaaccttgactggcaagacaatcactctcgaggtcgagagctccgacacgatcgacaacgttaaagcgaagatccaagacaaggaaggcatcctcccagaccagcaacgtctcatcttt

SEQ ID NO: 222889 - DNA, 388 bp, Gossypium hirsutum
caacattgaagagataagattatggtgaaaaactaaacataataaagtccctcataacattcttcgacttgcttcattgattagcccaaagataaacataaccaaaaagaaaaatggcttctgcttccgctactctcctcaagtcttcacctattatcgacaagtccgagtggattaagggccaaaacctccgccacccttcggtttgttttgtacggtcacaccctacatcggccgcctttaccgtccgtgctagttcatatgccgatgagcttgttaagaccgcgaaaactgctgcatctccaggtcgtggtattttggccatggatgaatcaaatgctacatgtgggaagcggcttgcctcgattggtctcgagaataccgaggc

SEQ ID NO: 222890 - DNA, 384 bp, Gossypium hirsutum
ggaacccaaggacagaagactcttttaacatttcaccgcaaagatggagataacaaatgtgagcgagtatcaagaaattgcgaagcaaaagttgccaaagatggtgtatgactactacgcatctggtgctgaggaccaatggacattgcaagagaatagatttgctttcactaagatactgtttcgtcctcgtattctcatcgatgtaagcaagatagacatgaccacaactgtgttgggtttcaagatatcaatgcctatcatgattgccccaactgccatgcaaaaaatggctcatcctgaaggggagtatgcaacagctagggctgcatctgctgcgtgaactatcatgacattatcctcatgggcaacttctagtgttga

SEQ ID NO: 222891 - DNA, 403 bp, Gossypium hirsutum
aaggacagggctactcctaaacaagttgttgattacaccctcagcctcctccgccaaagaatccctccagctgtccctggaatcatgtttttgtctggtgggcagtctgaagttgaggctaccttgaacttgaatgcaatgaaccaagctccaaacccatggtatgtgtcattctcatatgcaagagcccttcaaaacacttgcctgaagaagtggggaggcaggcctgagaatgtgaaggatgctcaggaagcgctgctcatccgagcaaaggccaactctcttgctcaactcggaaagtacactggcgaatgagagtcagaggaggccaagcaaggaatgtttgtcaagggctatgtctattagcatgtttgtatctttaacaggtcaatgaatttcctgc

SEQ ID NO: 222892 - DNA, 406 bp, Gossypium hirsutum
cccacgcgccgcttattgatgggttaaagagagtagctgtttgcaacccagtcatgctattggacgagattgacaagacaggttctgatgtgcgtggtgatccagcttcagctctactggaggttcttgatccggagcagaataattctttcaacgaccactatttgaatgtgccatatgacctttcaaaggtgatttttgtggctactgcaaatagggtgcagcctattcctcctccactcttggacaggatggaagtcattgagctgcctggatataccgctgaagaaaagctaagaatagccatgcaacatttgattccacgagttttggatcagcatggattgaattctgagtaccttcaaattccggaggccatggttaaacttgttattcagaggtacac

SEQ ID NO: 222893 - DNA, 381 bp, Gossypium hirsutum
  unsure (1)..(381): unsure at all n locations
cccacgcgtccgggaaaaagaagtccagtagtagtaagtctttattctacgaagctcctctcggttacagcattgaagacgttcgaccaaacggtggaatcaagaagttcagatctgctgcttactccaactgcgctcgcaagccatcctgatatactcacaagcgtgccgtctgaccactagtagtggttaataaaactgttatttgctttgttagttagttttagattatttccccgaccaacttcttcctcttctctcttcggggctggtttctttacattgcgttctcctgatttggcgactttgtaattcggataaagtttgcagtccttggttgaatcacaatggcagtgtctgcaattgganttgagggttatg

SEQ ID NO: 222894 - DNA, 399 bp, Gossypium hirsutum
ctcatatctctctgtttatttattttttttgttttccttttgtcgtccttttctcacctgttgttcttccattttttaatcaagttccccccaccccgctcaacacctctccctctaacaagccaaaggccccaagcagattctatttgttctaacatggagaaaagccatgaacttgaactgacccagatgaggaaatcagtagagaaacttgggttttcaacagagaaatacggggatccgacactcatgagattcttgattgcaagatcaatggacacagataaagcttcaaagatgtttgtccagtggctgaaatggaggtcttctttagttcctaatgggtgcgttgtagaatctgaagtgcctgaccaattagaagccaaaaagatttttttg

SEQ ID NO: 222895 - DNA, 404 bp, Gossypium hirsutum
cccacacgtgcggatgtcatgaagatagacatgggaggttctgcaccagttcttggtgcaacgaaagctctcgggcaaatcaaacctactgcagttgaggatcattacattgatgcatattgtgaaaacatgataagtggaacgggtatgagacctgtagatattctcacagcatctaatggaaagactattgaggttaataacactgatgcagaaggcaggcttacactcgcagatgctttggtatatgcttgcaaccaacgtgtctagaagatagtcgactcaggcaacactaactggggcttgtattgacgctcttggaccgacgattgcaggcgacttcacacctagcgatggacttgcaaaggaggtattcgaagctttaaagatcagtggtgagaaat

SEQ ID NO: 222896 - DNA, 392 bp, Gossypium hirsutum
atttgatgaaaaagggagtgaaggttagacaaaaggacgccatctgagggggaagagatctacagaaagtgatgggaaagcggataacggtgatgataagatcgtggttcggagccagactaagaagaacagaagattgggccttgataaaaggattgaactgaaaaagaatagagaagaaaagtcggttgtttctggccagagtaaaaagggtatctcgaatgaaagtgagaagatcgataggcttgtccgggactattcggcttcaaccgatttggtcagcctggactggaagaaaatgaagataccttcggttctgccgtccaccgaacatacttggttgcttaagctaatgcagccaatgaaggcactgcttgaggcaaaagagaact

SEQ ID NO: 222897 - DNA, 402 bp, Gossypium hirsutum
cgatggaaccgtcagtgttcttgtggcaacttttttgttcgtaattcccaacaagaagcgaaagggagagaaattgatggactggaacgaatgcaagaagctgccatggaacattattttgttactaggggctggtttcgccatagccgacggagtccagtcaagcggactcgctgatcaattatccaaaactctagattttctcgaagaggctccgtatttagctattgcccccgcggtgtgtttaatctgtgccataattaccgagtttataacatcaaatgatgctactgctacccttgtgcttccacttttgattcaaatggcaaaaaccatgcatgttcacccattactccttatggtccctggagcagtgggatcacaatttgcttttattcttgc

SEQ ID NO: 222898 - DNA, 403 bp, Gossypium hirsutum
cccacgcgtccgctaaaacaagtgtttctcttcttcttcatgttctcgatcatggcttcttcttcttctttctttgttaggtgtttccctttacttttcttcttcttcttctcacatgtccaagcagtgaaatcaccaattcatcctcgggatgttctacctttattgccgagacaggtttcatggccgatccttaattcacttaacagtgccatcgaccttttaccagcctttgtcggttctgtttcgtcccaaaaccacatcgtgagctggaaaggtgcgtgcttttatgagaacaccgctaggatggagttccataacaagagtggcagtgagttcggtggtggaactctccatatcaaggttagcaaagcccatagttggacgtgtctggatctttatc

SEQ ID NO: 222899 - DNA, 411 bp, Gossypium hirsutum
cccacgcgtccgaaaacacccaggttcagaagcactaacattttctctggggcttaccaaccttgggtctgaaatggcaaagtcacccgaagaagaacaccctgtcaagacctttggctgggctgcaagggacccatctggtcatctctctcctttcaccttctacagaagggtaactggtgaagaagatgtgaggtttaaggtgctgtattgtgggatttggcattctgaccttcacagtatcaagagtgaatggggctcctccaactaccccatggttcctgggcatgaaatagtaggggaagtgacagaagtaggcagcaaagtggaaaaggttaaggtgggagataaagtgggcgtgggatgcatggtcggagcttgccacagctgcgacagttgtgcaaacgacct

SEQ ID NO: 222900 - DNA, 413 bp, Gossypium hirsutum
gtttcattgaaggcgggactctcatactactctttcgaaccagctccaccatcacccccaaaaaacaaagcaaattgtataagatggcaacacaagcacttgtatcatcgtctcttacctactcagtggagactgcaaggcagattcttggagctaaacgacaaattgggccttcaaggaaaggatcctttgttgttaaggcagcttcgactccacccgttaagcaaggagctgatagacctttatggtttgcatctaaacaaagcctttcatacttggatggcagccttccaggtgattatggatttgaccccttgggactctcagaccctgaaggtccaggagggttcatcgagcctaaatggctagcctacggtgagatcatcaacgggcgttatgctattgtgggtgca

SEQ ID NO: 222901 - DNA, 386 bp, Gossypium hirsutum
cccacgcgtccggtgagacggcttgctcagctacttcatcggccgcggctctcatctgctctaagccaagggcttgctcctccaattccaagcccttctcccaatccctttctctccccaatcccttcactggtctccctgcccctctcctttctcgtcccgcctacttttccctctcccgcacctgcccttctcgcaagtctttcgtcgtcaaagccaccagtgagcttccattggtgggaaatcctgcccctgattttgaggctgaggccgtctttgaccaggagttcattaaggtcaagctctccgaatacattgggaagaaatatgtgattctcttcttttacccgctggacttcacatttgtttgccccacagagattact

SEQ ID NO: 222902 - DNA, 408 bp, Gossypium hirsutum
ctcttttgtatacctgtagcatatagtaatagtaagcagtaatagcaatggcctcctgcatgatctcatcggcaaccattgccaccgtgaaccgctcctccccggcacaggccaacatggtggcccccttcaccggcctcaaatctgcctctgctttcccagtcaccaggaaggccaacaacgacatcacttctcttgcaagcaacggtgggagagtgcaatgcatgcaggtgtggccgcctcttgggaagaagaagttcgagactctctcatacctgcccgatcttactcccgtacagttggctaaggaagtagattaccttcttcgctctaaatggattccttgcttggaattcgaattagaggagggattcgtgcaccgtaagtactcgagcttacccacgtact

SEQ ID NO: 222903 - DNA, 384 bp, Gossypium hirsutum
attcaaaactaatcatgtaaaaaaaaaagttgattggaacaaataaagtgaaacatttaagacaagaacaaagtggagattttataacacaaaaatagaggatgcaaatccacttaaaacacaaaaggaaaacaacattcaattaagacacaaaggggggatttcctttgtttgtgcccaatatagatttttttcttcccttagagcttaatttcccatttagaaagctcctctcttgatagcatcgtcattagcatttccaagggcagcttcactcaaatatttgtcagccaattgaaccctcttcacattctcttgctcagcaacaagcatgtatccatattccaacagcttctcaatggtcatcttcggttgctcgaaaga

SEQ ID NO: 222904 - DNA, 408 bp, Gossypium hirsutum
ctcccatcacccgagatcatctttccccttcagaatggcggctgcaaccatggctctctcttccccatatttcgccggaaaggccgtcaagctctctccttccgcccctaaaatccaaggcaatggccgtgtttccatgaggaaaaccgctaccaacgctgctccctctggaagtccatggtacggacctgaccgagtcttgtacttgggtccactatctggtgagcctacatcttacttgaccggagaattccctggtgactacggatgggacactgctggactcttggcggacccagagacatttgccaggaaccgtgagctcgaagtcatacactgtaggtgggctatgacgggtgctcttgggtgtgttttccctgagcttttgactaggaatggagtcaaatt

SEQ ID NO: 222905 - DNA, 401 bp, Gossypium hirsutum
cccacgcgtccgaaatcagttgcttcacaatggcctctacaaccatggctctttcttccccatcattcgccggtaaggcagtgaagttctccccttccacccctgaaatccggggaactggccgtgtttccatgaggaaaaccaccaagcctgttccttctggtagcccatggtacggtcctgaccgagttttgtacttgggtccactttccggtgagccaccatcttacttgaccggtgagttccctggtgactatggttgggacactgctggactctcagctgatcccgagacctttgctaggaaccgtgagctcgaagtcattcactgcagatgggccatgttgggagctcttgggtgtgttttccctgagctgttggctaggaacggtgtcaagttc

SEQ ID NO: 222906 - DNA, 409 bp, Gossypium hirsutum
gtttcatttgaagggcaggactctcagactacttctttcgaaccagctccaccatcaccggcaaaaaacaaagcagagtggagaagatggcaacacaagcacttgtatcatcgtctcttacctactcagtggagactgcaaggcagattcttggagctaaacgacaaattgggtcttcaaggaaaggatcctttgttgttaaggcagcttcgactccacccgttaagcaaggagctgatagacctttatggtttgcatctaaacaaagcctttcatacttggatggcagccttccaggtgattatggatttgaccccttgggactctcagaccctgaaggtccaggagggttcatcgagcctaaatggctagcctacggtgagatcatcaacgggcgttatgctatgtt

SEQ ID NO: 222907 - DNA, 406 bp, Gossypium hirsutum
caatctttcagaaagagagaggcaaagagaaaaaagagagagggtattacatatattcatctaattatacaaataaagatggctcttcacctttcctgggtttccgtttttggcgatctcggtactgaaatatatattcatatgcccttcttgtttgcgtattttaatattcactaacattacattatattgtttttaattaggcgtcattgtttcatttatggtcgccttttctcccatgccagcattttatcaaatctataagaagaaaacatcagaaggattccaatcattaccctatgtgatatcgctattcagtgccatgctttggatttactatgcacttcttaagaagaatgaaatgcatctaattatcatcaacattttctgctgtttcattcaaagc

SEQ ID NO: 222908 - DNA, 408 bp, Gossypium hirsutum
atggcttcttctctcagtctttcaagccacacagtggcttcattattcccttctcacacttcaaagccgcagttgtcactttctaaatccatcccaattctcaccaaatcatcacagtctcaatttcatggccttaaattctctcacccttcttctcttaaaattcctcgtttttccacttttaaaacctcgatttctgctaaggtgaataaaggtacagttcctccagcatttactttgaaagatcaagatgggaaaaatgtaagcctttcaaagtttaaagggaagcctgttgtggtttatttttaccctgctgatgaaacccctggttgcaccaaacaggcatgtgcttttagagattcttatgagaagtttaagaaagctggagctgaagttattgggattagt

SEQ ID NO: 222909 - DNA, 391 bp, Gossypium hirsutum
cagcagctgcaccacaactacagagaagagagtgaaggggaaaaaaagcgtcctccatcttgcttcttcttctacttcgctctctctccttctccgaagttcctctttcgttctttcatttattcagcattgtaaaagatggccgacggtgaggatattcaacccctcgtctgtgataatggaactggaatggcgaaggctggttttgctggtgatgatgctccaagggcagtttttcccagtattgctggtcagccccggcacactggtgttatggttgggatgggtcagaacgatgcctatgtacgagatgaagcacaatctaaaagaggtatccttactttgaaatatcctatagagcatggtatcgtgcgcaactgggatgatatgg

SEQ ID NO: 222910 - DNA, 409 bp, Gossypium hirsutum
cttggaaattccaccttactatctctcacaattcaatcgactatggaatccattggagttctcatggcttgccccatgaactcttacctcgagcaacaactcgagaaccgtttcaagctattcagattctggacagtgccggacaaatcatcctttctggcttctcacaaggactcaatccaggcggtcgtcggaaacgcctttgccggtgccgatgctatgctgatcgaggcgttgcccaagctggagattgttgccagcttcagtgtggggcttgataagatagatttggccaagtgtaaagaaaagggtatccgagttaccaacacccctgacgttttgactgaggacgtggcggatttggcgatcggtttgatgttggcggtgttgaggaagctctgtgagagtg

SEQ ID NO: 222911 - DNA, 404 bp, Gossypium hirsutum
cccacgcgtccgatggcacccattttattacccaacaagccccatgcagtatgggtcccctacccagcacgaggggcacgtaaatccgatgctcaaagtggccaaactcctccatttcaaaggcttccacatcacttttgtcaacaccgagtacaaccacaaacgcttgctcaaatccaggggcccccacgccctcaatggcttgcctgacttccggttcgggacaatccccgacggccttcctccgccggacatcgacgccacgcaagacatccccgcgctttgtgactccactagcaagcattgtttggctccctttcgccgactccttgttgagctaaaagctacttccggtgtcccgccggtcacttgtatcgtcgccgatgggtgcatgtcgttcactc

SEQ ID NO: 222912 - DNA, 403 bp, Gossypium hirsutum
cccacgcgtccgggaatccattggagttctcatggcttgccccatgaactcttacctcgaacaacaactcgagaaccgtttcaagctattcagattctggacagcgccggacaaatcatcctttctggcttcttacaaggactcaatccaggcggtcgtcggaaacgcctttgccggtgccgatgctaagctgatcgaggcgttgcccaagttggagattgctgccagcttcagtgtggggcttgataagatagatttggccaagtgtaaagaaaagggtatgcgagttaccaacacccctgacgttttgactgaagacgtggcggatttggcgatcggtttgatgttcgcggtgttgaggaagctttgtgagagtgatcggtttgtgaggagtggcaagtgg

SEQ ID NO: 222913 - DNA, 280 bp, Gossypium hirsutum
gggatgcggaagagcttgccttggtgaacaacaagagtgctgtatcttcattagggaaaatcacctggtgcgtcacaaagagcaagccagcagaccggtgaagatatcggtgcgttccagagccttgagtcatctgacactgactagtgtgccaagactgcaaaggatgttatgatcactggtgtatggaatgcttacctagagtcatgaacatgtgttgtttgagtttgtttattttcggctgttattttgggagttttaaacacgtgttgctaaactt

SEQ ID NO: 222914 - DNA, 403 bp, Gossypium hirsutum
cccacgcgtccgctcgagatgggtgggccagcccgatccgacccaataaccttttatttgattcgggtgcgatcgactttgccggttcaggtgtggttcacatggttggtggcattgcagggttatggggtgcattaatcgagggtccaaggattggccgattcgatcgagctggtcgatctgtggcgttacgtgggcacagtgcctcattagtagtgctcgggacgtttctattgtggttcggatggtatgggttcaacccaggttcattcttgaccatcatgaaagggtatggtggtggtggaggttattatggacattggagtgccgtagggaggacagctgttacgacgacattggccgggtgcacagctgctcttacaaccttgtttagcaagagact

SEQ ID NO: 222915 - DNA, 415 bp, Gossypium hirsutum
cccacgcgtccggtgagactcttttgtatacctgtagcatatagtaatagtaagcagtaatagcaatggcctcctccatgatctcatcggcaaccattgccaccgtgaaccgctcctccccggcacaggccaacatggtggcccccttcaccggcctcaaatctgcctctgctttcccagtcaccaggaaggccaacaacgacatcacttctcttgcaagcaacggtgggagagtgcaatgcatgcaggtgtggccgcctcttgggaagaagaagttcgagactctctcatacctgcccgatcttactcccgtacagttggctaaagaagtagattaccttcttcgctctaaatggattccttgcttggaattcgaattagaggagggattcgtgcaccgtaagtactcgagctt

SEQ ID NO: 222916 - DNA, 322 bp, Gossypium hirsutum
gctaccactgcttctccaatggcgactcagctgaagagcagctttacgtcgtcggttacaagaggactggtagtccccaggggcatttcgggatccccgttcaaagtatcttccggaaagaccaggaccccttgcttcactgtcaaagctgttcaatccgacaagtcaacatttcaagtaatccaacccatcaacggcgaccccttcattggaagcctggagactccaatcacctcaagccccttaattgcatggtacctttccaacctcccagcctataggacggcagtgaacccacttctgaggggaatcgaagtgggtc

SEQ ID NO: 222917 - DNA, 403 bp, Gossypium hirsutum
cgaactcccctcccgtcctctttcccgatttgtcttcttcattgccccgccatggcttgtgttagcttcgctaaactcaacgcgccgtcatcctcttggatcggtggccagcagtctctccctcaacgctccggatcatccgctcggctcgccactcgcagagtctcactcccgatccgtgctggcgcttacaccgacgaactcatcaaaaccgccaaaactattgcttcacctggtcgtggaatactggcaattgatgaatcgaatgcaacatgtgggaagagattatcttctattggcttagacaatactgaacccaaccgccaggcttacagacagcttctgctcacaactcctggcctcggagaatatatttccggtgccattcttttcgaggaaacac

SEQ ID NO: 222918 - DNA, 410 bp, Gossypium hirsutum
caaagtccaatcactcccaatactttcataacatttcacgaacttcactctccagtctgcaatggcggctgccgtctccaccatcggtgctgtcaaccgagcaccgttgagtttgaatggatcaggtgccggagcttctgctccaagctcagctttcatggggaacagcttgaagaaagtgagcgctaggttcaacaacaacggcaaggctccagtgggaagtttcatgattgtggctgccaaagaaatcgacgaagacacacagaccgaccaggaccgatggaagggtcttgcttatgatatctccgatgaccaacaagacattaccagagggaaaggtatggtcgactcattgttccaagctcccatgaacgatggtactcactatgctgtcatgagctcctatgagt

SEQ ID NO: 222919 - DNA, 417 bp, Gossypium hirsutum
ctcccatcacccgagatcatctttccccttcagaatggcggctgcaaccatggctctctcttccccatctttcgccggaaaggccgtcaagctctctccttccgcccctaaaatccaaggcaatggccgtgtttccatgaggaaaaccgctaccaaggctgctccctctggaagtccatggtacggtcctgaccgagtcttgtacttgggtccactatctggtgagcctccatcttacttgaccggagaattccctggtgactacggttgggacactgctggactctcggcggacccagagacatttgccaggaaccgtgagctcgaagtcatccactgtaggtgggctatgttgggtgctctcgggtgtgttttccctgagcttttggctaggaatggagtcaaattcgtgaggct

SEQ ID NO: 222920 - DNA, 403 bp, Gossypium hirsutum
acggaccgggaatgactgggtgggccgacccatgcgtccacccacccgttcttttgtataactgtagcatatagtactagtaagcaataatagcaatggcctccttcatgatctcatcggcaaccattgccaccgtgaactgctgcttcccggcacaggccaacatggtggcccccttcaccggcctcaagtctgcctctgctttcccagtcactaggaaggccaacaacgacatcacttctcttgcaagcaatggtgggagagtgcaatgcatgcaggtgtggccttctcttgggaagaagaagttcgagacactctcataccttcccgatcttacacccgtacagttggctaaggaagtagattaccttcttcgctctaaatggattccttgcttggaatt

SEQ ID NO: 222921 - DNA, 404 bp, Gossypium hirsutum
atttagctatagcatacactactagtacccactactagcaatggcttactcaatgatctcatcggctaccattgccactgcctctccggcacaggctaacatggtcgctcctttcaccggcctcaagtctgcctctgctttcccagtcaccaggaaggccaacaacgacattacttctctcgcaagcaatggcggcagagtgcaatgcatgcaggtgtggcctcctactggaaagaagaagttcgagactctctcatacctccccgatcttacacccgtgcagttggctaaggaagcggattaccttcttcgctcaaaacgggtttccttgcttggaattcgaattagaggagggattcgtgcaccgtcaatactcgagcctacccacgtactacgatggacgc

SEQ ID NO: 222922 - DNA, 364 bp, Gossypium hirsutum
aaagaggttcataaggaagttcccacccgatgttgttctttatgttgatcgtttggacgcgcatgacagagatcatactgattttctattattgaagtctctcacggattctctcggttcatcaatatggcaaaatgcctttgtgactcttactcatgctgcatctgcttccccagaggggccgatgggggaacccctaagttttgaggtctttgttgctcaacggtctcatgtgattcatcgagctatcagccaagcagttggcgatctgcgtctaatgaatccgagtatgatgcatcctgtggctctcgttgagaaccatccatcatgtcctagagacggaaatggagaaaatttgctttcc

SEQ ID NO: 222923 - DNA, 372 bp, Gossypium hirsutum
ccaatctctaccatggcagctcattatatcaatctccgggttatttgcctttatgttagtctatcattcatctttacaaagcaggtacaagccgacaactatatcattcacatggaccactctgccatgcccaaagctttcgccggccgccaaagctggtacttggctacactttcatctttatctgctaacttgagagctaacaccaattcaaccatccccaccgctgaacttctctatagttacaaccatgttattcaaggtttcagtgcgagtctcactctggctcagcttgaggccttgaaaaactctcgggggtatgtttcttctattagagacaaaactgtgaagctcgatactacttattctttc

SEQ ID NO: 222924 - DNA, 380 bp, Gossypium hirsutum
gttgagagggttgcccaaaagcagtttataaggcgtgggcagtaaaacttacaggtaaaccagatatagagatggcgactaaggttgctgtttccattattatataatttcaagatcacaatgggtctatgataagattgtttatttacagcggaatgatatacaaagtcaacagatctcactgaatacaaaataagatttatggctacacaaaccgttgagggtagttctagatctggtccaagacgaactgttgtaggggattttttgaaaccattgaattcggaatatggtaaggtagcccctggatggggaacgactcctttgatgggtgtcgcaatggctttatttgcgatattcttatctattattttggagat

SEQ ID NO: 222925 - DNA, 382 bp, Gossypium hirsutum
cttttgttggccaaatcatgaccactctcgtgaccggggtgtttctcctcctgcgatccgtcgccggcgtcgtatccgccgctagatatatcaccggtgatgttctccggttaccttcggaagcttcaaggttcttccgatggaggagcgatgatgatgaagttggtggcacaagatgggcggtcctgattgctggatctaatggatattggaattacaggcatcaggctgatgtttgtcatgcttatcaactcctaaggaacggtggtttgagagaggaaaatatcattgtctttatgtacgatgatatcgctttcaatgtagaaaaccctaggcctggtgttatcattaacaatcctcatggcgatgatgtttataaggg

SEQ ID NO: 222926 - DNA, 393 bp, Gossypium hirsutum
cgtccgaagagggctccttttgacctctttttcacaaggaaaaagcctaacaacatcaaggtttatgtcagacgtggctttatcatggacaactgtgaagagctgatccctgaattccttggctttgtgaagggtattgttgactcagaggaccttcctctcaacatctcgagagaaatgttgcagcaaaacaagattttgaaggttattcgcaagaacttggtgaagaagtgcatcgagctcttctttgaaattgctgagaacaaagaagattacaacaagttctatgaggctttctcgaaaaacctcaagcttggtatccatgaggactctcaaaacagaaacaagattgctgaattgctccggtatcactctaccaagagtggtgattag

SEQ ID NO: 222927 - DNA, 399 bp, Gossypium hirsutum
  unsure (1)..(399): unsure at all n locations
caggtgccggagcttctgttccaagtctcagctttcatggggaacagcttgaagagggtgagcgctaggtgcaacaacaacggcaaggctccagcgggaagtttcaagattgtggctgccaaagaaatcgacgaagacacgcagaccgaccaggaccgatggaagggtcttgcttatgatatctccgatgaccaacaagacattaccagagggaaaggtatggtcgactcattgttccaagctcccatgaacgatggtactcactatgctgtcatgagctcctatgaataccttagccaaggccttcgcacatacgacttggacaattttgcctctnttgtcacaggtcaaacctccaagcagcttcacccctgaagaaacggaatacctaacaaatcg

SEQ ID NO: 222928 - DNA, 385 bp, Gossypium hirsutum
cccacgcgtccggtggtgcactttgtcgctggaggagtggctactccggcggaggctgctctcatgatggagttgggttgtgatggcgtgtttgtggggtctggcgtttttaagagtggtgacccggctagacgtgcccgggctattgttcaggctgtcacccattatagtgacccggccgtgcttgctgaagttagctgtgggcttggcgaggctatggttggtcttaatttgaatgataagaaggttgagaggttcgctgctcgatctgagtagtgtatttcaaatttctgtggctacgcgaaggtgataaattccacttgtattctattttttcaacatttaagccgaagctttaatgatattccaaggtatttgatgtttt

SEQ ID NO: 222929 - DNA, 324 bp, Gossypium hirsutum
  unsure (1)..(324): unsure at all n locations
atgccacgacgttttattgatgggggaaagatagtaagtgtgttgcttccantcatgctattggattaaatttacaaaacaagttcttattttccttgtgaatccactttaacttttattggaggtttttgatcttgaccaaattaaatcttttattgatcactatttgaatgttccatttgacctatcaaaggtgatttttgtggctaccgcaaataggatgcagcctattcctcccccactcttggacaggatggaagtcattgagctgcctggatatacaacttaagaaaagctcagaatagccatgcaacatttgatccc

SEQ ID NO: 222930 - DNA, 323 bp, Gossypium hirsutum
  unsure (1)..(323): unsure at all n locations
ctgattgttggtggcaaacccaagtattagatggtacttgagggaacatggatggccatcatctaccatatttgagacncctcctgagagtgatgaggaacgagctaagttaattgacactcttcaggattggaagactcaaaggtacaaagaaataatcaaatctggaactgtggaacctagacctggagttttaagattgatggatgaggccaaggcagctgggaaaatgctagctgtttgctctgcagcaactaaaagttcagttgtactctgtcttgagaaccttattggaatggagcgatttaaggggcttgattgct

SEQ ID NO: 222931 - DNA, 408 bp, Gossypium hirsutum
  unsure (1)..(408): unsure at all n locations
gggccgacccaggcgtnccgggtacccctacgctctcactaaaacatctctctcttctttgttttccaatagggggtaacactgtccggggcacttcaagctgcatctaccctgatgcaaccaatcaaggttgctgcaccatcaaggaccaatgtgctgctcaggtcctcccagagcgtttctaaggccttcggtttggagcctgttggtgctaggctcacctgctctttgcaaactgacctcaaggactcggctcagacgtgtggtgatgctaccaagctcgctggtttcgctcttgctacatctgctcttgatgtctcgggagcaagcgctgaaggagttccaaagcggctaacctacgatggaatccaaagcatgacatacattggagtcaaaggaacaggaact

SEQ ID NO: 222932 - DNA, 380 bp, Gossypium hirsutum
gatccttgcaatggccaataccaatctccctcgaaggagaattaaggaaactgagcgtctcctcagtgaaccagcacctggaattagtgcttcaccatcagaggataacatgcgatatttcaatgtgatgatccttggtcccacacagtctccatatgaaggaggcgttttcaagttggaactatttttgcctgaagaatatcccatgactgctcccaaggtactcaattctcctgcatcgcttcttaatatttagcatgaccttgttttcgtatccacttttgtatactggattgtctttcctttgatatccgatattactcgtcttcatgacctcgtctagaaaagtttttatagggttttgatatgatttagggatg

SEQ ID NO: 222933 - DNA, 394 bp, Gossypium hirsutum
cggaccactcctaaaatcaggtcaattatttattgatcaagctgattctataggggtaagatcggctaagccttattttgcgactcctggagcaactgtccatgggcattatggagaaaccctttacgaaggagataccttaggtacatctatatatgcaaaatcgagatctggtgatataacgcagggtcttacaaaagtggaacaagtgttagaagagcgttcgattgattcaatatcggtgaacctagaaaagagaattgagggttggaacgaatgtataacaagaattcttggaataccttggggattcgcgatgggagctgagctaactatagtgcaaagtcttctctctttggttaataagatccaaaaggtttatcgatctcagggg

SEQ ID NO: 222934 - DNA, 405 bp, Gossypium hirsutum
gaccacgcgtccgcccacgcgtccggttgcttcacaatttcctctacaaccatggctctttcttcccgatcattcgccggtagggcagtgaagttctccccttccacccctgaaatccggggaactggccgtgtttccatgaggaaaaccaccaagcctgttccttctggtagcccatggtacggtcctgaccgagttttgtacttgggtccactttccggtgagccaccatcttacttgaccggtgagttccctggtgactatggttgggacactgctggactctcagctgatcccgagacctttgctaggaaccgtgagctcgaagtcattcactgcagatgggccatgttgggagctcttgggtgtgttttccctgagctgttggctaggaacggtgtcaag

SEQ ID NO: 222935 - DNA, 392 bp, Gossypium hirsutum
caaaatcagttgcttcacaatggcctctacaaccatggctctttcttccccatggggcgccggtaaggcggggaagttctctttcttccacccctgaaatccggggaactggccgtgtttccatgaggaaaaccaccaagcctgttccttctggtagcccatggtacggtcctgaccgagttttgtacttgggtccactttccggtgagccaccatcttacttgaccggtgagttccctggtgactatggttgggacactgctggactctcagctgatcccgagacctttgctaggaaccgtgagctcgaagtcattcactgcagatgggccatgttgggagctcttgggtgtgttttccctgagctgttggctaggaacggtgtcaagttc

SEQ ID NO: 222936 - DNA, 386 bp, Gossypium hirsutum
cccacgcttccgaatttcacagtttttttcttcactcgggctctcagccatgggggcagccatctccaccgtcgccgcccctgccgccgccaaccgagctctgggagtgtcagtcccaacctcagctttcatggggaagaaagtgagctcgagattcaacaacaccaggcaggttccttcgggaagttttaaggtgatggcggccgaaaaagagatagacgaagagacacagaccgaaaaggaccgatggaaagggttggcttacgatatttcggacgaccaacaagacattactcgagggaaagggatggtggattccttgttccaagctcccatgaatgatggaactcactatgctgtcatgagttcctatgaatacatcatcc

SEQ ID NO: 222937 - DNA, 271 bp, Gossypium hirsutum
  unsure (1)..(271): unsure at all n locations
tctcaatttagcccttccaacacttttcancttgaactgtccgcaacaatgttgcgatcagtaactcgatcggccgccccaaagcacctcctccgccgaggatatgccactgaatctgttccccaccggaaggtcgcggttttgggcgctgccggaggtattggccagcccttggctcttctcatgaagcttaaccctcttgtttctcggctggctctctatgatatcgctaacactcccggcgttgcagctgatgtcagccatgtcaaca

SEQ ID NO: 222938 - DNA, 381 bp, Gossypium hirsutum
  unsure (1)..(381): unsure at all n locations
ctnggaacccaaggacagaagacttttttaacatttcagcgcaaagatggagataacaaatgtgaccgagtatcaagaaattgcaaagcaaaagttgccaaagatggtgtatgactactacgcatctggtgctgaggaccaatggacattgcatgagaatagatttgctttcactaagatactgtttcgtcctcgtattctcatcgatgtaagcaagatagacatgaccacaactgtgttgggtttcaatatatcaatgcctatcatgattgccccaactgcctttcaaaaaatggctcatcctgaaggggagtatgcaacagctagggctgcatctgctgctggaactatcatgacattatcctcatgggcaacttctag

SEQ ID NO: 222939 - DNA, 381 bp, Gossypium hirsutum
gagagattagagaaagcactgaaattgcaaaaccatgggctctgcttctctcctgaagacttcaccagttttagacaagtctgagtgggttaagggtcacacccttcgccaaccttccacttctgtggtgaggtgccaccctgttgcaccctccggactaactgtgcgtgcaagctcatatgccgatgagcttgtcaagactgctaaagctattgcttctcctggccgtggaattatggccatggatgagtccaactctacctgtgggaaacgtatggcctcaatcgggctagaaaacacggaggctaaccgccaagcctacaggacgttgcttgtttcagctcctggccttggtcagtacatctcaggtgccatcctctt

SEQ ID NO: 222940 - DNA, 199 bp, Gossypium hirsutum
  unsure (1)..(199): unsure at all n locations
gcgacccacacanccgcaaaaggtgcgccctcttcattaactatctcgatgctggtgtttttcttatgnggggaactacccaatggggccgtttcaaccatattgtgaaccctaccancacgaacacatcccatgaccccaccaacgttcagctccccggtatttacaacaccaaacagatccatattttccccattat

SEQ ID NO: 222941 - DNA, 365 bp, Gossypium hirsutum
gctctgtatattgaaattttctttttctattttctctggggccaaaaaagattgagatcttcttcaagactctaaccggcaagaccatcactctcgaggtcgagagctccgacacgatcgacaacgtgaagaccaaaatccaagataaggaaggcattcctccagaccagcagcgtctgatcttcgccggaaaacagcttgaggacggccggaccttggccgattacaacatccaaaaggagtcaactctccacctcgtcctccgtttgcgcggtgggatgcaaatcttcgtgaaaaccttgaccggcaagacaatcactctcgaggtcgagagctccgacacgatcgacaacgttaaggcgaag

SEQ ID NO: 222942 - DNA, 359 bp, Gossypium hirsutum
  unsure (1)..(359): unsure at all n locations
ctcgnacttctcactncnnncnttttatatctnnnnctcgctctacctctgtcggaattctaaaaactctcctttctcctcccctgnaaaaaaagcttaaacaaaaaaatggagaacaataacaaccaggtcacgggagagttgaagtctgggaataagaagcaggttcgattgttttactgtatggagtgtgaagagcttgcccgtaaagttgctgctcactcccaactcattacccttcaatctatcaactggaggagctttgatgatggatttccaaatcttttcataaacaatgcacatgatatccgaggtcagcatgttgcttttctcgcatccttcagctccccagctgttat

SEQ ID NO: 222943 - DNA, 378 bp, Gossypium hirsutum
cgtatggtaggaaccacccaatacttcgtcaacaaccggatggttaacgctacgctcatgaacatcgcctataaccccaccaacgtccagctccccggtatgtacaacaaggaagagaacccccgtgtccccatcatcgtcactggtaacgatttctccacactgtatgctcctctcatccgtgacggtcgtatggagaaattttactgggcaccaactagggacgaccgtatcggtgtttgcaaaggtattttcaggaccgacggcctccgagatgaagacattgttaagctcgtatacaccttcccccgccaatccatcgatttcttcggtgccttgagggctcgggtttacgatgactaaatgaggaaatggatc

SEQ ID NO: 222944 - DNA, 379 bp, Gossypium hirsutum
aaacaaatcaaattgtagaagatggtaacacaagcactggtatcatcgtctctgacctactcagtggagactgcaaggcagattcttggagctaaacgacaaattgggccttcaaggaaaggatcctttgttgttaaggcagcttcgactccacccgttaagcaaggagctgatagacctttatggtttgcatctaaacaaagcctttcatacttggatggcagccttccaggtgattatggatttgaccccttgggactctcagaccctgaaggtccaggagggttcatcgagcctaaatggctagcctacggtgagatcatcaacgggcgttatgctatgttgggtgcagtaggtgcgattgcccctgaaatacttg

SEQ ID NO: 222945 - DNA, 374 bp, Gossypium hirsutum
  unsure (1)..(374): unsure at all n locations
cccacgcttccgccggnatcaaggttgacaagggtctggttccactggctggctggaacaacgagtcatggtgccaaggtcttgatggcctcgctccacgttcagctgcatactaccaacaaggagctcgttttgcaaaatggcgtactgtggtaagcattcccaatggaccaactgaacttgctgtgaaggaagcagcctggggactcgctcgctatgccgccatctcccaggacaatggattggttccaattgttgagccagagatcttgcttgatggtgatcacggaattgacaggactttcgaagtagccaaaaaggtatgggctgaggttttcttctatcttgcccagaacaatgtgatgtttgaaggt

SEQ ID NO: 222946 - DNA, 391 bp, Gossypium hirsutum
cccacgcgtccgcggcatgtctcctttgactgccatgtttttctcctcctttagggtccttaaattagtggatgatcattgcgggatgaagcttcccggaaaccccttttacctcttttttaacaacaattcggcataccatgatgtccaccatcagctttatggtaccaaatacaacttctctgtctacttcgacatatgggacagaattctaggaacctatatgccttattcacttgagaagagacctgatggcggccttgaagtacgacgtgctgatcaagaacacaagaaggattgattgattaattacttgattaatcagccaattatgataactagtgagcatggattgatgaatgttccattaggttttatatatgtatctaat

SEQ ID NO: 222947 - DNA, 389 bp, Gossypium hirsutum
agttccgacaaaagaaaactaaaaaaaagaagaagaaatacaatcgtgttctttttgaagtcgggttttagtttttggggtgaaaaaaatgttgggagtatttagcagtgcgatagtgtctccgccggacgagctggtggcggccggttgccgaactccatcacctaagataacggcggacgctctggtgaaacggttccttgagacgaactcctccggcgtgtccatgcacatcggagaccatgtccaattcgcttattctcaccataaagagtctcctttacagcccagatcatttgctgtgaaagacgaaatcttctgcttgtttgagggagcccttgataacttggggagtttaaagcagcaatatggtctggcaaagtcagcaa

SEQ ID NO: 222948 - DNA, 348 bp, Gossypium hirsutum
  unsure (1)..(348): unsure at all n locations
acccacgcgnncgcccacgcgtccggaaagcactgaaaaagcaaaaccatggcctttgcttctctccggaagacttcaccagtgttagacaagtctgagtgggttaagggtcacacccttcgccaaccttccacttctgtggtgaggtgccaccctgttgcaccctccggactaactgtgcgtgcaagctcatatgccgatgagcttgtcaagactgctaaagctattgcttctcctggccgtggaattttggccatggatgagtccaacgctacctgtgggaaacgtttggcctcaatcgggctagaaaacacggaggctaaccgccaagcctacaagacgttgctt

SEQ ID NO: 222949 - DNA, 410 bp, Gossypium hirsutum
  unsure (1)..(410): unsure at all n locations
cgggcngaccacgcgtncgaagcgtttgatcggtagaagattcatcaactcttcttttcttaaaagcaacaagaaattgtcgaccaaggagagttctgggcctggagacaagccaatgatcgtcgtcacatataaaggagaagagaagcaattcgctgctgaagaaatatcctctatggtcctcatgaagatgaaagagatcgccgaggcatatctcgggtccaccatcaaaaacgccgtcgtcactgtaccagcttacttcaatgattcccagcgtcaagccacgaaagacgctggtgttattgctggcctcaatgtcatgcgtataatcaacgagccaactgctgctgccattgcctacggacttgacaaaaaggctggaagttcaggagaaaagaaatgtgctattt

SEQ ID NO: 222950 - DNA, 393 bp, Gossypium hirsutum
  unsure (1)..(393): unsure at all n locations
cgggcgggcgnctccaagagaagacagagaggtctcctcacaaccaccgtaatgggtcgtgttattcgagctcagcgtaagggtgccggtgcggtcttcaaggcccataccaaccaccggaagggtcccgcccgtttccgcagcctcgacttcggtgaacggaacggttacctcaaaggtgtcgtcaccgacgtcattcacgaccctggccgtggcgctccgttagcccgcgtcgttttccgccaccctttccgttacaagaaacagaaggaattgttcgtcgccgccgagggtatgtacaccggacagttcgtgtattgtggtaagaaagctacccttatggttggaaatgtgttgccccttagatctatccctgaaggagcttgtcgttgc

SEQ ID NO: 222951 - DNA, 379 bp, Gossypium hirsutum
gtcatgagttcctatgaataccttttccaaggtcttagaggcgtacaatttggaggacaacatggatggtttctacattgctcctgcattcatggacaagcttgttttcacatcaccaagaacttcatgtccctccctaacattaaggttcctctaatcttgggtatttggggaggcaaaggtcaaggaaaatctttccaatgtgagcttgtgtttgccaagatgggtatcaaccccatcatgatgagtgccggagaactggaaagtggaaacgccggtgaaccagccaagttgatcaggcaaaggtaccgtgaagctgccgacataatcaaaaagggcaaaatgtgcgccctcttcattaacgatcttgatgctggtg

SEQ ID NO: 222952 - DNA, 383 bp, Gossypium hirsutum
ctcaacggtgttttgtgattaaaaaaactaccaagatgggggcaaaacaagatggcttccctgcatgaaccatggctagtggagaacgggttgaaggggtctagcaaggagattcgccatggcaggactgcacacaacatgtcgtcttcgtcgttgcggaaaaaatcggacctgacgcttgtttccaaggttcggtatgcaatgcttaggcagttcctcgccaatcttcaagaggtcatattagggaccaagctctccgttctcttcccagctattccattggccattgttgctgagtgttatggatttggaagaccctgggtgtttgcattaagtttacttggacttacaccattggctgaacgagtcagctttctcaccga

SEQ ID NO: 222953 - DNA, 383 bp, Gossypium hirsutum
cccacgctttcgctccctccgctatcgtgcgcccatcggctgctaccccctctgggtttttccaatggcgactactctgcaactatgtcgtttctgcatccgcaccgattctgataattttggtggaagattcggctctattccttcccggcggaagccgatctccgtccgatgctccggcgattcagattcgtcctcttccgttgccgtggatcccgataacttcgatgcaaagtctttccggcgtaacttgacgaggagcaagaattataatcggaaaggtttcggacacaaagaggaaacgctcgagctcatgaatagagagtacactagtgatattataaagaaattgaaggaaaatggaaacgagtatacatggggaa

SEQ ID NO: 222954 - DNA, 373 bp, Gossypium hirsutum
  unsure (1)..(373): unsure at all n locations
nnnnaatttngnnaaagcaacgntttcccggactnccggaancttcactcgatgtatctaagttacaagataatagggatgtaggacacgctattctagagagctattcaaggattctagagagcttggccttcaatgtcatgtcaagaatcgaggatgtccttcatgctgattcccttgctcaaacatcatcaccacaaaaatccgagacatcccctagctcatctgatgaagatgcattgagggtgagcagttcagacacaccaacactatcagattttatgggttggggtattgcttcaaggagaagaagctcaactgatctagaaatctactttaagggtgacaatgacaaaaaactggccaagccacc

SEQ ID NO: 222955 - DNA, 392 bp, Gossypium hirsutum
accattgttccaagtttgttgtaattcaagttagaaccagcatccaacatggcgcgcattagcagcctcgagcgctgccgcctcccttggcgtctctgaaatgcttggtaaccctctgaatttcagtggtggagctaggtcatcggctccaacaccatccaactcatccactttcaagaccgttgctcttttctccaagaagaaggccgctcctccaaagcccaaggctgctgctgtcgccccggccgatgaagagctggctaagtggtacggtccggacagaaggattttcttgcctgaaggtctgttagacagatcggagatcccagagtacttgaacggagaagttcccggagactatggatacgatccgtttggtctgagcaagaagc

SEQ ID NO: 222956 - DNA, 395 bp, Gossypium hirsutum
gagactcttttgtataactgtagcttatagtactagtaagcattaatagcaatggcctcctccatgatcgcatcggcaaccattgccaccgtgaactgctcctccccggcacaggccaacatggtggcccccttcaccggcctcaagtctgcctctgctttcccagtcactaggaaggccaacaacgacatcacttctcttgcaagcaatggtgggagagtgcaatgcatgcaggtgtggcctcctcttgggaagaagaagttcgagacactctcatacctccccgatcttacacccgtacagttggctaaggaagtagattaccttcttcgctctaaatggattccttgcttggaattcgaattagaagagggattcgtgcaccgtaagtactc

SEQ ID NO: 222957 - DNA, 371 bp, Gossypium hirsutum
  unsure (1)..(371): unsure at all n locations
gcggacgcgngggcggacgcgnggttttacgcgngggaaaatttttaaaaactagcaaatttcgcaaggcgggcgacttccattagggttcttcaattccgattttacagaacttttatcgaatttgtgaaatttcatcttcaaaaccctagtttctgctaatatcttattgattcaacatggctactgcatcagtggcgtttaaatcaagggaggatcaccgaaaacagctggaattagaggaagctcgaaaagcggggcttgctcccgctgacgttgacgaggatggaaaagaaattaaccctcatattcctcagtatatgtcatcagcaccttggtatcttaacgcctgaagacctatgtttgaaaca

SEQ ID NO: 222958 - DNA, 381 bp, Gossypium hirsutum
gtctctaccactgaaagcaaagaattaatggcaacggagatggcccttgtaaaggctatctccaaattcagtacaagcagtccaatttttagcaactcccgatatgggaagttcacgaccgtcagaatgtcatctacttcccaatcaacagcaaaggccgccgcgaagggtggcaagaaagctgccaaaaccgccatcaaagagacccttttgacaccaaggttttacaccaccgactttgatgaaatggaggcgcttttcaacactgagattaacaagaaccttaaccagtccgagtttgaggcactgctgcaagagttcaagactgattacaatcagactcactttgtaaggaacaaggagtttaaagaagctgctgat

SEQ ID NO: 222959 - DNA, 393 bp, Gossypium hirsutum
cgacaatgttcccgttgatgacctttttaagcttgttgacaccttcccgggccggtccattgactttgggggtgctctgagggccagagtttacgatgacgaagtgaggaaatggatcggagaggtcggagtcaatggtgtcgggaaaaagctcgtgaactcgagggaagggccaccatctttcgagcaaccgaagatgaccattgagaagctgttggaatatggatacatgcttgttgctgagcaagagaatgtgaagagggttcaattggctgacaaatatttgagtgaagctgcccttggaaatgctaatgacgatgctatcaagagaggagctttctaaatgggaaattaagctctaagggaagaaaaaaatctatattgggcacaaac

SEQ ID NO: 222960 - DNA, 376 bp, Gossypium hirsutum
ctggtgcacagctgactgtggttggattacagggcacaggtatgttacttatggacccatgcttaatggagctacagttcttctgtatgagggggccccaagttaccctgatcctggacgatgttgggacattgttgacaaatacaaggtgaccattttctacactgcccctaccttggtgcgctctctcatgcgtgatggtgatgagtatgttacacgctactcaaggaagtcccttcgtgtccttggaagtgttggcgagcctattaatccaagtgcttggaggtggttttttaatgtagttggagggtcaaggtgcccaatttctgacacttggtggcaaacagaaacaggtggctttatgattactcctcta

SEQ ID NO: 222961 - DNA, 394 bp, Gossypium hirsutum
gccacgcgtacgatttcccactcttttttttgctctcagttaacaacaaaatcgcggaatggctaccactgcttctccaatggcgactcagctgaagagcagctttacgtcgtctgttacaagaggactggtagtccccaggggcatttcgggatccccgttcaaagtatcttccggaaagaccaggaccccttgcttcactgtcaaagctgttcaatccgacaagtcaacatttcaagtaatccaacccatcaacggcgaccccttcattggaagcctggagactccaatcacctcaagccccttaattgcatggtacctttccaacctcccagcctataggacggcagtgaacccacttctgaggggaatcgaagtgggtctggctcacggc

SEQ ID NO: 222962 - DNA, 390 bp, Gossypium hirsutum
aaaaagtctctgacacttgcaacactataaactacacataaaatctgtgcctgcgctttgctctgcacacctcgggatatcagtttcaactccactcatcccacgggttactctcgtttacggagtttttttctgttctgcacttccctgtttagttttaagggtgaactgtttggattttctggttgagtaccgagtccatatattggtaagttcaaggaaggaacttgggcatcatgggtcttaaggcattagactatgagacaatgaatgaaaacgtgaagaaagttcaatatgcagttagaggtgagttgtatcttcgagcttctgagcttcagaaggaagggaagaagattattttcacaaatgttggcaatcctcatgctcttg

SEQ ID NO: 222963 - DNA, 363 bp, Gossypium hirsutum
atatgggaggggtttcatgtccttatatttgctttagaactttggatcatggacttcttctggtagggtgtggagctgctggttactccccaatccgctttaaggacaagcctttctggatcataaagaattcatggggagcaaactggggagaggacggatattacaaaatatgcagaggtcgcaatgtttgtggagtagactccatggtctcaagtgtggcggctttgcatacaaagtctcagtagcattgccctgtaaatgactgatataagtaacggtaatattagtatccgtcagtatgtcttatctctggatttatgccatctgctagaacgggtttatttcaatcctggtttatgc

SEQ ID NO: 222964 - DNA, 384 bp, Gossypium hirsutum
ataacttgttgcttacagcaaaccttatgtctgtaaagcgttgcagattttggggtggcgagggaagaatccgtgacagagatgatgactgctgagaccgggacttatcgttggatggcccctgagttgtatagcacagtgacattgcgtcgaggggaaaaaaagcattacaataacaaggttgatgtttacagctttggaattgtcttatgggaattattgaccaatcgcatgccatttgagggcatgtcgaatttgcaagcagcttatgctgctgcttttaagcaagaacgaccgagccttccgaaggatatatcccctgatctagctttcatcatacaatcgtgttgggttgaggaccctaacatgaggccaagctttagt

SEQ ID NO: 222965 - DNA, 382 bp, Gossypium hirsutum
aatcacttccaatactttcataacatttcacgaacttgactctccagtctccaggggcggctgccgtctccaccatcggtgctgtcaaccgagcaccgttgagtttgaatggatcaggtgccggagcttctgctccaagctcagctttcatggggaacagcttgaagaaagtgagcgctaggttcaacaacaacggcaaggctccagtgggaagtttcatgattgtggctgccaaagaaatcgacgaagacacacagaccgaccaggaccgatggaagggtcttgcttatgatatctccgatgaccaacaagacattaccagagggaaaggtatggtcgactcattgttccaagctcccatgaacgatggtactcactatgc

SEQ ID NO: 222966 - DNA, 346 bp, Gossypium hirsutum
cctaaatttgccgttcttttttatatataatagataggagaattgaagacaccagggataccagattcttacctcttttttttttatttcccaatttaagccaatgacggaaacgccgttctcgaagctccctgaggacgtcgttttaaatatattttcgaagctcgaagaggatctcgctagctgggcaagtcttgcttgtgtctgcaccagattctcttctctgattcgtaatacctgcttgaagcttaaatgttccaaaaccatacccgccgtttccgccgaccttctctcctcttcctccgccccacccggcggttgggcttctcttcataagctgtctgtc

SEQ ID NO: 222967 - DNA, 306 bp, Gossypium hirsutum
  unsure (1)..(306): unsure at all n locations
gcacgcgnccgcccacgcgnccgttacgcgnccgcccattcgnccgctcggggaaccccttcccttggcgatgacaacattgatttggatagaagtattggtgatcggattcatcgagttccaaaggaacgccgagcttgacccggagaagaggctgtaccccggaggaaagtactttgatcctctcggcctagccgccgaccccgagaagaaagcaaccctacaattggctgagatcaagcatgctcgccttgccatggttgctttcttggggtttgctgtccaagctgctgcaacaggcaaagg

SEQ ID NO: 222968 - DNA, 397 bp, Gossypium hirsutum
cacgcgtccggccacgcgtccggttcatttcaatttctgctcttgcttctttttcgtcctcctcgctcctcttctcatctccacctaccaagttcccttcaccttctctatgtcctcctctacacttgtctcttcccacttcttcttttctctcttcttctctttcactttctccttccttccatgcctaccccaccagctctagacgattctctgcttcttctttcactatcagggcctctgctgcagagaagaagaaggtccttatagttaatacaaacagtggcggccatgcagttatcggtttctactttgccaaagagcttctgggttctggccatgaggttaccatcttcactgttggagaagagggctctgataaaatgaagaagccccc

SEQ ID NO: 222969 - DNA, 403 bp, Gossypium hirsutum
agcgtccgcccacgcgtccgcccacgcgtccgtttacgcgtccgggtattgtcgactcattgttccaagctcccatgagcgatggtactcactatgctgtcatgagctcctatgaataccttagccaaggccttcgcacatacgacttggacaacaacatggatggattctacattgccccagctttcatggacaagcttgttgttcacatcaccaagaacttcatgacccttcctaacattaaggttcctcttatcttgggtgtttggggaggcaaaggtcaaggaaaatctttccaatgtgagcttgtctttgccaagatgggaatcaaccccattatgatgagtgccggagaattggaaagtgggaacgccggagaaccagccaagttgatcaggcaaag

SEQ ID NO: 222970 - DNA, 398 bp, Gossypium hirsutum
  unsure (1)..(398): unsure at all n locations
ggaannccccggctcttttgtataactgtagcatattttactagtaagcagttatagcaatggcctgctccatgatctcatgggcaaccattgccaccgtgaactgctcctccccggcacaggccaacatggtggcccccttcaccggcctcaagtctgcctctgctttcccagtcactaggaaggccaacaacgacatcacttctcttgcaagcaatggtgggagagtgcaatgcatgcaggtgtggcctcctcttgggaagaagaagttcgagacactctcataccttcccgatcttacacccgtacagttggctaaggaagtaaaataccttcttcgctctaaatggattccttgcttggaattcgaattagaggagggattcgtgcaccgtaag

SEQ ID NO: 222971 - DNA, 384 bp, Gossypium hirsutum
aaacatttttattttcaaaccccattccccccatggctgggctcaagcttattgggggcctagtattgttgtgcatgttggttttggaacccatggccacaactgctctcacatgtggacaagtggcaagccaaacgggtagttgtataaggtatttgcagcgtggagggaaccctccagctgcttgctgcaacggagttaggaacctaaacaggcaagctagaaccacccgtgaccgtcaaactgcatgcagatgcttgcaaactgccgctaggaccatctccggtatcaatactaaattggctgccggtcttccggccaaatgcggtgtcaaaattccttacaagatcagcccctccaccaactgcaatagagtgagatgat

SEQ ID NO: 222972 - DNA, 373 bp, Gossypium hirsutum
attgtagaagatggcaacacaagcttttgtatcatcgggtcttacctactcaggggagactgcaaggcagattcttggagctaaacgacaaattgggccttcaaggaaaggatcctttgttgttaaggcagcttcgactccacccgttaagcaaggagctgatagacctttatggtttgcatctaaacaaagcctttcatacttggatggcagccttccaggtgattatggatttgaccccttgggactctcagaccctgaaggtccaggagggttcatcgagcctaaatggctagcctacggtgagatcatcaacgggcgttatgctatgttgggtgcagtaggtgcgattgcccctgaaatacttgggaag

SEQ ID NO: 222973 - DNA, 382 bp, Gossypium hirsutum
caagataaaaagtattttgctttgtttaatttgtaagcgttgaggttaagtgaagaaactatggctgaagagggacaagtaattgcctgccacactgttgagtcatggcagcagcagctccagatgggaaacgagtccaacaaactggtggtggtggatttcacagcatcatggtgcgggccatgccgttttatatcaccaatcctggtggatcttgctaagaagctgcccaacgtcatattcttgaaggtggacgtggatgaactgaaatctgtcgctcagtcgtgggctattgaggcgatgccaacttttgtgtttctgaaaggaggcaccataattgacaagcttgtgggtgcaaggaaagatgaattgcagcagaaaa

SEQ ID NO: 222974 - DNA, 381 bp, Gossypium hirsutum
  unsure (1)..(381): unsure at all n locations
cccacgcgtccgnttaagcttaaattttttgtgcagatgttccttatctttagttgaactttgtcccttttatatcagtgtctacacatagaaatagatcatggcaaaagtagatgaaccacagccacatccaccaaaggagcagctgcccaacatttcttactgcattacaagtccacctccatggcccgaggccatccttcttggtttccaacattatcttgtgatgcttggaacgacagtgatcattccaacttcacttgttccccagatgggaggtggaaatgaggagaaagcaaaggttatccagactctactctttgttgctggtttgaacacattattgcagtcacttgttgggtctagattgcctgctgtgat

SEQ ID NO: 222975 - DNA, 407 bp, Gossypium hirsutum
  unsure (1)..(407): unsure at all n locations
ccgggcaccatnngngccaagtttgttgtaaaccaagttagaaccattagccaacatggccttattagcagcctccgccgctgtcgcctcgcttggcgtctctgaaatgcttggtaaccctctgaatttcagtggtggagctaggtcatcggctccaacaccatccaactcatccactttcaagaccgttgctcttttctccaagaagaaggccgctccttcaaagcccaaggctgctgctgtcgccccggccgatgaagagctggctaagtggtacggtccggacagaaggattttcttgcctgaaggtctgttagacagatcggagatcccagagtactttgacggagaagttcccggagactatggatacgatccgtttggtctgagcaagaagccagaagact

SEQ ID NO: 222976 - DNA, 397 bp, Gossypium hirsutum
  unsure (1)..(397): unsure at all n locations
gaggaaaaagctctntctctngctctctttagagtaaatttcttttgcaatcctttgtagagctccgggatccattgtcaccatgtcttgctcaaatctgacaatgtgggtgtcctcaaaaccctctctttctgacacttcttcactctctttccgttctttcatcagcccttttcagctcccatctcagagctcaacccccggtaacccttccaggtcctcatctgtaaccccagttcactgtggtcttcgtgagcttagagaccgtattgattcagtaaagaacacgcagaagatcactgaagccatgaaacttgtggctgctgctaaagttaggagagcacaagaagctgttgtcaatggcagacctttctttgagtccctggttgaagttctt

SEQ ID NO: 222977 - DNA, 397 bp, Gossypium hirsutum
  unsure (1)..(397): unsure at all n locations
cccacgcgnccgcttactctcaatattgaaatgaaatctctctgagagaagagtggcttaattgaattgggtttggttgtaataagcatggtttcgctggaagattcacattctagttccaaccggtttcctttgggtcgaaacttttacacccccggttcagcttccaccaccaaaatccaccgacatgtcggccgctccatgcgtacgattcgctccaatctttaccaaaacgacaatagtagctgctccttcaccagttccgtccctgagaggtccgcctttgtctccgaaaatctcaccgagtccgttatcgacatgcgtctcggcgaactggctgccaaaagcaacgctaaatctgntacgtctgagtccgaaaacgaggcccttttggagt

SEQ ID NO: 222978 - DNA, 422 bp, Gossypium hirsutum
cgggcgacccacgcgtccgaaaaagaaaaatggcttctgcttttttttttttctcaagtcttcacctattatcgacggagtccgagtggattaagggccaaaacctccgccacccttcggtttgttttgtacggtcacaccctacatcggccgcctttaccgtccgtgctagttcatatgccgatgagcttgttaagaccgcgaaaactgttgcatctccaggtcgtggtattttggccatggatgaatcaaatgctacatgtgggaagcggcttgcctcgattggtctcgagaataccgaggcaaaccggcaagcttaccgtacccttctcgtgtctgcccctggcctcggtaactacatctcgggagctatccttttcgaggagactctctaccaatctaccatcgatgggaaaaagatg

SEQ ID NO: 222979 - DNA, 403 bp, Gossypium hirsutum
aaaccaggttcgatggggaatcattttttcttggggttcgagaagtaccttggggggtctggtgagccggcataccctggaggaccactgtttaacccacttggttttgggaaagatgagaagtcattgaaggatttgaagctgaaagaagtgaagaatgggagattggcaatgttggcaatcttgggttacttcatacaagggctcgtgacaggtgtaggaccataccagaacctgttggatcacttggctgaccctttcaataacaatgtcttgactaacctcaagttccattagatgaaagtgcctatatttgttccatggaactaccctccccccccctccggctaaaagctccattgccaaatccctttctgctcctttcttgatctcagtaaaacat

SEQ ID NO: 222980 - DNA, 407 bp, Gossypium hirsutum
gtccgttcgaccttccatcccctctccctttttgtttctgaaaagtccaagtttttctgcaggggcgaccgtctctccaactcctctgttgaaagatgagctcgacatcgtgattcccacgattaggaacttggactttttggagatgtggagaccctttttccagccttaccatctcatcattgttcaagatggtgatcctaccaagaccatcaaggtccctgaaggcttcgattatgagctttacaataggaacgacatcaacaggattttgggtcctaaggcttcttgtatctctttcaaggattctgcttgtaggtgctttgggtacatggttttcaagaagaaatacatctataccattgatgatgactgctttgttgctaaagatccatctggcaaagaca

SEQ ID NO: 222981 - DNA, 405 bp, Gossypium hirsutum
accaaggcgtccgtttgaccggtaagttccctggtgattatttttgggacactgctggactctcaggtgaggccgaaacctttgctaggaaccgtgagctcgaagtcattcactgcagatgggccatgttgggagctcttgggtgtgttttccctgagctgttggctaggaacggtgtcaagttcggtgaagctgtatggttcaaggccgggtctcaaatcttcagtgagggtggacttgactacttgggtaacccaagcttgatccatgctcaaagcattttggccatctgggcttgccaagttatcttgatgggagccgtcgagggctaccgtattgccggtggaccactcggtgaagtgactgacccattgtacccaggtggcagctttgacccattgggtc

SEQ ID NO: 222982 - DNA, 411 bp, Gossypium hirsutum
  unsure (1)..(411): unsure at all n locations
gaaagattgtggaacaaatttatattcctccaccaggtgttagacaaacaatgctattcagtgccacctttccaagagagatacagagactggcctctgattttcttgcaaactatattttcttggctgtggggcgagttggatcaagtactgatttgattgtccagagagtagaatttgttcatgagtcagacaaaagaagtcaccttatggaccttcttcatgctcagagagcaaatggtgtccagggcaagcaagctcttacattagtttttgttgagacaaaaaagggagctgattcacttgaacattggctgtgcatgaatggttttcctgcaactaccattcatggtgatagaagccagcangaaagagaacaagcattacggtcatttaaaaccggtgctaccc

SEQ ID NO: 222983 - DNA, 411 bp, Gossypium hirsutum
ccacgcgtacgcccacgcgttcgtacgcttacgccttacgccatacgcatttggccgcacgttgttttgtgctctgtgtttctcaataaattccttattcctacaaaacccccaaaattaaagaaggatcaaaccgaccctttgcaattccaagacacatgaaccaagagacataccacgatggcaacaacgacggagaagcaagccatggttgttggaatcgacgacagcgagcacagtacgtacgcgctgcagtggatcctcgatcacttctttgctcctttcgcttccaatcctcctttcaagctcgtcatcgctcatgccaagcctactgcttcttctgctgttggtctcgccggacctggagctgctgatgtattgccctatgtggatgcggatttgaggaagatc

SEQ ID NO: 222984 - DNA, 410 bp, Gossypium hirsutum
cgagcaactagagcgaaagattatttatgtccactgtgccctttcacttgtggggtttttgtggcgctaatgatggcacagatcgaggtcttgagaaagaagggccactcgtactcagaaatcatcaatgagagtttgattgaagctgttgattccttgaaccccttcatgcatgctcgaggagtttctttcatggttgataactgttccacaaccgcacgattgggatcaagaaaatgggctccacgttttgattacaaccttactcaacaagcattcgtagcagtggattcaggtgctcccatcaaccaggacctgataagcaacttcttatctgatcctgttcatgaatctatcgaagtctgtgcaaagctaagacctactgttgatatatcagtgcccccagatgc

SEQ ID NO: 222985 - DNA, 394 bp, Gossypium hirsutum
cccacgcgtccggggcctctccaattcgattcctctcttctctagaaaccaccggcgaggcatggctctaatcacccgaaccaccgccaatcgcctccctcacctcctctccctacagcgtgccctcgctattcacaccaccgtcccttctctctcctcttctgccaccccaaccacatacgctcgcccttctccgccgtccacctccggcactccctccagtctgtctaagcctgctgagtacgtgatctccaaggtcgatgacctcttgaactgggcccgtcgtgggtccatatggcccatgactttcggcctcgcttgctgcgccgtcgaaatgatgcacgccggtgcttctcgctacgacttcgatcgctttggtgtcatttttaggcct

SEQ ID NO: 222986 - DNA, 349 bp, Gossypium hirsutum
gttttctcttcctccaattaatatgtatatcttcgttaagaccctgaccggcaggaccatcaccctcgaagtcgagagttccgacacgatcgacaacgttaaggcgaaaatccaagacaaggaagggatcccaccagaccaacaacgtctcatcttcgccggaaaacagctcgaagatggccggaccttggccgattacaacatccagaaggagtccaccctccatctcgtcctccgtctacgtggtggcatgcagatcttcgtcaaaaccctgaccggcaagaccataactttggaagtcgaaagctctgacaccattgacaacgtcaaggccaagatccaagacaag

SEQ ID NO: 222987 - DNA, 395 bp, Gossypium hirsutum
cccacgcgtccgtccacgcgtccgttcattcgtccggaaagaaatatttctttggtttgttcttttcgactttcggctactgagtcaccaaacgagttaaggaaaagagagacaagtttcaccaaaccatggggtcgatccccgatcctggcgagttgaccgagttaacccagccgagtttcgatgagttccagcgtcaaacgtctctgatgacgagctgtactctcctctggaaagaactgtcggatcacataaattcacttgagcagaacctgataaagcagtcggagaccttgaaacgcaaaatcgaggcactggactcggagaccaaggcttcactcgactcactcaagaagcgggaactcagtatcgaggacagtgtcaagatcgcactc

SEQ ID NO: 222988 - DNA, 407 bp, Gossypium hirsutum
gtcggtttaacacaggttacaaactcaaattctttaagttctcactttcaaaaaacttcgcaggttcaccatgtctgacaggtgcggcaactgtaactgcgctgaccgcagccaatgcacgaagggaaacagcaacaccatgatcattgagactgagaagagctacatcaacactgctgtgatggatgctccagctgagaacgatggcaagtgcaagtgcggtactggctgcagctgcacagactgcacctgtggccactaagccaacatacaatggtcatgcttcaggtcatggcatatatagggatctaaataatgaatttaaggttgaataatttgtctgttgtagtttgtgtggtgacttatatctgtcagttaacctttgtatcctttactatgatgtaatg

SEQ ID NO: 222989 - DNA, 268 bp, Gossypium hirsutum
  unsure (1)..(268): unsure at all n locations
cggaagggttggggcccaaagcgccaatttccttaagttcaagcccgaagaaattaaggccatcatgaatgactttaatgaaccgggtacgctcgctcccaccgggttgcccctcggtggcacgaaatacatggtgatccaaggcgaaccgggagcttgtatccgagggaagaggggacncngaggtgttactgttaagaagaccaatatggcctngatcatcggaatctatgatgaaccaatgacacccggccaatgcaacatgatc

SEQ ID NO: 222990 - DNA, 409 bp, Gossypium hirsutum
gagactcttttgtataactgtagcttatagtactagtaagcagtaatagcaatggcctcctccatgatctcatcggcaaccattgccaccgtgaactgctcctccccggcacaggccaacatggtggcccccttcaccggcctcaagtctgcctctgctttcccagtcactaggaaggccaacaacgacatcacttctcttgcaagcaatggtgggagagtgcaatgcatgcaggtgtggcctcctcttgggaagaagaagttcgagacactctcatacctccccgatcttacacccgtacagttggctaaggaagtagattaccttcttcgctctaaatggattccttgcttggaattcgaattagaggagggattcgtgcaccgtaagtactcgagcttacccacgt

SEQ ID NO: 222991 - DNA, 381 bp, Gossypium hirsutum
cccacgcgtccggtgacggttttttgtagaaattttactgggcaccaactaggggcgaccgtatcggtgtttgcaaaggtattttcaggaccgacggcgtccgagatgaagacattgttaagctcgtcgacaccttccccggccaatccatcgatttcttcggtgccttgagggctcgggtttacgatgacgaagtgaggaaatggatcagtgaggtcggagtcgcaagcgtagggaagaagttagtgaactcaagggaaggacctccaacatttgagcagccaaaaatgaccattgaaaagctattggaatatggaaacatgcttgttgctgagcaagagaatgttaagagagtccaattggctgacaaatacttgagtg

SEQ ID NO: 222992 - DNA, 433 bp, Gossypium hirsutum
  unsure (1)..(433): unsure at all n locations
ccggaaanccccgggngcgaccaaagaaagaattgctcatctttccttcagtgaatanttgttttgagtgaaaaaaaaaatgttgggagtattcagcggagcgatagtgtccccgccggacgagctggtggctgccggttgcaggacgccgtcgcctaagataacggcggacgctcttgtgaaacggttcatcgaggcaaacccctccaccgtgtctatgcagatcggagatcatgtccaattcgcttattctcaccgtaacgagtctgctttacttcccaggtcattcgcggtgaaagatgaaatattctgcatgtttgagggggcacttgataacttagggagtttaaagcagcaatatggacttggtaagtcagcaacagaggtggtattggtgatagaagcttacaaggctcttcgtgacagagcacct

SEQ ID NO: 222993 - DNA, 376 bp, Gossypium hirsutum
cccacgcgtccgcccacgcgttcgttcaaccactatcactaccattatggcttcggctactgtttctgtagccaaacccaaccttcagattcaggcaaaaggaaagggtgttggttttgcagatttctcaggcctacacaactcctctactagccttccctttgccaggaaaacctctgatgacttgcattcactcgttgcttttcagacatctgctctaggaagcaataatggcgggtacaggaaagggatggcagaggcaaagctaaaggtggctataaatgggtttggtaggattggcaggaatttcttaagatgctggcatggccgtaaggactccccacttgatgtcattgccatcaatgacactggtggt

SEQ ID NO: 222994 - DNA, 439 bp, Gossypium hirsutum
  unsure (1)..(439): unsure at all n locations
ccgtaacggaatncccgggcaaaatcagttgcttcacaatggcctctacaaccattgctttttcttccccatcattcgccggtaaggcagggaagttctccccttccacccctgaaatccggggaactggccgtgtttccatgaggaaaaccaccaagcctgttccttctggtagcccatggtacggtcctgaccgagttttgtacttgggtccactttccggtgagccaccatcttacttgaccggtgagttccctggtgactatggttgggacactgctggactctcagctgatcccgagacctttgctaggaaccgtgagctcgaagtcattcactgcagatgggccatgttgggagctcttgggtgtgttttccctgagctggtggctaggaacggtgtcaagttcggtgaagctgtatggttcaaggccgggtc

SEQ ID NO: 222995 - DNA, 411 bp, Gossypium hirsutum
gtcactcttttcctcctatttatacttaagccaatggcctccttatccttgctcgggctctcctccgccacccgttttaccccacgcgccactcctcttaaccaccgggctcgaacccagaaatcattctccatcaggtcccaatctgccccagtcctttcccaagatgagctcaaaaagcttgcagctgacaaagcggttgagtctgtcaagtcaggtatggtcctaggcctaggaacaggctcaacagctgcctttgtggttgacaaactgggtcaactcctttccaccggtcaactttctaacatcgtcggaatcccaacctcaaaaagaacccaagagcaagctgcatcacttaatatccctttatccacccttgacttgcatccccatattgatctcgccattgat

SEQ ID NO: 222996 - DNA, 382 bp, Gossypium hirsutum
cccacgcgtccggtccgtctctctgtttttttccacaaccactatcactaccatgatgggttcggctactgtttctgtagccaaacccaaccttcagattcaggcaaaaggaaagggtgttggttttgcagatttctcaggcctacacaactcctctactagccttccctttgccaggaaaacctctgatgacttccattcactcgttgcttttcagacatctgctctaggaagcaataatggcgggtacaggaaagggatggcagaggcaaagctaaaggtggctataaatgggtttggtaggattggcaggaatttcttaagatgctggcatggccgtaaggactccccacttgatgtcattgccatcaatgacactggt

SEQ ID NO: 222997 - DNA, 356 bp, Gossypium hirsutum
accattttggatacaaagaagatggtgagtacatttctcccccaccaagtgacatggaaagggtgggaaagctaatggagacctacctagttgaaatatcatctgaccgtaatctacctatctcgaaattcatcggtcttgctgaactcattccggaacaatccagggtaacagaggatgggatgtatagagccatagatatctacctcaaggcccaccccactattactgacatggagaggaagaaagtttgcagtttaatggattgccagaaactctcgagggaggcctgcgcgcatgcggctcagaatgaccgtcttccagtgcagaccgtggttcaagtcctttaccatgag

SEQ ID NO: 222998 - DNA, 398 bp, Gossypium hirsutum
caataatttcttccgttgatctttgttagttattagctttttaatttttcattatggggagagatcaagatcggaatcaatggatttggaaggatcgggcgtttggttgcgagagttgctctccaaagcgatgatattgagctcgttgctgttaacgatcctttcatcaccactgaatacatgacctacatgtttaagtacgacagtgttcacggtcaatggaagcatcatgagcttaaggtgaaggactcaaagacccttctctttggtgaaaagcctgtcacagttttcggtatcagaaaccctgaggaaatcccatgggctgaggctggagctgagtatgttgttgagtctactggtgtttttactgacaaggacaaggctgctgctcacttgaa

SEQ ID NO: 222999 - DNA, 393 bp, Gossypium hirsutum
ttttcagacatgactcccttctcttttttaccttgtgccagcagtaccacgtcgcctgatgcattccttcttcgttatcctcatctacgtcttctgaaatgccgtcactacgaacctcaacttcccaagatagagaatcttatgttgaggcctttccaagttccaactaggccttatctccctatcttgagcttgagaaaccctaggcgcacgcacccttgtgctaatatatcttctttcgctgaggcggaaggtgggaaagagcaaaacgatgaagcaatccatcttggaactcggcaagaagatgctaaacccaatgaagagtacctgcctggaatggctcaagcctttaatatatcttccagaactgcttctgctattgctatattcata

SEQ ID NO: 223000 - DNA, 414 bp, Gossypium hirsutum
tttagctatagcatacactactagttccctctactagcaatggcttcctcaatgatctgatcggctaccattgccactgcctctccggcacaggctaacatggtcgctcctttcaccggcctcaagtctgcctctgctttcccagtcaccaggaaggccaacaacgacattacttctctcgcaagcaatggcggcagagtgcaatgcatgcaggtgtggcctcctactggaaagaagaagttcgagactctctcatacctccccgatcttacacccgtgcagttggctaaggaagtggattaccttcttcgctcaaaatgggttccttgcttggaattcgaattagaggagggattcgtgcaccgtaaatactcgagcctacccacgtactacgatggacgctactggaccatg

SEQ ID NO: 223001 - DNA, 397 bp, Gossypium hirsutum
cccacgcgtccggagaaagctttgtttgcaaaaccatggcctctgcttctctcgtcaagacttcaccagttttagacaagtctgagtgggttaagggtcacacccttcgccaaccttccacttctgtggtgaggtgccaccctgttgcaccctccggactaactgtgcgtgcaagctcatatgccgatgagcttgtcaagactgctaaagctattgcttctcctggccgtggaattttggccatggatgagtccaacgctacctgtgggaaacgtttggcctcaatcgggctagaaaacacggaggctaaccgccaagcctacaggacgttgcttgtttcagcttctggccttggtcagtacatctcaggtgccatcctctttgaggaaaccctcta

SEQ ID NO: 223002 - DNA, 399 bp, Gossypium hirsutum
ctctagccacttggggcggccaatttgtgttactccaaaattcagcttggctcctctggtacccaggctttctgaattacttggcattcaggttgtcaaggctgatgactgcattggtccagaagtagaaaagttagttgctgcacttcctgaaggtggtgttcttcttcttgaaaatgttagattttacaaggaagaggaaaagaatgaacctgaatttcaaagaagcttgcttcgttagctgatctctttgtcaatgatgcatttgggactgcacatcgagcacatgcatcaacagaaggtgttacaaaattcttgaagccatcagttgctggtttccttttacagaaggaactagactaccttgttggtgctgtttcaagccccaaaaggcctttt

SEQ ID NO: 223003 - DNA, 437 bp, Gossypium hirsutum
  unsure (1)..(437): unsure at all n locations
tccggaaanacccgggccgaccaagccgtccgggctctcttcactcctcctattttttctttttcttccttgtcctcgccccttcggtgggaagctacatttccatggccccccctgaattggttcaacccagtgataaaacaaacgttttcgctaaacaagtcagtttgcgtaatcgtgcatatgttacgttcttggccggaaatggggactacgtgaaaggcgttgtagggttagccaaagggttaaggaaagtgaaatcggcgtaccctttagtggttgccgttttacccgacgtgcctgaggagcataggcggatcctggagaaccagggttgtatcgtccgagagatcgaaccagtttacccgcctgagaaccagacccagttcgccatggcctattacgtcatcaattactccaagcttcgtatttgggag

SEQ ID NO: 223004 - DNA, 232 bp, Gossypium hirsutum
gcattcaggttgtcaaggctgatgattgcattggtccagaagtagaaaagttagttgctgcactttctgaaggtggtgttcttcttctggaaaatgttagattttacaaggaagaggaaaagaatgaacctgaatttgcaaagaagcttgcttccttagctgatctctttgcaatgatgcatttgggactgcacatcgagcacatgcttcaacagagggtgtcacaaaattc

SEQ ID NO: 223005 - DNA, 411 bp, Gossypium hirsutum
cccacgcgtccggctatagcttactttactagtacccactactagcaatggctgggctcaatgatctcatcggctaccattgccactgcctctccggcacaggctaacatggtcgctcctttcaccggcctcaagtgtgcctctgctttcccagtcaccaggaaggccaacaacgacattacttctctcgcaagcaatggcggcagagcgcaatgcatgcaggagtggcctcctactggaaagaagaagttcgagactctctcatacctccccgatcttacacccgtgcagttggctaaggaagtggattaccttcttcgctcaaaatgggttccttgcttggaatacgaattagaggagggattcgtgcaccgtaaatactcgagcctacccacgtactacgatggacgc

SEQ ID NO: 223006 - DNA, 398 bp, Gossypium hirsutum
gggactctcagactactcttttttttcagctccaccatcacccccaaaaggcagagcaaattgtagaagatggcaacacaagcacttgtatcatcgtctcttacctactcagtggagactgcaaggcagattcttggagctaaacgacaaattgggccttcaaggaaaggatcctttgttgttaaggcagcttcgactccacccgttaagcaaggagctgatagacctttatggtttgcatctaaacaaagcctttcatacttggatggcagccttccaggtgattatggatttgaccccttgggactctcagaccctgaaggtccaggagggttcatcgagcctaaatggctagcctacggtgagatcatcaacgggcgttatgctatgttgggtgc

SEQ ID NO: 223007 - DNA, 397 bp, Gossypium hirsutum
accacgcgtgcgctttccctcaaacttattgatccatttccctatacacacgcggcggatggagggttcctccatcgctcagggtccagacgacgacgtccctgctcctggtcaacagtttgcacagttcggcgcgggttgcttttggggtgttgaattggccttccagagagttccaggggtgaccaaaacggaggtggggtatagccaagggtttatgcataatcctagctatgaagacgtgtgtacggggtccaccaaccataatgaagttgtgagggttcagtatgaccctaaagagtgtagctttgacactttgcttgatgtattctgggctcgccatgatcctactaccctcaaccggcaggggaatgatgtgggaacacagtatagatct

SEQ ID NO: 223008 - DNA, 398 bp, Gossypium hirsutum
cagtgagactcttttgtataactgtttcatatagtactagtaagcagtaagagcagtggcctcctccatgatctcatcggcaaccattgccaccgtgaactgctcctccccggcacaggccaacatggtggcccccttcaccggcctcaagtctgcctctgctttcccagtcactaggaaggccaacaacgacatcacttctcttgcaagcaatggtgggagagtgcaatgcatgcaggtgtggcctcctcttgggaagaagaagttcgagacactctcatacctccccgatcttacacccgtacagttggctaaagaagtagattaccttcttcgctctaaatggattccttgcttggaattcgaattagaggagggattcgtgcaccgtaagtact

SEQ ID NO: 223009 - DNA, 389 bp, Gossypium hirsutum
  unsure (1)..(389): unsure at all n locations
gcggaccaagccgtccgaaaaatcanttgtttaacaatggcttctttatccatggctctttcttccccatggttcgccggtaaggaaggaaagttttccctttcaacccttgaaatccggggaactggccgtgtttccatgaggaaaaccaccaagcctgttccttctggtagcccatggtacggtcctgaccgagttttgtccttgggtccactttccggtgagccaccatcttacttgaccggtgagttccctggtgactatggttgggacactgctggactctcagctgatcccgagacctttgctaggaaccgtgagctcgaagtcattcactgcagatgggccatgttgggagctcttgngtgtgtttttcctgagctgttggc

SEQ ID NO: 223010 - DNA, 290 bp, Gossypium hirsutum
  unsure (1)..(290): unsure at all n locations
tttcgtaatcttcttcaccagcgtcatcggcataactaccccggtcctcctggcccgttttttcaaggaaaacccgtgtacgacaaggcaattctaataatcaagtgcttcgctgccggagtcatcctttcaacctccttggtccacgtnctccccgacgccttcgccgccctatccgactgccaggtcgcttctcgccatccctggaaagatttccccttcgccggccttgtcactctaatcggggctctgctcgctctttttgtggacttaacggctagctcacatgt

SEQ ID NO: 223011 - DNA, 253 bp, Gossypium hirsutum
aagtgcattttcagatgctgggcttcttcctccatgcgcaagatgtctcgggagggaagcacatagaagaattctatggcaaagtggctagactacacggatccgttaagaatttgccagcgtcttgcacttcaagaatgggagccagaccagagttgtgtttcttcccacagtacgtggtgcagactatgcaaacaccaatcttcttcgtaaattcagcttatgactcctggcagattaagaacattttggc

SEQ ID NO: 223012 - DNA, 424 bp, Gossypium hirsutum
cgggccgacccacgcgtgcggcgagacaaaaatggcgacttcagttatgtttgaaaaacgggtcgtcctgctctgcggggactatgccgaggactatgaggttatggtccctttccaggctctgttggcttatggtatatcagtggacgctgtttgtcccggcaagaaggccggcgaaacttgccgcaccgctattcatcaactttccggccatcagacctataccgagatccgtggtcacaatttcacactaaatgcatcatttgaagatatagaccatactaaatatgatggtttagttatagccggaggacgagctcctgaatatcttgctatggatgcatttgtattgaacatggttcgcaattttgttaattctggaaagcctgttgcttcaatttgtcatggtcaattgatattagct

SEQ ID NO: 223013 - DNA, 369 bp, Gossypium hirsutum
ctcaggccttctgtcgacccttatgcatgtcctgtcccacaacttcgctcctggggatgagcttcctcctacaccctgtgaagttatacaaggatccctcccgccttgccttgacggtgcatacattcgtaatggccccaaccctcagttcctccctcgtggaccttaccacctcttcgatggtgatggtatgcttcactccattcgaatctccaagggcaaggccaccttgtgtagcagatacgtaaagacgtacaagtactccattgaaaaccaaatgggttctcccgttttccccaatgttttctccggctttaacggcctaaccgccgcggccactcgcggtgctctctccgctgtcagaattct

SEQ ID NO: 223014 - DNA, 384 bp, Gossypium hirsutum
gtcaacttcatcttgtgtgcgtgcttggcgtctacggtgttgatcacaaagatggctgaggcttggagacaacaccatgggtccccactctcccatcctccatttaacattacgggctctgccttggctgtattcggtgtcttgggtattccacttgcggtaacatacagtattccattcgctttggcatccatctactgttctagtactggtggtggtcaaggtctttctctaggagtgctaaacttgtctatagttatcccacagatgttcgtatcagtaattagtggaccgttggatgatgcattcgggggtggcaacttgcctgcttttgtgctggggtccatagcggctgctgtcagtgcgttgttggctatattggca

SEQ ID NO: 223015 - DNA, 399 bp, Gossypium hirsutum
ggagtccttagctatgggaaattttttactaacatctgttctcgtaggactagtggttgcttcagctataacccaaaccgtgttggctcaaaactgtggctgtgcgccaaacttgtgttgcagtcaacatggttattgcggtcagggtaacgattactgtggcactggttgcaaagaaggcccttgtttctccaagtctcccactggtgcttcagttgcctccattgtttcacctcagttcttcaacgggataatcaaccaagctcgtgcggattgtgcaggcaagaaattctatacacgacaagctttcctgactgcacttgattcctttcccgatttcggaaaattgggttctgatgttgaatccaagcgtgagattgctgcattcttcgcccatgc

SEQ ID NO: 223016 - DNA, 401 bp, Gossypium hirsutum
ctgatttctgataaaaactcttttttacttttttctttccaatcaataatagttggactgcaacagcagtaacagagtagataccaagtctaacaatggcgaatcctaagctcggtcgaagtcctagcatgagggaccgcgtggaggacacgctttctgctcatcgtaacgagctcgttgctcttctctccaggtacgtggcgcagggaaaaggaatactgcaaccgcatactttgatcgatgaactggaaaatgttgtaggcgacgacaaagctagagagaagctaagtgatggtccctttagcgaagtccttaaatctgcacaggaggccataattctgcctccatacgtggctatagcagttcgcccaagacctggtgtttgggaatacgtacgagtc

SEQ ID NO: 223017 - DNA, 399 bp, Gossypium hirsutum
ccatttccaagctcaagtttttatgcctaaacctgtctctcatctctgctgcaatccattgtctaacggggtccatacttcatccaaagctttcaccactttagctatctttaaatcaaagaccaaagcagctcccaagagggttgagccaaagtcaaagccaaaggttgaagatgggatctttggcacctctggagggattggttttaccaagcaaaatgagctctttgtgggacgtgttgccatgcttggttttgctgcatcattgctaggcgaagcaataacagggaaaggaatcctagcacagctgaatttggagactggaattcccatttatgaagctgaaccccttcttctcttcttcattctcttcacactccttggagccattggagcatt

SEQ ID NO: 223018 - DNA, 428 bp, Gossypium hirsutum
  unsure (1)..(428): unsure at all n locations
aaaaaccccttccttttttttttttaaaagaaaattttttttgcaagtcggtggtaaagcttccgggaatccattgtcaaccaatgtttggctccaaatttggacaatgtggggtggtccttcaaaaaccctttcttttcttgacactttctttcacttttctttttccgttcttttcatcagcccctttttcagcttcccaatctcagaggctcaaccccccggtaaccccttccaggtccctcatcnttgtaaccccagttcaactgtggttcttcgtgaggccttagagaccgtattgattcagtaaagaacacgcagaagatcactgaagccatgaaacttgtggctgctgctaaagttaggagagcacaagaagctgttgtcaatggcagacctttctctgagtccctggttgaagttcttta

SEQ ID NO: 223019 - DNA, 361 bp, Gossypium hirsutum
ctggaatattcgcaatatggttgattccgcaactgtttgcttacgcgtttaactgcccgatggcgaagttcttacaggcgcaaagcaagatgatggcgatggcggtgatatccggggtggcgttcgttctgcactgtttgtttagttggctgttgatgctaaaactgggttggggattagttggtgcagccattgtgttgaatgcgtcgaggattgccatagacgtgggtcagtttttgtacataattagcggcacttgtggtcaggcttggaccggcttctcttggaaggcatttcaacatctatggggatttgtcagattgtcttttgcttcagctataatgctctgtttagaggtatg

SEQ ID NO: 223020 - DNA, 391 bp, Gossypium hirsutum
ccacactctcaaattcagttaacattttcacagttgttttcttcagtctctctcgcagccatggctgcagccatctccaccgtcgctgccgctgccgccgccaaccgagctctgggagtgtcagtcccaacctcagctttcatggggaagaaagtgagctcaagattcaacagcaccaggcaggttccttcgggaagttttaaggtgatggcggcggagaaagagatagacgaagagacacagaccgaaaaggaccgatggaaagggttggcttacgatatttcggacgaccaacaggacattactcgagggaaagggatggtggattccttgttccaagctcccatgaatgatggaactcactatgctgtcatgagttcctatgaatacc

SEQ ID NO: 223021 - DNA, 401 bp, Gossypium hirsutum
atcactcccaatactttcattacatttcacgaacttcactctccagtctccaatggcggctgccgtctccaccatcggtgctgtcaaccgagcaccgttgagtttgaatggatcaggtgccggagcttctgctccaagctcagctttcatggggaacagcttgaagaaagtgagcgctaggttcaacaacaacggcaaggctccagtgggaagtttcatgattgtggctgccaaagaaatcgacgaagacacacagaccgaccaggaccgatggaagggtcttgcttatgatatctccgatgaccaacaagacattaccagagggaaaggtatggtcgactcattgttccaagctcccatgaacgatggtactcactatgctgtcatgagctcctatgagt

SEQ ID NO: 223022 - DNA, 399 bp, Gossypium hirsutum
  unsure (1)..(399): unsure at all n locations
cttctctacattccctccaaaactttctatcanactgaaaacaaccgtaacaacgcacgacagtcgcggccattccacccttatccaccgctacatcggttaccgacctctccgttttggatagcaccactgttgctctcataggtggaggttcagtcgctgccttagcagcggttctctccttcactgacccggaacgccgacgtcgtcttcaggcggaagaagtcggtgggggcgataaagaagtcgttaggaattacttcaataattctggtttccaaaggtggaagaagatttatggagagaccgatgatgtgaataaagtccagcttgatattaggttagggcattccaaaacccgtgaaaatgtgatgaaaatgttgaccgatgatggctcac

SEQ ID NO: 223023 - DNA, 387 bp, Gossypium hirsutum
aagggacgtgatttgccaggttgctctctttatcaatgctgatgtgcttgttatgggaagccatggctatggcctgattaagagggcattcttggggagtgtaagcaatcactgtgcacaaaacgtgaagtgccctgttttgattgttaagaagcccacatgttcgtcttctgcaagtggaaccaaatgattgaaatttcggattacatagtcatactttgctttgtttatgtacaaatttcactttagtgggtatgtttctgttcttggttttcttttctcatatctttgtctgcttcattactttgttgtataaggttttatttatctctgaatgtacttttcatatttgaattaaaaagagtcccattatacattattgggaat

SEQ ID NO: 223024 - DNA, 408 bp, Gossypium hirsutum
gagactcttttgtataactgtttcttatagtactagtaagcagtaatagcagtggcctcctccatgatctcatcggcaaccattgccaccgtgaactgctcctccccggcacaggccaacatggtggcccccttcaccggcctcaagtctgcctctgctttcccagtcactaggaaggccaacaacgacatcacttctcttgcaagcaatggtgggagagtgcaatgcatgcaggtgtggcctcctcttgggaagaagaagttcgagacactctcatacctccccgatcttacacccgtacagttggctaaggaagtagattaccttcttcgctctaaatggattccttgcttggaattcgaattagaggagggattcgtgcacccgaagtactcgagcttacccacc

SEQ ID NO: 223025 - DNA, 403 bp, Gossypium hirsutum
caatctactgatttcaccgagttaacgaacgaacaaccatggctttcgtccaccagattagttgttaagccggatatgttgtttggtaaacgtgggaagagtggcttggttgctctcaatttggatcttgctgaagttgctgaattcgtcaaagctcgcctcggcactgaggttgaaatgggcggttgcaaagctcctataaccacattcattgttgaaccttttgtaccccatgaacaagagtattacctttcaatagtctctgaaaggcttggttttaccattagtttttcggaatgtggaggtattgatattgaagagaactgggataaggctaacaccatgttccttacaaccgagaaacctatgaccttggagacatgtgcacacgtgatagctacac

SEQ ID NO: 223026 - DNA, 415 bp, Gossypium hirsutum
gttagctttagcatacactactagtacccactactagcaatggcttcctcaatgatctcatcggctaccattgccactgcctctccggcacaggctaacatggtcacccctttcaccggcctcaagtctgcctctgctttcccagtcaccaggaaggccaacaacgacattacttctctcgcaagcaatggcggcagagtgcaatgcatgcaggtgtggcctcctactggaaagaagaagttcgagactctctcatacctccccgatcttacacccgtgcagttggctaaggaagtagattaccttcttcgctcaaaatgggttccttgcttggagttcgaattggaagaaggattcctcccccgtaagtactcgagcttacccacgtactacgatggacgctactggaccatgt

SEQ ID NO: 223027 - DNA, 370 bp, Gossypium hirsutum
atgtgtctgtctctctgttttactccacaaccactatcactaccattatggcttcggctactgtttctgtagccaaacccaaccttcagattcaggcaaaaggaaagggtgttggttttgcagatttctcaagcctacacaactcctctactagccttccctttgccaggaaaacctctgatgacttccattcactcgttgcttttcagacatctgctctaggaagcaataatggcgggtacaggaaagggatggcagaggcaaagctaaaggtggctataaatgggtttggtaggattggcaggaacttcttaaagtgctggcatggccgtaaagactccccacttgatgtcattgccatcaatgacac

SEQ ID NO: 223028 - DNA, 409 bp, Gossypium hirsutum
cccacgcgtccgtttcgatcgtcccaaatttgacttgatttcctctttccatcgaagagtttagagggattcagaaaatgcagggaggcagaggtggaagagatcctttcttcaattttggtggtgaccccttcggtggtgacctcttcggtggtgaccccttcggtggttctgggggctttggaggatttggtggtcctagaaatttattctccaacttctttggaggaaggaacccatttgatgacccttttatcacacgcccttttggaagcatgtttgattcaagcttctttggccccggtcaaagtccttttatggatatgcatccgactgggtttattgagcgtcaggctccagagccaaagagacccaagggtctgattattgaaaactaaattctgatgat

SEQ ID NO: 223029 - DNA, 415 bp, Gossypium hirsutum
gagactcttttgtataactgtagcatatagtactagtaagcagtaatagcaatggcctcctgcatgatctcatcggcaaccattgccaccgtgaactgctcctccccggcacaggccaacatggtggcccccttcaccggcctcaagtctgcctctgctttcccagtcactaggaaggccaacaacgacatcacttctcttgcaagcaatggtgggagagtgcaatgcatgcaggtgtggcctcctcttgggaagaagaagttcgagacactctcatacctccccgatcttacacccgtacaggtggctaaggaagtagattaccttcttcgctctaaatggattccttgcttggaattcgaattagaggagggattcgtgcaccgtaagtactcgagcttacccacgtactacg

SEQ ID NO: 223030 - DNA, 401 bp, Gossypium hirsutum
  unsure (1)..(401): unsure at all n locations
gagtcctctcctaccccaacaatgaccggcaaagaagcccaacaacccgaagagctacctgtggtcttcgttcatcgtcgaccctcattcatccttccttttggggaccatttacgttctcaattccatgtcctggacccttatgagtcgcctgagccgtacgactcctttctggcccgtcatgctccctccataagagctctcatgactatgggccccaccctagtttcccgcgagtttctcgaccgtctgcctgttttggagctgatagtggctacaagtgctggccttgatcatatagacctccctgcttgtcgaagccgaggcatcgntgttactaatgctagctctgccttcgcagaggatgcagcggattgtgcttgttgggtgttgatcgatgt

SEQ ID NO: 223031 - DNA, 354 bp, Gossypium hirsutum
tgaattgaaaccctcaaaattccactaaaaaatggcctccacagcttccctctccagcgccgtagccaccacctctttcctccgcggccatccggcgccgaaaaccctaaactcccttcctttcaaccaatctcttttcgggctaaaaccccaacgaaatggccgtctcaccatggcagcatacaaggtgacactgttaacacccgaaggaccccaagaattcgtgtgccccgacgacgtatacatcggtgaccaagctgaggaagaaggcattgatcttccggtctcgtgtagggctgggtcttgttcttcgtgtgccggagtgattaagcaaggctccgtcgatcaatcccg

SEQ ID NO: 223032 - DNA, 220 bp, Gossypium hirsutum
aataaatcccatagaatgtgatactactctattgctttagaaaacacataacattctggcggggttactcttaactgattactgaatcttccacttatttgatcggatgcgtaagaaattatgtatggatgaactctgaacaactgattaatagctataccctattcggtatgtatagttgataagtgcgaccacagctgatgataatgatacatcctgc

SEQ ID NO: 223033 - DNA, 411 bp, Gossypium hirsutum
agtccaatcactcccaatactttcataacatttcacgaacttcactctccagtctccaatggcggctgccgtctccaccatcggtgctgtcaaccgagcaccgttgagtttgaatggatcaggtgccggagcttctgctccaagctcagctttcatggggaacagcttgaagaaagtgagcgctaggttcaacaacaacggcaaggctccagtgggaagtttcatgattgtggctgccaaagaaatcgacgaagacacacagaccgaccaggaccgatggaagggtcttgcttatgatatctccgatgaccaacaagacattaccagagggaaaggtatggtcgactcattgttccaagctcccatgaacgatggtactcactatgctgtcatgagctcctatgagtacat

SEQ ID NO: 223034 - DNA, 410 bp, Gossypium hirsutum
cctgtttcaaatttcagttactaactcaaagcaaagcaaaaggcaaaaaagccatgtcaaagctggtggtgttgcagccaacaaagcagcctcccatctccctcctctcttcctctctttcccacttcaatggcaccaagctctgccaaatccagtacaaaagaaaggtatatcagccaaaaggtgcattgcatgttgcagcatccagcaccaagaagattctcataatgggtggcactaggttcattggtgtgtttttatcaagactccttgtaaaagagggtcatcaggttactttgtttactagaggtaaagcaccagttactcaacaattgcctggtgaatcagacagtgactacgctgagtttaaatcccaagatttgcatttgaaaagagatagaatggacttc

SEQ ID NO: 223035 - DNA, 254 bp, Gossypium hirsutum
gaaagaaaaaaagtaaaagaaaaatggctttggcaagcttggtgagaagaaaggcatgcctggtgtctagaaacctgtcgaattcgcccgcagatgcgttgaaatactctttttcactcagcaatttctcgaggggtttcgcttcaggatctgaagagaacgacgtcgtcgtcatcggcgggggacccggcggctacgtggcagctatcaaggctgcacagctaggtctcaagacaacctgtatcgagaagcgt

SEQ ID NO: 223036 - DNA, 424 bp, Gossypium hirsutum
cccacgcgtccgcccacgcgtccgcatctccccaaatttgcctgaatttccccgctttttcatttcaaagagtttagaagataaaagaaaatgcagggcggcagaggcggaagggatccattctttgaatttggtggtgatccctttggtggttttgggggtcataaaagtttactatccaatttctttaatggaagggacccttttgatgatcctttcttcacacgtccttttgatagcatgtttgaatcaagcttctttggccctggtcataatcctttccctgatatgcacccatctgggttcattgaacaacaagccccagagccaaaacgaccaagcggtcctattatccaagaattagattctgatgatgaaaaagagatgaaagaaaatcccagaaaacatggtaggtctaaggatg

SEQ ID NO: 223037 - DNA, 387 bp, Gossypium hirsutum
ctgcttctctcgtcgagtgaaagaaataagcatggccgtggttggagtattggctttacagggatcttttaacgaacacatagcagcgctaaggaggttaggaatgaaaggagtggaaataaggaagccagagcagcttcaaagtatcagctctcttatcattcctggtggagaaagcaccaccatggctaagcttgctgagttccacaatctttttccagctctgcgggaatttgtgcaaatggggaagccggtttgggggacttgtgcaggtcttatatttttggcaaacaaagctgttggacagaaagacggaggacaggaattagttgggggtctgaattgcactgtccataaaaattactttgggagtcagatccaaagctt

SEQ ID NO: 223038 - DNA, 376 bp, Gossypium hirsutum
cccacgcgtccgcccacgcgtccgcccgagacgcgcacacctcgaccaatacatgcaccaactggagctcgcaggcaaaccagcgatttcagcgatgataaagagatacgccgagcaaaaccgccccgtttcttgcttcatcaacaaccctttcattccttgggcatctgatgttgctgaaagtctcggcatcccttctgcaatgctttgggtgcagtcttgcgcgtgtttcgccgcctattaccattacaatcatgggttagtgacgtttcctactgaaactgatcctgaatttgatgttcagttgccgtccatgccgcttctcaagcacgatgaagttcctagctttttgcacccttcaactccttttgcttac

SEQ ID NO: 223039 - DNA, 362 bp, Gossypium hirsutum
caagctccgatgatcaacgatcactgtttcgacatggagttcactacaccaaaagccttcccttatggctacaactacaactgtaactacaaccctcactgtcttagtcacagtgtatcatcttcttctctggatgttggggtagttccagatggcggtagtacgattacggatgtatcagtcccgtgcgcgaaagtgacggagacgacttatcagactgtgcaactctcgttggcggagagagaagcgagggtgctgaggtacagagagaagagaaagaacagaaaattcgagaaaacgatacgttacgcttctaagaaagcttacgcggaagtgcggccgaagattaaaggaagatttgc

SEQ ID NO: 223040 - DNA, 284 bp, Gossypium hirsutum
cccacgcgtccgaggacgcgtgggtttagctatagcatacactactagtacccactgctagcaatggcttactcaatgatctcatcagctaccattgccactgcctctccggcacaggctaacatggtccgtgctttcaccggcctcaagtctgcctctgctttcccagtcaccacgaaggccaacaacgacattacttctctctgcagcaatggcggcagagtgcaatgcatgcacgtgtgggctgctactgaaaaaacaaagtgggggactttttataccct

SEQ ID NO: 223041 - DNA, 381 bp, Gossypium hirsutum
ctcaaattcagttaacaatttcacagttgttttcttcagtctctctctcagccatggctgcagccatctccaccgtcgctgccgctgccgccgccaaccgagctctgggagtgtcagtcccaacctcagctttcatggggaagaaagtgagctcaagattcaacagcaccaggcaggttccttcgggaagttttaaggtgatggcggcggagaaagagatagacgaagagacacagaccgaaaaggaccgatggaaagggttggcttacgatatttcggacgaccaacaggacattactcgagggaaagggatggtggattccttgttccaagctcccatgaatgaatggactcactatgctgtcatgagttcctatgaat

SEQ ID NO: 223042 - DNA, 404 bp, Gossypium hirsutum
cccacgcgtccggttagctttagcatacactactagtacccactactagcaatggcgtcgggaatgatctcatcggctgccattgccactgcctctccggcacaggctaacatggtcacccctttcaccggcctcaagtctgcctctgctttcccagtcaccaggaaggccaacaacgacattacttctctcgcaagcaatggccgcagagtgcaatgcatgcaggtgtggcctcctactggaaagaagaagttcgagactctctcatacctccccgatcttacacccattcaaatggctaaggaagtagattaccttcttcgctcaaaatgggttccttgcttggagttcgaattggaggagggattcgtgccaccgaagtactctagcttacccacgtacta

SEQ ID NO: 223043 - DNA, 421 bp, Gossypium hirsutum
agtcttttgatctctgccccaaagcaaaaagttgtcatcttttacaatcacaactactggttatttattttcatggctcaaggagattctaacttccagcaagacatggctaaagaggaagaagaacagaggctgaaatacttggagttcgtgcaagtagccgccgttcacgccgctttgtgcttcaccaacctttacctttacgctaaggaaagatcggggccgttgaaacctagcgtcgagaccgttgagggaacggttaagagtgtggttggaccggtttatgataaataccatgatgtccctgttgaattccttaaattcgttgattccaaggtgggtgaatcagtgaccaagcttgatcgtcgagtccctccagtcatcaaacaggtctcaaccgaagccatcttggcagcccaaa

SEQ ID NO: 223044 - DNA, 410 bp, Gossypium hirsutum
tcacggctgacggacatgtggcctttgctgataatgttgatttgctgaaaggtgcctgtggcaaatctcttgcttctttccctcaaggctgtttcttctccacagcagttggagaactaatgagctatgaaaaccctaagaacaaaatcactgctgttcctgcagaagacgaggagatgtggggtgctacatataaggtggaagggccaacagttgcaggcaccgagtctcctatgctcagtttctaaatccatgtgagaaatggtagtaactctgtttggaacatatatatatatatatataggttttgatcttctgtacagctctaacttgtagtgtaatacaagtttgagggtcctaaatttgatatagaccttattaaataagaaactacaaaggacttcatttct

SEQ ID NO: 223045 - DNA, 401 bp, Gossypium hirsutum
  unsure (1)..(401): unsure at all n locations
ccttacttcaccttatccatcatcatctatttccatatacaaaagtaaacccccatttttgttctcttcaactttattgcataccaaaaaaacttacaacaatggcaacagcctcagttacctacactccacccatgttggctgctgccaccactaaccccaagaagaagaccaacaccaatgtgaattacataacaggcttgaattcttttggtgggttgaaagctcataacaaagtggtctcactaggccaacgtgtatgcaccgagcaatcatttgcaaacgttgttagctcactcaaagctccgacaaagggcaagacaggtaaaagcagcggcggtgcactgtcttcaacctgtaatgctgttggtgagatattcangattgcagcaatcatgaat

SEQ ID NO: 223046 - DNA, 414 bp, Gossypium hirsutum
ctaatcctctctgcaattcaaagaagaagaaaaatggcttcttcagctctctcaacactggctctccgcttacccacttcctctaatcctacgaacccttcccatttcaaagccccttccctccaattccctctccgttccctcactcctcctaacctcacccaccgttccaccgccctccgcgccacggccgcccccgaaaaaatcgaaaaacttggcaccgaaatctccaacttaaccctcgaggaagcccgcacccttgttgactaccttcaagagaaactcggcgtctctgccgctgccttcgctcccgcagccgtttcagttgccgcccccggtggtgccgatgccgaagcggctgttgtcgaagagaagaccgagttcgatgtggtgattgaggaggttcctagcaat

SEQ ID NO: 223047 - DNA, 420 bp, Gossypium hirsutum
catctaccctgtcatttaaaaactcagtcactgtccctgaaagaatcaacttcaacaagagtgttttgtacccaaaaaatgtcagccttggtggaaatgtggtttccattagagctcaggtcactacagaagctcctgcaaaagcaccaaaaatttccaagaaagatgacgagggtattgttgtgaacaagttcaaaccaaaggaaccctacattggaaagtgcctcctcaacaccaaaattaccggagatgatgctccaggagagacttggcacatggtttttagtaccgaaggggaagtaccatacagagaaggacaatccattggtgtcatcccagatggtattgacaagaacggaaaaccccacaaacttagattgtactctattgctagcagtgctttgggagattttggcaatt

SEQ ID NO: 223048 - DNA, 421 bp, Gossypium hirsutum
ctaagcgaaaatggcagcagaggaaggccaagtctatggttgccacactattgaatcatggaacgaacagcttcaaaaaggcaacgaatccgaaaaattggtggtggttgatttcactgcttcatggtgtggaccctgccgtttcattgcacctttcctggctgaactagccaagaagttcccttctgttacctttcttaaggtggatgtggatgagttgaaggaagttgctaccgattgggcagtggaggctatgccgactttcatgttcctcaaggaggggaagattgtagacaaagtggtgggagcaaagaaagaagagcttcagcagactctgtcaaagcatatggctgtccccagtactacttcagcttgattttattataattattagttcaactgtttttaatctttcatgttt

SEQ ID NO: 223049 - DNA, 368 bp, Gossypium hirsutum
ggaatttcaatgaattagattcacaagaatcacgaagcctcgcgtttcaatacaaaaatggaaacttttagttctcggattttttagccccattctatttcggtagttcgaccgcgaaatttatttgtttctgtatttccggaatatgagtaaagtttatgattggttcgaagagcgcctcgaaattcaggcgattgcagatgatataactagtaaatatgttcctcctcatgttaacatattttattgtctaggaggaattacgcttacttgttttttggtacaagtagctacaggatttgctatgactttttactatcgtccaaccgttactgaggcttttgcttctgttcaatacataatgactg

SEQ ID NO: 223050 - DNA, 405 bp, Gossypium hirsutum
caaccatctcggctaccaccacccctgcagctcttgttcacaagacattgcccaggattgcatccccagtccccattgggttgccaacaatgggaaagaaggggaaggtgatgatgatgtgtagcatggagaagaagagtgagaatgggtcaaacatggggatgagtgcatcattgctggcagcagcctgtgcagcaaccatgtcaagcccagccatggctctggtggacgagagaatgtccactgaaggaacaggacttccctttggattgagcaacaacctcctcgggtggatcctgtttggtgtgttcggcctgatttgggctctttacttcgtctacacttcctccctggaagaggatgaggagtctgggttgtccctctaaaacccaaaccttatttcct

SEQ ID NO: 223051 - DNA, 420 bp, Gossypium hirsutum
cccacgcgtccgcactactagtacccactactagcaatggcttcctcaatgatctcggcggctaccattgccactgcctctccggcacaggctaacatggtcgctcctttcaccggcctcaagtctgcctctgctttcccagtcatcaggaaggccaacaacgacattacttctctcgcaagcaatggcggcagagtgcaatgcatgcaggtgtggcctcctactggaaagaagaagttcgagactctctcatacctccccgatcttacacccgtgcagttggctaaggaagtagattaccttcttcgctcaaaatgggttccttgcttggaattcgaattagaggagggattcgtgcaccgtaaatactcgagcctacccacgtactacgatggacgctactggaccatgtggaagctg

SEQ ID NO: 223052 - DNA, 417 bp, Gossypium hirsutum
gttctccaccgctacgccgttgcctagctttggcgccaatgttggtcaccgtgttagcatgtcggctgactggatgcctggtcagcctaggcctccttatcttgatggttcagcacctggtgactttggatttgatccacttagacttggtgaggtgccggagaaccttgagagatacaaggaatctgagttgattcactgcagatgggctatgcttgctgttcctggtatattggtgccagaggcattggggtatggaaactgggtaaaggcacaagaatgggcagccgttcctggtgggcaagccacttacttaagcaaccctgttccatggggaactctcccaacaatcttggtcatcgagttccttgccatcgccttcgtcgagcaccaacgcagcatggaaaaagataccga

SEQ ID NO: 223053 - DNA, 424 bp, Gossypium hirsutum
gtgagactcttttgtataactgtagcatatagtactagtaagcagtaatagcaatggcctgctccatgatctcatcggcaaccattgccaccgtgaactgctcctccccggcacaggccaacatggtggcccccttcaccggcctcaagtctgcctctgctttcccagtcactaggaaggccaacaacgacatcacttctcttgcaagcaatggtgggagagtgcaatgcatgcaggtgtggcctcctcttgggaagaagaagttcgagacactctcatacctccccgatcttacacccgtacagttggctaaggaagtagattaccttcttcgctctaaatggattccttgcttggaattcgaattagaagagggattcgtgcaccgtaagtactcgagcttacccacgtactacgatggacg

SEQ ID NO: 223054 - DNA, 409 bp, Gossypium hirsutum
cccacgcgtccgcccacgcgtccgcccacgcgtccgctttggttgcaggatcatatagatgagaaagatttgatggcgtcaacagctaggcttatggagaaaccaagccatgaacagcaacaacagcagcaagtcctcaagtgtcctcgttgtgattcttccaacaccaagttctgctactacaacaactacagcttgtcgcagccaagacacttttgcaaggcttgtaagcgttattggactcgaggtggaactttaaggaacgttccggtgggtggtggatgtaggaagaacaagcgtgtgaagaggccggcggcttcagctaccggtggtgcttctccaacatctggtgcaaatattgctaacactccatctcaacctcagatggatgtgtctttcaacctcaagt

SEQ ID NO: 223055 - DNA, 394 bp, Gossypium hirsutum
gagtgatgaaggtggagatgaacttggacaacgattccaataatctggttcaagctccgacaaacggggactctgagaagctttcgccctccactttatcttctcttttgggttctaaagatcgtgattatcttctctgctccactgcagcagctgctgaaactgatcaagtgaaaatttcggatctagagggcaaggtgatcggaatttacttctcagctaactggtacccaccatgtagaaatttcaaccgagtattgattggtgtgtatgagcagctgaagagcaatggatctaactttgagattgtatttgtgtcatctgatgaagacttggatgccttcaacagctaccgtgaaaacatgccatggctttcgattcccttttctgattt

SEQ ID NO: 223056 - DNA, 371 bp, Gossypium hirsutum
cccacgcgtccgatttgaagaatcatttgttttactatggatcgtttctgataacgggggtgtgtaaatgtgtatggaagcattccaacaaccagtggcattatgactatggacttctcgtgagtgagatagctaataagtataccttagtgaaaaaccttgataaggctgttaatctcaaagatggtaccactcagcttcagcttgagactctcctacaaggtggactgtaatatggtggtgcatatttgaaatatcttcatcctcaagatgctgcatggaagcctacagagtttgacaatgaattctcttactctatcatgtttggacccgacaaatgcggggccacaaacaaagttcacttcatcctg

SEQ ID NO: 223057 - DNA, 416 bp, Gossypium hirsutum
gctaaaccccctttctgtcactgtaacagtgcgatgaatacgggatattcggacaatgaatttgacgtaatcgtcgtaggggcgggcgtcatggggagctccacggcgtaccaactagccaaaagagtccaaaaaacgctactcctcgagcagtttgactttctccaccatcgaggttcctctcacggcgagtcacgcaccatacgagcaacgtaccctgaagactactacttcggcttggtcgatgagtcgtatcggttgtgggagcaggctcaatctgaaatcgggttcaaggtttacttcaaggcccaacagttcgacatgggcccatccgacgccaagagtctcctttctgtgatctctacttgtagaaagaacggcatcccgtaccaagtcctcgatcacccggaagtcgc

SEQ ID NO: 223058 - DNA, 408 bp, Gossypium hirsutum
ctgattcgaaagactggaggcgagtgggcatagttagcccagtcaaagatcaaggctcttgtggatcttgctggacattcagtaccactggagctcttgaggcagcttaccatcaggcatttgggaaagggatctccctatctgagcagcagcttgtggactgtgctggagcttttaacaacttcggttgcaacggggggttgccatcccaagcctttgagtacatcaaatataacggcggcctcgatacggaggagtcatacccttacactgcaacaaatggtctatgcaaattctcttctgaaaatgttggtgttaaagtccttgactctgtcaacattaccttgggtgctgaagatgaattaaagcatgcagttgccatggtccggcctgttagtgtggcatttg

SEQ ID NO: 223059 - DNA, 390 bp, Gossypium hirsutum
cccacgcgtccgacaggctattatatttgctttaatggaccgaagtgagtcagagttgggggagcccctcactcgtcttctgccacttgctcttggtcttttataccttgggaagcaggaaagagtggaggcgactgcagaggtctcaaagacgttcaatgaaaaaataagaaaatattggtgatatgacactactttcttgtgcttacgctggaaccgggaatgttctgaaggtccaaaaccttcttggtcattgtgctcagcatcttgagaagggtgaaacccaccaaggtccagctgtgcttggtatcgccatggtagcaatggctgaggaattgggtcttgatatgtcaattcgttcactagagcatcttttgcagtatggtgagc

SEQ ID NO: 223060 - DNA, 389 bp, Gossypium hirsutum
cataaccaagaactacgtgaccctttctaacattaaggaccctattatgtcggatatggggggacgcaaaagtcaaggaaaatctctcgaatgtgagcttgtattcgccaagatgggaatcaaaccgattatgacgagtgccggataattggcaagtgggaacgccataaaaccagccaagtagatcacgctactgtaccgtgcggacgctgacattatcaataaagggaaaatgcgaaacctctttatcacactatcttcacgctcgagccaatcgtgtggcacgaaccacgccatacacagctgaacaaccaaatggtgaacaccacactcataaacatggcttgttacctcaccaacgttaatataccatgtatgtacaacaagga

SEQ ID NO: 223061 - DNA, 369 bp, Gossypium hirsutum
aaaaaaaaaaaggttaagtgagaaccaacggcaagtgcaggaaaagtgcaaaagttttgtcaagaaaaagtggagatataaaaaggttgataccttaactcaagaaaaaaaaaatggcgttttacgtcgacgaagaagaggtctggaaatgcccgagtcatccttctaagcgtcgccgtactggtatctgtccggtttgtctccgagacaaacttgcttctctttgccccgattgcgcccacgcgcgtccttgctcatgtatcacaacctcttcttcttcctcctcttcctccttctctcgcttctcaactgcggcggccggtggcaacacaggtgtcggttctgttggtcgagtttctaatcttatcg

SEQ ID NO: 223062 - DNA, 416 bp, Gossypium hirsutum
ctttactctatctcctttggattactcttttttcttctacttgtagttatcagaatggggacaataggcaaaactactacggccactatttttctttgtcttcttctgtttcctattgtcttttccacgcctaatgacagatttgttagaattggactcaaaaagagaaagattgaccgaaacaatcggatggctgcacaccttgaatccaaggaggaaaaggcatctgaagcttttcttagaaagtatcgtcttcatgggaacttgggggaatcagaggacattgatattgtggcactaaaagaactacatggatgctcagtactttggtgagattggtattggcactcctacacaaaaacttactgtgatatttgacactgggagttctaatttgtgggttccttcatctaaat

SEQ ID NO: 223063 - DNA, 400 bp, Gossypium hirsutum
ctcttctcaaatcttttttcaatcaactctctccaaagatgcagatcttcgtcaaaaccctgaccggcaagaccatcaccctcgaggttgagagttctgacaccatcgacaatgtgaagtctaaaattcaagacaaggaaggcatcccaccagaccagcagcgtctcatcttcgccggaaaacagctcgaggacggccgtaccttggccgattacaacatccagaaggaatctaccctccaccttgtcctccgtcttcgtgggggtatgcagatcttcgtcaaaaccttaaccggcaagaccatcaccctcgaagtcgagagctccgacaccatcgataatgtgaaagtctaaaattcaagacaaggaaggcatcccaccagaccagcagcgtattattt

SEQ ID NO: 223064 - DNA, 386 bp, Gossypium hirsutum
ctggtgactatggttgggacactgctggactctcagctgatcccgagacctttgctgggaaccgtgagctcgaagtcattcactgcagatgggccatgttgggagctcttgggtgtgttttccctgagctgttggctaggaacggtgtcaagttcggtgaagctgtatggttcaaggccgggtctcaaatcttcagtgagggtggacttgactacttgggtaacccaagcttgatccatgctcaaagcattttggccatctgggcttgccaagttatcttgatgggagccgtcgagggttaccgtattgccggtggaccactcggtgaagtgactgacccattgtacccaggtggtagctttgacccattgggtcttgctgatgac

SEQ ID NO: 223065 - DNA, 362 bp, Gossypium hirsutum
  unsure (1)..(362): unsure at all n locations
cccacgcgtncgaagaattcgggttattgtgtacaaccagcttgcatccagccttcctgcatgcagccatcatgtgtcgcccctacgacatgtttttcaccccgtttcttttcatcaaaatccaaaaaagatcggaaacccaagaacgatatggggaaccaagccagtccattgcccgagcttattgccgagccaacaaatgctcgctccatgtcattcgtgggaacccatgagtacttggcacctgaaattatcaaaagtgagggacatggaagtgctgttgattggtggacattcgggatcttcttatacgagctattgtttggtaaaactcctttcaaagggtctgggaaccgagcgac

SEQ ID NO: 223066 - DNA, 418 bp, Gossypium hirsutum
cccacgcgtccggagttttgaatctagggatttgcgggtggagaagacgagagctcatctgtgtgcttcaaagctcctgtccaggtagaattctcttcttcctttgcgttgtgttctttgttgttcagtcgccatggcttcaaagcggattttgaaggaactcaaggatttgcagaaagatccacccacttcttgcagtgctggtccagtagctgaagacatgtttcattggcaagcaacaatcatgggaccctcagatagcccttatgctggaggtgtgtttttagttaccatccatttccctccagattatcctttcaagcctcctaaggtcacgtttaggaccaaggtcttccatcctaacatcaacagcaatggaagcatttgtcttgatatcctcaaagaacaatggagccct

SEQ ID NO: 223067 - DNA, 354 bp, Gossypium hirsutum
cccacgcgtccgcccacgcgtacggaagaacagaggctgaaatacttggagttcgtgcaagtagccgccgttcacgccgctttgtgcttcaccaacctttacctttacgctaaggaaagatcgggggccgttgaaacctagcgtcgagaccgttgagggaacggttaagagtgtggttggaccggtttatgataaataccatgatgtccctgttgaattccttaaattcgttgattccaaggtgggtgaatcagtgaccaagcttgatcgtcgagtccctccagtcatcaaacaggtctcaaccgaagccatcttggcagcccaaaaagctcccgaggttgctcgtggcgtggc

SEQ ID NO: 223068 - DNA, 403 bp, Gossypium hirsutum
atcactaccattatggcttcggctactgtttctgtagccaaacccaaccttcagattcagaaaaaggaaagggtgttggttttgcagatttctcaagcctacacaactcctctactagccttccctttgccaggaaaacctctgatgacttccattcactcgttgcttttcagacatctgctctaggaagcaataatggcgggtacaggaaagggatggcagaggcaaagctaaaggtggctataaatgggtttggtaggattggcaggaacttcttaaggtgctggcatggccgtaaagactccccacttgatgtcattgccatcaatgacactggtggtgttaagcaagcttctcaccttctcaaatatgattccacccttggcatcttcgctgccgatgt

SEQ ID NO: 223069 - DNA, 374 bp, Gossypium hirsutum
aacacagagaaaaagaaaaccccataatcatggctcgattaacattggtctcctccatcatccttatgctatgctgcgttaccgcagcatcaactttcgaggattccaaccctattcggatggtatccgacggtctccgtggctacgagtcctctgttcttcgtgtcattggccatacacgtcacgctatctccttcgcccgctttgcttacaagcatggaaggaagtacgagacggtggaggaaatgaagcttcggtttcagattttcaaagagaatttggatttgatccgatccactaacaagaaaggcttatcttacactcttgctgttaatcggtttgctgattggagctgggacgagttccaaaaacac

SEQ ID NO: 223070 - DNA, 364 bp, Gossypium hirsutum
  unsure (1)..(364): unsure at all n locations
cccacgcgtncgcccacgcgtccggaatccaccaacattggattctgcaagtggggctggtcacgttgagaatcttgctggtctcaacacttatgtttctgggtctcttcaatctaagcttgctgtttttcttatctctgatattttcggatatgaggctccaaactttagaaagctcgcggacaaggttgcagccgctgggttctatgtggtggctcctgacttcttttatggagaaccctatgaccctaataaccctgatagacctctatctgtttggataaaggatcatggaccggataaaggttacgaggatgcaaagctcgtaattgacgctttgaaaaagtaaggggtttcatccatt

SEQ ID NO: 223071 - DNA, 397 bp, Gossypium hirsutum
cccacgcgtccgctaatctttgatgatcatgtgttttttttaattccttttttttttcagggaatatctataacattcctctttttcatattaacttcatattgatatacatagaaaattgcactattaggaactgggatcagtttgaaaccaatcaaaagctatttggtgtaaaaagtactttcaatgaggagctttacacaacaaaacttgagagaggtcctcaaacgagagagttggagaaggaagcaatgagaatagcaagagagattgagggtgaggagacccgggacctacatttagcagaggagagaggcttaaatcttcatgataattttgatattgacgaggagatgagatattcctcggtttataagggtagagggcttgatgatag

SEQ ID NO: 223072 - DNA, 420 bp, Gossypium hirsutum
gtcaacctcggccatgatggtgaagcttgccaaaagccaaggattgaagcctacagaggtgggcgccatgcaagattgcgtggaggaattggaggacacgatagatgagctgagaaagtcaatcagcgagatgggtcagattaaaggctccaattttggactaatgattaacgatatacagacatgggttagcgctgctttgacggatgagaacacctgcgccgacgggtttggagggaaaaacatgaacggcagtataaagactgctgtgagatccaagattgtcacaatcgctcatttgacaagtaatgccttggctttggtcaacagctatgcttcatttcatggttagctatttaatcaactgtacaggggaaatttagtcattatttacggtagcaattgtatttatgggatttt

SEQ ID NO: 223073 - DNA, 408 bp, Gossypium hirsutum
gtttcatatggtgggggttctacagctggaggcattcagtcatggcatatggatgatttgttggggctaactggcttaaaccaaagctttggttacatggataatgagttatctaaggctgatagtggcaagtgcggagactccgatggctcaccgttcttgcgacctgctgaggaagaggtctttgatgatgaatacatgggtcaggtgccggaatcccactgggcagtaccacaagtgccttcacctcctacagcctcagggttgtattggcctaaagattctcacaatcaatctgatagcgcggtatttgtccccgacatatcctggtctagtgtggaaaaccctttccactagtcgcatatcggctccaccccgtaacaatggcgacaaattcacagtcagatc

SEQ ID NO: 223074 - DNA, 420 bp, Gossypium hirsutum
  unsure (1)..(420): unsure at all n locations
cccacgcgtccgcccacgcgtccgaagaaatgcaacaagtcatactcaagtaaagatgtatgtctggacctgactgtcactactggattgagaaactacactgaagtcaaacctgttaggacagagctattccggagtcctcttgtatcgtttctctatgaaagaggctggcgtcaaaattttaatctcagtggcttccctggagctgatgaagagttcagaatggctcangagtactttaaacccgcagaaggtggcactttagtggatgttagctgtggaagtggtttgttttcccgaaaatttgctaaatcagggacatattctggtgttattgcactcgatttttctgaaaacatgctccggcaatgtaatgatttcattgagcaagatgcatctcttttagctagcaatattgct

SEQ ID NO: 223075 - DNA, 391 bp, Gossypium hirsutum
cggacgcgtgggtttgaattgaaaccctaaaaattccactaaaaaatggcctccacagcttgcctctccaccgccgtagccaccacctctttcctccgcggccatccggcgccgaaaaccctaaactcccttcctttcaaccaatctcttttcgggctaaaaccccaacgaaatggccgtctcaccatggcagcatacaaggtgacactgttaacacccgaaggaccccaagaattcgtgtgccccgacgacgtatacatcgttgaccaagctgaggaagaaggcattgatcttccgttctcgtgtagggctgggtcttgctcttcgtgtgccggagtgattaagcaaggctgcgtcgatcaatccgacggtgatttccttgatgatgacc

SEQ ID NO: 223076 - DNA, 422 bp, Gossypium hirsutum
gtaacattaccaatggcaaccctgtctagcgtgaacctcgtaaccccaagaaccatagccaatggaccagacgtcccaaccctcaaggtcccatgccttaaccggccttggaaaagggtatccccaatgaagctacgtgtcgggcctgttagagctgcaccggatggaatatcggagaaggtggagaaaagtataaaagaggcacaagagatgtgttcggatgatccggcgagtggcgagtgtgtggcggcttgggacgaagtggaagagctgagtgcggcggctagccacgctagggacaagaagaaagacgatgatcctttggagaattactgtaaagacaacccggagaccgatgagtgtcgtacttatgataattgaaaatgtttgtttttttttctagtttcttagattatagttgg

SEQ ID NO: 223077 - DNA, 358 bp, Gossypium hirsutum
aagaaatcgacgaagacacacagaccgaccaggaccgatggaagggtcttgcttatgatatctccgatgaccaacaagacattaccagagggaaaggtatggtcgactcattgttccaagctcccatgaacgatggtactcactatgctgtcatgagctcctatgagtacattagccaaggccttcgcacatacgacttggacaacaacatggatggattctacattgccccagctttcatggacaagcttgttgttcacatcaccaagaactacatgacccttcctaacattaaggttcctcttatcttgggtatttggggaggcaaaggtcaaggaaaatctttccaatgtgagct

SEQ ID NO: 223078 - DNA, 424 bp, Gossypium hirsutum
gagactcttttgtatacctgtagcatatagtaatagtaagcagtaatagcaatggcctcctgcatgatctcatcggcaaccattgccaccgtgaaccgctcctccccggcacaggccaacatggtggcccccttcaccggcctcaaatctgcctctgctttcccagtcaccaggaaggccaacaacgacatcacttctcttgcaagcaacggtgggagagtgcaatgcatgcaggtgtggccgcctcttgggaagaagaagttcgagactctctcatacctgcccgatcttactcccgtacagttggctaaggaagtagattaccttcttcgctctaaatggattccttgcttgggaattcgaattagaggagggattcgtgcaccgtaagtactcgagcttacccacgtactacgatggacgc

SEQ ID NO: 223079 - DNA, 410 bp, Gossypium hirsutum
  unsure (1)..(410): unsure at all n locations
ccacgcgncgaaaggcagtcctaaaatctgctctctcactcctctatttaaccatttctgtcttgtcctcgccccttccctagcaagctacatttccatggccccccctgaattggttcaacccagtgataaaacaaacgttttcgctaaacaagtcagtttgcgtaatcgtgcatatgttacgttcttggccggaaatggggactacgtgaaaggcgttgtagggttagccaaagggttaaggaaagtgaaatcggcgtaccctttagtggttgccgttttacccgacgtgcctgaggagcataggcggatcctggagaaccagggttgtatcgtcccgagagatcgaaccagtttacccgcctgagaaccagacccagttcgccatggcctattacgtcatcaattac

SEQ ID NO: 223080 - DNA, 440 bp, Gossypium hirsutum
ctcttttgtatacctgtagcatatagtaatagtaagcagtaatagcaatggcctcctccatgatctcatcggcaaccattgccaccgtgaaccgctcctccccggcacaggccaacatggtggcccccttcaccggcctcaaatctgcctctgctttcccagtcaccaggaaggccaacaacgacatcacttctcttgcaagcaacggtgggagagtgcaatgcatgcaggtgtggccgcctcttgggaagaagaagttcgagactctctcatacctgcccgatcttactcccgtacagttggctaaggaagtagattaccttcttcgctctaaatggattccttgcttggaattcgaattagaggaaggattcgtgcaccgtaagtactcgagcttacccacgtactacgatggacgctactggaccatgtggaaactg

SEQ ID NO: 223081 - DNA, 359 bp, Gossypium hirsutum
gagactcttttgtataactgtagcatatagtactagtaagcactaatagcaatggcctcctgcatgatctcatcggcaaccattgcacaccgtgaactgctccttcccggcacaggccaacatggtggcccccttcaccggcctcaagtctgcctctgctttcccagtcactatgaaggccaacaacgacatcacttctcttgcaagcaatggtgggagagtgcaatgcatgcaggcgtggcctactcttgtgaagaagaagttcgagacactctcatacctccccgatcttacacccgtacagttgggtaaggaagtagattacctgcttcactctaaatggattacttgcttggaat

SEQ ID NO: 223082 - DNA, 383 bp, Gossypium hirsutum
  unsure (1)..(383): unsure at all n locations
cccacgcgtccgcccacgcgtccgaagtagagcttctttctatctatatccttatcagctgtcaaagatggcaggaatcgcctttggtcgcttcgatgattccttcagtttggggtctgtcaaggcctaccttgctgagtttatctcaactttggtgtttgttttcgccggcgttggctctgccattgcttacaacaagttgacaactgatgcagccctagatcccgatgggctagtcgccattgctgtttgccacggatttgctctctttgttgcagtggctatcggtgccaacatctcaggtggccatgtcaaccctgcagtaacttttgggttagctcttggtggccaaatcaccatactcactggcatctnttactgga

SEQ ID NO: 223083 - DNA, 405 bp, Gossypium hirsutum
cccacgcgtccgacaatgtctaaggaagtgagtgaagaaggacagggtcgtaaggactatgtggaccctccaccggcacctctgattgatatggctgaactcaagtcatggtctttttacagagccctcatagctgagttcatagccactctcctcttcctctatgtcactgttgctaccgtaattggtcacaagaaacaacaagatgcatgtgatggtgttggtctcttgggtattgcatgggctttcggtggcatgatctttatccttgtttactgcactgccggtatctcaagtggacacattaaccctgcggtgacttttgggttgtttttggcccgtaaagtatctctcatcagggctgtggcttacatggtgtcacagtgcttgggtgctatatgtgga

SEQ ID NO: 223084 - DNA, 422 bp, Gossypium hirsutum
gttggagtgaatgctgacacctacaacccagatgagcctatcatcagcaatgcttcttgcaccaccaattgccttgctcctttcgtcaaggttctggaccagaagtttggtatcatcaagggcaccatgactaccactcactcgtacaccggtgaccagaggctacttgatgctagccaccgagacctcaggcgtgctagagccgcagctctcaacatcgtcccgacttcaactggtgcggcaaaggccgtggcccttgtactccctactctcaaaggcaaacttaacggcatcgcattgcgtgtaccaacaccaaatgtgtcggtggtggacctagtggtccaggtttcaaagaagacgtttgctgaagaggtgaacgctgctttcaaagagagtgcagagaaagagctacagggtatact

SEQ ID NO: 223085 - DNA, 423 bp, Gossypium hirsutum
gcctttgaattgaaaccctcaaaattccacttaaaaaatggcctccacagcttccgtctgcaccgccgtagccaccacctctttcctccgcggccacccggccccgaaaaccctaagctcccttcctttcaaccaatctcttttcgggctaaaaccccaacgaaatggccgtctcaccatggctgcatacaaagtgacactgttaacacccgaaggaccccaagaattcgtgtgccccgacgacgtttacatcgttgaccaagctgaggaagaaggcattgatcttccgttctcgtgtagggctgggtcttgttcttcgtgtgccggaatgattaagcaaggctccgtcgatcaatccgacggtaatttccttgatgatgaccagattgctgcaggttttgtcctcacttgtgttgcttaccc

SEQ ID NO: 223086 - DNA, 420 bp, Gossypium hirsutum
tttagctatagcatacactactagtacccactactagcaatggcttcctcaatgatctcatcggctaccattgccactgcctctccggcacaggctaacatggtcgctcctttcaccggtcaagtctgcctctgctttcccagtcaccaggaaggccaacaacgacattacttctctcgcaagcaatggcggtagagtgcaatgcatgcaggtgtggcctcctactgggaagaagaagtttgagactctctcatacctccccgatcttacacccgtgcagttggctaaggaagtagattaccttcttcgctcaaaatgggttccttgcttggaattcgaattggaggagggattcgtgcaccgtaagtactcgagcttacccacgtactacgatggacgctactggaccatgtggaagct

SEQ ID NO: 223087 - DNA, 416 bp, Gossypium hirsutum
  unsure (1)..(416): unsure at all n locations
atgtcatccaaatcccactgcaacggtgagagtgagagtgaaagagaaagcttaggttccacgctgctaaattataagcgaaaatggtgaatttcatgctgaagatctctgccgacctcgaaaacctcactaacctccagcctcagggcggctgtgacgatccttcctttccctatctcttcaagctgaagtgtgggaggtgtggagagttgagtcagaaggaaacatgtgtgagtttgggcgatactgttcctcttctacaaggcaagggaaccaccaatcttgttcagaagtgcaaattttgtatgagggaaggaactgtaacaatgatcccaggcaaaggtcgaccgctgactcangaagactgtgaaggcggaaaatttgcacctttgatgctttttgactgcaggggttat

SEQ ID NO: 223088 - DNA, 424 bp, Gossypium hirsutum
aaaccctcctttcctctcctctcctctcctctacaaggaaatggcaatttcatcaacagcggcggccactgccgcttcttctaagcttagatacccacacgcctcccctttcccaactcactcctcaaccaccacctctgcctttttctcctcaattccctctaaactaacccctacccacctctcctcttccttcctccctcctttcctcactaccgtcgccaccacttccgtattccctcgccgtcgcggttctttcaccgtcaaagctgcccgtggcaaattcgaacgcaaaaagccccacgtcaacatcggcaccatcggccatgtcgaccacggcaaaaccaccttaactgccgctctaactatggccttagcctccatgggtaacagtgccccaaaaaaagtacgacgaaattgatgc

SEQ ID NO: 223089 - DNA, 401 bp, Gossypium hirsutum
caacaaaatcaactgcttcacaatggcctctacaaccatggctctttcttccccatcattcgccggtaaggcagtgaagttctccccttccatccctggtgactatggttgggacactgctggactctcagctgatcccgagacctttgctaggaaccgtgagctcgaagtcattcactgcagatgggccatgttgggagctcttgggtgtgttttccctgagctgttggctaggaacggtgtcaagttcggtgaagctgtatggttcaaggccgggtctcaaatcttcagtgagggtggacttgactacttgggtaacccaagcttgatccatgctcaaagcattttggccatctgggcttgccaagttatcttgatgggagccgtcgagggctaccgta

SEQ ID NO: 223090 - DNA, 425 bp, Gossypium hirsutum
gtgagactcttttgtataactgtagcatatagtactagtaagcagtaatagcaatggcctcctccatgatctcatcggcaaccattgccaccgtgaactgctcctccccggcacaggccaacatggtggcccccttcaccggcctcaagtctgcctctgctttcccagtcactaggaaggccaacaacgacatcacttctcttgcaagcaatggtgggagagtgcaatgcatgcaggtgtggcctcctcttgggaagaagaagttcgagacactctcatacctccccgatcttacacccgtacagttggctaaggaagtagattaccttcttcgctctaaatggattccttgcttggaattcgaattagaagagggattcgtgcaccgtaagtactcgagcttacccacgtactacgatggacgc

SEQ ID NO: 223091 - DNA, 423 bp, Gossypium hirsutum
cccacgcgtccgggaaaatcatgggtgccaaagttctcttcttctttgctttgctggccttttcagctgtgtcggcatttgcacaggatgaggaagaccaaggtcttgttatgaacttctacaaggattcttgtcctcaggctgaagacattatcaaggagcaagttaagctactgtacaagcgacacaaaaacactgctttttcttggctgagaaacattttccatgactgtgctgtccagtcatgtgatgcttcactgctgctggactccacaagaaggagcttgtctgagaaggagacagacaggagctttggcctaaggaatttcaggtacattgagaccatcaaagaagctgtagaaagggaatgtcctggagttgtttcttgtgctgatatccttgttctgtctgctagagaaggca

SEQ ID NO: 223092 - DNA, 403 bp, Gossypium hirsutum
ctctctcgtaccgtgatacactttgtaaacctccactatccgacaacaatgggttcaacgggtgaaaccgaaatcactcctacccaaacctcggatgaggaaaacaatttattagccatgcagatcaccaaggactcactccttgccatgggcctcaattctgacatacaaattgacctgctgactatcatgtccgaacctaagactaatgctaccctctaccaaaaagaattgtcttaccatttcctcaccataaatcgagatgtaactgtgatgcttgaccgaatgtcgctcattatgggtatctactgcatactgacttgctccttgcgcactatctctgatggcgaacgcgagagactctatggtcttggccctgtctgcaaattcttgaccaacaatg

SEQ ID NO: 223093 - DNA, 424 bp, Gossypium hirsutum
gttcctggaatcatgttcttgtctggcggacattccgaggttgaagcaaccctcaacttgaacgcaatgaaccaatctccaaacccatggcacgtctcgttctcgtatgccagagctctccagaacacttgcttgaagacatggggaggcagacccgagaacgttaaggctgctcaggatgcactccttgtccgtgccaaagccaactcactcgctcagctcgggaaatacaccggcgagggagaatcagaagaggccaagaaaggaatgttcgtaaagggctacgtctactaagctgctgcaaacaaagctttagctgagatgatggagatttcatgatatggtttctttctctttgtgttgaatgttttataggctctggagactactttttgttctggattgcaatgtactgttaaataaa

SEQ ID NO: 223094 - DNA, 421 bp, Gossypium hirsutum
  unsure (1)..(421): unsure at all n locations
ctgcaaagatgtcacatnaccagcggccaatcaagtgagggcatctaaatactcatcaagcaccaaggctctcgtcgtaaggcttcttggaaggatccagaaggtcgcgtcatctccaccaccacccgagacgccgctgtctcacagcttaaacttctccgcgacgacatcgtttccaacaaggctaagttcgacgaggttgcctctcgctactccgattgcagctccgctaaacgtggcggtgatctcggtccttttggtcgaggccagatgcaaaagccatttgaggatgcaacatataatcttaacataggcgagataagtgacattgtggatactgatagcggtgttcacatcataatgagaactggttgatcattagtgatggagcctggatatcgtgagcaattagttcagtctt

SEQ ID NO: 223095 - DNA, 426 bp, Gossypium hirsutum
aaaaattccattaaagtccctctggtaacatccaaggcaagaactctcatttcgtttctgcacaactcaaacctctcaaatctttttcagttttcatttccccatccaaacgacgccctaaaccaaaagtcatggccaccccttccgcacgtgacgaaaacgtttacctggcgaaactcgccgagcaagccgagcgctacgaggagatggtcaagttcatggagaacgtcgtctccgccgtccctgcccccgacgaactcaccgtcgaggaacggaacctcctctctgtcgcctacaagaacgtgatcggcgctcgccgtgcctcttggcggatcgtttcctccatcgagcagaaagaggaaggcgtggcaacgccgaccacgtctctgtcatccgtgagtacagggccaagatcgaggccgaatt

SEQ ID NO: 223096 - DNA, 427 bp, Gossypium hirsutum
ctcaaattcagataacaatttcacagttgttttcttcactctctctctcagccatggctgcggccatctccaccgtcgccgccgctgccgccgccaaccgagctctgggagtgtcagtcccaacctcagctttcatggggaagaaagtgagctcgagattcaacaacaccaggcaggttccttcgggaagttttaaggtgatggcggccgaaagagatagacgaagagacacagaccgaaaaggaccgatggaaagggttggcttacgatatttcggacgaccaacaagacattactcgagggaaagggatggtggattccttgttccaagctcccatgaatgatggaactcactatgctgtcatgagttcctatgaatacatcagccaaggtcttaaaacgtacaatttggacaacaacatggatg

SEQ ID NO: 223097 - DNA, 425 bp, Gossypium hirsutum
tgaacaaccaaatggtgaacgccacactcatgaacatcgctgataaccccaccaacgttcagctccccggtatgtacaacaaggaagagaaccctcgtgttccgatcattgtcaccggtaacgatttctcgacgctgtacgcgccgctcatccgtgacggtcgtatggagaagttttactgggcacccaccagggaagataggatcggtgtttgcacaggtattttcaggaccgacaatgttcccgttgatgacattgttaagcttgttgacaccttcccgggccaatccattgactttttcggtgctctgagggccagagtttacgatgacgaagtgaggaaatggatcggagaggtaggagtcaatagtgtcgggaaaaagctcgtgaactcgagggaagggccaccatctttcgagcaacct

SEQ ID NO: 223098 - DNA, 426 bp, Gossypium hirsutum
gaaacttgcttaaaggacaaacagttggtgtaattgtagctggtcgtattggatctgcatacgccagaatgatggttgaagggttcaaaatgaacttaatttactatgatctttaccaatcaacacggctagagaagtttgtcacagcttatggtgagttcttgaaaagcaatggagagcaacctgttcactggaaaagagcatcaagtatggatgaggtgctccgggaggcagatgtgataagtcttcacccggtcttggataaaaccacctatcatctgatcaacaaagaaagccttgcaacaatgaagaaggaagcaatacttgtaaactgtagcaagggcccggtgattgatgaagtagctcttgttgagcatctgaagcaaaatcctatgttccgagttggtcttgatgtctttgaggatg

SEQ ID NO: 223099 - DNA, 426 bp, Gossypium hirsutum
tatgcaccggttaatgcaatgaagctattacattcaagtgatcagaaaagccaatggccggccaccggagcaaagggttcactgttaaggtacgcactcgcacaccagcagctcgaggccgtcattcaattggaatacaccattggattccatgatgggtacattcaagtgaacgcacgtgtcgataacttacgcttccacgtggccagactagggttcagcaaaaaaaacgacgaaatggatgatttcttgaacgagaaacacttcccgtcgaggatccgagtttgggtcggaccggaagtcgggtcaacgtacgtgtccgggttaaccttgggtcggtccacgaacaatggtgaaaacgaagtcgaaacacaaaggatccttaaagggagattcgggaaatattcaaaggattcctcccatgtt

SEQ ID NO: 223100 - DNA, 425 bp, Gossypium hirsutum
cccacgcgtccgcccacgcgtacgtggttatttatcagccatgttttggtgtagggggggcatcaaaatctcgacagctaccaaagctaagagccccatcaccactaaccttatactaacttctttatcccatttcagcaccgccaaccaacccccagttgcggctcaaccttgaggtcttggacccaccaaagcagatgagaaaccaagggtggtggtgttaggctcaggttgggctggttccaggctaatgaaaggcttggaccctaagctgtatgacatcgtttgcgtttcccctaagaatcatatggagtatactcccctcttggcttccacttgtgttgggactctcgagttcaggtacgtcgctgaacccatttacaggattcaaccctccatttgttcagcacctggctcctattttt

SEQ ID NO: 223101 - DNA, 426 bp, Gossypium hirsutum
cccacgcgtccggcccacactctcaaattttgtttacaatttcacagttgttttctgggggctctctctcagccatggctgcagccatctccaccgtcgctgccgctgccgccgccaaccgagctctgggagtgtcagtcccaacctcagctttcatggggaagaaagtgagctcaagattcaacagcaccaggcaggttccttcgggaagttttaaggtgatggcggcggagaaagagatagacgaagagacacagaccgaaaaggaccgatggaaagggttggcttacgatatttcggacgaccaacaggacattactcgagggaaagggatggtggattccttgttccaagctcccatgaatgatggaactcactatgctgtcatgagttcctatgaatacctcagccaaggtcttaaaacgt

SEQ ID NO: 223102 - DNA, 443 bp, Gossypium hirsutum
ctctctcagccatggctgcagccatctccaccgtcgctgccgctgccgtcgccaaccgagctctgggagtgtcagtgccaacctcagctttcatggggaagaaagtgagctcaagattcaacagcaccaggcaggttccttcgggaagttttaaggtgatggcggcggagaaagagatagacgaagagacacagaccgaaaaggaccgatggaaagggttggcttacgatatttcggacgaccaacaggacattactcgagggaaagggatggtggattccttgttccaagctcccatgaatgatggaactcactatgctgtcatgagttcctatgaatacctcagccaaggtcttaaaacgtacaatttggacaacaacatggatggtttctacattgctcctgcattcatggacaagcttgttgttcacatcaccaagaac

SEQ ID NO: 223103 - DNA, 419 bp, Gossypium hirsutum
gctttttccccttattttctctccataagatgtctttttctcttcattctcccaatatcttcatttgaagcagctatgtcttttagaggaggaaatgcatcatcgggcatgggagtggctgaacacagcaaaagcacgtacctggaactgcagagaaagaaggtgttccgatatgttatcttcaagattgatgagaagaaaaaggaggtcatagttgaaaagactggaggtccgacagagagctatgatgatttcgcagcctcattgccggagagtgactgccgctatgcagtttatgacttcgattttgtgacttccgagaattgtcagaagagcaagatcttttttattgcgtggtctccttctgtttcgaggatccgttccaagatgctttatgcaacatcaaaggacaggttccg

SEQ ID NO: 223104 - DNA, 427 bp, Gossypium hirsutum
ccccattatgatgagtgccggagaattggaatgtggtaacgccggagaaccagccaagttgatcaggcaaaggtaccgtgaggccgccgacattatcaagaaagggaaaatgtgttgcctctttatcaacgatctcgacgctggagccggtcgtatgggaggaaccacacaatacacagtgaacaaccaaatggtgaacgccacactcatgaacatcgctgataaccccaccaacgttcagctccccggtatgtacaacaaggaagagaaccctcgtgttccgatcattgtcaccggtaacgatttctcgacgctgtacgcgccgctcatccgtgacggtcgtatggagaagttttactgggcacccaccagggaagataggatcggtgtttgcacaggtattttcaggaccgacaatgttcccgtt

SEQ ID NO: 223105 - DNA, 421 bp, Gossypium hirsutum
ttaagtcagtgagtttattagtttacctagaagttaatcatggctcaaattaagaggatggagtgccaactcgagatcaagtcctcagctgataagttctttgatgcctacaagaccaaagcccagcttatgccaaaaatggccaatcaagtcgttagagatgtaaaacttgatgagggtagtggttgggattccgagggttcgactagacaatggtattttgttgccggaggtaaacttgagacttgtaaggaaatgatggaaaaggtgaatgataaagacaggactattgattacaaattggtggaaggcgaaatcatgaaagctttcaaaagctggaactacatccgtaacgtgatgccgatcggggagggaagattgctgaaatggactatggaatttgaaaagcataatgatgatg

SEQ ID NO: 223106 - DNA, 400 bp, Gossypium hirsutum
  unsure (1)..(400): unsure at all n locations
aaaacccggcgcgacccacgcgtacgcacaaaatctcctcccccaatcaatcctttaatataacaaaaaaaaaaaacaacagcccgcnctttcttatatggtgcgtgcgccccacaccaatggagatggtaacgaatttggcatccgagagaccggttgtgatcttcaccaagagttcttgttgcatgtgccatacaatcaagacccttttctacgaatttggagtcaatcctacagtctacgatctcgatgagatccctagaggatttgaactctaacaagctcttttaagatttggttgtagcccttcagttcctgtcgtgtacattggtggtgaatttgtcggtggagccaatgaactcatcagccttcaccttaacccaaccttaatccctatgct

SEQ ID NO: 223107 - DNA, 423 bp, Gossypium hirsutum
gttctagggtttttgttagcagctccgacagatgaaatgggaaaaggaactggaagctttggaaagcgaaggaataagacccacacactttgcgttcgatgtgggcgccgtagcttccatctccagaagagccgttgcagtgcttgtggctaccctgccagccgcatccgaaaatataactggagtgtgaaggctattagaagaaagacgactgggacaggccgcatgaggtacctccgtcatctgccccgaaggttcaaaactggttttagagaaggcactcaagcaactccaaggaagaaggcagctgttgctgcatcttaagttggttttggtgttttgtttttgagatttctgaatttacacaaactaagtttttgtgatttttatcatcattttgtacttttattattacaacctaat

SEQ ID NO: 223108 - DNA, 426 bp, Gossypium hirsutum
gtgagactcttttgtataactgtagcatatagtactagtaagcagtaatagcaatggcctcctgcatgatctcatcggcaaccattgccaccgtgaactgctcctccccggcacaggccaacatggtggcccccttcaccggcctcaagtctgcctctgctttcccagtcactaggaaggccaacaacgacatcacttctcttgcaagcaatggtgggagagtgcaatgcatgcaggtgtggcctcctcttgggaagaagaagttcgagacactctcatacctccccgatcttacacccgtacagttggctaaggaagtagattaccttcttcgctctaaatggattccttgcttggaattcgaattagaagagggattcgtgcaccgtaagtactcgagcttacccacgtactacgatggacgct

SEQ ID NO: 223109 - DNA, 405 bp, Gossypium hirsutum
ccaccgccgtcgatctcgttccttatcctcgttttcaaacaagctcgaaaaagatggccaacgctgcatcgggaatggctgtgcatgatgattgcaagttgaagttcttggagctcaaggcaaaaagaacccaccgcttcattgttttcaaaattgaggagaagcaaaagcaagttattgtggagaagcttggtgaaccaaccgaaagctatgaggattttactaaatgtctccccgctgatgaatgtcgatatgctgtgtacgattttgattttctaacggccgagaacgtaccgaagagcagaatctttttcatagcatggtctcccgacacgtcaaggatcaggagcaagatgatttacgccagctccaaagatagattcaagcgagaactggatggaattc

SEQ ID NO: 223110 - DNA, 423 bp, Gossypium hirsutum
cccacgcgtccgaaaagaaaaatggcttctgcttccgctactctcctcaagtcttcacctattatcgacaagtccgagtggattaagggtcaaaacctccgccacccttcggtttgttttgtacagtgcaaccctacatcggccgcctttaccgtccgtgctagttcatatgccgatgagcttgttaagaccgcgaaaactgttgcatctccaggtcgtggtattttggccatggatgaatcaaatgctacatgtgggaaacggcttgcctcgattggtctcgagaataccgaggcaaaccggcaagcttaccgtacccttctcgtgtctgcccctggcctcggtgactacatctcgggagctatccttttcgaggagactctctaccaatctaccatcgatgggaaaaagatggtcgatgtt

SEQ ID NO: 223111 - DNA, 423 bp, Gossypium hirsutum
cacactctcaaattcagttaacaatttcacagttgttttcttcagtctctctctcagccatggctgcagccatctccaccgtcgctgccgctgccgccgccaaccgagctctgggagtgtcagtcccaacctcagctttcatggggaagaaagtgagctcaagattcaacagcaccaggcaggttccttcgggaagttttaaggtgatggcggcggagaaagagatagacgaagagacacagaccgaaaaggaccgatggaaagggttggcttacgatatttcggacgaccaacaggacattactcgagggaaagggatggtggattccttgttccaagctcccatgaatgatggaactcactatgctgtcatgagttcctatgaatacctcagccaaggtcttaaaacgtacaatttggaca

SEQ ID NO: 223112 - DNA, 422 bp, Gossypium hirsutum
cccacgcgtccgcccacgcgtccgatcgctgtctccaatggccctcgctaacccactttcacctccatcatcatgtaccaaaggtccgggtcctgtaatccctgcaacacccttactaagtttccttgtacgtgtccaagaaactgctttgcaaacttatgggaaatcgaattttgatcctaaacactatgtagacttaccgttaaagtctaatctttccaccaccgtggaagcattcgataaacttcccaagacggaagatgggtcagtttctgttaaggattttgaagcgtttatcgggaagtactttactgatgcaggggatgatgttgtatatgccgagccagtggattttgtccctgagccgcatggctttttgcccaaggtggagagcccagaggtgagaggttgggcattggaag

SEQ ID NO: 223113 - DNA, 411 bp, Gossypium hirsutum
aaaagccgttcgaaaagcattttttgtatgatttatggctgcaaccacgctttccgccgggctaaacggtctgactaacggcaccactattcgcagaccgatggtcaaactgccgaccaaaacctacacttatttttaacctacattgaccgagccctggacagccacctcaatcgcccactcactgcgaatattagcagctatagctggatcacgagctgatgattcagctgattatgagatgtctgttgagaacgctctcaagctcgttgtggtgttcgaaaatgcttcttttgatgatattcttgatgctatgaattcgaccgaggactctattgaggatgaccaaaaagctgtcgatcaagctgtggctgagtatgacatgttgcttatgctgagcttaatgcaacg

SEQ ID NO: 223114 - DNA, 417 bp, Gossypium hirsutum
aacttaatcatggctcggttgacgttggtgttctccatcatccttctgctatgctccgtcgccgccggatcaactttcgaggactccaaccccatccagatggtatccgatggcctcagcggcttcgaatcctccgttcttcgtgtcatcggtcacactcgtcatgctctctccttcgcccgttttgcatacaagcatgggaagaggtatgaaaacgtggaggagatgaagctacggtttcagattttcaaaggcaacttggatttaatcagatccactaacaagaagggactgccttacactcttgctgtcaatcagtttgctgattggagctgggaagagttccagaaacacagattgggggctgctcaaaactgctctgctaccacaaagggcaatcaccagctcactgatgtc

SEQ ID NO: 223115 - DNA, 420 bp, Gossypium hirsutum
cccacgcgtccgggaacccaaggacagaagactcttttaacatttcaccgcaaagatggagataacaaatgtgagcgagtatcaagaaattgcgaagcaaaagttgccaaagatggtgtatgactactacgcatctggtgctgaggaccaatggacattgcaagagaatagatttgctttcactaagatactgtttcgtcctcgtattctcatcgatgtaagcaagatagacatgaccacaactgtgttgggtttcaagatatcaatgcctatcatgattgccccaactgccatgcaaaaaatggctcatcctgaaggggagtatgcaacagctagggctgcatctgctgctggaactatcatgacattatcctcatgggcaacttctagtgttgaggaggttgcttcgacaggacccgg

SEQ ID NO: 223116 - DNA, 422 bp, Gossypium hirsutum
ctctctctctctctctctcatggattctctttctctcttctgtaccggggctcttttagccggcggtctgtactggttcgtttgcgttttaggccccgcagagcagaagggcaagcgagctgtcgatctctccggcggttccatttccgctgaaaaggttcgagacaactacaagcagtattggtctttcttccgccgcccaaaggagatcgaaaccgccgagaaagtcccggacttcgtcgacactttttacaatctagtcaccgatatatacgaatggggctggggtcaatcctttcatttctctccttccatccccgggaaatctcaccgtgacgcgacgcgtctccacgaagagatggccgtcgatctcatcgacgtcaaacccggagaccgaatcctcgacgtaggatgcggggtag

SEQ ID NO: 223117 - DNA, 427 bp, Gossypium hirsutum
ggcatcagcctcagctttgttaacccccatcttcaccaccaccctccaaaacaaacatggcagccgccacaacatcgccaccccatcgttccatggcctcaggcccctacgcaaggtcccctcctccaagctcacccccatgtcttgtggtagaaaggttggtggtgtgaaggcggagctaagcgccccagtggtgataagcctaagcacagggctctcccttttcttgggtcggttcgtgttcttcaacttccaaagagagaacgtggcgaagcaagtgcctgagcaaaacgggttgacccatttcgaagcgggtgacactcgagccaaggagtatgttagcctcctgaaatccaacgatccggtgggattcaacctggtggatgttctggcttggggatccctgggtcatattggtgcttactat

SEQ ID NO: 223118 - DNA, 412 bp, Gossypium hirsutum
cttaaagtgtttaaggaacaaggtctggttttgaccgctcttttaggtctttcagctttcttctcgatggcagagactgcaataactacattatggccttggaaggtgcgtgaactggctgataaagactctgaagatggtgtttttaaaatgctttccagtgatgtaacacgctttctcacaaccattcttattggcaccacggtggtcaatattggagccactgctttagtcacagatgctgccacagctatatttggggaagctggtgttactgcagcaactggagtaatgaccgttgccatattgcttctcactgagattactccaaagagtatagctgttcacaatcccacagaagttgccagatttgtggtcaggccagtggcatggctttctgtaatactatatc

SEQ ID NO: 223119 - DNA, 403 bp, Gossypium hirsutum
  unsure (1)..(403): unsure at all n locations
cttctacgcttacacgccatttgaaccggagaagttctcgtgtntggaatggagttctgtcccgtggagatttgacacnctaggcagaagcaaccaggaaacattttccggacaagcagtaaagttttatgtagcagaggtcttgctagtactagaatatcttcacatgctcgggattatctatcgtgaccttaaacccgaaaatgttcttgtaagagaagatggtcatataatgctttctgatttcgatctttccccttcgttgtactgttaagtccgactcttgtcaaaacgtcctctctcgaatcagagccgntaaggaaagaaccctgtttattgtgttcagcctgcttgcatcgaaccttcgtgcattcaaccagcttgtgttgtcccaacaacatgc

SEQ ID NO: 223120 - DNA, 423 bp, Gossypium hirsutum
cccacgcgtccgcccacgcgtccggggaaaggtatggtcgactcattgttccaagctcccatgaacgatggtactcactatgctgtcatgagctcctatgagtacattagccaaggccttcgcacatacgacttggacaacaacatggatggattctacattgccccagctttcatggacaagcttgttgttcacatcaccaagaactacatgacccttcctaacattaaggttcctcttatcttgggtatttggggaggcaaaggtcaaggaaaatctttccaatgtgagcttgtctttgccaagatgggaatcaaccccattatgatgagtgccggagaattggaaagtgggaacgccggagaaccagccaagttgatcaggcaaaggtaccgtgaggccgccgacattatcaagaaaggg

SEQ ID NO: 223121 - DNA, 424 bp, Gossypium hirsutum
gaaaccctcaaaattccactaaaaaatggccttcacagcttccctctccaccgccggagccaccacctctttcctccgcggccatccggcgccgaaaaccctaaactcccttcctttcaaccaatctcttttcgggctaaaaccccaacgaaatggccgtctcaccatggcagcatacaaggtgacactgttaacacccgaaggaccccaagaattcgtgtgccccgacgacgtatacatcgttgaccaagctgaggaagaaggcattgatcttccgttctcgtgtagggctgggtcttgttcttcgtgtgccggagtgattaagcaaggctccgtcgatcaatccgacggtaatttccttgatgatgaccagattgctgcaggttttgtcctcacttgtgttgcttaccctcagagtgatgtt

SEQ ID NO: 223122 - DNA, 425 bp, Gossypium hirsutum
  unsure (1)..(425): unsure at all n locations
gaaaaagaagagcctacactatgtctatctactcaagaatttgatgctatataatttcagggcctcaccctctttcttcagtcattgtctctaaacaaagcgttcttcatatggttttcctgtttgtttccatggaaaacctgtaccattaccttgtaatcatcttattcattcttctcaccatcaaacttttgactcataaaaccaaaaatttgcctcccagtcccttttctctgccaattattggccaccttcacctcatcaaaaacccactttaccaatcactgaccacgttattatccaaatatggccctgttttatatctcaaattcggttgcagacatgtccttgttctttcttctccttctgctgntgaagaatgcttgaacaagaatgatataatatttgcaaaccggcctcggact

SEQ ID NO: 223123 - DNA, 418 bp, Gossypium hirsutum
ataagagaaagcactgaaaacgcaaaaccattttctctgcttctctcctcaagacttcaccagttttagacaagtctgagtgggttaagggtcacacccttcgccaaccttccacttctgcggtgaggtgccaccctgttgcaccctctggactaactgtgcgtgcaagctcatatgccgatgagcttgtcaagactgctaaagctattgcttctcctggccgtggaattttggccatggatgagtccaacgctacctgtgggaaacgtttggcctcaatcgggctagaaaacacagaggctaaccgccaagcctacaggacgttgcttgtttcagctcctggccttggtcagtacatctctggtgccatcctctttgaagaaaccctctatcaaaccacaattgatggcaagaagat

SEQ ID NO: 223124 - DNA, 421 bp, Gossypium hirsutum
cgacggcttccatcaacggttggtgccttattttctcttcttcctccaccaccaccggcggtttttccgctcgtcgacgacctacattgcggccttcggtcgtcgctagccttaactcttctccttctcctccgactcttatccaagaccgcccggttttcgctgcccctgttcctttgctcaccccgagagaagagatgggaaacaagtcctacgacgaagccattgaagctctcaagaaacttctcagtgagaaaggagaactgaaagctgaagcagctgcaagggtagatcaaataacagcagagttaaacacaacatcagctgacggcaaaccatctgactcttctgttgagagactgaaagaaggcttcgtttacttcaagaaagaaaaatatgaaaagaatcctgctctgtatgg

SEQ ID NO: 223125 - DNA, 422 bp, Gossypium hirsutum
cccacgcgtccgggaaaatccaaatttccctttcacaatttttctgccacactatcccttggttacagacacagaaaagatcagagcgtggagacatggttagctgctgcaacatggcatcggctgcttcaggtttcttgctaacacccaatgtttctgcagggacttctaagaccaacaacaacaacatggtgtttttcccatccaagaccaacaacacctcaaggcttgttgtgagggcagctgatgaggaggcttcaccaccaccaccctctccaaccccagcaaccaccactgcaccacctgaagggggtgaagctcctaagcctaagccaccaccaataggaccaaaaagaggcaccaaggtgaagattcttaggagggagtcctactggtacaacagctatggatcagttgttaca

SEQ ID NO: 223126 - DNA, 422 bp, Gossypium hirsutum
cccacgcgtccgggatccttacaagtttcgtccttatgttcctttgattccccgttctggaccaccaattctggtgctccagtttggaacaataactcatcacttactgtgggagcaagaggtccaattctccttgaagactatcatttggtggagaagctagctaatttcgatagagaacgcatacctgaacgtgttgttcatgctagaggagccagtgcgaaagggttcttcgaggtcactcatgatatatctcagctcacatgtgctgatttccttcgtgcccctggagtccagacccctctcattgttagattctccacggttattcatgaacgcggtagtcctgaaactttgagagacccccgaggtttcgctgtgaaattttacacgcgagagggaaattttgatctagtggggaa

SEQ ID NO: 223127 - DNA, 311 bp, Gossypium hirsutum
  unsure (1)..(311): unsure at all n locations
cccacgcgtncgaaaaaacaaagggctgaaaacgcacaaccgtgtcctctgcttttctcctcaagactttagcagtggtcgacaagcctacctcggaaaacgcggagagtctttgtctaccaaccaaaactgcagaaagcacccaccctggtacccggcggggtcttagtgaacgtgcaagaaaataggcctaagagcgggacaagaccgctggagctattgattgtgggggcggaaaaattggcgccatggattaatccaacgctgcgtgcggcaaacacttggcgtccatgggtctaaaaaacacagag

SEQ ID NO: 223128 - DNA, 423 bp, Gossypium hirsutum
cccacgcgtccgcccacgcgtacgcggacgcttgttttgacgcgtgggtagctacagcgtgcgctactagtacccactactagcaatggcttcctcaatgatctcatcggctaccattgccactgcctctccggcacaggctaacatggtcgctcctttcaccggcctcaagtctgcctctgctttcccagtcaccaggaaggccaacaacgacattacttctctcgcaagcaatggcggcagagtgcaatgcatgcaggtgtggcctcctaccggaaagaagaagttcgagactctctcatacctccccgatcttacacccgtgcagttggctaaggaagtggattaccttcttcgctcaaaatgggttccttgcttggaattcgaattagaggagggattcgtgcaccgtaaatactcgag

SEQ ID NO: 223129 - DNA, 422 bp, Gossypium hirsutum
cccacgcgtccgctttggtctccggcttctgcctcacttccaactccacctctccggctgactcactccggcaacccacattgcggcggccgtctatcgtcgccaacctcaactcttccacttctcctcctactctcattcgaaatcaacccgttttcgcagcacctactcctttgctcactccttccaattggaaagaaaacatgggagaccagtcatacgaggaagccattgaagctctcaagaaactgctcaatgagaaaggagaattgaagagtgcagcgacggcaaaggtagagcaagtgacagctgagttgaagactgctgcttcttccgatgagtctgttgaccgcttgaaacaaggcttcatttacttcaagactgaaaaatacgaaaagaatcctgctctgtatggtgagctt

SEQ ID NO: 223130 - DNA, 422 bp, Gossypium hirsutum
cccacgcgtccggatcagtgagactcttttgtttacctgtagcatatagtaatagtaagcagtaatagcaatggcctcctccatgatctcatcggcaaccattgccaccgtgaaccgctcctccccggcacaggccaacatggtggcccccttcaccggcctcaaatctgcctctgctttcccagtcaccaggaaggccaacaacgacatcacttctcttgcaagcaacggtgggagagtgcaatgcatgcaggtgtggccgcctcttgggaagaagaagttcgagactctctcatacctgcccgatcttactcccgtacagttggctaaggaagtagattaccttcttcgctctaaatggattccttgcttggaattcgaattagaggagggattcgtgcaccgtaagtactcgagcttac

SEQ ID NO: 223131 - DNA, 424 bp, Gossypium hirsutum
atccgcctgttctcacagtatctcctcccctttgttcctcgaaatggccgccgctatctgctccgcctcctcctcccctacttcccattgcaacgtcttcctcggcatcgacgtcggcaccggtagtgcacgcgccggtctctttgatgaggaagggaagcttctaggatctgctagtagcccaatacaaatatggaaagaaggcgattgtattgagcaatcttcaactgatatctggcatgcagtctgttcagctgtgaaagcagcatgttcacttgcaaatattgatggggaacaggtgaagggcattggatttgcagctacttgttcacttgtggctgtggatgcagatggctctccagttactggttcttggagtggtgattcaagaagaaatatcatagtctggatggaccatcgggct

SEQ ID NO: 223132 - DNA, 421 bp, Gossypium hirsutum
  unsure (1)..(421): unsure at all n locations
gaatcttngggtaattccaggggtgaattatttatagatacagagtacgaaccatgggggccaaaagaagagaaatcaaaactgcaaatactgtgtttcaatctaaggtggaaaaggcttttggtactggctacagtttgggtacttttcacagttattcaagtcatcaagaatgatgtggttccctgtaccactttgtattgggtattgttttgcttacagttccccatagcaacactggtttttggatatgaagcaactaaattatacatagaacataagaagagaatgagcactgggaacgctgaaacagtttgtggagcttcaattcaatggagtccattgaacattgcattttgtgcactttgtggcatcttgggaggcactgttggtggattgcttggttctggtggtggattca

SEQ ID NO: 223133 - DNA, 414 bp, Gossypium hirsutum
cccacgcgtccggtggtggtggtggtgtttttcgtagtcgacgttgttgttctttgtgggttttcattttatttgaatttttattggacaaagaaagaagttgtagcaagatgatgctcaggattaagagggttccgactgttgtttcgaattaccagaaggatgagacggaagagactgctcgccgcagcagtgggtgtggaaagaattgccttagaagctgctgcatcccaggagcaaagcttcctttatatgctttcaggaaactgaacaatattgagagtgaaaaagttgtgcttggaattgagaataaagatccccctgttgcttttcttgactcgctcattcttggggagtgggaagatcggatgcaaagagggctctttcgctatgatgttactgcctgtgaaacca

SEQ ID NO: 223134 - DNA, 423 bp, Gossypium hirsutum
  unsure (1)..(423): unsure at all n locations
cccacgcgtncgcccacgcgtncgcccacgcgttcgtccacgcgtncgcccacgcgtncgcccacgcgtncgcccacgcgtccggcccccccagtactgccagagcagaaatggcgctaactctcccaaacacatttctccaaatcaagccttctcctcccccttcactccctctcagaaaggtggtgactgcaaggggagggggctataggccacaagttacttgccggaagaaggacatccacccggaattccacgaggatgctaaagtttactgcaatggagaattggtgatgacaacaggtgggacgcagaaggagtatgtggtggatgtttggtcggggaaccatcctttttacctcgggaacaggtcggccgtccttgttgacgctgaccaggtcgagaagttccgtaagaagttcg

SEQ ID NO: 223135 - DNA, 424 bp, Gossypium hirsutum
cgtttagctatagcatacactactagtacccacttctttcaatggcttcctcaatgatctcatcggctaccattgccactgcctctccggcacaggctaacatggtcgctcctttcaccggcctcaagtctgcctctgctttcccagtcaccaggaaggccaacaacgacattacttctctcgcaagcaatggcggcagagtgcaatgcatgcaggtgtggcctcctactggaaagaagaagttcgagactctctcatacctccccgatcttacacccgtgcagttggctaaggaagtggattaccttcttcgctcaaaatgggttccttgcttggaattcgaattagaggagggattcgtgcaccgtaaatactcgagcctacccacgtactacgatggacgctactggaccatgtggaagct

SEQ ID NO: 223136 - DNA, 424 bp, Gossypium hirsutum
atcatctacatggccatggcaactcaagcaggtctcttcacccccacaatccccaccccaaaatctttggccccatggaaaccagcctcatcattttcctttgctacctcttccaagtccctcaacttctccatggctcaaagaaccattagagctgcagctgctgatgaggaagcatcatctgctgctgctacaaaggaagctccggtcggtttcacccctccggaattggaccccaacaccccatcacccatcttcggaggaagcactggaggactgcttagaaaggctcaagtcgaagaattctacgtcatcacatgggattcacccaaagaacaaatctttgagatgccgactggtggggcggccatcatgaggcaaggacctaacttgctcaagttggcgaggaaagagcagtgtttgg

SEQ ID NO: 223137 - DNA, 423 bp, Gossypium hirsutum
caccaccatagtccaacattttcataacattgtttgccatcacaaacgccgctgctacatgctccttcatggggacactcttccccgacgtctacacaagttcagggagattcgtcgccaggtttggctttggcggcaaaaaagcagctcccaagaaagtctcgaaacgaaccccagaccgccctctatggtacccaggagcagtggcgcctgattggctcgatggaagtttggtgggtgattacgggttcgacccgttcgggttagggaaaccggcggagtacttgcaatatgatttggattctttggaccagaacctggctaagaattcggctggtgagataattggaactaggaccgaggttgccgacgtgaaggcgacgccgtttcagccttacagcgaggtttttggtctacagaggt

SEQ ID NO: 223138 - DNA, 426 bp, Gossypium hirsutum
cttttacttcttctgcaacaacaacccccatcagaaataacatattctcctttcttcttatttcttcattataaaaaaagaaaagaaaagacatggctgctgttactgctgcagtctctgttccttctaccaagtccacctctctccctgctagaacctctcttgtctttcctgataggatcaccttcaagaaggtgcccgtttactacagagatgtttgcagtggggggagagtggtttctgtcagggcccaggttacaactgaagctcctgccaaagttgtaaaggaatccaagaaaaacgatgaaggtgttgtggttaacaagttcaggcctatcaacccttacattggtagatgccttctaaacactaagatcactggcgatgatgctcctggagagacttggcacatggtcttcagcaccg

SEQ ID NO: 223139 - DNA, 421 bp, Gossypium hirsutum
gcatcccaccagaccagcagcgtcttatcttttccggaaaacagctcgaggacggccgtaccttggccgattacaacatccagaaggaatccaccctccaccttgtcttacgtcttcgtgggggtatgcagatcttcgtcaaaactttaaccggcaagaccatcaccctcgaagtcgagagctctgacaccatcgataatgtaaagtctaaaattcaagacaaggaaggcatcccaccagaccagcagcgtctcatcttcgccggcaaacagctcgaagatggccgtaccctggccgattataatccagaaggaatccaccctccacctcgtcctccgtcttcgcgggggaatgcagaccttcgtgaaaaccttgaccggcaagaccatcaccttggaggtggagagttcggacaccatcg

SEQ ID NO: 223140 - DNA, 298 bp, Gossypium hirsutum
  unsure (1)..(298): unsure at all n locations
tggagaagttttagtgggaaaaaaaaaaggaagataggatnggtgtttgaataggtattttaaggaaagaaaatgttaaagttgatgatgttgttaagattgttgaaaaattnnagggataataaattgaatttttnggtgatntgagggnaagagtttatgatgaagaagtgaggaaatggattggagaggttggagtaaatggtgttgggaaaaagnttgtgaantggagggaagggggaaaatattttgagaaatngaagatgataattgagaaggtgttggaatatggataaat

SEQ ID NO: 223141 - DNA, 292 bp, Gossypium hirsutum
cggacgcgtgggcggacgcgtggggttcaaggtcgggtctcaaatcttcagtgagggtggacttgactacttgggtaacccaagcttgatccatgctcaaagcattttggccatctgggcttgccaagttatcttgatgggagccgtcgaaggttaccgtattgccggtggaccactcggtgaaaggactgacccattggacccaagtggtagctttgacccattgggtcttggtgatgacccaaaagcattcgctgaacttaaagggaaagaaatcaaaaacgggagggtg

SEQ ID NO: 223142 - DNA, 423 bp, Gossypium hirsutum
  unsure (1)..(423): unsure at all n locations
ttttnttttttttttttttcaagaaatatggtaagaaactaccttttattcattagttctcagccggccattggaaatccaaaacaaaccaaagagaaagaccccaagccaaatacctcaattaaaaaagaaaaagaaaaagggggggggggtttgaggggcttaatttaagtacaactttgaaacaaatggaattcctaggagggaagtaaacaacttagtagcctttaggcttgtaggcaatgaaactaatgcactgcacttgacgaacgttgtcgaacccaatgattctaatgaatgcattggggtattccttcttgcaattctcaagctcctccaacacctgagccgagtcagtgcacccaaacatgggcagtttccacatggtccagtagcgtccatcgtagtacgtgggtaagctcg

SEQ ID NO: 223143 - DNA, 424 bp, Gossypium hirsutum
gagactcttttgtatacctgtagcatatagttttagttagcagtaatagcaatggcctggtccatgatctcatcggcaaccattgccaccgtgaaccgctcctccccggcacaggccaacatggtggcccccttcaccggcctcaaatctgcctctgctttcccagtcaccaggaaggccaacaacgacatcacttctcttgcaagcaacggtgggagagtgcaatgcatgcaggtgtggccgcctcttgggaagaagaagttcgagactctctcatacctgcccgatcttactcccgtacagttggctaaggaagtagattaccttcttcgctctaaatggattccttgcttggaattcgaattagaagagggattcgtgcaccgtaagtactcgagcttacccacgtactacgatggacgct

SEQ ID NO: 223144 - DNA, 424 bp, Gossypium hirsutum
agaaaaatggcttctgcttccgctactctccttatagtcttcacctattatcgacaagtccgagtggattaagggccaaaacctccgccacccttcggtttgttttgtacggtcacaccctacatcggccgcctttaccgtccgtgctagttcatatgccgatgagcttgttaagaccgcgaaaactgttgcatctccaggtcgtggtattttggccatggatgaatcaaatgctacatgtgggaagcggcttgcctcgattggtctcgagaataccgaggcaaaccggcaagcttaccgtacccttctcgtgtctgcccctggcctcggtaactacatctcgggagctatccttttcgaggagactctctaccaatctaccatcgatgggaaaaagatggtcgatgttcttgttgagcaaaat

SEQ ID NO: 223145 - DNA, 424 bp, Gossypium hirsutum
cccacgcgtccgcccacgcgtccgagagaaagttctgaaaaagcaaaaccatggccggtgcttctctcctcaagacttcaccagttttagacaagtctgagtgggttaagggtcacacccttcgccaaccttccacttctgtggtgaggtgccaccctgttgcaccctccggactaactgtgcgtgcaagctcatatgccgatgagcttgtcaagactgctaaagctattgcttctcctggccgtggaattttggccatggatgagtccaacgctacctgtgggaaacgtttggcctcaatcgggctagaaaacacggaggctaaccgccaagcctacaggacgttgcttgtttcagctcctggccttggtcagtacatctcaagtgccatcctctttgaggaaaccctctatcaaaccacaat

SEQ ID NO: 223146 - DNA, 422 bp, Gossypium hirsutum
gaaccagcagccaacatggcctcattagcagtctccaccgctgccgcctcccttggcgtgtctgaaatgcttggtaaccctctgaatttcagtggtggagctaggtcatcggctccaacaccatccaactcatccactttcaagaccgttgctcttttctccaagaagaaggccgctcctccaaagcccaaggctgctgctgtcgccccggccgatgaagagctggctaagtggtacggtccggacagaaggattttcttgcctgaaggtctgttagacagatcggagatcccagagtacttgaacggagaagttcccggagactatggatacgatccgtttggtctgagcaagaagccagaagactttgcaaaatatcaagcatatgagttgatacacgcaaggtgggcaatgcttggtgc

SEQ ID NO: 223147 - DNA, 412 bp, Gossypium hirsutum
cggacgcgtgggcggacgcgtgggcggacgcgtgggctcgcaagcaatggcggcagagtgcaatgcatgcaggtgtggcctcctactggaaagaagaagttcgagactctctcatacctccccgatcttacacccgtgcagttggctaaggaagtggattaccttcttcgctcaaaatgggttccttgcttggaattcgaattagaggagggattcgtgcaccgtaaatactcgagcctacccacgtactacgatggacgctactggaccatgtggaagctgcctatgttcgggtgcaccgactcggctcacgtattgaaggagcttgaggaatgcaagaaggaataccccaatgcattcattagaatcattggcttcgacaacgtgcgtcaagtgcagtgcattagtttca

SEQ ID NO: 223148 - DNA, 392 bp, Gossypium hirsutum
atttagtgcaaaaaccatcttcttttttctgctttctcgtatagcagcctgttgggagaaactttttttttgaggaaattagaaaatgtcatcggagaacgggaaaaggttgctggaaactgatgccggcggcttgaattttgaggctaccgagctgactttagggttacctggagagcctagagtaacatcggacggtggagctaagttgggcagtaaacgtggattttcggaaaccgttgatcttaagttgggtgacaacaatcaagaggttaagctgggtcactccctccaagaagctgccaagtctcccgtttcaaagacacaagtggtgggttggccgcccgtgagaggctttgcaaagagaggaaagaagagtgcaaatatgtaaa

SEQ ID NO: 223149 - DNA, 421 bp, Gossypium hirsutum
cccacgcgtccgcccacgcgtccgcacaaaatggcgtcgccatctgattgtaaagcgaccattatcgacggcaaagctatcgctcagacgatcagatctgaaattgccgacgaggtccgtcatctctcccagaaatacggcaaggtgccaggcctagctgttgtaattgttgggaacaggaaagattctcaaagctatgtgggaatgaagagaaaagcctgtgctgaagttgggattagatcttttgatgtgaatctccctgaagaagtacctgaatccgatttgatcagcaaagttcacgagctcaatgcaaatcctgatgtacatggcatattgggttcagcttcctttaccaaagcacataaatgaagagaaagttttgggtgaaatcagtcttgaaaaagatgtagatggttttcac

SEQ ID NO: 223150 - DNA, 374 bp, Gossypium hirsutum
gactgctgttagagaaacaatgggagaccaaatgccatgtgcagctatggctagtggatggaacaaagtgaaaccattcttggcaatcatctccctgcaatttgaatatgcagggatgtatatcatctacttggtttctgtaaagcatggaatgagtaatttcatcctttgcacctatcgtcatgttgttgccaccattatcattgctcccttcgcctttgatctccaaaggaaaatccggccaaagatgacccttcctatcttcctcaggattgtggctcttggtttgctcgaaccaggacttgaccagaacttatactatgtgggaatgatgaagacaactgcaacatattcatcggatttcgtcaacatgc

SEQ ID NO: 223151 - DNA, 412 bp, Gossypium hirsutum
gagataagagaaagcactgaaaacgcaaaaccatggcctctgcttctctcctcaagacgttgaccagttttagacaagtctgagtgggttaagggtcacacccttcgccaaccttccacttctgcggtgaggtgccaccctgttgcaccctctggactaactgtgcgtgcaagctcatatgccgatgagcttgtcaagactgctaaagctattgcttctcctggccgtggaattttggccatggatgagtccaacgctacctgtgggaaacgtttggcctcaatcgggctagaaaacacagaggctaaccgccaagcctacaggacgttgcttgtttcagctcctggccttggtcagtacatctctggtgccatcctctttgaggaaaccctctatcaaaccacaattgatg

SEQ ID NO: 223152 - DNA, 417 bp, Gossypium hirsutum
cccacgcgtccgaaaggcttgaaatttccttttttgagcctggcatctttgctgatcgtgaaggaaagggtcttcgggcacttaccaaagcccagttggatgagattctaggtccagctgaatgcaccattgtttcttcattatctaacaagcaagtggactcctatgtcctttctgagtctagcctctttgtctatccatacaagattataatcaaaacctgtgggacaactaagttgcttcttgctatcccacccatcttgaaattggctggcagtctatcccttgctgtaaaatctgttaggtatactcgtgggagttttatattccctggtgctcagccatttcctcaccgaaacttctctgaagaggttgctgttcttgataactatttcgggaagcttggcgctggtagca

SEQ ID NO: 223153 - DNA, 403 bp, Gossypium hirsutum
agagcactagcattagcactagcactagtagcaaccatggcctccgccgcatggttggggcaccaccacgcactcacaaccaatggcagatcatcatcattatcgccgtcgctgcgccaggtttcaaacatgaagcctacccagcaggtggtgtgcaaggctcaaaagcaggaagatgatggaagccttgtgtcccgtaagttggctctcactgtactcattggtgctgccgctgttggctctaaggtttctcctgctgatgctgcctatggtgaagctgcaaatgtatttggaaagccaaaaacagacacagacttcatgccatacagtggggatggattcaagctctcgataccatcgaaatggaacccaagcaaagaggtggagttcccaagtcaagtgc

SEQ ID NO: 223154 - DNA, 324 bp, Gossypium hirsutum
cacgtccccaacccccactatctgtccatctttcagtaatagaaaggaaatggagtttagttcagaggctaaccagcgcattgccaggctcgcagcccatctccaacctcagatggaggaaagttctattttgaggcgagctgactgtaaaaccaaagggaggtcaacaagggtcaaaagtgctatcttaagaacaactggaggcattggccaccctcttgcaatggtaatgaagaagaatcctctcgtctcggttcttcatctttacgatgttgtgaactctcctggtgtcacagctgacctcagacacatggatactggtgc

SEQ ID NO: 223155 - DNA, 420 bp, Gossypium hirsutum
ccaatcccaggctcagggatgcaacttacatacatcgcccacgtttgggacttgtcgtctatgcttaccctagctgttgagaagccagaagctgcatgttgtaatatcttcaattgtgtgagtgaccgggcagtgactctggatggaatggccaaattgtgtgctgcagctgctggcttaccagttgaaattgttcattatgatccgaaagctattggaatcgatgcaaagaaagcttttcctttccgtaatatgcacttttacgccgaaccaagggctgcaaaggacatactggggtggaagagcaccacaaatctgccagaagacttgaaggagcgattcgaggagtatgtgaagatagggcgtgacaagaagcctatgcagtttgagatggatgataagatactagggtcccttaaa

SEQ ID NO: 223156 - DNA, 419 bp, Gossypium hirsutum
caaaaatggcgacttcagccatgtcggaaaaacgggtcgtcctgctctgcggcgacgatgccgaggactatgaggttatggtccctttccaggctctgttggcttatggtatatcagtggacgctgtttgtcccggcaagaaggccggcgaaacttgccgcaccgctattcatcaactttccggccatcagacctataccgagatccgtggtcacaatttcacactaaatgcatcatttgaagatatagaccatactaaatatgatggtttagttatagccggaggacgagctcctgaatatcttgctatggatgcatttgtattgaacatggttcgcaattttgttaattctggaaagcctgttgcttcaatttgtcatggtcaattgatattagctgctgccggggcagttggtggt

SEQ ID NO: 223157 - DNA, 420 bp, Gossypium hirsutum
  unsure (1)..(420): unsure at all n locations
cccacgcgtccgcgaaaccgaccctaggagttgtgccaaggaaaggtgccatttcgggggtgtcagcctcgattttaatccctcaattcatacttggtggactgacggaagcgtttgcatccattggcctcattgaattctactacaagcagttccctgaaaacatgaaaagcatcggagggtctctattctactgtgggttggcaggttcaaattatttcagtagcttgctgatctttataattcatcgaacaacaaaccgcacagccaccggaaactggttaaaggaggatctgaataagggaagattggattactactattacataattgctggcctaggaatcttaaacttgggctactnntttgtatgcgcaagttggtataagtacaaaggaaacagncgacacacccctgagc

SEQ ID NO: 223158 - DNA, 425 bp, Gossypium hirsutum
cccacgcgtccgcaatttgaagccttcttcttatttcctcattcaagatgcaaatggggggcaagaccctcaccggaaagaccatcacattggaggtggagagttctgatactattgacaatgtaaaggccaagattcatgacaaggaaggcatccccccagaccagcaaaggttgatcttcgctggtaagcaacttgaggatggccgcacgttggctgattacaacatccagaaggagtccacactccacttagtgcttcgcctccgtggaggaatgcaaatttttgttaagactttgactgggaagaccattacattggaggtagagagttcagataccattgataatgttaaggcaaaaattcaggacaaggaaggaattcctccagaccaacagaggctgatttttgctggtaagcaactg

SEQ ID NO: 223159 - DNA, 414 bp, Gossypium hirsutum
gcgcctcgaaattcacgcgattgcagatgatataactagtaaatatgttcctggggatgttaacatattttattgtctaggaggaattacgcttacttgttttttggtacaagtagctacaggatttgctatgactttttactatcgtccaaccgttactgaggcttttgcttctgttcaatacataatgactgaagctaactttggttggttaatccgatcagttcatcgatggtcggcaagtatgatggtcttaatgatgatcctgcacgtatttcgtgtctatctcactggtggttttaaaaaacctcgcgaattaacttgggttacaggcgtggttctgggtgtgttgaccgcatcttttggcgtaacaggttattccttaccttgggaccaaattggttattgggcagt

SEQ ID NO: 223160 - DNA, 414 bp, Gossypium hirsutum
ttttgtttagatgaaattctgtttgagttttctttggtgaatgatcagacttagagagagagcagagtaatttgggtcaagtgtttctgggttttcacaaccatggcttcttcaatgcttagtggagcagccccaacaggggtaggatttgcgaggtccaattttcattttaggagcttgccccagaagagtttattttcttatacaaagaatcagaagactagaatggtggtaacaaccagatgcagtatatcatcctcaaggccggcttctcagcctaggttcatacaacacaagaaagaagcgttttggttttacaggtttttatcaatagtgtatgatcatatcataaaccctggtcattggactgaagatatgcgggatgaggcgcttgagcctgctgatctttattct

SEQ ID NO: 223161 - DNA, 416 bp, Gossypium hirsutum
cccacgcgtccgcgttctggtcgattctgtttaaagggtgttgctattaatttcgcgaaaagcgacgacatcaagattcttagagacatagaacaatactaccgtacccaaattggccaaatggccatgaatggcgcaaatctgatattaaaaatgctttcattagtgcttggaccggaacttggaaggtaccggtggacatttttcattggggtggggtaattcaattaatctatctggtggaatgttgggggggaatggggttggattgctacccgaaggtcaattaactgattgtttttcgtaccaaattaaccttttaactatcaaaacacagtgattttcgtgcttttgttcactgttgtatgtatgtgtagttggattgctcaaatttctatagttttatttattattac

SEQ ID NO: 223162 - DNA, 424 bp, Gossypium hirsutum
cccacgcgtccgcccacgcgtccgcccacgcgttcgacggctttggtctccggcttggtggctcacttccaactccacctctccttctaactcactccggcaacccacattgcggcggccgtctatcgtcgccaacctcaactcttccacttctcctcctactctcattcgaaatcaacccgttttcgcagcacctactcctttgctcactccttccaattggaaagaaaacatgggagaccagtcatacgaggaagccattgaagctctcaagaaactgctcaatgagaaaggagaattgaagagtgcagcgacggcaaaggtagagcaagtgacagctgagttgaagactgctgcttcttccgatgagtctgttgaccgcttgaaacaaggcttcatttacttcaagactgaaaaatacgaa

SEQ ID NO: 223163 - DNA, 422 bp, Gossypium hirsutum
  unsure (1)..(422): unsure at all n locations
gatctcaggtcatccatctggaaacagatgtctgatgctgggatcaagtacatcccgagcaatgctttctcttactatgaccaggtgctcgatgccacatccatgctcggagctgttccacctagatacggctggagtggtggtgagatcggatttgacacttacttctccatggccagaggaaatgcctctgtccctgcaatggaaatgactaagtggtttgacaccaactaccacttcattgttcctgaattgggacctgatgttaacttctcttatgcatctcacaaggcagtggatgagtacaaggaagctaaggcgcttggagttaacacagtcccggtccttatcggccctgtctcatacttgttgctctctaaacctgcaaagggtgttgagaagaccttntctcttctctccct

SEQ ID NO: 223164 - DNA, 416 bp, Gossypium hirsutum
cccacgcgtccgcccacgcgtccgggagaaccgatctgcgagtctcatgaaaacaagttgctggagcggatggcaataagcgtggaatacttgaacaaaaaggttaaggaatgtttcttggatttgggatcatttccagaagataaaaaaattccccttgatgttctcattaacatgtgggttgagatacatgacattgatgaggaggaagcatttgccattcttgtcgagctttctgataagaatctactcacttttggtgaaagacccaacggttggagatgcgtacagtagttattatgaaatttgtgttactcaacatgatgtgttgagagaccttgctcttcatctcagcaatcaaggggatgtgaaccagccaaagcggttgcttatgcctagaagagatacttgaactc

SEQ ID NO: 223165 - DNA, 420 bp, Gossypium hirsutum
atttagctatagcatacactactagtacccactactagcaatggcttcctcaatgagcgggcggctaccattgccactgcctctccggcacaggctaacatggtcgctcctttcaccggcctcaagtctgcctctgctttcccagtcaccaggaaggccaacaacgacattacttctctcgcaagcaatggcggcagagtgcaatgcatgcaggtgtggcctcctactggaaagaagaagttcgagactctctcatacctccccgatcttacacccgtgcagttggctaaggaagtggattaccttcttcgctcaaaatgggtttccttgcttggaattcgaattaaaggagggattcgtgcaccgtaaatactcgagcctacccacgtactacgatggacgctactggaccatgtggaa

SEQ ID NO: 223166 - DNA, 418 bp, Gossypium hirsutum
cccacgcgtccgatcactaccattatggcttcggctactgtttctgtagccaaacccaacgcttcagattcaggcaaaaggaaagggtgttggttttgcagatttctcaggcctacacaactcctctactagccttccctttgccaggaaaacctctgatgacttccattcactcgttgcttttcagacatctgctctaggaagcaataatggccgggtacaggaaagggatggcagaggcaaagctaaaggtggctataaatgggtttggtaggattggcaggaatttcttaagatgctggcatggccgtaaggactccccacttgatgtcattgccatcaatgacactggtggtgttaacaggcttctcaccttctcaaatatgattccacccttggcatcttcgctgccgatgtc

SEQ ID NO: 223167 - DNA, 418 bp, Gossypium hirsutum
aacatgatggacatttggtcttggatatgttagcctcctaacaatgacgattggggggaatcagacccacatccaccgctcgcctttacaatggcgagttctgaggaaggcgactcaagctcaactcgttcgatccaactcaaagccgagcgtaccatggggtccgattcagaggtctgtataaccttcacaataagcttccaagggttccaatcttcacctctttgggtctctgacccctgttctctatcttcagagcaacctttcctccctttagtacttcagcttctccaagaaaccatcagccgttcaccagcaatgcccaacaccatttgcccgaggtctcagcttcaaaaactcaaacccgaacccatttcttggatcattgagtctcactcacccgaatcattctcgagtt

SEQ ID NO: 223168 - DNA, 418 bp, Gossypium hirsutum
cccacgcgtccgattatggcttcggctactgtttctgtagccaaacccaacctggagattcaggcaaaaggaaagggtgttggttttgcagatttctcaggcctacacaactcctctactagccttccctttgccaggaaaacctctgatgacttccattcactcgttgcttttcagacatctgctctaggaagcaataatggcgggtacaggaaagggatggcagaggcaaagctaaaggtggctataaatgggtttggtaggattggcaggaacttcttaaggtgctggcatggccgtaaagactccccacttgatgtcattgccatcaatgacactggtggtgttaagcaggcttctcaccttctcaaatatgattccacccttggcatcttcgctgccgatgtcaagcctgtcg

SEQ ID NO: 223169 - DNA, 416 bp, Gossypium hirsutum
gccgtctccaccatcggtgctgtcaaccgagcaccgttgagtttgaatggatcaggtgcgggagcttctgctccaagctcagctttcatggggaacagcttgaagaaagtgagcgctaggttcaacaacaacggcaaggctccagtgggaagtttcatgattgtggctgccaaagaaatcgacgaagacacacagaccgaccaggaccgatggaagggtcttgcttatgatatctccgatgaccaacaagacattaccagagggaaaggtatggtcgactcattgttccaagctcccatgaacgatggtactcactatgctgtcatgagctcctatgagtacattagccaaggccttcgcacatacgacttggacaacaacatggatggattctacattgccccagctttcatgga

SEQ ID NO: 223170 - DNA, 424 bp, Gossypium hirsutum
gccttcatcacctggagagacactatgtgcagcggtctcagcctctgcctgggtggaaccccatggaaaatgtactattgcattttctcttgcttggtcttctccaaaaataaaatttttaaaagggagctcataccataggagatacacaaaattctatggcacttctgaaagagcagctttgaacttggcgcatgatgcactgacaaattacaagcggtgggaagacgagattgaaaaatggcaaagtcctatcctcaatgatcaaaggctgccagaatggtataaatttacactgtttaacgagctctactttttggttgctggcggaactgtttggatagattcttccttgccatctacaaatgtgaaaaatgatcaagattcaccagaagatgcacaaagggtagatgtaaaagtaact

SEQ ID NO: 223171 - DNA, 421 bp, Gossypium hirsutum
gttttcttttaatttggtcactgttgaaattgtatggtcatacttgcatatatcgatctgccctgttttcttctctgtaaattttataacttggaacctagacacccatggctactgtttctcaattgaataactttccatgcaagaccttcttaataaccccacaaaacagtaactttacctcaaaacttccggttctgcctctaaactctacaaaaccaactcagaattcgatcaagaaatctcaatttttgacccagaaatcagtccagccaaggcctgttttccaggtccgtgcttcggacgccgacgacgaatggggcccggacaaggaggagccagttgtaatcgagagtcctggagtggccgtggcggaagagaagaagcctgacgatgcgggggaaatagagagcttgaagaa

SEQ ID NO: 223172 - DNA, 415 bp, Gossypium hirsutum
atcagttgcttcacaatggcctctacaaccatggctctttcttccccatcattcgccggggaggcagtgaagttctcccctaccacccctgaaatccggggaactggccgcgtttccatgaggaaaaccaccaagcctgttccttctggtagcccatggtacggtcctgaccgagttttgtacttgggtccactttccggtgagccaccatcttacttgaccggtgagttccctggtgactatggttgggacactgctggactctcagctgatcccgagacctttgctaggaaccgtgagctcgaagtcattcactgcagatgggccatgttgggagctctcgggtgtgtattccctgagctgttggctaggaacggtgtcaagttcggtgaagctgtatggttcaagggccggg

SEQ ID NO: 223173 - DNA, 218 bp, Gossypium hirsutum
cccacgcgtccgtgacagtggaaaagaagctttgcgttccgacttccgcatgggaaaggtacgaatacgtgtatctactttggaaacgggtaaagtgtacaaaaatacatatccgttggtgatgttgggtaatagccgggtacaaaaaatgggtgaagctggaggtggctgtaaggtttgttcgtgcagcttcaaacactagaattttcttacaacgt

SEQ ID NO: 223174 - DNA, 422 bp, Gossypium hirsutum
cagtgagactcttttgtataactgtagcatatagtactagtaagcagtaatagcgggggcctcctccatgatctcatcggcaaccattgccaccgtgaactgctcctccccggcacaggccaacatggtggcccccttcaccggcctcaagtctgcctctgctttcccagtcactaggaaggccaacaacgacatcacttctcttgcaagcaatggtgggagagtgcaatgcatgcaggtgtggcctcctcttgggaagaagaagttcgagacactctcatacctccccgatcttacacccgtacagttggctaaggaagtagattaccttcttcgctctaaatggattccttgcttggaattcgaattagaggagggattcgtgcaccgtaagtactcgagcttacccacgtactacgatg

SEQ ID NO: 223175 - DNA, 317 bp, Gossypium hirsutum
  unsure (1)..(317): unsure at all n locations
gtctcctaatccacnttttctccggcttctacttctctagtccctctttcaacccgcagatttttgaatggctgcgacgccaaaaattaacacgattagcaggacactctttcgtcttaaagatggcttccgtgggcatggtgcctgcttctggttcaagagaatctaagaccgccagaggtgaaaagttacctgaggagattaacgacatgaaaatcccaaatgacatacatacggaagcaacattcttggacgaaaacgaaactcaaacaaggcatataattgcgacaaccatcggtggtacaaatggccaacca

SEQ ID NO: 223176 - DNA, 419 bp, Gossypium hirsutum
cccacgcgtccgccagattctgtggttcctgtactgatggctgctggagaggcagcctgtgcatcagttcatggtgctaatcggttgggtgcaaattcccttcttgacattgtcgtctttggtcgggcttgtgcaaaccgagttgcagagatccaaaggccagggcagaagcagaaacctttggaaaaggatgctggtgagagaacaattgcatggttagacaaaataagaaattctaatggttctcttccaacttcaaacattcgattaaatatgcaacgagtaatgcaaaacaatgctgctgttttccgcacacaggaaacactagaggaaggttgtcagttaattgataagacatgggaaagcttccatgatgttaagttgaaggatcgcagtttaatatggaactctgatttgat

SEQ ID NO: 223177 - DNA, 409 bp, Gossypium hirsutum
cttttctgttgctaaggctcttaatatgatttgtagtggctatgtttggattgctgcagattggcttccttcatacttagattcaaaggacgcagttgattccaacacaatgaatatcttgcaaggggttattgctctccgccattacacccctgatactgatctcaagaagagttttatgtctaagtggaacaccctaaaatataagggaagtgcaggtcatgcaggtttcaattcatatgcgctttatgcttatgattcggcttggttggctgcacatgcccttgatggttttctcaacgaaggtgggaatttatctttctcttatgacccgaaattgcatgatacaaatggcagcatgctgcatctagcatcccttcgtgtgtttaatggcggggaacaacttctc

SEQ ID NO: 223178 - DNA, 424 bp, Gossypium hirsutum
gcgactctggatacattcagcaagccttgcacaatggccaccatcacctctgccgctgtcgctatcccatctttcaccggccttaaagccggtgcaaccgcagctaaagttagcgccacagccaaggttgcagcctctccagtcccaagggtcagcatcaaggcctccctcaaagacgtcggtgttgctgttgcggcaactgctgcaagcgcaatccttgccaacaatgccatggccattgaagtcttgctcggcagtgacgatgggggtctggctttcattcccaaagaattcagcgtaagcccaggggagaagattgtgttcaagaacaatgccggattcccacacaatgttgtgttcgatgaggacgaaatcccaagcggcgtcgacgtatccaaaatctccatgcctgaagaagagctac

SEQ ID NO: 223179 - DNA, 422 bp, Gossypium hirsutum
cccacgcgtccgaaaggaacaggaactgctaaccagtgcccaaccatcgatggtggtgtcgactcttttgccttcaagcctggcaaatactacgccaagaagttctgcttggagcccacttccttcactgtcaaggctgagggtgttaacaagaatgcccctcctgagttccaaaacaccaagctcatgacccgtttaacctacacccttgacgaaatcgagggccctttcgaggtatccaccgatggcaccgtcaaattcgaggagaaagatgggattgattatgctgccgtcacagttcagcttcctggtggtgagcgtgtgcctttcctgttcaccatcaagcaattggttgcatcaggcaaacctgatagctttggaggagacttccttgtaccatcctaccgtggctcatctttctt

SEQ ID NO: 223180 - DNA, 405 bp, Gossypium hirsutum
cgtttttattctctagagtcttcccttgtccctgttaaaatctgtcactgtgatcagtaatggccaccgctgaacctgaagttccagtcactgagcagcagcccgcggcagcagaggagccaaagccggcggaaaagcctgtgaaggagaagagacccagagctccaaaggagaaaaagcctaagcaacccaaatccgcagcacatcctccttatttttagatgatcaaggaggcgcttttggctttgaaagagaagagtggatcaagtccgtacgctatagcgaaatacatggaagagaagcacaaggcggtgcttccagcgaatttcaggaaaatcttaggtcttcagcttaaaaactcagctgccagaggcaagctgataaagatcaaggcctcttacaagc

SEQ ID NO: 223181 - DNA, 422 bp, Gossypium hirsutum
cccacgcgtccgcccacgcgtccggctgatttccttcgtgcccctggagtgcagacgcccgctcattgttagattctccacggttattcatgaacgtggtagtcctgaaactttgagagacccccgaggtttcgctgtgaaattttacactcgagagggaaattttgatctcgtggggaacaatttccctgtgtttttcatccgtgacggaatgaagttccctgatatggtccatgctcttaaaccaaacccgaagtcccacattcaggaaaactggaggattctggacttcttttcgcaccatcccgaaagcttgcacatgttcaccttcctgtttgatgacatcggtgttccacaggattataggcacatggatggctctggtgttcatacctacacactaatcaacaaggctgggaagt

SEQ ID NO: 223182 - DNA, 411 bp, Gossypium hirsutum
attacctgtgaaattctgttctcatttttctttcaagaactaagcgaaaatggcagcagaggaaggccaagtctatggttgccacactattgaatcatggaacgaacagcttcaaaaaggcaacgaatccgaaaaattggtggtggttgatttcactgcttcatggtgtggaccctgccgtttcattgcacctttcctggctgaactagccaagaagttcccttctgttacctttcttaaggtggatgtggatgagttgaaggaagttgctaccgattgggcagtggaggctatgccgactttcatgttcctcaaggaggggaagattgtagacaaagtggtgggagcaaagaaagaagagcttcagcagactctgtcaaagcatatggctgtccccagtactacttcagc

SEQ ID NO: 223183 - DNA, 325 bp, Gossypium hirsutum
atttagctatagcatacactactagtaccctttactagcaatggcttcctcaatgatgtcatcggctaccattgccactgcctctacggcacaggctaacatggtcgctcctttcaccggcctcaagtctgccctttgatttcccaggccaccaggaaggccaactacgacattacttatctcgcaagcaatggcagcagactgcaatgcatgcaggtgtggacccctactggaaagacgaagttcgagactctatcatacctgcccgatcttacacccgtgcacatggctaaggaagtggattacctatttagttcaaaatggg

SEQ ID NO: 223184 - DNA, 424 bp, Gossypium hirsutum
ggcgccgcaattcgtcgagcttccatcgtttggttccgcaacgatttacgggtccacgacaacgagtgtctcaacaccgccaacaatgagtccatgtcggttttgccggtttactgttttgaccctcgagattacgggaaatcctcatctgggttcgacaaaaccggtccttacagagccacattcttgattgaatcggtttcggatctccggaagaatctgcaagcacgagggtcggatcttgtagttcggattgggaagccggagagtgttttggttgatttagctaaagctatcggggctgacgctgtctatgctcatagagaagtttctcatgatgaggttaaggctgaggaaaagattgagtcggccatgaaagaagagggtgttgaagttaagtacttttggggaagtactttgttcc

SEQ ID NO: 223185 - DNA, 426 bp, Gossypium hirsutum
caggattgaagagataagattatagtgaaaaactaaacataataaagccccttcgacgggcttcattgatttgccctctcaaagcccaagaaaaatggcttctgcttccgctactctcctcaagtcttcacctattatcgacaagtccgagtggattaagggccaaaacctccgccacccttcggtttgttttgtacggtcacaccctacatcgggccgcctttgccgtccgtgctagttcatatgccgatgagcttgttaagaccgcgaaaactgttgcatctccaggtcgtggtattttggccatggatgaatcaaatgctacatgtgggaaacggcttgcctcgattggtctcgagaataccgaggcaaaccggcaagcttaccgtacccttctcgtgtctgcccctggcctcggtgactaca

SEQ ID NO: 223186 - DNA, 418 bp, Gossypium hirsutum
ggcggtctcacttcaagctgcagctacccttatgcaaccaatcaaggttgctgcggcgatcaaggaccaatgtgccgctcaggtcctcccagagcgtttctaaggccttcggtttggagcctgttggtgctaggcttacctgctctttgcaaactgacctcaaggacttggctctgaagtgtgttgatgctaccaagctcgctggtttcgctcttgctacatctgctcttgttgtctcgggagcaagcgctgaaggagtttcaaagcggctaacctacgctgaaatccaaagcaagacatacatggaagtcaaaggaacaggaactgctaaccagtgcccaaccatcgatggtggtgtcgactcttttgccttcaagcctggcaaatactacgccaagaagttctgcttggagcccac

SEQ ID NO: 223187 - DNA, 432 bp, Gossypium hirsutum
agccttccgttggtccccattactagcaatggcttcctcattgatctcatcggctaccattgccactggctctccggcacaggctaacatggtcacccctttcaccggcctcaagtctgcctctgctttcccagtcaccaggaaggccaacaacgacattacttctctcgcaagcaatggcggcagagtgcaatgcatgcaggtgtggcctcctactggaaagaagaagttcgagactctctcatacctccccgatcttacacccgtgcagttggctaaggaagtagattaccttcttcgctcaaaatgggttccttgcttggagttcgaattggaggagggattcgtgcaccgtaagtactcgagcttacccacgtactacgatggacgctactggaccatgtggaagctgcccatgttcgggtgcaccga

SEQ ID NO: 223188 - DNA, 409 bp, Gossypium hirsutum
cccacgcgtccgcccacgcgtccgtttttttttccttttcgattctttgatttgagaaaggaaacaggaaaaaatgggttctttcttttcatccaattcaacgccagaaaagtcatcatcttcatcttagcattcaggcatccaaacctttcattcatcacccagatggcaacttcacttcaactctgtcaaagacagctcacagcttatggttatagatttctcagcttcttggtgtgggccatgtaaattcatggaacctgttttgaatgccacggctgctaagttcactgatgttcagtttgtaaaacttgatgttgatgaactgcctgatgtggcacaggaatttggggttcaaggaatgccaactttcgtgttgctaaagaaagggaaggaagtggatagggtg

SEQ ID NO: 223189 - DNA, 423 bp, Gossypium hirsutum
acaaaatcagttgcttcacaatggcctctacaaccatggctctttcttccccatcagtcgccggtaaggcagtgaagttctccccttccacccctgaaatccggggaactggccgtgtttccatgaggaaaaccaccaagcctgttccttctggtagcccatggtacggtcctgaccgagttttgtacttgggtccactttccggtgagccaccatcttacttgaccggtgagttccctggtgactatggttgggacactgctggactctcagctgatcccgagacctttgctaggaaccgtgagctcgaagtcattcactgcagatgggccatgttgggagctcttgggtgtgttttccctgagctgttggctaggaacggtgtcaagttcggtgaagctgtatggttcaaggccgggtctc

SEQ ID NO: 223190 - DNA, 419 bp, Gossypium hirsutum
cctgaatttccctacgttcttcatgccccttaccataaccagctcgcctatctatggctgcgtccactaaggagcaacagcaggctgtccactgccatggagaggaccggccagtgggttttctcccaagagattcctactgatgttattgtcgaagttggtgaagccaatttcaatctacacaagttcatgctggtggcaaagagcaattacataaggaagttgataatggaaacaaatgaagcggatttgacaagaatcaacctgtctgaaatccacggaggccctgagatcttcgagaaagcagccaagttctgctacggcgttaatttcgagattacagtgcataacgtggcggctatgcgatgtgctgccgagtatcttcaaatgacggataaatactgcgacaacaacctggc

SEQ ID NO: 223191 - DNA, 415 bp, Gossypium hirsutum
gttgggtataagaaggccttcacctatacaaatggtggctattcctttggggttgcaacagagggatgtaattgggattgcagagacaggatcaggtaagactgctgcttttggtttggcctatgttagcttatatatctagattacctcctatgagtgaagagaatgaagctgaggggccttatgctgttgtaatggctccgactcgtgaacttgctcaacaaattgaggatgaaactatgaagtttgcacattatttaggtattaaggttgtttcaattgttggtggtcagtcaatagaggaacaagggtttaggattagacaaggttgtgaggttgttattgcgacccctggtcgtttgctcgattgtttagagaggcggtatgcggtgttgaatcagtgtaattatgtggg

SEQ ID NO: 223192 - DNA, 423 bp, Gossypium hirsutum
cttaacgctataatcattgaagaaaaatgggtttgaaggaggaattcgaggagtgtgcggagaaagctaagacccttccccagaacactaccaacgacgacaagctcattctctatggactctacaagcaagctactgttggaccagtgaacaccagccgtcctggaatgttcaacatgaaggaaaagtacaagtgggatgcatggaaggctgttgaagggaaatcgaaggaggaagcaatgaacgattatatcactaatgtaaaacagctgcaagaggctgctgctgcatcttcttgacgtgtgtgtgagaatagaaaatggtgtaattttcaagccctttgatacctatgggtttgaaaaggtctataactatgaataagcaatgtactatgttttattgctattaagttatattaatgaa

SEQ ID NO: 223193 - DNA, 422 bp, Gossypium hirsutum
ctcatggtatagttcatcgtgctatgatgggggaaagctggactgggcaattcgctgttaaaaacaaaatgggggaaagattttcagctgttgcaaccaatactccattttatgatgatgatggttctttggttggaatcatttgtgtttcgaccgatactcggccttttcaagacatgaaagttgcattgtcagctgaaaagcaagccgatggtgattcggcttttagctggtctaaaaacgcagtctcggctaaactcggtcttgatcctcagcagccgttacaagctgcaatcgcgtcgaaaataacgaatttggcgtccaaggtgagcaacaaagtgaaatcgaagattaggacgggagagaattgttccgatcgtgaagggggaagtggagatagtcattattctgatcatggtttg

SEQ ID NO: 223194 - DNA, 428 bp, Gossypium hirsutum
gtccgtttagctatagcatacactactagtacccactattagcaatggcttcctcaatgatctcggcggctaccattgccactgcctctccggcacaggctaacatggtcgctcctttcaccggcctcaagtctgcctctgctttcccagtcaccaggaaggccaacaacgacattacttctctcgcaagcaatggcggcagagtgcaatgcatgcaggtgtggcctcctactggaaagaagaagttcgagactctctcatacctccccgatcttacacccgtgcagttggctaaggaagtggattaccttcttcgctcaaaatgggttcccttgcttggaattcgaattagaggagggattcgtgcaccgtaaatactcgagcctacccacgtactacgatggacgctactggaccatgtggaagct

SEQ ID NO: 223195 - DNA, 366 bp, Gossypium hirsutum
acggaagccatgggcttccgtaacggttgctttctctccgattaccaccgctgcttcggccccttattcttcggtttccgatcggagaatatccgttagattaccgggatttcgtggtctcaagagtaaatcgacgtcggcgtcggtggttccgttgttccgatcggtgatccgggagccgcttatacgcggtcgaggtggccgtgtagtatgtgaagcccaggagaccgctgttgatgtgtcagcagtgaaggaagatgcatggcaatcacttgttcttgattgtgaattgcctgtgctggttgagttttgggctccatggtgtggaccttgccgtatgatacaccccgtagttgacgagctgtc

SEQ ID NO: 223196 - DNA, 408 bp, Gossypium hirsutum
  unsure (1)..(408): unsure at all n locations
atctacaccatgattgtaggtcaaggatattacaccttgatgttaaaccagaaaatggattgcttgatgagagttatagagcaattgtggctgattttggtttatcaaagttaataggaaaagatgaaagtggggttattacaacactaagagggactagaggttatttagcaccagaatggctattacaacatggagtttcagagaaatctgatatttacagctatggaatggttctttntgaaatgatcggtggtcaaagaaatgttagtttgattgaaaatgggattgacagatctcaaaggaaatggaatttctttcctaaaattctgaggaaaaaactgaaagaagggaaattaatagaagctattgatcaaagactggttgaagcangtggcggtggtggtg

SEQ ID NO: 223197 - DNA, 395 bp, Gossypium hirsutum
cttgcaatcctttgtagagatccgggatccattgtcaccatgtcttgctcaaatctgacaatgtgggtgtcctcaaaaccctctctttctgacacttcttcactctctttccgttctttcatcagcccttttcagctcccgtctcagagctcaacccccggtaacccttccaggtcctcatctgtaaccccagttcactgtggtcttcgtgagcttagagaccgtattgattcagtaaagaacacgcagaagatcactgaagctatgaaacttgtggctgctgctaaagttaggagagcacaagaagctgttgtcaatggcagacctttctctgagtccctggttgaagttctttacaacatcaatgaacagctccagactgaagacatagatgc

SEQ ID NO: 223198 - DNA, 420 bp, Gossypium hirsutum
  unsure (1)..(420): unsure at all n locations
ggagagccttttttgtgtagcgattctcagttagtcttttctttaagcttacagctgcggtccagagttttataatgggtaaggagaaggttcacatcaaccttgttgtcattggccatgtcgactctggcaagtcgaccactaccggtcatttgatctacaagcttggtggtattgacaagcgtgtgattgagaggttcgagaaggaggctgctgaaatgaacaaaaggtcattcaagtatgcttgggtgcttgacaagcttaaggctgagcgtgaacgtggtatcaccattgatattgccctgtggaagtttgagaccaccaaatactattgcaccgttattgatgcacctggacaccgtgactntatcaagaacatgattaccggtacctcacaggctgactgtngctgtctcatta

SEQ ID NO: 223199 - DNA, 400 bp, Gossypium hirsutum
cccacgcgtccgagccggcgagggaaggaaaacctgagagggtgaaaaatgccagctggggacggtctccgatctcggaccagggatctgttttccagacccttcagaaagaagggttacatcccattgtccacttatctcaggacctacaagattggtgactatgtggacgtcaaggtaaatggcgccgttcacaagggcatgccccacaaattctaccatggccgcactggtcgtgtctggaacgtcaccaagcgcgccatcggcgttgaggtcaacaagcaggtgggtaaccggattatcaggaagaggattcatgtcagagtggagcatgttcagccttcaaggtgcactgaggaattcaaactgaggaagataaagaatgatcagctcaaggcag

SEQ ID NO: 223200 - DNA, 402 bp, Gossypium hirsutum
gtcactttttttctttcgttcaatatttggctctttgtttttgttttttggtttagagagatggatcatgcagcagatgctcataggactgatttgatgacaataacacgtttcgtgttgaacgagcaatccaagtatcctgagtctcgtggggatttcaccatcttgcttaatcacatcgttcttggttgcaagtttgtttgctctgctgttaacaaggctggtcttgccaaactcatcggactcgctggggagactaatgttcagggtgaagaacaaaagaaattggatgtgctttcaaatgaagtctttgtcaaggctttagtaagcagtggcagaacatgcatccttgtctcagaagaagatgaagaagcgacttttgtagatccctcaaagcgtggg

SEQ ID NO: 223201 - DNA, 284 bp, Gossypium hirsutum
caaatggctttagcggtggaaactaccatttttttagatctgatgggcctgcgctcggtgcttctactgagatcgcaccagacgaaggcttgcttcttcgagcgtggccgcatccacatgccattcaactggtacagaacgagaggatggaaacggtattgtagcaccaagttattaaagaagctgtgcagcaccagcaagcgttctatgagaagcctgataatactatcgtgaccaacaatactcacaactgagattgtgaacagctgtacgtacctcaccaa

SEQ ID NO: 223202 - DNA, 432 bp, Gossypium hirsutum
cgtttacgaaaaatataatattctcactttcccggggatcaaaggccatatattttgcgaattcaattaatgggttttagaagaatgggttggcatgagctactatgggtcggaaggctgcttgttcttatgcaactgcttcatggggtgtttggttggggaaaggacggtcattttgctgtttgcaagatagctgaggaatatcttactaaagatgctctggctacagtaaaggaactgctccccgattccgctagaggtgagcttgcatctgtatgctcctgggctgatgatgtaaggtggcactatcactggtctagtcccttacactatgttgacactccagatttcaagtgtaattataaatactgccgggactgccatgatactgctggacataaggatcgctgcgtaactggagccattttcaac

SEQ ID NO: 223203 - DNA, 349 bp, Gossypium hirsutum
atagtaatctcatcagcaagaaggttatttaacagtacattggaatccagaacaaaaagtagtctccaaaagctataaaacattcaacacaaagaggaaggaacccttatcatgaaatctccatcatctcagctaaagctttggttgcagcagcttaatagacgtaaccctttaccaacattcctttcttggcctcttctgaatctccctcgccggtgtatttcccgagctgagcgagtgagttggctttggcacggacaaagagtgcattctgagcagccttaacgttctcgggtctgccgtcccatgtcttcaagcaagtgttctggagagctctggcatacgagaa

SEQ ID NO: 223204 - DNA, 261 bp, Gossypium hirsutum
cccacgcgtccgccgatattttgcagaattcgaagtttgaggaacacagaattagtagggaaagggatgtgattctaagggaaatggaagaggttgagggtcaaacggaggaggttatttttgaccatttgcattcaactgctttccagtacactcctcttggtagaactattctcggacctgctgataatattaggacgatcaccaaagagcatctgcaaaactatattcagacacactatactgctcctagaatggtca

SEQ ID NO: 223205 - DNA, 432 bp, Gossypium hirsutum
cccacgcgtccgcccacgcgtccggttttacgtcatcacatgggagtcacccaaggaacaaatcttcgagatgccaacaggtggtgcagccatcatgagacaaggtccgaacctgctgaaattggctcgtaaagagcagtgcttggctcttgggactaggcttaggtctaagtacaagatcaagtatcagttttatagggtgttccctaatggtgaggttcaatatttgcaccctaaagatggggtgtaccctgagaaggtgaaccctggtcgacaaggtgtgggacagaactttaggagcattgggaagaatgttagccctatcgaggttaagttcactggcaaacaagtctatgatctgtaataaatttatgttcatgttttgagatgttttattttaatggtgattgttgcaatttaaatacacttttt

SEQ ID NO: 223206 - DNA, 422 bp, Gossypium hirsutum
cccacgcgtccgccagtctcaagcaaccaaaccaaacaaccccttatccttttccatctctctcaaagaaatggctacatctcagctaacagcgtcgtcagtgacagcatcagctaggaacttggcttcattacaagggcttaggctgtccactgtcaaattctcttcctttggaacattaaagcctggggctttgaccagcaggtccttcaaacgtttggttgttaaagcggctaccgttgttgcccctaagtacacttcagttaagcccttgggtgacagggtgttggtgaagattaaagaaacagaggagaagactgagggtggcattttgcttccaacaactgctcaatcaaagcctcaaggaggtgaggtggttgcttgtggtgaagggaagacaattgggaataccaaattggaaa

SEQ ID NO: 223207 - DNA, 422 bp, Gossypium hirsutum
gacggtcgatttgtttaaccccagcaactcgttgaaatggcgtccaagttgtgtgactcatgcaaatcagcgacggccactctgttctgccgtcctgactcggcttttctttgccccaactgctactccaaaatccatgccgccaacaagctagcctcccgtcacgctcgggtcttggtctgcgaagtttgcgaacaagcaccggctcacgtcacctgcaaggctgacgcagccgctctttgcgtcacttgtgaccgtgacatccactccgctaaccctctcgctcgccggcacgagcgggttcctttggctcccttttacgattccgtcaagcccaacacagcgtttaacttcctggacgaccgttacttatccgacgttgatggagacgctgacagcagcagggaagaagcggaggcagc

SEQ ID NO: 223208 - DNA, 417 bp, Gossypium hirsutum
gccgaccagaaggcctacgctgcggcgaagtagggggaagtgtggctaaggtgcagcccacgaagtcacgcagctcggtttgttgcgtggagttcaaccccttcggagatgcattgatagctgccggatgcgccgaccagaaggcctacgcctatgatgtacggaaaatggtggaacctgtacacattttcgatggacatacgaaaaccataacatacgttagatttctgaatgcccaaacactggtttccgctggaaccgacgggtgtttaaaactatggaatatcgttgattctcgtttacttagaacatacaaagggcacgtaaacagtcggagttttgtggggttgtcagtgtggaggcatggagggttgcttggatgcggatcagaaaataaccaggtgttcgtttatgata

SEQ ID NO: 223209 - DNA, 406 bp, Gossypium hirsutum
  unsure (1)..(406): unsure at all n locations
cccacgcgtccgtctctctctctcttcaacaagccggcgagggaaggaaaaccagagagggtgaaaaatgccagctggtcacggtctccgatctcggaccagggatctgttttccagacccttcagaaagaagggttacatcccattgtccacttatctcaggacctacaagattggtgactatgtggacgtcaaggtaaatggcgccgttcacaagggcatgccccacaaattctaccatggccgcactggtcgtgtctggaacgtcaccaagcgcgccatcggcgttgaggtcaacaagcaggtgggtaacccgattatcaggaagaggattcatgtcagagtggagcatgttcagcctttcaagtgcactgaggaattcaactgangaagataagatgatcac

SEQ ID NO: 223210 - DNA, 438 bp, Gossypium hirsutum
gaaaaagtctctgacacttgcaacacaataaactacacataaaatctgtgcctgcccttttctctgcacacctcgggatatcagtttcaactccactcatcccacgggttgagtaccgagtccatatatcgttaagttcaaggaaggaacttgggcatcatgggtcttaaggcattagactatgagacaatgaatgaaaacgtgaagaaagttcaatatgcagttagaggtgagttgtatcttcgagcttctgagcttcagaaggaagggaagaagattattttcacaaatgttggcaatccctaagctcttggacagaagccactgactttccctcgtcaggtggttgctttgtgccaagctccatttctgctagatgatcctaatgtaggacttatatttcctgctgatgccattgcaagagcaaaacattatctt

SEQ ID NO: 223211 - DNA, 291 bp, Gossypium hirsutum
caaaaatggcggacaaagctaaaaccgaaaacccatctttactccatggaaaatacgagcttggccgtatgttgggtcatggaaccttcgccaaagtctaccatgcgaagaaccttcaaacagggaagaatgtcgccatgaaagtggtgggcaaagagaaagtgatccaagtcgggatgatggagcagatcaagcgagagatctccgtcatgaaaatggtgaaacaccccaacatcgtcgagctgcacgaagtgatggcgagcaagtccaagatttacttcgccatggagc

SEQ ID NO: 223212 - DNA, 435 bp, Gossypium hirsutum
cggacgcgtgggcggacgcgtgggcggacgcgtgggcggacgcgtgggcgagaccattgctcaactatttataatttggtcatttcttttgtgtggtggttctctcagtttttgagtttgctgcgcttgtctgtagtccatgtgactctctttcctttgctttcgtttcccagtctcttactttttgaatctcagatcaggaaattatcaaatccgagccgccatggaggttaacgacaagcttttgaacacgggtattctcatagtagccaccctagtagtggccaagctcatatctttcctcataatgcctagatctaagaaacgggttccaccagcagtcaaagcctggccggtaatcggtgggctccttcgattcgtgaaagggcctatggtgatgctccgggaggagtacccgaagcttggcagtgtttt

SEQ ID NO: 223213 - DNA, 434 bp, Gossypium hirsutum
ctgacgcgtgggcggacgcgtgggcggtctcttttgcggacgcgtgggcgagaccggggcgcaactatttataatttggtcatttcttttgtgtggtggttctctcactttttgagtttgctgcgcttgtctgtagtccatgtgactctctttcctttgctttcgtttcccagtctcttactttttgaatctcagatcaggaaattatcaaatccgagccgccatggaggttaacgacaagcttttgaacacgggtattctcatagtagccaccctagtagtggccaagctcatatctttcctcataatgcctagatctaagaaacgggttccaccagcagtcaaagcctggccggttatctgtgggctccttctattcgtgaaagggcctatggtgttgctccgggaggagtacccgaagcttggcagtgttt

SEQ ID NO: 223214 - DNA, 399 bp, Gossypium hirsutum
agttgatcaggcaaaggtaccgtgaagccgccgacataatcaaaaagggcaaaatgtgcgccttgttcattaatgatctcgattctggtgccggtcgtatgggaggaaccacccaatacaccgtcaacaaccagatggttaacgctaccctcatgaacatcgccgataaccccaccaacgtccagctccccggtatgtacaacaaggaagagaacccccgtgtccccatcatcgtcactggtaacgatttctccacactgtatgctcctctcatccgtgacggtcgtatggagaaattttactgggcaccaactagggacgaccgtatcggtgtttgcaaaggtattttcaggaccgacggcgtccgagatgaagacattgttaagctcgtcgacacct

SEQ ID NO: 223215 - DNA, 432 bp, Gossypium hirsutum
agttgcttcacaatggcctctacaaccatggctctttcttccccatcattcgccggtaaggcagtgaagttctccccttccacccctgaaatccggggaactggccgtgtttccatgaggaaaaccaccaagcctgttccttctggtagcccatggtacggtcctgaccgagttttgtacttgggtccactttccggtgagccaccatcttacttgaccggtgagttccctggtgactatggttgggacactgctggactctcagctgatcccgagacctttgctaggaaccgtgagctcgaagtcattcactgcagatgggccatgttgggagctcttgggtgttttttccctgagctgttggctaggaacggtgtcaagttcggtgaagctgtatggttcaaggccgggtctcaaatcttcagtgagggt

SEQ ID NO: 223216 - DNA, 435 bp, Gossypium hirsutum
cccacgcgtccgagctgattctcacatccgatctttcctttttttttaaataattttttatctcccccagttcatggcataagaattgtcttcattcagattcgggcacctgctctctttcccccttccttcagctctggttctctggaggatggatcatgaaagggcccccattttgagatctaaggatcaaaagaaaattgagatgccgttggcgttggtgtctgaagaaagtaatatcattttaattccagcagagttgaaatgcttctctgtttctacttccaggcaagaaaacataactttggaatcaaaggaacgacagaagtcggcatcccaactttctgggcttatcattttctatcttgtggttatgttagtagagattgtcggtggaatgaaagccaatagccttgcagttttgacagatgcggc

SEQ ID NO: 223217 - DNA, 260 bp, Gossypium hirsutum
caaaatcaactggttaacaatggcctctacaaccatggatgtctcttgcccatcattcaccggtaaggcagggaatttctcaccatatcacccctgaaatacagggaactggccgagttttcatgatgaaaaccaccgagcctgttacttctggtagcccatgggacagtcctgaccgagttaaggacttgggtccactttccggagagccaccatcttacttgaccagcgagtttcctgcagactatggatgtgacact

SEQ ID NO: 223218 - DNA, 422 bp, Gossypium hirsutum
  unsure (1)..(422): unsure at all n locations
ctagcctacggtgagatcatcaacgggcgttatgctatgttgggtgcagtaggtgcgattgcccctgaaatacttgggaaagccggtcttatcccagcagaaacagcccctccttggtttaaaactggtgtgatcccaccagcaggggcatacaactattgggcagacccttacacttttgttgtgttcgagatggcactcatgggatttgagatcacactatgttccaagactgggccaaaccatgttcgatggagaaacaatatttcttggggttcgagaagtacctaggagggtctggtgagccggcataccctggaggaccactngttaacccacttggttttgtgaaagatgacaagtcattgaaggatttgaagctgaaagaagtgaagaatgggagattggcaatgttggcaatc

SEQ ID NO: 223219 - DNA, 310 bp, Gossypium hirsutum
cccacgcgtccgttcagccttctttggatcgatcaacaacaacgcgtcaaattcaacgagggcgttgtcgaacgtgagtgtggacaaggcgctaacctcgacgttctggccgacaaactcacggacgatcgtacgcacaccattaaggctatctgcattgctgacaacgaaaccgcgactggagttaccaacaacttgaacacagtgagaaatctactacaccattacctgcacccagcactggttgttgtctatggaggtgcctccatttgcgctctcgattaacggatggatgaatggggagtagacg

SEQ ID NO: 223220 - DNA, 436 bp, Gossypium hirsutum
caaagtccaatcactcccaatactttcataacatttcacgaacttcactctccagtctccaatggcggctgccgtctccaccatcggtgctgtcaaccgagcaccgttgagtttgaatggatcaggtgccggagcttctgctccaagctcagctttcatggggaacagcttgaagaaagtgagcgctaggttcaacaacaacggcaaggctccagtgggaagtttcatgattgtggctgccaaagaaatcgacgaagacacacagaccgaccaggaccgatggaagggtcttgcttatgatatctccgatgaccaacaagacattaccagaaggaaaggtatggtcgactcattgttccaagctcccatgaacgatggtactcactatgctgtcatgagctcctatgagtacattagccaaggccttcgcacatac

SEQ ID NO: 223221 - DNA, 417 bp, Gossypium hirsutum
gagttgattatggtgaacaacatagcaagacttgtggccactctcggtttggtcgaatttatgaacaagggcattacccacaatgggatgaaaatcaccctattcactttgttggccattcaactggtgctcaagttgtgcgtgtcttgcagcaaatgcttgctgataaggcattcgagggatatgagaatacttctgagaattgggtgttaagcataacagccttatctggggctttcaatgggactacaagaacgtatttagatggcatgctctatgccgcttaggagttataatatatgattggttggacatccccttgctaaaggcctattacaatttcgggttcgatcactttaacttgtcatggagaaaagtaggtctttggggtcttggtgattgccttttggggaatgc

SEQ ID NO: 223222 - DNA, 433 bp, Gossypium hirsutum
ggcactctagtcccgatcattcaactactccccattcagagagatggacaagtttccggcgtttcttcttcttccatttctttgttttttccactctttatttctttccgacgccgatgttactggaaattcgtccgatcccggcctaactctctccgccgactctctctgcgcccagcttatcgagcccaatggttatttctgcactgaacacactattcaaactaaggatggctatttattagctctacaacgcgtctcatctcgttctggggatcttaaagttcagcaaggtcatcctgttctgcttcagcatggattattcatggcaggtgatgcatggtttttggattccactgaacagtcgttgggcttcatccttgcagaccagggttttgatgtgtgggttggaaatgctcgtggaacacgttgg

SEQ ID NO: 223223 - DNA, 374 bp, Gossypium hirsutum
cccacgcgtccgcccacgcgtccgagtggatcatacgtatgatgcagttgtggttggtgctggtggtgcggggctgagagcagccattggtctttcagagcatggatttaatactgcttgcataactaagcttttcccaactcgttcacatactgttgcggctcagggtggcataaatgctgctttgggaaatatgactgaagatgactggcgatggcacatgtatgacacagttaaaggaagtgattggttaggtgatcaggatgcaattcaatatatgtgcagggaggcaccaaaagccgtgattgaactcgagaattatgggctgcctttttctcgaacagaagatgggaaaatatatcagagagcatttg

SEQ ID NO: 223224 - DNA, 431 bp, Gossypium hirsutum
cccacgcgtccgtttagctatagcatacactactagtacccactactagcaatggcttcctcaatgatctcatcggctaccattgccactgcctctccggcacaggctaacatggtcgctcctttcaccggcctcaagtctgcctctgctttcccagtcaccaggaaggccaacaacgacattacttctctcgcaagcaatggcggcagagtgcaatgcatgcaggtgtggcctcctactggaaagaagaagttcgagactctctcatacctccccgatcttacacccgtgcagttggctaaggaagtggattaccttcttcgctcaaaatgggttccttgcttggaattcgaattagaggagggattcgtgcaccgtaaatactcgagcctacccacgtactacgatggacgctactggaccatgtggaa

SEQ ID NO: 223225 - DNA, 386 bp, Gossypium hirsutum
ggaaaaaggaaaaagggaactgaattctttgacggagagaagagttaggcgttatggacggcaatactacggaggctgagcggtggttgacgattgcggagaagctgttggcggcgcgtgatttgcacgggaccagaaccttcgcgatccgagctcgtgaatcggcccctatcctcgccgaccaaatcctagccgtgacggacactctcataacggctcaatctaactctcaagactggtacgggatcctccaactcgtgccgttaactcagtccatggaagttgtggcgagtcagtataggaaactcgcccttcttttgaatcctgggaggaacaggctctctttcgcagatcaggcgtttcgatttgtttccgaagcttggaat

SEQ ID NO: 223226 - DNA, 413 bp, Gossypium hirsutum
gcttctgcttctgatatttctttaggttgtgtttggtatcgtcattttagatttatcatcaatggcggagactgaaacgtttgcctttcaagctgagatcaatcagcttctcagcttgattataaacactttctacagtaacaaggagatctttcttcgtgaactcatcagcaattcttccgatgccttagacaagatcagatttgagtctttgacagacaagagcaagcttgatgctcagccagagttgttcattcatattgtgccagacaagactaataacaccctatcaatcattgatagtggtgttggcatgaccaaggctgatttggtgaacaatttgggtaccatcgcaaggtctggcaccaaggagttcatggaggcattggctgctggtgcagatgttagtatga

SEQ ID NO: 223227 - DNA, 435 bp, Gossypium hirsutum
cttttgtataactgtagcatatagtactagtaagcagtaatagcaatggcctcctccatgatctcatcggcaaccattgccaccgtgaactgctcctccccggcacaggccaacatggtggcccccttcaccggcctcaagtctgcctctgctttcccagtcactaggaaggccaacaacgacatcacttctcttgcaagcaatggtgggagagtgcaatgcatgcaggtgtggcctcctcttgggaagaagaagttcgagacactctcatacctccccgatcttacacccgtacagttggctaaggaagtagattaccttcttcgctctaaatggattccttgcttggaattcgaattagaggagggattcgtgcaccgtaagtactcgagcttacccacgtactacgatggacgctactggaccatgtggaaa

SEQ ID NO: 223228 - DNA, 414 bp, Gossypium hirsutum
  unsure (1)..(414): unsure at all n locations
gagactcttttgtataactgtagcatatagtactagtaagcagtaatagcaatggcctcctccatgatctcatcggcaaccattgccaccgtgaactgctcctccccggcacaggccaacatggtggcccccttcaccggcctcaagtctgcctctgctttcccagtcactaggaaggccaacaacgacatcacttctcttgcaagcaatggtgggagagtgcaatgcatgcaggtgtggcctcctcttgggaagaagaagttcgagacactctcatancctcccgatcttacacccgtacagttggctaaagaagtagattaccttcttcgctctaaatggattccttgcttggaattcgaattagaagagggattcgtgcaccgtaagtactcgagcttacccacgtactac

SEQ ID NO: 223229 - DNA, 425 bp, Gossypium hirsutum
  unsure (1)..(425): unsure at all n locations
ttttgttagaaagacgttagtagcggaaaattttgaacgttactattaaggaaggataatgctatccttgcgcttcgctattcctaccgcgaatacattaactccgcccaagattaaaccaaaaccgggtttagtagtacataccgcttggaaccaaacggacctttttccttctcttcccaaacgaaatgattataagctacaagcagctaccacggacttatctgtggcgggagatataccggcggaggaggtggtggagcttccggcggagctgagcagagagttgatgccgaaacacgtagcggtgataatggacgggaacgggcggtgggctcngcagcggggattggcgacatcagcgggacacgaagccngtgtaaaggcgttgagggagctggtcgaactatgttgccagtggggga

SEQ ID NO: 223230 - DNA, 424 bp, Gossypium hirsutum
gtctatttagtccaaggattccttttttgttattattttattttcctagtacttgaaatttctttgctcaagtatttctcctgtcttctacgcttatatcaaacgcaaatgaacagaaaagattgtttctttttcactgtttctgggattttcttcatttggaatgaactgaattttgattgaaagatggtggcttttgggaagaagttgaaagagtcacaaattcaagaatggcaagggtattacataaactacaaattattgaagaagaaagttaatagatatgctcagcaacttgaaattggagcacaagatcaccattatgttcttaaagatttctcaagaatgttagatagtcaaattgaaaagattgtattatttctgctggaacaacaaggacaactagcaaacagattatgtgatc

SEQ ID NO: 223231 - DNA, 359 bp, Gossypium hirsutum
aacaaaatcaactgcttcacaatggcctctacaaccatggctctttcttccccatcattcgccggtaaggcagtgaagttctccccttccacccctgaaatccagggaactggccgtgtttccatgaggaaaaccaccaagcctgttccttctggtagcccatggtacggtcctgaccgagttttgtacttgggtccactttccggtgagccaccatcttacttgaccggtgagttccctggtgactatggttgggacactgctggactctcagctgatcccgagacctttgctaggaaccgtgagctcgaagtcattcactgcagatgggccatgttgggagctcttgggtgtgtttt

SEQ ID NO: 223232 - DNA, 433 bp, Gossypium hirsutum
gatgcataatgatgaacaagaaaagctctacttgatagactttgagtatgggtcttacaagtacagaggctttgacattggaaatcacttcaatgaatatgctggatatgactgtgactatagcttgtatccgagtaaagatgaacaatatcattttttcaggcattatttagaacctgaaaaaccatgcgaggtatcagaaaaagaccttgaagctctgtatgtggagactaatacgttcatgttagcttcacatttatattgggcgttatgggccttaatccaggcaaggatgtcacccatcgattttgattatctggggtatttcttcttgcggtacaatgagtataagaagcagaagagaatgtgtttctcccttgcaaaatctcacatatctggttctggaaaagcataagactctgatggcgttctc

SEQ ID NO: 223233 - DNA, 173 bp, Gossypium hirsutum
tctcaagtcatttcacaaagtcggactagagaggtgtaggataagtgggagctctcgggcgaaatggaaataccactacttttaacgttattttacttattccgggaatcggaggcggggcacggcccctctttttggacccaaagccggcttcggccggccgatccgggcgg

SEQ ID NO: 223234 - DNA, 417 bp, Gossypium hirsutum
ggcgatgtccccgattgtgtcaaacagtttttcactttcgacaagacacttagttactcaggccacttcaagcccttagctgcagttcaagttaccgagttggccgacggggtttttattgggtgtatagtgaatcacgctgtgaccgatgggacttcattctggcactttttcaacactttcgctgagatcaccaaaggggctttaaaaatatcgaaatctcccgattttggtcggaacaccgtgtttaattcccaagccgtgcttaaattccctcccggaggacccaccgttactttcgccggcgacgagccgttgagggaaaggattcttcatttcagcagagaagcgattttaaaacttaaatacagagctaattacggttgtttattaactaaacaaacgaattctcgagtc

SEQ ID NO: 223235 - DNA, 425 bp, Gossypium hirsutum
tttttgtattaagagtcgccctttggtgtttttctaattcaatcagtgaggtgaagaaagagaggtcttgctgtggtggaaactgcggttgcggctccggttgcaagtgcggcggcggcggcggctgcggctgcggcggttgcaagatgtaccctgagatgaactttgctgagcaaaccacaactgagacacttgttcttggcgtggcaccccggaaagtgaactttgatggagctgaaatggaaactggggctgaaaatggctgcaaatgtggagataactgcacttgcaacccttgcaattgtaaatgaggggaaaaaaaaaaccgaagcatattatggaagctgatctaaataatatatgatgtatttgggtttttattattagaataaagcagccatggttcattaggtgttttgcttctt

SEQ ID NO: 223236 - DNA, 434 bp, Gossypium hirsutum
tgaaattcaaagggaagggatggcgatccccgaagtaaaccgccaacaagccagagggagacctacggcgtcttcaacacgaccgccggttcgagctagaattcggctccggcagctgcttcgagtcacttccgtggcatgcgggatacagttcggatgggctttacagctctcgcttttgacaccttacgttcaagagctaggtatacctcaccagtgggccagcatcatatggctttgcgggccgctttcgggcctcctcgtacaacctctggtgggacacatgagcgaccgatgcaccagccgcttgggtcgtcgccgaccttttatcgtggctggtgcagtttcgattatcgttgccgttttgatcatcggtcactccgccgatatcggatggttgttcggcgatacagaggcgtcccggccgagagcta

SEQ ID NO: 223237 - DNA, 342 bp, Gossypium hirsutum
cccacgcgtccgcccacgcgtccgcccacgcgtccgctatagcatacactactagtacccactactagcaatggcttcctcaatgatctcatcggctaccattgccactgcctctccggcacaggctaacatggtcgctcctttcaccggcctcaagtctgcctctgctttcccagtcaccaggaaggccaacaacgacattacttctctcgcaagcaatggcggcagagtgcaatgcatgcaggtgtggcctcctactggaaagaagaagttcgagactctctcatacctccccgatcttacacccgtgcagttggctaaaggaagtggattaccttcttc

SEQ ID NO: 223238 - DNA, 398 bp, Gossypium hirsutum
gtatcgacatctaaaactcaaaagagtctgtcatttcccttacttcctcaaaccagaagccatggccagcatgataatggcttcctcaaagcctgtaatctccattgctgcttcatcatccttcttttccaaacccaaactcaaacaaatcccacaactttccctcccaaaactccccaccccaaagttcttgaaaacccaacaaatcccctcactctcctccaccactctcaaatctatctccctcttcacagtcaccactttatcctttgccccaccttctcttgctgcagaaatagaaaaggccgctcttttcgatttcaacttaaccctccccatcatgatggtccagttcttgtcctcatgtttgctcttgacaaggtctactttaccccact

SEQ ID NO: 223239 - DNA, 417 bp, Gossypium hirsutum
cggacgcgtgggggggaggcaaaggtcaaggaaaatctttccaatgtgagcttgtctttgccaagatgggaatcaaccccattatgatgagtgccggagaattggaaagtgggaacgccggagaaccagccaagttgatcaggcaaaggtaccgtgaggccgccgacattatcaagaaagggaaaatgtgttgcctctttatcaacgatctcgacgctggagccggtcgtatgggaggaaccacacaatacacagtgaacaaccaaatggtgaacgccacactcatgaacatcgctgataaccccaccaacgttcagctccccggtatgtacaacaaggaagagaaccctcgtgttccgatcattgtcaccggtaacgatttctcgacgctgtacgcgccgctcatccgtgacggtc

SEQ ID NO: 223240 - DNA, 227 bp, Gossypium hirsutum
ctcactcgttcgttccatatctgctagatgaacctaatgtaggactcatatccaccgccggagccattgcaagagcaaaacattctctttcattgacttgtgcaggtctaggtgcatatagtgattccagaggtattacaggcgttaggaaagacgttgctaaattcaatgagaggcctaatggccatcctattgacccagagattatatttgtcactgacggtgcc

SEQ ID NO: 223241 - DNA, 426 bp, Gossypium hirsutum
ctccaccatcacccccaaaaaacaaagcaaattgtagaagatggcaacacaagcacttgtatcatcgtctcttacctactcagtggagactgcaaggcagattcttggagctaaacgacaaattgggccttcaaggaaaggatcctttgttgttaaggcagcttcgactccacccgttaagcaaggagctgatagacctttatggtttgcatctaaacaaagcctttcatacttggatggcagccttccaggtgattatggatttgaccccttgggactctcagaccctgaaagtccatgagggttcatcgagcctaaatggctagcctacggtgagatcatcaacgggcgttatgctatgttgggtgcagtacgtgcgatcgcccctgaaatacttgggaaggccggtcttatcccagcaaaaac

SEQ ID NO: 223242 - DNA, 350 bp, Gossypium hirsutum
ttcaagctgcagctaccctgatgcaaccaatcaaggttgctgcaccatcaaggaccaatgtgctgctcaggtcctcccagagcgtttctaaggccttcggtttggagcctgttggtgctaggctcacctgctctttgcaaactgacctcaaggacttggctcagacgtgtgttgatgctaccaagctcgctggtttcgctcttgctacatctgctcttgttgtctcgggagcaagcgctgaaggagttccaaagcggctaacctacgatgaaatccaaagcaagacatacatggaagtcaaaggaacaggaactgctaaccagtgcccaaccatcgattggcgtgtcgac

SEQ ID NO: 223243 - DNA, 284 bp, Gossypium hirsutum
cccacgcgtccgcccacgcgtccgattttgcgtggcaatgtcgacggcttctatcaacggttggtgccttacctcctcttcttccaccactaccacctcctctttttccgctcgtcgacgacctacattgcggccttcagtcgtcgctagccttaactcttctccttctcctccgactcttatccaagaccgcccgggttttgctgcccctattcctttgctcaccccgagagaagagatgggaaacaagtcctacgacgaaaccattgaagctctcaagaaac

SEQ ID NO: 223244 - DNA, 423 bp, Gossypium hirsutum
gcagaaggagttaataatcggaatggagatcggttcccgcattacaatctatgacatggaaaacataaaagtgctgattagccggttggaaattgagatggaatctttattgcataatgctgattttgcagttagagaagaagatgcagtgaagcttgcaatcaatgagatcaagggaaaattagaagcatttatgaaaaccattgaggaattgggtcgacaggccgaaaattgtagccgtgatattaggatggcgaggacggtagttttgcagaagatgatgaaacgttctgggaattcatcaacgggtgacagcccgtgggaagtgtagcaatgaggtaaatttcagtgtgttaatgttgtaataattttatgctgtattcaaagtaatgaagttgctccactggatttgatcttatacgt

SEQ ID NO: 223245 - DNA, 413 bp, Gossypium hirsutum
gttgaccaagattgacagacgatctggcaaggaactcgagaaggaacccaagttcttgaagaacggtgatgcaggtatggtaaagatgattcccaccaaacccatggtggttgagactttctccgaatacccaccactcggacgttttgctgtccgtgacatgcgccagaccgttgctgtcggtgtcatcaagagtgttgagaagaaggacccaactggtgctaaggtcaccaaatctgctgccaagaagaaatgagagattattgcagagataattatatcagttttcattacagctttggacaattatcttaaatttggactttaaatttactttttgtgagacttgttgatttgctttttaaacaaattctagttttatgtttaatgttttaattctgagcgttctatat

SEQ ID NO: 223246 - DNA, 411 bp, Gossypium hirsutum
aggatgagtacactggatgcaactagagcagaacttgctcttgtagttttgtatttgaataaggctgaagcaagggataagatatgcagggctatacaatatggctcgaaattcttaagtgatgggcagcctggcacagcacaaaatgttgacaaatcaaccagcttggcacggaaagttttccgcctttttaagtttgtgaacgatttgcatggtcttattagcccagttcctcaaggaactcccgttccacttgttctgctaggaaagtcaaagaatgcactgttgtcaactttcttatttctcgatcaaattgtgtggcttggcagaacaggcatctataagaacaaagaacgtgctgagttgattggacgaatatcccctttctgttggaatggatcaataatatgt

SEQ ID NO: 223247 - DNA, 400 bp, Gossypium hirsutum
actactagtacccactactagcaatggcttcctcaatgatctcatcggctaccattgccactgcctctccggcacaggctaacatggtcacccctttcaccggcctcaagtctgcctctgctttcccagtcaccaggaaggccaacaacgacattacttctctcgcaagcaatggcggcagagtgcaatgcatgcaggtgtggcctcctactggaaagaagaagttcgagactctctcatacctccccgatcttacacccgtgcagttggctaaggaagtagattaccttcttcgctcaaaatgggttccttgcttggagttcgaattggaggagggattcgtgcaccgtaagtactcgagcttacccacgtactacgatggacgctactggaccatgtg

SEQ ID NO: 223248 - DNA, 397 bp, Gossypium hirsutum
cccacgcgtccgcatggcggtgccaaaatgtcagcctccgccgcttccagctacgccaccgctttagccgatgtagccaagtccaacaacacccttgatgccaccagctccgacgttgaaaaagtcgagacaatcttctccgacccacaagtcctcgaattcttcaccaaccccaccattgatgtcctcaaaaaacgtcaggttttggatgagattgttagctcctccgagcttcagccgcacacggcgaattttttgaacatcctggttgatgccaagaggattgatcttatcaaagaaatcgtgaaagagttcgagttggtttacaatcagctgacggatacagagctggcgggggggagttcagtggtgaaatggagtctcaacatttgcacag

SEQ ID NO: 223249 - DNA, 366 bp, Gossypium hirsutum
acaaaatcaactgcttcacaatggcctctacaaccatggctctttcttccccatcattcgccgggaaggcagtgaagttctccccttccacccctgaaatccagggaactggccgtgtttccatgaggaaaaccaccaagcctgttccttctggtagcccatggtacggtcctgaccgagttttgtacttgggtccactttccggtgagccaccatcttacttgaccggtgagttccctggtgactatggttgggacactgctggactctcagctgatcccgagacctttgctaggaaccgtgagctcgaagtcattcactgcagatgggccatgttgggaagctcttgggtgtgttttccctgag

SEQ ID NO: 223250 - DNA, 317 bp, Gossypium hirsutum
agctatagcatacactactagtacccactactagcaatggcttcctcaatgatctcatcggctaccattgccactgcctctccggcacaggctaacatggtcgctcctttcaccggtctcaagtctgcctctgctttcccagtcaccaggaaggccaacaacgacattacttctctcgcaagcaatggcggtagagtgcaatgcatgcaggtgtggcctcctactgggaaagagaagtttgagactctctcataccttcccgatcttacacccgtgcagttggctaaagaaagtagattaccttcttcgctcaaaat

SEQ ID NO: 223251 - DNA, 387 bp, Gossypium hirsutum
gagataagagaaagcactgaaaaagcaaaaccatggcctctgcttctctcctcaagacttcaccagttttagacaagtctgagtgggttaagggtcacacccttcgccaaccttccacttctgtggtgaggtgccaccctgttgcaccctccggactaactgtgcgtgcaagctcatatgccgatgagcttgtcaagactgctaaagctattgcttctcctggccgtggaattttggccatggatgaatccaacgctacctgtgggaaaacacggaggctaaccgccaagcctacaagacgttgcttgtttcagctcctggccttggtcagtacatctcaggtgccattctttttgaagaaaccctctatcaaaccacaattgatgg

SEQ ID NO: 223252 - DNA, 418 bp, Gossypium hirsutum
cccacgcgtccgttttattgttccttccttcgccgtctactgctcttgtgacctcgatttcaagtgaaacagaatgggtaaggaaaagactcacattaacattgtggtcattggccatgtcgattccggaaaatcgaccaccactggccacctgatctacaagcttggtggtattgacaagcgtgtgattgaaaggtttgagaaagaagctgctgagatgaacaagaggtcattcaagtatgcttgggtgcttgacaagctcaaggctgaacgtgagcgtggtatcaccattgatattgccttgtggaaatttgagaccaccaaatactactgcactgtgattgatgcgcctggacaccgtgactttatcaagaacatgattactggtacctcgcaggctgactgtgctgttttgatt

SEQ ID NO: 223253 - DNA, 369 bp, Gossypium hirsutum
  unsure (1)..(369): unsure at all n locations
aacaaaatcagttgcttcacaatggcctctacaaccatggctctttcttccccatcattcgccggtaaggcagtgaagttctccccttccacccctgaaatccggggaactggccgtgtttccatgaggaaaaccaccaagcctgttccttctggtagcccatggtacggtcctgaccgagttttgtacttgggtccactttccggtgagccaccatcttacttgaccggtgagttccctggtgactatggttgggacactgctggactctcagctgatcccgagacctttgctaggaaccgtgagctcgaagtcattcactgcagatgggccatgttgngagcttttggtgtgttttccctgagctgt

SEQ ID NO: 223254 - DNA, 443 bp, Gossypium hirsutum
atagtggcgggtttttcaagcaaaataacaactggagttaagctctctcactgagaaaaaactgataagagtgaagaattggcaatcaacatggagaacggatatatcaacccggcaccaagtccacttaggaaaatcatcacggttgcatccattgctgccggcatccagtttgggtgggctctgcagctgtctctcctgacaccctacgtccagacccttggtgtaccccacgcttgggctgctttcatttggctttgcggtcccatttctggccttctggttcaacccatcgtgggatacaacagtgaccgttgcacctctcggttcggccgacgccgaccctttattgtcattggagctctctctgtctccatagctgtcttcctcatcggtttcgccaaagacattggccaccatgcgggagattccttgaagagaac

SEQ ID NO: 223255 - DNA, 413 bp, Gossypium hirsutum
agcagccaacatggcctcattagcagcctccaccgctgccgcctcccttggcgtctctgaaatgcttggtaaccctctgaatttcagtggtggagctaggtcatcggctccaacaccatccaactcatccactttcaagaccgttgctcttttctccaagaagaaggccgctcctccaaagcccaaggctgctgctgtcgccccggccgatgaagagctggctaagtggtacggtccggacagaaggattttcttgcctgaaggtctgttagacagatcggagatcccagagtacttgaacggagaagttcccggagactatggatacgatccgtttggtctgagcaagaagccagaagactttgcaaaatatcaagcatatgagttgatacacgcaaggtgggcaatgcttg

SEQ ID NO: 223256 - DNA, 438 bp, Gossypium hirsutum
  unsure (1)..(438): unsure at all n locations
gaagtttttctcttcttctctgaaattcccttgctatcgttctctggaagaaatttttttgagatggcccgtacgaagcaaactgctcgtaaatccaccggcggcaaggctccaaggaagcagcttgccactaaggctgctcgcaagtcggcaccgacaaccggaggcgtgaaaaagcctcaccgatatcgccctggaactgtagctctgcgtgaaatccggaagtaccagaaaagtactgaactcctcatcaggaaactgcctttccaaaggctcgttcgtgaaattgcccaagactttaagaccgatctgcgtttccagagccatgctgttttggcgttgcaagaggcggcagaggcataccttgttggattgttcgaagataccaacctgtgcgccattcatgctaagcgtgttacaatcatgcncaaggacatt

SEQ ID NO: 223257 - DNA, 353 bp, Gossypium hirsutum
cccacgcgtccgatagttcgtaacaatggcggtctcacttcaagctgcagctaccctgatgcaacgcaatcaaggttgctgcaccatcaaggaccaatgtgccgctcaggtcctcccagagcgtttctaaggccttcggtttggagcctgttggtgctaggcttacctgctctttgcaaactgacctcaaggacttggctctgaagtgtgttgatgctaccaagctcgctggtttcgctcttgctacatctgctcttgttgtctcgggagcaagcgctgaaggagtttcaaagcggctaacctacgctgaaatccaaagcaagacatacatggaagtcaaaggaacaggaact

SEQ ID NO: 223258 - DNA, 442 bp, Gossypium hirsutum
cccacgcgtccgcccacgcgtccgcccacgcgtccgcggacgcgtgggtttagctatagcatacactactagtacccactactagcaatggcttcctcaatgatctcatcggctaccattgccactgcctctccggcacaggctaacatggtcgctcctttcaccggcctcaagtctgcctctgctttcccagtcaccaggaaggccaacaacgacattacttctctcgcaagcaatggcggcagagtgcaatgcatgcaggtgtggcctcctactggaaagaagaagttcgagactctctcatacctccccgatcttacacccgtgcagttggctaaagaagtggattaccttcttcgctcaaaatgggttccttgcttggaattcgaattagaggagggattcgtgcaccgtaaatactcgagcctacccacgtactacg

SEQ ID NO: 223259 - DNA, 421 bp, Gossypium hirsutum
cccacgcgtccgcattgttccaagtttgttgtaaaccaagctagaaccagcagccaacatggcctcattagcagcctccaccgctgccgcctcccttggcgtctctgaaatgctcggtaaccctctgaatttcagtggtggagctaggtcatcggctccaacaccatccaactcatccattttcaagaccgttgctcttttctccaagaagaaggccgctcctccaaagcccaaggctgctgctgtcgccccggccgatgaagagctggctaagtggtacggtccggacagaaggattttcttgcctgaaggtctgttagacagatcggagatcccagagtacttgaaacggagaagttcccggagactatggatacgatccgtttggtctgagcaagaagccagaagacttgcaaaatat

SEQ ID NO: 223260 - DNA, 365 bp, Gossypium hirsutum
tatctctctaagctcccaatatggccaattcccaccaaccgtttgttgcactcatcgtcggcgtcaccggcatggcggggttgagcctagctgaagccttgaagagccccaatgccctcggcggtccttggaaagtttatggctctgcttcacgtcccataccaacttggttcccttcctcgcttctcgataaatacatcgcttttgatgccaccgacgccggaaacaccgctgatacgctcactccaatctccagcgaagtcacccatgttttctgggtggcaatccaagttcgtgaaagtgaacaagtaactgttacagttaacgcaactatgttatccaacgttctcgatgttttgaagagc

SEQ ID NO: 223261 - DNA, 372 bp, Gossypium hirsutum
gtgaaagagttggtgtcgatggatccaaagcaactggtgcctttattttgacagctagtcataaccctggcggtcctcatgaggattttggaattaaatacaacatggaaaatggtggacctgctccagaggctatcactgataagatctttgagaacacaaaaacaataacagaatacttgattgctgaagatctaccaaatatagacattagtacaattggtgttgcaaacttctcggggcctgaaggacagtttgatgttgaggtttttgattcagcaagtgactatgtgaaactgatgaagtcaatttttgactttgagcttattcgcaagctgctttcctttttcgaagtttacattctgctatgat

SEQ ID NO: 223262 - DNA, 432 bp, Gossypium hirsutum
attgacccttatttcctgccttagtttcattgaaggcgggactctcagactactctttcggaccagctccaccatcacccccaaaaaacaaagcaaattgtagaagatggcaacacaagcacttgtatcatcgtctcttacctactcagtggagactgcaaggcagattcttggagctaaacgacaaattgggccttcaaggaaaggatcctttgttgttaaggcagcttcgactccacccgttaagcaaggagctgatagacctttatggtttgcatctaaacaaagcctttcatacttggatggcagccttccaggtgattatggatttgaccccttgggactctcagaccctgaaggtccaggagggttcatcgagcctaaatggctagcctacggtgagatcatcaacgggcgttatgctatgttggg

SEQ ID NO: 223263 - DNA, 433 bp, Gossypium hirsutum; identical to SEQ ID NO: 196723

SEQ ID NO: 223264 - DNA, 429 bp, Gossypium hirsutum
cttttgtataactgtagcatatagtactagtaagcagtaatagcaatggcctcctccatgatctcatcggcaaccattgccaccgtgaactgctcctccccggcacaggccaacatggtggcccccttcaccggcctcaagtctgcctctgctttcccagtcactaggaaggccaacaacgacatcacttctcttgcaagcaatggtgggagagtgcaatgcatgcaggtgtggcctcctcttgggaagaagaagttcgagacactctcatacctccccgatcttacacccgtacagttggctaaggaagtagattaccttcttcgctctaaatggattccttgcttggaattcgaattagaggagggattcgtgcaccgtaagtactcgagcttacccacgtactacgatggacgctactggaccatg

SEQ ID NO: 223265 - DNA, 388 bp, Gossypium hirsutum
cccacgcgtccgcccacgcgtccgttttaagacaagaacaaagtggagattttataacacaaaaatagaggatgcaaatccacttaaaacacaaaaggaaaacaacattcaattaagacacaaaggggggatttcctttgtttgtgcccaatatagatttttttcttcccttagagcttaatttcccatttagaaagctcctctcttgatagcatcgtcattagcatttccaaaggcagcttcactcaaatatttgtcagccaattgaaccctcttcacattctcttgctcagcaacaagcatgtatccatattccaacagcttctcaatggtcatcttcggttgctcgaaaagatggtggccccttccctcgagttcacgagctttt

SEQ ID NO: 223266 - DNA, 349 bp, Gossypium hirsutum
ccgaaacagaattggtgacttgctatcctcttgcctagcgggcaaggatttacctccgtggaaaagatgatgcattcggatccgcatgaaagcccaactccattgcattgccagaatccatgttgtgtatttggaagaggatgaccttcttgcttctgatcatggtacaatcctcttcccgctgagccccctttctcctaggtccacagagacaaaatggaatgttggactaggactggcgccaacagttaatcacggcagaaaggactcactgagccgggatcactaactaatactaatctaatctaactgatactaatctaatactaatagaatactaatctaatac

SEQ ID NO: 223267 - DNA, 375 bp, Gossypium hirsutum
cccacgcgtccggtgagactcttttgtataactgtagcatatagtactagtaagcagtaatagcaatggcctcctccatgatctcatcggcaaccattgccaccgtgaactgctcctccccggcacaggccaacatggtggcccccttcaccggcctcaagtctgcctctgctttcccagtcactaggaaggccaacaacgacatcacttctcttgcaagcaatggtgggagagtgcaatgcatgcaggtgtggcctcctcttgggaagaagaagttcgagacactctcatacctccccgatcttacacccgtacagttggctaaggaagtagattaccttcttcgctctaaatggattccttgcttggaattcg

SEQ ID NO: 223268 - DNA, 434 bp, Gossypium hirsutum
cccacgcgtccgcccacgcgtccggagactcttttgtatacctttagcatatagtaatagtaagcagtaatagcaatggcctcctccatgatctcatcggcaaccattgccaccgtgaaccgctcctccccggcacaggccaacatggtggcccccttcaccggcctcaaatctgcctctgctttcccagtcaccaggaaggccaacaacgacatcacttctcttgcaagcaacggtgggagagtgcaatgcatgcaggtgtggccgcctcttgggaagaagaagttcgagactctctcatacctgcccgatcttactcccgtacagttggctaaggaagtagattaccttcttcgctctaaatggattccttgcttggaattcgaattagaggagggattcgtgcaccgtaagtactcgagcttacccacgta

SEQ ID NO: 223269 - DNA, 376 bp, Gossypium hirsutum
attggcatctctgctctccgctctaatgtccccgccattgacgtcgttgaacttgttgtgagagaactggaaacagacccgctgttcaactccgggcgtgggtctgctcttacggagaaaggaacagtggaaatggaagccagcattatggacgcattcttatttgaccaccccgggagccgaagagtttgccaagaaacagggcgtggagatggtggacaatgattacttcatcacagaagataacgtggggatgcttaagttggctaaagaagcaaactcaatcctgtttgattaccgtatcccgacagttggcacctgcggtgcagctgtggacagccatttgcagatgaacgggcttccgatcagcgtctac

SEQ ID NO: 223270 - DNA, 404 bp, Gossypium hirsutum
gtcccgaaggcagagataaaagaaatggcggaaacatgcgacttcctcgcaacaaagagatatgcagtggtgagtggaggaaacaagggaattggattggaaatatgtaagcagttggcttccaaaggagtcatggtggtgttaactgctagagatgagaaaagggggtttcaagctcttgacaagctcaaggaatctggcctttctcataatctggttttccaccagctcgatgtcgcaaaccctattagcgttgcttctcttgctattttcctcaacacccaattcgggaaacttgatatcttaccactaggggaagaagtgtggaatgagattattacaagtgaaacttatgatatggtccaagattgcctaaaaaccaattactatggtatgaaaagcat

SEQ ID NO: 223271 - DNA, 439 bp, Gossypium hirsutum
gcccggatttcccgggtctagctatagcatacactactagtacccactactagcaatggcttcctcaatgatctcatcggctaccattgccactgcctctccggcacaggctaacatggtcgctcctttcaccggtctcaagtctgcctctgctttcccagtcaccaggaaggccaacaacgacattacttctctcgcaagcaatggcggtagagtgcaatgcatgcaggtgtggcctcctactgggaagaagaagtttgagactctctcatacctccccgatcttacacccgtgcagttggctaaggaagtagattaccttcttcgctcaaaatgggttccttgcttggaattcgaattggaggagggattcgtgcaccgtaagtactcgagcttacccacgtactacgatggacgctactggaccatgtggaagctg

SEQ ID NO: 223272 - DNA, 434 bp, Gossypium hirsutum
atttctgggaatgctgacgataactttgacggcttggatcccacagctccagcctccacaatgcccagctgagcagcaattacatggtcactgcattagtccaagcaaggctcaactgggagtactgctaacagggttaggcctcttatcaattggaactggtgggataagaccctgcagcattccctttgggattgatcagtttgatccaaccactgaagaaggggcgaaagggatcaacagcttcttcaattggtactacaccacattcacattggtcatactgctcactttaacccttgtggtttatattcaagactcagtgagctgggttctaggccttggaatccccactctcctcatggctgcttcaattgttttgtttctcatcggaaccagaattatgtgcatgtgaagccccaaagaagcatttt

SEQ ID NO: 223273 - DNA, 428 bp, Gossypium hirsutum
  unsure (1)..(428): unsure at all n locations
cttcacctctttcttctccagatctccaccacaagtctcttgtcttcaggggcatgtttccagttgctgtaaacccgcagacatgttcaacagctgttgtccgcagaaagttgagcttctgtacaaaggcagttcttggaggaaatgtgcatgtaacaggagttcctacttctgtccctgtaagagtagcacacgagcttcatcaagctgggcatcgatatttggatgttaggactcctgaagagttcagtgcagggcatgtccctggggccattaacatcccttacatgtacaaagttggatcaggaatggcaaaaaaccccagttttgtagctgaagtatcatcacatttaggaaaatatgatgaaattattgttggatgtcaacttnggaaaacgtctctgatggcagncaccgagcttttagct

SEQ ID NO: 223274 - DNA, 410 bp, Gossypium hirsutum
gttgagactttgaactgagcttcgctgaattttcgtgatcgtcgagaaagaaaatgatgggaaggaaattcttcgtcggcggaaattggaaatgcaatggaaccactgaggaagtgaataagattgtgagtactttgaatgctggagaggtgccttctccggatgttgttgaggttgtggttagccctccatttttgttccttcctttggtaaaaacttcactgagacctgagttccaagtcgctgcacaaaattgttgggtcaagaaaggaggtgctttcactggtgaagttagtgcggagatgcttgtcaatttgagcattccttgggttattattggtcattctgagaggagacttattttgatggagtcaaatgagttcgttgccgataaggttgcttatgcactt

SEQ ID NO: 223275 - DNA, 392 bp, Gossypium hirsutum
cccacgcgtccgcccacgcgtccgctcaaattcagataacagtttcacagctgttttcttcactctctctctcagccatggctgcagccatctccaccgtcgccgacgctgccgccgccaaccgagctctgggagtgtcagacccaacctcagctttcatggggaagaaagtgagctcgagattcaacaacaccaggcaggttccttcgggaagctttaaggtgatggcggccgaaaaagagatagacgaagagacacagaccgaaaaggaccgatggaaagggttggcttacgatatttcggacgaccaacacgacattactcgagggaaagggatggtggattccttgttccaagctgccatgaatgatggaactcactatgctgtcatg

SEQ ID NO: 223276 - DNA, 430 bp, Gossypium hirsutum
cccacgcgtccgcccacgcgtccggttagctttagcatacactactagtacccactactagcaatggcttcctcaatgatctcatcggctaccattgccactgcctctccggcacaggctaacatggtcacccctttcaccggcctcaagtctgcctctgctttcccagtcaccaggaaggccaacaacgacattacttctctcgcaagcaatggcggcagactgcaatgcatgcaggtgtggcctcctactggaaagaagaagttcgagactctctcatacctccccgatcttacacccgtgcagttggctaaggaagtagattaccttcttcgctcaaaatgggttccttgcttggagttcgaattggaggagggattcgtgcaccgtaagtactcgagcttacccacgtactacgatggacgctact

SEQ ID NO: 223277 - DNA, 395 bp, Gossypium hirsutum
gcctatataaatagatatgttgattccttctttcatgcattctcaaacccagttgaaagcctagagcttagtagcaacccttaggcttcttcttcttcttcttgttcttattattatttttactctctatctcataaaacctaaaaaaaaaaaattaagctttttttgcagcttggaggatagaatagtggcgggtttttcaagcaaaataacaactggagttaagctctctcactgagaaaaaactgataagagtgaagaattggcaatcaacatggagaacggatatatcaacccggcaccaagtccacttaggaaaatcatcacggttgcatccattgctgccggcatccagtttgggtgggctctgcagctgtctctcctgacaccctacg

SEQ ID NO: 223278 - DNA, 425 bp, Gossypium hirsutum
gggaaacaagtcctacgacgaagccattgaagctctcaagaaacttctcagtgagaaaggagaactgaaagctgaagcagctgcaagggtagatcaaataacagcagagttaaacacagcatcagctgatggcaaaccatctgactcttctgttgagagactgaaagaaggcttcgtttacttcaagaaagaaaaatatgaaaagaatcctgctctgtatggtgagcttgccaagggtcaaagccctaagtatatgattgttgcctgctcggactctagggtctgcccatctcatgtgctggacatgcaacctggtgaagcttttgtggtccgtaatgttgctaacatggtgccaccatatgaccagattaaatatgctggcattggatctgctattgaatatgcagttttgcatctcaaggtac

SEQ ID NO: 223279 - DNA, 325 bp, Gossypium hirsutum
aagagctatggctaaggacattgaggttggtggtgagttccaggccaagggctgcgcatgatcctccacccgctccattggtcgacgctcaggagttagccaagtggtctttttacagggctgtcatagctgagttcattgccactctcctctttctctacatcactgtcttgactgtgatcggttacaagacccagaccgaccctgctaagggcggtgaagattgtggcggcgttggcattctcggcattgcttgggcttttggtggcatgatctttatccttggttactgcactgccggtatctctgggggacacatcaaccc

SEQ ID NO: 223280 - DNA, 412 bp, Gossypium hirsutum
ctcttttgtataactgtagcatatagtactagtaagcagtaatagcaatggcctcctccatgatctcatcggcaaccattgccaccgtgaactgctcctccccggcacaggccaacatggtggcccccttcaccggcctcaagtctgcctctgctttcccagtcactaggaaggccaacaacgacatcacttctcttgcaagcaatggtgggagagtgcaatgcatgcaggtgtggcctcctcttgggaagaagaagttcgagacactctcatacctccccgatcttacacccgtacagttggctaaggaagtagattaccttcttcgctctaaatggattccttgcttggaattcgaattagaagagggattcgtgcaccgtaagtactcgagcttacccacgtactacga

SEQ ID NO: 223281 - DNA, 375 bp, Gossypium hirsutum
gttttggccaggcctgggattatgtcattgcagaagcagggcaccaaggaattaggctgcgtgtgagcttggtaaataacttgcaaccatatggcggaaagacccagtatgtcaactgggcatggcaagaaggcgttggtttgagctcttctaatgattccttcttctttgatccatctatccgcaaatatttcaagaattatgtcctgactgtccttaccaggaagaacactatcactggaattcaatatcggaatgatcccaccatctttgcttgggagttgataaatgaaccccgtgcatgactgatccttctgggatactcttcaagattggtagaagagatgtcggctttcataaaatcaatcgacaaaa

SEQ ID NO: 223282 - DNA, 426 bp, Gossypium hirsutum
  unsure (1)..(426): unsure at all n locations
cccacgcgtncgagaaaatggcatttaattcacttcctttcttttaatcccaccttctctactccgaattttctctagaaccatacttcgagatggcttttctcatgccttcacctgaaatttccaccgcctctgcaaaatttttctctaaccctaccccccgccctaaatttctcaagagctgcgcgatttcgaagaacgacgacgagaaagtttggtcaaggaccaacgctagggtcggtgttaaagatgccggcagtacggtttcgtgtttgagccaaaacttgaggttgtacgtacaattttcggctccggtgaagcgaggatcgaagcccagcaaagaggaagaggagaagcaggattattacgtgaatatgggttacgctattcggaccttgggagaggagtttccggacatcttttaca

SEQ ID NO: 223283 - DNA, 352 bp, Gossypium hirsutum
atgtggttctccatgctgatgctatccacagaggtggtggtcaaatcattccgactggcaggagggttttctatgcttctcagcttacggccaaaccaaggcttctggagcctgtttacttggttgagattcaagcccctgagcaggcacttggtggtatttacagtgttcttaaccagaagcgtggacatgtgtttgaggagatgcagaggcctggtactccactttacaacatcaaggcctaccttccagttattgagtcttttggattctccagcactctgagggctgcaacctccggacaggctttcccacaatgtgtgtttgatcactgggatatgatgtcatcaga

SEQ ID NO: 223284 - DNA, 367 bp, Gossypium hirsutum
gtctgtctctctgttttactccacaaccactattactaccattatggcttcggctactggttgtgtagccaaacccaaccttcagattcaagcaaaaggaaagggtgttggttttgcagatttctcaagcctacacaacttctctactagcctttcctttgccaggaaaacctctgatgacttccattcactcgttgcttttcagacatctgctctaggaagcaataatggcgggtacacgaaagggatggcagaggcaaagcttaaggtggctataaatgggtttggtaggattggcaggaacttcttaaggtgctggcatggccgcaaagactccccacttgatgtcattggcatcaatgacact

SEQ ID NO: 223285 - DNA, 276 bp, Gossypium hirsutum
atacacacactactatatcccactactagcaatggctgactaacagatctcatcggcggcgcagggacactgcctttacggaacaggctaacatggacgctcattccaccgaccttaagtctgactatgctcatccagccaccatgaaggccaacaacgacattactactatcgtaagccctggcgatagaatgcaaagcatgcccgagtagcctcctactggaaagaagaagacccagactctctcatactatactggatcttacacccatgcag

SEQ ID NO: 223286 - DNA, 433 bp, Gossypium hirsutum
cccacgcgtccgaaaaaaaaaacatgtctgggtttgaagcagacaaccatggcgtctccatttcagttgcagtcgacaataaaactcttgcagattttgaggttttgaagaaacctaaaaggaacaagttcgcttttgcttgtgccattcttgcttctttagcttctatcttgcttggatatgatattggggtgatgagtggggctattctttacataaaagacgacctgaaaattagcgacgttcaagttgaaatcctcgttggaattctaaacttgtattgtctcatcggagcatacgtcgccggtaggacttccgactggataggtcgccgttacaccatcgtcgtggccgcctccatcttcttcgtgggagctttgctcatggggttcgcaacgaactacactttcctcatggtcggccgcttcgtcac

SEQ ID NO: 223287 - DNA, 425 bp, Gossypium hirsutum
gaaaaatggcttctgcttccgctactctcctcaagtcttcacctattatcgacaagtccgagtggattaagggccaaaacctccgccacccttcggtttgttttgtacggtcacaccctacatcggtcgcctttaccgtccgtgctagttcatatgccgatgagcttgttaagaccgcgaaaactgttgcatctccaggtcgtggtattttggccatggatgaatcaaatgctacatgtgggaagcggcttgcctcgattggtctcgagaataccgaggcaaaccggcaagcttaccgtacccttctcgtgtctgcccctggcctcggtaactacatctcgggagctatccttttcgaggagactctctaccaatctaccatcgatgggaaaaagatggtcgatgttcttgttgagcaaaatatt

SEQ ID NO: 223288 - DNA, 295 bp, Gossypium hirsutum
aagacaagaacaaagtggagattttataacacaaaaatagaggatgcaaatccacttaaaacacaaaaggaaaacaacattcaattaagacacaaaggggggatttcctttgtttgtgcccaatatagatttttttcttcccttagagcttaatttcccatttagaaagctcctctcttgatagcatcgtcattagcatttccaagggcagcttcactcaaatatttgtcagccaattgaacccttttcacattctcttgctcagcaacaagcatgtatccatattccaacagct

SEQ ID NO: 223289 - DNA, 434 bp, Gossypium hirsutum
cccacgcgtccgcatttttgttctcttcaactttattgcataccaaaaaaacttacaacaatggcaacagcctcagttacctacactccacccatgttggctgctgccaccactaaccccaagaagaagaccaacaccaatgtgaattacataacaggcttgaattcttttggtgggttgaaagctcataacaaagtggtctcactaggccaacgtgtatgcaccgagcaatcatttgcaaacgttgttagctcactcaaagctccgacaaagggcaagacaggtaaaagcagcggcggtgcactgtcttcaacctgtaatgctgttggtgagatattcaggattgcagcaatcatgaatggccttgttcttgttggtgttgctgtcggatttgtgctgcttcgaatcgaagcttctgtggaagaggctgagta

SEQ ID NO: 223290 - DNA, 433 bp, Gossypium hirsutum
gtgctatctgaattgctatcttttgagttttgaagaagaataacgcagagaaaggttctttattactgttcatcagatttttcaactttagaagatgaggggaagtctttggcatcttggacaatcaattacacgccgtgtagctcaggctgacaagaaggctgcagcacgtcgattctttgcttcagaagctgatctgaaaaagactgttctttataacttccacattgctcatggtgggaagatggtcccattcgccggatggagcatgccgatccagtacaaggactcaattatggactctacggtgaattgcaggcagaatggttcactctttgacgtttctcatatgtgtgggttaagccttaagggaaaggactgtgttccattccttgaaaagctcgtcattgccgatgttgctggactcgcccct

SEQ ID NO: 223291 - DNA, 438 bp, Gossypium hirsutum
attcaggacgccttgcacaatggccaccattacctctgccgatgtcgctatcgcagctgtcaccggccttaaagccggagcaaccgcaggtaaagatagcgccacagacgagggagcagcctctccagtcgcaaggggcagcatcaaggccctcctaaaagacgttggtgacgatgttggggccaactgatgcaagcgtgatccttgtcagcaaagccatggccatgagaagtgtagctcggcagagacaatgggggtctggctctaattaccaaagaattcagcgcacgcccaggggagaagattgagtacaagaacaaggccagattcccacacaatgctgtgttcgatgaggacgaaatcccaagcggagtcgacgtatgcaaaatctacatgcctgaagaagagctactcaatgccaaagacgagacttacgct

SEQ ID NO: 223292 - DNA, 425 bp, Gossypium hirsutum
atcttcctctccacccttgaaccatgtcggcttttgttggcaagtatgcagaggagttgatcaagaacgccaagtacatcgccacgccaggcaaaggtattttggcggcggacgagagcacaggcaccatcgggaagcgtctctcgagcatcaacgtcgagaacatcgagtccaatcgccaagccctccgcgagctccttttcacctctccaaacgcattatcctgcctctccggtgtcattcttttcgaggaaacactttaccagaaaacctctgacgggaaacccttcgttgaaatcctcgaagagaacaatgtcattccaggtatcaaggtcgataagggcaccgttgagatagccggcaccaatggcgagaccactactcaagggttcgactccctgggtgcgcgttgtcagcaatactat

SEQ ID NO: 223293 - DNA, 431 bp, Gossypium hirsutum
gaaaaatgttctcccctggaaatttgagagctacatttgataaccccgaatatgacaagttgatcaactattatgtaagagagaaatacacattgaggtacactggtggaatggtacctgatgtcaaccagatcattgttaaagagaaaggaatatttacaaatgtggcctcgccatctgccaaggccaagctgagattgttatttgaggtagcaccattggggttcttgattgagaaagctggtggttacagcagcgatgggcaaaaatcggtgctcgacaaagtgatcgagaacctcgacgataggactcaagtcgcgtacggttcgaagaatgagattatacggttcgaagaaacattatacggatcctcgaggcttaatgcaggggtccctgttggagctactgcttaagcaacaatgtttttactt

SEQ ID NO: 223294 - DNA, 217 bp, Gossypium hirsutum
cccacgcgtccgaaattatcttctttctcttctcttaccatggatccttacaagtttcgggcttgtaggtcctttgattccccgttctggactaccaattctggggctccagtttggaacaataactcatcacttactgggggagcaagaagtccaattctccttggagactatcatttggtggagaagctagctaatttcgacagagaacgcatac

SEQ ID NO: 223295 - DNA, 432 bp, Gossypium hirsutum
aaaacagtgagggagtagtagttcgagttatcgacgacgttttttttcaacacgaaaaaaaatggataacttttacgcaccagggaagaaccatctcttcgttccgggtccggttaacataccggaacccgttattcgagccatgaaccggaacaacgaggattaccgttccccggctattccggcgatgacaaaaacccttctcgaagatgtcaagaagatattcaagactacgaccgggactccttttatgatcccaacaacaggaaccggtgcatgggagagtgcacttactaatacgttatcccccggtgaccgaatcgtatcgttcctcattggacaattcagtcttctttggatcgatcaacaacaacgtctcaaattcaacgtcgacgttgtcgaaagtgagtggggacaaggtgctaacctcga

SEQ ID NO: 223296 - DNA, 415 bp, Gossypium hirsutum
  unsure (1)..(415): unsure at all n locations
cccacgcgtccgcccacgcgtccgcttcctttcagggttgctgcatatgataaaacccaaggtaaaatggcgttcttcgatccctcgagggctcaagacttcctcttcatatcaggcaccaagatgaggacattagcaaagaacaaagagaaccctcctccgggatttatgtgccctggcggctgggaagtgttggtcgagtattacgccagcttaacaccatcggacaatgacagaataccgcaacccgttgctgcttagatgaattgaatttggaagcaaacctcgaaacactatttatctncatcgcgtaatctggaccttgtgaagtctcttgtgtccaganttttgttcaataaaaaccatgtggagaccctgtttcatagtcatgaaacttgcctcctgttactaggat

SEQ ID NO: 223297 - DNA, 437 bp, Gossypium hirsutum
ctccggcacaggctaacatggtcgctcctttcaccggcctcaagtctgcctctgctttcccagtcatcaggaaggccaacaacgacattacttctctcgcaagcaatggcggcagagtgcaatgcatgcaggtgtggcctcctactggaaagaaaaagttcgagactctctcatacctccccgatcttacacccgtgcagttggctaaggaagtagattaccttcttcgctcaaaatgggttccttgcttggaattcgaattagaggagggattcgtgcaccgtaaatactcgagcctacccacgtactacgatggacgctactggaccatgtggaagctgcctatgttcgggtgcaccgactcggctcaggtattgaaggagcttgaggaatgcaagaaggaataccccaatgcattcattagaatcattggcttc

SEQ ID NO: 223298 - DNA, 435 bp, Gossypium hirsutum
tttcatttcaaagattctctcaaaacagtgagggagtagtagttcgagttatcgacgacgttttttttcaacacgaaaaaaaatggataacttttacgcaccagggaagaaccatctcttcgttccgggtccggttaacataccggaacccgttattcgagccatgaaccggaacaacgaggattaccgttccccggctattccggcgatgacaaaaacccttctcgaagatgtcaagaagatattcaagactacgaccgggactccttttatgatcccaacaacaggaaccggtgcatgggagagtgcacttactaatacgttatcccccggtgaccgaatcgtatcgttcctcattggacaattcagtcttctttggatcgatcaacaacaacgtctcaaattcaacgtcgacgttgtcgaaagtgagtgggg

SEQ ID NO: 223299 - DNA, 429 bp, Gossypium hirsutum
cccacgcgtccgcccacgcgtccgcccacgcgtccgcccacgcgtccgctccgccatcttcaataatttcttccgttgatctttgttagagattagctttttaatttttcattatgggaaagatcaagatcggaatcaatggatttggaaggatcgggcgtttggttgcgagagttgctctccaaagcgatgatattgagctcgttgctgttaacgatcctttcatcaccactgaatacatgacctacatgtttaagtacgacagtgttcacggtcaatggaagcatcatgagcttaaggtgaaggactcaaagacccttctctttggtgaaaagcctgtcacagttttcggtatcagaaaccctgaggaaatcccatgggctgaggctggagctgagtatgttggtgagtctactggtgtttttactg

SEQ ID NO: 223300 - DNA, 153 bp, Gossypium hirsutum
gaagcaaaccaattggtctcttcataagggggtccattatcttccgatctgattctaatggggaaaatctaaaaaggtattccggggctggcccttatgacagggtgcccatgggtaaaaaagaaaaaggggggggtgattactcatcggacc

SEQ ID NO: 223301 - DNA, 317 bp, Gossypium hirsutum
catgcctgtggcttgtgagcaagggatgcggtttgctatcagagaaggagggaagacggttggagccggggttattcagtctattattgagtgatcttaggatactttggcgttgcaggatatgttatttgctgttgcagtgatgtcaaagaaccttcatatgccaaatgtcaaggtcatgcaattagtttcgtcaccatttatagatcctctttgattccaatgtcatattttggagttttgtatttcttttgcttcagactcatgtctaatctagttggattggtaatattcatgtcacaattcgatatgaattt

SEQ ID NO: 223302 - DNA, 441 bp, Gossypium hirsutum
  unsure (1)..(441): unsure at all n locations
ttttgcttgaacccgacatccatggctacacacgcaagtctagctccttcaaggatccctgcaacaaccaggcttccttctaagaccacacactctttcccctctcaaattcaatgctcttccacgagattacaagttactgaattctctggactgcgctccttctcatgcgtcacattcgtcaacaatgctagagatgcgtcctttttcgatgtggtggctgctcaacttactccaaagactgcaggtggagcaacacctgtttaggggcgaaacagttgccaaattgaaggttgctatcaacggatttggacgcatcggcaggaactttctccgatgttggcatggcaggaagaactctcccctcgacgtgattgttgtaaatgacagtggtggtgtcaagaatgcttcacacttgctgaagtatgnatcaatgctggg

SEQ ID NO: 223303 - DNA, 429 bp, Gossypium hirsutum
gtgagactcttttgtataactgtagcatatagtactagtaagcagtaatagcaatggcctcctccatgatctcatcggcaaccattgccaccgtgaactgctcctccccggcacaggccaacatggtggcccccttcaccggcctcaagtctgcctctgctttcccagtcactaggaaggccaacaacgacatcacttctcttgcaagcaatggtgggagagtgcaatgcatgcaggtgtggcctcctcttgggaagaagaagttcgagacactctcatacctccccgatcttacacccgtacagttggctaaggaagtagattaccttcttcgctctaaatggattccttgcttggaattcgaattagaggagggattcgtgcaccgtaagtactcgagcttacccacgtactacgatggacgctact

SEQ ID NO: 223304 - DNA, 435 bp, Gossypium hirsutum
atatttagctatagcatacactactagtacccactactagcaatggcttcctcaatgatctcatcggctaccattgccactgcctctccggcacaggctaacatggtcgctcctttcaccggcctcaagtctgcctctgctttcccagtcaccaggaaggccaacaacgacattacttctctcgcaagcaatggcggcagagtgcaatgcatgcaggtgtggcctcctactggaaagaagaagttcgagactctctcatacctccccgatcttacacccgtgcagttggctaaggaagtggattaccttcttcgctcaaaatgggttccttgcttggaattcgaattagaggagggattcgtgcaccgtaaatactcgagcctacccacgtactacgatggacgctactggaccatgtggaagctgcctatgttc

SEQ ID NO: 223305 - DNA, 436 bp, Gossypium hirsutum
gttttagagagagaaagagaaggccggaatctgaaagacaagacacagagaaaaagagagagagagagagagatgtcgggaggaatagcgcgtggtcgactcgccgaggaacgtaaggcatggaggaagaaccatccccatggttttgttgcgaaaccagagacgttgcctgatggaacggtcaatttgatggtgtggcattgcacgatccctggtaaagcaggaactgattgggagggtggctacttcccgctcacgctccatttcagtgaagattatcccagcaagcctccaaagtgtaaatttccccagggctttttccacccaaatgtttatccatctggtactgtttgcctttcaatcctaaatgaggatagtggttggagaccagccataactgtgaagcagattcttattggaatccaagatcttctgg

SEQ ID NO: 223306 - DNA, 432 bp, Gossypium hirsutum
cccacgcgtccgtgtggctatggcggcagcactcagctactgcaagccttccccattcattggccaatttccttccaactttgggaagccagtatctctgcgaagcatcgaaatctcgacgcaggcatctagaatcactgcactgttttggggatctaagaagtctgtgaagcatcaacctgtggattcttctttgggggatttcactttgacagggtcagaaacagaggaacttaaagagaacccgacaaagggcaagaaggtatcggtatcgattatttcctcaattctggacgtttcttcacatgaatgggattcttgcgctctggatgctaccggtcctgaaaagttcaatccatttctttctcatggtttcctttcaagcttggaagagacgggttgcgcagtgaaggaaacaggatggatgccgag

SEQ ID NO: 223307 - DNA, 328 bp, Gossypium hirsutum
cccacgcgtccgcgatgactcccctccacttcttcctcctcctcctcgtcctcctcctttcgtcagctgctttaatctccgccgccgccgccaccaccgcatatccttccatcccgggcaccgattccacaactgattgtggcctatccggaggagacgagaaatccagttcccatccgtcgcgaagtctacggtaacggcaagatattcgacatcagccataggtacaccgtcgacatgccgtcttgggaatccaaggacggcgtaggacagttcctatggttgcctaaaagcatgaagaacggttccctcgctaataattcggaga

SEQ ID NO: 223308 - DNA, 417 bp, Gossypium hirsutum
aggaaacagagaacgaaactatggcttccatgtctttctctgcaactattccgtctcctcttcttgatttttcccaaaccaaaaagaacccagttttttcttcatcatggccttccatgtctttctcaattccttccatcaaatcctcgcttgggtcttcaaaatcagcctttttccaaaatgggttctccttgccatcgcttactgcttctgggtttgtctttaactctagatcttcaggcatttatgcaagagcagctacggataaaaccctatacgactacacagtaaaggatattgatgggaaggatacccctcttggcaaatttaagggaaaaggtctttttgattgttaatgttgcttcaagatgtggtttgacaacatcaaattactctgagctttcccacatatatgac

SEQ ID NO: 223309 - DNA, 438 bp, Gossypium hirsutum; identical to SEQ ID NO: 198073

SEQ ID NO: 223310 - DNA, 414 bp, Gossypium hirsutum
ggaggcacgtgctggtgtccgagagattcacttcctaccattcaaccctgtagacaagagaactgctctaacctacattgattctgatggaaactggcatcgtgctagcaaaggtgcacctgagcagattatagatctttgcaaatgcaaagatgatgtcaggaaaaaagttcattcagttattgataaatttgctgaacgtgggacttcgatctttagctgttgcaagacaggaaatacctgagaaaacaaaagagagtcctggatccccgtggcagtttattggcttgttgccactatttgatccaccgaggcatgatagtgctgaaacaatcagaagagctctaaaccttggagtgaatgttaagatgattactggggatcagctggccattgccaaagaaactggcagga

SEQ ID NO: 223311 - DNA, 424 bp, Gossypium hirsutum
  unsure (1)..(424): unsure at all n locations
ctctcttcctgtcttcgtctacttcgcctctttctctatggatccctacaagcaccgtccatcaagtgctttcaattcaccattctggactaccaattctggcgctccagtttggaataacaattcatctctcactgttggacccagaggtccaattctccttgaggactatcatctggtggaaaagcttgccaacttgacagggagcggattccagaacgtgttgtccatgctaggggagcaagcgcaaagggtttcttcgaggttacccatgacatttctcaccttacatgtgctgattttctgcgagcacctggagttcaaacccctgttatcgtgcgattttcaaccgtcatccatgagcgtggaagccctgaaaccctcagggatcctcgtggttntgcagtgaagttctacacccgag

SEQ ID NO: 223312 - DNA, 412 bp, Gossypium hirsutum
  unsure (1)..(412): unsure at all n locations
cccacgcgtccgcggattggacccaagggtcaagatttacgggagctacgaccaactgctggatgacccgtcggtggatgcggtgtacatgccattgccgactaccttgcacgtccattgggctgtcatggctgcccaaaaaggcaagcatgtgctgatcgagaaaccgacggctcttgatgtgggtgagcttgatacaatacttgaagcatgtcaatctaatggcctgcagtttatggatgggtcgatgtggttacaccatcctaggactgttaaaatgaaggagatgctttttgattccaagcttttaggagacgtcaattatatatacagcacatcaacaacttcagcatcccctgaattctttgagaatgacataagagtnaaaaggaaacctggatagtctcggagc

SEQ ID NO: 223313 - DNA, 418 bp, Gossypium hirsutum
aacatggatggattctacattgccccagctttcatggacaagcttgttgttcacatcacgaagaacttcatgacccttcctaacattaaggttcctcttatcttgggtgtttggggaggcaaaggtcaaggaaaatctttccaatgtgagcttgtctttgccaagatgggaatcaaccccattatgatgagtgccggagaattggaaagtgggaacgccggagaaccagccaagttgatcaggcaaaggtaccgtgaggccgccgacattatcaagaaagggaaaatgtgttgcctcttcatcaacgatctcgacgctggagccggtcgtatgggaggaaccacacaatacacagtgaacaaccaaatggtgaacgccacactcatgaacatcgctgataaccccaccaacgttcagc

SEQ ID NO: 223314 - DNA, 432 bp, Gossypium hirsutum
gaagaatcttgctatcccttgcttttctctcgcaaaaaattctcaaacttgtttttaacgttcgctgaatactatcgctcatttcttccctcagaaccctaatcgataactgaagccatttaatcatgtttgggcgtgttccaaaaaaatctgataacactaagttttacgaagtacttggggttcccaaaagtgcaagtcaggatgaattaaagaaggcttataagaaagctgcaattaagaatcatccggataaaggtggagaccccgagaagtttaaggaactggctcatgcttatgaagtacttagtgacccagagaagagagaaatatatgatcaatatggtgaagatgctcttaaagagggaatgggaggaggcggttcttctcacaacccatttgacatatttgagtcatttttcggtgggggag

SEQ ID NO: 223315 - DNA, 345 bp, Gossypium hirsutum
gagatggttcttgctttcaaaccgccattgacatacttctccccattttcttcgcctcatctacctccacgctcaactccttcttggcccctccatcactctaactctacctataaccccaacacttgtctttctccacttccaatctatgcacattccaagtggcctacaaacacacactccttcgccatctggtatcgctactccagcagtgaagaagaagacgacaaccatagctttgacgaggcagtttcccttttcaaccaaagggaatactataagtgccatgacttgcttgaagccttatggaacaaagccgaggatcccactagaactctcattcat

SEQ ID NO: 223316 - DNA, 353 bp, Gossypium hirsutum
caaacaatggcttccatgcttagctctggaactgttcttaggccaaccccatttcttggccaaaccaaaaatgctaaccctcttagagatgttgtctctttgggcactcccaaatatgcaatgggaaatgaactatggtatgggccagacagagtgaagtacttgggaccattttcagctcagactccatcttacttgaactggagaattccctggagactatggttgggacactgctggtttgtcagccgaccctgaggcctttgccaggaatagggctcttgaggtcatccatggaagatgggcaatgttgggagcactaggctgcatcacaccagaagtacttgagaaat

SEQ ID NO: 223317 - DNA, 435 bp, Gossypium hirsutum
ttcaccttttatttctttttttctcctatatcttggaatgctactttacctcttcatcagttgtttctccatcatcttctttataaagtccttaactttgaaaccactcccaccatgggcaactgagatgagactattgtctccctggtttaggaaagacgtttccttttttctcagttccagattgatcaaaaacattcttggtcttggttattttaccacagtcgtttccaaaatgtctctcaaaaagatgtctttcacttcaaaagttgataactttgaggaggttgaagaaagtgccatgtcaattttggacctaccagatttggtcttggaatgcattcttgaaaggctaccacctgctgctctttggtagtatggctggtgtttgcagctctttgaggagtaggtgtattagtgaccatttctgggaaa

SEQ ID NO: 223318 - DNA, 429 bp, Gossypium hirsutum
cttcctccccacccttaaaccatgtcggcttttgttggcaagtatgcagaggagttgatcaagaacgccaactacatcgccacgccaggcaaaggtattttggcggcggacgagagcacaggcaccatcgggaagcgtctctcgagcatcaacgtcgagaacatcgagtccaatcgccaagccctccgcgagctccttttcacctctcccaacgcattatcctgcctctccggtgtcattcttttcgaggaaacactttaccagaaaacatctgacgggaaacccttcgttgaaatcctcgaagagaacaatgtcattccaggtatcaaggtcgataagggcaccgttgagatagccggcaccaatggcgaaaccaccactcaagggttcgactccttgggtgcgcgttgtcagcaatactataaagct

SEQ ID NO: 223319 - DNA, 431 bp, Gossypium hirsutum
cccacgcgtccgtagctatagcatacactactagtacccactactagcaatggcttcctcaatgatctcatcggctaccattgccactgcctctccggcacaggctaacatggtcgctcctttcaccggcctcaagtctgcctctgctttcccagtcaccaggaaggccaacaacgacattacttctctcgcaagcaatggcggcagagtgcaatgcatgcaggtgtggcctcctactggaaagaagaagttcgagactctctcatacctccccgatcttacacccgtgcagttggctaaggaagtggattaccttcttcgctcaaaatgggttccttgcttggaattcgaattagaggagggattcgtgcaccgtaaatactcgagcctacccacgtactacgatggacgctactggaccatgtggaagc

SEQ ID NO: 223320 - DNA, 225 bp, Gossypium hirsutum
ggaaggtagattaccttcttcgctcaaaatgggttccttgcttggaattcgaattagaggagggattcgtgcaccgtaaatacttgagcctacccacgtactacgatggacgcttctggaccatgtggaaactggctattttcgggtgcaccgacttcgctcaagtattgaaagggcttgggggatgccaaaaagaataccccaatgcattcattaaaatcattg

SEQ ID NO: 223321 - DNA, 367 bp, Gossypium hirsutum
agaaactaaaaaaaaaaaaaaattataaagaaagacgaataaggaaaaaagggtgttaaagaccaaaggccaaagccattttttctttcttttggtttctggggagagaccagtttgggcaaagatggtgaagaagtggaaaaaggctttgattttggtgctgtttacagtctgcattctggggtttaagccaagatgtgtcaatggcgaaacagatcaagcagatgcttctgctctaggggttatgtataccagcttaaattcaccacagcaacttaacaggttggactgctagcaatggtgatccatgtgggcagtcctggaaaggtgttacttgctcgaacaaacgcgtcactgaaattaaact

SEQ ID NO: 223322 - DNA, 427 bp, Gossypium hirsutum
cccacgcgtccggtgctccatagtcttggaacccaaggacagaagactcttttaacatttcaccgcaaagatggagataacaaatgtgaccgagtatcaagaaattgcaaagcaaaagttgccaaagatggtgtatgactactacgcatctggtgctgaggaccaatggacattgcatgagaatagatttgctttcactaagatactgtttcgtcctcgtattctcatcgatgtaagcaagatagacatgaccacaactgtgttgggtttcaatatatcaatgcctatcatgattgccccaactgcctttcaaaaaatggctcatcctgaaggggagtatgcaacagctagggctgcatctgctgctggaactatcatgacattatcctcatgggcaacttctagtgttgaggaggttgcttcgaca

SEQ ID NO: 223323 - DNA, 369 bp, Gossypium hirsutum
  unsure (1)..(369): unsure at all n locations
cccggtccgaattcccggctagttcttgattaatagccaatcacagcagccatgtctctcctcaatgatctcatcaacctcaacctcggcgacgccactgaaaagatcatagccgaatacatatggatcggtggatctggaatggatctgagaagcaaagcaaggactntgcctggaccagtggcggacccttcaaaactcccgaagtggaactacgatggttccagtaccaatcaagcacctggagatgacagtgaggtcattctttatcctcaagctatattcaaggatccatttagaaaaggaaacaaacatcttggtgatgtgcgatgcttacacaccagccggcgaacnccattctaccaacaa

SEQ ID NO: 223324 - DNA, 430 bp, Gossypium hirsutum
cccacgcgtccgcccacgcgtccgctgtgactccaaaatccacgcggccaacaagctcgcctcgcgtcacgctcgagtttgggtctgcgaagtctgcgagcaagcgcccgctcacgtcacttgcaaggccgatgcagccgctctctgtattacctgcgaccgtgacatccactccgccaaccctcttgctcgccgacacgagcgcctccctgtaacccccttctacgactccgtcaattcagtcccagccgtcaaacccaacggagttgttaactttctggaggagcgttacttctccgacgtggacggagacgctgatgtcagccgggaggaagcggaggcggcgtcgtggctgcttccgaaccctaaccataaggctgtggacagcccggacgtgaactcggggcagtacgtgttctcggagatggac

SEQ ID NO: 223325 - DNA, 419 bp, Gossypium hirsutum
cccacgcgtccgcccacgcgtccgctccaatggcgactcagctgaagagcagctttacgtcgtctgttacaagaggactggtagtccccaggggcatttcgggatccccgttcaaagtatcttccggaaagaccaggaccccttgcttcactgtcaaagctgttcaatccgacaagtcaacatttcaagtaatccaacccatcaacggcgaccccttcattggaagcctggagactccaatcacctcaagccccttaattgcatggtacctttccaaccctccaagcctataggacggcagtgaacccacttctgaggggaatcgaagtgggtctggctcacggcttcctcctggtgggtccattcgttaaggccggccctctaaggaacactgcggtggcgggtcaagctgggtcctt

SEQ ID NO: 223326 - DNA, 299 bp, Gossypium hirsutum
cacaattcattcttttttttttcctgtgcttgtacacaatggctatgactgtaaatgcagcagtatctcttccatcttccaagtcatctaccctgtcatttaaaaactcagtcactgtccctgaaagaatcaacttcaacaagagtgttttgtacccaaaaaatgtcagccttggtggaaatgtggtttccattagagcctcaggtcactacagaagctcctgcaaaagcaccaaaaatttccaagaaagatgaccagggtattgttgtgaacaagttcaaaccaaaagaaccctacat

SEQ ID NO: 223327 - DNA, 390 bp, Gossypium hirsutum
ctttttattgtggtctccagagcttctctgttacatcgtttattttctctcaagaactgaagaaaaaatccgaatagattaaaacttaagaaagatcaaaagatgtttggaagagcacctaagaagagtaataacaccaggtactatgagattctgggtgtttcgaataacgcttcccaggatgatttgaagaaaagcttataaaaaaagccggccattaaaaaccatccagacaaaggcggtgatcctgaaaaatttaaagagttggcgcaagcttatgaggtattgagcgatcctgagaaacgtgagatatatgatcagtatggtgaggatgcactcaaggaaggaatgtggtggggtgccggtgctcatgacccgtttgacatcttc

SEQ ID NO: 223328 - DNA, 279 bp, Gossypium hirsutum
aatattactagttttgcttgaacccgatatccatggctacacacgcaagtctagctccttgaaggatccctgcaacaaccaggcttccttctaaggccacacactctttcccctctcaaattcaatgctcttccacgagattacaagttactgaattctctggactgcgatccgcctcatgcgtcacattcgtcaacaatgctagagatgcgtcctttttcgatgtagtggctgctcaacttactccaaagactgcaggtggagcaacacctgttaggg

SEQ ID NO: 223329 - DNA, 435 bp, Gossypium hirsutum
ctatagcatacactactagtacccactactagcaatggcttcctcaatgatctcatcggctaccattgccactgcctctccggcacaggctaacatggtcgctcctttcaccggcctcaagtctgcctctgctttcccagtcaccaggaaggccaacaacgacattacttctctcgcaagcaatggcggcagagtgcaatgcatgcaggtgtggcctcctactggaaagaagaagttcgagactctctcatacctccccgatcttacacccgtgcagttggctaaggaagtggattaccttcttcgctcaaaatgggttccttgcttggaattcgaattagaggagggattcgtgcaccgtaaatactcgagcctacccacgtactacgatggacgctactggaccatgtggaagctgcctatgttcgggtgcac

SEQ ID NO: 223330 - DNA, 436 bp, Gossypium hirsutum
gaaaagaaggggaaaaaaaacttgttcgtcactgaaaaacagttgattttcttttttttcttctttaaaaaagaattagtaatcaaatcgaatggcgggaatttgctgtgaagttgttggagaaagtgaagcagcggctccggttgagccaacttcaagagcttctcgtcgccggagattggagcttctaccgtttaagttagtggccgaagctgctgttctaccgccgttagagaacggccggaaacgtcagaagctcgatctcgttcgcccgacttctcgtgattgtgataacgctgttcaaaactcggatactgataagcttgagaaagatcaagaacttaatggaagtctaaattttaatggagcagtaaaatcagaagccgtagaagaagaaaaggaatcgccgaagttcggcctgacatctgtttgcgga

SEQ ID NO: 223331 - DNA, 436 bp, Gossypium hirsutum
aaaccaagtcaacctaaagccttaggcaccatggcaacctctgctatccaacaatctgctttcgttggccagaccgttttgaagcagtccaatgagctcttacgcaaagtcggagctttcgatggtggtcgggttaccatgcgcagaactgtgaaaagtgcccctaccagcatctggtacggccctgaccgcccaaagtacttgggtccattctgagaccaaatcccatcatacctgacaggtgaattccctggtgactatgggtgggacactgctggggtatcagctgacccagagacatttgctaagaaccgtgagcttgaagtgatccactgcatatgggcaatgcttggtgcccttggttgtgccttccctgaaattctttcaaagaatggagttaagttcggagaggcagattggttcaaagctggatctc

SEQ ID NO: 223332 - DNA, 429 bp, Gossypium hirsutum
  unsure (1)..(429): unsure at all n locations
gcgaaatttatttgtttctgtatttccggaatatgagtaaagtttatgattggttcgaagagcgcctcgaaattcaggcgattgcagatgatataactagtaaatatgttcctcctcatgttaacatattttattgtctaggaggaattacgcttacttgttttttggtacaagtagctacaggatttgctatgactttttactatcgtccaaccgttactgaggcttttgcttctgttcaatacataatgactgaagctaactttggttggttaatccgatcagttcatcgatggtcggcaagtatgatggtcttaatgatgatcctacacgtatttcgtgtctatctcactggtggttttaaaaaaccctcgcgaattaaccttgngttaccaggcgtggtttctgggtgtgttgaccgcatctttt

SEQ ID NO: 223333 - DNA, 395 bp, Gossypium hirsutum
ctttcataacatttcacgaacttcactctccagtctccaatggcggctgccgtctccaccatcggtgctgtcaaccgagcaccgttgagtttgaatggatcaggtgccggagcttctgctccaagctcagctttcatggggaacagcttgaagaaagtgagcgctaggttcaacaacaacggcaaggctccagtgggaagtttcatgattgtggctgccaaagaaatcgacgaagacacacagaccgaccaggaccgatggaagggtcttgcttatgatatctccgatgaccaacaagacattaccaggagggaaggtatggtcgactcattgttccaagctcccatgaacgatggtactcactatgctgtcatgagctcctatgagtacattag

SEQ ID NO: 223334 - DNA, 348 bp, Gossypium hirsutum
gcccattggttggttttggccaaaagacagctaaagaccccactttgaaaaccggaattgtcggccgaggagcttcatttcgagtccaaggccgacgccggcgcttccaaaacctaccctcagcaggccggcaccatccgcaagaacggttacatcgtcatcaaaaatcgcccctgcaaggttgttgaagtttccacctccaagaccgggaagcatggtcatgcaaagtgtcactttgttggaatcgatatcttcactgccaagaagctcgaagatattgttccttcttcccacaattgtgatgttccccatgtcaatcgtactgactaccagttgattgacatttct

SEQ ID NO: 223335 - DNA, 319 bp, Gossypium hirsutum
gccaacccttccggaaaaccccaaaaattacctccaaatggggtttggcagaaaacactaccggattggaggagggaccactggagattggcttggaatataaaactgtttctggagttgctgggcctttagtaatccttgataaagtgaagggacccaaatatcaagaaattgttaatattcgattaggggatgggacaaccagacgtggtcaagtccttgaagtgatggagaaaaaagctgtagtcaatttttgaaggaccatccgaatgacaacaatatacactgtcaatttacaagcgagtgttgaaactcctgt

SEQ ID NO: 223336 - DNA, 397 bp, Gossypium hirsutum
  unsure (1)..(397): unsure at all n locations
gtncgcccacgcgtccgtgaatagaaaccctcaaaattccactaaaaaatggcctccacagcttccctctccaccgccgtagccaccacctctttcctccgcggccatccggcgccgaaaaccctaaactcccttcctttcaaccaatctcttttcgggctaaaaccccaacgaaatggccgtctcaccatggcagcatacaaggtgacactgttaacacccgaaggaccccaagaattcgtgtgccccgacgacgtatacatcgttgaccaagctgaggaagaaggcattgatcttccgttctcgtgtagggctgggtcttgttcttcgtgtgccggagtgattaagcaaggctccgtcgatcaatccgacggtaatttccttgatgatgaccaga

SEQ ID NO: 223337 - DNA, 302 bp, Gossypium hirsutum
ctttcgtataactgtagcacatagtactagcaagcagtaatagcaagggcctactgcatgatctcatcagtgaccattgccaccaggaactgatgctccccggtacaagccaacatggtggcccccttgaccggcctgaagtctgcctgtgctttaccagccactatgaaggccaacaacgacatcacttatctcgcaagctacggtgggagagtgctacgcatgcaagtatggcctactctcgggaagaagaagctcgagacactctcatacctccccgatctgacacccgtacagttggc

SEQ ID NO: 223338 - DNA, 431 bp, Gossypium hirsutum
cccacgcgtccgaaccggcatcactggaattgtgaatggcatggatgttcaagaatggaaccctaccactgacaaatacatcagtgtgaaatatgatgcaacaactgtaacgtatgcaaagcgattattaaaggtagctcttcaagcagaacttgggttgccttgcgatgagaatgttccattgattgggttcatcggtaggctggaagagcagaaaggttcagacatcttgacagcagctattccaaaattcattggacagaattgtcagattgttgtccttggaactggtaaaacggccatggagaagcagattcaacagctggagaccctatatcctggaaaagctataggagtagccaaattcaatgtcccattggcccatatgatttttgcgggtgctgattaccttttggttcctagtagatttg

SEQ ID NO: 223339 - DNA, 415 bp, Gossypium hirsutum
ggcacccaccagggaagataggatcggtgtttgcacaggtattttcaggaccgacaatgttcccgttgatgaccttgttaagcttgttgacaccttcccgggccaatccattgactttttcggtgctctgagggccagagtttacgatgacgaagtgaggaaatggatcggagaggtcggagtcaatggtgtcgggaaaaagctcgtgaactcgagggaagggaagacgatcagataccgtcctagtctcaaccgaagatgaccattgagaagctgttggaatatggatacatgcttgttgctgagcaagagaatgtgaagagggttcaattggctgacaaatatttgagtgaagctgcccttggaaatgctaatgacgatgctatcaagagaggagctttctaaatgggaaatt

SEQ ID NO: 223340 - DNA, 415 bp, Gossypium hirsutum
cttccacttcactctgggtcacttagtttctttgttttttgctcttggagtgaggaaatccataggaaacaagtacgtttcgtctctttttaattttcataatggctgggactggagtgttttcagacatattggatggagatgtttacaagtactatgctgatggtgaatggaagaagtcttcttctggaaaaactgttgcaattatcaaccccaccaccagaaaaactcagtataaggttcaagcttgtacacaagaagaggtgaacaaggttatggaatcagcaaaaactgcacaaaaatcatgggcttagactccactttggaagagagctgagctccttcataaagctgctgctatcctaaaggagcataaagcaccaattgctgaatgcctggtaaaaaaattgcaaaa

SEQ ID NO: 223341 - DNA, 432 bp, Gossypium hirsutum
cccacgcgtccgcccacgcgtccgaaacaaaaacaaaaccatctgctcatcgcagattcagatcgaaaattggggccaaaaaatacgaagaaaaatgacgatgtttcacttcttcaactgtgcgatcctcactttcggtcctcacgccgtctactactccgccactcccttatcggagtatgatactcttggtacttctgttaaagctgcccttgtttatcttggaactgctttggtaaagcttgtttgtctcgcaacgtttttgaaggtttctgagaatgacggcttcgatccgtaccaggaacttttgaaggcagagattggttttatagatgttgctggcctttattttgccttaacacagttgactcataggaacatctctcaaaatcataaatttcaagctgttggacttggatgggcatttgctga

SEQ ID NO: 223342 - DNA, 376 bp, Gossypium hirsutum
ctcactcaacattcccatttccaatctccagctcccaaggtaaatatgccgatcagaaacatagcggttggccggcccgaagaggctactcaccccgatgctctcaaggctgctttggctgagttcatctcaaccttgatcttcgttttcgctggatcgggctcaggaatggcctttaacaagttgactgacaacggagcaaccaccccggctggtctcgtagccgccgctctagctcatggcttcggtcttttcgtcgctgtctccgttggcgccaacatctcaggtggccacgtcaaccctgccgtcaccttcggtgcttttgttggcgggaacatcactctcttgcgcggcattctttaactgatcgcccaac

SEQ ID NO: 223343 - DNA, 422 bp, Gossypium hirsutum
gcaaagtttcgacaatggctgtcgggaagaacaagaggatttccaagggaaagaagggaggaaagaagaaggcggctgatccatttgctaagaaggattggtatgatatcaaggctccatcagtttttactaccagaaatgttgggaagactcttgttacccgtactcagggtaccaagattgcttcagaaggactcaagcaccgtgtgtttgaggtctcactggctgatcttcaaggaggtgatgaggatcatgcttacagaaagattcgtttgagagctgaagatgttcaaggaaaaaatgttttgaccaacttttggggaatgaattttacaactgacaaactgaggtcattggtgcgtaaatggcaaactttgattgaagctcatgtggacgtaaagacaactgacagttacactttg

SEQ ID NO: 223344 - DNA, 452 bp, Gossypium hirsutum
ctctttagtataactgtagcatatagtactagtaagcagtaatagcaatggcctcctccatgatctcatcggcaaccattgccaccgtgaactgctcctccccggcacaggccaacatggtggcccccttcaccggcctcaagtctgcctctgctttcccagtcactaggaaggccaacaacgacatcacttctcttgcaagcaatggtgggagagtgcaatgcatgcaggtgtggcctcctcttgggaagaagaagttcgagacactctcatacctccccgatcttacacccgtacagttggctaaggaagtagattaccttcttcgctctaaatggattccttgcttggaattcgaattagaggagggattcgtgcaccgtaagtactcgagcttacccacgtactacgatggacgctactggaacatgtggaaacttgccatgtttggg

SEQ ID NO: 223345 - DNA, 408 bp, Gossypium hirsutum
gacattaccagagggaaaggtatggtcgactcattgttccaagctcccatgaacgatggtactcactatgctgtcatgagctcctatgagtacattagccaaggccttcgcacatacgacttggacaacaacatggatggattctacattgccccagctttcatggacaagcttgttgttcacatcaccaagaactacatgacccttcctaacattaaggttcctcttatcttgggtatttggggaggcaaaggtcaaaaaatctttccaatgtgagcttgtctttgccaagatgggaatcaaccccattatgatgagtgccggagaattggaaagtgggaacgccggagaaccagccaagttgatcaggcaaaggtaccgtgaggccgccgacattatcaagaaagg

SEQ ID NO: 223346 - DNA, 413 bp, Gossypium hirsutum
cccacgcgtccgaagagaaccctcgtgttccgatcatcgtcaccggtaacgatttctcgacgctgtacgcgcctctcatccgtgacggtcgtatggagaagttttactgggcacccaccagggaagataggatcggtgtttgcacaggtattttcaggaccgacaatgttcccgttgatgaccttgttaagcttgttgacaccttcccgggccaatccattgactttttcggtgctctgagggccagagtttacgatgacgaagtgaggaaatggatcggagaggtcggagtcaatggtgtcgggaaaaagctcgtgaactcgagggaagggccaccatctttcgagcaaccgaagatgaccattgagaagctgttggaatatggatacatgcttgttgctgagcaagaaaat

SEQ ID NO: 223347 - DNA, 433 bp, Gossypium hirsutum
gcgaaaattgatctccaacgttgaaacctcatctacaaagtgttttctatatatgaatgtgatcccttggcggcaataatgtccacggcttcggtctccggcttctgcctctcttccaataccacctctccttctaactcactccggcaacccacattgcggcggccctctatcatcgccaacctcaactcttccacttctcctcctacactcatccgaaatcaaccagttttcgcagcacctactcttttgctcactccttccaattggaaagaaaccatgggagacgagtcatacgaggaagccattgaagctctcaagaaactgctcaatgagaaaggagaattgaagagtgcagcgacggcaaaggtagagcaagtgacagctgagttgaagactgctgcttcctccgatgagtctgttgaccgcttga

SEQ ID NO: 223348 - DNA, 416 bp, Gossypium hirsutum
cacactctccgtccggcctgaccgtctaactcccggctcccctattcccagaccgccggtgcgcctccctaaccaaacccacccttctttaaaacccgctaaaatcgagccctggagagccgccgcaatcctccatacgcgacgaccattagccgctcgtgccggttcacgagctgatgactccgctccgttcgagatgtctgttgagaacgcgctcaatctccttggagtctccgaaagagcttcttttgatgatattcttcgcgccaagaattcgattgttgcctctattaaggataaccaagaagctatcgcccaggttgaggctgcatatgacatgttgcttatgaggagcttaacacaacgacgagctggaaaagttgtagacagaagcattagatttgcagatgttaaac

SEQ ID NO: 223349 - DNA, 423 bp, Gossypium hirsutum
cacccatcaagcttttcatcaatggcttcccttcaacaagcttcaatctctcttcaacccaagcttctttcatcttctcaacaccccagatcccttccctctctcaacctctctttttcagccactttcccttccctcaaactctccaccactcgccctcttcatggcggtgccaaaatgtcagcctccgccgcttccagctacgccaccgctttagccgatgtagccaagtccaacaacacccttgatgccaccagctccgacgttgaaaaagtcgagacaatcttctccgacccacaagtcctcgaattcttcaccaaccccaccattgatgtcctcaaaaaacgtcaagttttggatgaaaatgttagctcctccgagcttcagccgcacacggcgaattttctgaacatcctgggtgat

SEQ ID NO: 223350 - DNA, 426 bp, Gossypium hirsutum
acactctaaaattcagttaacaattccacagttgttttcttaagcctctctctcagccatggctgcagccatctccaccgtcgctgccgctgccgccgccaaccgagctctgggagtgtcagtcccaacctcagctttcatggggaagaaagtgagctcaagattcaacagcaccaggcaggttccttcgggaagttttaaggtgatggcggcggagaaagagatagacgaagagacacagaccgaaaaggaccgatggaaagggttggcttacgatatttcggacgaccaacaggacattactcgagggaaaggggttggtggattccttgttccaagctcccatgaatgatggaactcactatgctgtcatgagttcctatgaatacctcagccaaggtctttaaacgtacaatttggacaaca

SEQ ID NO: 223351 - DNA, 437 bp, Gossypium hirsutum
gggagactctttggtttacctgtagcatatagtaatagtaagcagtaatagcaatggcctcctccatgatctcatcggcaaccattgccaccgtgaaccgctcctccccggcacaggccaacatggtggcccccttcaccggcctcaaatctgcctctgctttcccagtcaccaggaaggccaacaacgacatcacttctcttgcaagcaacggtgggagagtgcaatgcatgcaggtgtggccgcctcttgggaagaagaagttcgagactctctcatacctgcccgatcttactcccgtacagttggctaaggaagtagattaccttcttcgctctaaatggattccttgcttggaattcgaattagaggagggattcgtgcacccgaagtactcgagcttacccacgtactacgatggacgctactggaccatg

SEQ ID NO: 223352 - DNA, 427 bp, Gossypium hirsutum
cagaaaagccagagattccccgacaactccggcgataactgtaccccataccctatctctgcccttctcgactaccgcaccctcgttcctaagccctttctttgatctgagtaagaaatggcgatgtatatcgtatctcggcgactctccgctggatccaccacctcccagctggtcacctctctccgttatgccacctgctggagatccttctccacgtcttttagggaggaacgagacactttcggccccattaacgttccctccgataaattgtggggagcgcagactcagagatcgttacagaattttgaaattgggggagagcgtgaacggatgcctgaacctattattcgggcctttggtgttctcaagaaatgtgctgccaaggttaacatggaatatggtcttgatccaaccattggga

SEQ ID NO: 223353 - DNA, 427 bp, Gossypium hirsutum
cttacaagtttcgtccttcaagttcctttgattccccgttctggaccaccaattctggtgctccagtttggaacaataactcatcacttactgtgggagcaagaggtccaattctccttgaagactatcatttggtggagaagctagctaatttcgatagagaacgcatacctgaacgtgttgttcatgctagaggagccagtgcgaaagggttcttcgaggtcactcatgatatatctcagctcacatgtgctgatttccttcgtgcccctggagtccagacccctctcattgttagattctccacggttattcatgaacgcggtagtcctgaaactttgagagacccccgaggtttcgctgtgaaattttacacgcgagagggaaattttgatctagtgggggaacaatttccctgtgtttttca

SEQ ID NO: 223354 - DNA, 427 bp, Gossypium hirsutum
cccacgcgtccggcccggttttcgctgcccctgttcctttgctcaccccgagagaagagatgggaaacaagtcctacgacgaagccattgaagctctcaagaaacttctcagtgagaaaggagaactgaaagctgaagcagctgcaagggtagatcaaataacagcagagttaaacacaacatcagctgacggcaaaccatctgactcttctgttgagagactgaaagaaggcttcgtttacttcaagaaagaaaaatatgaaaagaatcctgctctgtatggtgagcttgccaagggtcaaagccctaagtatatgattgttgcctgctcggactctagggtctgcccatctaatgtgctggacatgcaacctggtgaagcttttgtggtccgtaatgttgctaacatggtgccaccatatgacca

SEQ ID NO: 223355 - DNA, 412 bp, Gossypium hirsutum
acggctttggtctccggcttctgcctcacttccaactccacctctccttctaactcactccggcaacccacattgcggcggccgtctatcgtcgccaacctcaactcttccacttctcctcctactctcattcgaaatcaacccgttttcgcagcacctactcctttgctcactccttccaattggaaagaaaacatgggagaccagtcatacgaggaagccattgaagctctcaagaaactgctcaatgagaaaggagaattgaagagtgcagcgacggcaaaggtagagcaagtgacagctgagttgaagactgctgcttcttccgatgagtctgttgaccgcttgaaacaaggcttcatttacttcaagactgaaaaatacgaaaagaatcctgctctgtatggtgagc

SEQ ID NO: 223356 - DNA, 427 bp, Gossypium hirsutum
attacttcatctgggtatgggagtttccttcatctgaggaagcgtgggtttcgtgggagtgtcgtcttaaccatggctgcttctggttcggtccagaagtctgaggaagagtggagtgctattctttccccagagcagtttcgaattttgagacaaaagggcaccgagtatccaggcaccggagaatatgataagttcttcgaagaaggtatctataaatgtgcaggatgtgggacttctctttacaagtccactacaaaatttaattcaggttgtgggtggccagctttctatgagggtctccctggagccataaatcgccatccggacccggatgggatgaggactgaaatcacttgtgcaggcttgtggtggccatttgggccatgtattttaaaggtgaagggtttccaacacccaccgatga

SEQ ID NO: 223357 - DNA, 427 bp, Gossypium hirsutum
cccacgcgtccgctctctcagatcagaactagagtgtttacatcctggtaagaggttgagttgccatgtttcagcttcctccaattcactatcaatctcaccctcatccaccctcgtggatgccaaagctcctcgtcaaccaactgctgcatccccacaatgtgtcactcttcctactcttcctcccccacccgttcagtcccagagtcgtccctggaagaccactgcctactgtcgcaagattgctcgaaatgtgatggctatggccactggtgagactttggccacgcgtgaagctccaaccgaagttaccccaactgagctgacagagtttatcaacaaaatacaagaaacatgggataaagttgaggacaagtacgcaatgagttcacttgctgtagcaagtcttgttttggtctagggtact

SEQ ID NO: 223358 - DNA, 409 bp, Gossypium hirsutum
cccacgcgtccgcccacgcgtccggcatactcgtgaagttgtctacgaacatctaattgttgatggctttattcaggggtataaaaaatggatttttcatggggagtgtacatctagtggaacttcttcaacgattaatccgacttatcctgatactgattaccatcagtatgttagacaagatgacatggaaggtatgttgcgggatgcatttaatttgcacagtcatggtgagcaatcgtttccacctgattttattgcatccgatgattgtaatattggtggaaatgtttttggcgaaacgggaacaagtgcaccttatgaggagccaaatgaagaagccggcaagttctacaatttacttaatgaaatgaacgaagaactttaccgaggatcaaaatattcaaaa

SEQ ID NO: 223359 - DNA, 429 bp, Gossypium hirsutum
cccacgcgtccgtttagctatagcatacactactagtacccactactagcaatggcttcctcaatgatctcatcggctaccattgccactgcctctccggcacaggctaacatggtcgctcctttcaccggcctcaagtctgcctctgctttcccagtcaccaggaaggccaacaacgacattacttctctcgcaagcaatggcggcagagtgcaatgcatgcaggtgtggcctcctactggaaagaagaagttcgagactctctcatacctccccgatcttacacccgtgcagttggctaaggaagtggattaccttcttcgctcaaaatgggttccttgcttggaattcgaattagaggagggattcgtgcaccgtaaatactcgagcctacccacgtactacgatggacgctactggaccatgtgg

SEQ ID NO: 223360 - DNA, 428 bp, Gossypium hirsutum
cccacgcgtccgcccacgcgtccgaattcatattctatttaagaaggtcccaatttctcgatgtctttaacagcactcccgacgagactgctttctttcgactgatgctgaatcgtgaaggagttacagattctattgtcatgatccaacccacactcctacaatattctttcgatggacctccggttccggttctcttagacattcgttctatatccccggatgttattttactctttgactcgtacttttgcgtggttattcattatggatccaagattgctcaatggagaaagctcggttacgataaagacccaaatcatgggaatctaagaaagttgtttgaagcaccggagctggatgcaggtcagttggtggcaggacgagttccaccaccgaagcttattaaatgcgaccagcatagcagt

SEQ ID NO: 223361 - DNA, 396 bp, Gossypium hirsutum
cccacgcgtccggttcgtaacaatgtcgactcttttgccttcaagcctggcaaatactacgccaagaagttctgcttggagcccacttccttcactgtcaaggctgagggtgttaacaagaatgcccctcctgagttccaaaacaccaagctcatgacccgtttaacctacacccttgacgaaatcgagggccctttcgaggtatccaccgatggcaccgtcaaattcgaggagaaagatgggattgattatgctgccgtcacagttcagcttcctggtggtgagcgtgtgcctttcctgttcaccatcaagcaattggttgcatcaggcaaaccctgatagctttggaggagacttccttgtaccatcctacccgggctcatctttcttggaccc

SEQ ID NO: 223362 - DNA, 421 bp, Gossypium hirsutum
gaaaaacttaatcatggctcggttgacgttggtgtcctccatcatccttctgctatgctccgtcgccgccggatcaactttcgaggactccaaccccatccagatggtatccgatggcctcagcggcttcgaatcctccgttcttcgtgtcatcggtcacactcgtcatgctctctccttcgcccgttttgcatacaagcatgggaagaggtatgaaaacgtggaggagatgaagctacggtttcagattttcaaaggcaacttggatttaatcagatccactaacaagaagggactgccttacactcttgctgtcaatcagtttgctgattggagctgggaagagttccagaaacacagattgggggctgctcaaaactgctctgctaccacaaagggcaatcaccagctcactgatgtc

SEQ ID NO: 223363 - DNA, 381 bp, Gossypium hirsutum
cccacccgtccggaaaaacaaaaatggccatggcattggcgcttcgacgactctcctcttccattgacaagcctctccgtcctttcttcaatgccccttccctctattacatgtcgtctttgccaaatgaagctgtgtacgagaaggagaaacctggcgtcacttggccaaagcaactgaatgctccacttgaaaccagtgatcctgaaattgctgacatcatcgagcttgaaaaagcgcgccaatggaagggacttgaactcattccatcggagaacttcacttcggtgtcagtgatgcaagcagttgggtctatcatgaccaacaagtacagtgaagggtatcccggtgctagatactatggagggaatgagtacatcg

SEQ ID NO: 223364 - DNA, 410 bp, Gossypium hirsutum
caaaaagaaggcttggaggaagaagagaaagtatgagcttggaaggcaaccagcaaacacaaagttgtcaagcaacaagacagtcaggaggattagggttcgtggtggaaatgtgaagtggcgcgctctgaggctcgacactggaaactactcatggggaagtgaagctgtgactcgtaaaaccagaatattggatgtggtctacaatgcatctaacaatgagcttgttcgtactcaaactttggtgaagagtgctattgttcaagttgatgctgctccattcaagcaatggtatctccagcactatggtgtcgaccttggtcgcaagaagaaaacacttgcagcagctaccaagaaagatggagaggaaggtgaaactgttgctgaggaggcgaagaagagcaaacatg

SEQ ID NO: 223365 - DNA, 391 bp, Gossypium hirsutum
ctttctgcagaactaaaactgaaaagccttcccaaactcagctcacacccacagaaagagagaggaggagaaaacataacttctagcaaactgggttgttgaaatggcatcgaagttgtgtgactcgtgcaaatcagcgacggcgactcttttctgccgggctgactcggcgtttctatgctccaactgtgactccaaaatccacgcggccaacaagctcgcctcgcgtcacgctcgagtttgggtctgcgaagtctgcgagcaagcgcccgctcacgtcacttgcaaggccgatgcagccgctctctgtattacctgcgaccgtgacatccactccgccaaccctcttgctcgccgacacgagcgccttcctgtaacccccttctacgac

SEQ ID NO: 223366 - DNA, 419 bp, Gossypium hirsutum
cccacgcgtccggcaggctatctcaggatggcaaggaatgtggccaataccgtaactggcaaatgtgggatcgcgatggaagcctcttatccgatcaaaacaggtgaaaatccccccaatcccggaccgtctccaccatctcctataaaacctccgaccgtgtgcgatagttattattcctgtcccgagagcaatacctgctgctatatacgagtactataactactgctttgcttggggatgctgcccactcgaggctgccacttgctgcgaagatcgctacagctgctgccctcatgactaccctgtgtgcaacatacatgaaggcacctgcttgatgagcaagggcaatcctttggcagtgaaagcactgaagcgcactccggctaaaccgttctgggcacattgaaagcctggga

SEQ ID NO: 223367 - DNA, 413 bp, Gossypium hirsutum
  unsure (1)..(413): unsure at all n locations
cccacgcgtccgattgcccgtagatacacagggctcgaccggggcatcagcttcctgcaccggatgggaataggattcatgatatcagtattagccactctggtagcaagcttcacggaagtgaagcgtaaagaagcggctttagcacatgggcttcaagacaaggctcatgcaatcatccccatctcagtgttctggcttgtgcctcagtacagtcttcatggaatagcggaggcattcatgtcgattggacacttggaattcttttatgatcaggcacctgaaagcatgaggagtacagctaccgcactgttttggaccgcaatctcagtcggaaattacatgagcancgctgctggtttcttagtacacanattcagcgcaagagctggtggatcaaaattgcttcctga

SEQ ID NO: 223368 - DNA, 422 bp, Gossypium hirsutum
cccacgcgtccgcccacgcgtccggaataaggttcctaccctttttaatcgccatttaattcctgctaccactactacctgttccactactacacttgccactctttccctccacccaaaccccacttctttcaaaatcgccactaaaaaccccgctcctctccaaaacatcgtgaaatcctcgtcaccagttcctgggattgttgggttttcaatgatggcgtctgcacctgctgaagagaatggcctttcaaggtggccgaaacctgtgtgcgctaaatcaacaagggtgatattactaagtggtttattgatggctcctctgatgctattgttaatccagcaaacccgagaatgctcggaggtggggcgctgatggagccatacatagagctgctggcccagaacttaaagaagcatgc

SEQ ID NO: 223369 - DNA, 428 bp, Gossypium hirsutum
ctcatttccttttcattctctaattaatttaacatatttctctttgccattttccattcatggagacaaccaatgggacatccatcaataaccacaagttcaccatccctgctgtgaacgatgtcgagcaacaacaagcaagcatggaactcgaacccaccgacgatttcaactactcgaaacgatcacaatggctacgagccgcggtcctaggtgccaacgatgggctcgtctccaccgcagccctgatgatgggtgttggtgcagtaaaacaagacattaaagccatgatattaactggttttgctggtctagttgcaggggcttgcagcatggcaataagtgagttcgtttcggtgtattcacagttagatatagaggtggcccagcttaagagagacaagctaagagacgaaaattcagaaaca

SEQ ID NO: 223370 - DNA, 358 bp, Gossypium hirsutum
aaaaggaaagggtgttggttttgcagatttctcaggcctacacaactcctctactagccttccctttgccaggaaaacctctgatgacttccattcactcgttgcttttcagacatctgctctaggaagcaataatggcgggtacaggaaagggatggcagaggcaaagctaaaggtggctataaatgggtttggtaggattggcaggaacttcttaaggtgctggcatggccgtaaagactccccacttgatgtcattgccatcaatgacactggtggtgttaagcaggcttctcaccttctcaaatatgattccacccttagcatcttcgctgccgatgtcaagcctgtcggcact

SEQ ID NO: 223371 - DNA, 290 bp, Gossypium hirsutum
cccacgcgtccggaggggcataaaagaattcttgcggccacagatttggttggaaggggaattgacattgaacgagttaacattgtcatcaactatgacaagcctgattctgctgatacatacctgcacagggttggcagatctggtacgtttggcaccaagggtcttgcaattacgttagtttcttctgcttcagattcatgatgtgctcaaccaggtccaagagaggtttgaggtggatataaaggagcttcctgagcagattgatacatctacatacatgccgtcat

SEQ ID NO: 223372 - DNA, 380 bp, Gossypium hirsutum
ctctaacagcgacgatcgatttttattaattttctttgccgtcggatctttggttttccattttgattcaatcaggattgcttcgttttgaacccaggcgacgatgaagaaggctatcggtcaaactgttagagagcttaagagagaggttaataagaaagttctcaaagttcctggaatagagcagaaggttcttgatgctaccagtaatgagccatggggtcctcatggatcacttcttgcagatattgcaatggctacaagaaactatcatgagtatcagatgatcatgacagtgatctgggaacgtctaagtgacactggaaagaatttggcgtcatgtctacaaaggctctgactgttcctagagtaccttgttg

SEQ ID NO: 223373 - DNA, 428 bp, Gossypium hirsutum
gcaggagtttgcctgatagtcaagctgggttttttgatttgatcaagatatatttccccatggtatacgacatcaagcacatgatgaagttttgcaacagccttcatggtggtttgaacaagctcgccgagttgttggaagtggaaagagtcggtgtgtgccatcaagctggttccgatagtttgctcacctcatgcacctttaggaagttgagagataactttttcaacggctccacagagaaatatgcaggtgtattgtatggcctaggtgtccagaatggacagaatactaattagaagaaaataattgaaaaaaaatgttgatggatgtagactacttagagtttgagcctgaattttctttgtatacattgtcaaaaaaaaagtattgttgatttagctgtgacttttctccttttgcttgca

SEQ ID NO: 223374 - DNA, 408 bp, Gossypium hirsutum
  unsure (1)..(408): unsure at all n locations
ctctgtcactagggtttcgaactttccttgatttttttccttgaaatcgctgctttcgaaggcaatatgagacccattttctgtggaaactttgagtatgatgcacggcagtctgatttggaacgactcttcagaaaatttgggagaatcgaaagagtagatatgaagtctggatttgctttcatatatatggaagatgagagagatgctgaagatgccatccgagcacttgatcgaacagaatttggtcagaaaggacgtaggcttcgtgttgaatggacaaagcatgagcgtggcattagaaggcccgagggtggggggcggtggatcaaagaagatctgcagcaaatacaaagaccttcaaagactttatttgtcatcaattntgatccttaccacactcgaact

SEQ ID NO: 223375 - DNA, 277 bp, Gossypium hirsutum
tggggtggggggaaaaatttttgaggagggtttcctttgttgccttgtgtgtggtggcactcgcggtggtgctgttttcgggtgaaagtcgcacggcggaggcagtgacatgtaatcccgtggagcttgccccctgctcgccggcgcttacgtcgtcctcgcctccatcaagcgcttgttgcagcaagctgaaagcgcagcagccatgcctctgtggatacattaagaacccatctcttaaacagtatgtcaacagtcctaacgctaaaaaggtggc

SEQ ID NO: 223376 - DNA, 417 bp, Gossypium hirsutum
tttagctatagcatacactactagtacccactactagcaatggcttcctcaatgatctcatcggctaccattgccactgcctctccggcacaggctaacatggtcgctcctttcaccggcctcaagtctgcctctgctttcccagtcaccaggaaggccaacaacgacattacttctctcgcaagcaatggcggcagagtgcaatgcatgcaggtgtggcctcctactggaaagaagaagttcgagactctctcatacctccccgatcttacacccgtgcagttggctaaggaagtggattaccttcttcgctcaaaatgggttccttgcttggaattcgaattagaggagggattcgtgcaccgtaaatactcgagcctacccacgtactacgatggacgctactggaccatgtgg

SEQ ID NO: 223377 - DNA, 399 bp, Gossypium hirsutum
cccacgcgtccgagaaaatggaaggttcatctttacgccattggaaggtaatcccaattctgcttattacccttcaattcactactaacatggtcttgagcttagctgatgcaccatttgacaaacaaagaaacattgagtacatcaaatcttcatgcagctccacaacttatcccagactgtgctatcgctcactctcaatctatgcaaacaaaatcaaaactagccccagattgttagtggatactgccctcaatgttaccctcaaggccagcaaatcaactccaaggttgatggtgaagatctctagaatccacggtttgaggcctagggtagctgctgccatggcagattgcatagaggtgacggtgactctgttgatgagcttcaacagtctat

SEQ ID NO: 223378 - DNA, 340 bp, Gossypium hirsutum
tccacgcgtacgcccacacgtacggcagggtgtgcatctataaagaagaaatagattgggaaagcctcacatttcgcccccttcctattttcactcttttcagtcctaacaaaaggcggcccctcaactctcttctctctttccccttcactgtttcaactcaaagaaatggcggaggagaagaaggctcaatctgctggggtttggcctacggttaaaccttttgtcaatggtggtgcctctggtatgcttgctacctgtgtcatccaacccatcgatatgatcaaggtaagaatccaactgggtcaaggatcggcagcaactgttaccaagaacatgc

SEQ ID NO: 223379 - DNA, 372 bp, Gossypium hirsutum
cggttctttggtttcttcaaacccccaaaacaatggcaatctcacttaatacaaatcttcatcacccgtctctgagttgtgggactaaggtttactctggtttgaagcttcaatctccctgtttgtttgcaactggtagaccaaacttgactgcggacttctataccagagttaataagagtctccaatgcggaacgcgaagctgcaaagcaacaaggtcacgagtagggatgatgccaataggaactccaagagttccctatagagttccaggtgaaggaacttggcaatgggttgatttatggaatgcactatatcgagaagccgttatcttcattggacaacatatagatgaggaatttagcaaccaaa

SEQ ID NO: 223380 - DNA, 326 bp, Gossypium hirsutum
gaccgactcgtccgaccactcctccgctactagtacccactactagcaatggcttcctcaatgatctcatcggctaccattgccactgcctctccggcacaggctaacatggtcacccctttcaccggcctcaagtctgcctctgctttcccagtcaccaggaaggccaacaacgacattacttctctcgcaagcaatggcggcagagtgcaatgcatgcaggtgtggcctcctactggaaagaagaagttcgagactctctcatacctccccgatcttacacccgtgcagttggctaaggaaagagattaccttcttcgctcaaa

SEQ ID NO: 223381 - DNA, 321 bp, Gossypium hirsutum
tccgacacgggcaagggaaagggtgtttaccattttgttgacaaatatggggctaacgtcgatgggtacagtgctatctacaacaccaacgactggtctcccagtggtgatgtttatgttggcggtactaccggattggcaatctgggcggttaccctagccggaattcttgccggtggtgcacttcttgtttacaatacaagtgctttggcgcagtagatgtctctaaagagatccctgcactcggttgcattatatgctgtccgatgtaattgttgtgatcaacagaaccatcccacaactactgtgcatatctttatc

SEQ ID NO: 223382 - DNA, 411 bp, Gossypium hirsutum
cccacgcgtccgggacatttggtcttggatatgtgagcttcctaacaatgacgattggggtgaatcagacccacacccaccactcgcctttacaatggcgagttccgaggaaggcgactcaagctcaactcgttcgatccaactcaaagctgagcgtaccatggggtccgattcagaggtctgtataaccttcacaataagcttcgaagggttccaatcttcacctctttgggtctctgacccctgtcctctatcttcagagcaacctttcctcgctttagtacttcagcttctccaagaaaccatcagccgttcaccagcaatgcccaacaccatttgcccgaggtctcagcttcaaaaactcaaacccgaaccgatttcttggatcaatgagtctcactcacccgagtc

SEQ ID NO: 223383 - DNA, 429 bp, Gossypium hirsutum
taatgtttcagcttcagctattaaaggatttaaagctacaatacaggtatactgatacaaactacaaagcaactcattgtacttcatttagcaccttttgagggttcctaagctttcaagcaacaaaatttcgttaggataagaggtgagttagaagaagtctgtcatcaatgaatccagcggctgctgctaaccagaaagaagagttcaaattgaaggacacaaaaccgcagctcggggaacgatggcctcatggaggaacacgccgcgggagtggttggattagcagtgaacgagcaacaagcacatatgaccttgttgagcagatgttttatctttatgtcagggttgttaaagccaaagatttgcccactaatcctgttaccggaaccaatgatccttatgtcgaagtgaagctggggaattata

SEQ ID NO: 223384 - DNA, 391 bp, Gossypium hirsutum
cccacgcgtccggcctgctggaggaagaggggatgaggaagagctagccaaggagaacaacaagagtgctgcatcttcatcagggaaaatcaccttgagcgtcacaaagagcaagccggagaccggtgaagttatcggtgtgttcgagagccttcagccatctgacactgacttgggtgccaagactccaaaggatgtcaagatcactggtgtctggtatgctcagcttgattcataaacaagtcttgtatgaatttgtttattctcggctgagattttgtaatttttaaacaagtgttgctaaactttgcagtaatccactgagaaacccttatcttctttggatgttactatgctggctttttataataattttctaagcttctagtac

SEQ ID NO: 223385 - DNA, 438 bp, Gossypium hirsutum
ctgtctgtctctctgttttactccacaaccactatcactaccattatggcttcggctactgtttctgtagccaaacccaaccttcagattcaggcaaaaggaaagggtgttggttttgcagatttctcaggcctacacaactcctctactagccttccctttgccaggaaaacctctgatgacttccattcactcgttgcttttcagacatctgctctaggaagcaataatggcgggtacaggaaagggatggcagaggcaaagctaaaggtggctataaatgggtttggtaggattggcaggaacttcttaaggtgctggcatggccgtaaagactccccacttgatgtcattgccatcaatgacactggtgggtgtaagcaggcttctcaccttctcaaatatgattccacccttggcatcttcgctgccgatgtc

SEQ ID NO: 223386 - DNA, 390 bp, Gossypium hirsutum
  unsure (1)..(390): unsure at all n locations
cggacgcgtgggctttgaattgaaaccctcaaaattccacttaaaaaatggcctncacaggcttggctctccaccgccgtagccaccacctctttcctccgcggccacccggccccgaaaaccctaagctcccttgctttcaaccaatctcttttcgggctaaaaccccaacgaaatgggcggctcaccatggctgcatacaaagggacactggtaacacccgaaggaccccaagaattcgtgtgccccgacgacgtttacatcgttgaccaagctgaggaaagaaggcattgatcttccgttctcgtgtagggctgggtctnggtcttcgtgtgccggaatgattaagcagggctccgtcgatcaatccgacgggtatttcttgatgat

SEQ ID NO: 223387 - DNA, 379 bp, Gossypium hirsutum
ctcaagtcttcacctattatcgacaagtccgagtggattaagggtcaaaacctccgccacgcttcggtttgttttgtacagtgcaaccctacatcggccgcctttaccgtccgtgctagttcatatgccgatgagctggttaagaccgcgaaaactgttgcatctccaggtcgtggtattttggccatggatgaatcaaatgctacatgtgggaaacggcttgcctcgattggtctcgagaataccgaggcaaaccggcaagcttaccgtacccttctcgtgtctgcccctggcctcggtgactacatctcgggagctatccttttcgaggagactctctaccaatctaccatcgatgggaaaaagatggtcgatgttc

SEQ ID NO: 223388 - DNA, 451 bp, Gossypium hirsutum
gtttgtaactgaaaaaacaaaacccaatttgaaaccctaacaaagaaccagggaacaccgaaggaagaatctcgggaaccatggacagagactggggctccaaacccggttctggaggtgctgcctccgcccaaactgaagccatggaccgccgcgagcggctccgtcggcttgctcttgaaaccatcgatctcgccaaagatccctatttcatgcgcaaccacctcggcagttatgagtgtaagctttgtctgacgctacacaacaatgaagggaactatttggcacatacgcaagggaagcggcaccagaccaacttagcaaagagagcggcgcgtgaagctaaggaagctccggctcagcctcagcctcacaagcgtaaagtttctgttcgtaaaacagtcaaaattggtaggccaggatatcgtgtgacaaagcaatatgatccgga

SEQ ID NO: 223389 - DNA, 330 bp, Gossypium hirsutum
  unsure (1)..(330): unsure at all n locations
gggaagaaaaccaacttgttattcattagttctcaggattaaaacccggaaatcgagaaacaaaggccaataactcaaagaaaaggaaaagcaaaagtaaagaacatgattttttctgagtacaaattcaaacaaatggagagacaaagttaataaaaagcttanaagcctggaggcttgtaggcaatgaaactaatgcactgcacttgacgcacgttgtcgaagccaatgattctaatgaatgcattggggtatgccttcttgcattcctcaagctcctccaacaacctgagccgagtcggtgcacccgaacatgggcagcttccacat

SEQ ID NO: 223390 - DNA, 378 bp, Gossypium hirsutum
cccacgcgtccggtgagactcttttgtataactgtagcatatagtactagtaagcagtagtagcaatggcctcctccatgatctcatcggcaaccattgccaccgtgaactgctcctccccggcacaggccaacatggtggcccccttcaccggcctcaagtctgcctctgctttcccagtcactaggaaggccaacaacgacatcacttctcttgcaagcaatggtgggagagtgcaatgcatgcaggtgtggcctcctcttgggaagaagaagttcgagacactctcatacctccccgatcttacacccgtacagttggctaaggaaagtaaataccttcttcgctctaaatggattccttgcttggaattcgaat

SEQ ID NO: 223391 - DNA, 368 bp, Gossypium hirsutum
tctcaaaagactccccttttaactcacaactctttcgaggtctgtaatgggtaaagggaaaggtcacatcaacattgggggcatcggccatgtccacttttggaaggctacaaccactggtcatttgatctaccaacttggtggtattgaccagcgtgtgattgaaaaggttgaaaaaggagctgctgaaaataacaaaaagtcatttaaatatgcatgggtgcttgacaagcttaaaggcccgacgtgaacgtggtattaccatcgatattgcccttctggagtttgaaactaccaaatactactgcactgtcattgatgcccctggacaccgtgacttcatcaagaacatgattactgtacctcac

SEQ ID NO: 223392 - DNA, 373 bp, Gossypium hirsutum
cacaggttccattgtttttcagtagtaaagagcaaaaaacagaagggaaatcaatggaagggaaagaagaagatgttagattgggagctaacaagttctcagagaggcagcctattgggacagcagctcagtcccaagatgataaagattacactgagccaccaccagcacccttgtttgagcctagtgagttgacctcatggtctttttaccgagctggaatcgctgagttcgttgctactttccttttcttgtatatctcggtgttgaccgtgatgggagttgttaaggacaaaaccaagtgtacaactgttgggattcaagggattgcttgggcttttggtggtatgatctttgctcttgttactgcact

SEQ ID NO: 223393 - DNA, 412 bp, Gossypium hirsutum
cccacgcgtccgcccacgcgtccgcccacgcgtccgcccacgcgtccgcttttttttcttttcggttttcggctactgagtcaccaaacgagttaaggaaaagagagacgagtttcaccaaaccatggggtcgatccccaatcctggcgagttgaccgagttaacccatccgagtttcgatgagttccagcgtcaaacgtctctgatgaccagctgtactctcctctggaaagaactgtcggatcacataaattcacttgagcagaacctgatgaagcagtcggagaccttgaaacgcaaaatcgaggcactggactcggagaccaaggcttcactcgactcactcaagaagcgggaactcagtatcgaggacagtgtcaagatcgcactcagccgagtcgagttcaacacc

SEQ ID NO: 223394 - DNA, 387 bp, Gossypium hirsutum
  unsure (1)..(387): unsure at all n locations
aatagttcgtaacaatggcggtctcacttcaagctgcagctaccctgatgcaaccaatcaaggttgctgcaccatcaaggaccaatgtgccgctcangtcctcccagagcgtttctaaggccttcggtttggagcctgttggtgctaggcttacctgctctttgcaaactgacctcaaggacttggctctgaagtgtgttgatgctaccaagctcgctggtttcgctcttgctacatctgctcttgttgtctcgggagcaagcgctgaaggagtttcaaagcggctaacctacgctgaaatccaaagcaagacattacatggaagtcaaaggaacagggactgctaaccagtgccccaaccatcgatggtggtgtcgactcttttgc

SEQ ID NO: 223395 - DNA, 372 bp, Gossypium hirsutum
cccacgcgtccgcccacgcgtccgcccacgcgttcgaaaacaataaaaaatgccgatttctcgcattgcagtaggatctgcagctgaggctggccaagctgatgccctcaaagcagctttagctgagtttatttcaatgctcatttttgtttttgctggtgaaggctcgggcatggcttttaacaagctcactgacaatggctctacaacaccggctggtcttgtagctgcatcggtggcccatgctttcgctctgtttgtggccgtttctgtcggtgctaacatctcgggtgggcacgtaaaccctgccgtcaccttcggtgcctttgttggtggccacattaccttggtccgaagtattttgtattggat

SEQ ID NO: 223396 - DNA, 425 bp, Gossypium hirsutum
accgcccctccctctccactatctcttttcccggtttctccggcctcaaatcttctatcggtcgcgcttcctcatcccgtcgacgccttccctcccgctccaaccaaaagcgccaggtccgtgctgctgccgtcgaaacaattggcaccgccgccgagacttccttggtcgagaaatccgtcaacaccatcagattcttgtctattgatgcggtcgagaaggcgaattcagggcatcctgggttgcccatgggatgtgctcccatgggtcacattttgtacgatgaagtcatgaggtataaccccaagaacccttactggttcaaccgtgaccgtttcattctgtccgctggtcacggttgtatgttgcagtatgctctgcttcacctcgctggttacgacagtgtcctggaagaagatttgaag

SEQ ID NO: 223397 - DNA, 385 bp, Gossypium hirsutum
cccacgcgtccgcccacgcgtccgaaataatattactagttttgcttgaacccgacatccatggctacacacgcaagtctagctccttcaaggatccctgcaacaaccaggcttccttctaagaccacacactctttcccctctcaaattcaatgctcttccacgagattacaagttactgaattctctggactgcgctccgcctcatgcgtcacattcgtcaacaatgctagagatgcgtcctttttcgatgtggtggctgctcaacttactccaaagactgcaggtggagcaacacctgttaggggcgaaacagttgccaaattgaaggttgctatcaacgggttttggacgcatcggcaggaactttctccgatgttggcat

SEQ ID NO: 223398 - DNA, 425 bp, Gossypium hirsutum
gtcccgactgttaccatgtgggcttcatgttattggtgagcctccatctgctatggaagcagttgctacattggtgaatattgctgctttagaccgacctgaagatgggatttcatcactgccatctatattagctgagactgttggaagaaacatagaggatgtgtacagaggaagtgacaaaggcatcttgaaggatgtagagcttctgcggcaaattactgaggcctcacgtggggcaatttctgcctttgtgcagaaaacaaccaacaagaatggtcaagttgttgatgtggctgataagttaagctcgatccttgggtttggtatcaacgagccgtggattcagtatttatcgaacacaaaattttaccgtgcagatagggaaaagcttagagtattatttgagttcctaagtgagtgtt

SEQ ID NO: 223399 - DNA, 409 bp, Gossypium hirsutum
gcaatggcttcctcaatgatctcatcggctaccattgccactgcctctccggcacaggctaacatggtcacccctttcaccggcctcaagtctgcctctgctttcccagtcaccaggaaggccaacaacgacattacttctctcgcaagcaatggcggcagagtgcaatgcatgcaggtgtggcctcctactggaaagaagaagttcgagactctctcatacctccccgatcttacacccgtgcagttggctaaggaagtagattaccttcttcgctcaaaatgggttccttgcttggagttcgaattggaggagggattcgtgcaccgtaagtactcgagcttacccacgtactacgatggacgctactggaccatgtggaagctgcccatgttcgggtgcaccgact

SEQ ID NO: 223400 - DNA, 421 bp, Gossypium hirsutum
cccacgcgtccgcggtgaagctgtatggttcatggccgggtctcaaatcttcagtgagggtggacttgactacttgggtaacccaagcttgatccatgctcaaagcattttggccatctgggcttgccaagttatcttgatgggagccgtcgagggctaccgtattgccggtggaccactcggtgaagtgactgacccattgtacccaggtggcagctttgacccattgggtcttgctgatgacccagaggcattcgctgagctcaaggtgaaagagatcaagaacggtaggttggctatgttctcaatgttcgggttcttcgttcaagccatcgtgaccggaaagggaccattggagaacttggctgaccaccttgctgacccagtcaacaacaatgcttgggcctatgccaccaacttt

SEQ ID NO: 223401 - DNA, 418 bp, Gossypium hirsutum
cccacgcgtccgccaacgaccatcaagggccttggtggcagctctctcagtggaaccaagctcttggtgaagtcaactcgccagagtttcaaacccaaaaactacagggctggtgctgtggtagccaagtatggtgataagagtgtatactttgatttggaggatattggcaacacaactgggcaatgggacttgtatggatccgatgcaccttcaccgtacaacccactccagagcaagttctttgagacatttgcagctccatttaccaagagaggattgttgctcaagttcctgatcttgggaggcggttccctcggtctttacctcagtgccactgcttccgatgaccttctaccgatcaagaaaggtccgcaactcccacccaagcctgggccgcgtggcaagatctaattta

SEQ ID NO: 223402 - DNA, 382 bp, Gossypium hirsutum
ccaagatgtctcttacaatcccaactaatctctcaaaatcaattttgaagccaaagctggagacccaagtgatccccaaggcttcatccagatcattgattgtatgctcctccagcaatccttcctccgacaaatcggcttcaccactccaggccttctcagcggctctggctctttcttccatccttctttcagctccactccctgctgttgccgacattgcggggctcactccttgcaaagagtccaagcaattcgccaagcgcgagaagcagcagatcaagaagctggaatcctcgttgaagctttacggccccgatagcgcaccggctctcgccatcaaagccaccatcgagaaaaccaagagacggttcgacaacta

SEQ ID NO: 223403 - DNA, 421 bp, Gossypium hirsutum
  unsure (1)..(421): unsure at all n locations
cccacgcgtccgttcttttgtataactgtagcatataatactaggtaaccaatataaccatgggcttcttcattaatttatcgggaaccattggcaacgggaactggttcttcccgggacaaggcaacatggggggcccctttaaccgccttaaagcttgcttttgttttccaagcactaagaaaggcaacaaccaccatactttttttggaagccatggtgggagaaggcaatggatggcagtggggccttcttttgggaaaaagaaagtcgagacaactttataccctcccgatcttacacccgtacagtggcttaagaaagagattaccttcttcgctctaaatggattccttgcttgaattcgaattaaanggagggattcgtgcacccgaagtactcgagcttacccacgtactac

SEQ ID NO: 223404 - DNA, 405 bp, Gossypium hirsutum
  unsure (1)..(405): unsure at all n locations
cccacgcgtccgcccacgcgtccggattgctctgctcacatgctttgggttggtgagaggactcggcaattagatggagcacatgtcgaatttctccggggtatttccaatcctctcggcataaaggttagtgataaaatggacccgaaggaccttgtgaagttgtgtgaaattctcaaccctcggaacaaacctggaagactgacaataatcacacgaatgggtgccgataacatgcgaataaagcttccacatcttataagggcagtgcgccaggctgggcttattgtcacttgggtgagtgatcccatgcatgggaacacaattaaagctccatgtggtctcaaaactcgtccatttgatgcaatcagatctgagtngagggcgttcttcgatgttcatgaa

SEQ ID NO: 223405 - DNA, 398 bp, Gossypium hirsutum
  unsure (1)..(398): unsure at all n locations
aactcccattcatctcctcatttcatcccctttggaaacagcccccccagtactgccagagcagaaatggcgctaactctcccaaacacatttctccaaatcaagccttctcctcccccttcactccctctcagaaaggtggtgactgcaaggggagggggctataggccacaagttacttgccggaagaaggacatccacccggaattccacgaggatgctaaagtttactgcaatggagaattggtgatgacaacaggtgggacgcagaaggagtatgtggtggatgtttggtcggggaaccatcctttttacctcgggaacagggtcgccgtccttgntgacgctgaccangtcgagaagttccgtaagaaagtcggcagntatctgagatttgg

SEQ ID NO: 223406 - DNA, 398 bp, Gossypium hirsutum
cccacgcgtccgctcaccattgttccaagtttgttgtaaaccaagttagaaccagcagccaacatggcctcattagcagcctccaccgctgccgcctcccttggcgtctctgaaatgcttggtaaccctctgaatttcagtggtggagctaggtcatcggctccaacaccatccaactcatccactttcaagaccgttgctcttttctccaagaagaaggccgctcctccaaagcccaaggctgctgctgtcgccccggccgatgaagagctggctaagtggtacggtccggacagaaggattttcttgcctgaaggtctgttagacagatcggagatcccagagtacttgaacggagaagttcccggagactatggatacgatccgtttggtctgag

SEQ ID NO: 223407 - DNA, 427 bp, Gossypium hirsutum
tagaattgaacacttaaagggagatcaagttcaaaaactgggatggcttttgtaacgtcggaggaattgctggccactttggtgccaattgctgtttattggatatactcaggtatgtatgtgatgtttgagtcaaggtttgagaagtacaagttgcactccaagaaagaagaggaggagaagaatttggtttccagaaaggaagtcttcaaagccgttctttgccatcaagtcatgtcaattgctattaacctcttcacgtatgcggtaacaagagaaaaagatggtgaggcatctccaaagaaatcactaaccttgcttcttctagccaagcaattggtgatagcaatggtggtgatagatacatggtcgttttttgtgcattggtacttgcatcagaacaagtttttatacaaacaccttcatg

SEQ ID NO: 223408 - DNA, 399 bp, Gossypium hirsutum
ctccggttggccgcttcttccctgttcccgtaaccccctcatccgactgacgcccaatcgtagaatcagttttagtcccattcgttgcgccgcacccgaagccgatgccgacagaaaagtctccgctcgtctctcgcaaatgcagcagctccttcaggaagcggaagagcgagccagctccgccgggaatgagcccactcctcaaatcactttggatcatgttacggtgagttttgcaaggagtggtggccctggtggtcaaaatgtaaacaaggttaacaccaaggtggacatgcggttcaatgtaaaacaggcttattggcttagtgacaggattagagagaggattatgcaaatggaaaagaaccgtataaacaaggatggagaagtcgtgatatc

SEQ ID NO: 223409 - DNA, 409 bp, Gossypium hirsutum
  unsure (1)..(409): unsure at all n locations
gaagcctacgatgttgtgtacgacataaatggacgataggcggccgaagttgaaccgatactggatgcactcccgaacttagaacagttcatatattgctcctcagcaggtgtttaccttaagtctgatatgttaccacattgtgagatcgatgctgttgatccgaagagtaggcacaagggaaaacttaataccgagagcttactggagtcgagagatgttaactggacatctgtgagaccagtctacatatatggacctttgaattataaccctgttgaagaatggttcttccaccgattgaaagccggtcgccctattccaattcccaactctggagtgcaaataacccaacttggtcatgtcaaggacttggcaacggctttcattgcggntcttggtaatgaaa

SEQ ID NO: 223410 - DNA, 368 bp, Gossypium hirsutum
  unsure (1)..(368): unsure at all n locations
caaagccatggggagttgagtctgcaaggagtgcttacgccaagctaggtgacgatgccactgctcagttgctggacataaggcctctcaaggagtctagagatgttggtagccctgacattaagggatttgggaagaaaccggtgtcaattgcctacaatggtgaagataaaccagggttcttgacaaaactgtctttgaaattcaaggaacctgaaaatactaccttattcattatagacaaatttgatgggaattccgaactggttgcggagttggtcactgcaaatggattcaaagctgcttatgcagtcaaagatggtgctgaaggaccacggggatgggtgaacagtggtcttncctggata

SEQ ID NO: 223411 - DNA, 256 bp, Gossypium hirsutum
cggtagactcgcgatgttcgccatgctcggtttcttcttacaagcttatgtgaccggagaaggtccggtggagaacctttcgaagcacctgagcgatccttttggcaacaacttgctcacggtcattgctggaactgctgaaagagctcccaccctctgattttaatatctttgtcttctgattttcgccgctacttgttattgcgtttatgcattttgttgtacatcaaatcaaacttatcggataattcccgcg

SEQ ID NO: 223412 - DNA, 407 bp, Gossypium hirsutum
  unsure (1)..(407): unsure at all n locations
gtcaccttggcagttcatacttatggtcgctgcaagctcagttggagaggagcttttctatagggcagctgttcagggagcattggctgatatattccttagaggcactgaattggtttcggatgctcgaggaatggcagctttgactggtgtgctacctccctttgttccatttgctcaagcatttgcagcagtaataactgctgctcttaccggttctctatattatgtggctgcctctccgaaagatcctacttacgtagttgcaccagttcaacgatcccgttctgctcgtgaagatctgaaaaaactattcgcagccttgtatgagacgagacaaatgaaaaagatctactctncgcttttggaaggaatattggcccttttaccttggatttgaatggatc

SEQ ID NO: 223413 - DNA, 409 bp, Gossypium hirsutum
gtaagtccaagatttactttgccatggaacttgttcgaggcggtgaactcttctcgaaaatcgccaagggtcggctcaaggaagacttggcaagagtctatttccaacagttggtttccgttatcgatttctgtcatagccgtggggtttaccaccgtgatttgaagccggagaatttgctcttggatgaagatggctgcttgaaggttacagattttggtctcagcgctttctctgagcacttgaaacaagacgggttattgcacacaacatgtggaacaccggcttatgtggctcctgaagttattggtaaaaacggatacgacggagctaaagcagatctttggtcttgtggggtaatcctttacgtgcttctcgctgggttcttaccatttcaagatgataatat

SEQ ID NO: 223414 - DNA, 331 bp, Gossypium hirsutum
gcactcccttgctctcccccacatttcatttcatcttttttctcttatcttttaagcttaaggcttttgtgcagatttccttatctttagttcaactttgtcccttttatatcagtgtctacacatagaaatagatcatggcaaaagtagatgaaccacagccacatccaccaaaggagcagctgcccaacatttcttactgcattacaagtccacctccatggcccgaggccatccttcttggtttccaacattatcttgtgatgcttggaacgacagtgatcattccaacttcacttgttccccagatgggaggtggaaatgaggagaa

SEQ ID NO: 223415 - DNA, 386 bp, Gossypium hirsutum
  unsure (1)..(386): unsure at all n locations
cccacgcgtccgatccatctcaccactaaaccccaaccatcgtttatcatggcttcctcaactctctcccctgcagctccttggcagctatgctccagcaagagtggcatgttctgcccatcacgagcgtttcttgtgaaaccagcgaggacccatatggtcaaaaacgaaaagggaatgaggatcacatgccaggccactagcatccctgctgatagagtgccagacatgggcaagaggcagctcatgaatctgcttctgttgggggctatttcactcccctcangtttcatgttggttccttatgcagccttctttgtgccatctgggggacggggtaccggtggtggcaccgttgccaaggacgcaatcgggaatgatgtaat

SEQ ID NO: 223416 - DNA, 363 bp, Gossypium hirsutum
cggaatggactggccggaccgacccacgcgatcgcactaccttgctctcccccacatttcatttgatttgttttctgttatcgagtagaaattggctggcaaaaggcaaaggtccggcgattggtattgatctcggcaccacgtactcgtgcgttggtgtttgcaacatgatcgtgggagatcatagctaacggatcaggaacaagaccacgccgtcttacgtgggtttacagacactgagcgtttgatcggtgacgctgctaagaatcaggttgctatgaaccctaccaatactgttttcgatgctaagcgtttgatcggtagaagattcagcgactcttctgtccaaagcgacatgaaatt

SEQ ID NO: 223417 - DNA, 365 bp, Gossypium hirsutum
caagcttctattcagttttgtaagagctatggctaaggacattgaggttggtggtgagttccaggccaaggactaccatgatcctccacccgctccattggtcgacgctcaggagttagccaagtggtctttttacagggctgtcatagctgagttcattgccactctcctctttctctacatcactgtcttgactgtgatcggttacaagacccagaccgaccctgctaagggcggtgaagattgtggcggcgttggcattctcggcattgcttgggcttttggtggcatgatctttatccttgtttactgcactgccggtatctctgggggacacatcaacccagcagtaacctttggacttt

SEQ ID NO: 223418 - DNA, 340 bp, Gossypium hirsutum
cagggagactcttttgtataactgtagcatatagtactagtaagcagtaatagcaatggcctcctccatgatctcatcggcaaccattgccaccgtgaactgctgctccccggcacaggccaacatggtggcccccttcaccggcctcaagtctgcctctgctttcccagtcactaggaaggccaacaacgacatcacttctcttgcaagcaaaggtgggagagtgcaatgcatgcaagtgtggcctcctcttgggaagaagaagatcgagacactctcatacctccccgatcttacacccgtacagttggctaaagaagtaaattaccttcttcgctct

SEQ ID NO: 223419 - DNA, 412 bp, Gossypium hirsutum
cccacgcgtccgccggtatgtacaacaaggaagagaacccccgtgtccccattatcggcactggtaacgatttctccacactgtatgctcctctcatccgtgacggtcgtatggagaaattttactgggcaccaactagggacgaccgtgtcggtgtttgcaaaggtattttcaggaccgacggcatcccagatgaagacattgttaagctcgtcgacaccttccccggccaatccatcgatttcttcggtgccttgagggctcgggtttacgatgacgaagtgaggaaatggatcagtgatgtcggagttgcaggcgtaaggaaagaagttagtgaactcaaaggacggacctccaacatttgagcaaccgaaaatgaccattgaaaagctattggaatatggaaacatgc

SEQ ID NO: 223420 - DNA, 424 bp, Gossypium hirsutum
cccacgcgtccgcccacgcgtccgcaggaccgacggcgtccgagatgaagacattgttaagctcgtcgacaccttccccggccaatccatcgatttcttcggtgccttgagggctcgggtttacgatgacgaagtgaggaaatggatcagtgaggtcggagtcgcaagcgtagggaagaagttagtgaactcaagggaaggacctccaacatttgagcagccaaaaatgaccattgaaaagctattggaatatggaaacatgcttgttgctgagcaagagaatgttaagagagtccaattggctgacaaatacttgagtgaagctgccctcggtgaagctaatgaagattccatcaatagaggaactttctatggcaaagcagcacaacaagttggggttccagttcccgaagggtgcactgat

SEQ ID NO: 223421 - DNA, 402 bp, Gossypium hirsutum
cccacgcgtccgtctttctagctatatccttatcagctttcaaagatggcaggaatcgcctttggtcgctttgatgattccttcagtttggggactgtcaaggcctaccttgctgagtttatctcaactttggtgtttgttttcgccggcgttggctctgccattgcttacaacaagttgacaactgatgcagccctagatcccgatgggctagtcgccattgctgtttgccatggatttgctctctttgttgcagtggctatcggtgccaacatctcatgtggccatgtcaaccctgcagtcacttttgggttagctcttggtggccaaatcaccatactaactggcatcttttactggattgcccaacttcttggatccattgttgcttgcttcttgctc

SEQ ID NO: 223422 - DNA, 329 bp, Gossypium hirsutum
gagcacacaaaattcacattctgctttcattgattgtgcaacaaatttacattcacaccaacaaaatcagttgcttcacaatggcctctacaaccatggctctttcttccccatcattcgccggtaaggcagtgaagttctccccttccacccctgaaatccggggaactggccgtgtttccatgaggaaaaccaccaagcctgttccttctggtagcccatggtacggtcctgaccgagttttgtacttgggtccactttccggtgagccaccatcttacttgaccggtgagttccctggtgactatggttgggacactgctggactc

SEQ ID NO: 223423 - DNA, 424 bp, Gossypium hirsutum
cccacgcgtccgctcaaattcagataacaatttcacagttgttttcttcactctctctctcagccatggctgcagccatctccaccgtcgccgccgctgccgccgccaaccgagctctgggagtgtcagtcccaacctcagctttcatggggaagaaagtgagctcgagattcaacaacaccaggcaggttccttcgggaagttttaaggtgatggcggccgaaaaagagatagacgaagagacacagaccgaaaaggaccgatggaaagggttggcttacgatatttcggacgaccaacaagacattactcgagggaaagggatggtggattccttgttccaagctcccatgaatgatggaactcactatgctgtcatgagttcctatgaatacatcagccaaggtcttaaaacgtacaattt

SEQ ID NO: 223424 - DNA, 437 bp, Gossypium hirsutum
ggggggcccacgcttgcggctataccatacactactagtacccactatcttttatggctttctcaatgatctggtgggctaccattgccactgcctctccggcacaggctaacatggtcgctcctttcaccggcctcaagtctgcctctgttttcccagtcaccatgaaggccaacaacgacattacttctctcgcaagcaatggcggtagagtgcaatgcatgcaggtgtggcctcctactggaaagaagaagttcgagactctctcatacctccccgatcttacacccgtgcagttggctaaggaagtggattaccttcttcgctcaaaatgggttccttgcttggaattcgaattagaggagggattcgtgcaccgtaaatactcgagcctacccacgtactacgatggacgctactggaccatgtgggagctg

SEQ ID NO: 223425 - DNA, 416 bp, Gossypium hirsutum
ctatttttggccttctcttggccactgtgtcttctttcaacaacaaacaacatatataaccatattatatacatacatacacaaggtctttccttctaaggaagccatgactggcaaagaaatcctccacaagatgaaggagaaagttcaagaaaaagtaggcttaaacccttctaataatgctgaatctggaaaagggaagagtaagatgtcgaagaatataacacatggttatcatttagtgaaggggaaagcgaatcatccaatggaagactacgttttcgcggagtttaagcaagtcaatggcagtgagctcggtttatttgccatattcgatggccatttgagccatgttattcccgattatttgaaggcgaacttgtttaacaatatcttgaatgaacccgacttttgga

SEQ ID NO: 223426 - DNA, 376 bp, Gossypium hirsutum
tcgtttgaaaccctcaaaattccactaaaaattggtcttcacagtttccctctccaccggcgtggccaccacctctttcctgcgcggccatccggcgcctaaaaccctaaactccctttctttcaaccaatctctttttgggctaaaaccccaacgaaatggccgtctcaccatggcagcatacaaggtgacactgttaacacccgaaggaccccaagaattcgtgtgccccgactacgtatacatcgatgaccaagctgaggaagaaggcactgatcttcctttctcttgtatggctggttcttgttcttcgcgagccggatagattaatcaaggtttctgcgatcaatccgacagtaatttccttgatgatgac

SEQ ID NO: 223427 - DNA, 412 bp, Gossypium hirsutum
gcttcggctactgtttctgtagccaaacccaaccttcagattcaggcaaaaggaaagggtgttggttttgcagatttctcaggcctacacaactcctctactagccttccctttgccaggaaaacctctgatgacttccattcactcgttgcttttcagacatctgctctaggaagcaataatggcgggtacaggaaagggatggcagaggcaaagctaaaggtggctataaatgggtttggtaggattggcaggaacttcttaaggtgctggcatggccgtaaagactccccacttgatgtcattgccatcaatgacactggtggtgttaagcaggcttctcaccttctcaaatatgattccacccttggcatcttcgctgccgatgtcaagcctgtcggcactgatggca

SEQ ID NO: 223428 - DNA, 409 bp, Gossypium hirsutum
  unsure (1)..(409): unsure at all n locations
aaccccattatgatgagtgccggagaattggaaagtgggaacgccggagaaccagccaagttgatcaggcaaaggtaccgtgaggccgccgacattatcaagaaagggaaaatgtgttgcctctttatcaacgatctcgacgctggagccggtcgtatgggaggaaccacacaatacacagtgaacaaccaaatggtgaacgccacactcatgaacatcgctgataaccccaccaacgttcagctccccggtatgtacaacaaggaagagaaccctcgtgttccgatcattgtcaccggtaacgatttctcgacgctgtacgcgccgctcatccgtgacggtcgtatggagaagttntactgggcacccaccagggaagataggatcggtgtttgcacaggtattttca

SEQ ID NO: 223429 - DNA, 419 bp, Gossypium hirsutum
ggaaaagaaaaaagaccctagctaagcctcctgtgatccttcttcaacatgggagattacaacgatgccttcatgcgcaaccaaaacgccgccgccgccgttcaggctcgcgttaaaccccctcagaatcgcgccaatattcagcagctcaagctgattggccaaagccatcctactggtttaacagctaaccttttgaagctctttgaaccacgacctccgttggagtttaaaccgcctcctgagaagagaaaatgtcctccgtatacaggaatggcacaatttgtgagtcactttgctgagccaggagatcctgagtattccccgcctgttcaggaagcagaaacacctgcacaacggagagcaagaattcataagttgcgactagagaagggcttggagaatgctgctgaggagct

SEQ ID NO: 223430 - DNA, 419 bp, Gossypium hirsutum
cttgctgggttggagctagtttcatcgctgcaaaacttggctattctctggcctggaaggttgtgcttgtatctcaattgctttgttggacaggacagtttcttggccatggaattttcgagaaacgagcacccgcgctgttggacaatcttgttcaagctttactaatggctcctttctttgttttgctcgaggttcttcaatcattatttggatacgaaccatatcctggttttcagatgcgcgtaaatgcaaagatcaaagccgaaatcaaggagtggcaggacaagaaacagaaaaaggtttcttaggttacattgttgtaagttgtatgtttggtaacgagtaaatttaggtttaagtataatgtactgttgtggtataagtgttgtaaggcaacattgcatggattttaatta

SEQ ID NO: 223431 - DNA, 418 bp, Gossypium hirsutum
cggacgcgtgggcggacgcgtgggcggtcgcttggggtcgacggcttccatcagcggggggtgccttacctcctcttcttcctccaccaccacctcctctttttccgctcgtcgacgacctacattgcggccttcggtcgtcgctagccttaactcttctccttctcctccgactcttatccaagaccggccggttttcgctgcccctgttcctttgctcaccccgagagaagagatgggaaacaagtcctacgacgaagccattgaagctctcaagaaacttctcagcgagaaaggagaactgaaagctgaagcatctgcaagggtagatcaaataacagcagagttaaacacaacatcagctgacggcaaaccatcttactcttctggtgagagactgaaagaaggcttcgtttac

SEQ ID NO: 223432 - DNA, 421 bp, Gossypium hirsutum
gcaggtgttaataggaaaatatcagccgcttccgcaagagctcacactagaagagccaagcaaaacgcttctttcaagcttccttcagggatttgcacaaagatactattggtcttgtttgctgggatattggcatgggcttatcaggctattcagccgccaatacctaagacatgtggctctcctgatggtccaccggtcacggcatcgagaataaagctcaaggatggaaggtatttggcctacaaagagcatggtgttccccgagatgcagcaaagtataaaattgtctatgtccatggctttgattcttgtagacatgatgcggttgttgccaataccttgtcaccggaaattgttgaagctctcggggtctatatcgtgtcttttgacagaccaggttatggagagagtgacccta

SEQ ID NO: 223433 - DNA, 400 bp, Gossypium hirsutum
agctgaaaagtttctatgattccggacttggaccagtaccatcacgctggaaaggcgagtgccaggtggggaaaaacttcagtgcatcgagctgcaacaggaaactaattggagccaagttcttttcaaaagggtatgaagttgcgttcgggcctattgatgaaacgatggagtcaaggtccccgagagatgatgatggacatggaactcacacagcaactacagctgcagggtcagttgtgccctctgctaacttgctagggtatgcttctgggacagcgcgggggatggcttcacatgcccgagtggccgtctacaaggtgtgttggcttggtgggtgttttggctctgatattgtagcagccatggatgcagcttgtgcagatggagtggatgtttt

SEQ ID NO: 223434 - DNA, 418 bp, Gossypium hirsutum
gttagctttagcatacactactagtacccactactagcaatggcttcctcaatgatctcatcggctaccattgccactgcctctccggcacaggctaacatggtcacccctttcaccggcctcaagtctgcctctgctttcccagtcaccaggaaggccaacaacgacattacttctctcgcaagcaatggcggcagagtgcaatgcatgcaggtgtggcctcctactggaaagaagaagttcgagactctctcatacctccccgatcttacacccgtgcagttggctaaggaagtagattaccttcttcgctcaaaatgggttccttgcttggagttcgaattggaggagggattcgtgcaccgtaagtactcgagcttacccacgtactacgatggacgctactggaccatgtgga

SEQ ID NO: 223435 - DNA, 371 bp, Gossypium hirsutum
ggcaaaggtcaacgaaaatctttccaacgcgtgcttgtgcctgacaagatgggtttcaaccgaagcatgacgagtgcgggcgaactatgacaagggtgaacgcctgatgagaccagcgaagcttgctcaagcgaaggtaccgtgacactgacgacgtctttaataagggcacatggttcgcccgcttcattaacgatcttgatgctgacgccgaccgtattgcaggaacctactctatacagcgcgatgacaaccacagagggaatgttacacttatcaacatctgcgttaaccgcaccaaggttcagatcgcccgtatgtacaacatggatgacaacccacttgttgccattatactctctggtgacgat

SEQ ID NO: 223436 - DNA, 419 bp, Gossypium hirsutum
cccacgcgtccgcggacgcgtgggcgaaaatcctcaaatatcttgttcaaaaagaaaccctaaatcatgggtcagggaacaccgggtggtctgaaccgacaaggctttccaggggatcggaaacaggatggttccgataagaaggagaagaaatttgagccggcggcaccaccggccagggtgggccgtaagcaacgaaaacaaaaaggacccgaagcggcggcccggcttcctactgtgacgccgcatactaagtgtaagctccggctgttgaagctggagcgggtcaaggattatttactgatggaagaagaattcgttgctaatcaggaacggctcaaaccgcaggaagagaaagccgaggaagatcgatctaaagtcgatgatttgagagggtcgccaatgagtgtgggtaattt

SEQ ID NO: 223437 - DNA, 405 bp, Gossypium hirsutum
atccctccagctgtacctggaatcatgtttttgtctggtgggcagtctgaagctgaggctacctgtgaacttgaatgcaatgacaccaagctccaaacccatggcatgtgtcattctcatatgcaagagcccttcaaaacacttgcctgaataagtggggaggcaggcctgataatgtgaaggatgctcaggaagcgctgttcatcctagcaaaggccaactctctagctcaactctgaaagtacactggcaaatgagagtcagaggaggccaagcaaggaaggtttgtcaagggatatgtctattagcatgtttttgtctggtgggcagcctgaacatgaagctaccttgaacttgaatgcaatgaaccaagctccaaacccatggcatgggtcattctcatat

SEQ ID NO: 223438 - DNA, 392 bp, Gossypium hirsutum
tttagctatagcatacactactagtacccactactagcaatggcttcctcaatgatctcatcggctaccattgccactgcctctccggcacaggctaacatggtcgctcctttcaccggtctcaagtctgcctctgctttcccagtcaccaggaaggccaacaacgacattacttctctcgcaagcaatggcggtagagtgcaatgcatgcaggtgtggcctcctactgggaagaagaagtttgagactctctcatacctccccgatcttacacccgtgcagttggctaaggaagtagattaccttcttcgctcaaaatgggttccttgcttggaattcgaattggaggagggattcgtgcaccgtaagtactcgagcttacccacgtacta

SEQ ID NO: 223439 - DNA, 348 bp, Gossypium hirsutum
gaagaactaattccccaaaatttgtttcagttttggctgcctcagttatggcttcttcaggtaccctcaagccttcattcaatgttgagaaacctggtgtaagaggggttccttcccttgctaggtccccttcttctttcaaggttgaagccagtggtggcaagaagatcaagaccgacaagccttacggaatcaatggtggtatgagcttgagggatggtgttgatgcctctggaaggaagggtaagggaaagggtgtttaccaatatgttgacaaatatggtgctaacgttgatgggtacagtcctatctacaacaccaactactggtctcccagtggtgatgttt

SEQ ID NO: 223440 - DNA, 379 bp, Gossypium hirsutum
cccacgcgtccgagcaaatacaacatcctttcccttctcttttaatctttcttgtcttctctttcacctcgctttgttgtccatcagttgaggattcttgtcaacaaataacgcatggcagaggaagaacccaagaaggttgaaaccgtaaccccctcggagcaaccacctcccgaagcccccaaagacgttgcggaggaaaaatcggtaatcccacctcctacctctgaagaaaaacctgctgagtccgccgcactccaaaaggcggtggaaccgactgaggaaaagagcacggagagtactgtggaccgagatgctgtgcttgctagagttgcgacagagaagcgaatttcactgatcaaagcttgggaagagagtg

SEQ ID NO: 223441 - DNA, 417 bp, Gossypium hirsutum
  unsure (1)..(417): unsure at all n locations
gggaggggtggctcaaccgggtacgataatgcagtggccttgcctgctggaggaagaggggatgaggaagagctagccaaggagaacaacaagagtgctgcatcttcatcagggaaaatcaccttgagcgtcacaaagagcaagccggagaccggtgaagttatcggtgtgttcgagagccttcagccatctgacactgacttgggtgccaagactccaaaggatgtcaagatcactggtgtctggtatgctcagcttgattcataaacaagtcttgtatgaatttgtttattctcggctgaggttttgtaatttttaaacaagtgttgctaaactttgcagtaatccactgagaaacccttatcttctntgtatgttactatgttggcttcttataataattttctaagcttctac

SEQ ID NO: 223442 - DNA, 405 bp, Gossypium hirsutum
cttgcaccaccacgcactcacaaccaatggcagatcatcatcattatcgccgtcgctgcgccaggtttcaaacatgaagcctacccagcaggtggtgtgcaaggctcaaaagcaggaagatgatggaagccttgtgtcccgtaggttggctctcactgtactcattggtgctgccgctgttggctctaaggtttctcctgctgatgctgcctatggtgaagctgcaaatgtatttggaaagccaaaaacagacacagacttcatgccatacagtggggatggattcaagctctcgataccatcgaaatggaacccaagcaaagaggtggagttcccaggtcaagtgctgatgtacgaggacaacttcgacaccaccaacaatttgagcgtcatgatcactcccac

SEQ ID NO: 223443 - DNA, 415 bp, Gossypium hirsutum
cttctttctcttctcttaccatggatccttacaagtttcgtccttctagttcctttgattccgggttctggactaccaattctggtgctccagtttggaacaataactcatcacttactgtgggagcaagaggtccaattctccttgaagactatcatttggtggagaagctagctaatttcgacagagaacgcatacctgaacgtgttgttcatgctagaggagccagtgcgaaagggttctttgaggtcactcatgatatatctcagctcacatgtgctgatttccttcgtgcccctggagtgcagaccccgctcattgttagattctccacggttattcatgaacgtggtagtcctgaaactttgagagacccccgaagtttcgctgtgaaattttacactcgaaagggaaa

SEQ ID NO: 223444 - DNA, 398 bp, Gossypium hirsutum
cccacgcgtccgcccacgcgtccgcatcactcaccattgttccaagtttgttgtagaccaagttagaaccagcagccaacatggcctcattagcagcctccaccgctgccgcctcccttggcgtctctgaaatgcttggtaaccctctgaatttcagtggtggagctaggtcatcggctccaacaccatccaactcatccactttcaagaccgttgctcttttctccaagaagaaggccgctcctccaaagcccaaggctgctgctgtcgccccggccgatgaagagctggctaagtggtacggtccggacagaaggattttcttgcctgaaagtctgttagacagatcggagatcccagagtacttgaacggagaagttcccggagactatggatac

SEQ ID NO: 223445 - DNA, 411 bp, Gossypium hirsutum
gttcacttctgcttctgcctgcctgcctgcctgcctgcaatggcttcctacaaactctgtgccctctttctgctcttcactcttcttttccactcaacattcaccactgcttgcaattcatgcaaacccaaacctccaccatgccctccaccttcttgccctaaggacacattgaagctcggtgtctgtgctgacgtgcttggacttgtcaacgtgattgttggaacccctccttccagcaaatgctgtgctttgcttcaaggattggctgatttggaagctgccctttgcctttgcactgccattaaagccaatgtacttggaatcaacctcaacatcccagtttctcttagtctaatccttagtgcatgtcagaaggaggttccttcaggcttcaaatgggaataaaaa

SEQ ID NO: 223446 - DNA, 341 bp, Gossypium hirsutum
cccacgcgtccgataaatcacgtgttaaggaatatcttcccattgttggaatagctgagtttaataaattaagtgctaaacttatttttggtgctgacagccctgctattcgagagaatcgggttactacagttcagtgtttatctgggacgggttcattgagagttggagctgaatttttggctaggcattatcatcaaaaaactatatacattccacagccaacatggggaaatcaccccaaggtttttactttggcaggattatctgtgaaaacttaccgctattatgatccaacaacacgcggaatgaatttccaggggttattggaggaccttggc

SEQ ID NO: 223447 - DNA, 419 bp, Gossypium hirsutum
ggtatccgcagcacagaaggttcccgaggatggttggacaatgcaggatggaactccatggcctggaaactgtgttcgtgaccatcctggcatgattcaggttttcctaggtcatagtggtgtgcgcgatgtggaaggaaatgagttacctcatctagtttatgtttctcgtgagaagaggccagggtttgaacaccataaaaaggcgggggccatgaatgctttgatacgagtctcagcagtcctctcaaatgctccttatcttctgaacgttgattgcgatcattatattaataatagcaaagcactaagagaagcaatgtgcttcatgatggaccccacttcagggaagaaagtctgttatgtgcagtttcctcaaagatttgatggaattgatcggcatgatagatactcaaacc

SEQ ID NO: 223448 - DNA, 417 bp, Gossypium hirsutum
gccctcttttttgcactcaacattctcttcttttcacttgtcagtgctaattgttcttgcccttcccccaagccaaaaccaaaccccactccctccccaactcctgctgcggaaggaaagtgccccataaatacccttaaactaggtgtatgtgctgaggtgcttggtttagtcaatgtaactgttgggtcacccccagttcaaccttgctgcacccttatcaaaggccttgctgatcttgaagctgctgtttgcctttgcacagcgatcaaaggcaacattttgggtatcaatcttaatatcccagtttccctcagcttgcttctaaatgtctgctcaaaaaaagttccatccggcttccaatgtccctgatcactcttccaaaatcttttttttctcagtgtttttcatgcttag

SEQ ID NO: 223449 - DNA, 418 bp, Gossypium hirsutum
caatggcagtttgcccagtatacaccacccaatctctcaactcaacatgttcaatctccacaccatcaaaaacccacttcagttctcaccacaatcacttagttttctacagaactagcaagagaactagcaagagaggtggcagcagctcatgtgtgataacctgctcagctggtgattcacaaacagttgtgattggtttagctgctgactcaggatgtgggaagagtacctttatgaggaggctaacaagtgtgttcggtggtgcagctgagccaccaaagggaggcaaccctgattccaacacactgatcagcgacatgaccactgtgatatgtttagatgattatcattcacttgacagaactggaaggaaagagaagggagtgacagcacttgacccaagagccaatgactt

SEQ ID NO: 223450 - DNA, 422 bp, Gossypium hirsutum
cttgaacgagtccccgccgacatccgagcccaaggtggcgtggcgcggatgagtgacccacaactcatcaaagaaattaagcaagctgtcaccattcccgtcatggccaaggctcgtattggccatttcgttgaggcccagatccttgaagccattggcatcgactatgttgacgagagcgaagtccttaccctcgccgacgaagaaaaccacattaacaaacataattttcggattcctttcgtctgtgggtgccggaatttgggggaagcgctccggagaatccgagaaggagccgcgatgatccgaaccaaaggagaagcggggaccgggaatgttatcgaagctgttaggcatgtcagatccgtgatgggggatattagggcccttaggaacatggatgatgatgaggttttcagctt

SEQ ID NO: 223451 - DNA, 308 bp, Gossypium hirsutum
  unsure (1)..(308): unsure at all n locations
cggnnccggaaacccggggcgacccacgcgnccggcgagacgcnccngaaaaccaggagcaacacgcaacagcaagcaagaagagcaggggccggccccaagagcggagcggcagccaaagccaccgggaaccgccccgccccggcgcaggccaacaaggaggcccccgccaccgggcacaaagccgccacagcgagcccaggcaccaggaaggccaacaacgacagcacgggcgcagcaagcaacggagggagagcgcaaagcaagcagggggggccgccaccagggaagaagaaggccgagacgcg

SEQ ID NO: 223452 - DNA, 395 bp, Gossypium hirsutum
acagtgaacaaccaaatggtgaacgccacacttatgaacatcgctgataaccccaccaacgttcagctccccggtatgtacaacaaggaagagaaccctcgtgttccgatcatcgtcaccggtaacgatttctcgacgctgtacgcgcctctcatccgtgacggtcgtatggagaagttttactgggcacccaccagggaagattggatcggtgtttgcacaggtattttcaggaccgacaatgttcccgttgatgaccttgttaagcttgttgacaccttcccgggccaatccattgactttttcggtgctctgagggccagagttttcgatgactaagtgaggaaatggatcggagagggcggagtcaatggtgttcggaaaaagctcgtgaa

SEQ ID NO: 223453 - DNA, 418 bp, Gossypium hirsutum
cttttgtataactgtagcatatagtactagttagcagtaatagcaatggcctcctccatgatctcatcggcaaccattgccaccgtgaactgctcctccccggcacaggccaacatggtggcccccttcaccggcctcaagtctgcctctgctttcccagtcactaggaaggccaacaacgacatcacttctcttgcaagcaatggtgggagagtgcaatgcatgcaggtgtggcctcctcttgggaagaagaagttcgagacactctcatacctccccgatcttacacccgtacagttggctaaggaagtagattaccttcttcgctctaaatggattccttgcttggaattcgaattagaggagggattcgtgcaccgtaagtactcgagcttacccacgtactacgatggacgct

SEQ ID NO: 223454 - DNA, 421 bp, Gossypium hirsutum
ggcaggttccttcgggaagttttaaggtgatggcggccgaaaaagagatagacgaagagacacagaccgaaaaggaccgatggaaagggttggcttacgatatttcggacgaccaacaagacattactcgagggaaagggatggtggattccttgttccaagctcccatgaatgatggaactcactatgctgtcatgagttcctatgaatacatcagccaaggtcttaaaacgtacaatttggacaacaacatggatggtttctacatcgctcctgcattcatggacaagcttgttgttcacatcagcaagaacttcatgtccctccctaacattaaggtttctctaatcctgggtatttggggaggcaaaggtcaaggaaaatctttccaatgtgagcttgtgtttgccaagatgggtat

SEQ ID NO: 223455 - DNA, 411 bp, Gossypium hirsutum
cttaaaccaaacccgaagtcccacattcaggaaaactggaggattctggacttcttttcgcaccatcccgaaagcttgcacatgttcaccttcctgtttgatgacatcggtgttccacaggattataggcacatggatggctctggtgttcatacctacacactaatcaacaaagctgggaagtcacactatgtgaaattccattggaaacccacttgtggtgtaaaatctttgttggaggatgaagccataagagtaggtggcgcgaatcacagtcatgccacacaagatctttatgactcgattgcagccggaaactaccctgaatggaagctgttcattcaaataatggatcctcttcatgaggacaggtttgattttgacccacttgatgtaaccaagacatggcca

SEQ ID NO: 223456 - DNA, 351 bp, Gossypium hirsutum
gaagtacaagagctcacttgatgcattctctcagatcttgaaaaatgagggtgccaagtctctatttaagggtgctggagctaacattcttcgtgctattgccggtgctggtgtgcttgctggatatgacaagttgcagctcattgtgttcggaaagaaatatggatcgggtggtgcttaaacttttgggtatatttccctttttggttccgtttataggtttagatggtgatgaaaaactcttggtccggagaagtttattttggcaaagatttcgttaaaaataattcagatttagtggggagttgctctccaaacaatttttctattttaccatgaaagttttgcttt

SEQ ID NO: 223457 - DNA, 349 bp, Gossypium hirsutum
cccgacttctttgcattttccctcttctcttccttcacattggaggaactgaaccagaaggcaagaaacagttggattgaacaaaagaatttaaaacatgcgctctttcgggcacagattaaatggggtcttaacccttccgtgacgatactggcaataatgtgtgctatcgcgtctctcttggacaaccttaatactccttctcccacggcagaaattaagattatgaacataaactggttccagaaacagccgcaggggaatgacgaggtcagccctgacaatgaatatatctgctgattagcagtcattgttcacatggaacacaaaacagctttttatatttttt

SEQ ID NO: 223458 - DNA, 383 bp, Gossypium hirsutum
  unsure (1)..(383): unsure at all n locations
gctatcaagactgctggtttaacttcgttccccgattatttggtattgcacatgaggaagtttgtcatggaggccggctgggtgcctaaaaagcttgatgtctacatagatgtccctgacgtcatagatataagccacattcgcagcaagggccttcaacctggggaagaactgttgccagaggctgctcctgagggtgcggcggaatcaagtcagcctgtggctgatgaagcaattgttgcccagcttgcctcaatgggctttaaccagcttcattgtcagaaagctgccataaacactntaaatgctggtgtggaagaggcaatgaattggttgctttcacacatggatgatccagatatagatgctcctatcctccatga

SEQ ID NO: 223459 - DNA, 411 bp, Gossypium hirsutum
cccacgcgtccggaaaaactaaacataataaagccccttcgacttgcttcattgatttgccctctcaaagcccaagaaaaatggcttctgcttccgctactctcctcaagtcttcacctattatcgacaagtccgagtggattaagggccaaaacctccgccacccttcggtttgttttgtacggtcacaccctacatcggccgcctttgccgtccgtgctagttcatatgccgatgagcttgttaagaccgcgaaaactgttgcatctccaggtcgtggtattttggccatggatgaatcaaatgctacatgtgggaaacggcttgcctcgattggtctcgagaataccgaggcaaaccggcaagcttaccgtacccttctcgtgtctgcccctggcctcggtgactaca

SEQ ID NO: 223460 - DNA, 422 bp, Gossypium hirsutum
cccacgcgtccggaaaaactaaacataataaagccccttcgacttgcttcattgatttgccctctcaaagcccaagaaaaatggcttctgcttccgctactctcctcaagtcttcacctattatcgacaagtccgagtggattaagggccaaaacctccgccacccttcggtttgttttgtacggtcacaccctacatcggccgcctttgccgtccgtgctagttcatatgccgatgagcttgttaagaccgcgaaaactgttgcatctccaggtcgtggtattttggccatggatgaatcaaatgctacatgtgggaaacggcttgcctcgattggtctcgagaataccgaggcaaaccggcaagcttaccgtacccttctcgtgtctgcccctggcctcggtgactacatctcgggagct

SEQ ID NO: 223461 - DNA, 390 bp, Gossypium hirsutum
cccacgcgttcgaaccccctttctgtcactgttacagtgcgacgaatatgggatattcggactgtgaatttgacgtaatcgttgtttgggcggacgtcatggggagctccacggcgtaccaactagccaaaagaggccaaaaaacgctactcctcgagcagtatgactttctccaccatcgaggttcgtctcacggcgagtcacgcaccatacgagcaacgtaccctgaagactactacttcggcttggtcgatgagtcctatcggttgagggagcaggctcaatctgaaatcgggttcaaggtttacttcaaggcccaacagttcgacatgggtgcatcccacaccaagagtttcctttctgtgatcgctacttgtcgaaagaacgcca

SEQ ID NO: 223462 - DNA, 403 bp, Gossypium hirsutum
  unsure (1)..(403): unsure at all n locations
cccacgcgtccgcccacgcgtccgcccacgcgtccgccaccaccaacatagtccaacattttcataacaatggctgcagtcacaaacgccgctgctacatcctccttcatggggacacgcttccccgacgtctacacaagttcagggagattcgtcgccaggtttggttttggcggcaaaaaagcagctcccaagaaagcctcgaaacaaacctccgaccgccctctatggtacccaggagcggtggctcctgattggctcgatggaagcttggtgggtgattacgggttcgacccgttcgggttagggaaaccagcggagtacttgcaatatgatttggattctttggaccagaacctggctaagaatatggctggtgagatcatnggaactaggaccgaag

SEQ ID NO: 223463 - DNA, 418 bp, Gossypium hirsutum
  unsure (1)..(418): unsure at all n locations
caagcacccggtgaagatagtgaagttatcttataccctcaagcaatctttaaggaccctttccgaggaggtaacaatatcttggtaatttgtgatgcatacacaccagctggtgagcctattcccacaaacaagcgccaccgagccgctgagattttcagtaacaagaaggtggtcgatgaagtaccatggtttggtattgagcaagagtacactttacttcaacaaaatgtgaaatggcctttgggatggcctgttggaggctaccctggtcctcagggtccttattactgtgcagctggtgctgacaagtcattcgggcgtgacatctcagatgctcattacaaggcttgcttgtatgccggcattaacattagtggtaccaacggngaggttatgccaggccagtgggagtatc

SEQ ID NO: 223464 - DNA, 321 bp, Gossypium hirsutum
cgactctggatacattcagcaagccttgcacaatggccaccatcacctctgccgctgtcgctatcccatctttcaccggccttaaagccggtgcaaccgcagctaaagttagcgccacagccaaggttgcagcctctccagtcccaagggtcagcatcaaggcctccctcaaagacgtcggtgttgctgttgcggcaactgctgcaagcgcaatccttgccaacaatgccatggccattgaagtcttgctcggcagtgacgatggggggtctggcttttcattcccaaagaaatttatccgtaaagccccaaggggaagaa

SEQ ID NO: 223465 - DNA, 420 bp, Gossypium hirsutum
atcggctaccattgccactgcctctccggcacaggctaacatggtcgctcctttcaccggcctcaaatctgcctctgctttcccagtcatcaggaaggccaacaacgacattacttctctcgcaagcaatggcggcagaatgcaatgcatgcaggtgtggcctcctactggaaagaagaagttcgagactctctcatacctccccgatcttacacccgtgcagttggctaaggaagtagattaccttcttcgctcaaaatgggttccttgcttggaattcgaattagaagagggattcgtgcaccgtaaatactcgagcctacccacgtactacgatggacgctactggaccatgtggaagctgcctatgttcgggtgcaccgactcggctcatgtattgaaggaacttgaggaatgcaa

SEQ ID NO: 223466 - DNA, 424 bp, Gossypium hirsutum
ccgagccaccgaagggaggcaaccctgattcaaacacgctcattagcgatatgaccactgtgatatgcttagatgattaccattcactcgacagaactggaaggaaagagaagggggtgacagcacttgacccaagagctaacgactttgacctcatgtatgagcaagttaaggctatcaagagcggtgttgctgtggacaagcctatctacaaccatgttactggtctcttagatcctcctgagctcatcaagcctcctaagatccttgtcatcgaaggactacaccctatgttcgatgagcgtgtgagggatctgttggacttcagcatctatttggacatcagcaatgaggtcaaatttgcatggaaaaattagagggacatggctgagagagggcacagccttgaaagcattaaagctag

SEQ ID NO: 223467 - DNA, 426 bp, Gossypium hirsutum
cccacgcgtccgcccacgcgtccggcagattcttggagctaaacgacaaattgggccttcaaggaaaggatcctttgttgttaaggcagcttcgactccacccgttaagcaaggagctgatagacctttatggtttgcatctaaacaaagcctttcatacttggatggcagccttccaggtgattatggatttgaccccttgggactctcagaccctgaaggtccaggagggttcatcgagcctaaatggctagcctacggtgagatcatcaacgggcgttatgctatgttgggtgcagtaggtgcgattgcccctgaaatacttgggaaggccggtcttatcccagcagatacagccctcccttggtttagaaccggtgtgatcccaccagcaggaacatacagctattgtgcagacccttacac

SEQ ID NO: 223468 - DNA, 411 bp, Gossypium hirsutum
gataagagaaagcactgaaaaagcaaaaccatggcctctgcttctctcctcaagacttcaccagttttagacaagtctgagtgggttaagggtcacacccttcgccaaccttccacttctgtggtgaggtgccaccctgttgcaccctccggactaactgtgcgtgcaagctcatatgccgatgagcttgtcaagactgctaaagctattgcttctcctggccgtggaattttggccatggatgagtccaacgctacctgtgggaaacgtttggcctcaatcgggctagaaaacacggaggctaaccgccaagcctacaggacgttgcttgtttcagctcctggccttggtcagtacatcttaggtgccatcctttttgaggaaaccctctatcaaaccacaattgatggc

SEQ ID NO: 223469 - DNA, 413 bp, Gossypium hirsutum
cacactctcaaattcagttaacaatttcacagttgttttcttcagtctctctctcagccatggctgcagccatctccaccgtcgctgccgctgccgccgccaaccgagctctgggagtgtcagtcccaacctcagctttcatggggaagaaagtgagctcaagattcaacagcaccaggcaggttccttcgggaagttttaaggtgatggcggcggagaaagagatagacgaagagacacagaccgaaaaggaccgatggaaagggttggcttacgatatttcggacgaccaacaggacattactcgagggaaagggatggtggattccttgttccaagctcccatgaatgatggaactcactatgctgtcatgagttcctatgaatacctcagccaaggtcttaaaacgtac

SEQ ID NO: 223470 - DNA, 411 bp, Gossypium hirsutum
cccacgcgtccgggcattagtgataaatgtagtggccatggagttactcgatttactaagcttctaagcagctggtctaattctcaaggatactgcgtggaaattggagatggttcatgggattcatggactatgccccttttggaacagacatcaattgcttgtgaaaaggtgaaaaacatgactgaacttagccaaggttacaacatggttggactctctcaaggtagcctgattagtcgaggcattattgaattttgtgatggatgacctcctgtcaagaatttcataacgttggcagggccccatgctggtattgcttcaattccattttgtgaatctaccgtgatatgcatatttctcgatagcttaatcaagtccgaagtttatagcaactttgtacaagaacac

SEQ ID NO: 223471 - DNA, 392 bp, Gossypium hirsutum
cacactctcaaattcagataacaatttcacagttgttttcttcactctctctctcagccggggctgcagccatctccaccgtcgccgccgctgccgccgccaaccgagctctgggagtgtcagtcccaacctcagctttcatggggaagaaagtgagctcgagattcaacaacaccaggcaggttccttcgggaagttttaaggtgatggcggccgaaaaagagatagacgaagagacacagaccgaaaaggaccgatggaaagggttggcttacgatatttcggacgaccaacaagacattactcgagggaaagggatggtggattccttgttccaagctcccatgaatgatggaactcactatgctgtcatgagttcctatgaatacatc

SEQ ID NO: 223472 - DNA, 386 bp, Gossypium hirsutum
cccacgcgtccggagaagttcccggagactatggatacgatccgtttggtctgagcaagaagccagaagactttgcaaaatatcaagcatatgagttgatacacgcaaggtgggcaatgcttggtgctgcagggttcatcatccctgaagcctttaacaaatttggtgccaactgtggccccgaagccgtttggttcaagaccggagctcttctcttggacggtaacaccttgaactacttcgggaagaacatccccatcaaccttgtggtggctgtcgttgccgaagtcgtccttgttggtggtgctgaatattacagaatcatcaatggcttggatctggaggacaagcttcaccctgggggaccatttgacccactggggtta

SEQ ID NO: 223473 - DNA, 414 bp, Gossypium hirsutum
taactgtagcatatagtactagtaagcagttttagcaatggcctcctccatgatctcatcggcaaccattgccaccgtgaactgctcctccccggcacaggccaacatggtggcccccttcaccggcctcaagtctgcctctgctttcccagtcactaggaaggccaacaacgacatcacttctcttgcaagcaatggtgggagagtgcaatgcatgcaggtgtggcctcctcttgggaagaagaagttcgagacactctcatacctgcccgatcttacacccgtacagttggctaaggaagtagattaccttcttcgctctaaatggattccttgcttggaattccaattagaagagggattcgtgcaccgtaagtactcgagcttacccacgtactacgatggacgctactg

SEQ ID NO: 223474 - DNA, 438 bp, Gossypium hirsutum
cggggcggacccacccgtccgccacgcgtccgaaaaactaaaacctgtgtgcctttgctacgcaccacttcttaagcagcttcctctacgatcataatggtgtcggttactgtttctgtagccaaaccaacccttcaggcaaatgcaaagggttttgcggaattctcaggtctgcgcaactcagctagccttacctttgccaggaaaacctcggatgactttcaatcagtcattgctttccagacatctgctttgggaatcaataatggtggataccggaaaggcgtagtagaggcaaagctaaaggtcgctattaatgggtttggtaggattggcaggaacttcttaagatgctggcatggccgtaaggactccccacttgatgtcattgcaatcaatgacactggtggtgttaagcaggcttctcaccttctcaag

SEQ ID NO: 223475 - DNA, 430 bp, Gossypium hirsutum
cggggcggaccaacccgtccgcccactcatttaacctgcggaattatttgctccattgactcaactcgtgtcacccaaatcacccttgatcctgctggttactccggccaactcacccctctcctttcccaactcacccaactcactattcttgatctctctgataacggcttcttcgggtctataccttcttccatttcttccctacgtagtctccaaactctgattctcaagtccaactccttctctgggtcaatccctgactctgttaccaccctgaaatcacttgaatccttggacatttctcataattcactttccggacctttgcccaaaaccttcaactcgctttctggtttgaggagactcgatctcagttacaaccaactcaccggttttctacctaaactgccttataacttattggagc

SEQ ID NO: 223476 - DNA, 411 bp, Gossypium hirsutum
gctatagcatacactactagtacccactactagcaatggcttcctcaatgatctcatcggctaccattgccactgcctctccggcacaggctaacatggtcgctcctttcaccggcctcaagtctgcctctgctttcccagtcaccaggaaggccaacaacgacattacttctctcgcaagcaatggcggcagagtgcaatgcatgcaggtgtggcctcctactggaaagaagaagttcgagactctctcatacctccccgatcttacacccgtgcagttggctaaggaagtggattaccttcttcgctcaaaatgggttccttgcttggaattcgaattagaggagggattcgtgcaccgtaaatactcgagcctacccacgtactacgatggacgctactggaccatgt

SEQ ID NO: 223477 - DNA, 308 bp, Gossypium hirsutum
gttattatccatattatatcttcctctccacccttgaaccatgtcggcttttgttggcaagtatgcagaggagttgatcaagaacgccaagtacatcgccacgccaggcaaaggtattttggcggcggacgagagcacaggcaccatcgggaagcgtctctcgagcatcaacgtcgagaacatcgagtccaatcgccaagccctccgcgagctccttttcacctctcccaacgcattatcctgcctctccggtgtcattcttttcgaggaaacactttaccagaaaacctctgacgggaaacccttcg

SEQ ID NO: 223478 - DNA, 389 bp, Gossypium hirsutum
cattttagcctttgaattgaaaccctcaaaattccactaaaaaatggcctccacagcttgcctctccaccgccgtagccaccacctctttcctccgcggccatccggcgccgaaaaccctaaactcccttcctttcaaccaatctcttttcgggctaaaaccccaacgaaatggccgtctcaccatggcagcatacaaggtgacactgttaacacccgaaggaccccaagaattcgtgtgccccgacgacgtatacatcgttgaccaagctgaggaagaaggcattgatcttccgttctcgtgtagggctgggtcttgttcttcgtgtgccggagtgattaagcaaggctccgtcgatcaatccgacggtaatttccttgatgatgacc

SEQ ID NO: 223479 - DNA, 404 bp, Gossypium hirsutum
cccacgcgtccgtggaataagaaaccaaagggagtggcagtggaagatggccgctagcagcgatcctaacccggagggttccgatgagcagcagaaacgatccgagatatacacttacgaggccccttggcatatctacgccatgaactggagtgtccgccgcgacaagaaataccgtctcgccatcgccagcttgctcgagcattacaacaaccgccttgagattgtccagctcgatgactccaatggcgagatccgatcggacccaaatctctccttcgatcatccttatcccccgaccaagaccatcttcatccccgacaaggagtgccagaaacccgaccttctcgccacgtcctccgacttcctccgcatttggcgcatctccgatgaccactcccgcg

SEQ ID NO: 223480 - DNA, 413 bp, Gossypium hirsutum
cccacgcgtccgcccacgcgtccgccaacttggactggtacaagggccctacacttcttgaggctcttgaccagatcaatgagcccaagaggccttcagacaagcctctccgtctaccacttcaggatgtgtacaagattggtggtattggaactgtcccagttggtcgtgttgaaactggtgtcttgaagcctggtatggttgtgacctttggtcctactggtctgaccactgaagttaagtctgttgagatgcaccatgaagctcttacggaggcgcttcctggtgataatgttgggttcaatgttaagaatgtcgctgttaaagatctcaagcgtggttatgttgcatccaactccaaggatgatcctgctaaagaggctgcaaacttcacttctcaggtcatcatcatg

SEQ ID NO: 223481 - DNA, 411 bp, Gossypium hirsutum
ccaggcgtccgccagaaccaccattttaaggccattgcatgtatggggtcatcccactatggatcagtctatagtgcacttatggccaaaacacttagcaccccctccgccaccaccacggccagcttggggacctacaccaccggcagaccctagcttttggcaccatcagcaccaccgtgtaccaaatggacaaaccccgggaacaccgtgctttcccccgccattgacggcggcaccaacgagatttggtgtagtaccggtgccgggcattcctcctcaccatgcaatgtacaaagctgacaccggcatcggtgtccctgccagccaattacgtcgccaccctctcgtcgacttacatccgtcgaaagagagcatcgatgccgctatcggggacgttttatcgaaacc

SEQ ID NO: 223482 - DNA, 417 bp, Gossypium hirsutum
cccacgcgtccgaagaggggtcccttcaccatccttaccctctcaatcaacaatggcctctacttcatctgtcaccctatctcaagccctcctttctcgcgctatctcttcccatgcctccgcccaatcctccgaccaccgcccctccctctccactatctcttttcccggtttctccggcctcaaatcttctatccctcgcgcttcctcatcccgtcgacgccttccctcccgctccaaccaaaagcgccaggtccgtgctgctgccgtcgaaacaattggcaccgccgccgagacttccttggtcgagaaatccgtcaacaccatcagattcttgtctattgatgcggtcgagaaggcgaattcagggcatcctgggttgcccatgggatgtgctcccatgggtcacattttgta

SEQ ID NO: 223483 - DNA, 386 bp, Gossypium hirsutum
gcatacactactagtacccactactagcaatggcttcctcaatgatctcatcggctaccgttgccactgcctctccggcacaggctaacatggtcgctcctttcaccggcctcaagtctgcctctgctttcccagtcatcaggaaggccaacaacgacattacttctctcgcaagcaatggcggcagagtgcaatgcatgcaggtgtggcctcctactggaaagaagaagttcgagactctctcatacctccccgatcttacacccgtgcagttggctaaggaagtagattaccttcttcgctcaaaatgggttccttgcttggaattcgaattagaagaaggattcgtgcaccgtaaatactcgagcctacccacgtactacgat

SEQ ID NO: 223484 - DNA, 385 bp, Gossypium hirsutum
caccattgttccaagtttgttgtaaaccaagttagaaccagcagccaacatggcctcattagcagcctccaccgctgccgcctcccttggcgtctctgaaatgcttggtaaccctctgaatttcagtggtggagctaggtcatcggctccaacaccatccaactcatccactttcaagaccgttgctcttttctccaagaagaaggccgctcctccaaagcccaaggctgctgctgtcgccccggccgatgaagagctggctaagtggtacggtccggacagaaggattttcttgcctgaaggtctgttagacagatcggagatcccagagtacttgaacggagaagttcccggagactatggatacgatccgtttggtctgagc

SEQ ID NO: 223485 - DNA, 433 bp, Gossypium hirsutum
cggggggggcccacgcgtccgcccacgcgtccgcttttgtataactgtagcatatagtactagtaagcagtaatagcaatgggctcctccatgatctcatcggcaaccattgccaccgtgaactgctcctccccggcacaggccaacatggtggcccccttcaccggcctcaagtctgcctctgctttcccagtcactaggaaggccaacaacgacatcacttctcttgcaagcaatggtgggagagtgcaatgcatgcaggtgtggcctcctcttgggaagaagaagttcgagacactctcatacctccccgatcttacacccgtacagttggctaaggaagtagattaccttcttcgctctaaatggattccttgcttggaattcgaattacaggagggattcgtgcacccgaagtactcgagcttaccca

SEQ ID NO: 223486 - DNA, 442 bp, Gossypium hirsutum
cggggcggcccaagccgtccgttagctatagcatacactactagtacccactactagcaatggcttcctcaatgatctcatcggctaccattgccactgcctctccggcacaggctaacatggtcgctcctttcaccggcctcaagtctgcctctgctttcccagtcaccaggaaggccaacaacgacattacttctctcgcaagcaatggcggcagagtgcaatgcatgcaggtgtggcctcctactggaaagaagaagttcgagactctctcatacctccccgatcttacacccgtgcagttggctaaggaagtggattaccttcttcgctcaaaatgggttccttgcttggaattcgaattagaggagggattcgtgcaccgtaaatactcgagcctacccacgtactacgatggacgctactggaccatgtggaagct

SEQ ID NO: 223487 - DNA, 280 bp, Gossypium hirsutum
ctttttcttctctcttcaaaatctaacctcttaagctttagagattctcattttgctgagcgtattttagatcgggagtttagaggttattcattaatggcggatacagagacatttgctttccaagctgagatcaatcagcttcttagcttgatcatcaacactttctacagcaacaaagagatctttcttcgtgagctcatcagcaacgcatccgatgctttggataagatcagatttgagagcttaacagacaagagcaagctagatccttaaacct

SEQ ID NO: 223488 - DNA, 404 bp, Gossypium hirsutum
tttaatatttgttcaaagctttcgattacaaatccctcgcgaaagatgcagatctttgtgaaaactcttactggtaagaccatcaccctcgaggtggaaagctccgacacaattgataatgtcaaggccaagatccaagacaaggaagggatcccccctgaccaacagaggcttatcttcgccgggaaacagcttgaggatggccgtacccttgctgactacaacatccaaaaggagtccaccctccaccttgtccttcgtctcaggggtggcatgcagatcttcgtaaaaacccttactggcaagacaatcacccttgaggttgaaagctctgacacaattgataatgtcaaggctaagatccaggataaagaagggatccctcctgaccaacagaggcttat

SEQ ID NO: 223489 - DNA, 351 bp, Gossypium hirsutum
cccacgcgtccgcaaaaggcaaaaaagccatgtcaaagctggtggtgttgcagcccacagagcagcctcccatctgcctcctctcttcctctctttcccacttcaatggcaccaagctctgccaaatccagtacaagagaaaggtctatcagccaaaaggtgcattgcatattgcagcatccagcaccaagaagattctcataatgggaggcactaggttcatcggtgtgtttttatcaagactccttgtaaaagacggtcatcaggttacttcgcttactagaggtaaagcaccagttactcaacaattgcctggggaatcagacactgactacgctgagattaaatcca

SEQ ID NO: 223490 - DNA, 379 bp, Gossypium hirsutum
cccacgcgtccgatcactcccaatactttcataacatttcacgaacttcactctccagtctccaatggcggctgccgtctccaccatcggtgctgtcaaccgagcaccgttgagtttgaatggatcaggtgccggagcttctgctccaagctcagctttcatggggaacagcttgaagaaagtgagcgctaggttcaacaacaacggcaaggctccagtgggaagtttcatgattgtggctgccaaagaaatcgacgaagacacacagaccgaccaggaccgatggaagggtcttgcttatgatatctccgatgaccaacaagacattaccagagggaaaggtatggtcgactcattgttccaagctcccatgaacgat

SEQ ID NO: 223491 - DNA, 425 bp, Gossypium hirsutum
cgtccgcccacccgtccggttaattattgaaaccatgggctgcaatcatatgtggctttgtagcagcatgggttctaattggattcaacatgcttgcagccgagttcaagtacgatgacccactagaagcagcccaattacatggaggatgcggcgcgtggggtttactcttcaccgggttgtttgcgacaaaggcctacgtcaacgaggtgtatccggggctgtcagggaggccatatgggatgttcatgggcggtggagggaagctgttaggggctcaaatcattcagattggtcataacagggtgggtgacggccacaatggggccactgttttatgtgctaaaaaagatgaatttgttaaggatttcaagagaggatgaaacagcagggatggacttgactaggcatgggggatttgctta

SEQ ID NO: 223492 - DNA, 427 bp, Gossypium hirsutum
gtccgaaataagaagaaaaacaaaaatggccatggcattggcgcttcgacgactctcctcttccattggcaagcctctccgtcctttcttcaatgccccttccctctattacatgtcgtctttgccaaatgaagctgtgtacgagaaggagaaacctggcgtcacttggccaaagcaactgaatgctccacttgaaaccgttgatcctgaaattgctgacatcatcgagcttgaaaaagcgcgccaatggaagggacttgaactcattccatcggagaacttcacttcggtgtcagtgatgcaagcagttgggtctatcatgaccaacaagtacagtgaagggtatcccggtgctagatactatggagggaatgagtacatcgacatggcagagacattgtgtcagaagcgtgctttggaagcattc

SEQ ID NO: 223493 - DNA, 310 bp, Gossypium hirsutum
cgggagatgataaatccaagcatgtctgcttgtcactggttcataactgtattctgaggggctttcccatttgctttggctcttctaatttgggatgtattactctttgagggtgttaagattgtctttaaagttggattggccctttctgaagtactgccattatgatttgataaaattatcctctgaaaaactcattcatgctatgcgtaacttccaagaggattcaatgaatcctgatatatagctgcccatggcttattcattcaaaggatcccgattcttagcagaattttatatcgagtgctat

SEQ ID NO: 223494 - DNA, 410 bp, Gossypium hirsutum
cccacgcgtccgcccacgcgtccgggcattacagctgaagatgtgaatgctgcttttagaaaggcagccgagggaccattgaagggtgtattggaagtgtgcgatattcctcttgtctcagtggacttcaggtgctctgatgtttcttccaccattgactcttccttgaccatggtcatgggagatgacatggtcaaggtggtggcctggtatgacaatgaatggggttacagccaaagggttgttgatctggcacacttggtggcaagcaagtggccgggcatgcctgtagctggaagcggtgaccccttggaggattactgcaaggcaaacccagcagatgaggaatgcaaagtttacgaggcttaaatagttgcaactttatgattatttttaattttttttttact

SEQ ID NO: 223495 - DNA, 415 bp, Gossypium hirsutum
gttgttttcttcagtctctctctcagccatggctgcagccatctccaccgtcgctgccgctgccgccgccaaccgagctctgggagtgtcagtcccaacctcagctttcatggggaagaaagtgagctcaagattcaacagcaccaggcaggttccttcgggaagttttaaggtgatggcggcggagaaagagatagacgaagagacacagaccgaaaaggaccgatggaaagggttggcttacgatatttcggacgaccaacaggacattactcgagggaaagggatggtggattccttgttccaagctcccatgaatgatggaactcactatgctgtcatgagttcctatgaatacctcagccaaggtcttaaaacgtacaatttggacaacaacatggatggtttctacatt

SEQ ID NO: 223496 - DNA, 412 bp, Gossypium hirsutum
ggagagccttttttttgtgtagcgattctcagttagtcttttctttaagcttacagcttctctccagagttttataatgggtaaggagaaggttcacatcaaccttgttgtcattggccatgtcgactctggcaagtcgaccactactggtcatttgatctacaagctaggtggtattgacaagcgtgtgattgagaggttcgagaaggaggctgctgaaatgaacaaaaggtcattcaagtatgcttgggtgcttgacaagcttaaggctgagcgtgaacgtggtatcaccattgatattgccctgtggaagtttgagaccaccaaatactattgcaccgttattgatgcacctggacaccgtgactttatcaagaacatgattaccggtacctcacaggctgactgtgct

SEQ ID NO: 223497 - DNA, 416 bp, Gossypium hirsutum
gcgtgagccgctatagttacgagtccctccaccctagattcttataattgtgcttcccccctgcaaaggctttattcttcattcgcttcgttgaatttttatcttctttttatctgaacggagtttggtaatccagttttcgtcttcggttgattcacgaaatcttagtttttgaattgcgtgactgaatgatctaatggagtctaaaggtgggaaaaagaagtctagcagtagtaagtctttattctacgaagctcctctcggatacagcattgaagacgtgcggccaaactgtggaatcaagaagttcagatctgctgcttactccaactgcgctcgcaagccatcctgatatactcacaagcgtgccgtctgaccactagtagtggttaataaaactgttatttgctttgata

SEQ ID NO: 223498 - DNA, 416 bp, Gossypium hirsutum
cggacgcgtgggcggacgcgtggggaaaaatggcttctgcttccgctactctcctcaagtcttcacctattatcgacaagtccgagtggattaagggccaaaacctccgccacccttcggtttgttttgtacggtcacaccctacatcggccgcctttaccgtccgtgctagttcatatgccgatgagcttgttaagaccgcgaaaactgttgcatctccaggtcgtggtattttggccatggatgaatcaaatgctacatgtgggaagcggcttgcctcgattggtctcgagaataccgaggcaaaccggcaagcttaccgtacccttctcgtgtctgcccctggcctcggtaactacatctcgggagctatccttttcgaggagactctctaccaatctaccatcgatgggaaa

SEQ ID NO: 223499 - DNA, 377 bp, Gossypium hirsutum
cgggcgggccagccgtccgcccacgcgtccgattaattttaatggctgcttttgtttctttttggtactcctctctcgtctggtcatatccacctaccgagtgagcttcaccatgtctatatcctcctctacgcttggctctgcccacttctgctatactctactatctgctctttcactttgtccttgctaccatgcctaccccaccagctgtagacgatactctgctgcttctttcactatcacggcctctgctgcaaagaagaagaaagtccttatatgtaatacagacagtggcggccatgcagttatcggttcctactgtgacaaagagctgctgggttctggccatgaggttaccatcttcactggtggag

SEQ ID NO: 223500 - DNA, 421 bp, Gossypium hirsutum
ccttccgaggaaatggagtttagttcaaacgctaaccagcgcattgccaggctcgcagcccatttccaagctcaaatggacgaaagttctattttgaggcgagctgactgtaaagcgaaaggagggtcaccagggttcaaagttgctatcttaggagcagctggaggcattggccagcctcttgcaatgttaatgaagatgaatcctctcgtctcggttcttcatctttacgatgttgtgaactctcctggtgtcacagctgacctcagtcacatggatactggtgctgtggtacgtggtttcctagggcagccgcagcttgagagtgcgttgaccggcatggaccttgtgatcatacctgctggtgttccaaggaagcctggaatgacgagggatgaccttttcaacatcaatgctggaa

SEQ ID NO: 223501 - DNA, 355 bp, Gossypium hirsutum
aaaatcagttgcttcacaatggcctctacaaccatggctctttcttccccatcattcgccggtaaggcagtgaagttctccccttccacccctgaaatccggggaactggccgtgtttccatgaagaaaaccaccaagcctgttccttctggtagcccatggtacgggcctgaccgagttttgtacttgggtccactttccggtgagccaccatcttacttgaccggtgagttccctggtgactatggttgggacactgctggactctcagctgatcccgagacctttgctaggaaccgtgagctcgaagtcattcactgcagatgggccatgttgggagctcttgggtgtgttt

SEQ ID NO: 223502 - DNA, 409 bp, Gossypium hirsutum
caaaaaaacacggtttttccttcttccctgtctttctctgtcttctctttcttttttatgttactctcaattcccattgaaactttcagactttcagccataattaagcttcttcccttcagaaaacttcgactgaagctgctccaagattaaagaagcttcaatttataatactctgccccttaaactagcaagcctgatctgctgcataatcgtctaaagaaaatttgatggggataaataagttgctgtgttggtttgcagttttcttctttttgttgggtttctctgcttgcacttcgatttcggatggtgttttcgactctctcacttctactggaaggcacctccttcaagctaagaaagcttgccctgtgaactttgagtttctgaactacacaattatcac

SEQ ID NO: 223503 - DNA, 412 bp, Gossypium hirsutum
gttttccaatagttcgtaacaatggcggtctcacttcaagctgcagctaccctgatgcaaccaatcaaggttgctgcaccatcaaggaccaatgtgccgctcaggtcctcccagagcgtttctaaggccttcggtttggagcctgttggtgctaggcttacctgctctttgcaaactgacctcaaggacttggctctgaagtgtgttgatgctaccaagctcgctggtttcgctcttgctacatctgctcttgttgtctcgggagcaagcgctgaaggagtttcaaagcggctaacctacgctgaaatccaaagcaagacatacatggaagtcaaaggaacaggaactgctaaccagtgcccaaccatcgatggtggtgtcgactcttttgccttcagccttgcaaatacta

SEQ ID NO: 223504 - DNA, 354 bp, Gossypium hirsutum
ccgaataaaaaaagaagaaataaactcaatcttacacccgtacagttggctaaggaaggggattaccttcttcgctctaaatggattccttgcttgtaattcgaattagaggagggattcgtgcaccgtaagtactcgagcttacccacgtactacgatggacgctactggaccatgtggaaactgaccatgtttgggtgcactgactcggctcaagtgttagaggagcttgtgaatcgcatgaaggaataccccaatgcattcattataatcattgggttcgacaacgtttgtcaagtgcagtgcattagtttcattgcctacaagccttatagctacttaagtgtttacttt

SEQ ID NO: 223505 - DNA, 426 bp, Gossypium hirsutum
aaaaaaggagagaaaaccctagatttaggggagatagggtcattatcgtcatttcacgctatgaatcggcgataacgggagcggttcatatcaacggcaaaataagagaagaaaagagatgtacagaggataagtcatcgcagtcccttcaaatggggaagcatccacctgatcattaccgtgactcttgttctgcttctctacctaaaccgaacgcctccggtgatgaatctgaaactgacagtgaagagtcggatgttagtggttccgacggggatgacacatcttggatctcatggttttgcaatctacgtggaaatgaattcttttgcgaagttgatgatgactacatacaagacgattttaacctttgtgggctaagtagccaagttccttactatgattatgctcttgatttgattttgg

SEQ ID NO: 223506 - DNA, 250 bp, Gossypium hirsutum
  unsure (1)..(250): unsure at all n locations
tcctcttcttggagagaggcccttctgggccttttcgtggcggtggtactagccatcaccatctctaaacttcgtggcaagcggttcaagctccctcctggaccattacccgtgccggtgttcggcaactggctccaagtgggtgatgacttgaaccaccgcaacnnnacaacaccggccgagatattcggtgacatatttttacttcgaatgggacagaggaatctggtggtggggcctcttcctgagc

SEQ ID NO: 223507 - DNA, 368 bp, Gossypium hirsutum
cccacgcgtccgaattatttgaaatttgaagaaaaaaacatctctcaaaaagacccatagatgaaagggaaatggaaaggttcgaagagaaaactagggttgccagctgcccttctactgtgctcactctcattccttgctggattgtttgttcccacttttttctttcaggatgttccaatcattaaacccaagccgagaatgctcgaggcagtgcaggagaagacgtttcgtgatccgatggcaaatggagtaactggggagagttcgattgaatctattccatttcaggttttaagttggaaaccacgagcttactattttcccaactttgcaacttcagaacaatgtgaacatgtaatagaaat

SEQ ID NO: 223508 - DNA, 416 bp, Gossypium hirsutum
cccacgcgtccgcccacgcgtccgtttagctatagcatacactactagtacccactactagcaatggcttcctcaatgatctcatcggctaccattgccactgcctctccggcacaggctaacatggtcgctcctttcaccggtctcaagtctgcctctgctttcccagtcaccaggaaggccaacaacgacattacttctctcgcaagcaatggcggtagagtgcaatgcatgcaggtgtggcctcctactgggaagaagaagtttgagactctctcatacctccccgatcttacacccgtgcagttggctaaggaagtagattaccttcttcgctcaaaatgggttccttgcttggaattcgaattggaggagggattcgtgcaccgtaagtactcgagcttacccacgtacta

SEQ ID NO: 223509 - DNA, 423 bp, Gossypium hirsutum
aatgtcgacggcttccatcaacggttggtgccttacctcctcttcttcctccaccaccacctcctctttttccgctcgtcgacgacctacactgcggccttcggtcgtcgctagccttaactcttctccttctcctccgactcttatccaagaccgcccggttttcgctgcccctgttcctttgctcaccccgagagaagagatgggaaacaagtcctacgacgaagccattgaagctctcaagaaacttctcagtgagaaaggagaactgaaagctgaagcagctgcaagggtagatcaaataacagcagagttaaacacaacatcagctgacggcaaaccatctgactcttctgttgagagactgaaagaaggcttcgtttacttcaagaaagaaaaatatgaaaagaatcctgcttctga

SEQ ID NO: 223510 - DNA, 338 bp, Gossypium hirsutum
gtaaatggttaccactgcttctccattggcgattcatctgaagagcagctttaggtcgtctgttacaataagactggtatgtcccaagggcatttcgggatcccctgttaaagtatttttcggaaagaccaggaccccttgctttactgtcaaagctgttcaatccgacaagtcaacatttcaagtaatccaacccattaactgggaccccttgattggaagcctggagactctcatcacctgaagccccttaattgcatggtacctttgcaaccttccagcctataagacggcagagaacccacttttgatgaggatctaagtgggtctggctcaca

SEQ ID NO: 223511 - DNA, 402 bp, Gossypium hirsutum
cccacgcgtccgctcttaccatggatccttacaagttttgtccttcaagttcctttgatttgctgttctgtaccaccaattctggtgctccaatttggaacaataactcatcacttactgtgggagcaagaggtccaattcttcttgaagactatcatttggtggagaagctatgctaatttcgatagagaactcatacctgaacgtgttgttcatgctagaggagccagtgcgaaagggttctttgaggtcactcatgatatatctcagctcacatgtgctgatttccttcgtgcccctggagtccagacccctctcattgttagaattcttcagggttttaatgaacgcgtattcctgaaacttttgagagaaccctcgggtttctcttgtgaaaattta

SEQ ID NO: 223512 - DNA, 324 bp, Gossypium hirsutum
  unsure (1)..(324): unsure at all n locations
ctagtacccactactagcaatggcttcctcaatgatctcatcggctaccatagccactggctgggctgtacatgctaacatggncaccccttncaccggcctcaagtctgcctctgctttcccagacaccaggaaggccaacaactacattacttctctcgcaagcaatggcggctgattgcaatgcatgcaggtgtggctctcctactggaaagaagaagttcgagactctcttataccttcccgatcttacacccgtgctgtttgctaatgaagaagatttccttcttttctcaaaatgggtaccttgcttggagttttaat

SEQ ID NO: 223513 - DNA, 410 bp, Gossypium hirsutum
gatttctataagaaacaacagctgcgagagctatcaatgctgaatggtacacttcgtgaggaaggctctccaatgtctggttctttatcccctttccaaaacagcctcggaatgaagcgagcaaagactagggggtaaaaggatcccttctcgaggcctgttggagcttgtgtcttagtgtctgccgtaagccagcagttttcccggacattgcaggtattggctatatataggcaaatgcctccatgcacgatcggggcactggcatgggcactgttactgttgtgtgccagttaagttaggttgttctaacttatttgtttgatatatgaagtgtgtttatgttgtgtgtgttgggagaagttaaatgctagtattatttttacacagtgagcaatgggtgtgcgttc

SEQ ID NO: 223514 - DNA, 390 bp, Gossypium hirsutum
ataattggcccctaaatttcccctacgctctcactaaaacaactctctcttctttgttttccaatagttcgtaacaatgtcggtctcacttcaagctgcagctaccctgatgcaaccaatcaaggttgctgcaccatcaaggaccaatgtgctgctcaggtcctcccagagcgtttctaaggccttcggtttggagcctgttggtgctaggctcacctgctctttgcaaactgacctcaaggacttggctcagacgtgtgttgatgctaccaagctcgctggtttcgctcttgctacatctgctcttgttgtctcgggagcaagcgctgaaggagttccaaagcggctaacctacgatgaaatccaaagcaagacatacatggaagtcaa

SEQ ID NO: 223515 - DNA, 425 bp, Gossypium hirsutum
  unsure (1)..(425): unsure at all n locations
aatgaaagcaagcaatccagttgtcatggtccaggcataccgcctccttgttgctgaaatgtacgttcatggctgggattatccattacacttgggagtcactgaagctggagaaggtgaagatggaaggatgaaatccgcgattggcattgggaccctccttcaggatggtttaggtgacacaatcagggtttcactcaccgagccacccgaggaagagatagatccgtgcagaaggatggctgaccttggtatgaaagctgccgaactccagcaaggggtggcaccatttgaggaaaagcacagacattactttgatttccagcgtcgatctggtcaattgccaacacaaaaggaaggcgaagaggtggactttataagtgtcctgcatcgtgatggctcgngtcttatgtcttgttcccttg

SEQ ID NO: 223516 - DNA, 421 bp, Gossypium hirsutum
atgttgataacggtcagggaagcttcttcttggcctctcaccttcaacctctcctctttctcttctcctaagccttctccaatactcaaaaactctgtttgcagagccagtttaagtgttcatccaaaacccacctccaattcccaatcatggaaccttagtcttctttctaacagccaaaaaggatctgtttttgatcctttgggtatcaacccagacgagtcttcaggtttaaatcgtgtttgggatagttttctatccttgttaacacctacatttgagagtacctcaggtactagaaaggagaaatcttcttcggctagaggagtggcagctgcaattgaggacagttccattgaatttggggatttcttcaaaggcccattaccaggaaaatttctcaagcttttagcatttttgg

SEQ ID NO: 223517 - DNA, 417 bp, Gossypium hirsutum
atgttgataacggccagggaagcttattcttggcctctcaccttcaacctctcctatgtctcttctcctaagccttctccaatactcaaaaactctgtttgcagagccagtttaagtgttcatccaaaacccacctccaattcccaatcatggaaccttagtcttgtttctaacagccaaaacggatctgtttttgatcctttgggtatcaacccagacgagtcttcaggtttaaatcgtgtatgggatagttttctatccttgttaacacctacatttgagagtacctcaagtactagaaaggagaaatcttcttctgctagaggagtggcagctgcaattgacgacagttccattgaatttggggattccttcaaaggcccattaccaggaaaatgtctcaagcttttagcattt

SEQ ID NO: 223518 - DNA, 414 bp, Gossypium hirsutum
ggcggacccacccgtccggggttgcaatggcacaagcaatggcatcgatgactggtttacgtggctcttcacaagctgtgttggaaggtagtctccaactcagcggccaaacccggttgaacgttgctagcaccaacagggtggctgtggctagacctggttttaccgttagagctcaacaggtccctgccgagcctgaaactggacgcagagctgtgctgggtcttgttgctgctggtttggctactggctcctttgttcaagctgtgcttgctgatgcacgaagcatcaaggttggcccgcctccaccaccctccggtggattgcccggaactttgaattccgatgagccaagagaccttgatctggcgtacaaagatcggtttttcctccaaccattgactccggcacaag

SEQ ID NO: 223519 - DNA, 394 bp, Gossypium hirsutum; identical to SEQ ID NO: 198316

SEQ ID NO: 223520 - DNA, 410 bp, Gossypium hirsutum
cgtccgcgaaaaagatcccatacttctgatctctgccccaaatcaaaaaaagttctcatcttttacaagcgcggcttctgcttatctattttcatgcctcaaagatattcttacttcccgcaagacatggttaatcaggaagaagaacagaggctgaaatacttggaattcgtgcttgttgccgccgttcacgccgatttgtgcttcaccaacctttacctttacgctaaggaaagatcggggccgatgaaacctagcgtcgagaccgttgatggaaccgctaactgcgtgtgaggacctcctttttcattaataccaagatgtccctgttgtatttcttaaattcgttgattccaaggagggggaatttgtgaccaaacttgattttttagtcccttccctcataaaac

SEQ ID NO: 223521 - DNA, 312 bp, Gossypium hirsutum
gctccccacccttaaaccatgtcggcttttgttggcaagtatgcagaggagttgatgaagaacgccaactacatcgccacgccaggcaaaggtattttggcggaggacgagatcacaggcaccatcgggaagtgtctttcgagcatcaacgtctagaacatcgattccaatcgccaagccctccgcgagctcctatttacctctcccaacgcattatcctgcctctacggtgtcattcttttcgaggaaacactttaccagaaaacatctgacgggaaactcttttttgaaatcctcgaagagaacaatgtc

SEQ ID NO: 223522 - DNA, 414 bp, Gossypium hirsutum
gctgtatcagctagggtgagtattgaggctggatcaacatttgggtgggcgaagatgtgttggatccaaggggaaggctattggaattgaccggttcggggcaagtgcaccagcaggcaaaatatacaaggagtttggcttgactcccgaggctgttgttgcagcagcaaaagaactttgctaagcttgcttagaagtgtcgggagaaatttgtggttctgggttggaggttacactgaagagagaccattccatttgtgacagtctcgtttgtttttaataagaatcagaatccacttatattttatgttgcctgtgattcatcaaaaagcaaaacatagagagaaagggagggtagagtttgtgtatgatcatcaattttgaatttactctcggactttttcccagagtttt

SEQ ID NO: 223523 - DNA, 406 bp, Gossypium hirsutum
cccacgcgtccggtcccttattaataagtagagtatttccataactggtttaattcccttcatgcactgtgctccatagtcttggaacccaaggacagaagactcttttagcatttcaccgcaaagatggagataacaaatgtgagcgagtatcaagaaattgcgaagcaaaagttgccaaagatggtgtatgactactacgcatctggtgctgaggaccaatggacattgcatgagaatagatttgctttcaccaagatactgtttcgtcctcgtattctcattgatgtaaacaagatagacatgaccacaactgtgttgggtttcaagatatcaatgcctatcatgattgccccaactgccatgcaaaaaatggctcatcctgaaggggagtatgcaacagcta

SEQ ID NO: 223524 - DNA, 424 bp, Gossypium hirsutum
cccacgcgtccgcttctttgaaatttagctgaaatggctactgcaacaatgagcttcaatttggtgggagcatttaggggtctttctctagcatcaagctcgacgtcgtcctttatgaaaggagaagtgggttccattcacaaaacggcagtcgtttcgttcccgaggaagtctccgttccctttgacgatcgaatcggcgcacaaaaaaggagccggtagtactaaaaacggtcgcgattcaaagggtcaacgactcggcgtcaaaatctacggcgaccaggtcgccaagcccggcgctattatcgttaggcaacatggaaccaagtttcatccagggaaaaatgtggggcttggcaaggatcacacaatcttttcattgattgatggacttgtgaaattcgagaagtttggaccccacagaa

SEQ ID NO: 223525 - DNA, 373 bp, Gossypium hirsutum
aacttccacattgttctactccctcttctcttagcttcaaccctttttcatcttcattcccttctttctcaacgcgacaaaacaagggttttaggagaacatctctggtagtagcttccatggctgatctcagcactgtgctcgtcactggagccgctggcagaacaggtcagatagtttacaagaagctgaaagagaggtcggatcagtttgtcgtgagaggactcgttagaactccagaaagcaaggagacaatcggtggagcagatgatgtgtttgttggggatatcagggataccacctctctggttcctgccatgcaaggaattgatgcactcataattcttactagtgctgttcctagaatgaaacc

SEQ ID NO: 223526 - DNA, 432 bp, Gossypium hirsutum
cccacgcgtccggaaacaattctaacaatgatggtttcttgcatggatgtctcagagcctgtggcagtcagaatagagggatttagacttgcccaacatttggtggcagatgaacaacgatgcataaaaatgacaagcttatgttctgggcctctaattaaagccattattggaggaatgagagtatggaggttgggctctggaaagggtgtaaatgatctggtgtctttgctagatgaggcctgtcggttggctctaattactcgctggccaggagaacatcacaatcacttttgggagcaagggattgacaaagttcttcttgatctacttcttgaaaattttgacaaacaagcatcggagcacactttgacacctcaggcacgaatctctattgctcagcaaggccttgatactaattttcttattgca

SEQ ID NO: 223527 - DNA, 413 bp, Gossypium hirsutum
tggtgaaaccatcaacgataaggatcgttgcccacaatgcaaaggtgataaggttgtgcaagagaagaaagtcttggaggttattgttgagaagggtatgcagaatggacaaaggattactttcccaggagaagctgatgaagcgcccgatacggttactggggacattgtattcgtcctgcaacagaaagatcatcctaaatttaaacgaaagggtgatgacttatttgtagagcatacattggcacttactgaggccctttgtggctttcagttcatactgactcacttagatggcagacaacttctcattaaaacccaacctggggaagtcgttaagcctgatcaattcaaagcaataaacgatgaaggaatgccgatttatcagaggccatttatgagaagtaaacttt

SEQ ID NO: 223528 - DNA, 379 bp, Gossypium hirsutum
gtctactcttgctcgtacctctctgcttcatttatctcctcttcgttcaacttcttctacgagggataacgcaactgaaagtgttgccatcgagggtcgtaatattaacttctcggtcaatacgaggcaaggcaaaatggtgccaattctcaaggattgttcaattcggattccttccggacagttgtggatgcttcttggacctaatggttgcggtaaatctacccttttaaagatcttggcaggtcttttgacccctacaaacggggctttatacgttaggaggccaaagagctatgtattccaaaatccagaccatcaggttgtgatgcctacagttgaagcagatgttgcatttggcctttggagaataaactta

SEQ ID NO: 223529 - DNA, 438 bp, Gossypium hirsutum
gctatagcatacactactagtacccactactagcaatggcttcctcaatgatctcatcggctagcattgccactgcctctccggcacaggctaacatggtcgctcctttcaccggtctcaagtctgcctctgctttcccagtcaccaggaaggccaacaacgacattacttctctcgcaagcaatggcggtagagtgcaatgcatgcaggtgtggcctcctactgggaagaagaagtttgagactctctcatacctccccgatcttacacccgtgcagttggctaaggaagtagattaccttcttcgctcaaaatgggttccttgcttggaattcgaattggaggagggattcgtgcaccgtaagtactcgagcttacccacgtactacgatggacgctactggaccatgtggaagctgcccatgttcgggtgcaccg

SEQ ID NO: 223530 - DNA, 435 bp, Gossypium hirsutum
actcccctctcactgcaacactcatagcacactatccacacttgctttctttgctttgccttccagtacagccccattttaaagccttggaaagcagacagacagcattaaggaatctcgaatctcaactgggtatggcaattactgcaacggctatgactatgactgtcactacgggattacagtttgctggttctctcaatcataaacagacttcttttttaggagttcccttgaggctgtcaatgtcaaaccctcagccatctttaccctctgtcttcctcaatgttcaagccaaagctcgcacccgaacagaagatcgtgaggcccgccattctcgcattaggaagaagattgaagggacaccagatagaccaagactgtgtgtcttccgttccaacaagcatctctatgttcaggtcattgatgactcaa

SEQ ID NO: 223531 - DNA, 432 bp, Gossypium hirsutum
atatcttcctctccacccttgaaccatgtcggcttttgttggcaagtatgcagaggagttgatcaagaacgccaagtacatcgccacgccaggcaaaggtattttggcggcggacgagagcacaggcaccatcgggaagcgtctctcgagcatcaacgtcgagaacatcgagtccaatcgccaagccctccgcgagctccttttcacctctcccaacgcattatcctgcctctccggtgtcattcttttcgaggaaacactttaccagaaaacctctgacgggaaacccttcgttgaaatcctcgaagagaacaatgtcattccaggtatcaaggtcgataagggcaccgttgagatagccggcaccaatggcgagaccactactcaagggttcgactccttgggtgcgcgttgtcagcaatactataaagc

SEQ ID NO: 223532 - DNA, 376 bp, Gossypium hirsutum
gtccatctttcagtaagagaaaggaaatggagtttagttcagaggctaaccagcgcgttgccaggctcgcagcccatctccaacctcagatggaggaaagttctattttgaggcgagctgactgtagagcgaaaggagggtcaccagggttcaaagttgctatcttaggagcagctggaggcattggccagcctcttgcaatgttaatgaagatgaatcctctcgtctcggttcttcatctttacgatgttgtgaactctcctggtgtcacagctgacctcagtcacatggatactggtgctgtggttcgtggtttcctagggcagccgcagcttgagagtgcgttgaccgggatggaccttgtgatcatacctgc

SEQ ID NO: 223533 - DNA, 283 bp, Gossypium hirsutum
gttgtttatacgtttggttgttgttgatttattgctactaccatggctacaaagaggagcgttggggacttgaaggaagctgatttgaagggaaagaaagtgtttgttagagtcgatctgaacgttccattggatgataacttcaacataactgatgacacaaggatccgtgccgctgtttccaccatcaagtatttgatgggtcatggctctaaagttatcctatttagtcatttgggacgcccaaagggtgtttctcccaagttcaggttgaatccttttg

SEQ ID NO: 223534 - DNA, 345 bp, Gossypium hirsutum
gagaatactagagtctttacacaaatcaacttattttcaatttcctatatttagaatggtaattcgagtggatcaagattttgaattttagtgggaattttgatcattatacatgggctgaatgagcacagtggaagatatgctcaatttgcaaagcaactaatctcttgcaactttggtgtatatgcaatggactggataggtcatggtggcagtgatggattgcatggatatgttccttcacttgatcatgttgttgtagacactggggctttcttggaaaagatcaaatcagagaacccaggtgtaccttgcttcctttttggtcactctactggtggagct

SEQ ID NO: 223535 - DNA, 424 bp, Gossypium hirsutum
tttcaagaccgttgctcttttctccaagaagaaggccgctcctccaaagcccaaggctgctgctgtcgccccggccgatgaagagctggctaagtggtacggtccggacagaaggattttcttgcctgaaggtctgttagacagatcggagatcccagagtacttgaacggagaagttcccggagactatggatacgatccgtttggtctgagcaagaagccagaagactttgcaaaatatcaagcatatgagttgatacacgcaaggtgggcaatgcttggtgctgcagggttcatcatccctgaagcctttaacaaatttggtgccaactgtggccccgaagccgtttggttcaagaccggagctcttctcttggacggtaacaccttgaactacttcgggaagaacattcccatcaacctt

SEQ ID NO: 223536 - DNA, 433 bp, Gossypium hirsutum
ggcatacttcaaaagatatcaagttaagttcaagagaagacgagagggcaagactgactaccgggccaggaaccgtcttatcaatcaggataaaagcaagtacaataccccaaaatatcgtttcgttgcaagatttaccaataaggatatagttgcacaaattatacatgctagtatttctggtgatatagttcttgcagcagcttatgctcatgaacttccccgctatggacttgaagtgggccttaccaattatgctgcagcttattgtgttggactcctcttggctcgccgaacactgaagcaactggagatggatgctgagtatgagggaaatgttgaggcaactggggaggacttcactgttgaaccagcagagaccaggaggcctttccgtgcgctccttgatgttggtcttatcagaactactact

SEQ ID NO: 223537 - DNA, 432 bp, Gossypium hirsutum
gaaggcaggactctcagactactctttcgaaccagctccaccatcacccccaaaaaacaaagcaaattgtagaagatggcaacacaagcacttgtatcatcgtctcttacctactcagtggagactgcaaggcagattcttggagctaaacgacaaattgggtcttcaaggaaaggatcctttgttgttaaggcagcttcgactccacccgttaagcaaggagctgatagacctttatggtttgcatctaaacaaagcctttcatacttggatggcagccttccaggtgattatggatttgaccccttgggactctcagaccctgaaggtccaggagggttcatcgagcctaaatggctagcctacggtgagatcatcaacgggcgttatgctatgttgggtgcagtaggtgcgattgcccctgaaatactt

SEQ ID NO: 223538 - DNA, 276 bp, Gossypium hirsutum
cccacgcgtccgattataacagggaaaggagcactagcacagttaaacattgagacagggattcgtattagcgacattgaaccccttgttttgttcaacgttgccttcttcttctttgctgctataaatcctgggactggtaaatttgttactgatgaagcggaagaagactagattttcccaagcaatttgtaattaaagtctcaatacttttctctcccctttttttcttcatgtcccttcgttggcatcaatggattacattgctttttaacc

SEQ ID NO: 223539 - DNA, 437 bp, Gossypium hirsutum
ttggtattgggcacctgggcaagcccgttcgtgctgagggtgaagattgcacttcacctcaagggtgtcaactacgagaaccatgaggaaaatttgccggaatccaaaagcgaccttcttctcaaatctaaccctgtttataagaaagtcccagtcctcatccatggtcataatcccatctgtgagtctctaatcatcgttgagtacatcgacgaggtttggaccacctctgcttcttccatcctcccttctgatgcctatgaacgcgcccagtcccgattttgggcggcctatgtcgaagataagttttccactgccttaagaagagtgttgtttggtgctacagaggaagataaaagggcagcaatggccgaagtctcagaagggatggtgctgttggaggaagtctttgtgaaattgagcaaagggaaagcttt

SEQ ID NO: 223540 - DNA, 434 bp, Gossypium hirsutum
cccacgcgtccgcccacgcgtccggggatcagtgagactcttttgtataactgtagcatataggactagtaagcagtaatagcaatggcctcctccatgatctcatcggcaaccattgccaccgtgaactgctcctccccggcacaggccaacatggtggccccccttcaccggcctcaagtctgcctctgctttcccagtcactaggaaggccaacaacgacatcacttctcttgcaagcaatggtgggagagtgcaatgcatgcaggtgtggcctcctcttgggaagaagaagttcgagacactctcatacctccccgatcttacacccgtacagttggctaaggaagtagattaccttcttcgctctaaatggattccttgctgggaattcgaattagaggagggattcgtgcaccgtaagtactcgagct

SEQ ID NO: 223541 - DNA, 428 bp, Gossypium hirsutum
  unsure (1)..(428): unsure at all n locations
ccgccatgtaaatccatgctaaaattgcagactccaagaggtttcaaagcaacacctgttggacaggataactcaacagttgattacagctccacggcctcagtatttccagctgaggcatgcgatacacttggaggagaagcctgtgatgttgagatgttccctgaagtgaagctaaagccagatcaaacacaaagcaataagggtaagacaggttcagagcaggttgacagagaatacttggagtacaacagtcccaagacggtgttcataggagaggcttgtgatgatcttggaggagaattctgtgagcctgagtatcagaaaggagttcaatgattttaccagataaacctcaaaacagtaactgcaaataaataatggggtggtcaccttctttgtaacctgcatactgncttgtgtttctt

SEQ ID NO: 223542 - DNA, 428 bp, Gossypium hirsutum
cactctcaaattcagttaacaatttcacagttgttttcttcagtctctctctcagccatggctgcagccatctccaccgtcgctgccgctgccgccgccaaccgagctctgggagtgtcagtcccaacctcagctttcatggggaagaaagtgagctcaagattcaacagcaccaggcaggttccttcgggaagttttaaggtgatggcggcggagaaagagatagacgaagagacacagaccgaaaaggaccgatggaaagggttggcttacgatatttcggacgaccaacaggacattactcgagggaaagggatggtggattccttgttccaagctcccatgaatgatggaactcactatgctgtcatgagttcctatgaatacctcagccaaagtcttaaaacgtacaatttggacaacaacat

SEQ ID NO: 223543 - DNA, 401 bp, Gossypium hirsutum
tcactctcttccactttgtctccttcctttctcccttacagccaatcccctcaataccccatggttctggttcctttttcaagccattttacaggcacttcccagttgggagaaggggaaaatggcacagcttttagcaccctcaactcaatggcaaatgacactaccaaagacctcaacctatggaagtcccattgcaacaaaaatgtggagttctctggtactgaaacagaacaagaaaggagctgctaaaagctctggcaagtttaaagtggttgccttgtctgaaaacagcactgtcaacaggctagagaacttactaaacatggacgtcactccatacaccgacaagatcatcgctgaatacgtttggataggaggcagtggactcgatatgcgta

SEQ ID NO: 223544 - DNA, 433 bp, Gossypium hirsutum
gttaaggcaaaaattcaggacaaggagggaattcccccagaccaacagaggctgatttttgctgggaagcaactggaggatggccgtaccctggctgactataacatccagaaggagtccaccctccacttggtgctccgtcttcgtggtggtatgcagatttttgtgaagacacttactgggaagaccatcaccctggaagttgagagctctgacacaatcgataatgttaaggccaaaattcaagataaggaaggtatccctccagaccagcagaggctgatatttgctggaaaggcagctagaggatgggaggacccttgcagattacaacatccagaaggagtccaccctccacttggttctccgtctccgtggcgggatgcaaattttcgtgaagaccctgactggaaagaccatcaccctggaagtt

SEQ ID NO: 223545 - DNA, 393 bp, Gossypium hirsutum
attttctctcaaaaaagtgaagcaaagaatacttgcatcaaacagatggcaaccatggagaaggggttagagtttgagaacaagaatttaggcctcaagcacctaaacttcgtcagggtggctacaatccacgccttggtttgcgtctcgaacctttacgattactctaaacagaactcggggccgttgagatccaccgttgacgccgtcgagcatgccgttaccactgccgtcggtcccgcctacgggaaatttaaggatgttcctgatcattttcttggatttcttgataacaaggtagatgaggtttcacacaaatttgacgagcatgctccagcaccagccaagcaagtggttaacctggcccacgatttggtccaaaaggcaacccaa

SEQ ID NO: 223546 - DNA, 382 bp, Gossypium hirsutum
ctcaaacaaaccttttacttctcaactctctcaaattcaccatggctgacaagtgcggcaactgcgactgctctgacaagagccagtgtgtgaagaaaggaaacgccttggtcattgagactgagaaaagctacatcagcactgtagtggtcgaggctgtggcagagaacgatggcaagtgcaagtgtggaactagctgcagctgcacaaactgcacatgtggcaatcattaagcagacatatatagaactgcacgatgttttagtccataattaaattaatttgaataattggaggcgtgttgcatgtttgtctccgactcattgtataccatgatagaatggccatgtctatggactttgtctgattaatgaatgattat

SEQ ID NO: 223547 - DNA, 364 bp, Gossypium hirsutum
tcgattacgggttcgacccgttcgggttagggaaaccagcggagtacttgcaatatgatttggattgtgtggaccagaacctggctaagaatatggctggtgagatcattggaactaggaccgaagttgccgacgtgaaggcgacgccgtttcagccttacagcgaggtttttggtctacagaggtttagggagtgtgaattgatccatggacggtgggccatgttggctacgcttggtgcacttaccgttgaatggctcactggtgttacatggcaagatgctggcaaggttgagttagttgagggttcatcgtattttggccagcccctttccttcttgatgacaacattgatttggataga

SEQ ID NO: 223548 - DNA, 429 bp, Gossypium hirsutum
cccacgcgtccggcttgtcagcaattagagaatggaagtgatattgatgatgaggatgatactgaacatgatgaaattcttatggatgcagtttcggaccttttacctgcatttgctaagtcaatgggttatcactttgctcctatatttgcaaaactatttgaacctttgatgaaatttgcgaaagcttcacgtcctccaccagatcggactatggtggttgcttgtcttgctgaagttgcacaggacatgggtgctccaattgcaagctatattgatggactgatgcccctagtgcttaaagagttagcttcgccatctgcaacaaatagaaggaatgctgcattttgtgctggagagctggccaaaaatggatgagagacaactttgaaatattacaatgatatattgcgtgggctttacccatta

SEQ ID NO: 223549 - DNA, 416 bp, Gossypium hirsutum
gattgtggctgccaaagaaatcgacgaagacacacagaccgaccaggaccgatggaagggtcttgcttatgatatctccgatgaccaacaagacattaccagagggaaaggtatggtcgactcattgttccaagctcccatgaacgatggtactcactatgctgtcatgagctcctatgagtacattagccaaggccttcgcacatacgacttggacaacaacatggatggattctacattgccccagctttcatggacaagcttgttgttcacatcaccaagaactacatgacccttcctaacattaaggttcctcttatcttgggtatttggggaggcaaaggtcaaggaaaatctttccaatgtgagcttgtctttgccaagatgggaatcaaccccattatgatgagtgccg

SEQ ID NO: 223550 - DNA, 415 bp, Gossypium hirsutum
cccacgcgtccgagcaaaactggatgctgaccggaaggcaaacccaggaacagtcaaaggggggaataaggctgatgatgattcaaaaaaggagaggcagccatttctcacacagttcttctctcccatatttctgaaggcattttccatcacattctttggtgaatggggcgacaagagccagcttgctaccattggtttggctgcagatgagaatccatttggtgtggttcttggtggaattttaggacaagcactgtgcaccactgctgctgtacttggaggaaagagcctggcgtgtcagatatctgagaaaattgttgcactctctggtggagttcttttcattgtttttggattccaatccctcctctcaacagttgagtcttgacgacttactaatggttagttctga

SEQ ID NO: 223551 - DNA, 428 bp, Gossypium hirsutum
cggacgcgtgggcggacgcgtgggtgagactcttttgtataactgtagcatatagtactagtaagcagtaatagcaatggcctcctccatgatctcatcggcaaccattgccaccgtgaactgctcctccccggcacaggccaacatggtggcccccttcaccggcctcaagtctgcctctgctttcccagtcactaggaaggccaacaacgacatcacttctcttgcaagcaatggtgggagagtgcaatgcatgcaggtgtggcctcctcttgggaagaagaagttcgagacactctcatacctccccgatcttacacccgtacagttggctaaggaagtagattaccttcttcgctctaaatggattccttgcttggaattcgaattagaggagggattcgtgcaccgtaagtactcgagcttac

SEQ ID NO: 223552 - DNA, 433 bp, Gossypium hirsutum
cccacgcgtccgattagcactagcactagtagcaaccatggcctccgccgcatgtttcttgcagcaccactcactcacaaccaatggcagatcatcatcattatcgccgtcgctgcgccaggtttcaaacatgaagcctacccagcaggtggtgtgcaaggctcaaaagcaggaagatgatggaagccttgtgtcccgtaagttggctctcactgtactcattggtgctgccgctgttggctctaaggtttctcctgctgatgctgcctatggtgaagctgcaaatgtatttggaaagccaaaaacagacacagacttcatgccatacagtggggatggattcaagctctcgataccattcgaaatggaacccaatcatagaggtggagtttccaggttaagtgctgaggtacgaggacaactttgacaccac

SEQ ID NO: 223553 - DNA, 432 bp, Gossypium hirsutum
aataagcacctccccgtaagcaaaccacaaaggaaagcttggagagagacccaaaaacaatgtctaaggaagttagtgaagaaggacagggtcgtaaggactatgtggaccctccaccggcacctctgattgacatggctgaactcaagtcatggtctttttacagagccctcatagctgagttcatagccactctcctcttcctctatgtcactgttgctactgtaattggtcacaagaaacaacaagatgcatgtgatggtgttggtctcttgggtattgcatgggctttcggtggcatgatctttatccttgtttactgcactgccggtatctcaggtggacacattaaccctgcggtgacttttgggttgtttttggcccgtaaagtgtctttcattagggctgtggcttacatggtgtcacagtgct

SEQ ID NO: 223554 - DNA, 414 bp, Gossypium hirsutum
cccacgcgtccggattatcacaagaacctaataatcctctccttcttgctaattatgctcagtttctctaccttgttgttcatgattatgacagagcagaagagttgttcaagaaagcaatacaaatggaaccggtagacgctgaagcacacaataaatatgcgatttttttatggaaagcgaagaaggatatgtgggcagcggaggaaaatttcttggaagccattgaagttgatcctaataactcatattatccggcgagctatgctaattttctatggagtaccggtggggaagatacttgtttccctcttggttcatcggatggtattgcttaagaaacaatggccaacactctgttttttctttctttttctggaattttgctcagataaatgaaaacctttctttccc

SEQ ID NO: 223555 - DNA, 419 bp, Gossypium hirsutum
cttgattgctggtggcccgtttgtccttcctcttgctcacaaacataaagtaaaaattcttccagctgattccgaacattctgccatatttcagtgtattcagggattaccagagggtgcacttcggcgtattattttgactgcatctggtggggctttcagggattggcctgttgataaattaaaagaagtcaaagtagctgatgctttgaagcatcctaactggaatatggggaaaaagattactgtggactctgctacccttttcaataagggtctagaagtcattgaagctcattacctatttggagctgagtatgatgatatcgagatagtaattcatccgcaatctattatacattcaatggttgaaacacaggattcatcagtgctggctcagttgggatggccagatatgc

SEQ ID NO: 223556 - DNA, 429 bp, Gossypium hirsutum
atcatcaggatggccttcggttgttgcagtagttggtaactggttcgggaagaaaaaaagagggctaattatgggcatatggaatgcccacacgtctattgggaacattactggttctttgattgcttcaacactattgagctatggatggggttggtcctttgttgtgcctggtttgcttattgctttcatgggcatcctggtttgtcttcttcttcctgttagtcctgaatcagttggagctgatagacaagaagaagaagaagatgatgcagtagattcccctaagaagaagaaagagggagtaacagagcctctattgcgctcacatactgagatgaaggaaaatgcagtggggttcatagaagcatggcgaatcccaggggttgctccttttgctttttgcctctttcttgccaaattagttgc

SEQ ID NO: 223557 - DNA, 432 bp, Gossypium hirsutum
cttcaagctgcagctaccctgatgcaaccaatcaaggttgctgcaccatcaaggaccaatgtgctgctcaggtcctcccagagcgtttctaaggccttcggtttggagcctgttggtgctaggctcacctgctctttgcaaactgacctcaaggacttggctcagacgtgtgttgatgctaccaagctcgctggtttcgctcttgctacatctgctcttgttgtctcgggagcaagcgctgaaggagttccaaagcggctaacctacgatgaaatccaaagcaagacatacatggaagtcaaaggaacaggaactgctaaccagtgcccaaccatcgatggtggtgtcgactcttttgccttcaagcctggcaaatactacgccaagaagttctgcttggagcccacttccttcactgtcaaggctgagggt

SEQ ID NO: 223558 - DNA, 435 bp, Gossypium hirsutum
ctgagagataagagaaagcactgaaaaagcaaaaccatggcctctgcttctctcctcaagacttcaccagttttagacaagtctgagtgggttaagggtcacacccttcgccaaccttccacttctgtggtgaggtgccaccctgttgcaccctccggactaactgtgcgtgcaagctcatatgccgatgagcttgtcaagactgctaaagctattgcttctcctggccgtggaattttggccatggatgagtccaacgctacctgtgggaaacgtttggcctcaatcgggctagaaaacacggaggctaaccgccaagcctacaggacgttgcttgtttcagctcctggccttggtcagtacatctcaggtgccatcctctttgaggaaaccctctatcaaaccacaattgatggcaagaagatggttgatgtt

SEQ ID NO: 223559 - DNA, 432 bp, Gossypium hirsutum
ctcgtctctctctctttcacctctctagaaaaccctgcatttcaccttcttcactcccattttcttatatctcgaaaccccataaaccaaaggatcgaacccatttcagattgtattcaatggcatcatcggacttgaaagaatcagctgccaataaccctgggcttcatactacccctgatgaagctaccaaagactacatcatgcagcaaactatgtttcgaattaaggatccaaaagccagtcttgatttttactctcgtgtgttgggcatgtcgctgcttaagagagtggatgttccagaattgaagtttaccttgtactttatgggctatgaggatgtttccaaagctccaagtgatccatacggtagaacagtttggacctttggaagggcagctaccattgaattaacacataattggggtactg

SEQ ID NO: 223560 - DNA, 427 bp, Gossypium hirsutum
gtttcgttgatttgtttctaaggatttaatctccaaaccttcttcccatttcttcattacattgttcaagaaaaaagaagcaaaaaaacatggccaaagttctgttgttcattgcactatgtgtgcttccagctttggttagtgctacacgcattctgaataatcaattggtggtagaaggctatgtgtactgtgatacttgccgtgctggttttgaaacccctaagactagaagcctagctgatgccatggttaggttggtatgctccgacaggaagagcggccaagttgtcttcaaaaaggagggatacaccgacaaaaccggaaaataccagattcgtgtatccgaggatcacttggatcagatctgtgatgcagttcttgtgaagagctcccagcttggttgtgccacaatgtcccccggtcg

SEQ ID NO: 223561 - DNA, 419 bp, Gossypium hirsutum
cgaaagccctttttcctcccatggccgccaccaacacattgatgagctgtggcatcgccaccgctttcccttcagtgctttcctcttcaaagtccaagttcgccaccgctacgccgttgcctagctttggcgccaatgttggccaccgtgttagcatgtcggctgactggatgcctggtcagcctaggcctccttatcttgatggttcagcacctggtgactttggatttgatccacttagacttggtgaggtgccggagaaccttgagaggtacaaggaatctgagttgattcactgcagatgggctatgcttgctgttcctggtatattggtgccagaggcattggggtatggaaactgggtaaaggcacaagaatgggcagccgttcctggtgggcaagccacttacttaggcaac

SEQ ID NO: 223562 - DNA, 431 bp, Gossypium hirsutum
gtgatcctgaaaagtttaaagagttggctcaagcttatgaggtgctgagtgacccagagaagcgtgagatatatgatcagtatggcgaggacgcccttaaagaaggaatgggtggaggcggtggtgcccatgatccatttgatatcttccaatccttctttggtggcaatccttttggtggtggtggtagcagccgaggccgaagacaaagaaggggagaggatgtaattcatcccctaaaggtttctttggaagatctctataatgggatttccaaaaagctttctctttcacgcaacataatttgctccaagtgcaaggggaaagggtctaaatcaggtgcatcaatgaaatgttctggttgtcaaggttcaggaatgaaagtctccatcagacaccttggtccttccatgatccaacagatgcagcac

SEQ ID NO: 223563 - DNA, 428 bp, Gossypium hirsutum
catggaagcaacctcacttctttcttcatcttcttccttcgccctctctttccttccttgacctctttcttctccagatctccaccacaagtctcttgtcttcaggggcatgtttccagttactgtaaacccgcagacatgttcaacagctgttgtccgcagaaagttgagcttctgtacaaaggcagttcttggaggaaatgtgcatgtaacaggagttcctacttctgtccctgtaagagtagcacacgagcttcatcaagctgggcatcgatatttggatgttaggactcctgaagagttcagtgcagggcatgtccctggggccattaacatcccttacatgtacaaagttggatcaggaatggcaaaaaaccccagttttgtagctgaagtatcatcacatttaggaaaatatgatgaaatta

SEQ ID NO: 223564 - DNA, 338 bp, Gossypium hirsutum
caacctctttggtggcccaagtgttgttagcgtgtcgcagagtgatggtccatatagctttgcggttacgcgggcggcgcctggtccgtcatgtggggatgtcctccgagtgatgcagcacgagcccgagctaatgtttgagaccctcaagcaccgtgcggaagaattttgtggacaggaccatggcaatgaaggcacccatgctgctttagttagcaccattgctcgttctttccacaacatgccttatcttgtagtggcatccccttgttcgttgactgccatgaataacaatggcttctactattgcaatgaggaagattacaatgctgctgtcg

SEQ ID NO: 223565 - DNA, 347 bp, Gossypium hirsutum
cccacgcgtccggtccattcacagcctatacgaaccctaagagctcctcatctctttgtttggggcttccatatgaactcaagttcgtcgtcgctttctactctttagccatcaaagatgaccaccatggaaagcttaatcggtttagttaacacgatccaacgagcatgtacggtgctcggggattacggtggcggcgacaacactttatcttccctttgggaagctcttacttccgttgccgtcgtcgggggtcagagtttaaggaagtcttaagtgcttgaaagcatataccgacgttattttcttcctagaggatcaggaaattgtacaagacggcctttgga

SEQ ID NO: 223566 - DNA, 430 bp, Gossypium hirsutum
tcggaaaaaagccttaccctcaaaagaaaaccggacgtgttcgccgtgggtctacgcgcaccccgcgcgtcccggtggtggtgttatcttcggacccaaacccagagactggtcggttaagatcaataaaaaagagaaaaggttggcgatttcgacggcgttatccagtgcggctgagaacacgatagttgttgaagattttggggataaatttgagaaaccgaggactaaagagtttattgaggcttttaagagatggggattagacccaaagcagaaatctattgttttgatgatggaagtgccggaaactgtgaataaatagattcggaatattggaactttgaggatgttaacgccgaggacccttaatttgcttgatatttttgaattgcgataatttggtgttgacctctgatactgtggatta

SEQ ID NO: 223567 - DNA, 429 bp, Gossypium hirsutum
  unsure (1)..(429): unsure at all n locations
cccacgcgtccggcaggatctgagatacaacggctgaaagtcggcaaatactaacatataaacgagtctccatgggatctctggacctaagctcaggatcagaagttgttaccattcatgttaatgaagcaaaaaacttgctgcagtcaggctaccgttacatcgatgtcatgacagtggaagaattcgagaagggacatgtggaagcagagaatattcttaacatcccatacttgttcatcacaccagaaggtagggtgaagaatcctgagttcttgaaggaggtttcatctctttgcaaggaggatgatcgtctcatagtgggctgccaaagtggggtgagatcccttgctgcaaccgctgatcttcttaaaattggttntaagaatgtgcacgacatgggaggagggtatctngcttgggtggaga

SEQ ID NO: 223568 - DNA, 423 bp, Gossypium hirsutum
accaccaccatagtccaacattttcataacaatggctgccatcacaaacgccgctgctacgtcctccttcatggggacactcttccccgacgtctacacaagttcagggagattcgtcgccaggtttggctttggcggcaaaaaagcagctcccaagaaagtctcgaaacgaaccccagaccgccctctatggtacccaggagcagtggcgcctgattggctcgatggaagtttggtgggtgattacgggttcgacccgttcgggttagggaaaccggcggagtacttgcaatatgatttggattctttggaccagaacctggctaagaattcggctggtgagataattggaactaggaccgaggttgccgacgtgaaggcgacgccgtttcagccttacagcgaggtttttggtctacagag

SEQ ID NO: 223569 - DNA, 431 bp, Gossypium hirsutum
cggacgcgtgggctccttgttggccatcttcgtggtcgtcttcattcgtaccactaacagaagaaacctcttattgccaccgtcgccgccgaaactcccaatcatcggaaacctccacaacatcggacgctaccctcatcgctcactcaagtccttagctcaacggttcggtcctctcatgtcgctacgcttcggcaatttccccatactcgtcgtctcctccgctgatgctgcctctgagatcaagaaaactcatgacttgacattcgtaaacagaccgaaacgcagcctctttcaaaagcttctttatgactacaaagacgtggcgtcggcaccttacggtgagtattggaggcaaatgaaaagtatatgcgtagtaaatcttttgagtaacagaagggataaatcttatcaaggtgtgcgagaagaaa

SEQ ID NO: 223570 - DNA, 344 bp, Gossypium hirsutum
ggccgccctttttttttttttttttatagaagaaacacaaaataatgagtgatattaatttgtagataaagatagtattacatagtcgcaaaaagcgacctagtacacaacgcacaactctaaaattaggataactcctctgctatccctacggatggattttaaacatccatttttattctgtagctatcattattttggcttccactagctgatgaacattccatgccaaaatttcacttgacgctgctgcagtcagtgctagggctgatcttgtaagggatgttgacaccgcacttgcctggtagtccgcttgcaaggccaaagttgatgccaggaatgcc

SEQ ID NO: 223571 - DNA, 432 bp, Gossypium hirsutum
  unsure (1)..(432): unsure at all n locations
caccgccataagcgaaatcaaaagccagcagcgctgcagctaaaagagcagtcgtttgacaattattcgccatgggtaaggttcacggatctctagctcgtgctggtaaggtgagaggccaaactcctaaagtggccaagcaagacaagaagaagaagccccgtggccgcgcttacaagcggatgcaatacaaccgccgcttcgtcaccgcagtaatgagtttttggggattttttcacagtggttggatttggcaaaaagaggggacctaactcatctgagaagtaagagatctatgtaggtgaaagaaggcaagaagccttgttgaaagctttgatggattttaagtctttgttttcttttgataatgtttntatgatactggtttcaaggattggattgaactaccattttgtttgctagatattatgt

SEQ ID NO: 223572 - DNA, 432 bp, Gossypium hirsutum
cccacgcgtccgttcttcacgtccattttcagatcctttgagtcctctcattccaaccccactgactactcataattgctgcggctcagctatggcctctcaaacccacatctctctcgatttccacacttgtgtcttcaagaaagagaaagtctccctcgctggtcacctcgagtacattgtgagaggaggaagagatttgtttacgttgctgcctgatgctttcaaagggattaagcagattggtgttattggttggggctcccagggacctgctcaagctcaaaatttaagggattctcttgctgatgcaaaatctaatatcattgtcaaggttggactcaggaagggttctcctttttttgccgaagctcgcgctgctgggttctctgaagaaaatggcccttttgggtgatatgtgggaaactattt

SEQ ID NO: 223573 - DNA, 405 bp, Gossypium hirsutum
  unsure (1)..(405): unsure at all n locations
ctactccaaannnnctctagaaccatactncgaganggctnnnctcaagccttcacctgaaatttccaccgcctctgcaaaatttttctctaaccctaccccccgccctaaatttctcaagagctgcgcgatttcgaagaacgacgacgagaaagtttggtcaaggaccaacgctagggtcggtgttaaagatgccggcagtacggtttcgtgtttgagccaaaacttgaggttgtacgtacaattttcggctccggtgaagcgaggatcgaagcccagcaaagaggaagaggagaagcaggattattacgtgaatatgggttacgctattcggaccttgagagaggagttcccggacatcttttacagggagctcagttttgatatttacagggatgacattgt

SEQ ID NO: 223574 - DNA, 243 bp, Gossypium hirsutum
cccacgcgtccgggccttaaagccggtgcaaccgcatctaaagttagcgccacagccaaggttgcggcctctccagtcccaaggggcagcatcaaggcctccctcaaagacgttggtgttgctgttggggcaactgctgcaagcgtaatccttgccagcaatgccatggccattgaagtcttgctcggcagtgacgatgggggtctggctttctttcccaaaaaattcaccgtaggcccaggg

SEQ ID NO: 223575 - DNA, 435 bp, Gossypium hirsutum
aaaaaagcagataggtagataggttgaactctcttttctccccttagaaccaaactttcaccgaccttcactttctgcctaccatgacggccaaggattgcggcaaccatggcaaaggccggcggcagctcatccgaaggctcttcggttgccttctagtcttcctccttatcgttctcatcacaatcctcatcatttgggcaatcctccgccccacaaaaccccgcttcatccttcaagacaccaccgtctatgctttcaacgcctccagtcccaatttcctcacttctaatttccaagtcaccgtatccacccgaaaccccaatgacagaatcgggatttactacgacaggctcgtcatctacgccacctaccggaaccaacaaaccacccttaggacagctctcccttcaacataccagggtcataatgaga

SEQ ID NO: 223576 - DNA, 396 bp, Gossypium hirsutum
gtacgcacaccattaaggctatttgtattgttcacaacgaaaccgcgactggagttaccaacaacttggccacagtgagaaaactactagatcattacgggcacccagcactgcttctcgtcgatggagtttcctcgatttgtgctctcgatttccgtatggatgaatggggagttgacgtagccttaaccggctcgcaaaaggcgctttctcttccaaccgggatcggtattgtttgcgctagcccgaaagctctcgaggcgaccaaaaccgcgaaatcagtccgggttttcttcgattggaacgattaccttaagttttacaaattaggaacattttggccttacactccttcaattcaactcttgtatggactaagagcagctttggacctta

SEQ ID NO: 223577 - DNA, 401 bp, Gossypium hirsutum
cccacgcgtccgcgacatcacttctcttgcaagcaatggtgggagagtgcaatgcatgcaggtgtggcctcctcttgggaagaagaagttcgagacactctcatacctccccgatcttacacccgtacagttggctaaggaagtagattaccttcttcgctctaaatggattccttgcttggaattcgaattagaggagggattcgtgcaccgtaagtactcgagcttacccacgtactacgatggacgctactggaccatgtggaaactgcccatgtttgggtgcactgactcggctcaggtgttggaggagcttgagaattgcaagaaggaataccccaatgcattcattagaatcattgggttcgacaacgttcgtcaagtgcagtgcattagtttca

SEQ ID NO: 223578 - DNA, 406 bp, Gossypium hirsutum
cggacgcgtgggcggacgcgtgggcggacgcgtgggcggacgcgtgggccgaggcaaaccggcaagcttaccgtacccttctcgtgtctgcccctggcctcggtaactacatctcgggagctatccttttcgaggagactctctaccaatctaccatcgatgggaaaaagatggtcgatgttcttgttgagcaaaatattgtccctggtatcaaagttgacaagggtttggttccactccctggttccaacaacgagtcatggtgccaaggtcttgacggtctttcatcccgcacagctgcctactaccagcagggtgctcgtttcgccaaatggcgtaccgttgtgagcattccaaatggtccatctgccttggcagtaaaagagcagcttggggacttgctcgc

SEQ ID NO: 223579 - DNA, 434 bp, Gossypium hirsutum
cccacgcgtccggacgacaggattacgagatctatcgccaccgccaaattcagtccccgcaacgcttcatccaaatatgacttcgtcaaggtgaaggtctggttgggtgataatgccgatcattattatgttttatccaggtttttgcttagcagaatgttaaccgtcacgaagattccgaatcatgttgcagttaaaatctctcttgagctcaagaagctgcttatagacaacagccttttggatatctcgcagtccgatttagaggctaatctttttaagctgatggagtggcgaggttatggacaggagtacataagccggtacaagatgatgaccagatttcaccatcagagagttcctttggtaattcttgtttgtggaactgcttgtgttgggaagtctactatagctacacaacttgcacagaggct

SEQ ID NO: 223580 - DNA, 421 bp, Gossypium hirsutum
cccacgcgtccgcccacgcgtccgcaccaacaaaatcagttgcttcacaatggcctctacaaccatggctctttcttccccatcattcgccggtaaggcagtgaagttctccccttccacccctgaaatccggggaactggccgtgtttccatgaggaaaaccaccaagcctgttccttctggtagcccatggtacggtcctgaccgagttttgtacttgggtccactttccggtgagccaccatcttacttgaccggtgagttccctggtgactatggttgggacactgctggactctcagctgatcccgagacctttgctaggaaccgtgagctcgaagtcattcactgcagatgggccatgttgggagctcttgggtgtgttttccctgagctgttggctaggaacggtgtcaagttc

SEQ ID NO: 223581 - DNA, 426 bp, Gossypium hirsutum
ccaggattgaagagataagattatagtgaaaaactaaacataataaagccccttcggcttgcttcattgatttgccctctcaaagcccaagaaaaatggcttctgcttccgctactctcctcaagtcttcacctattatcgacaagtccgagtggattaagggccaaaacctccgccacccttcggtttgttttgtacggtcacaccctacatcggccgcctttgccgtccgtgctagttcatatgccgatgagcttgttaagaccgcgaaaactgttgcatctccaggtcgtggtattttggccatggatgaatcaaatgctacatgtgggaaacggcttgcctcgattggtctcgagaataccgaggcaaaccggcaagcttaccgtacccttctcgtgtctgcccctggcctcggtgactaca

SEQ ID NO: 223582 - DNA, 394 bp, Gossypium hirsutum
ctttgtttgtagaagacagaagaagaagaagaagaagaagaagaaaaaaagggaacaaaagatggcaattcagattcctagagtgaaacttggaactcaaggatttgaggtttcaaagctgggatttgggtgtatgggtctttcaggtcacaataattcagtgtcagatgaagctggcatagccatcattaagcacgcattcgaaagaggaatcactcatttcgatacagccgacatgtacggacccaaaactaacgaaattctagttggaaaggcattgaagcatttgccacgagagaaggtacagttggctacaaaattcggtgttgaaagcatgggtccaagtggtccggttatcaatggcactcctgaaattttgtcgttctttacttga

SEQ ID NO: 223583 - DNA, 425 bp, Gossypium hirsutum
  unsure (1)..(425): unsure at all n locations
aaggctaccgattctcctcttccgactgttccaggctatgatgtancgggagtggtggtgaaagttggaagtcaagtgaaggagctaaaggaaggagatgaagtgtatggaaacataaatgagaaagcattagaagggccgagacagttcggttcccttgctcagtacactgctgttgaagagaagctgttggctttaaagcccaagaatctagatttttcccaagctgctggtctccctcttgctatcgaaaccgcctacgagggtcttgagcggaccggcttttcatccgggaaatccatccttgttttgaatggttctggtggtgttggaagcttagttattcagttagcaaaacaagtattcggtgcttcaaaagttgcggccacttccagtacttgaaaactggangtactgaagagctt

SEQ ID NO: 223584 - DNA, 381 bp, Gossypium hirsutum
atggcattttcccaacttatcgtgatagtccattgccagcagcatttaatcgtgttttacagtttggtgatgctagtggcatacaatcacctgtctcttttggtggtttcgggagcttgactaggcacctcggaagattatcaaatgggatttacgaagcaattgatggggattttctcgattcatacagtttgtccctgctgaatccttacatgcctaacttgagtgcttcatggttatttcaaagagcaatgtctgcaaagaaacagtctaatgttccaccggattttattaacgagcttcttgacataaacttcaagagtatggagaggcttggagaccctgtgctaagaccgtttcttcaggatgtcatacagtttg

SEQ ID NO: 223585 - DNA, 197 bp, Gossypium hirsutum
tcggggtcttgcttatgatatctccgatgacccacaagacattaccagagggaaagggttggtgggctcattttttcaagctcccatgaacgatggtactcactatgctgtcatgagctcctatgagtacattaacccaaggctttgcacataccacttggacaacaacatggatggattctacattgccccagctt

SEQ ID NO: 223586 - DNA, 372 bp, Gossypium hirsutum
gcaccttcgttttttttcctttttcacttccaaaaaggaaaaagaaaagcaaaaaaatggctcatcgtatggcgttttctctgtgtgtcatttcgtattttttattcatcggtttgatatcatcggaggctttctcggtcgtcggatcagaagttgatccgttgatcaggcaagtaacggacggtcaagatgatggagtggagacacagcccttgaccgctgagcatcacttctcgctgttcaaggctcggttcaagaaatcgtacggctcggaggaggagcatgattaccggttcaaggttttccgggcgaacttgagacgagcggagcgtcatcagaagcttgacccgtccgcgactcacggtgtgactc

SEQ ID NO: 223587 - DNA, 321 bp, Gossypium hirsutum
tccactcattcgtatgatgagtgccagagaattcgaatgtgagaacgccggataaccaaccaaggggatcaggcagaggtaccgcgtggtcaacaacattataaagaaagggataatgtttagcctttttatcaatgaactcgacgctggagccggacccatgggatgaaccacacactacacagtggacaaccaaatggtgaacaccacacttatgaacatcactgataaccacaccaacgttcagttcaccagggtgtacaacacggaagagaaccctattgttaccatcattgttacctggaaccatttctcgacgct

SEQ ID NO: 223588 - DNA, 404 bp, Gossypium hirsutum
cccacgcgtccgccaaatcttccaagagaacctgttcgatatgcttgacagccatgaaaccaggccaaggtcatgcaattttcactgcagaatgctcccattctttccacttccactgtataacttctaatgtaaaacatgggaatcagatttgtccggtttgcagagcaaaatggaaggaaatcccctttcagagtcctgcttcagatcttcccaatggaaggtctagaatcaacccagcagactggccccgggatgatgcgtggacaactgtggtacggcggctaccttcccctcggttggatccaactaggcagatttcttcactctttcatacttctgagccaggtacttttgatgatgacgaagtactagatctgcagcatgagacaactgaagaaaat

SEQ ID NO: 223589 - DNA, 340 bp, Gossypium hirsutum
gtcaaccctgttaaacgagaagctattgcaactcgcggtggcggattacgagttccgacagtcaatatacaggaaggagttggaggaagtgataaggtggtccaagaataagggtatgagcgacatgggatttggtcgagataaaactacatattgctactttgccattgcttccagcattccactgccatatgactctgaagtgaggatgataattacaaaaagtgcagttgtgataacagttgccgacgatttttatgataccgaagcttctttcgatgaactgaccacccttactcaagctattagaagatgggatgctgagggattgaatgggcac

SEQ ID NO: 223590 - DNA, 422 bp, Gossypium hirsutum
tttcaactctcaaaccttcaagtctcatttctttctttctctttctctcactagagaagccaagtttctgtgtggccacagagaaaataatttatgatggtgggaaaagatcaagatctgggtttaagtctaagcttgagttattctcaaaatcatcattcgcttcagttaaatctaggcccatctctcgttccatcttctgctaatcaatgctactctccttctgatccaaacatggaatctttacgggcagagactagatcatttcttaaagggatcgacgttaacaggctgccatccacggtcgattgtgaagaagaagccggagtttcatctccgaacagcaccatatcgagtagcctgagtgggaaaaggagcgaaagagaaggtaataacaatggcgacgagctcgagatcgaaag

SEQ ID NO: 223591 - DNA, 411 bp, Gossypium hirsutum
cccacgcgtccgcccacgcgtccgctaagatttcgtcgtttatatttctccatctggattgtgattgagctctctctcctttcgtcttaattggtttcactatgtcttcttatacccctaagaacatcctcataactggggcagctggttttattgcgtcacatattgctaaccggctcataaggaactacccggactacaagattgttgtgcttgacaagcttgattactgctcgaacctgaaaaacctccttccttccaagtcatctccgaactttaagtttgtgaaaggtgacattggtagtgctgaccttgttaactacctccttattaccgagtctatcgacacaataatgcactttgcagcccagactcatgttgataactcgtttggaaacagctttgagttta

SEQ ID NO: 223592 - DNA, 427 bp, Gossypium hirsutum
cccacgcgtccgcccaactggaaatagtttatggtgtctttggatacatgcaggtattgtcagcttgcttcatgtcattcgcccatggaggaaatgatgtctcaaatgcaatagggcctctagctggtgcattatcgattcttcaaggtggtgccagcagcgctgagatcgttatcccaaatgatgttcttgcatggggaggattcgggattgttgcagggcttttgatttgggggtatagagtgatagcaactattgggaagaagatcaccgaactcacaccaactagagggtttgcagctgagtttgcagctgcttcggtcgttctctttgcatcaaagctggcattgccgatctcagcaacccatactttggtcggagccgtcatgggagttggctttgcaaggggattaaatagtgttcgagc

SEQ ID NO: 223593 - DNA, 404 bp, Gossypium hirsutum
  unsure (1)..(404): unsure at all n locations
cccacgcgtncgatcacccccaaaaaacaaagcaaattgtagaagatggcaacacaagcacttgtatcatcgtctcttacctactcagtggagactgcaaggcagattcttggagctaaacgacaaattgggtcttcaaggaaaggatcctttgttgttaaggcagcttcgactccacccgttaagcaaggagctgatagacctttatggtttgcatctaaacaaagcctttcatacttggatggcagccttccaggtgattatggatttgaccccttgggactctcagacccctgaagtccaggagggttcatcgagcctaaatggctagcctacggtgagatcatcaacgggcgttatgctatgttgggtgcagtaagtgcgattgcccctgaaatacttgg

SEQ ID NO: 223594 - DNA, 424 bp, Gossypium hirsutum
  unsure (1)..(424): unsure at all n locations
ctaggttctcttattattggtctcattaaggctgctctttgctctctccttcccaacacaacggtagttattctggtttttagtggaggcgccggcngcggctgctgctgctgctgcngtggctgaaattcaacaaatctcgtaatccgacatggcgaccaaagggtttcgtttgtatctgctgtcgggttttttcgatagcagttctctctgttttggtcatccaaaaaagcaacaacgacgacatgaaccagagctcaaatctcttagagtccccatataatttatccaccactgaaaaaagttggcctgcattggagttgaactggaggcttgtaatggcgaccgtgatagggtttctaggatcaacatgtgggacggtggggcggcgttggcggcggcggcatttttgttccaatgctta

SEQ ID NO: 223595 - DNA, 436 bp, Gossypium hirsutum
tttaagtgtttcttagtagcctctgtgaagaacccaatcaaggaaaaaacaaaaaacccaactccaaatctgttcagagagagaaacactagaaacaaacaaacaagctcttatcaatgggggaggaagagaagaaacctgcagacgagaaaaaaacggaagagcaagtatctgaaaaagaaggaaagaaaggagatgaagaggaagtaaagcaggctgagaagccagttgaggaaaagaaagctgaagaatccaaggaagaaacgccgccgccttctccgcaagagattatcttgaaggtttacatgcattgtgaagggtgtgcacggaaagttcgccggtgcctcaagggctttcaaggggtcgaagatgtaatgactgattacaagagtaataaagttgtggtgaaaggagagaaaactgatcctttgaaagg

SEQ ID NO: 223596 - DNA, 424 bp, Gossypium hirsutum
gaaatataccagaaaatcaaaaagaagaagaaaagagatccccaagatgtctcttacaatggcaactaatctctcaaaatcaattttgaagccaaagctggagacccaagtgatccccaaggcttcatccagatcattgattgtatgctcctccagcaatccttcctccgacaaatcggcttcaccactccaggccttctcagcggctctggctctttcttccatccttctttcagctccactccctgctgttgccgacattgcggggctcactccttgcaaagagtccaagcaattcgccaagcgcgagaagcagcagatcaagaagctggaatcctcgttgaagctttacggccccgatagcgcaccggctctcgccatcaaagccaccatcgagaaaaccaagagacggttcgacaactac

SEQ ID NO: 223597 - DNA, 360 bp, Gossypium hirsutum
cccacgcgtccgcatttttgttctcttcaactttattgcataccaaaaaaacttacaacaatggcaacagcctcagttacctacactccacccatgttggctgctgccaccactaaccccaagaagaagaccaacaccaatgtgaattacataacaggcttgaattcttttggtgggttgaaagctcataacaaagtggtctcactaggccaacgtgtatgcaccgagcaatcatttgcaaacgttgttagctcactcaaagctccgacaaagggcaagacaggtaaaagcagcggcggtgcactgtcttcaacctgtaatgctgttggtgagatattcaggattgcagcaatcatgaat

SEQ ID NO: 223598 - DNA, 416 bp, Gossypium hirsutum
  unsure (1)..(416): unsure at all n locations
cttttgtataactgtagcatatagtactagttttctgtaatagcaatggcctcctccatgatctcatcggcaaccattgccaccgtgaactgctccttcccgggacaggccaacatggtggcccccttcaccggcctcaagtctgcctctgctttcccagtcactaggaaggccaacaacgacatcacttctcttgcaagcaatggtgggagagtgcaatgcatgcaggtgtggcctcctcttgggaagaagaagttcgagacactctcataccttcccgatcttacacccgtacagntggctaatgaagtagattaccttcttcgctctaaatggattccttgcttggaattcgaattagaggagggattcgtgcaccggaagtacttgagcctacccacgtactacgatggacg

SEQ ID NO: 223599 - DNA, 420 bp, Gossypium hirsutum
ctgatatagagggaatgaagacaaaggtgatgatatgggtaaaagtaaccagtatcacttgtgaaggatctaagatctatgtcacggccggaatgaagaaaagcaggaatagagaggcgtacgaggtttccagggatggagtaagtgtagataagttttaaagtggttaggatgccttggagatcctatttcttttaacttttaactctgaaccttcatacttttgtgtccataataagttttaggattcaagtgcaaagaccggtcaactttatggtttctattgtgataaggcttttattctgttctactatgttgaaggtgtctggccaaatatatatataatgaaagtggcaatgcatgaaccttgtgattaagatattataaattgtatggaaggtgctttagaggatctgcagt

SEQ ID NO: 223600 - DNA, 419 bp, Gossypium hirsutum
ctcttttgtatacctgtagcatatagtaatagtaagcagtaatagcaatggcctcctccatgatctcatcggcaaccattgccaccgtgaaccgctcctccccggcacaggccaacatggtggcccccttcaccggcctcaaatctgcctctgctttcccagtcaccaggaaggccaacaacgacatcacttctcttgcaagcaacggtgggagagtgcaatgcatgcaggtgtggccgcctcttgggaagaagaagttcgagactctctcatacctgcccgatcttactcccgtacagttggctaaggaagtagattaccttcttcgctctaaatggattccttgcttggaattcgaattagaggagggattcgtgcaccgtaagtactcgagcttacccacgtactacgatggacgc

SEQ ID NO: 223601 - DNA, 355 bp, Gossypium hirsutum
attggaacgattaccttaagttttacaaattattgaacattttggccttacactccttcaagtcaactcttgtatggactaagagcagctttggaccttatttttgaggaaggacttgacaatgtcattgaaaggcatagtcgtttaggcaaagcaacaaggcttgcagtggaagcatggggcttgaagaattgcacacaaaaggaggaatggttcattgacacggtgacggcggtgcttgttccaccatatattgatagttcggaaatcgtttaacgggcattgaagagatacaatatgagcttaagtcttgggcttaacaaagtggcaggaaaaagttttagaataggacatt

SEQ ID NO: 223602 - DNA, 232 bp, Gossypium hirsutum
attccccaaaatttgtttcagtaatggctgccttagctttggcttcttcagttaccctcaggcctttattcaatgttgagaaacctggcgtaagaggggtttcttcccttgctaggtccctttcttctttcaaggtagaagccagtggtggcaataatatctataccgacatgccttacggaatcaatggttgtttcatcttgagggacggtgtttatgcctattggaacga

SEQ ID NO: 223603 - DNA, 381 bp, Gossypium hirsutum
tttctcttgctctctcgtaaaaaacattccttataaatcctctagatctctttttacctttgagtaactctaggttattccgctttgccctaaatggagagggagctgctgcatttgttcgacgccgccaaaaaagctgccgatttggccgccttcgacgccgttttctccaacgcccctgaaagtttcagatgcgttgacgccttgaaccaccttaaggaattccccgtcacttatgacactcttgtttctacacaggttggaaaaaagctgcgacctcttactaagcatcctagagagaaaatcaagactgtggcttttgacttgctttgagtgtggaagaaaattgttattgtggagactaccaagagtaagaaaaat

SEQ ID NO: 223604 - DNA, 434 bp, Gossypium hirsutum
cccacccgtccgcccacgcgtccgaacaacgttgttcgaaacgatcaacccgggattgtcaggattggaagtctttttctcttttcttcagaacagggatttcctcgttcgcaacaacggggatcaggttaaaatcgatagcttgaaggggaagaaggttggattgtatttctcagcatcttggtgcggtccatgccgtagattcaccccaaatttaatcgaagtgtacaccgagctctcaacgaaaggcgatttcgaggtcatttttattctcgcagatgaagatgaagagtcattcaatggttacttcttcaagatgccatggctggcaatccctttttctgaatcagaggcacgcaagcgcttagatgaaccgtacagtgtgaagggaatacctcacctcgtgctcttggatgaaaatggtaaagtcttga

SEQ ID NO: 223605 - DNA, 423 bp, Gossypium hirsutum
cccacgcgtccgcccacgcgtccgcccacgcgtccgcttgctcacacccaatgtcgcagcgaattcaagctccacttctaagaccaccaccgtgtttttcccttcaaagaacaacaacaattccaggcttgtggtgacgagggcagctgacgaggctgctgcaccagcaccagctaccaccactgcagcatcagaaggcggtgaagcccctaaacctaagccaccaccaattggaccaaaaagaggaaccagggtcaagattcttagaagagagtcctactggtacaacagctttgggtcagttgttacagtcgaccaggaccctaagactcggtatccagtggtggttcgattcaacaaagttaattacgccaatggatcaaccaacaactatgccttggatgagattgcagaagttaactg

SEQ ID NO: 223606 - DNA, 400 bp, Gossypium hirsutum
cccacgcgtccgcccacgcgtccgcccacgcgtccgatagttcgtaacaatgtcgggctcacttcaagctgcagctaccctgatgcaaccaatcaaggttgctgcaccatcaaggaccaatgtgctgctcaggtcctcccagagcgtttctaaggccttcggtttggagcctgttggtgctaggctcacctgctctttgcaaactgacctcaaggacttggctcagacgtgtgttgatgctaccaagctcgctggtttcgctcttgctacatctgctcttgttgtctcgggagcaagcgctgaaggagtttcaaagcggttaacctacgatgaaattcaaagcatgacattcatggaagtttaaggaacacgaactgtttaccagtgcccaaccatcgat

SEQ ID NO: 223607 - DNA, 426 bp, Gossypium hirsutum
cccacgcgtccgcccacgcgtccgcccacgcgtccgaaaaaaatcaattcctctcagagctcactagagatcttctctgttaaccatggcggctaacggatttgtaggagatgaacgcaaagttcaaaagaattactggattgaacactcggttgatcttacggtggaggctatgatgctcgactccaaagccgctgatattgacaaagaggaacgtcccgaagtgctctccttactcccaccgtatgaagggaaaaccattttggaactaggagctggcattggtcgatttactggtgacttagctaagaaggctggtcatgttatagcattagacttcattgagaatgttataaagaagaatgaaaccatcaatgggcattataagaacgtcaaattcctctgtgcggatgtcacttcccctga

SEQ ID NO: 223608 - DNA, 431 bp, Gossypium hirsutum
cccactccctcctttcctttctccctccccaaacacactttaacctcatatgcggtgtcccttacactgccctccctatagccacctccatctctctcgacacctccatccccatgctcatgcgccgcaaagaagtgaaagactacggaactgccaagtccatcgaaggtgtttacgaaaagggtcaagcttgtttggtggtggaagacctcgtaacgtccggtgcatcggttctcgaaacggcggcaccgcttcggtctttgggtatcaacgtaacggatgccgtcgtggttatagatagggagcaaggcgggagggaaacgctggaggagaatgggattaaacttcatgcactttttactttaactgagatggtcaaggttttaagagctaaagggaagctggaggaagagatggaaagtttggttatg

SEQ ID NO: 223609 - DNA, 411 bp, Gossypium hirsutum
cccacgcgttcgaaaaaaaaaagaatttattgcttcttccatggctatctttggggagggtgtttccatccttcccatctccgccgtcatcttcctcctcctccgagcttatcgtctccggcgcctccgtctaccgccgggaaacttgggtttacctttcgtcggggagactttacagcttatatctgcttacaagaccgaaaaccccgagccgtttattgatgaaagggcgaaacggcacggttcagtatttacgacccacgtgttcggtgagccgactgtgtattcagccgatccggagacgaaccggttcatcttacaaaacgaagggaagctgttcgagtgtacctacccccggtcgatttcgaatttgctggggaaacattctttgctttggatgaaaggaaacct

SEQ ID NO: 223610 - DNA, 411 bp, Gossypium hirsutum
cccacgcgtccgccggcttctgcctcacttccaactccacctctccttctaactcactccggcaacccacattgcggcggccgtctatcgtcgccaacctcaactcttccacttctcctcctactctcattcgaaatcaacccgttttcgcagcacctactcctttgctcactccttccaattggaaagaaaacatgggagaccagtcatacgaggaagccattgaagctctcaagaaactgctcaatgagaaaggagaattgaagagtgcagcgacggcaaaggtagagcaagtgacagctgagttgaagactgctgcttcttccgatgagtctgttgaccgcttgaaacaaggcttcatttacttcaagactgaaaaatacgaaaagaatcctgctctgtatggtgagc

SEQ ID NO: 223611 - DNA, 426 bp, Gossypium hirsutum
  unsure (1)..(426): unsure at all n locations
cccacccttccggtttaacttggaggttccttctggtgggaaggtcctttgggcccttggttattcggccaaaattcaaaagaattctggtggaatggaaccaggcggcttttttaccactggttctttcaaggaagcctgttgcccacccaaaaaaacttaacccaagggctgacccaagaaagaagcccaaaaggggggttggaaaacagcagcaaaagcagaggcccgttgagaggaggaggcaccaaaagcccaacccaagaatcctcttgatttgctggcttcaagtagatggtactggatgacttgaaaaggctttactctaacacnaagaccaatttccgagaggttgcaattaaaggattctgggacatgtatgatcccgagggatactcactgtggttttgtgactacaagtacaat

SEQ ID NO: 223612 - DNA, 420 bp, Gossypium hirsutum
cttatcccattcactgagtctcaacaccgagttatcatcactcatggctatcgaggcttggtttatggatgaaagcaaagaagaccaaaggctttctcatcgacgcaaccccaacgaacctgtttcgttggagcacttggcagagctgggagtgttgtattggcatttgaaccccaaggattacgagaacgatgaagagttgaagaagattatagaagccagaggttataattacatggatttgcttgatttatgccctgagaaagttgacaactatgaggagaaactgaggaacttttacaccgagcacatccatgctgacgaaaagatacgctactgcctggaaggcagtgggtattttgatgttagggacaaggatgaccgatggatttcgatttggatcaaaggaagagatcttat

SEQ ID NO: 223613 - DNA, 370 bp, Gossypium hirsutum
gccaaccccaacaccaaccatatgctcagctttcttagtcccaagccagtcccgatgaaacagatgggttctccaccgaaacccaccaagctctacaggggagttaggcaacgtcactggggaaaatgggtcgctgagatccggctacctaagaaccggacacgtctttggttaggcactttcgatacagccgaggaagcagccttggcttatgataaagcagcctataaacttaggggtgattttgcgagactcaactttcctaaccttcgtcaccaaagttcccatatcggtggcgacttcggtgaatacaagcctttgcatttctctgttgatgctaagcttcaagctatctgtgaaagtttggaac

SEQ ID NO: 223614 - DNA, 424 bp, Gossypium hirsutum
aaacaactctctcttctttgttttccaatagttcgtaacaatggcggtctcacttcaagctgcagctaccctgatgcaaccaatcaaggttgctgcaccatcaaggaccaatgtgccgctcaggtcctcccagagcgtttctaaggccttcggtttggagcctgttggtgctaggcttacctgctctttgcaaactgacctcaaggacttggctctgaagtgtgttgatgctaccaagctcgctggtttcgctcttgctacatctgctcttgttgtctcgggagcaagcgctgaaggagtttcaaagcggctaacctacgctgaaattcaaagcaagacatacatggaagtcaaaggaacaggaactgctaaccagtgcccaaccatcgatggtggtgtcgactcttttgccttcaagcctggc

SEQ ID NO: 223615 - DNA, 425 bp, Gossypium hirsutum
gccaccaaaaagaaaaacagaaaacaattcttaagtaaccgcttaggaaccttcactcttcagagcatccattgttatccccaagtagctttagtactctaccaccgaaatccaacccttaaaacaataccatttgcagagtggaaatgggcatctacgccatggattttgcactcaaattcaaccattctattttctctactccatacccacctaaaccttcacccaaatgtagatttctaaccgcaagatgctccctccctctctcctctgacggtgccgccactgggttggcagagaggccatggaaggtagcggatgctaggctggttcttgaagatggttctatttggagggccaaattttttggtgcctctggtacccaagttggcgaagtggttttcaacactttttttaacagggta

SEQ ID NO: 223616 - DNA, 421 bp, Gossypium hirsutum
cccacgcgtccgtcatttcaaagattcttttataacagtgagggagtagtagttcgagttgtcgacgacgttttttttcaacacgaaaaaaaatggataacttttacgcaccagggaagaaccatctcttcggtccgggtccggttaacataccggaacccgttattcgagccatgaaccggaacaacgaggattaccgttccccggctattccggcgatgacaaaaacccttctcgaagatgtcaagaagatatttaagactacgaccgggactccttttatgatcccaacaacaggaaccggtgcatgggagagtgcacttactaatacgttatcccccggtgaccgaatcgtatcgtttctcattggacaattcagtcttttttggatcgatcaacaacaacggtctaaattcaacgt

SEQ ID NO: 223617 - DNA, 417 bp, Gossypium hirsutum
attgaaaccctcaaaattccacttaaaaaatggcctccacagcttccctctccaccgccgtagccaccacctctttcctccgcggccacccggccccgaaaaccctaagctcccttcctttcaaccaatctcttttcgggctaaaaccccaacgaaatggccgtctcaccatggctgcatacaaagtgacactgttaacacccgaaggaccccaagaattcgtgtgccccgacgacgtttacatcgttgaccaagctgaggaagaaggcattgatcttccgttctcgtgtagggctgggtcttgttcttcgtgtgccggaatgattaagcaaggctccgtcgatcaatccgacggtaatttccttgatgatgaccagattgctgcaggttttgtcctcacttgtgttgcttaccctc

SEQ ID NO: 223618 - DNA, 366 bp, Gossypium hirsutum
ccggaacggaagggccgggccgagcgacccgtcccgcgagcgccgccattgtttatatctctttcaacaacaacaacttggtcattttctgacacgagagaatatgatgcaaatccacttaaaacacaaaaggtaaacaacttttaattaagacacaaaggggggattagctttgtttgggcccaatgtagatttttttcttaccttagagctgaattgcccctttataaagctcctcttttgatagcatccgcattagcatttccaagggcggctgtactcaaatatttgtcagccaattgaaccctgttcacattttcttgctcaacaccaagcatgtatccatattccaacagctgcttaatg

SEQ ID NO: 223619 - DNA, 420 bp, Gossypium hirsutum
tcaaagtccaatcactcccaatactttcataacatttcacgaacttcactctccagtctccaatggcggctgccgtctccaccatcggtgctgtcaaccgagcaccgttgagtttgaatggatcaggtgccggagcttctgctccaagctcagctttcatggggaacagcttgaagaaagtgagcgctaggttcaacaacaacggcaaggctccagtgggaagtttcatgattgtggctgccaaagaaatcgacgaagacacacagaccgaccaggaccgatggaagggtcttgcttatgatatctgcgatgaccaacaagacattaccagagggaaaggtatggtcgactcattgatccaagctcccatgaacgatggtactcactatgctgtcatgagctcctatgagtacattagcc

SEQ ID NO: 223620 - DNA, 408 bp, Gossypium hirsutum
  unsure (1)..(408): unsure at all n locations
cccacgcgtncgcccacgcgttcgcccacgcgttcgatttactcagtacttggtgggtcaaatgggaagggaatacatgataaccagcaggaagcatgtgagtgcttggtgggatgatattagtagcagaccggtctggcagaaggttctccagctctatgctcctcctttctaagaattgaaaatgatgcaatctggggatgggatctttgcaatgatgtctgctttgtggtttaacagtttggattggtttggggtctggtctttgtttgaagaggccaactagttatcctatgttagttatagttcaataaaatgttgatacgggtagggggccgggttacagttatccctgtgtttgcctatgtttgatggtatgaataaagaagaaaaaatcatggagatttc

SEQ ID NO: 223621 - DNA, 369 bp, Gossypium hirsutum
gccgcctgcgtctctctcttcatctctctgaaccaaaaagactttagcttttcgctgcgagagagaccatgttggtttaccaggatctcatctccggtgacgagcttctttctgactcattcccctacaaggaaatcgagaatgggatgctgtgggaagttgagggaaagtgggttgtgcaaggagctgtcgatgttgacattggtgccaatccttcagccgaaggtgctgatgaggatgaaggtgttgacgaccaagctgtgaaggttgttgacattgttgacactttcacgctttatgagcaaccccctttcgacaagaagcagtttgttgtgttcatcaagaagttcatcaagaacttgtcaccaa

SEQ ID NO: 223622 - DNA, 423 bp, Gossypium hirsutum
ctcaacattcccatttccaatctccagctcccaaggaaaatatgccgatcagaaacatagcggttggccggcccgaagaggctactcaccccgatgctctcaaggctgctttggctgagttcatctcagccttgatcttcgttttcgctggatcgggctcaggaatggcctttaacaagttgactgacaacggagcaaccaccccggctggtctcgtagccgccgctctagctcatggcttcggtcttttcgttgctggctccgttggcgccaacatcttaggtgggcacgtcaaccctgccgtcaccttcggtgcttttgttggcgggaacattactctcttgcgcggcattctttactggatcgcccaactcctaggctcaaccgtcggttgcctgttgcttaagctcgctaccggcgacc

SEQ ID NO: 223623 - DNA, 339 bp, Gossypium hirsutum
cccacgcgtccgcccacgcgtccgaaaatgtgttgcctcttcatcaacgatctcgacgctggagccggtcgtatgggaggaaccacacaatacacagtgaacaaccaaatggtgaacgccacactcatgaacatcgctgataaccccaccaacgttcagctccccggtatgtacaacaaggaagagaaccctcgtgttccgatcatcgtcaccggtaacggatttttcgacgctgtacgcgcttctcatccgtgacggtcgaatggagaagtttttactgggcacccaccagggaaaaataggatcggtgtttggcacaaggtatttttcaaggaaccg

SEQ ID NO: 223624 - DNA, 422 bp, Gossypium hirsutum
tttagctatagcatacactactagtacccactactagcaatggcttcctcaatgatctcatcggctaccattgccactgcctctccggcacaggctaacatggtcgctcctttcaccggcctcaagtctgcctctgctttcccagtcaccaggaaggccaacaacgacattacttctctcgcaagcaatggcggcagagtgcaatgcatgcaggtgtggcctcctactggaaagaagaagttcgagactctctcatacctccccgatcttacacccgtgcagttggctaaggaagtggattaccttcttcgctcaaaatgggttccttgcttggaattcgaattagaggagggattcgtgcaccgtaaatactcgagcctacccacgtactacgatggacgctactggaccatgtggaagct

SEQ ID NO: 223625 - DNA, 380 bp, Gossypium hirsutum
  unsure (1)..(380): unsure at all n locations
cccacgcgtncgcccacgcgtccgctctgtcagaattgaagagaaacctccaacctccacaaccaccaccaaaacatcacatccaccaccaccccaatctcctaaagcttggcctccaccagcgccatcctatgcttctccatcagttggagccaagaaaagagtagaaccaaggctgtccaccatgatcttcaatacatttgacgatattataaacaacttcatagaccctccactcaggccttctgtcgaccccaagcatgtcctgtcccacaacttcgctcctgttgatgagcttcctcctacaccctgtgaagttatacaaggatccctcccgccttgccttgacggtgcatacattcgtaatggccccaaccctc

SEQ ID NO: 223626 - DNA, 439 bp, Gossypium hirsutum
cccacgcgtccggccacgcgtgcgatctgtcagaatggaacagaaacctccaacctacgcaaccaccaccaaaacatcacatccaccaccaccccaatatcctaaagcttggcctccaccagcgccatcctatgcttctccatcagctggagccaagaaaagagtcgaaccaaggctgtccaccatgatcttcaatacatttgacgatattataaacaacttcatagaccctccactcaggccttctgtcgaccccaagcatgtcctgtcccacaacttcgctcctgttgatgagctttctcctacaccctgtgaagttatacaaggatccctcccgccttgccttgacggcgcatacattcgtaatggccccaaccctcagttcctccctcgtggaccttaccacctcttcgatggtgatggtatgcttcactccatt

SEQ ID NO: 223627 - DNA, 422 bp, Gossypium hirsutum
cggacgcgtgggcggacgcgtgggcggacgcgtgggttccattccttttctctctctgtagcaatggagtcgcgattgttatcacgcgcttctgttatcaccggcttacctcagctcaggccgaagctttcgccagggattgtcaacgtttcgtttgcttcggctaagccgatcggagccgtcggtgaaggcgggaacctcatatgggggaggcaactaaggccctccttgctactagaatgctcgtcggttagcaagccagaggtcctgaaaccggtttcggctgccgcgtcgtcaccggccgagggaggaagcgattccgccggggatgggaagattgctccggttggattcttcgagaagtttcccgctcttgataccggatgtttcttcttcatgtggtacttcgtgaatgtaatatt

SEQ ID NO: 223628 - DNA, 418 bp, Gossypium hirsutum
gttagctatagcatacactactagtacccactactagcaatggcttcctcaatgagctgatcggctaccattgccactgcctctccggcacaggctaacatggacgctcctttcaccggcctcaagtctgcctctgctttcccagtcattaggaaggccaacaacgacattacttctctcacaagcaatggcggctgagtgcaatgcatgcacgtgtggcctcctactggaaagaagaagctcgagactctctcatacctccccgatcttacacccgtgcagtttgctaaggaagcagactaccttcttcggtcaaaatgggttccttgcttggaattcaaattatacgagggattcgtgcaccgtaaatacttcagcctacccacatgctatgatggacgctactggaccatgtgga

SEQ ID NO: 223629 - DNA, 428 bp, Gossypium hirsutum
  unsure (1)..(428): unsure at all n locations
nncgcccacccgtccggccgctaatctgcttctcttctccttctcttgcctttccaggttccaaactctgagtcttcctctagctcctatcctttaacaggaaatggcagtcacattcaacgacttgggttctgctgccggcttgaagaagctcgatgagtatctcctcactcgcagttacatctctgggtaccaagcttcaaaggatgatatcaccgtctacacagctctatctggggccccatcgtctagctatctgaatgtttctcgatggtacaaacacatcgatgcccttttgaggatcttaggtgtttctgaagaaggctgtggtgtgactgttgagggatttgctcccgctgaggctgtggccactcctccaactgcagattcaaaggctgcagctgctgaggatgacgaaaatgatgatg

SEQ ID NO: 223630 - DNA, 419 bp, Gossypium hirsutum
atcaaagtccaatcactcccaatactttcataacatttcacgaacttcactctccagtctgcaatggcggctgccgtctccaccatcggtgctgtcaaccgagcaccgttgagtttgaatggatcaggtgccggagcttctgctccaagctcagctttcatggggaacagcttgaagaaagtgagcgctaggttcaacaacaacggcaaggctccagtgggaagtttcatgattgtggctgccaaagaaatcgacgaagacacacagaccgaccaggaccgatggaagggtcttgcttatgatatctccgatgaccaacaagacattaccagagggaaaggtatggtcgactcattgttccaagctcccatgaacgatggtactcactatgctgtcatgagctcctatgagtacattag

SEQ ID NO: 223631 - DNA, 437 bp, Gossypium hirsutum
  unsure (1)..(437): unsure at all n locations
gtaatagcaatggcctcctccatgatctcatcggcaaccattgccaccgtgaaccggtcctccccggcacaggccaacatggtgngcccccttcaccgggcctcaaatctgcctctgctttcccagtcaccaggaaggccaacaacgacatcacttctcttgcaagcaacggtgggagagtgcaatgcatgcaggtgtggccgcctcttgggaagaagaagttcgagactctctcatacctgcccgatcttactcccgtacagttggctaaggaagtagattaccttcttcgctctaaatggattccttgcttggaattcgaattagaggagggattcgtgcaccgtaagtactcgagcttacccacgtactacgatggacgctactggaccatgtggaaactgcccatgttcgggtgcaccgactcggctcaggtg

SEQ ID NO: 223632 - DNA, 260 bp, Gossypium hirsutum
  unsure (1)..(260): unsure at all n locations
cccacgcgtccgntgagagataagagaaagcactgaaaacgcaaaaccatggcctctgcttctctgctcaagacttcaccagttttagacaagtctgagtgggttaagggtcacacccttcgccaaccttccacttctgcggtgaggtgccaccctgttgcaccctctggactaactgtgcgtgcaagctcatatgccgatgagcttgtcaagactgctaaagctattgcttctcctggccgnggaattttggccatgga

SEQ ID NO: 223633 - DNA, 375 bp, Gossypium hirsutum
  unsure (1)..(375): unsure at all n locations
tttgaattgaaaccctcaaaattccactaaaaaatggtctccacagnttccttctccaccgccgtggccaccacctctttcctgcggggccatccggcgccgaaaaccctaaactcccttccctttcaaccaatctcttttcgggctaaaaccccaacgaaatggccgtctcaccatggcagcatacaaagtgacactgttaacacccgaaggaccccaagaattcgtgtgccccgacgacgtatacatcgttgaccaagctgaggaagaaggcatngatcttccgttctcgtgtagggctgggtctggttcttcgtgtgccggagtgattaagcaaggctccgtcgatcaatccgacggtaatttccttgatga

SEQ ID NO: 223634 - DNA, 437 bp, Gossypium hirsutum
taagagaaagcactgaaaacgcaaaaccatggcctctgcttctctcctcaagacttcaccagttttagacaagtctgagtgggttaagggtcacacccttcgccaaccttccacttctgcggtgaggtgccaccctgttgcaccctctggactaactgtgcgtgcaagctcatatgccgatgagcttgtcaagactgctaaagctattgcttctcctggccgtggaattttggccatggatgagtccaacgctacctgtgggaaacgtttggcctcaatcgggctagaaaacacagaggctaaccgccaagcctacaggacgttgcttgtttcagctcctggccttggtcagtacatctctggtgccatcctctttgaggaaaccctctatcaaaccacaattgatggcaagaagatggttgatgttcttgttgagc

SEQ ID NO: 223635 - DNA, 438 bp, Gossypium hirsutum
ctaaattcaccatgtcttctactttcagcggcgatgaaacggctcccttcttcggcttcctcggcgccgccgccgctctcgtcttctcctgtatgggagctgcatatgggacggctaagagcggtgtgggtgtggcttcaatgggtgtgatgaggcctgagttggtgatgaaatccattgttccagttgttatggctggtgttttgggtatttatgggttgattattgctgttattattagtactggcatcaatccaaaggccaaatcgtattatctttttgatggctatgctcatctttcctctggtcttgcttgtggacttgctgggctttcagctggaatggcaattggaattgttggtgatgctggtgtcagagctaatgcacagcagccaaaactttttgttggaatgatcctgatcctcatctttgctgaag

SEQ ID NO: 223636 - DNA, 433 bp, Gossypium hirsutum
atccgacgaaattgccgtgaaggaagaatgggaaggtggagtcaattcgtggttgcggtgactattctggcggtgggcctcctttcggcatcagccaccgctagaccctgcaagacattcttcgtcgcctcctattctttctcttttgaaaaccctaacgacccttcttcctccaccggattcgtcaccgtcttcaccgagatcggtcaattgaacgtcgtaccaccaagacccaagccctccgatgtcttgagctctctccgtgagcgcagtaaggacatccttagcgtggtcgtcgctcttctcttcggcgtcggtagcggcgctctcacggcggctaccctctacttggtctggaccctcttctcggcccggtctgattatcatcgtgcttgtttggaggatgatgagagcgacggagaacttagcccta

SEQ ID NO: 223637 - DNA, 438 bp, Gossypium hirsutum
atggctttggctcccaccacttatccctcctatctctgctctaacacttgctcacccttacacagagccaggggagctttcctttcttcaaccaggcatgtaggagttagattcaacagcaagtgttcagcgtctttctgcagtggcaaggagcagctaaagccatggattttggtagcgaaagcattggaaggtgagtcccaaaccacagagcaggaagagcagcagtacgaggagtatgaggtagagattgagcagccttatgggctcaaattcagaaaaggcacagatggtgggacttacattgatgctattcagcctggtggagctgctgacaaggctgtggttttcaccgttggggacaaagtacttgccaccagtgcagtgtttggaacagaaatattgccggccgccgaatatgggaggacaatgtacacc

SEQ ID NO: 223638 - DNA, 433 bp, Gossypium hirsutum
cccacgcgtccgcttttttgctttcagttaacatcaaaatccgtaaatggctaccactgcttctccaatggcgactcagctgaagagcagctttaggtcgtctgttacaagaggactggtagtccccaggggcatttcgggatccccgtttaaagtatcttccggaaagaccaggaccccttgcttcactgtcaaagctgttcaatccgacaagtcaacatttcaagtaatccaacccatcaacggcgaccccttcattggaagcctggagactccaatcacctcaagccccttaattgcatggtacctttccaacctcccagcctataggacggcagtgaacccacttctgaggggaatcgaagtgggtctggctcacggcttcctcctggttggtccattcgtaaaggccggccctctaaggaacactgcg

SEQ ID NO: 223639 - DNA, 429 bp, Gossypium hirsutum
cttttgttagaaagacgttagcagcggcaaaatttgaacgttactcttaaggaaggataatgctatccttgcgcttcgctattcctaccgcaaatacattaactccacccaagactaaaccgaaaccgggtttagtagtacaaaccgcttggaaccaaacggacctttttccttctcttcccaaacgatatgattataagctacaagcagctaccacggacttatctgtggagggagatataccggcggaggaggtggtggagctgccggcggagctgcgcagagagttgatgccgaagcacgtagcggtgataatggacgggaacgggcggtgggctcggcagcggggattggcgacatcagcaggacacgaagccggtgtaaaggcgttgagggagctgatcgaactatgttgccagtgtgggatcc

SEQ ID NO: 223640 - DNA, 436 bp, Gossypium hirsutum
  unsure (1)..(436): unsure at all n locations
cccacgcgtccggagataagagaaagcactgaaaaagcaaaaccatggcctctgcttctctcctcaagacttcaccagttttagacaagtctgagtgggttaagggtcacacccttcgccaaccttccacttctgtggtgaggtgccaccctgttgcaccctccggactaactgtgcgtgcaagctcatatgccgatgagcttgtcaagactgctaaagctattgcttctcctggccgtggaattttggccatggatgagtccaacgctacctgtgggaaacgtttggcctcaatcgggctagaaaacacggaggctaaccgccaagcctacaggacgttgcttgtttcagctcctggccttggtcagtacatctcaggtgccatcctctntgaggaaaccctctatcaaaccacaattgatggcaagaagatggt

SEQ ID NO: 223641 - DNA, 236 bp, Gossypium hirsutum
ctcagctgaagagcagctttaggtcgtctgttacaagaggactggtagtccccaggggcatgtcgggatccccgtttaaagtatcttccggaaagaccaggaccccttgcttcactgtcaaagctgttcaatccgacaagtcaacatttcaagtaatccaacccatcaacggcgaccccttcattggaagcctggagactccaatcacctcaagccccttaattgcatggtacctt

SEQ ID NO: 223642 - DNA, 440 bp, Gossypium hirsutum
cggacgcgtgggaagaagagctgctatgctgtatttgtcagctacccttttcaccacagcggctgcttcttctgcaaatgctggggtcattgatgattaccttgaaaagagcaaagctaacaaggagttgaatgacaagaagaggttggccacaagtggagcaaactttgcaagagcatacactgttcaatttggcacctgcaagttccctgagaactttacaggatgccaggatcttgcaaaacagaagaaagtaccattcatctctgatgacttggccttggagtgtgaagggaaggacaaatacaagtgcggttccaatgttttctggaaatggtgaagacatcccaatgtaattttctcaattttctctgtattgttgtgctatttagtgaaacaccctgaaaatgttgtggtatttgttgataaacagaagtatg

SEQ ID NO: 223643 - DNA, 434 bp, Gossypium hirsutum
gctctctttagagtaaatttcttttgcaatcctttgtagagctccgggatccattgtcaccatgtcttgctcaaatctgacaatgtgggtgtcctcaaaaccctctctttctgacacttcttcactctctttccgttctttcatcagcccttttcagctcccatctcagagctcaacccccggtaacccttccaggtcctcatctgtaaccccagttcactgtggtcttcgtgagcttagagaccgtattgattcagtaaagaacacgcagaagatcactgaagccatgaaacttgtggctgctgctaaagttaggagagcacaagaagctgttgtcaatggcagacctttctctgagtccctggttgaagttctttacaacatcaatgaacagctccagactgaagacatagatgctcctctcacaaacgtca

SEQ ID NO: 223644 - DNA, 373 bp, Gossypium hirsutum
  unsure (1)..(373): unsure at all n locations
tcgnccacttttattattattttttctcaattaattttaaaaccccttaatggggtcccctgggggttcaattgtgactcaactgaagaacaacttaatgtcgtctgcatacaaaaggacttgtaaaccccaggggcatttcgggatccccgtttaaagtatcttccggaaagaccaggacccctagcttcactgtcaaagctgttcaatccgacaagtcaacatttcaagtaattcaacccatcaacgtcgaccccttcattggaagcctggagactccaatcacctcaagccccttaattgcatggtacctttccaacctcccagcctatatgacggcagtgaacccacttttgaggggaatcgaagtggg

SEQ ID NO: 223645 - DNA, 411 bp, Gossypium hirsutum
  unsure (1)..(411): unsure at all n locations
cccacgcgtccggtaggtatgactctggaggatttcttgacgaaagctggggcggttagggaagaggatgtcaggggagttgttaatcangtgggagtaggtgcaggggtttatcctgttgacccggccgttatcaacggtggtggaaatcatttttcggcgttcggaaacagcggtggcgttgatcatcataggttggtggcggtggcaggtggaggcgctagaggaaagcgacgcgccgtggaggcaccgcctttggataaagcgactcagcagaaacagaggcggatgataaaaaacagagaatctgcagctagatccagagaacgcaaacatgcttatacggttgaattggaatcactggtgacacaattggaagaagaaaaagcccggttgctgagagaagaggct

SEQ ID NO: 223646 - DNA, 331 bp, Gossypium hirsutum
cccacgcgtccgaatctcttctctcttgcttttcgtcttgcgttcttttgatatggcaggaaccggggtggttgcagtttatggaaacggggctataaccgagactcacaaatcccctttctcggtgaaagtggggctagcccaaatgctccgaggcggagttataatggacgtggtcactcccgatcaagctcgcatcgctgaagaagccggagcctgcgccgtcatggctctcgaacgagtccccgccgatatccgagcccaaggcggcgtggctcgaatgagtgacccacatctcatcaaagagattaagcaatccgtttctatacct

SEQ ID NO: 223647 - DNA, 384 bp, Gossypium hirsutum
  unsure (1)..(384): unsure at all n locations
attggcaccatccaatgaggatcaagcctatgatcctttccttaccccgatggagaatttcttctcccatgcgattatgaaattggccgtacttctttttgcaatgatattatttgttcagttgaattcgctcatccatggtcgctgtagggagaatccggaacgagcggcggcgactcagttggcgacggtggggttgaataaacgggacttgaaacgaatcccggtggccgtttacaggactggcggcacaagctttacggccaccgactgtcccatttgtcttggagagttcttagatggngaaaaggtacgagtgttaccaaaatgcaaccatggattccatgtgaagtgtatagacaaatggttaatgtcgaagtcatc

SEQ ID NO: 223648 - DNA, 290 bp, Gossypium hirsutum
gagaaataaaaacagtttcatttccattctaagtttgtgttttttatttgccttttgtgggttttttttaaaaaaaattcagcaaaaatgtttattgagagttttaaggtagagagccccaatgtgaagtacacggagaatgaaattcagtctgtttacaactatgaaactacagagcttgttcatgagaacaaaaatggaacctatcaatgggttgttaaacccaaaactgtcaaatatgaattcaagactgatatccatgtccctaaattgggggtgatgcttgtggg

SEQ ID NO: 223649 - DNA, 340 bp, Gossypium hirsutum
cccacgcgtccgatagcatacactactagtacccactactagcaatggcttcctcaatgatctcatcggctaccattgccactgcctctccggcacaggctaacatggtcgctcctttcaccggcctcaagtctgcctctgctttcccagtcatcaggaaggccaacaacgacattacttctctcgcaagcaatggcggcagagtgcaatgcatgcaggtgtggcctcctactggaaagaagaagttcgagactctcttataccttcccgatcttacacccgtgcagttggctaaggaagtagattaccttcttcgctcaaaatgggttccttgcttgga

SEQ ID NO: 223650 - DNA, 434 bp, Gossypium hirsutum
caacagccaccaccacatacccttctgatacctcacccacaccaaactccagaaccagcctccgttatcaatggcgatgatatctacatattgcccacatttcaacggacttcaccgatcatctcccaagctcgacagttctcaatctcaatctttccttcaacacatcaactctcagcttcgccttgcttcgtctcgtaaaccttgcagagctgttactgccatggccggttccggaaagttctttgttgggggtaactggaaatgtaatggaacaaaagactccatcacaaagcttgtttctgacttgaacagcgcaaagttggagactgatgttgatgttgttgtgtcacctccctttgtttatctcgatcaagtgacagcttcatttaccagtcgaattgaggtatctgctcaaaactcttggattggga

SEQ ID NO: 223651 - DNA, 436 bp, Gossypium hirsutum
cccacgcgtccgccagaatttgcttcagtaatggctgcctcagttatggcttcttcagttaccctcaagccttcattcaatgttgagaaatctggtgtaagaggggttccttcccttgctaggtccccttcttctttcaaggttgaagccagtggtggcaagaagatcaagaccgacaagccttatggaatcaatggtggtatgaacttgagggatggtcttgatgcctctggaaggaagggtaagggaaagggtgtttaccaatatgttgacaaatatggtgctaacgtcgatgggtacagtcctatctacaacaccaacgactggtctcccagtggtgatgtttatgttggcggtactaccggattggcaatctgggcggttaccctagccggaattcttgccggtggtgcacttcttgtttacaatacaagtg

SEQ ID NO: 223652 - DNA, 434 bp, Gossypium hirsutum
cccacgcgtccgcccacgcgtccgcccacgcgtccggtggcatttgaagttgtcactagtttccgtttttacaaaagtggggtttataccagtaaaacatgtggcagcacacccatggatgtgaaccacgctgttcttgcagttgggtatggagtcgaaaatggcgttccatattggctcattaagaactcatggggtgcagaatggggtgacaatggctacttcaagatggagatgggcaaaaacattgcggtgtggcaacttgtgcatcatacccaattgttgcttgatccagtcgatgaaccgtgttggatcatgtcattcctttgtgttatagaaggcgtctagttatggtctacaaatgttgtagttgttcagggttatggtctagttgaaacccatgggttcatgtacaataaggatccaaagacatg

SEQ ID NO: 223653 - DNA, 282 bp, Gossypium hirsutum
gcttctcttgcaaccttagctggtgttcaaccaacgaccatcaagggccttggtggcagctctctcaatggaaccaagctcttggtgaagtcaactcgccagagtttcaaacccaaaaactacagggctggtgctgtggtagcaaagtatggtgataagagtatatactttgatttggaggatattggcaacacaactgggcaatgggacttgtatggatccgatgcaccttcaccgtacaacccactccagagcaagttctttgagacatttgcagctcca

SEQ ID NO: 223654 - DNA, 422 bp, Gossypium hirsutum
gtcatttcaaagattctatcaaaacagagaggttttttttataacgagttatacacgacgtggtcgttgaacacgaaaaagaatggatgacttttatagaccagggaggaaccatctcttctttactgcaacggttcacataccggaacctgatattcgagccatgaaccgtgataacgaggattaccgttccccggctattccgcgaatgacaaaaacccttgtcgataatgttcagaagatatgaaagactacgaccggtactccctatatgaacccaacaacaggaaccgacgcatgagagagagcacttactaatacgttatgccccggagaccgaatcatatcgggactcattgaacaatgcattcttctttggatcgatcaacaacaacgtctcaaggacaacgtcgacgttgacg

SEQ ID NO: 223655 - DNA, 439 bp, Gossypium hirsutum
cttagcatacactactagtacccactactagcaatggcttcctcaatgatctcatcggctaccattgccactgcctctccggcacaggctaacatggtcgctcctttcaccggtctcaagtctgcctctgctttcccagtcaccaggaaggccaacaacgacattacttctctcgcaagcaatggcggtagagtgcaatgcatgcaggtgtggcctcctactgggaagaagaagtttgagactctctcatacctccccgatcttacacccgtgcagttggctaaggaagtagattaccttcttcgctcaaaatgggttccttgcttggaattcgaattggaggagggattcgtgcaccgtaagtactcgagcttacccacgtactacgatggacgctactggaccatgtggaagctgcccatgttcgggtgcaccgact

SEQ ID NO: 223656 - DNA, 434 bp, Gossypium hirsutum
cccacgcgtccgatagcatacactactagtacccactactagcaatggcttcctcaatgatctcatcggctaccattgccactgcctctccggcacaggctaacatggtcgctcctttcaccggcctcaagtctgcctctgctttcccagtcatcatgaaggccaacaacgacattacttctctcgcaagcaatggcggcagagtgcaatgcatgcaggtgtggcctcctactggaaagaagaagttcgagactctctcatacctccccgatcttacacccgtgcagttggctaaggaagtagattaccttcttcgctcaaaatgggttccttgcttgcaattcgaattagaggagggattcgggcaccggaaatactcgagcctacccacgtactacgatggacgctactggaccatgttgaagctgcctatg

SEQ ID NO: 223657 - DNA, 407 bp, Gossypium hirsutum
aacagcttctcaatggtcatcttcggttgctctaaagatgggggcccttacctagagtggacgagctttttaccgacaccattgactccaacctctacgatccatttcctcacttcttcatcgtaaactctggccctcagagcaccgaaaaagtcaatggattggcccgggaaggtgtcaacaagcttaacaaggtcatcaacgggaacattgtccgtcctgaaaatacctgtgcaaacaccgatcctatcttccctggtgggtgcccagaaaaacttctccatacgaccgtcacggatgagaggcgcctacagcgtcaagaaatcgttaccggtgacgatgatcggaacacgagggatctctgccttgttgtacataccggggagctgaacgttggtggggtaatc

SEQ ID NO: 223658 - DNA, 439 bp, Gossypium hirsutum
gcctatcgtactagtgagtacacttagcaatggccttcttcatgatgtcatcgtcaacgattgcgaccgttaactgttcctccgcctcacaggccaacattgtggcggcctttacttgcctcaagtttgcctctgcttttccagtcactatgaaggccaacgacgacatcacttttcttgctatcaatggcgggagagtgcaatgcatgcacgtgcagccttctcttgggacgaagaagaatgagacactgtcattcttatacgatcttacacttatacagttggctaaggatgaagaagaccatcatcgctctcaatggaaaccttgttcgggattggaattagaagaaggagtcgggcaccggcagtactcgagcttacccacaccctacgactgacactactgcaccatgtggaaactgaccatgtctatgtgcac

SEQ ID NO: 223659 - DNA, 437 bp, Gossypium hirsutum
cccacgcgtccgatagcatacactactagtacccactactagcaatggcttcctcaatgatctcatcggctaccattgccactgcctctccggcacaggctaacatggtcgctcctttcaccggcctcaagtctgcctctgctttcccagtcatcaggaaggccaacaacgacattacttctctcgcaagcaatggcggcagagtgcaatgcatgcaggtgtggcctcctactggaaagaagaagttcgagactctctcatacctccccgatcttacacccgtgcagttggctaaggaagtagattaccttcttcgctcaaaatgggttccttgcttggaattcgaattagaggaaggattcgtgcaccgtaaatactcgagcctacccacgtactacgatggacgctactggaccatgtggaagctgcctatgttc

SEQ ID NO: 223660 - DNA, 375 bp, Gossypium hirsutum
  unsure (1)..(375): unsure at all n locations
cccacgcgtccgctactcttaccctttttcagagctttgatagaggaagagcagctcaccgaatccatcatgggtcactctaatgtctggaactctcaccccaaaacctacggccctggctctcgcgcctgccgtgtgtgcgggaacccccacgccatcatcaggaaatatggactcatgtgttgcaggcagtgcttccgtagcaatgccaaggaaattggattcattaagtaccgctgaagaatttatgttgggaagaactttgttagagtatgagcctttggtaatgtgattattgaattagaaggataatgtttaattgtttcagtctggacatctaaagtggttgttgaactaaggannnntttttttttt

SEQ ID NO: 223661 - DNA, 437 bp, Gossypium hirsutum
cggacgcgtgggctttttttttaaatatttttcattgccaatcagtcccttattaataagtagagtatttccacaactggtttaattcccttcatgcactgtgctccatagtcttggaacccaaggacagaagactcttttaacatttcaccgcaaagatggagataacaaatgtgagcgagtatcaagaaattgcgaagcaaaagttgccaaagatggtgtatgactactacgcatctggtgctgaggaccaatggacattgcaagagaatagatttgctttcactaagatactgtttcgtcctcgtattctcatcgatgtaagcaagatagacatgaccacaactgtgttgggtttcaagatatcaatgcctatcatgattgccccaactgccatgcaaaaaatggctcatcctgaaggggagtatgcaacagct

SEQ ID NO: 223662 - DNA, 419 bp, Gossypium hirsutum
agtgatcaccggcaatgggtatcgatttggtcgccggcggcaagagcaagaagacaaagcgaactgctccgaagtctgatgatatctacctcaagctcctcgtcaagctttacaggtttctagtaaggaggactgggagcaaattcaatgccgtgattttgaagcggcttttcatgagcaaagtcaacaaaccgccattgtctctctccagattgattcaatacatgaagggcaaggaggataagatcgctgtggtagttgggaccgacaccgatgacattcgagtgtatgaagttccggcactgaaggttactgcattaaggttcactgagacggcgagggcaaggatcgagaaggccggtggggaatgtttaacgtttgaccaacttgctcttcgagcaccttttgtgcagaacacg

SEQ ID NO: 223663 - DNA, 346 bp, Gossypium hirsutum
cagacacttacccatacacgacttcttttccttctgggtcggcttcagatcctggggtggacgcacactaagaccccccggaaaaatttccggcgagtcatctcttgtattctaatcctcctccttctcgttctcatcacaatcttactcatatgggcaatccttcgtcctagcaaacccaacttcactctcctcgacaccaccgtctacgccttcaacgccgccaccttcaacttactcacttcaaactctcaaatcaccgtcccgtcaaaaaaccccaaccaagatattcgtttttatttccgcccggttcaccgtttcccctcctacccgaacccaaaaaata

SEQ ID NO: 223664 - DNA, 385 bp, Gossypium hirsutum
ggtattctgagacggaattgttagagcggatggcccttttagaagggcagaatcaaagtatagtgtccaacaagtaggtgtaactgttgagttctatggcggcgaactcaatggagtgagttatagtgatcctgctactgtgaaaaaatatgctagacgtgctcaattgggtgaaatttttgaattagatcgtgctactttgaaatccgatggtgtttttcgtagcagtccgaggggttggtttacttttgggcatgcttcgtttgccttgcttttcttctttggacacatttggcatggtgctagaaccctgttcatagatgtttttgccggtattgatccagatttggatgctcaagtggaatttggagcattccaaaaactt

SEQ ID NO: 223665 - DNA, 202 bp, Gossypium hirsutum
cgaagtgctcccaactcagctgatcccagatgacaatgaggggaaggttttgagagtgaggttgataatgaaagaaggggtggagcatttcagtccagtttacctgtttgatgaaggctcaaccatctcatggataccatgtggaaggaagctcacttgttcttaccctggcatcaaattcttctatggccctgacacatac

SEQ ID NO: 223666 - DNA, 437 bp, Gossypium hirsutum
tttagctatagcatacactactagtacccactactagcaatggcttcctcaatgatctcatcggctaccattgccactgcctctccggcacaggctaacatggtcgctcctttcaccggcctcaagtctgcctctgctttcccagtcaccaggaaggccaacaacgacattacttctctcgcaagcaatggcggcagagtgcaatgcatgcaggtgtggcctcctactggaaagaagaagttcgagactctctcatacctccccgatcttacacccgtgcagttggctaaggaagtggattaccttcttcgctcaaaatgggttccttgcttggaattcgaattagaggagggattcgtgcaccgtaaatactcgagcctacccacgtactacgatggacgctactggaccatgtggaagctgcctatgttcgggtg

SEQ ID NO: 223667 - DNA, 442 bp, Gossypium hirsutum
cgccgcctgcgtctctctcttcatctctctgaacctaaaagtctttagcttttcgcttcgagagagaccatgttggtttaccaggatctcatctccggtgacgagcttctttctgactcattcccctacaaggaaatcgagaatgggatgctgtgggaagttgagggaaagtgggttgtgcaaggagctattgatgttgacattggtgccaatccttcagccgaagatgctgatgaggatgaaggtgttgatgaccaatctgtgaaggttgttgacattgttgacactttcaggcttcaggagcaaccccctttcgacaagaagcagtttgtcgtgttcatgaagaagttcatcaagaacttgacaccgaaactggatgcggaaaagcaagagtccttcaagaaaaacattgagggagcaaccaagtttttgctttcaaaat

SEQ ID NO: 223668 - DNA, 404 bp, Gossypium hirsutum
gcacgtagcggtgataatggacgggaacgggcggtgggctcggcagcggggattggcgacgtcagcgggacacgaagccggtgtaaaggcgttgagggagctggtcgaactatgttgccagtgggggatccaggttctgactgtcttcgccttctcttacgagaactggattcgtcccaaggtggaggttgattttttgatgagtttgtttgagagagcgttgaagtctgaagtggagtcactttctagaggaggcattcgaatatctgtaataggggattcaacaaagcttcccacatcgctgcaaaagttgatcaacgaagttgaggagaccacaaaacataactccaggctccaactcattgtagccgtcagctacagtgggaaatacgacgtcgttcaag

SEQ ID NO: 223669 - DNA, 386 bp, Gossypium hirsutum
ggtagacggtgtacggaattgatagagcggatgggcctgttagaatggcagaataaaagtatactgtctaacaagtaggtgtaactgttgagttctatggcggcgaactcaatggagtgagttatagcgatcctgctactgcgaaaaaatatgctagacgtgctcaattgggtgaaatttcttggatgagatacagctactttcaaatccgatcgtgttttttgcaacactccaaggggttggattactttagggcatgctacgattgccttgcttttcttcttcggacacatattggcatggtgctagaaccctgttcagagatgtttatgccggtattgatccagatttggatgctcaagtggaatttggagcattacaaaaac

SEQ ID NO: 223670 - DNA, 442 bp, Gossypium hirsutum
tcttcttttacctaacatccactctcttaaaaagcaaatggccaaactctctttgggctccacattttctatcttccattcccgccacatccgtcctccactcgccggctgccacgtcaccaaaatgacagtggccgatcaccacccatcgttggaggtcgtaggcggagcacgtgatcgcttcctcccatctctccacaccaacctccgactaccctacaaccctttccccctcatcgcctggaaccgtcacgtcgagaccatcttcgcctccttcttacgctctattccccaagtcagattacgacgggagtgcctccgagtcaaagacggcggctccgttgccctcgattgggtctccggcgaccaccgacgtcttactcctgattctcccgtcctcattttactcccgggtttgactggaggaagccaagattcatat

SEQ ID NO: 223671 - DNA, 424 bp, Gossypium hirsutum
  unsure (1)..(424): unsure at all n locations
cccagaccaacagaggctgatttttgctggtaagcaactggaggatggccgtaccctggctgactataacatccagaaggagtccaccctccacttggtgctccgccttcgtggtggtatgcagatttttgtgaagacacttactgggaagaccatcaccctggaagttgagagctctgacacaatcgataatgttaaggccaaaaattcaagataaggaaggtatccctccagaccagcagaggctgatatttgctggaaagcagctagaggatgggaggaccctngcagattacaacatccagaaggagtccaccctccacttgggtctccgtctccgtggcgggatgcaaattttcgtgaagaccctgactggaaagaccatcaccctgaaagttgagagctcagacacgattgataatgt

SEQ ID NO: 223672 - DNA, 392 bp, Gossypium hirsutum
ggtagacggagacggaattgttagagcggatgtcccttttagaagggcagaatcaaagtatagtgtcgaacaagtaggtgtaactgttgagttctatggccgcgaactcaatggagtgagatgtagtgatcctgctactgagaaaaaatatgctagacgtgctcaattgggtgaaatttttgaattagatcgtgctactttgaaatcccatggtcgtttttcgccgcagtgcgaggggttggttcacttttgggcatgcttcgcttgccttgcttttcttattcggacacatttggcatggtgctagaaccctgttcagagatgtttttgccggtattgatccagatttggatgatcaagtggaatttggagcattccaacaacttggagat

SEQ ID NO: 223673 - DNA, 362 bp, Gossypium hirsutum
aattcccgcgccgaccccgcgccccctttgtctgacttacttgcttgtacttgttaacgtttttgtaggaacccctccttccggctggtgctgttctttgctttatggattgactaatcagcaagcagtccttagcctttacactgtcataaaagccaatgttctaggaattaaccttaacattccaactgttataaaattaatccttagtgcatatttgtaggaggttccttcattctataaatgtgattaaaaaagatatattatcatttcgttggctaaagtttgttctaagttactttcatttctagtgattctcgttggtttttaagtcggatatatattgttttttttttgccatt

SEQ ID NO: 223674 - DNA, 417 bp, Gossypium hirsutum
tttgattcccatgttgagcaacataactaagttgagttcagaaatctttcaaagagagatttctactctccctaagggaacagctgggtcttcccgacatctatatagtatcaagattttgggtcacctcacctttctacaaggagtcctgttagctcaacaacagtttgaggctcaccccactgatataatactttctagtgcccttagaaccgccccagcctggtaaaaatctttaactttcgttactataccaggaccttcttccaatgatcctcccaccctttggctttcaaggatgcctaatgatgttggcccttcaatgaagctggaccatgctaatttttccgttaatgaccatttggaatttcctttttggcccactcagcctctttattctttcttacctacatcaat

SEQ ID NO: 223675 - DNA, 391 bp, Gossypium hirsutum
cccacgcgtccgctcaaattcagttaacaatttcacagttgttttcttcagtctctgtgtcagccatggctgcagccatctccaccgtcgctgccgctgccgccgccaaccgagctctgggagtgtcagtcccaacctcagctttcatggggaagaaagtgagctcaagattcaacagcaccaggcaggttccttcgggaagttttaaggtgatggcggcggagaaagagatagacgaagagacacagaccgaaaaggaccgacggaaagggttggcttacgatatttcggacgaccaacaagacattactcgagggaaagggatggaggaattccttgttccaagctcccatgaatgatggaactcactatgctgtcatgagttcctatg

SEQ ID NO: 223676 - DNA, 390 bp, Gossypium hirsutum
cttctattcagttttgtaagagctatggctaaggacattgaggttggtggtgagttccaggccaaggactaccatgatcctccacccgctccattggtcgacgctcaggagttagccaagtggtctttttacagggctgtcatagctgagttcattgccactctcctctttctctacatcactgtcttgactgtgatcggttacaagacccagaccgaccctgctaagggcggtgaagattgtggcggcgttggcattcctcggcattgcttgggcttttggtggcatgatctttatccttgtttactgcactgccggtatctctgggggacacatcaaccccagcagtaacctttggacttttcttggctaggaaggtgtccgtggttc

SEQ ID NO: 223677 - DNA, 414 bp, Gossypium hirsutum
gagactcttttgtataactgtagcatatagtactagtaagcagtaatagcaatggcctcctccatgatctcatcggcaaccattgccaccgtgaactgctcctccccggcacaggccaacatggtggcccccttcaccggcctcaagtctgcctctgctttcccagtcactaggaaggccaacaacgacatcacttctcttgcaagcaatggtgggagagtgcaatgcatgcaggtgtggcctcctcttgggaagaagaagttcgagacactctcatacctccccgatcttacacccgtacagttggctaaggaagtagattaccttcttcgctctaaatggattccttgcttggaattcgaattagaggagggattcgtgcaccgtaagtactcgagcttacccacgtactac

SEQ ID NO: 223678 - DNA, 417 bp, Gossypium hirsutum
cccacgcgtccgcccacgcgtccgcccacgcgttcgcacacgtccttttgctgttggttttcagtaatcttgcgtttctccgtcgggtttccaagtttcagggctgagctcaacatcgaggaaacctcacgacacaacatccatccagtaacttgttttggttactggagacaatggacttcgggttcaagggaatcaatgaggacacatctgcgtgctcatttaatgagacagacattcagaaatgtccatttcttaagaacattaacaaacccaccgacttttcattcccttcaatgaggttttcccatgcctggaactagaggtcctttatttgaagatggtccaaactttgatatggcatttaagctttttcatgggaaggatggcattgtacctctctcagggaggtctgat

SEQ ID NO: 223679 - DNA, 328 bp, Gossypium hirsutum
ctaagctggtttcagggctcctatactttgggtacatgctaattgcttcgtatgcattttttgttctaacgggcaccatcggattttatgcgtgcttttggttcacgagacttatctactcatctgtcaagatcgattagtgtgtaaaaggggatatgctttttaggttaagatatagtcatgctttaagatgtatacgttaattctcatttttgaactgagttgtcattgttgtagttgattgagaaaatactcgttaagagaagcctgaaatacactgggtgaatttgatgattttgtaataatatcgtaccctttttattccttt

SEQ ID NO: 223680 - DNA, 294 bp, Gossypium hirsutum
gactccaacttctaagctcaacctatacttgtctgttgcttaagtaccataccgctggggcgtgtgcacctggtttaccattgccatcatgaactgctccttctaaccccaggccaacatgaaggccgattacactggccttgagtctcactctgctctcccaatcactaggaacgccaacaacaacatcactaacattgcaagcaatggcgggagagtgcaatgcatgcaggctacagctctgctcttgggaagaataagatcgagacactctcataccttccctatcttaca

SEQ ID NO: 223681 - DNA, 264 bp, Gossypium hirsutum
cgaaatggcagcgaaaaggaagactcccgtcaagaccagaaacccagatctgatccgtggtgtgggaaagtattccaggtctaagatgtaccacaagcgtggcctttgggcaatcaaggccaaaaatggcggtgctttcccccgccatgatcccaaacctaaggcccccgctgccgctgagaaacctcccaagttttacccggctgaggatgtcaagaagccgcttcttaacaagcgcaaaccttaacccaccaaacttagagc

SEQ ID NO: 223682 - DNA, 397 bp, Gossypium hirsutum
ggtagatttgtttaaccccagcaactcgttgaaatggcgtccaagttgtgtgactcatgcaaatcagcgacggccactctgttctgccgtcctgactcggcttttctttgccccaactgcgactccaaaatccatgccgccaacaagctagcctcccgtcacgctcgggtcttggtctgtgaagtttgcgaacaagcaccggctcacgtcacctgcaaggctgacgcagccgctctttgcgtcacttgtgaccgtgacatccactccgctaaccctctcgctcgccggcacgagcgggttcctttggctcccttttacgattccgtcaagcccaacacagcgtttaacttcctggacgaccgttacttatccgacgttgatggagacgctgacagca

SEQ ID NO: 223683 - DNA, 392 bp, Gossypium hirsutum
cggacgcgtccgcccacgcgtccgtctcaacgaagcccaggctcattcttctgttaagaacttggattttagctgtgatggaaaatttcttgtctcactgggaagtggcctttgtaggatttgggatgtaacttcgtcaaaagttgttgcttctctggcaaagggaaatgatgaggtttttgccttctgcagatttgctcaaattaatgataagaatccacatctgtatattgctgcagtcacagactatggtggaagtattttaacatataacacaaccacatggaaaagaatccgcacaagccgagtagtccgggaagctatctctgcattcaatgtctcgtctgatgggaagttccttgcagttggaacagtcggaggagaccttttta

SEQ ID NO: 223684 - DNA, 263 bp, Gossypium hirsutum
ggcagacttttttgcttacctgatccttgtcaacatcgggctcagatttagcaccggcctccttcttgatactatcgctaaccattgacaccggaaaccgctccttcccggtgcaggccaacatggtggacccctacaccgggctaaaattggactctgctctcccagtcaccacgaggggcatcaccgacttaatttctattgcaagcgactacggtagagagcagtgcatgcagaaacagccgcctatcgggaagaagaag

SEQ ID NO: 223685 - DNA, 340 bp, Gossypium hirsutum
gtggaacccaaatgggaaatacagagttattttcaccaaacctatgcctggaactggagggatcaacctcttaatcgagcaagattgccgtgtcgaaatatgtactgagaagaaaacaattttgtccgctgaggatatcatttctttgattggcaataactgcgatggggtgattggacagttgactgaaaactggggggagactttatttgcaggtttaagcagaccatgatgcaaagcatttagtaacatggttgtaggttacaacaatgttgatgttaatgctgacaacaagtatggtgttgctgttggaaacactcctggtgtactcacagaaaca

SEQ ID NO: 223686 - DNA, 408 bp, Gossypium hirsutum
cccacgcgtccgcacactctcaaattcagttaacaatttcacagttgttttcttcaggctgtctctcagccatggctgcagccatctccaccgtcgctgccgctgccgccgccaaccgagctctgggagtgtcagtcccaacctcagctttcatggggaagaaagtgagctcaagattcaacagcaccaggcaggttccttcgggaagttttaaggtgatggcggcggagaaagagatagacgaagagacacagaccgaaaaggaccgatggaaagggttggcttacgatatttcggacgaccaacaggacattactcgagggaaagggatggtggattcctttgtccaagctcccatgaatgatggaactcactatgctgtcatgagttcctatgaatacctcagcc

SEQ ID NO: 223687 - DNA, 395 bp, Gossypium hirsutum
cccacgcgtccggaaaagacatggctgctgttactgctgcagtctcttttccttctaccaagtccacctctctccctgctagaacctctattgtctctcctgataggatcaccttcaagaaggtgcctgtttactacagagatgtttgcagtggggggagagtggtttctgtcagggcccaggttacaactgaagctcctgccaaagttgtaaaggaatccaagaaaaatgatgaaggtgttgtggttaacaagttcaggcctatcaacccttacattggtagatgccttctaaacactaagatcactggcgatgatgctcctggagagacttggcacatggtcttcagcaccgaaggagaggtcccctacagagaagggcaatccattgggtga

SEQ ID NO: 223688 - DNA, 410 bp, Gossypium hirsutum
gtcctcaaatatctcatacaaggaattaaattgaattaatggctcaaaccatgttgctcatgtctagccatgcagtgagcttgaagagagatcaccctttactccatttccaagctcaaggactcaagcctaaacctgcctctcatctcttcttcaatccattgtctaatggtgtccatacttcacccaaagctttcaccactttagctgtctttaaatcaaagaccaaagcagctcccaagagggttgagccaaagccaaaggttgaagatgggatctttggcacctctggagggattggttttaccaagcaaaatgagctctttgtgggacgtgttgccatgcttggttttgctgcatcattgctaggcgaagcaataacagggaaaggaatcctagcacagctgaat

SEQ ID NO: 223689 - DNA, 310 bp, Gossypium hirsutum
ctcttgtgctatttatacttatctttgatacttcttttgaacccgccgggagatcattcgattgttgtttttaccaaattcctcactgggtctggctttcttggattccacagctcttactttcattgcataggactgaagctccttattgcatactcgagcttcttaaaattgctactgtttatccgcaggctctatattactggctccttacatatttttttgagctcctcgatgtttcaaattaatcaaatctttgccgaatgaccatttttcagctaattatgcattacactattggatgtatttt

SEQ ID NO: 223690 - DNA, 367 bp, Gossypium hirsutum
gtgagactcttttgtataactgtagcatatagtactagtaagcagtaatagcaatggcctccgggatgatctcatcggcaaccattgccaccgtgaactgctcctccccggcacaagccaacatggtggcccccttcaccggcctcaagtctgcctctgctttcccagtcactaggaaggccaacaacgacatcacttctcttgcaagcaatggtgggagagtgcaatgcatgcaggtgtggccttctcttgggaagaagaagttcgagacactttcataccttcccgatcttacacccgtacagttggctaacgaagtagattaccttcttcgctctaaatggattccttgcttggaattcgaatt

SEQ ID NO: 223691 - DNA, 416 bp, Gossypium hirsutum
gttgcttcacaatggcctctacaaccatggctctttcttccccatcattcgccggtaaggcagtgaagttctccccttccacccctgaaatccggggaactggccgtgtttccatgaggaaaaccaccaagcctgttccttctggtagcccatggtacggtcctgaccgagttttgtacttgggtccactttccggtgagccaccatcttacttgaccggtgagttccctggtgactatggttgggacactgctggactctcagctgatcccgagacctttgctaggaaccgtgagctcgaagtcattcactgcagatgggccatgttgggagctcttgggtgtgttttccctgagctgttggctaggaacggtgtcaagttcggtgaagctgtatggttcaaggccgggtctcaa

SEQ ID NO: 223692 - DNA, 418 bp, Gossypium hirsutum
cccacgcgtccgactactagtacccactactagcaatggcttcctcaatgatctcatcggctaccattgccactgcctctccggcacaggctaacatggtcacccctttcaccggcctcaagtctgcctctgctttcccagtcaccaggaaggccaacaacgacattacttctctcgcaagcaatggcggcagagtgcaatgcatgcaggtgtggcctcctactggaaagaagaagttcgagactctctcatacctccccgatcttacacccgtgcagttggctaaggaagtagattaccttcttcgctcaaaatgggttccttgcttggagttcgaattggaggagggattcgtgcaccgtaagtactcgagcttacccacgtactacgatggacgctactggaccatgtggaagct

SEQ ID NO: 223693 - DNA, 387 bp, Gossypium hirsutum
cccacgcgtccgcccacgcgtccgcgaagatccaagacaaggaaggcatccccccagaccagcaacgtctcatctttgccggaaaacaactcgaagacggccgtaccttggccgactacaacatccagaaggagtcaactctccaccttgtccttcgtttgcgcggcgggatgcaaatcttcgttaagacgcttaccggaaagacgatcactctcgaggtcgagagctctgacacgatcgacaacgtgaaagccaaaatccaagacaaggaaggcatcccgccagaccagcaacgtctcatcttcgccgggaagcaactcgaggacgggcggactttagccgattacaatatccagaaggaatcgactcttcatctggttctacgtc

SEQ ID NO: 223694 - DNA, 409 bp, Gossypium hirsutum
gatgccaccgatctctgccacttgataaaattttcctcataaattcaaatctttattttttttcaagatccgatagaagaacccgacctggtgatccgaaatggcggcgtatagagcagatgacgactacgactatttgttcaagctagtattgatcggagattcgggggttgggaaatcgaacttgttgtcgagattcacgaaaaacgagtttaatctggagtcaaaatccacaatcggagtagaatttgctacccgaagtattcgggtcgatgataaggtcgttaaggcccagatttgggacaccgctggacaagaaagataccgggcgattacaagtgcgtactaccgaggagctgttggtgcattgcttgtctatgatgtcactcgacacatcacatttgagaat

SEQ ID NO: 223695 - DNA, 420 bp, Gossypium hirsutum
cccacgcgtccgtccaagtttgttgtaaaccaagctagaaccagcagccaacatggcctcattagcagcctccaccgctgccgcctcccttggcgtctctgaaattgctcggtaaccctctgaatttcagtggtggagctaggtcatcggctccaacaccatccaactcatccattttcaagaccgttgctcttttctccaagaagaaggccgctcctccaaagcccaaggctgctgctgtcgccccggccgatgaagagctggctaagtggtacggtccggacagaaggattttcttgcctgaaggtctgttagacagatcggagatcccagagtacttgaacggagaagttccccgagactatggatacgatccgtttggtctgagcaagaagccagaagactttgcaaaatatcaag

SEQ ID NO: 223696 - DNA, 236 bp, Gossypium hirsutum
cccacgcgtccggtcagggcccaggttacaacttatgctcctgccaaagttgttaaggaatccaagaaaaatgatgaaggtgttgtggttaacaagttcatgcctatcaacccttacattggtagatgccttctaaacactaagatcactggcgatgatgctcctggagagacttggcacatggtcttcagcaccgaaggagaggtccgctacagagaatggccatacattggggt

SEQ ID NO: 223697 - DNA, 417 bp, Gossypium hirsutum
  unsure (1)..(417): unsure at all n locations
cttatcttcctcctcttttccctcttataattcttccccctcaccattttcttttggtttctagaaaaaaaaacccagatttttctttcatttctgaagtgaattaagcaaaaaaaaaaagatgaagaaaacccttttggactctntttaatattgtatattgaattatcatcgtttttatagaaaacccaatatgttcttatagaacagttcatttgttgtaattgataaacaaaaagtgaagagaaaaaaaaaatcatttttgtattgaataagtcaaaacccagttcagctttctcggtaaacaaacatggcatcggtgtttttataccatgtagtgggtgatctaacggtggggaagccagaattggaagaattttatgaaacagaaacgattggatcagctataagagcaat

SEQ ID NO: 223698 - DNA, 255 bp, Gossypium hirsutum
ggctttttcttccccatcattcgccggttatgttgtgaagttctccccttccacccctgagatcctaagaactggccgtttttccatgaagaaaaccaccaaacctgtcccttatggtatcccatggtacggtccttacctatttttatacttgggtccacttaccggtgagccactatatcacatgaccagagagttctcttgtgacaatggcttggacacttctatactcttaactgatccctaaacctttgc

SEQ ID NO: 223699 - DNA, 420 bp, Gossypium hirsutum
aaatggtccatctgccttggcagtgaaagaagcagcttggggacttgctcgctatgccgccatttctcaagacagtggactggtcccgattgtggagccggaaatcttgcttgatggtgaccatggaattgataggactttcgaagtagcgcagaaggtttgggctgaggttttcttctaccttgctgagaacaatgtcatgtttgagggcatccttctcaagcccagcatggtcactcctggtgctgaatgcaaagacaaggccaccccacagcaagttgctgattacaccctcaagctcctccacaggagaatccccccagctgttcctggaatcatgttcttgtctggcggacaatccgaggttgaagcaaccctcaacttgaacgcaatgaaccaatctccaaacccatggcacgt

SEQ ID NO: 223700 - DNA, 359 bp, Gossypium hirsutum
acaatctccagctgccaaggtaaatatgccgatcagaaacataccggctggccgggccgaagaggctactgaccccgatgctctcaaggctgctttggctgaattcatctcaacctggagactcatgtaattctggagagggctcaagaatggcactataacaagtgcgactgacaacggagcaaccaccccggaatggtctcgtagccgacggtctagctcatgggtccagtcttttcactcctggctccgaaggccccaacatgttaagtggcacacgtaaaccctgacgacaccttcagtgcttttgatggcagaaacatcactctcgtgcgcggaatcatgtactggatcggcca

SEQ ID NO: 223701 - DNA, 342 bp, Gossypium hirsutum
attcaaaacacccccaaaaaaaattccaaaaaaatataaaagaaaaagaaaatgagccgaggaagtggaggcggctacgatcgtcatatcacaatcttctctcccgaaggtcgccttttccaagtggagtatgcgtttaaggcagttaaagcagctggaaccacttgaatgggtgttcaaggcaagaacttggcttcgttgttacttaaaaaaaagttcccgacaagctattggatcagactagagtcactcatcttttccctattaccaagttccttggattgttggctactgggctgacagctgatgcaagggaccttggccaacaagcaaagaatgaag

SEQ ID NO: 223702 - DNA, 372 bp, Gossypium hirsutum
atcgcttgctccgactggattgtaccttggtggcacaaaatacatggtgatccaaggtgagcccggagctgttattcgagggaaaaagggcccctgagtgtgttactggtaaaaagaccaacctgtccttgatcattgggatctatgacgagccaatgactccaggtcagtgcaacatgattgtggaaaggcttggcgattatcttatagaccaaggtctttgatcactatggtgtcaccttaattgctgcaattcttcctggcttattctatacaaaagagcatctaccaccaccttttgtaatggttggctgcacttaaatcatactattactagtgttaaagtcgtgtggaaccttatacataaacaat

SEQ ID NO: 223703 - DNA, 409 bp, Gossypium hirsutum
cccacgcgtccgtctatttagccaaacaagatgcagatcttcgttaagactctaaccggcaagacgatcactctcgaggtcgagagctccgatacgatcgacaacgtgaaggccaaaatccaagataaggaaggcatccctccagaccagcagcgtctgatcttcgccggaaaacagctcgaagacggccggaccttggccgattacaacatccaaaaggagtcaactctccacctcgtcctccgtctgcgcggtgggatgcaaatcttcgtgaaaaccttgactggcaagacaatcactctcgaggtcgagagctccgacacgatcgacaacgttaaagcgaagatccaagacaaggaaggcatccccccagaccagcaacgtctcatctttgccggaaaacaactcg

SEQ ID NO: 223704 - DNA, 413 bp, Gossypium hirsutum
accattatggcttcggctactgtttctgtagccaaacccaaccttcagattcaggcaaaaggaaagggtgttggttttgcagatttctcaggcctacacaactcctctactagccttccctttgccaggaaaacctctgatgacttccattcactcgttgcttttcagacatctgctctaggaagcaataatggcgggtacaggaaagggatggcagaggcaaagctaaaggtggctataaatgggtttggtaggattggcaggaacttcttaaggtgctggcatggccgtaaagactccccacttgatgtcattgccatcaatgacactggtggtgttaagcaagcttctcaccttctcaaatatgattccacccttggcatcttcgctgccgatgtcaagcctgtcggcac

SEQ ID NO: 223705 - DNA, 421 bp, Gossypium hirsutum
actcactatgctgtcatgagttcctatgaatacatcagccaaggtcttaaaacgtacaatttggacaacaacatggatggtttctacatcgctcctgcattcatggacaagcttgttgttcacatcagcaagaacttcatgtccctccctaacattaaggttcctctaatcctgggtatttggggaggcaaaggtcaaggaaaatctttccaatgtgagcttgtgtttgccaagatgggtatcaaccccatcatgatgagtgccggagaactggaaagtggaaacgccggtgaaccagccaagttgatcaggcaaaggtaccgtgaagccgccgacataatcaaaaagggcaaaatgtgcgccttgttcattaatgatctcgatgctggtgccggtcgtatgggaagaaccacccaataca

SEQ ID NO: 223706 - DNA, 418 bp, Gossypium hirsutum
gagaaaactagaaggaaagaaaagaaagagctccagaagctctcatcttcgatggcatcggcagccacggcccgagctgtcatcctctcccgcatcactgccctttcagtcaaacctctatcaccttctctctctcgcttcctccctagccctcgcaaccgtcctccttcagccttgaccgtgagctgctgcttaaaggacggcggagcctacgacgactactccgtttcgacgcagaaatcgaatttagatcgtggattcatagtaatatctaacatgttaaagcacatcgaaccactcgacacttccgttatttccaaaggggtttctgattccgccaaggaagctatgaagcgaactatctccactatgctcggaattctcccttctgatcagttctccgttttggcttccctct

SEQ ID NO: 223707 - DNA, 375 bp, Gossypium hirsutum
ctgccactgacaaatacatcaatgtgaaatatgatgcaacaactgtttcttatgcaaagcgattattaaagggaggtcttcaagcagaacttgggttgccttgctatgagaatgttccattgattgggtacatccgtaggctggaagagcataatggctcatacatcttgacagctgctattccaaaattcattggacaaaattgtcagattgttgttcttggaactggtgaaacggccatggagaagcagattcaacagctggagaccctatattctgcaaaagctatatgagtagccaaattcattgccccataggcccatatgattttctcggttgctcattacctcttggttcctacttgatttgaaccat

SEQ ID NO: 223708 - DNA, 409 bp, Gossypium hirsutum
gttagattttacaaggaagaggaaaagaatgaacctgaatttgcaaagaagcttgcttcgttagctgatctctttgtcaatgatgcatttgggactgcacatcgagcacatgcatcaacagagggtgttacaaaattcttgaagccatcagttgctggtttccttttacagaaggaactagactaccttgttggtgctgtttcaagccccaaaaggccttttgctgccattgtgggtggttcaaaggtctcttccaagattggcgtcattgaatcactccttgagaaatgtgacattctccttcttggtggtggtatgattttcacattttacaaggcacaaggcctatcagtcggttcatccctggtagaggaggataagcttgaacttgcaacatcacttcttgcaa

SEQ ID NO: 223709 - DNA, 370 bp, Gossypium hirsutum
cccacgcgtccgctagcattagcactagcactagtagcaaccatggcctccgccgcatgtttcttgcaccaccacgcactcacaaccaatggcagatcatcatcattatcgccgtcgctgcgccaggtttcaaacatgaagcctacccagcaggtggtgtgcaaggctcaaaagcaggaagatgatggaagccttgtgtcccgtaggttggctctcactgtactcattggtgctgccgctgttggctctaaggtttctcctgctgatgctgcctatggtgaagctgcaaatgtatttggaaagccaaaaacagacacagacttcatgccatacagtggggatggattcaagctctcgataccatcgaaat

SEQ ID NO: 223710 - DNA, 382 bp, Gossypium hirsutum
cttgctcaaatctgacaatgtgggtgtcctcaaaaccctctctttctgacacttcttcactctgtgtccgttctttcatcagcccttttcagctcccatctcagagctcaacccccggtaacccttccaggtcctcatctgtaaccccagttcactgtggtcttcgtgagcttagagaccgtattgattcagtaaagaacacgcagaagatcactgaagccatgaaacttgtggctgctgctaaagttaggagagcacaagaagctgctgtcaatggcagacctttctctgagtccctggttgaagttctttacaacatcaatgaacagctccagactgaagacatagatgctcctctcacaaacgtcaggcctgtcaaaaa

SEQ ID NO: 223711 - DNA, 411 bp, Gossypium hirsutum
ggccactgacgcttcaccccagctccggtccgtgccacctccttcagactttcaccctgaaatctcactttcccagtcgccaacccacgatggccttcacttttggcaattcatgatcgctggctccatagccggcaccctcgagcacatggctatgtttcctctcgacacacttaagacacgcatgcaagctcttggcgcttcatgttcggttcaacccgtcagcgttcgtcaagccctcggttccatcttaaagctagaaggtcctcccggtctttaccgtggtatagctgcaatggggcttggcgcaggacctgcacatgcagtttacttttctgtttacgagctatctaagcaagttttgtcccgtggtgatccgaataactcaatggttcacgctgcttctggcgt

SEQ ID NO: 223712 - DNA, 419 bp, Gossypium hirsutum
aaagcactgaaaacgcaaaaccatggcctctgcttctctcctcaagacttcaccagttttagacaagtctgagtgggttaagggtcacacccttcgccaaccttccacttctgcggtgaggtgccaccctgttgcaccctctggactaactgtgcgtgcaagctcatatgccgatgagcttgtcaagactgctaaagctattgcttctcctggccgtggaattttggccatggatgagtccaacgctacctgtgggaaacgtttggcctcaatcgggctagaaaacacagaggctaaccgccaagcctacaggacgttgcttgtttcagctcctggccttggtcagtacatctctggtgccatcctctttgaggaaaccctctatcaaaccacaattgatggcaagaagatggttgatg

SEQ ID NO: 223713 - DNA, 324 bp, Gossypium hirsutum
aaagcactgaaaacgccaaaccatggtctctgcttctttccttatgactttaccagctacagacatggctcagagggttgagggtcacaccctacgacaaccgtctacttctgcggagaggcgccgccttgtggcaccctctggactaacatgacgtgcatagctcatatgcctatgagcatgtgcaagactgctatagctactgcttgtcctggacggggaatttgggccatggatgactacaacgctacctgcaggaaacgatcggcctccagcggactaaaacacacactagcttaccgtcaagcctacaagactgcgctt

SEQ ID NO: 223714 - DNA, 376 bp, Gossypium hirsutum
gcaccttgtaattgtcttgaaccaattctgattatctcttgcatactatcaaatggcaggtactgcagcaatcaccactctcccccagttcagtgggttaagacccaaagtttctactgctccagttaggagcctggcagcagttcaaccaatgaggcgcaaggggaagggtgctctccgtgcacgatgtgatttcatcggatctcccacaaatttgataatggtgactacaacaaccctgatgctgtttgctgggaggtttggggttggctccatcagcaaacagaaaggccaccgctggattgaagcttgaagtaagggactcaggcttgcagactggtgaccctgctggttttacacttgctgacactttggc

SEQ ID NO: 223715 - DNA, 409 bp, Gossypium hirsutum
gagagcggaggcttctttgcttgccacctctcttttatctcttcaaacacttctaaaatgatggatgagaagatgagtttgactgttgctgatgcagtggactacaagggtcaccctgctgacaagtctagaactggtggctgggtacctgctgctctcagcttaggcattgaaatatgtgagaggctgtcaacaatgggaatagcagtgaaccttgtgacttacctgggtggaaccatgcaccttccaagtgctacttctgcaaatgttgtgacagacttcatggggacatcatttctactatgtttactgggcggcttcctagccgattcatacttgggcagatacctaacgatcgcaatattcgccatggttcagatgcttggaacttgcctgttagcagtatcga

SEQ ID NO: 223716 - DNA, 401 bp, Gossypium hirsutum
  unsure (1)..(401): unsure at all n locations
attggtcctcaaatattctcatacaaggggaattaaattgaatcaatnggctcaaaccatgtntgctcatgtctagccatgcagtgagcttgaagagagatcaccctttactccatttccaagctcaagggctcaagcctaaacctgtctctcatctcttcttcaatccattgtctaacggtgtccatacttcatccaaagctttcaccactttagctatctttaaatcaaagaccaaagcagctcccaagagggttgagccaaagtcaaagccaaaggttgaagatgggatctttggcacctctggagggattggttttaccaagcaaaatgagctctttgtgggacgtgttgccatgcttggttntgctgcatcattgctaggcgaagcaataacaggg

SEQ ID NO: 223717 - DNA, 340 bp, Gossypium hirsutum
cccacgcgtccggaaacccaagattataaatttagtatcgctttgagtatttgaattgttgagattacaggaatggcaggggaattagtattgttggatttctggccaagtccatttgggatgagatccaagattgctttggctgaaaaagggatactatacgagttcagagaaaaagatttgaggaacatgaggggatttgttgctgtagatgaaccctgttcacaagaaaatgcctgttcttatccataacggtaaacccatttgtgagtctgtcattaaagttcaatatattgatgaggtctggcgtgataaagctactttgatcccttctgatcct

SEQ ID NO: 223718 - DNA, 404 bp, Gossypium hirsutum
gtggacttcaggtgctctgatgtttcttccaccattgactcttccttgaccatggtcatgggagatgacatggtcaaggtggtggcctggtatgacaatgaatggggttacagccaaagggttgttgatctggcacacttggtggcaagcaagtggccgggcatgcctgtagctggaagcggtgaccccttggaggattactgcaaggcaaacccagcagatgaggaatgcaaagtttacgaggcttaaatagttgcaactttatgattatttttaattttttttttacttgcagatggtatagttggtggccaagggttttccaatgttcatgttaacagaaaaaataaacaggtcattttgtaatgacagcagagtgacatgaacatataacatttcaatgc

SEQ ID NO: 223719 - DNA, 362 bp, Gossypium hirsutum
cccacgcgtccgttctctcaagacctgctcttaactgctcccaagcctcaatctcaatcgtctgaccttcccgaaggcagccaatggaggtacagtgagttcttgaacgcagtcaagaaggggaaagtggagagagtcaggttcagcaaagacggttccgtcctccaactctccgccgttgatggtcgtcgagcctctgtgattgtccccaatgaccccgatctcatcgacattttagccatgaatggtgtcgatatttcggtgtccgagggtgaatccgctaataggctttttaactttattgggaatttgcttttcccttttcttgcatttgcccgattgttctttctctttccgtcggc

SEQ ID NO: 223720 - DNA, 265 bp, Gossypium hirsutum
  unsure (1)..(265): unsure at all n locations
gtctgaagcaagtcaaacaacctgcaacttcgtcttggactgtgcccacaaccattggagtggctccctcttcccttcctcctccttcacctcccnctcccctgcgtactcataacccttcttggttcaccacgaggaccaccctctggtgaatggaacactgtgcgcaagggaagtccgcaaaatggatccgtaacctcgggaaaaggattggctcttagggctgggcacgggggtcccagtcccgaacccgtcggctgccggc

SEQ ID NO: 223721 - DNA, 424 bp, Gossypium hirsutum
ggtattgaagagataagattatagtgtaaatttagacataataaagcccctcataacatccttcgacttgcttcattgattagccctctgaaagcccaagaaaaatggcttctgcttccgctactctcctcaagtcttcacctattatcgacaagtccgagtggattaagggccaaaacctccgccacccttcggtttgttttgtacggtcacaccctacatcggccgcctttaccgtccgtgctagttcatatgccgatgagcttgttaagaccgcgaaaactgttgcatctccaggtcgtggtattttggccatggatgaatcaaatgctacatgtgggaagcggcttgcctcgattggtctcgagaataccgaggcaaacccggcagcttaccgtacccttctcgtggtttgcccctggcc

SEQ ID NO: 223722 - DNA, 401 bp, Gossypium hirsutum
cccacgcgtccgcccacacgttcgcaaccacccactcttacactggagaccagaggctctgaggggctttacaccgtgacttgaggagagccagggctgcagcattgaacattgtaccaacaagtacaggtgctgccaaagctgtctcccttgtgcttgctcagctcaagggcaagctcaatggcattgcacttcgtgtgccaacacccaatgtatctgttgtcgatctggttgtgaatgttgagaagaagggtatcacagctgaagatgtgaatgctgcattcagaaaggcatctgaggagccattgaagggcgtatcggatgtgtgtgatgttcctcttgactcggaggactttaagtgctctgattgttcctccaccattgactctttcattgaccat

SEQ ID NO: 223723 - DNA, 399 bp, Gossypium hirsutum; identical to SEQ ID NO: 194091

SEQ ID NO: 223724 - DNA, 420 bp, Gossypium hirsutum
atcggctaccattgccactgcctctccggcacaggctaacatggtcgctcctttcgccgggctcaagtctgcctctgctttcccagtcaccaggaaggccaacaacgacattacttctctcgcaagcaatggcggcagagtgcaatgcatgcaggtgtggcctcctactggaaagaagaagcacgagactctctcatacctccccgatcttacacccatgcagttggctaacgaagtggattaccttctacgctcaaaatgggttccttgcttggaattcgaattacaggagggattcgggcaccgtagatactcgagcctacccacgtactaccatggacgctactggaccaagtggaagctgcctatgttcgggtgcaccgactcggttcaagtattgaaggagcttgaggaatgcaa

SEQ ID NO: 223725 - DNA, 436 bp, Gossypium hirsutum
ctcctccaaccctgactccatggaaatcgtggagctagctgcacttcttcatgatgtaggtgattacaaatacttgagggatccgtccgaggagaagctagttgagaattttctagaggaagaaggcatagctgagagcaaaaagataaaaatattaagcatcataaagggaatgggttttaaagatgaacttgctggtgtgggaaaccaggaatttccccctgaatttggggttgtgcaagatgctgatcgtctcgatgcaattggtgccataggaatcgctcgctgctttacatttggtggaaacagaaacagagtgcttcacgatcctgctatccagtcacgattggacttatccaaggaacattacatgaagaaagaggagcagactactgtgaaccatttccatgagaagcttcttaagttaaaggatttg

SEQ ID NO: 223726 - DNA, 322 bp, Gossypium hirsutum
ccggcccgaattcccggtcgcccccccttccggggaatccaatctcctttttaagccctccccaattccaaattcgaagttgattttggaaggggagtcttccgaggaggcgatggcagctttgtcaaaccttctcagtgagaaagctgatctcggaagtgttgccgctgaaaaaatcaaccaaataccacccgccttaaaggcacttggcagttgcgacaccgccaaccggatcaaaaccggtttccttcatttcaagtcagaaaaattcgagaaatatcctgatttgtacggtccacttgccaaaggccaatgccccaag

SEQ ID NO: 223727 - DNA, 417 bp, Gossypium hirsutum
cccacgcgtccgcccacgcgtccggatgtttgccatctgaatctccacaaaaccttgtgcattccacacggaggtggtggacctggcatgggacctattggtgtcaagaagcatttggcaccatttttgccttcacaccctgtggtacctacaggaggtatcccagccccagaaaaatcagaccctcttggtaccatttccgctgcaccttggggctctgcacttatcctgccgatatcttacacttacatagccatgatgggatctaagggactcactgatgcttcaaagatagctattttgaatgcaaattacatggcaaaacacttggagaaacactaccccgttcttttccgcggagttaatggaacagttgctcatgaattcattatagacttgagaggttttaagaatact

SEQ ID NO: 223728 - DNA, 441 bp, Gossypium hirsutum
gtcgaatcttttttattttttggcctccaaagggtttctgccaccacttccaccacttttgccggcctcaaaaccaccgcctccaccaccttttcctccgcctcccgctcttttgcatccctcatccgccttccctccactcgccgccacctcaaatcctcttctctcatccacagcctaggcttctcctccgctgcttctggggactctctgctttccctccatgcctcctccaaagttcgatctttcaagggaaaagggtcaagaggggttgtttcaatggccaagaagagtgttggggacttgactgccgctgatttgaaagggaagaaagtgtttgtgagggctgacttgaatgttccattggatgatagccagaacatcactgatgacaccaggattcgtgctgctattcccaccatcaagcatttgattcagaat

SEQ ID NO: 223729 - DNA, 388 bp, Gossypium hirsutum
gagtctctctttaacccagggtgggggccatataaaccgtggttgccgttgccgccgccaaccaagctatgggagggtcattcccaacctcagttttcatggggaagaaagtgagctcaagattcaacagcaccaggcaggttccttcgggaagttttaaggtgatggcggcggagaaagagatcgacgaagagacacagaccgaaaaggaccgatggaaagggttggcttacgatatttcggacgaccaacaggacattactcgagggaaagggatggtggattccttgttccaagctcccatgaatgatggaactcactatgctgtcatgagttcctatgaatacctcagtcaaggtctttaaacgtgcaatttggacaacaacat

SEQ ID NO: 223730 - DNA, 437 bp, Gossypium hirsutum
agccttccgccaaggcttccgtttaaacgttagctgaatactattgttcatttcttcccgcaaaaccctaggcgataactgaagccatttaatcatgtttgggcgtgttccaaaaaaatctgataacaccaagttttatgaagtacttggggttcccaaaagtgcaagtcaggatgaattaaagaaggcttataagaaagctgcaattaagaatcatccagataaaggtggagaccccgagaagtttaaggaactggctcatgcttatgaagttcttagtgacccagagaagagagacatatatgatcaatatggtgaagatgctcttaaagagggaatgggaggaggcggttcttctcacaacccatttgacatatttgagtcattttttggtgggggagcctttggtggcggtggtagctccagaggaagaaggc

SEQ ID NO: 223731 - DNA, 436 bp, Gossypium hirsutum
attgaaaccctcaaaattccactaaaaaatggcctccacagcttccctctccaccgccgtagccaccacctctttcctccgcggccatccggcgccgaaaaccctaaactcccttcctttcaaccaatctcttttcgggctaaaaccccaacgaaatggccgtctcaccatggcagcatacaaggtgacactgttaacacccgaaggaccccaagaattcgtgtgccccgacgacgtatacatcgttgaccaagctgaggaagaaggcattgatcttccgttctcgtgtagggctgggtcttgttcttcgtgtgccggagtgattaagcaaggctccgtcgatcaatccgacggtaatttccttgatgatgaccagattgctgcaggttttgtcctcacttgtgttgcttaccctcagagtgatgttgttattgag

SEQ ID NO: 223732 - DNA, 439 bp, Gossypium hirsutum
tatgcatagccgaggtaagggtatttccgcatctgctcttccgtacaaaagaactcgagctagttggctcaagatctcctctcaagatgtggaggagaacatttgcaagtttgtgaagaagggtttgaccccatctcaaattggtgtcattctccgtgattcacatgggattgctcaggtgaagagtgttacgggcagcaagattttgcggatactgaaagcccatggtcttgctcctgaaattcccgaagatttgtaccacctgattaagaaagctgttgccatcagaaagcatcttgagaggaaccgcacagacaaggattccaagttccggttgatcctggttgagagcagaatccatcgccttgcccgctattataagaagacaaagaagcttccacccgtctggaaatacgagtcgactactgccagcacactt

SEQ ID NO: 223733 - DNA, 436 bp, Gossypium hirsutum
gaaaaatccactcaacctttaagatttcaaacatggctgcaacttcctcttacgtggcctgcacaaaattctccatgttgggttggagtggagggaaaagagacttgagaatgaaaagggttctttcggtttcggctcagcagcaagctgaagttggtgaaacacaagaagctaaagtgcaggaagagcaagaaaaggttaagcaacaacaacctacacaaccaaggccagtggaaaaacaactgaatgtaaagagcaaaaacatgggcaaagattatggaggacagtggcttagcagtgttacgaggcacgtcaggatctatgctgcctacattgatcctgaaacctctgagttcgatcaaactcagatggataaactcacccttatacttgaccctactgatgagtttgtttggactcctgaaacttgcaataa

SEQ ID NO: 223734 - DNA, 439 bp, Gossypium hirsutum
atcggctaccattgccactgcctctccggcacaggctaacatggtcgctcctttcaccggcctcaagtctgcctctgctttcccagtcatcaggaaggccaacaacgacattacttctctcgcaagcaatggcggcagagtgcaatgcatgcaggtgtggcctcctactggaaagaagaagttcgagactctctcatacctccccgatcttacacccgtgcagttggctaaggaagtagattaccttcttcgctcaaaatgggttccttgcttggaattcgaattagaggagggattcgtgcaccgtaaatactcgagcctacccacgtactacgatggacgctactggaccatgtggaagctgcctatgttcgggtgcaccgactcggctcaggtattgaaagagcttgaggaatgcaagaaagaataccccaatgca

SEQ ID NO: 223735 - DNA, 425 bp, Gossypium hirsutum
cccacccgtccgcgacggcttccatcaacggttggtgccttacctcctcttcttcctccaccgccacctcctctttttccgctcgtcgacgacctacattgcggccttcggtcgtcgctagccttaactcttctccttctcctccgactcttatccaagaccgcccggttttcgctgcccctgttcctttgctcaccccgagagaagagatgggaaacaagtcctacgacgaagccattgaagctctcaagaaacttctcagtgagaaaggagaactgaaagctgaagcagctgcaagggtagatcaaataacagcagagttaaacacaacatcagctgacggcaaaccatctgactcttctgttgagagactgaaagaaggcttcgtttacttcaagaaagaaaaatttgaaaagaatcctgct

SEQ ID NO: 223736 - DNA, 405 bp, Gossypium hirsutum
  unsure (1)..(405): unsure at all n locations
tttgggggaaaaaatggtggttgcagaagcttaagtttccatgtcggccaccgccgttttgattccacgtgttcctgcacccgttagaacaacccactgttccgccttgccgcctgtccttcctcgcgtttccaccgtttccttttcctcgtccgttaagctaactccagaatcccggaggtttccttttctccaaacaaaagcaacagaagacacctctgtcgataccggggagctttttgatgacttgaaagaaaaatgggataaagttgagaacaagaccacggttcttctttatggtggtggggcaatagttgccgnttggctatcatctattcttgttggcgccattaactcagtgcccttgcttccaaagataatggagttggttggacttggatattc

SEQ ID NO: 223737 - DNA, 433 bp, Gossypium hirsutum
cccacgcgtccgagaaaaccccctttgccaaacatggagactagtgtcacgtgctacgctcgtgggattgttcttcctggtgtctcttctaagcactcctcggcattagtctcccctccatccatatctccttccttcagctctaagagccttaaaacaagttcactatttggagaatcattaagggttgttccaaggtcatcattgaaggtttcaaaggcaaagaacactacttcactagtgacaaaatgtgaaattggagagtctttggaagagtttcttacaaaggcaacaacagataaggcattgattagaataatgatgtgtatgggtgaagcattaagaacaattgcttttaaagttagaacagcttcatgtggtggtactgcttgtgttaattcctttggtgatgaacaacttgctgttgatctac

SEQ ID NO: 223738 - DNA, 437 bp, Gossypium hirsutum
  unsure (1)..(437): unsure at all n locations
cccacgcgtccgcccacgcgtccgcccacgctttctcccacgcgtccgaaaaacttatgggggctcggttgacgttggtgtcctccatcatccttctgctatgctccgtcgccgccggatcaactttcgaggactccaaccccatccagatggtatccgatggcctcagcggcttcgaatcctccgttcttcgtgtcatcggtcacactcgtcatgctctctccttcgcccgttttgcatacaagcatgggaagaggtatgaaaacgtggaggagatgaagctacggtttcagattttcaaaggcaacttggatttaatcagatccactaacaagaagggactgccttacactcttgctgtcaatcagtttgctgattggagcttggaagagttccagaaacacagattgggggctgcttanaactgctctgctacc

SEQ ID NO: 223739 - DNA, 432 bp, Gossypium hirsutum
gcctttgaattgaaaccctcaaaattccactataaaatggcctccacagcttccctctggaccgccgtagccaccacctctttcctccgcggccatccggcgccgaaaaccctaaactcccttcctttcaaccaatctcttttcgggctaaaaccccaacgaaatggccgtctcaccatggcagcatacaaggtgacactgttaacacccgaaggaccccaagaattcgtgtgccccgacgacgtatacatcgttgaccaagctgaggaagaaggcattgatcttccggtctcgtgtagggctgggtcttgttcttcgtgtgccggagtgattaagcaaggctccgtcgatcaatccgacggtaatttccttgatgatgaccagattgctgcaagttttgtcctcacttgtgttgcttaccctcagagtgat

SEQ ID NO: 223740 - DNA, 431 bp, Gossypium hirsutum
cccacgcgtccggccactgactctccggcacaggctaacatggtcgctcctttcaccggcctcaagtctgcctctgctttcccagtcaccaggaaggccaacaacgacattacttctctcgcaagcaatggcggcagagtgcaatgcatgcaggtgtggcctcctactggaaagaagaagttcgagactctctcatacctccccgatcttacacccgtgcagttggctaaagaagtggattaccttcttcgctcaaaatgggttccttgcttggaattcgaatcagaggagggattcgtgcaccgtaaatactcgagcctacccacgtactacgatggacgctactggaccatgtggaagctagctatgttcgggtgcaccgactcggctcaagtattgaaggagcttgaggaatgcaagaaggaataccc

SEQ ID NO: 223741 - DNA, 411 bp, Gossypium hirsutum
  unsure (1)..(411): unsure at all n locations
cccacgcgtccgaattcagttaacaatttcacagttgttttcttcagtctctctctcagccatggctgcagccatctccaccgtcgctgccgctgccgccgccaaccgagctctgggagtgtcagtcccaacctcagctttcatggggaagaaagtgagctcaagattcaacagcaccaggcaggttccttcgggaagttttaaggtgatggcggcggagaaagagatagacgaagagacacagaccgaaaaggaccgatggaaagggttggcttacgatatttcggacgaccaacaggacattactcgagggaaagggatggtggattccttgttccaagctcccatgaatgatggaactcactatgctgtcatgangtcctatgaatacctcagccaggtcttaaaacg

SEQ ID NO: 223742 - DNA, 435 bp, Gossypium hirsutum
agccttcggtctggtgcttttggaaatagaggtaccaggctgttgtaaaaaaggtgccggtggcgcttttcatgaggatgacctcaggggtgtttacttggtttggcaggacctcacggtggtgttgccaaactttggtaataaaccaaccaaaaggttgcttcaaggacttagtggatatgctgagcctggcagaatcatggccattatgggtccttctggttccggaaaatctactctgctcgactctcttgcaggtagacttgccagaaatgtggtcatgactggaaatatccttttaaatggaaagaagaagagactagagtatggtgctgttgcttatgtaactcaggaggatgtgatgttgggaactctaacagtaagagaaactttaacatactcagctcatttaaggcttccgaccacgttgagcaa

SEQ ID NO: 223743 - DNA, 420 bp, Gossypium hirsutum
cccacgcgtccgctcgccgtctcgcgtgcgctcctgtggctctcttcaaccctcgcatgggtcttcaagatctgatctgatctgacaaaaaaatgttcgggagagcaccaaagaaaagcgataatactaaatactatgagatattgggagtgcccaaaaccgcttcccaagatgatttgaagaaggcttacagaaaagctgcaattaagaatcatccagataaaggcggtgatcctgaaaagtttaaagagttggctcaagcttatgaggtgctgagtgacccagagaagcgtgagatatatgatcagtatggtgaggacgcccttaaagaacgaatgggtggaggtggtggtgcccatgatccatttgatatcttccaatccttctgtggtggcaatccttttggtggtggtggtagca

SEQ ID NO: 223744 - DNA, 434 bp, Gossypium hirsutum
cccacgcgtccgcccacgcgtccgcccacgcgtccggtgagactcttttgtataactgtggcatatagtactagtaagcagtaatagcaatggcctcctccatgatctcatcggcaaccattgccaccgtgaactgctcctccccggcacaggccaacatggtggcccccttcaccggcctcaagtctgcctctgctttcccagtcactaggaaggccaacaacgacatcacttctcttgcaagcaatggtgggagagtgcaatgcatgcaggtgtggcctcctcttgggaagaagaagttcgagacactctcatacctccccgatcttacacccgtacagttggctaaggaagtagattaccttcttcgctctaaatggattccttgcttggaattcgaattagaggagggattcgtgcaccgtaagtactcg

SEQ ID NO: 223745 - DNA, 435 bp, Gossypium hirsutum
cccacgcgtccggcgggccgcccttttttttttttttttaagacaagaacaaagtggggaggttataacacaaaaatagaggatgcaaatccacttaaaacacaaaaggaaaacaacattcaattaagacacaaaggggggatttcctttgtttgtgcccaatatagatttttttcttcccttagagcttaatttcccatttagaaagctcctctcttgatagcatcgtcattagcatttccaagggcagcttcactcaaatatttgtcagccaattgaaccctcttcacattctcttgctcagcaacaagcatgtatccatattccaacagcttctcaatggtcatcttcggttgctcgaaagatggtggcccttccctcgagttcacgagctttttcccgacaccattgactccgacctctccgatccatttc

SEQ ID NO: 223746 - DNA, 424 bp, Gossypium hirsutum
caaaaacactattatatatcaccatgccttcttcaccttcttttactcttgtgtctagatgcacggtttccccagaccaaatatctgacatcaaaaccttaaagctttcggtttctgacatccctatgctttcatgtcagtacattcaaaaaggggttttgctcacttctcctccttattcgttcgacgacctcgtgtgcttccttaaacaatccctgtccactactctctcctacttccctcctttggctggtcgtctcaccacggaccccgacggtcacgtccacatcacctgcaacgatgccggcattgacttcctcgttgtgaaatcccccaatatttccattcacaacgttttggtccccggcgatgtccccgattgtgtcaaacagtttttcactttcgacaagacacttagttactc

SEQ ID NO: 223747 - DNA, 436 bp, Gossypium hirsutum
caagttctgaaaacaaaatccttcacttcaaaatttcactttccctcacttcaaatgccggcggcgatgcctcccctcaagctcccttgcctatgctcaagttcaccatcactggcgccgcttccacctctctttctgctcataagaagaccaagggtcgtggcttccatgagggcgatgctaaccgccactcccgtctcgcctctcgcgacttcgagtcctttggcactgacggcggccccggtccccagagatgttcaagtggattttgatgataaaactagctgggagtatctgtttaaggtgtactgggttcttttaaaagagaagctagctttaagtttacatgagcttactaacgctacaaatccatggaaggaacttagagaagcttcagctaatattgaaccaaagcatcaaaacgacgttgcagatt

SEQ ID NO: 223748 - DNA, 433 bp, Gossypium hirsutum
agcaaaaggcaaaaaagccatgtcaaagctggtggtgttgcagcccacaaagcagcctcgcatctccctcctctcttcctgtctttcccacttcaatggcaccaagctctgccaaatccagtacaagagaaaggtatatcagccaaaaggtgcattgcatattgcagcatccagcaccaagaagattctcataatgggaggcactaggttcattggtgtgtttttatcaagactccttgtaaaagagggtcatcaggttactttgtttactagaggtaaagcaccagttactcaacaattgcctggtgaatcagacagtgactacgctgagtttaaatccaagattctgcatttgaaaggagatagaatggacttcgatgttgtgaaatccagtctttctgcagaaggctacgatgttgtgtacgacataaat

SEQ ID NO: 223749 - DNA, 427 bp, Gossypium hirsutum
cccacgcgtccgtttagctatagcatacactactagtacccactactagcaatggcttcctcgatgatctcatcggctaccattgccactgcctctccggcacaggctaacatggtcgctcctttcaccggtctcaagtctgcctctgctttcccagtcaccaggaaggccaacaacgacattacttctctcgcaagcaatggcggtagagtgcaatgcatgcaggtgtggcctcctactgggaagaagaagtttgagactctctcatacctccccgatcttacacccgtgcagttggctaaggaagtagattaccttcttcgctcaaaatgggttccttgcttggaattcgaattggaggagggattcgtgcaccgtaagtactcgagcttacccacgtactacgatggacgctactggaccatgt

SEQ ID NO: 223750 - DNA, 431 bp, Gossypium hirsutum
ggcgagaccactactcaagggttcgactccttgggtgcgcgttgtcagcaatactataaagctggtgcgcgtttcgccaaatggcgtgcagtgctcaagatcggtcccaacgagccatccgagttggctatccagcagaacgcgcaggggttggctcgttatgccatcatttgtcaggaaaatgggctcgtccccattgttgagcctgaggtgctaactgatggccctcatgatattaaaaaatgtgccgctgtcactgaaaccgtgcttgccgctgtttacaaggcgctgaatgatcaccatgttttactcgagggcacccttttgaagcccaacatggtcactccaggttctgacagcctaaaggaggcaccagaggtgattgcgcaatacacagtaaccgcacttcgccgaaccgttccaccagcagt

SEQ ID NO: 223751 - DNA, 435 bp, Gossypium hirsutum
agataagagaaagcactgaaaacgcaaaaccatggcctctgcttctctcctcaagacttcaccagttttagacaagtctgagtgggttaagggtcacacccttcgccaaccttccacttctgcggtgaggtgccaccctgttgcaccctctggactaactgtgcgtgcaagctcatatgccgatgagcttgtcaagactgctaaagctattgcttctcctggccgtggaattttggccatggatgagtccaacgctacctgtgggaaacgtttggcctcaatcgggctagaaaacacagaggctaaccgccaagcctacaggacgttgcttgtttcagctcctggccttggtcagtacatctctggtgccatcctctttgaggaaaccctctatcaaaccacaattgatggcaagaagatggttgatgttcttgt

SEQ ID NO: 223752 - DNA, 383 bp, Gossypium hirsutum
caaaatcagatgcttcacaatggcctctacaatcatggctgtttctttcccatcattcgccggtgaggcagagaagttctgcccttccacccctgaaatcctgggaactggccgcgtttccatgaggaaaaccaccaatcctgttccttctggtctcccatggcacggacctgaccgagttttgtacttgggtccactttccggtgagccaccatcttacttgaccggtgagttccctgtggactatggctgggacactggtggactctcagctgatcccgagacctttgctaagaaccgggagctcgaagtcattcactgcagatgggccatgtagggagctctcgggtgtgtttcacctgagctgccggctaggaacgggg

SEQ ID NO: 223753 - DNA, 429 bp, Gossypium hirsutum
agccttccgttcaatattgggaattattccctggtttttaacttccaaacaacaataaataacccgtcttcgctaccatcgtccaccactaacgaccgtccgtgtcagtgctgcaaccgtcactacaaccaccgggatgccagaccaccaccacccttcactctaaattactggtggaggagctgatcgctttatccctgctttaacacccttaaccttgcttacaaacctttccgcatgattgggtggaaccgtcatgttgagaccatatttgctgccttcttacgtactgtccccgaagataagtaccgccgtgtgtgcctgcggacccaatacaatggcaccatagccttggattgggtctatggcgaccaccggaggtagtcttgcgactctacgattctcattttactgccagcgctaactgga

SEQ ID NO: 223754 - DNA, 436 bp, Gossypium hirsutum
ctcaaattcagataacaatttcacagttgttttcttcactctctctcagccatggctgcggccatctccaccgtcgccgccgctgccgccgccaaccgagctctgggagtgtcagtcccaacctcagctttcatggggaagaaagtgagctcgagattcaacaacaccaggcaggttccttcgggaagttttaaggtgatggcggccgaaaaagagatagacgaagagacacagaccgaaaaggaccgatggaaagggttggcttacgatatttcggacgaccaacaagacattactcgagggaaagggatggtggattccttgttccaagctcccatgaatgatggaactcactatgctgtcatgagttcctatgaatacatcagccaaggtcttaaaacgtacaatttggacaacaacatggatggtttctaca

SEQ ID NO: 223755 - DNA, 402 bp, Gossypium hirsutum
gagagctcccttcatacgttactagattatcttctctctcttctcttaccatggatccttacaagtttcgtccttcaagttcctttgattccccgttctggaccaccaattctggtgctccagtttggaacaataactcatcacttactgtgggagcaagaggtccaattctccttgaagactatcatttggtggagaagctagctaatttcgatagagaacgcatacctgaacgtgttgttcatgctagaggagccagtgcgaaagggttcttcgaggtcactcatgatatatctcagctcacatgtgctgatttccttcgtgcccctggagtccagacccctctcattgttagattctccacggttattcatgaacgcggtagtcctgaaactttgagag

SEQ ID NO: 223756 - DNA, 383 bp, Gossypium hirsutum
aattccccaaaatttgtttcagtaatggctgcctcagttatggcttcttcagttaccctcaagccttcattcaatgttgagaaacctggtgtaagaggggttccttcccttgctaggtccccttcttctttcaaggttgaagccagtggtggcaagaagatcaagaccgacaagccttacggaatcaatggtggtatgagcttgagggatggtgttgatgcctctggaaggaagggtaagggaaagggtgtttaccaatatgttgacaaatatggtgctaacgtggatgggtacagtcctatctacaacaccaacgactggtcttccagtggtgatgtttatgttggcggtactaccggattggcaatctgtgcggataccct

SEQ ID NO: 223757 - DNA, 449 bp, Gossypium hirsutum
ccacgcgtccgcccacgcgtccgcaatacctcccataatcacctttgatctttgcacttaccttcaatcaggtgcgaattttgttgctgtcgttatatattttctcgagaagagcacccaaaaattccaagaaaagttgcatccctgaaccatctggttcattgccactcatcggtcacctccatctactaggtgggaaaaagccaacctgcaagaagctagcaacaatggcagacaaacacggcccactctactcactcaaactcggaacccaccgagtgttggtggtgagcagttgggaaatcgccaaggattgcttcacggacaatgaccgaaccctggctactcgagctagcatcgctgctgggcggcacatgggttacaacaatgcggtcatggcactcgccccatacggcgaatattggcgtaacatccgtaagatagccacg

SEQ ID NO: 223758 - DNA, 371 bp, Gossypium hirsutum
  unsure (1)..(371): unsure at all n locations
tcaataataataaatgggaccttggaccggcgggaaataaacggaagatatagttagctatagcatacactactagtacccactactagcaatggcttcctcaatgatctcatcggctaccattgccactgcctctccggcacaggctaacatggtcgctcctttcaccggcctcaagtctgcctctgctttcccagtcatcangaaggccaacaacgacattacttctctcgcaagcaatggcggcagagtgcaatgcatgcaggtgtggcctcctactggaaagaagaagttcgagactctctcatacctccccgatcttacacccgtgcagttggctaaggaagtagattaccttcttcgctcaaaat

SEQ ID NO: 223759 - DNA, 437 bp, Gossypium hirsutum
cccacgcgtccgcccacgcgtccggtggagtcagtaaacactcctccagcataagcaaatgggtgagctaacaatttcgggacactgaattatgccgttaggccatttaccagaaagagaactttggggagggatgctcaaaatctgcttgattatttcaagaagatgcaggcatagaaccctggtttcttttatgcaatacagttggatgatgataatcaaatggctaatgcattttgggctgatgcaaggtcaaggacagcctacacacattttggtgatgctgtgaaactggacaccagttacagagtaaaccactatagggtgccatttgctccattttcagggatgaaccatcatggccagaccattttgtttggttgtgctgtactactagatgattccgaggcttcttttgtttggcttttcaaaacatt

SEQ ID NO: 223760 - DNA, 433 bp, Gossypium hirsutum
gagagccttttttgtgtagcgattctcagttagtcttttctttaagcttacagcttctctgcagagttttataatgggtaaggagaaggttcacatcaaccttgttgtcattggccatgtcgactctggcaagtcgaccactaccggtcatttgatctacaagcttggtggtattgacaagcgtgtgattgagaggttcgagaaggaggctgctgaaatgaacaaaaggtcattcaagtatgcttgggtgcttgacaagcttaaggctgagcgtgaacgtggtatcaccattgatattgccctgtggaagtttgagaccaccaaatactattgcaccgttattgatgcacctggacaccgtgactttatcaagaacatgattaccggtacctcacaggctgactgtgctgttctcattattgactcgaccact

SEQ ID NO: 223761 - DNA, 406 bp, Gossypium hirsutum
gttaaaaaataaaaggccatggttcctttacaattatttacaaaccccattcttaagccatcaatcaaacattccctctctctttgatctttaagaatcaagatcctttctttttctttcactaaatcgacgttaacccaatcttcccaacacaatcaggccattgaattctctggtgtttgaattgaatatctcatatatggcttacatccctccacacaagcgacattcgaaggatgcggagagtccaacaccaactccagagtccctgattcccaaatttgaaagaaatgtacagttaagagcttcaaacaccaaagctgataggagcggaagaatcatatattcaaactatgccatctctagatggtttggctgtggtttggatgatggaaacggggacaca

SEQ ID NO: 223762 - DNA, 434 bp, Gossypium hirsutum
  unsure (1)..(434): unsure at all n locations
gttcttgaaaagcaatggagagcaacctgttcactggaaaagagcatcaagtatggatgaggtgctccgggaggcagatgtgataagtcttcacccggtcttggataaaaccacctatcatctgatcaacaaagaaagccttgcaacaatgaagaaggaagcaatacttgtaaactgtagcaggggcccggtgattgatgaagtagctcttgttgagcatctgaagcaaaatcctatgttccgagttggtcttgatgtctttgaggatgaacctttcatgaaacctgggcttgctgagatgaagaatgctgtcatcgtaccacacattgcttctgcttccaagtggactcgtgagggaatggcaacgttagctgctctaaacgtcttgggcaagatcaaaggatatnccaatttgggtgattcaaaatgcgtcg

SEQ ID NO: 223763 - DNA, 443 bp, Gossypium hirsutum
aaagaatggcgtcatcatctagcagcggtctaactttcaagcttcatcctctggtaatcgttgacatatttgatcactacactcgtgtcaagtcccagttgaacccaccttctctcaccttcaccttcgccaccgtcaatggcgtcgaaaaccatcagcaagctcctcgagtctatggatgtgtcatatgctttcagaggggccgcaccgtctagatcttcaacagcttcgagcttctctacgatccctccacccactcccttgaccgccccttccttaagaagaaacacgtgctttatatgaaggttttccccatttttatatacttattatggtactccactgggagcgatgccctagaatcctatatgcacattcatagagcctcgattgatattaatgaaagtcctctctatgttctgctcaatcctgcaatcaatccc

SEQ ID NO: 223764 - DNA, 426 bp, Gossypium hirsutum
cttgtcttccagagttgcattttagacaattagacagacataaaggaaacagagaacgaaattatggcttccatgtctttctctgcaactattccgtctcctcttcttgatttttcccaaacgaaaaagaaccaagttttttcttcatcatggccttccatgtctttctcaatcccttccatcaaatcctcgcttgggtcttcaaaatcagcctttttccaaaatgggttctcgttgctatcgcttactgcttctgggtttgtctttaactctagatcttcaggcatttatgcaagagcagctacggataaaaccctatacgactacacagtaaaggatattgatgggaaggatacccctcttagcaaatttaagggaaaagttcttttgattgttaatgttgcttcaagatgtggtttgacaaca

SEQ ID NO: 223765 - DNA, 430 bp, Gossypium hirsutum
cccacgcgtccggaagaaggttcatcgtcgcctttggcgatggaaatgcgagacatcggcgatctgccgaagaacgccgccaactacacggcgttgacgcctttgtggttcttggaacgagccgccaccgttcatcctgctaggaaagcggtggtccatgggtctcgtacttttacttggctgcaaacttaccagcgctgccgtcgcttggcttctgctctctctaacctctccgtcggcttcggtagcacggtagcagtaatcgcgccaaacgtccctgctgcatacgaagctcacttcggaattccaatgtctggtgctgttataaaccctgtcaatattaggctaaatgcatcaaccgttgcattccttttgggtcactctcaatcagccgtcgtcattgtcgaccaagagtttttcactttggcag

SEQ ID NO: 223766 - DNA, 436 bp, Gossypium hirsutum
gcaaaaggcaaaaaagccatgtcaaagctggtggtgttgcagccaacaaagcagcctcccatctccctcctctcttcctctctttcccacttcaatggcaccaagctctgccaaatccagtacaaaagaaaggtatatcagccaaaaggtgcattgcatgttgcagcatccagcaccaagaagattctcataatgggtggcactaggttcattggtgtgtttttatcaagactccttgtaaaagagggtcatcaggttactttgtttactagaggtaaagcaccagttactcaacaattgcctggtgaatcagacagtgactacgctgagtttaaatccaagattttgcatttgaaaggagatagaatggacttcgattttgtgaaatccagtctttctgcagaagcctacgatgttgtgtacgacataaatggac

SEQ ID NO: 223767 - DNA, 437 bp, Gossypium hirsutum
cgattctgaaattttgcctgccgctccatctctacatcacaggaatggcgacagatgttgcagcccccgccaccgccgcacccaaagacccaacccaacctcaccttgaagtaaaactcttcaaccgctggagcttcgaggaagttcaggttgctgatatctccttgagtgattacattggtgtccaagcttcgaagcatgctacctatgtgccacacactgctgggaggtactcagttaagcgtttcaggaaggctcagtgcccaattgttgaaaggcttacaaactcacttatgatgcatggccgaaacaatgggaagaagcttatggcagtcaggattgtgaagcatgctatggatattatttatctcttgactgatcagaacccaattcaagtcattgttgatgctattatcaacagtgggccacgtgaagat

SEQ ID NO: 223768 - DNA, 448 bp, Gossypium hirsutum
gaccaacccttccgcggccgcgtgggtgatgttgaaaatcacccaagtgttgttgccataaacgttagtcctattgaatacggacatgtgctgttgatccctcgaattcttgaatgcttgcctcagaggatcgaccgtgagagctttttgcttgcgctctatatggcagctgaagctgggaatccgtactttagattgggttacaacagcttgggtgcatttgctacaatcaatcacctgcacttccaggcttactacttggctgtggcctttcccattgagaaagctcctaccaagaagataacctctctgaatgatggagtcatcatctcagagcttttaaagtatccggtcagaggtgttgtctttgagggtggtaacactcttcaagacttgtctgacgcagtgtctgatgcgtgcatttgccttcaagataacaacatagcat

SEQ ID NO: 223769 - DNA, 325 bp, Gossypium hirsutum
  unsure (1)..(325): unsure at all n locations
cggnccggaannccggggcgaccaagccttccgcaaacgggtaaaggaaattacgttcttggttcaaaatgggaacctaacccggaaaaccatggggaagagggattttagaactgtaaattctcaagcttaccgagttactaaaatggacacatgtgtaacatgtttgagctgcccatgtttggatagcacagactcgtttcagatgctggaagatctggtataactaaataaggcatacacaattgcataaattataattagtggatccaacaacatgcaacaagagctgtgcataaaccgcattgagaaaaagtcttcatac

SEQ ID NO: 223770 - DNA, 431 bp, Gossypium hirsutum
gaaaaatggcttctgcttccgctactctcctcaagtcttcacctattatcgacaagtccgagtggattaagggccaaaacctccgccacccttcggtttgttttgtacggtcacaccctacatcggccgcctttaccgtccgtgctagttcatatgccgatgagcttgttaagaccgcgaaaactgttgcatctccaggtcgtggtattttggccatggatgaatcaaatgctacatgtgggaagcggcttgcctcgattggtctcgagaataccgaggcaaaccggcaagcttaccgtacccttctcgtgtctgcccctggcctcggtaactacatctcgggagctatccttttcgaggagactctctaccaatctaccatcgatgggaaaaagatggtcgatgttcttgttgagcaaaatattgtccct

SEQ ID NO: 223771 - DNA, 434 bp, Gossypium hirsutum
atacattttctgggatttttggagtagaactgcttgaaagtagaaaagcatggcaacagtgacagcttcacactttgtttcgaggatttcccatggagctgaaactaaggccaatctgagtcagacagggttggggaatcaatccatgactcacaatgggttgaggtttttaaacaaggtagataggttgcagatgaggaccaatgcaaaggctgttgctaggaacgcagtgaaagatgaacacccaactgcaaatgacaagctatctgggaaaattatatgtggaacagggatgaatattatctttgtgggagctgaggttggtccatggagcaaaactggtggacttggtgatgttcttggcggacttcctcctgcaatggcggccaaaggacatcgtgttatgacagtgtctcctcggtacgaccagtaca

SEQ ID NO: 223772 - DNA, 434 bp, Gossypium hirsutum
gaaacacagtttctttctcacttgtcttccccccctcacccctcaatggctgcaatcacgtaatttcttaactaagccacctacttccgatcttcacttcaccccaaaactcacttctctttgctctcatgcttcttttctaccatcccttgcgactaggcccagatctttttcaacaaagctaggaacaagcacaagctctcgcttcattaccaaggctacagctgctcctgggaccaagaatgctccgagtgatgagcgagttcagaaggttcacagcattgaggaattcgatgaagctctcaggaaggctaaaaacaggcttgttgtggtggaatacgccactagcttcagctatcatagcagtaaaatttacccgtttatggtagaccttagcaggacatgcaacgatgtcgaattcatcctcgtgatgg

SEQ ID NO: 223773 - DNA, 424 bp, Gossypium hirsutum
tcgcaccttgtaattgtcttgaaccaattctgtttatctcttgcatactatcaaatggggggtactgcagcaatcaccactctcccccagttcagtgggttaagacccaaagtttctactgctccagttaggagcctggcagcagttcaaccaatgaggcgcaaggggaagggtgctctccgtgcacgatgtgatttcatcggatctcccacaaatttgataatggtgactacaacaaccctgatgctgtttgctgggaggtttgcgttttcttcatcaccaaacagaacagccacctcttgattgaagcttgaagtaagggactcaagcttgcagactgaagaccctgctggttttacacttgctgacactttggcttgtggtgtcgttggccatatttttggtgttgggatcgttcttgggc

SEQ ID NO: 223774 - DNA, 372 bp, Gossypium hirsutum
ctagtacccactactagcaatggcttcctcaatgatctcatcggctaccattgccactgcctctccggcacaggctaacatggtcacccctttcaccggcctcaagtctgcctctgctttcccagtcaccaggaaggccaacaacgacattacttctctcgcaagcaatggcggcagagtgcaatgcatgcaggtgtggcctcctactggaaagaagaagttcgagactctctcatacctccccgatcttacacccgtgcagttggctaaggaagtagattaccttcttcgctcaaaatgggttccttgcttggagttcgaattggaggagggattcgtgcaccgtaagtactcgagcttacccacgtacta

SEQ ID NO: 223775 - DNA, 447 bp, Gossypium hirsutum
tcgcccacgcgtacgaaacaaaccaagtcaacctaaagccttaggcaccatggcaacctctgctatccaacaatctgctttcgttggccagaccgctttgaagcagtccaatgagctcttacgcaaagtcggagctttcgatggtggtcgtgttaccatgcgcagaactgtgaaaagtgcccctaccagcatctggtacggccctgaccgcccaaagtacttgggtccattctcagaccaaatcccatcatacctgacaggtgaattccctggtgactatgggtgggacactgctgggttatcagctgacccagagacatttgctaagaaccgtgagcttgaagtgatccactgcagatgggcaatgcttggtgcccttggttgtgtcttccctgaaattctttcaaagaatggagttaagttcggagaggcagtttggttcaaagc

SEQ ID NO: 223776 - DNA, 432 bp, Gossypium hirsutum
catatcttcagtgtctcactctctccgtgcttcactcccgcttctcctttccctcttcaaagaaaatgcgtgagatccttcatattcaaggtggccaatgcggcaaccaaatcggagccaagttctgggaagttgtttgtgctgagcatggcatagatgcaactgggcgttaccaaggagacttggatcttcaacttgagcgaatcaatgtctactacaatgaagccagttgtggtagattcgttcctcgtgctgttctcatggatcttgaacctggaaccatggacagcatcagatctggccccgtcggtcagatttttagaccagataacttcgtttttggtcagtctggtgctggtaacaactgggctaagggccattacactgaaggtgctgagttaatcgactccgtacttgatgttgttcgtaaag

SEQ ID NO: 223777 - DNA, 408 bp, Gossypium hirsutum
cttccgccaacccgtccgcccacccttccggggaagtattgagggggttaattattggttgtttttggataattactgaggtctccgccgctgcttggcgtggaggaggaaggggttcaaagcaatgttactttactcggttcttcaggctcaatggaaagtgtgtgccagaatagtgctgaattgaaggaacggaactacatgggcttgtctgattgttcttcagtggatagctctgttttttcccctccctccgacgaaagaaaggctagtttgaatctaaaggcgactgagcttaggctctgacttcctggattgcagtcgcctgacagaaatccagagctttgcttgttaaggtcttctcagcttgatgagaagccgcttttccctttgcatccttcaagtgat

SEQ ID NO: 223778 - DNA, 454 bp, Gossypium hirsutum
cttccgttcaaattcagataccaatttcacagtggttttcttcactctctctctcagccatggctgcagccatctccaccgtcgccgccgttgccgccgccaaccgagctctgggagtgtcagtcccaacctcagctttcatggggaagaaagtgagctcgagattcaacaacaccaggcaggttccttcgggaagttttaaggtgatggcggccgaaaaagagatagacgaagagacacagaccgaaaaggaccgatggaaagggttggcttacgatatttcggacgaccaacaagacattactcgagggaaagggatggtggattccttgttccaagctcccatgaatgatggaactcactatgctgtcatgagttcctatgaatacatcagccaaggtcttaaaacgtacaatttggacaacaacatggatggtttctacatcgctcctgc

SEQ ID NO: 223779 - DNA, 307 bp, Gossypium hirsutum
ccgatacctacttgatacatgtgcaaggccaaatatccaaagacaatagaaggctattcctccagacccaacaagatgctctatttttgcccggaaaacaaactcgaggatggccagaactcttgccgactacaacatccaaaaggagtccaccctccacctagtccttcgtctaaggggtggcatgcacatatttgtgaaaacccttacgggcaagaccatcaccctcgaggtggaaagttctgatacgattgataatgtcaaggccaagatccaagacaaggaagggatccctccagaccaacag

SEQ ID NO: 223780 - DNA, 435 bp, Gossypium hirsutum
cccacgcgtccggtcgacggtttacatgaacggttggtgcctgaccttctcttcttgctgcaccaccacctgctttttttccgctcgtctacgacctacattgcggccttcggtcgtcgctagccttaactctcctacttctgctacgactctgatccaagaccgcccggttttcgctgcccctgttcctttgctcaccccgagagaagagatgggaaacaagtcctacgacgaagccattgaagctctcaagaaacttctcagtgagaaaggagaactgaaagctgaagcagctgcaagggtagatcaaataacagcagagctaaacacaacatcagctgacggcaaaccatgtgactcttctgttgagagactgaacgaaggcttcgtttacttcaagaaagaaaaatatgaaaagaatcctgctctgtatgg

SEQ ID NO: 223781 - DNA, 429 bp, Gossypium hirsutum
catgtctcctcaacccgacccatgcctgactccatttgtagcatctgctggcgaatgggggccttcttgctgcacttccggagaaaacaattgctgaggaaacgccttttgcttcttattctggtctccagatcaagcgtttgttttctcttttgaatatccgatttgagtttttggatgggggaaaattataacgagctgaaaaaatcaacggcttcacaaaccgttctaaccgacgttgttttgggctgggtgattctatacatcgacgacccggaggaccggagcgccgtttccctcgtttgtcggcgttggtacgagctcgacgcgttgacacgtaagcacgtcacggttgcgctttgttacacgacgagtcccgaacggttgctgcggccgttcccacacttggaatcgttgaaatcgaaagga

SEQ ID NO: 223782 - DNA, 429 bp, Gossypium hirsutum
gttgccaaaaggattccctctctctaatcttcttctgcaacttctttgggaaggttttcaagttggggaagaagaattaatagctttagtactgctgctgctgcgattgatgaacctatacatccatctattcaagtagatcatactcagcttctcatcaatggacaatttattgatgctgcatcaggaagaaccttccctacagttgatcctaggacaggagatgtaattgctcgagttgcagaaggagatctcgaagatgtaaatcgtgcggttgctgcagctcgtaaagctttcgacgaaggaccatggcctaagatgactgcttatgaaaggtcgcgtataatgttgcgtttcgccgatttgctcgagaagcacactgaagaggtagcgaaacttgaaacttgggacaatgggaagccttatgag

SEQ ID NO: 223783 - DNA, 305 bp, Gossypium hirsutum
tctaagaaacgtaaacaaaatccttcaagaaaacttttggagatggaacttgctgggagatgcgtgccaaaatatcttcttctttgcattttagcgttggttgaaggaggaaggagatgaagagttgtgagctcttgtatgtagcggcgacaacattttgagaatcggaccaagccagattgtgctgggattgtgacgctgtagtccacggcgcttacttccttgaggcaagacatgtgaggttgttgttctgtcacgcttagtattatcttactccgtggatagtcactggtttcaagcttggt

SEQ ID NO: 223784 - DNA, 240 bp, Gossypium hirsutum
tatgttaggtttcttttttgagtggtttttattttgcccgtcttgctttctgcaggtacagggttaaaccatcaacccttctgattttggttgaaccaacttatcatctggatttaccctttatcagatatgctagaggaggctattatggaatacatcggcactgtcactatctgttcgcatgaccgatactttatttggcagatagtcaacagagtactgggagtaaaagatggtcat

SEQ ID NO: 223785 - DNA, 433 bp, Gossypium hirsutum
gtcgcttcttttgttagaaagacgttagtagctgaaaattttgaacgttactattaaggaaggataatgctatccttgcgcttcgctattcctaccgcgaatacattaactccgcccaagattaaaccaaaaccgggtttagtagtacaaaccgcttggaaccaaacggacctttttccttctcttcccaaacgaaatgattataagctacaagcagctaccacggacttatctgtggcgggagatataccggcggaggaggtggtggagcttccggcggagctgagcagagagttgatgccgaagcacgtagcggtgataatggacgggaacgggcggtgggctcggcagcggggattggcgacatcagcgggacacgaagccggtgtaaaggcgttgagggagctggtcgaactatgttgccagtggggga

SEQ ID NO: 223786 - DNA, 430 bp, Gossypium hirsutum
gggaaatggcctcatccactgtcttcaccggtgtcagcctcttcaagtccaaaaactccactaaactcatcacttcaactcggttctccgactccaagcaacaactcagcctcaactcagtgaaatgttgctcaaaaacaaccgccgcaacaacggaggaggcgactggtcgtctagtcacggtgaagaacgggaacgattcgctcgaaatatgtcgagtccttaacggcatgtggcagaccagtggaggttggggcagaatcgaccgagacgccgccgttgaagccatgcttcgctacgctgacgccggtctctccaccttcgacatggccgaccactacgggcctgcagaagatctttatggcatctttatcaatagagttcgtcgggagcgtccaccagagtacttggaaaaagtcagaggtctcac

SEQ ID NO: 223787 - DNA, 415 bp, Gossypium hirsutum
gaattaattttacaccccacaccagctgttaggcacgttttgatttgcgcaattgggatccattttttccaacaagcgataggcttggagtctgttgttttgtacagtccaaggatttttgaaaaagctgggatcacatcgtcagatcataagctacttgccaccatggccgttggattttccaagacaacctttatcttagtggccacatttttactagacaaaatcggacgacgtccgttgctcctcatcagttctggcggcatggtcgttatattggctacactagggctttcattaaccgtcattggtcattcggacaagaaacaaacttgggccgtcggattgtgcattaccatggttttatcttctgtggcagtttttttcgatagggatgggacctattacgtgggtt

SEQ ID NO: 223788 - DNA, 286 bp, Gossypium hirsutum
actcgtctttcgtagacaaatcatttcccaaacggggggggtttctctgggccgtggaactctctcttctctcccattgccagctaagtccgaggaagttttgtcggaatgggaaagagtctaccttcccatcgatcccggtgctgtccttctagacatcgcctttgaccctgatgacttaaaccatggatttttgctggggacgaggcatactattttggagacaaaagatgggggaaatacatggactcaacgttcaattctctttgctgaggatgatgacttc

SEQ ID NO: 223789 - DNA, 428 bp, Gossypium hirsutum
ctctatcccagacttcttgtacttcgactgcatctttagactttgaaattgctatttctcaacttcccctcagagatttcactcatcagatttgtgcttggggttttcctcatctcttagttaaaaccatggattttagccatttaaatcgtgggcagatgactctgatgggatctgcgttttgtgtggtgctttcgttgcatttcacactgcagcttgtgtcacagcatcttttttactggaaaaaccccaaggagcagaaagctatacttattattattcttatggctcctatatatgctgctgtctcctttgtgggtttatcggatattagaggaagcaaagccttcttcatgtttctggaatctgtcaaggaatgttacgaggcttttgtgatcgctaagttcatggctttgatgtatagttac

SEQ ID NO: 223790 - DNA, 420 bp, Gossypium hirsutum
gcttgtgggatggggaggaaacaatggttcaaccctcaccggaggtgttatagctaacaaagagggtatctcttgggctactaaggacaaggtacaacaggctaattactttggttcattgactcaagcatcaacgatccgagttgggtcctacaatggagaagagatttatgctccatttaagagtcttcttcctatggtgaacccaaatgatattgtgtttggaggatgggacattagtgacatgaacctatctgatgcaatggctagggccaaggttttcgacattgatctgcaaaagcaactgataccctacatggaatccatggtcccactccctggaatctacgatcctgatatcattgctgctaaccaaggtgaacgtgccaataatgtcatgaaggggaccaagaaagaaca

SEQ ID NO: 223791 - DNA, 428 bp, Gossypium hirsutum
cccacgcgtccgtaaatatgttcctcctcatgttaacatattttattgtctaggaggaattacgcttacttgttttttggtacaagtagctacaggatttgctatgactttttactatcgtccaaccgttactgaggcttttgcttctgttcaatacataatgactgaagctaactttggttggttaatccgatcagttcatcgatggtcggcaagtatgatggtcttaatgatgatcctgcacgtatttcgtgtctatctcactggtggttttaaaaaacctcgcgaattaacttgggttacaggcgtggttctgggtgtgttgaccgcatcttttggcgtaacaggttattccttaccttgggaccaaattggttattgggcagtcaaaatcgtaacaggcgttccggaagctattccggtaatag

SEQ ID NO: 223792 - DNA, 429 bp, Gossypium hirsutum
atggattccctcacttgcacggcctctgacctcgtccccctcctctcctcctccgccaatgcaaccgccctcgcctccttcctttgcgcccgtttctccaccatctccagccaactctctgacgccactcacgccgttgacaacacttacctcctcttctccgcttacctagtcttcgccatgcaactcggctttgccatgctttgtgctggctctgtcagagctaagaacaccatgaacatcatgttgactaacgtccttgacgctgcagccggtgctctttcttattacctctttggttttgcctttgcctttggtgccccttctaatgggttcattggatgtcatttctttggtcttaaagcatacccttcacccgatggtgattataggttttttctttatcaaagggcttttgctatagctgct

SEQ ID NO: 223793 - DNA, 423 bp, Gossypium hirsutum
gttttaaaccttcccttgcttgtataagcatacctaaatatagcaatgacaacaacaacctcagctacactctctccacccacattggctgctgccagtgttggcaatcccaggaggagaactaaagttaatgtaagttacattataggattgaattcctttggtgggctaaaagctcataacaatgtgatctcactaggccaaccagtgtgcattgaacgatcatttgcaaaggttgtgagctcactcagagctccatccaaggggaaaggtagtggcggcggtgccctctcttcaacctgcaatgcaattggtgagatatttaggattgcggcaatcatgaatggacttgttctcgttggtgttgctgtggggtttgttctccttcgaattgaagcatctttggaagaggctgagtgagaa

SEQ ID NO: 223794 - DNA, 410 bp, Gossypium hirsutum
cccacgcgtccgcttgaggatgggaggaccttttctgtttataacatccagaaggaatcgaccctgcaccttgttttgaggcttcgtggaggcatgcatattttcgttaagacattgactgggaaaacaatcacattggaggtggaaagttcggatacaattgacaatgtgaaggcaaagattctggacaaggaaggtatccccccagatcagcaaaggcttatctttgctggcaagcaattggaggatgggaggactttatctgattattacattcagaaagagtccacccttcaccttgttctttgtcttcgtggtgggcaatgagaagtaaatacttcttctgactttgttctagcttaagatgtcacaaataatcctttagaaagtcctatttcttatctcttaag

SEQ ID NO: 223795 - DNA, 283 bp, Gossypium hirsutum
agccatgttgggagctcttgggagtgttatttctgttctgttggctaggaacggagtcaagtgcggtgaattctgatggtttaaggccgggtcttaaatcttcagtgagggtggacttgactacttgggttacccaagcttgatccatgctcaaagcatttttggccatcttgggcttgccaagttatcttgatgggagccttctagggctaccgttatttcggtggaccactctgtgaaatgactgacccactgtacccagttggcagttttgactccattt

SEQ ID NO: 223796 - DNA, 422 bp, Gossypium hirsutum
gatcgtccctgcatacacgatgcctgcagatgccgaacacatcgcagtcctgcgcgtgggtgttagggaagacttcagttgtagcttggccgagaggcttatctcgcacattcaagaggtgttaaaggaactcgactcacttccgagtcaaattgtgaaagattctcacgttgttgccgttgcaaaagaagtggtagaggagaacaaagatggggaggcagctaaaatgggtgacagaaagattcaagaaaaggttactaagcaatggaggcattatgtgaaaactaagaagacgggtgtgtgttaaaaggctcctacaaaatctatgttctatcatatactgtttgtagctatatttccaaactgcagcataattgacctattacttggtcataatctcgttgtgtcatgcatttgtagca

SEQ ID NO: 223797 - DNA, 292 bp, Gossypium hirsutum
ctttacaaaaccctaatctctaactacttatttgtattgcctaaaccatgtcgtggagaaaggttttagagcccaaggaggagaatactaacctaggacctgctgttcgagagggcgagcatgtattaggggtggctcacatctttgctacatttaatgacacattcattcatgtgactgactagtctggaagggaaacaatgtgatcgcattactggtgacttgaaggtgaaagctgatatggatgattcttccccttatgcatgtatgcttgtaacccaagatgtttctc

SEQ ID NO: 223798 - DNA, 390 bp, Gossypium hirsutum
gttctttttttcacagcaatggcagtcatgaactccagtgttttggcatgcaactatgctatctcaggcactggatcatctgagcttaatgccaaacttgcttcagcgccatcagttgcttccccagttatgtgcggtggtcgcaagttgcctgtgatcagagcccagcaggctaaattttctgattccaaaggatcatgtgccagtgaaggaagaagagctgctgtgctctacttggcagctggccttttcaccacagctgttgcttcttctgcaaatgctggggtcattgacgagtaccttgaaaagagcaaagctaacaaggaattgaatgacaagaagaggttggcaacaagtggagcaaacttttccagagcatacactgttcaa

SEQ ID NO: 223799 - DNA, 418 bp, Gossypium hirsutum
cccacgcgtccgttgggattcaagggattgcttgggcttttggtggaatgatctttgctcttgtttactgcactgctgggatctcaggtggtcatatcaatccagcggtgacatttgggctgttcttgggaaggaaattgtcgttgacaagggcaatatactacatggtgatgcagtgcttgggagccatatgtggggctggtgtggttaaagggttcatggggaagacaaggtatggtgctttgggtggtggagctaactctgtgaatcatggctacaccaagggagatgggcttggtgctgaaattgttggcacctttgtgcttgtttacactgtgttctcagccactgatgccaagcgcagtgccagagactctcacgttcctattctggcaccattgccaattgggttcgcagt

SEQ ID NO: 223800 - DNA, 430 bp, Gossypium hirsutum
ggagaaacaaattactggtggaaacaattgtatgcttattgccttcagataagggtgtgaggtggtcatgtagtttcttgctgaagctgttgaaagttgccattttggttggggtggatgattcagcgagggaagatttaatgaataggataattttaaagttgcatgaagcttctgtcaaggatttattaatcccagcacggtcttctcaaacaaccatttatgatgttgggatggtgcattctatttgtgaatcagtgtatgatcaataagaagtgcagtcaagatttggatcttggaaagaatgatgtgggatgtactgatttttgttctacggcatggatcattgttgagtgttggtaaagtgattgatgggtattttgtaaaaatttgacgagatccgtatttttccttgtcagtttcattgtct

SEQ ID NO: 223801 - DNA, 392 bp, Gossypium hirsutum
tatatttagctatagcatacactactagtactcactactagcaatggcttcctcaatgatctcatcggctaccattgccactgcctctccggcacaggctaacatggtcgttcctttcaccggtcttaagtctgcctctgctttcccagtcaccaggaaggccaacaacgacattacttctctctcaagcaatgtgcggagagtgcaatgcatgcaggtgtggtcttcttctgggaagaagaagtttgagactcttttatacctccccgattcttacacccgtgcagttggctaatgaagaaaatttccttctttcgttcaaaatggggttctttcttggaatttctaattggttggaggatatcttgcacccgaatgttcttttagctttc

SEQ ID NO: 223802 - DNA, 414 bp, Gossypium hirsutum
  unsure (1)..(414): unsure at all n locations
cccacgcgtccgaaaatcgaaccccccttctctctattgctttccatggcgaactcggtggctaattcacgtagcaacagggcagcggttcaagccaccaacgatgatgcttcagccagtaaactgtcatgcgttaaaaagggatacatgaaagatgactacatccatttgtttgtcagaagacctgtgaggagatctcctattattaaccgtggttattttgcacgttgggctgctttcaggaagcttctatatcagtttcttgattgtgagggatctaatagtgaaaagggtaaaacaaagaggcagatactatcacttggtgctggatttgataccacctattttcagttgcaggatgagggaaaagcaccgtatctatacgtggaactggattntaaagaggtaaccaac

SEQ ID NO: 223803 - DNA, 426 bp, Gossypium hirsutum
gaaaaatggcttctgcttccgctactctcctcaagtcttcacctattatcgacaagtccgagtggattaagggccaaaacctccgccacccttcggtttgttttgtacggtcacaccctacatcggccgcctttgccgtccgtgctagttcatatgccgatgagcttgttaagaccgcgaaaactgttgcatctccaggtcgtggtattttggccatggatgaatcaaatgctacatgtgggaaacggcttgcctcgattggtctcgagaataccgaggcaaaccggcaagcttaccgtacccttctcgtgtctgcccctggcctcggtgactacatctcgggagctatccttttcgaggagactctctaccaatctaccatcgatgggaaaaagatggtcgatgttcttgttgagcaaaagattg

SEQ ID NO: 223804 - DNA, 417 bp, Gossypium hirsutum
attgaaaccctcaaaattccactaaaaaatggcctccacagcttccctctccaccgccgtagccaccacctctttcctccgcggccatccggcgccgaaaaccctaaactcccttcctttcaaccaatctcttttcgggctaaaaccccaacgaaatggccgtctcaccatggcagcatacaaggtgacactgttaacacccgaaggaccccaagaattcgtgtgccccgacgacgtatacatcgttgaccaagctgaggaagaaggcattgatcttccgttctcgtgtagggctgggtcttgttcttcgtgtgccggagtgattaagcaaggctccgtcgatcaatccgacggtaatttccttgatgatgaccagattgctgcagggtttgtcctcacttggggtgcttaccctca

SEQ ID NO: 223805 - DNA, 412 bp, Gossypium hirsutum
cccacgcgtccggtgcaccgtaagtactcgagcttacccacgtactacgatggacgctactggaccatgtggaagctgcccatgttcgggtgcaccgactcggctcaggtgttggaggagcttgaggaatgcaagaaggcataccccaatgcattcattagaatcattggcttcgacaacgtgcgtcaagtgcagtgcattagtttcattgcctacaagcctccaggcttctaagctttttattaactttgtctctccatttgtttgaatttgtactcagaaaaaccatgttctttacctttgcttttctctttctttgagttattggcctttgtttcttgatttctgggttttaatcctttttggattttcgttggaaaaaaggctgagaactaatgaattaaagttggtt

SEQ ID NO: 223806 - DNA, 423 bp, Gossypium hirsutum
cccacgcgtccgcccacgcgtccgattcacccaggtgtggtggccataaacgttagtcctatggaatacggacatgtgctgttgatccctcgaattcttgaatgcttgcctcagaggatcgaccgtgagagctttttgcttgcgctctatatggcagctgaagctgggaatccgtactttagattgggttacaacagcttgggtgcatttgctacaatcaatcacctgcacttccaggcttactacttggctgtggcctttcccattgagaaagctcctaccaagaagataaccactctgaatgatggagtcatcatctcagagcttttaaagtatccggtcagaggtgttgtctttgagggtggtaacactcttcaagacttgtctgacacagtgtctgaggcgtgcatttgccttcaagat

SEQ ID NO: 223807 - DNA, 417 bp, Gossypium hirsutum
aaagaatatggtgggggcttcgtctttgcatccaagactcctctcttcttttgttggtgatcgtttagctcaatcgagacaaccacttgctcagctatttcattacaacccaggtcgtaagcatatatcaatgcaattatccagaacgttttctggcttaaccaatattttatttaatagaaggaacaatttggacgaagttccagatggcaaacgcaaatgtctaagacctgggaagttatctcctcgtcgaccagttccaaatcatataaaaaagccaccttatgtcaaaactcgtatggcacctggaattgctagtggcccggaagtgcatgatctaaagggcatagaacacatgagagcttctggaaggctcgcagctcaggttctcaattatgctgggaccttagtgaagcc

SEQ ID NO: 223808 - DNA, 408 bp, Gossypium hirsutum
attatcttctctctcttctcttaccatggatccttacaagtttcgtccttcaagttcctttgattccccgttctggaccaccaattctggtgctccagtttggaacaataactcatcacttactgtgggagcaagaggtccaattctccttgaagactatcatttggtggagaagctagctaatttcgatagagaacgcatacctgaacgtgttgttcatgctagaggagccagtgcgaaagggttcttcgaggtcactcatgatatatctcatctcacatgtgctgatttccttcgtgcccttggagtccatacccctttcattgtaagattcttcacggttattcatgaacgcggtattcctgaaactttgagagaacctcgaggtttcgcttgtgaaattttaca

SEQ ID NO: 223809 - DNA, 425 bp, Gossypium hirsutum
cccacgcgtccggcagtcccctgtaccaactccagaaacacagtttctttctcacttgtcttccccccctcacccctcaatggctgcaatcactaatttcttaactaagccacctacttccgatcttcacttcaccccaaaactcacttctctttgctctcatgcttcttttctaccatcccttgcgactaggcccagatctttttcaacaaagctaggaacaagcacaagctctcgcttcattaccaaggctacagctgctcctgggaccaagaatgctccgagtgatgagcgagttcagaaggttcacagcattgaggaattcgatgaagctctcaggaaggctaaaaacaggcttgttgtggtggaatacgccactagcttcagctatcatagcagtaaaaattacccgtttatggtagacc

SEQ ID NO: 223810 - DNA, 421 bp, Gossypium hirsutum
ggaaatccagaaaaacaaaagtagattttttcttgtttttgataatggctgggactggtttgtttgcagagatattggatggagatgtttacaagtactatgctgatggagaatggaagaagtcttcttcagccaaaactgttgccattattaatccaactaccagaaaaactcactacaaggttcaagcttgtacacaagaagaagtgaacaaggtcatggaatcagcaaaaactgcacaaaagtcttgggccaagactccactttggaaacgagctgagctacttcataaagctgcagccatcctaaaggaacataaagcaccaattgcttgagtgcctggttaaagaaattgcaaaaccagccaaagatgcagttaccgaggttgtaaggtccggggatctggtttcttacactgttg

SEQ ID NO: 223811 - DNA, 376 bp, Gossypium hirsutum
cccacgcgtccgttttgctttcagttaacaacaaaatccgtaaatggctaccactgcttctccaatggcgactcagctgaagagcagctttaggtcgtctgttacaagaggactggtagtccccaggggcatttcgggatccccgtttaaagtatcttccggaaagaccaggaccccttgcttcactgtcaaagctgttcaatccgacaagtcaacatttcaagtaatccaacccatcaacggcgaccccttcattggaagcctggagactccaatcacctcaagccccttaattgcatggtacctttccaacctcccagcctataggacggcagtgaacccacttctgaggggaatcgaagtgggtctggctcac

SEQ ID NO: 223812 - DNA, 423 bp, Gossypium hirsutum
cggacgcgtgggaaaatgtctcttacaatccccactaacctctccaaatcccttttgaagccaaagctaaactccaaactcacccccaaagtttcacgatcattggtggtatgctccaccgacaagacttcatcgccactatcatcagcttcatcactccaagccttctcagcagctcttgctctttcttccattcttctctcagccccacagcctgccgtagctgatattgcaggcctcacaccatgcaaagagtccaagcaattcgccaaacgtgagaagcagcagatcaagaagctggaatcgtcgttgaagctatacgcccctgacagcgctccagctctcgctatcaaagcaaccatcgagaaaaccaagagacggtttgacaactacgggaagtacgggctgctgtgtgggtctgat

SEQ ID NO: 223813 - DNA, 270 bp, Gossypium hirsutum
ccccgatcttacacccgtgcagttggctaaggaagtagattaccttcttcgctcaaaatgggttccttgcttggaattcgaattagaggagggattcgtgcaccgtaaatactcgagcctacccacgtactacgatggacgctactggaccatgtggaagctgcctatgttcgggtgcaccgactcggctcaggtattgaaggagcttgaggaatgcaagaaggaataccccaatgcattcattagaatcattggcttcgacaacgtgcg

SEQ ID NO: 223814 - DNA, 397 bp, Gossypium hirsutum
gccaatttgatagattatatgaacttatttttgttgaaagccatttgagcaacagtctccgccaagttctatggagaagtcacccagcaaatgttgaagcatgcggatttatctggaagtaacaacggaactggcctcttccaaaccattgtctggttgaagataatagatctctatgagcaaattacttccagcaaaactgcatcttcactagaagcaacaaaagcctaagactattagagtttcttcatacattgtactagaccttgggtccataacaaattatcctttttacagctttcctctataaaaggtttatttgattgtatggctgttgttgctttcataagaattgaatatgatcctatgcaatttattttattctcgttattcagtg

SEQ ID NO: 223815 - DNA, 423 bp, Gossypium hirsutum
aacagaacttacccacacccaatgccacaaacaagctttgcttatatgaatcacctccacttcaactaactaccttcttccacaacccaaaataagaagaaaaacaaaaatggccatggcaatggcgcttcgacgactctcctcttccattgacaagcctctccgtcctttcttcaatgccccttccctctattacatgtcgtctttgccaaatgaagctgtgtacgagaaggagaaacctggcgtcacttggccaaagcaactgaatgctccacttgaaaccgttgatcctgaaattgctgacatcatcgagcttgaaaaagcgcgccaatggaagggacttgaactcattccatcggagaacttcacttcggtgtcagtgatgcaagcagttgggtctatcatgaccaacaagtacagtga

SEQ ID NO: 223816 - DNA, 307 bp, Gossypium hirsutum
gatttcctgaattggttaatgtactttgttttctacttgatattgtttcaagctttccgtgggatcacaagaaggatattggtaagatcccataagcttccgcccggtccaccaacaattccgatcttcgggaaccttttccaggttggtgataaacctcaaaggttccttgccaaacttgccaagattcatggggacatcatgactctgaaacttggccacactactaccgtagttatttcatctgcaacaatggccaaagaaatcctccaaaagcatgatgccgtatcttgtaaccgaaccattt

SEQ ID NO: 223817 - DNA, 441 bp, Gossypium hirsutum
atttagctatagcatacactactagtacccactactagcaatggcttcctcaatgatctcatcggctaccattgccactgcctctccggcacaggctaacatggtcgctcctttcaccggcctcaagtctgcctctgctttcccagtcaccaggaaggccaacaacgacattacttctctcgcaagcaatggcggcagagtgcaatgcatgcaggtgtggcctcctactggaaagaagaagttcgagactctctcatacctccccgatcttacacccgtgcagttggctaaggaagtggattaccttcttcgctcaaaatgggttccttgcttggaattcgaattagaggagggattcgtgcaccgtaaatactcgagcctacccacgtactacgatggacgctactggaccatgtggaagctgcctatgttcgggtgcac

SEQ ID NO: 223818 - DNA, 422 bp, Gossypium hirsutum
gcacaatggccaccatcacctctgccgctgtcgctatcccatctttcaccggccttaaagccggtgcaaccgcagctaaagttagcgccacagccaaggttgcagcctctccagtcccaagggtcagcatcaaggcctccctcaaagacgtcggtgttgctgttgcggcaactgctgcaagcgcaatccttgccaacaatgccatggccattgaagtcttgctcggcagtgacgatgggggtctggctttcattcccaaagaattcagcgtaagcccaggggagaagattgtgttcaagaacaatgccggattcccacacaatgttgtgttcgatgaggacgaaatcccaagcggcgtcgacgtatccaaaatcttcatgcctgaagaagagctactcaatgccaaaaacgagacttacgct

SEQ ID NO: 223819 - DNA, 318 bp, Gossypium hirsutum
gcaatgcatgcaggtgtggcctcctcttgggaagaagaagttcgagacactctcatacctccccgatcttacacccgtacagttggctaaggaagtagattaccttcttcgctctaaatggattccttgcttggaattcgaattagaggagggattcgtgcaccgtaagtactcgagcttacccacgtactacgatggacgctactggaccatgtggaaactgcccatgtttgggtgcactgactcggttcatgtgttggaggagcttgagaattgcaagatggaattccccaatgcattcattataatcattgggtt

SEQ ID NO: 223820 - DNA, 446 bp, Gossypium hirsutum
  unsure (1)..(446): unsure at all n locations
cgggggagccccacgcttccgcccacgcgtcggcccacgcgtccgcccacgcgtccggacaaatctaaaatttctacgcttggcagaaatctagggtttttgtatctaataaatggaccacataaatactcaacccccacactcaattctcctttcttttcagctttgcttcaaaattcgatcacatttcccctaaattccgtcttttttcttcaaattccccacaaatggccatcactttctcagatctccacacggaatctggccttaaatcccttaatgacttcctcaccggcaaatcttacatctctggggataagctgactaaggatgacatanaagtttatgctgctgttttgaaaaatcctggtggttcatttcccaatgtgagccaatggtataattgtgtgtcttcccatctcgcttctagcttccctgggaaagct

SEQ ID NO: 223821 - DNA, 427 bp, Gossypium hirsutum
gtctcaagctctctcttcctgtcttcgtctacttcgcctctttctctatggatccctacaagcaccgtccatcaagtgctttcaattcaccattctggactaccaattctggcgctccagtttggaataacaattcatctctcactgttggacccagaggtccaattctccttgaggactatcatctggtggaaaagcttgccaactttgacagggagcggattccagaacgtgttgtccatgctaggggagcaagcgcaaagggtttcttcgaggttacccatgacatttctcaccttacatgtgctgattttctgcgagcacctggagttcaaacccctgttatcgtgcgattttcaaccgtcatccatgagcgtggaagccctgaaaccctcagggatcctcgtggttttgcagtgaagttcta

SEQ ID NO: 223822 - DNA, 424 bp, Gossypium hirsutum
cggacgcgtgggtaaattattagggttatttttaaaattttcatatttgataaaggtgtttatggaaaccctttctcctaaatcaacctcaaacttttttaaccaaaggatgttatacccaaactccatcattataaattggaccttggaactgcgggaaataaacgggagatatagttagctatagcatacactactagtacccactactagcaatggcttcctcaatgatctcatcggctaccattgccactgcctctccggcacaggctaacatggtcgctcctttcaccggcctcaagtctgcctctgctttcccagtcatcaggaaggccaacaacgacattacttctctcgcaagcaatggcggcagagtgcaatgcatgcaagtgtggcctcctactggaaagaagaagttcgagac

SEQ ID NO: 223823 - DNA, 341 bp, Gossypium hirsutum
gggacgacccacaatggcgaaaacgggtcctcaatctctttattccttactttctttcccatcaaacactccttttttttttccaaggctgtttaagatggcagatggtcatgatattcagccccttgtttgtgacaattgaactggaatggttaacgctggttttgctggcgatgattctccccgtgccgtttttcctaacttccgtgggtcgttcacgttttcacctgtgttattgttggcttggaccaaacagatgcctattttggtgatgaatctcatttacatagaggtactttgactttgaaataccctattgttcatggtcttgttagcaactg

SEQ ID NO: 223824 - DNA, 425 bp, Gossypium hirsutum
tgggaatcaaccccattatgatgagtgccggagaattggaaagtgggaacgcgagaaccagccaagttgatcaggcaaaggtaccgtgaggccgccgacattatcaagaaagggaaaatgtgttgcctcttcatcaacgatctcgacgctggagccggtcgtatgggaggaaccacacaatacacagtgaacaaccaaatggtgaacgccacactcatgaacatcgctgataaccccaccaacgttcagctccccggtatgtacaacaaggaagagaaccctcgtgttccgatcatcgtcaccggtaacgatttctcgacgctgtacgcgcctctcatccgtgacggtcgtatggagaagttttactgggcacccaccagggaagataggatcggtgtttgcacaggtattttcaggaccgacaa

SEQ ID NO: 223825 - DNA, 423 bp, Gossypium hirsutum
gccagaaggaccctttcgactttctaccaaaggggtttctggagaggacaaaagggcggggtctagtggtgccatcgtgggcaccacaggctcaagtgctgagccacagctctaccggagggtttttgacccactgcgggtggaattctactctggaaagtatcgttaacggggtgcctttgatcgcctggccgctctacgctgagcaaaaaaatgaatgccgcgatgctaacccaagatattaaagtggcactgcgaacagaacccaacgaaaacggtttagtttgcagagacgagattgcaaaggctgttaagggtctaacggaaggtgaagaagggaaaggtgttcgaaatagaatgaaggacctcaaggaagctgcggcaaaagcactttttgaaaatgggtctttcaccaaggcactt

SEQ ID NO: 223826 - DNA, 334 bp, Gossypium hirsutum
gaaaaacaaaggcacccgtatgctctcataccctttggaattgggccacgggcatgcgtcggccggaagttctccttacaggaaatcaaactttccttgatacatctatatcggaaatatacatttcaacattcttcaaccatggaaaatcctttggagcttgaatatggcatagttctcaacttcaaacacggtgtaaaactcactgtcacaaaaagaacatgattattgtatctgactgagttatatttcctcagtcgtattaatgcaaaaaggtgtcatactatacgcctaaaattctaaaacaaatgaaagaacaaagaaatgtttggtc

SEQ ID NO: 223827 - DNA, 423 bp, Gossypium hirsutum
agattaccttcttccttagccaactgtacgggtgtaagatcggggaggtatgagagtgtctcgaacttcttcttcccaagaggaggccacacctgcatgcattgcactctcccaccattgcttgcaagagaagtgatgtcgttgttggccttcctagtgactgggaaagcagaggcagacttgaggccggtgaagggggccaccatgttggctaaggaagtagattaccttcttcgctctaaatggattccttgcttggaattcgaattagaggagggattcgtgcaccgtaagtactcgagcttacccacgtactacgatggacgctactggaccatgtggaaactgcccatgtttgggtgcactgactcggctcaggtgttggaggagcttgagaattgcaagaaggaataccccaatgca

SEQ ID NO: 223828 - DNA, 264 bp, Gossypium hirsutum
tttcgctcttttgtataactgtagcatatagtactagttagcagtaatagcaatggcctcctccatgatctcatcggcaaccattgtcaccgagaactgttccttcccggcacaggccaacatggtggcccccttcaccggcctcaagtctgtctctgctttcccagtcactaggaaggccaacaacgacatctctttttttgcaagcaatggtaggtagagtgcaatgcattgccgtgtggtcttctcttgggatgaaagaat

SEQ ID NO: 223829 - DNA, 359 bp, Gossypium hirsutum
tggacgcgtgggtccatggacggtttgccatgttggctacgcttggtgcactggccgttgaatggctcactggtgttacatggcaagatgctggcaaggtggagttagttgagggttcatcgtatctcggccaaccccttcccttctcgatgacaacattgatttggatagaagtattggtgatcggattcatcgagttccaaaggaacgccgagcttgacccggagaagaggctgtaccccggaggaaagtactttgatcctctcggcctagccgccgacccggagaaggaagcaaccctacaattggctgagatcaagcatgctcgccttgccatggttgctttcttggggtttgct

SEQ ID NO: 223830 - DNA, 353 bp, Gossypium hirsutum
cccacgcgtccgctctttgttttattcccttccaaagatggaccgcttgtctcgtctcttcctcctcctttcctccgtcgttgcttcggccgtcgtctccgacgttaatagcgatgacgatcctctcatccgtcaagttgtttccgatggtggtgtcgaggaggactccgatgaccatctccttaatgcggagcaccacttcacgctgttcaaatccaagtatgggaaaacctacgcatcccaggaggagcacgattaccgactgggagtcttcaaggctaacctgcgtcgggccaagcgtcatcaggtcctggaccccagtgccgtccatggcgtcacaaagttttccgatt

SEQ ID NO: 223831 - DNA, 352 bp, Gossypium hirsutum
gttgaacactgtgagcgagttcatttgataatagctgcaaagcgagtctgcagggcaaattgtcgcgagtgtttattctttttgggagtgaatcagcgcccccttgttgttggtgataaccacaagctacaggtggcaccgtataatacattctactctcagttggaggagcacatgactgaagttggcattcaggccactatgaatagatgggatgaacctttggcacttggagcggttgatccacacgattcattatctcatcctgcaggtgtttctgatgcgcaagcagagtcagctgcacagttagatcctgatcagttcacaaatttcctgattccaaactggtttg

SEQ ID NO: 223832 - DNA, 370 bp, Gossypium hirsutum
gtgttaaaccctgattctccccatccccactaatatctccttgatggctttgagggcggcggcgacgagagcgatgttcgctggggcggctccccagggattcaggcgcatgtgttcaacagctacggctaattcctttatgccgcctccaattacggcgatgggcaacggcgagggaacccctggtcgagagcaagcgcctccaagtaccaacctctttgtctctgggcttaacaagcgcactaattcggagaaacttcgagaagccttttctcagttcggacgtgtaattgatgccagagtagtgactgatcgtgtatcaggatattctaaagggtttggtttcgtaagatatgccactatagaggaa

SEQ ID NO: 223833 - DNA, 359 bp, Gossypium hirsutum
aacatttcacgaacttcactctcctttctctaatggcggctgccgtctccaccagcggggctgtcaaccgagcaccgttgagtttgaatggatcaggtgccggagcttctgctccaagctcagctttcatggggaacagcttgaagaaagtgagcgctaggttcaacaacaacggcaaggctccagtgggaagtttcatgattgtggctgccaaagaaatcgacgaagacacacagaccgaccaggaccgatggaagggtcttgcttatgatatctccgatgaccaacaagacattaccagagggaaaggtatggtcgactcattgttccaagctcccatgaacgatggtactcactat

SEQ ID NO: 223834 - DNA, 357 bp, Gossypium hirsutum
ggaaaatctttccaatgggagctttttttttccaagatgggaatcaaccccatgatgaggagtgccggagaattggaaagtgggaaccccggagaaccagccaagttgatcaggcaaaggtaccgtgaggccgccgacattatcaagaaagggaaaatgtgttgcctcttcatcaacgatctcgacgctggagccggtcgtatgggaggaaccacacaatacacagtgaacaaccaaatggtgaacgccacactcatgaacatcgctgataaccccaccaacgttcagctccccggtatgtacaacaaggaagagaaccctcgtgttccgatcatcgtcaccggtaacgatttctcg

SEQ ID NO: 223835 - DNA, 356 bp, Gossypium hirsutum
cccacgcgtccgctcaaagctctgtttctccattgctgcttcatcatccgtctgttccaaacccaaactcaaacaaatcccacaactttccctcccaaaactccccaccccaaagttcttgaaaacccaacaaatcccctcactctcctccaccactctcaaatctatctccctcttcacagtcaccactttatcctttgccccaccttctcttgctgcagaaatagaaaaggccgctcttttcgatttcaacttaaccctccccatcatgatggtccagttcttgttcctcatgtttgctcttgacaaggtctactttaccccactcgggaaattcatggatgagagagatgctg

SEQ ID NO: 223836 - DNA, 351 bp, Gossypium hirsutum
ggtcaagccaatatcaaatgactttccttttagctcacagctcctctgttgagtgctataatgggtaaggagaaggttcacatcaacattgtggtcattggccatgtcgactccgggaagtctacaaccactggtcatttgatctacaagcttggtggtattgacaagcgtgtgattgagaggtttgagaaggaggctgctgagatgaacaaaaggtcatttaagtatgcatgggtgcttgacaagcttaaggccgaacgtgaacgtggtattactatcgatattgccctctggaagtttgagactaccaaatactactgcactgtcattgatgcccctggacaccgtgac

SEQ ID NO: 223837 - DNA, 354 bp, Gossypium hirsutum
agccaaacaagatacagattttcgtttagactctaaccggcaagacgagcactgtcgaggtcgagagctccgatacgatcgacaacgtgaaggccaaaatccaagataaggaaggcatccctccagaccagcagcgtctgatcttcgccggaaaacagctcgaagacggccggaccttggccgattacaacatccaaaaggagtcaactctccacctcgtcctccgtctgcgcggtgggatgcaaatcttcgtgaaaaccttgactggcaagacaatcactctcgaggtcgagagctccgacacgatcgacaacgttaaagcgaagatccaagacaaggaaggcatccccccag

SEQ ID NO: 223838 - DNA, 356 bp, Gossypium hirsutum
  unsure (1)..(356): unsure at all n locations
cccaaaaatgaggaagtttttcctcttttcgtcancggcctaaaccccgaaggtgacgccggatccatncggcccgaccccgcttcgttccctaaccaaactctcccttccaccaccgncaccacagccgccggtcatcggaaaaaagggaccggtgttcgagcatggcttatactggactcgacatgccaaacccagatggtggaagccggaaaacatgctatcatgagacgtacgggtttgcctgctcgagatcttcggatcttggacccgctgttgtcgtacccatcgacgattcttggtcgagaaagggcgatcgtgattaatttggagcatatcaaggcaatcatcacggc

SEQ ID NO: 223839 - DNA, 354 bp, Gossypium hirsutum
ctcgacacctccatccccattcttattcgccgcaaagaagtgaaagactacggagctgccaagtccatcgaaggtgtttacgaaaagggtcaagcttgtttggtggtggaagacctcgtaacgtccggtgcatcggttctcgaaacggcggcaccgcttcggtctttgggtatcaacgtaacggatgccgtcgtggttatagatagggagcaaggcgggagggaaacgctggaggagaatgggattaaacttcatgcactttttactttaactgagatggtcaaggttttaagagctaaagggaagctggaggaagagatggaaagtttggttatgaagtttttggaggagaat

SEQ ID NO: 223840 - DNA, 352 bp, Gossypium hirsutum
tggaaatcctgcgaaaatttctttgtgaggattgtctcttgctttgcccagaggggagtgttttggcatgcttggacccaatggtgctggcaagacttctttaattaatatgatgattgggctcacaaaaccaacctcagggacaacatatcttcagggtttggatatactgacttctatggatataatctatacaagcatgggtgtctgtctgccccggacctgctctgggaaactttaactgggagggagcacttgctattttatgggagactgaagaacctcaaagcttctgcattaaatcaagcagtggaagactctcttaagagtgtcaacctatttcatggagggg

SEQ ID NO: 223841 - DNA, 360 bp, Gossypium hirsutum
  unsure (1)..(360): unsure at all n locations
gccaccggcttccatcaacggtggtttgctttacctcctctncttcctccaccacgcaccgcctttttttccgctcgtcgacgacctacattgcggccttcggtcgtcgctagccttaactcttctccttctcctccgactcttatccaagaccgcccggttttcgctgcccctgttcctttgctcaccccgagagaagagatgggaaacaagtcctacgacgaagccattgaagctctcaagaaacttctcagtgagaaaggagaactgaaagctgaagcagcttgcagggtagatcaaataacagcagagttaaacacaacatcagctgacggcaaaccatctgactcttctgttgag

SEQ ID NO: 223842 - DNA, 357 bp, Gossypium hirsutum
atctaaagggttctttagattttcttaccatttccttctattaagaaaatggcgtcccagattgttggatatccccgtatgggaccaaagagagagcttaagtttgctttggaatccttctgggataagaagagcagtgccgaggatttgcaaaaggttgctgctgatctcaggtcatccatctggaaacagatgtctgatgctgggatcaagtacatccccagcaatgctttctcttactatgaccaggtgctcgatgccacatccatgctcggagctgttccacctagatacggctggagtggtggtgagatcggatttgacacttacttctccatggccagaggaaatgcctct

SEQ ID NO: 223843 - DNA, 378 bp, Gossypium hirsutum
ccgggcggcccaaggcttccgcccacgcttccgggctctctctcttttttttcttttccttttaaatctgtttgaaattgacctaaaggttgattcaaccatgaagaggtcacttggcagctcagattctttgggtgctttgatgtccatctgtcccacaacagatgaacatagtcctaggaacaaccatgtttacagcagggagtttcagtcgatgttagatggattagatgaagaagggtgtttagaagaatcaggtcatgttgctgagaagaagagaagattaagtgtagatcaagttaaggccttggaaaagaatttcgaggttgaaaacaagcttgaacctgaaaggaaagtgaagttggctcaagagcttgg

SEQ ID NO: 223844 - DNA, 345 bp, Gossypium hirsutum
cacagcaatggcagccttgaactccagtgttttggcatgcaactgtgctatctcaggcactggatcatctgagcttaatgccaaacttgcttcagcgccatcagttgcttccccagttatgtgcggtggtcgcaagttgcctgtgatcagagcccagcaggctaaattttctgattccaaaggatcaggtgccagtgaaggaagaagagctgctgtgctctacttggcagctggccttttcaccacagctgttgcttcttctgcaaatgctggggtcattgacgagtaccttgaaaagagcaaagctaacaaggaattgaatgacaagaagaggttggcaacaag

SEQ ID NO: 223845 - DNA, 351 bp, Gossypium hirsutum
cccacgcgtccgcaggaatcgcctttggtcgctttgatgattccttcagtttggggactgtcaaggcctaccttgctgagtttatctcaactttggtgtttgttttcgccggcgttggctctgccattgcttacaacaagttgacaactgatgcagccctagatcccgatgggctagtcgccattgctgtttgccatggatttgctctctttgttgcagtggctatcggtgccaacatctcaggtggccatgtcaaccctgcagtcacttttgggttagctcttggtggccaaatcaccatactaactggcatcttttactggattgcccaacttcttggatccattgttg

SEQ ID NO: 223846 - DNA, 354 bp, Gossypium hirsutum
cggacgcgtgggcggacgcgtggtgttgacgcgtgggcggacgcgtgggtttaggtatagcatacactactagtacccactactagcaatggcttcctcaatgatctcatcggctaccattgccactgcctctccggcacaggctaacatggtcgctcctttcaccggcctcaagtctgcctctgctttcccagtcaccaggaaggccaacaacgacattacttctctcgcaagcaatggcggcagagtgcaatgcatgcaggtgtggcctcctactggaaagaagaagttcgagactctctcatacctccccgatcttacacccgtgcagttggctaaagaagtggattacct

SEQ ID NO: 223847 - DNA, 352 bp, Gossypium hirsutum
ctaaaagaaagaaccagagttttttttctctttagtttacgtttattggccttgtggaatttttgatactaaaaaaaggaagcaacgaagaagggaaatggagggcaaagaagaggatgttagattgggagccaacaagttcacagagaggcaaccaattgggaccgcggctcagagtcaagatgacgggaaagactacactgaaccaccaccggctccatttttcgagcctggcgagttaacctcatggtctttttatagggctgggattgccgagtttgtggcgactttccttttcttgtatatcactattttgactgttatgggagttgttaaggaaaaaactaagtgc

SEQ ID NO: 223848 - DNA, 353 bp, Gossypium hirsutum
cttgggttgagtgtagagatgaggtaaaatcatgggtgccaaagttcttggcttgtttgctttgctttccttttcagctgtctcggcatttgcacaggatgaggaagaccaaggtcttgttatgaacttctacaaggattcttgtcctcaggctgaagacattatcaaggagcaagttaagctactgtacaagcgacacaaaaacactgctttttcttggctgagaaacattttccatgactgtgctgtccagtcatgtgatgcttcactgctgctggactccacaagaaggagcttgtctgagaaggagacagacaggagctttggcctaaggaatttcaggtacattgaga

SEQ ID NO: 223849 - DNA, 356 bp, Gossypium hirsutum
gttggctcgtaagctttcttcgtgctctacttgcaagtttgagaaattttattgtttagcaatcaacggtgatggcttcatctctagctctcaagaggctcctctcatgcaacatcctccctagctccttgcgggtggtccgcccaatggccattgctccatcctcctccaggctctttaacaccaatgccatgcgtgagttcgacgacgatggtgacgagcgtgacctcagtgatgaacgccagcgttcactttctcgccgcggtgacggttttttcacagatgtgctcgatccttttgctccaacaaggagcctgagccaagtcctgaacatgatggatcagttcatggagagc

SEQ ID NO: 223850 - DNA, 358 bp, Gossypium hirsutum
gtttgtttaactgtagcatatatttttagtttgcacaaatagcaatggcctccgccatggtctcattggcaaccattgccaccgtgaactgcttcttcccggcacaggccaacatggtggcccccttcaccggcctcaagtctgcctctgctttcccagtcactaggaaggccaacaacgacatcacttctcttgcaagcaatggtgggagagtgcaatgcatgcaggtgtggcctcctcttgggaagaagaagttcgagacactctcatacctccccgatcttacacccgtacagttggcttaggaagtagattaccttcttcgctctaaatggattccttgcttggaattcgaatt

SEQ ID NO: 223851 - DNA, 356 bp, Gossypium hirsutum
cccacgcttccggccaaaaccagtttcaattgaagtgtggaacccaaatgggagatacggagttattagcaccaaacctatgcctggaactcgatggatcaacctcttaatcgagcaagattgccgtgtcgaaatatgtactgagaagaaaacaattttgtccgttgaggatatcatttctttgattggcaataagtgcgatggggtgattggacagttgactgaagactggggggagactttatttgcagctttaagcagagcaggaggcaaagcatttagtaacatggctgttggttacaacaatgttgatgttaatgctgccaacaagtatggtgttgctgttggtaacactc

SEQ ID NO: 223852 - DNA, 353 bp, Gossypium hirsutum
ttcagttaacaatttcacagttgttttcttcagtctctctctcagccgtggctgcagccatctccaccgtcgctgccgctgccgccgccaaccgagctctgggagtgtcagtcccaacctcagctttcatggggaagaaagtgagctcaagattcaacagcaccaggcaggttccttcgggaagttttaaggtgatggcggcggagaaagagatagacgaagagacacagaccgaaaaggaccgatggaaagggttggcttacgatatttcggacgaccaacaggacattactcgagggaaagggatggtggattccttgttccaagctcccatgaatgatggaactcactat

SEQ ID NO: 223853 - DNA, 352 bp, Gossypium hirsutum
cccacgcgtccgtcactttaaccttgtacactactattacacttccgggaaaagatcatggccaccgtcacgacgcaagcctctgccgctgttttccggccatgtgcatcgaaaacacggttccttactggttcttccggtaagttaaaccgagacgtttcatttaaaccagtggcttctacatcgactagctcattcaaagttgaagcaaagaaaggggagtggttacctggtcttccttcaccagcttacctcaatggcagtcttccaggtgataatggctttgatcctcttggattggctgaggaccctgagaacttaagatggtatgtacaagctgagcttgtgaatg

SEQ ID NO: 223854 - DNA, 352 bp, Gossypium hirsutum
cccacgcgtccgatcacctttacattaaccaagtgttcgacctctccagtgatgtgcttccacaaggtgggaccaagtgctatgatgacgacggccgcctcaagcgatctggaaccgtgtggaccgctagcgcacatattattacagcagtcattggttcaggggttctgtcactggcttgggccacggctcagctgggatggatcgctggtccaatagtgatgattttgttttcttttgtaacttattacacctccactcttcttgccgcttgttaccgctctggtgaccctgttaacggcaagcgaaactatacttacatggatgctgtccgatcaaatcttggtgggtt

SEQ ID NO: 223855 - DNA, 351 bp, Gossypium hirsutum
ctcaaagccaggtctgggggcttttaagttttgacaaagatggaagtgcaaaagcctcaacatgggcaatatattgaaataaatgtggatgttggtcaaggccaaaggcgtataggagggagtaagttttgtggggaagcaccttgtggattttctgatgccggtactagctctaaggatgccgaagaaagatcggcttccatgcgcaagcttttaattgccgtggtgctttgcgtcatcttcatgagtgtagaagtagtgggaggcatcaaagccaatagtctagcaatattaactgatgcagcacgtttgctatctgatgttgcagcttttgccatatccttgttttcg

SEQ ID NO: 223856 - DNA, 354 bp, Gossypium hirsutum
cccacgcgtccggtggaagtcaagttcatgtctccatcagataatttaagtcaagaagattggaattggccattggggtttattttttccctaagaaccgagaactagaccgaaaacagttatagtttgagaagaaaagagaagaaaggcaaaaaggaagaaactttggagagaaatgagtggtggagcggaagaaggggtaacattagagcatacgccaacatggattgttgcagcaatttgtactgtgattgttgccatttctttggctatggaacgtttgcttcatgttgttgggaatgttttgaagagaaaacaacagaaaccactctttgaggctcttttgaaagttaa

SEQ ID NO: 223857 - DNA, 351 bp, Gossypium hirsutum
cccacgcgtccgcccacgcttccgtttggcctctacaaccatggctctggcttgcccatcattcgccggtaaggcagtgaagttctccccttccacccctgaaatccagggaactggccgtgtttccatgaggaaaaccaccaagcctgttccttctggtagcccatggtacggtcctgaccgagttttgtacttgggtccactttccggtgagccaccatcttacttgaccggtgagttccctggtgactatggttgggacactgctggactctcagctgatcccgagacctttgctaggaaccgtgagctcgaagtcattcactgcagatgggccatgttgggagctct

SEQ ID NO: 223858 - DNA, 354 bp, Gossypium hirsutum
ccacactctcaaattcagttaacattttcacagttgttttcttcagtctctctgtcagccatggctgcagccatctccaccgtcgctgccgctgccgccgccaaccgagctctgggagtgtcagtcccaacctcagctttcatggggaagaaagtgagctcaagattcaacagcaccaggcaggttccttcgggaagttttaaggtgatggcggcggagaaagagatagacgaagagacacagaccgaaaaggaccgatggaaagggttggcttacgatatttcggacgaccaacaggacattactcgagggaaagggatggtggattccttgttccaagctcccatgaatgat

SEQ ID NO: 223859 - DNA, 352 bp, Gossypium hirsutum
cccacgcgtccgcaacagttatgttctacgacagattatccctctcctgtaaggcaaagctccaaaaactcgaaaaccctgatccccgtttcctcaaatacggttcccctcatccagctgttgtttcccacacgcacatactatcttcccccgaaaccaaaattacaactttgcccaatggccttcgtgtcgccactgaatctactctatcttcccgcacggccacggttggggtctggatcgatgcggggtcgagatttgagactgaagagactaatggaacggcgcacttcttggagcatatgatatttaaagggacagagaggaggtctgccagggacttggaggaaga

SEQ ID NO: 223860 - DNA, 360 bp, Gossypium hirsutum
cagcaatttttatatgggcaagcactctccagctatgcttcctccacaagctagtgttgggtatcagcagcaactgcttcctggaatgaggcctggtggcccccctgtaccaaacttctttgttcccatggtccagcagggtcagcagggccagcgtccagggggacgaggaggagctggtgctgtccaacagactcagcaaccaatgccgatgatgcagcagcagatgatgcccagggggcatgcctatcgttacccccctggtcgtaacatgcctgaagttccactgtctaatgttggtggaggcatgctttctgttccatacgacatgggtggcatgcccttgcgagatgctggtat

SEQ ID NO: 223861 - DNA, 358 bp, Gossypium hirsutum
  unsure (1)..(358): unsure at all n locations
gagcttanaaccttttcttgcacgttaaaattgattcttcactcactgatcaggagcaagacaagtaccgttcttacttgcatggagaaggtgaaaagaataccaactggaagcttggtgctcctccaaactatgacactgttaacaagctctttgaagaaggccgaaccaagatatggcctcctgcatcactagaagagaaggtccagaaccttgtgaagacatgggaaatggaaatgttcaataaaatatccttccctgactacaaatcagtgaaactacagaattatacagtcagcgtgaatgggaggaaacctttgagtttagaagagaagaggaagctgggaggaggctataa

SEQ ID NO: 223862 - DNA, 355 bp, Gossypium hirsutum
tcgatttccattcctttgacttcttttcatcatttcaagaaatgggttcaggagaaaaggtatttgtttatgaagatctggtgaagcacaaagacagaaatgattgttggcttttgatctctggaaaggtgtataatgtaacccaattcttggaggaccatcctggtggagatgaagtttgcttgctgctagtggaaaagatgcgaccaatgatttcgaagacgtaggtcacagtgatgatgcaagagagcagatgcagaagtactatattggtgaggtcgatgccaccaccattcccgcacgaaggatgtacaaagcacagacgtcaaccgcggcaactcaacaagaggagcct

SEQ ID NO: 223863 - DNA, 353 bp, Gossypium hirsutum
aacaaaatcagttgcttcacaatgttctctacaaccatggctctttctggcccgtcattcgccggtaaggcagtgaagttctccccttccacccctgaaatccggggaactggccgtgtttccatgaggaaaaccaccaagcctgttccttctggtagcccatggtacggtcctgaccgagttttgtacttgggtccactttccggtgagccaccatcttacttgaccggtgagttccctggtgactatggttgggacactgctggactctcagctgatcccgagacctttgctaggaaccgtgagctcgaagtcattcactgcagatgggccatgttgggagctcttgggtg

SEQ ID NO: 223864 - DNA, 352 bp, Gossypium hirsutum
tcctttttctttttctcagtcaagtttggttctcagggatcggttatggctatgcttttgctgatgatgttcactttatcatcagcttccgacatgtccattatatcctacgatgaagcccatcccgacaagtcaacgtctagttggagaacagacgacgaagttatggccatgtacgaggagtggcttgtaaagcatggaaaaacatacaacggtttgggtgagaaagagaggaggctccagatttttaaggataaccttaggttcatcgatgaacataacgccgatgagagtcacagttttaaggttggtttgaaccgctttgctgatcttaccaacgaggagtaccgag

SEQ ID NO: 223865 - DNA, 379 bp, Gossypium hirsutum
  unsure (1)..(379): unsure at all n locations
ccgggtcgcccaacgccttccgaccattttcctccttttaatcttaattacattcacccaaaaaataaaacccttgggaaagcaaanaaggaagaagaagatgtcttggcaagcttacgtagatgatcacttgatgtgtgaaatcgaaggaaaccatctctctgccgccgctatcatcgcccacgacggcagcgtttgggcccaaagcgccaatttccctcagttcaagcccgaagaaattaatgccatcatgaatgactttaatgaaccgggtacgctcgctcccaccgggttgcacctcggtggcacgaaatacatggtgatccaaggcgaaccgggagctgttatccgagggaagaagggacccggaggtgttact

SEQ ID NO: 223866 - DNA, 360 bp, Gossypium hirsutum
gttagcttaagcatacactactagttccctttactagcaatggcttcctcaatggtctgagtcggctaccattgccactgcctctccggcacaggctaacatggtcacccctttcaccggcctcaagtctgcctctgctttcccagtcaccaggaaggccaacaacgacattacttctctcgcaagcaatggcggcagagtgcaatgcatgcaggtgtggcctcctactggaaagaagaagttcgagactctctcatacctccccgatcttacacccgtgcagttggctaaggaagtagattaccttcttcgctcaaaatgggttccttgcttggagttcgaattggaggagggattcgt

SEQ ID NO: 223867 - DNA, 363 bp, Gossypium hirsutum
tcgaaaaaacgaaaaccttccttaaagtgtccttttcattactggactgacccataggtgaagaaaagagggaccccaatataataacctctttgtctttggtggtttagccattgaagaaacgaagctgaagagaaaaagaaaattaacagagtcggaagaaagaatgtttgcagcggagaatggactcaaaggggacccgaggctacaagccatatctgacgccattagagtggttcctcacttcccaaaaccagggattatgttccaagacataacaacgttgttgctggatcacaaagcgttcaaggataccgtcgacatatttgtcgatcgctacagagacatggatatatctgtcgt

SEQ ID NO: 223868 - DNA, 357 bp, Gossypium hirsutum
cccacgcgtccggccatacattttttgggttttttggagtagaactgcttgaaagtagaaaagcatggcaacagtgacagcttcacactttgtttcgaggatttcccatggagctgaaactaaggccaatctgagtcagacagggttggggaatcaatccatgactcacaatgggttgaggtttttaaacaaggtagataggttgcagatgaggaccaatgcaaaggctgttgctaggaacgcagtgaaagatgaacacccaactgcaaatgacaagctatctgggaaaattatatgtggaacagggatgaatattatctttgtgggagctgaggttggtccatggagcaaaactgg

SEQ ID NO: 223869 - DNA, 359 bp, Gossypium hirsutum
cccacgcgtccgctactagtaccctctactttcaatggcttcctcaatgatctggtcgggtaccattgccactgcctctccggcacaggctaacatggtcacccctttcaccggcctcaagtctgcctctgctttcccagtcaccaggaaggccaacaacgacattacttctctcgcaagcaatggcggcagagtgcaatgcatgcaggtgtggcctcctactggaaagaagaagttcgagactctctcatacctccccgatcttacacccgtgcagttggctaaggaagtagattaccttcttcgctcaaaatgggttccttgcttggagttcgaattggaggagggattcgtgcacc

SEQ ID NO: 223870 - DNA, 354 bp, Gossypium hirsutum
cccacgcgtccgctttccctctcatttccgctcatcttccttctttcaggctaggccaatgtctacttgttcacaggacttagctccgctcctcggcgtcaacggcaccggcgccgccgactacatatgcggcaagttcagtgatgcttcttatgccgtcgacaacacttaccttctcttctcagcctacctcgtcttctccatgcaactcggctttgctatgctctgtgctggctcagtccgagccaaaaacaccatgaacatcatgttaaccaacgtcctcgacgctgccaccggtggtcttttttattacctttttgggttcgcctttgcctttgggtccccttccaatgg

SEQ ID NO: 223871 - DNA, 357 bp, Gossypium hirsutum
ggaaggccggtattgaaaagataatttttatgtgtaaatttagacataataaaggcccgcataacatccttcgacttgcttcattgattagccctctgaaagcccaagaaaaatggcttctgcttccgctactctcctcaagtcttcacctattatcgacaagtccgagtggattaagggccaaaacctccgccacccttcggtttgttttgtacggtcacaccctacatcggccgcctttaccgtccgtgctagttcatatgccgatgagcttgttaagaccgcgaaaactgttgcatctccaggtcgtggtattttggccatggatgaatcaaatgctacatgtgggaagcggct

SEQ ID NO: 223872 - DNA, 354 bp, Gossypium hirsutum
ctcggagttccggaagatttacagtaaatgatcagtgacctcatgtcgatatgcgacaacaatgttcaagccaacaagaatgcgagtcccattaaaaatccagtcacgtaaggtcaaaatcttcttcagctgaaaacccaacagcaacaggacgagttcttccgtggtcaaggcctttccttcttcaatgagtccaacataccggctaataaccagattttaccacaaggggaagctcaattcgaccggttgaagacctcgaattctccattcgagaccacctacaacaacaacaacagtttcaaactgatgttcggctctccattcgatttgtcttcatttgattacaatgat

SEQ ID NO: 223873 - DNA, 361 bp, Gossypium hirsutum
cacccgtacaagaagaagaaatgtgatccttatgatgtctcttacaatcccaactaatcgctcaaaatcaattttgaagccaaagctggagacccaagtgatccccaaggcttcatccagatcattgattgtatgctcctccagcaatccttcctcctccgacaaatcggcttcatcactccaggccttctcagcggctctcgctctttcttccatccttctttcggctccactccctgctgttgcggacattgcggggctcactccttgcaaagagtccaagcaattcgccaagcgcgagaagcagcagatcaagaagctggaatcctcgttgaagctttacgcccccgatagcgcaccg

SEQ ID NO: 223874 - DNA, 362 bp, Gossypium hirsutum
aggcgacgcgttcgaaacctgataacttatgctttatatataacaacaccaatcaggaatggtgggcaagttttaatgtgactgcgatcccaaaagagatagacgaagagacacagaccgaaaaggaccgatggaaagggttggcttacgatatttcggacgaccaacaagacattactcgagggaaagggatggtggattccttgttccaagctcccatgaatgatggaactcactatgctgtcatgagttcctatgaatacatcagccaaggtcttaaaacgtacaatttggacaacaacatggatggtttctacatcgctcctgcattcatggacaagcttgttgttcacatcagcaag

SEQ ID NO: 223875 - DNA, 359 bp, Gossypium hirsutum
cctctccacccttgaaccatgtcggcttttgttggcaagtatgcagaggagttgatcaagaacgccaagtacatcgccacgccaggcaaaggtattttggcggcggacgagagcacaggcaccatcgggaagcgtctctcgagcatcaacgtcgagaacatcgagtccaatcgccaagccctccgcgagctccttttcacctctcccaacgcattatcctgcctctccggtgtcattcttttcgaggaaacactttaccagaaaacctctgacgggaaacccttcgttgaaatcctcgaagagaacaatgtcattccaggtatcaaggtcgataagggcaccgttgagatagccggcac

SEQ ID NO: 223876 - DNA, 361 bp, Gossypium hirsutum
gccacgcgtccgcccacgcgtccgtttagtctatacattttcataacaatggctgcgatcagaaacgccgctgctacatcctccttcatggggacactcttccccgacgtctacacaagttcagggagattcgtcgccaggtttggctttggcggcaaaaaagcagctcccaagaaagtctcgaaacgaaccccagaccgccctctatggtacccaggagcagtggcgcctgattggctcgatggaagtttggtgggtgattacgggttcgacccgttcgggttagggaaaccggcggagtacttgcaatatgatttggattctttggaccagaacctggctaagaattcggctggtgaga

SEQ ID NO: 223877 - DNA, 358 bp, Gossypium hirsutum
ggccacgcgtacgctctgaagcttttattttctttctataaacagttctaaagcacgttctgggtgtttttcttttggttggagatctcggcggagatggggaaacgacgctgtgttgtggcggcattagcagcgataatgttgatgatggagttggcggcgttgacagtagcagaaaacagaagaagtatgttgagtaatggtcttggaatgactcctcccatgggttggaacagctggaatcactttggatgcaatattgatgaaaaaatgatcagagaaactgctgatgctctagtttcaactgggctctccaagcttggatatgaatatgttaatatagatgattgctgggctg

SEQ ID NO: 223878 - DNA, 350 bp, Gossypium hirsutum
gtttcatgccggctaacttatgctttattcatcacaaccaccatcaggaatgggtggcaaattggctttcactttgatgcctcctcgtttcttcactgcgactattcaaaaacccgtggtttgtttctcttcttcttcttcttcttctatcaggtttcaacccagtgggaagcatctatgttttcgacgccgattgctcttactacccctcaaggctactgccgatcaacaaggtcaggtcgaagaagatgaagttgttgatagtaaaattctgccttactgtagcatagacaagaaagagaagaagtctttgggtgaaatggaacaagagtttcttcaagccctacaag

SEQ ID NO: 223879 - DNA, 352 bp, Gossypium hirsutum
cccacgcgtccggctgtcgaagaatacgaggatagattttaacatctacagccggaatacatcatctacaagctcaacggttccttgtagcagtgacaagtgcgaacaacatagaaaatgttcttcaccttcaagtaattgtccttatcaagttatctatctatccaatggcacctcgtcgatcggggttttggtggaagatgtcttgcgcttgactacggacgacgataaaacaaacaaacccgtcgacgccaagattactttcggttgcgggaagattcagactggatcgttcttaaacggtgcagctcctaatggtcttttcgggcttggtatggacaatatatcagtt

SEQ ID NO: 223880 - DNA, 353 bp, Gossypium hirsutum
tgataaccgaatcatacgatgctctcttctctttatatctcaacctctgtttcggtttctccgatttctccgccgtctacttcccgctccaaattccggccacctcgctccgccgctacttacacttcgcaacaacagaaaggatcgacgaacggttacctaagccgtcaaggaatggcgacgtgcacgtcgttgtacgaagttctagggattcccgtcggtgcttcgaacgaggaaatcaaatcggcgtaccgccgattggctagagtttgccatccagacgtggcggcaatcgatcggaaagattcgtcggcggacgagttcatgaagatccacgcggcgtacagtacctt

SEQ ID NO: 223881 - DNA, 226 bp, Gossypium hirsutum
cccacgcgtccgcccacgcgtccgcttattgtgactgtaatgatctatgcaggtggtcatgtttctggggcacatatgaaccctgctgttactctcgctttcgcagttgtcagacattttctatggaaacaggtctcattttatggtgcagttcaactaacaggggcaatctatgtatcattcacactccgtgtatcattcgattcaatataacatgctggtttca

SEQ ID NO: 223882 - DNA, 352 bp, Gossypium hirsutum
gagagataagagaaagcactgaaaaagcaaaaccatggcctctgcttctctcctgaagacttcaccagttttagacaagtctgagtgggttaagggtcacacccttcgccaaccttccacttctgtggtgaggtgccaccctgttgcaccctccggactaactgtgcgtgcaagctcatatgccgatgagcttgtcaagactgctaaagctattgcttctcctggccgtggaattttggccatggatgagtccaacgctaccttggggaaacgtttggcctcaaacgggctagaaaacacggaggctaaccgccaagcctacaggacgttgcttgtttcaactcctggcctt

SEQ ID NO: 223883 - DNA, 278 bp, Gossypium hirsutum
cccacgcgtacgcagaagactcttttaacatttcaccgcaaagatggagatagcgagatgtgaccgagtattgaagaaattgcaaagcaaaagttgccaaagatggtgtatgactactacgcatctggtgctgaggaccaatggacattgcatgagaatagatgtgctttcactaagatactgtgttgtcctcgtattttcattgatgtgagcaatgaaatacatgaccacaactgtgttggggtgtcaatatatttaatgcctattatggattgccc

SEQ ID NO: 223884 - DNA, 347 bp, Gossypium hirsutum
aaccctcaaaattccactaaaaaatgtcctccacagcttccctctccaccgccggagccaccacctctttcctccgcggccatccggcgccgaaaaccctaaactcccttcctttcaaccaatctcttttcgggctaaaaccccaacgaaatggccgtctcaccatggcagcatacaaggtgacactgttaacacccgaaggaccccaagaattcgtgtgccccgacgacgtatacatcgttgaccaagctgaggaagaaggcattgatcttccgttctcgtgtagggctgggtcttgttcttcgtgtgccggagtgattaagcaaggctccgtcgatcaatccgac

SEQ ID NO: 223885 - DNA, 346 bp, Gossypium hirsutum
tttagctatagcatacactactagtacccactactagcaatggcttcctcaatgatctcatcggctaccaggggcactgcctctccggcacaggctaacatggtcgctcctttcaccggcctcaagtctgcctctgctttcccagtcaccaggaaggccaacaacgacattacttctctcgcaagcaatggcggcagagtgcaatgcatgcaggtgtggcctcctactggaaagaagaagttcgagactctctcatacctccccgatcttacacccgtgcagttggctaaggaagtggattacctccttcgctcaaaatgggttccttgcttggaattcgaattag

SEQ ID NO: 223886 - DNA, 251 bp, Gossypium hirsutum
cccacgcgtccgattagcactagctctagtagcaaccatggcctccgccgcatgtttcttgcaccaccacgcactcacaaccaatggcagatcatcatcattatcgccgtcgctgcgccaggtttcaaacatgaagcctacccagcaggtggtgtgcaaggctcaaaagcaggaagatgttggaagccttgggtcccgtaggttggttttaactgtactcattggggctgccgtggttggcttaaaggttt

SEQ ID NO: 223887 - DNA, 324 bp, Gossypium hirsutum
ttttcatttcaaagattctttcaatatcagtgagggagtagtagttcgagttatggacgacgttttgtttgggcgcgaaaaaaaatggattacttttatggaccagggaggaaccatctcttcgttccgggtccggttaacataccggaacccgttattcgagccatgaaccggaataacgaggattaccgttccccggctattccggcaatgacaaaaacctttcttgaagatgtttagatgatattcaagacttctaccggtacttcttttatgatcccaacatacagtgaactcgcgcatgggagagtgcacttactaata

SEQ ID NO: 223888 - DNA, 340 bp, Gossypium hirsutum
taaaattttcacttcacttttttttactttgtctccttcctttctcccttacgggcaatcccctcaataccccatttttctggttcctttttcaagccattttacaggcacttcccagttgggagaaggggaaaatggcacagcttttatcaccctcaactcaatggcaaatgacactaccaaagacctcaacctatggaagtcccattgcaacaaaaatgtggagttctctggtactgaaacagaacaagaaaggagctgctaaaagctctggcaagtttaaagtggttgccttgtctgaaaacagcactgtctacatgctagagaacttactaaacat

SEQ ID NO: 223889 - DNA, 346 bp, Gossypium hirsutum
gccttccaggtgattatggatttgaccccttgggactctcagaccctgaaggggcaggagggttcatcgagcctaaatggctagcctacggtgagatcatcaacgggcgttatgctatgttgggtgcagtaggtgcgattgcccctgaaatacttgggaaggccggtcttatcccagcagaaacagccctcccttggtttagaaccggtgtgatcccaccagcaggaacatacagctattgggcagacccttacactttgtttgtgttcgagatggcactcatgggatttgcagagcacagaaagttccaagactgggccaaaccaggttcgatgggggaacaata

SEQ ID NO: 223890 - DNA, 237 bp, Gossypium hirsutum
cccacgcgttcgcccacgtttccgctcacgcgttcgtgaaaatccactgtgatggttgtgagagagtttcagcaacagtgatatgttgtgcatatgaggctgcactttgtgctaaatgttatttcgaattttatgcacctaacaagcttggtagcaaacaccataggtttgtcctttaatgccttcttaacaatgttttcttcttgtgatatatgtcaggataaagctgctatcatc

SEQ ID NO: 223891 - DNA, 314 bp, Gossypium hirsutum
acatcacgcgttcgcgatatctttgaaatctttttctaacatcttaacatacgattttggttgtgtggtagagagagatggactcccttgacaacgtggtatatcctttgagagacttctccaaggacagctttcgccttgtcatgcgttgtcacaagtctgatcgttaagagttcacgaaggtggttttccgtacagtgatcggttttgtagtgatggtattttgttggattctttgtcaagcttatctttatttctattaaccaacattatctttggctttcgttaggaattggtaggctcgtttaaaattg

SEQ ID NO: 223892 - DNA, 234 bp, Gossypium hirsutum
agctttcttttccgttttagatctcaaaattcaaaaggctttctttttcatctgatggctgctactattgactccgtcaaagctaggcagatcttcgacagccgtgtaaatcctacggttgaggttgatgtggaaatttctaacggtataaaggctagggccgcatttcctagcggtgcatccactgtattttactgaggctcattgagttgagagatggaggttcctattacc

SEQ ID NO: 223893 - DNA, 347 bp, Gossypium hirsutum
cccacgcgtccgcccacgcgtccgtgctattttctgtctagattccatgcccatggcttctacaaccagtaccaatctcccactcaaagaccgagttgctatagtaactgggtcatctcgtggtattggccgagttatagccactcacctggccggactcggtgctaaactcgttattaactacacttccagtgcagaccaagccgatctcgtagctacccagatcaattctctgtatcctggtgactccccgcgagctgtgactgtcaaagccgatgtttcggaccctgcccaggtcaagcttctgtttgattcggccgagcaggcgtttggatcaccgattcaca

SEQ ID NO: 223894 - DNA, 202 bp, Gossypium hirsutum
  unsure (1)..(202): unsure at all n locations
gcaacccacgaaaacccaatttttcccgcacaacaacggcaaccaaggggaggttttaaaaagaggtttcccttaaccaaccagcnggacggacgagaaggagcactacgccgatagcacaccccggaccgctgagaacgaccgagcgcacggcaccggcgagaaaggggtaggccggaacggcaaacccctccaccacaaa

SEQ ID NO: 223895 - DNA, 379 bp, Gossypium hirsutum
gttactctctacctcccacagtcgcatcatggccgattccgccaccgcgggttgccccctaaaagtcatcggcggagctgattcttttggcgccgagctaaaagacgccatggtatcccacctccgctccctcaacatagaagtcgaagatctcggaatcacctcctactacaacatcggtgctgaagtcggccgtcgagtatcttccgccaccacctcgccctccttggagacccgtggcctccttgcttgcggaacgggcgtcggagtcgggatcttcgccaacaaattccccggcgtgttcgccaccacatgtctcactccggacgaagctcgcaacaatcgctccatcaataactgcaacgtcttggcactcttc

SEQ ID NO: 223896 - DNA, 376 bp, Gossypium hirsutum
cccacgcgttcgactcctcaaaattttttttcaatggcgtctcgagttcttgttttggcttcaattcttattttctcttgttttgcagagacatgctatggggcgatctcattctcatcccttcaaagaacacttgttgttactgcttctcatagacaaggacttttgaaagccggggaagacaagatcacagtgagatggggattgaaccagagttttccggccgggaccgactcgtcttataagaccatcaaggtccagctttgctatgcacccatcatccaagtcgaccgtgcatggcggaaaaccgaggaccatcttaacaaagacaagacatgccagttcaagatagtcaagaaaccctacatcaacgtta

SEQ ID NO: 223897 - DNA, 384 bp, Gossypium hirsutum
gcatacactactagtacccactactagcaatggcttcctcaatgatctcatcgggtaccattgccactgcctctccggcacaggctaacatggtcgctcctttcaccggcctcaagtctgcctctgctttcccagtcatcaggaaggccaacaacgacattacttctctcgcaagcaatggcggcagagtgcaatgcatgcaggtgtggcctcctactggaaagaagaagttcgagactctctcatacctccccgatcttacacccgtgcagttggctaaggaagtagattaccttcttcgctcaaaatgggttccttgcttggaattcgaattagaggagggattcgtgcaccgtaaatactcgagcctacccacgtactacg

SEQ ID NO: 223898 - DNA, 382 bp, Gossypium hirsutum
gttgaagctcagctctataaaaaaatatgggcaccacattgttttccggctggggtagcttttcatggcagcaactatctctttcttgcagtttcgctcactcttcttcatcagaaaatgggatttcaaggccaaaagctgttcccacgtcaagaggaaatgggttggttgataaggagaaggacaattcattggggatttcgagtagacgatcccttttgatcactgggatatctgtagcgtcatcgtctgtattaggatttccaggtgagggaatggcagtcgtcaaacaaggtcttctagcaggaaggatacctggcttgtctgagcccgatgaacaaggttggaggacttatcgaagaccagatgacaagtcaggagg

SEQ ID NO: 223899 - DNA, 411 bp, Gossypium hirsutum
gaaaaaccggggcggcccacgcgtccgttagctatagcatacactactagtttcttctactagcaatggcttcctcaatggtcggatctgttaccattgccgctgcctctccggcacaggctaacatggtcgctcctttcaccggcctcaagtctgcctctgctttcccagtcaccaggaaggccaacaacgacattacttctctcgcaagcaatggcggcagagtgcaatgcatgcaggtgtggcctcctactggaaagaagaagttcgagactctttcataccttcccgatcttacactccttcagttggctaaggaagtggattaccttcttcgctcaaaatgggttccttgcttggaattcgaattagaggagggattcgtgcaccgtaaatactcgagcctaccca

SEQ ID NO: 223900 - DNA, 302 bp, Gossypium hirsutum
  unsure (1)..(302): unsure at all n locations
gaaaaaccggggcggccgacgcgtccggaaatagtgaaggtgaacgcttcatttgttgatatgctcctacagccaangatctttgttcaatggatgttggtgggcgatctataaccatggaaatcatggaaggtcgtggtgtaggacctttgaaggatcatatctatctccacttgaatcacttgcctacagaggtgcttaaggagaggcttccaggtatctctgagactgctgccatttttgctggtgtggatgttacgaatgtgcccatcccacttttgcctactgtacattataacatt

SEQ ID NO: 223901 - DNA, 423 bp, Gossypium hirsutum
  unsure (1)..(423): unsure at all n locations
caggaanggaanaaccggggcgacccacgcgtacgcccacgcgtacgcccacgcgtacgtttttttctctcagactactctttcgaaccagctgcaccatcacccccaaagaacaaagcaaattgtagaagatggcaacacaagcacttgtatcatcgtctcttacctactcagtggagactgcaaggcagattcttggagctaaacgacaaattgggccttcaaggaaaggatcctttgttgttaaggcagcttcgactccacccgttaagcaaggagctgatagacctctatggtttgcatctaaacaaagcctttcatacttggatggcagccttccaggtgattatggatttgaccccatgggactctcagaccctgaaggttcaggatggtttaattgagcctaaatggctagcctac

SEQ ID NO: 223902 - DNA, 396 bp, Gossypium hirsutum
aaacccgggcggaccgacgcgtccgcctttacctgagctaatagcagatttatttgatgcacgttcaatgtcatttggtgggacacacgagtacttggctccagagatcatcaaaggtgaaggccatggaagtgctgttgattggtggacttttggaatcttcctctatgaactcttgtttggtaaaactcctttcaagggatccgggaaccgagcaacattgttcaatgttgtaggacaacctctttggtttccagaatcacccattgtgagttttgtagtaagggacctcatactaggtctacttgtaaaggaaccacaacatatattggcttataagcgaggtgcaaccgagattaaacaacatcctttctttgaaggggtgaattgggcatt

SEQ ID NO: 223903 - DNA, 379 bp, Gossypium hirsutum
gccagtttcaatggcaaagttttgttcctgttttctcctctgctgttttctctggattcatatccccacctgggctcaaagcagacaaccctcctacgccgaacagcaagagaccgacagggtgactaacttgcctggacagccgccggtgaagttccggcactatgctgggtacgtcaagctccgacctcaagacttcaaagccttgttctactggtttttcgaagcccaagatggagtttccaacaagcccctagttctatggcttaatggaggacctggttgctcatcagtggcctactgagcagcacaagaacttggtccttttcttattcgaagcaatggcactcgccttacttttaacaaattctcttggaat

SEQ ID NO: 223904 - DNA, 305 bp, Gossypium hirsutum
tgaaaaagcaaaaccatggcctttttttctctcctcaagacttcaccagatttggacaagtctgagtggggtaagggtcacacccttcgccaaccttccacttctgtggtgaggggccaccctgttgcaccctacggactaactgtgcgtgcaagctcatatgcctatgagcttgtcaagactgctaaagctattgcttcttctggccgtggaattttggccatggatgagtccaacgctacctgtgggaaactgttggcctcaatcggtctttaaaacacggaggcttaccgtcatgcctacag

SEQ ID NO: 223905 - DNA, 404 bp, Gossypium hirsutum
aaaaatccgggcggcccacgcgtacgcccacgcgtacggttgagcagctgtttttacatgcacgtagactccaggtatcggggtagacttcagattggtgtgggtgagaaagggtatgagaaagatcctgcaattgtagcaaaggaagcaattcatgaggccactcgtaatggttctgatgttgttctcgtcgatacagctggtcggatgcaggataatgaaccactaatgagagccctctcaaagcttatataccttaacaattcaaatctagtcttatttgtgggagaggcacttatgtttaaatgatgctgttgaccagtttttaaaacttaatcacatattggttgacctctttactttttctacttttatatcgatagtatatatttctcttaccaaat

SEQ ID NO: 223906 - DNA, 341 bp, Gossypium hirsutum
gctatagcatacactactagtactttctactagcaatggcttcctcaatgatctgatcggctaccattgcgcgctggctctccggcacaggctaacatggtcgctcctttcaccggcctcaagtctgcgtctgctttcccagtcaccaggaaggccaacaacgacatcacttttctcgcaagcaatggcggcagagtgcaatgcatgcaggtgtggcctcctactggaaagaagaagttcgagactctctcatacctacccgatcttacacccgtgcagttggctaaggaagtggattaccttcttcgctcaaaaagggttccttgcttggaattcgaatt

SEQ ID NO: 223907 - DNA, 366 bp, Gossypium hirsutum
acggcgaagccgtgatcaggaggttttttttatgctttagccagggcccaagaagagaagaaagtcaaagaagctggggatgttcgattcataatggcgcagatacagttcttgcaaaagaacgtggacgaatctttgatgagttaccaggaattggtcaaagaagatccaactgattttaggccgtatttttgtcaaggtatcatatatagcttgcttgataggaatgcttaagctaaagaacagttcgtaaagtataaggagctttcaccaaacaagtttgtggtggatggatacttaatgacatctttatcgagaatgaaaactgttttgtgaccagtgtggatgaattgtagtttgggggtt

SEQ ID NO: 223908 - DNA, 199 bp, Gossypium hirsutum
gaaatggaccgatggaaaggttttttttacgatatttcggacgaccaacaggacatttcttttgggaaagggatggtgcataccttgttccaagctcccacgattgatggaacttactatgctggtatgagttcctattattacattaaccattgtcttaaaactttacaatttgtacaacatcatggatggactttac

SEQ ID NO: 223909 - DNA, 383 bp, Gossypium hirsutum
cccacgcgtccgtggaatcagccctagttgacaaatattcactttctctttcacagagagagagagagagagagagaaaaaagagagggtattctttacataatattcatctaatacaaataaaagatggctcttcacctttcttgggttttcgtttttggcatcctcggcaacgttgtttcatttatggtctccctttctcccttgccaacattttatcaaatctacaagaagaaaacatcagaagggttccaatcattaccctatgtggtatcactgttcagtgcgatgctttggatttactatgcacttcttaagaaggatgctatgctactaaattaccatcaacactttctgctgtttcattcaatctttttacattg

SEQ ID NO: 223910 - DNA, 380 bp, Gossypium hirsutum
cggacgcgtgggcggacgcgtgggcggacgcgtggggagaaaactcagaaacacacaggaaacccaaagtctttctcctttttttccccctctttttttatacacaaaggtaataattttcgaaaatggcgtttgctgttacctcttccccggctgcaatttctggttccagcttttctcgttcaagtgcctcctctgacctcaaaattccgcaaattggttcatttcggctagcggatcgccatgcaacggtgaatctatctcaaaagcgttgcgcagtgaagcccgtgaatgcggagccaaagaggaacgattccatgctttctcatgctgcaaccacctctgctcctgaagtgtcggaaaaagttgaggtggaggat

SEQ ID NO: 223911 - DNA, 386 bp, Gossypium hirsutum
  unsure (1)..(386): unsure at all n locations
cccacgcgnccgaaaatggcctctgtttgtgcttcttcttttattgcagctgttgccatctcatcccccgggtgctttaaaactggatcagtcctccctacaacaaaggcttctttccttacagggaagaaacttagatctgtgagaaagtacacaaaaccagctgccggaccaacatttccagtgtgcgccgccgccgaccccgacagacccctttggttcccaggcagcactcctcctccatggctggatggcagtctccctggtgactttggttttcgatcctcttggtcttgggtctgaccctgagacattgagatggtactgtccagcagagctggttcactgcagatgggcaatgttgggagctgctggtattttcatcc

SEQ ID NO: 223912 - DNA, 339 bp, Gossypium hirsutum
gtaaatttcttttgcaatcctttgtagagctccgggatccatcggcaccatgggggcgtcaattttgacaatgtgggggccctcaaaaccctctctttctgacacttcttcactctctttccgttctttcatcagcccttttcagctcccatctcagagctcaacccccggtaacccttccaggtcctcatctgtaaccccagttcactgcggtcttcgcgagcttagagaccgtattgattcagttaagaacacgctgaagatcactgtagccatgaaactgggggctgctgctaacgttaggagagcacaagaagctggtgctaatggcagaccttt

SEQ ID NO: 223913 - DNA, 382 bp, Gossypium hirsutum
ctgaatctcaattaatcaaccacacactcaggcagccatggcatcagcctcaggtttgtttacccccatcttcaccaccaccctccaaaacaaacatggcagccgccacaacatcgccactccatcgttccaaggcctcaggcccctacgcaaggccccctcctccaagctcgcccccttgtcttgtggtagaaaggttggtggtgtgaaggctgagctaagcgccccagtggtgataagcctaagcacaggcctctcccttttcttgggtcggttcgtgttcttcaacttccaaagagagaacgtggcgaagcaagtgcctgagcaaaacgggttgacccatttcgaagcgggtgacactcgagccaaggagtatgttagc

SEQ ID NO: 223914 - DNA, 340 bp, Gossypium hirsutum
  unsure (1)..(340): unsure at all n locations
gccggaggcgtggccacaccggcggtatgctgcgttgatgatgcagttgggttgcgacggattgtttgtcggatctggggttttcaagagtggtgacccggctaagcgtgcccgagctattgttcaggccgtcactcactacagtgaccccaacatgcttgcggaagttagctgtgggctcggtgaggccatggttggccttaatttgaacgattagaaggttgagcggttcgcagctcggtctgattagtaagtgaaggagggatcaagcctntggttgttgaaccaccgtcaccagtgcactggtgttccaagttatcatagtttaaagtggagtctt

SEQ ID NO: 223915 - DNA, 371 bp, Gossypium hirsutum
tttattcgtacgtttttaccttatattaaaccaaaaccagcaggcaccggtcagagaatcttcagacaccccctccctccataatctggaacaaccaagatgacgaatatgcctggcaccactattgtggagcctttagatttggctggtctacaaataccttatcatttcaggggccccatgttcctcgagctaatgcatgaccctgtcaccgtgtgcaccggccaaacctacgaccgtgccagcatagagtcctgggtcgccaccggcaacaccacttgtcccgtcactcgtgcccccctatctgattgcacatttatgcctaaccataccctttgacggcttattcaagattggtgaggagcgaacca

SEQ ID NO: 223916 - DNA, 259 bp, Gossypium hirsutum
cccacgcgtccgtccacgcgttctttagcttctgctccaagctcaactgggagggggtattgtttgaagaaagcgacccctaggttcaacaacaacggcaaggctccagtgggaagcatcatgattgtggctgcccaagaaattgactaagacacacataccgaccaggaccgatggaagggtcttgctttagattgttacgaagaccaacaagacatcaccataggggaaaggtttggctgactcatatcatcaagct

SEQ ID NO: 223917 - DNA, 331 bp, Gossypium hirsutum
  unsure (1)..(331): unsure at all n locations
gaaaaaaccggggggaccaacgctttcgaccatttgtagctgctgttgacttttcttgtcgtctccatcccgaagccgnggggatcctcctacgacaatggtggccgctaagaagaccaagaagacccatgagagcattaacaacagattggctctcgttatgaagagtggtaaatacactttgggttacaaaactgttcttaaatctcttagaaaactccaaaggttagttgattattattgccaacaactgccctccttttaggaagtcagagatcgaaaattatgccatgctgtgcaaagttggagtccactcaccataatggaaaca

SEQ ID NO: 223918 - DNA, 414 bp, Gossypium hirsutum
ggaaattcccggcctataatcttccttccttttcattccttttgctatggcaggaactggggtggtcgctgtttatgggaacggcgcaatagctgaaacccacaaatcccctttctccgtcaaggttggcctagcccaaatgctccgtggcggggtgattatggatgtcgtcacccctgaccaagctcgcatcgctgaagaagctggagcctgcgccgtcatggctcttgaacgagtccccgccgacatccgagcccaaggtggcgtggcgcggatgagtgacccacaactcatcaaagaaattaagcaagctgtcaccattcccgtcatggccaaggctcgtattggccatttcgttgaggcccagatccttgaagccattggcatcgactatgttgacgagagcgaagtcct

SEQ ID NO: 223919 - DNA, 352 bp, Gossypium hirsutum
ccacgcgtccgttggccttctggttcaacccatcgtgttatacaacagtgaccgttgcacctctcggttcggccgacgccgacccgttattgtcattggagctctctttgtctccatagctgcctttctcatcggttgcgccaaagacattggccaccatgcgggagatttcttgaagagaactaccaaaccgagagctgtatcctattttttgtcgtcgggttttggatccttgtcgtggctaacaacatgttgcaaggtccgtgttgagctctccttgcggacctttcgggtaaagaccactaaaagatgagaaccgctaacgggtggttttcgtttttcatggcggtcg

SEQ ID NO: 223920 - DNA, 272 bp, Gossypium hirsutum
tcggtaaatggctaccactgctttttcaatggcgactcagctgaagagcagctgcacgtcgtctgttacaagaggactggtattccccatgggcattttgggatccctgtttaaagttattttttggaaagaccaggaccccttgcttcactgtctaagctgttcaatccgacatgtcaacatttcaagtcatgcaactcatcaattgagactcctttataggaagcctggagactccaatcttctgaagcccctataatttcattggtacc

SEQ ID NO: 223921 - DNA, 221 bp, Gossypium hirsutum
ccacagcgtccgcggacgcgtggggcaaccattgctttcgtgaactgctcctccccggcacaggccgacatggtggcccccttcaccggcctcaagactgtctctgctttcccagtcactaggaaggccaacaacgacattacttctcttgcaagcaatggtgggagagtgcaatgcatgcaggtgtggcctcctcttgggaagaagaagtttcgagacac

SEQ ID NO: 223922 - DNA, 328 bp, Gossypium hirsutum
gaaagagtggaggaagatgactcttaacaaaacaatgttaaaactaggcccaagggaggattggtcaccatgcctttcattttctcaaatgagatctgtgagaagctggcggtggtgggatttaataccaatatgataagctacttaacaacacagcttcatatgccattaaccaaagcagccaacactctcacaaattttggtggaacagctagcttgacaccattgcttggtgcctttatctttgatttatacgccggtcgtttctggacaataacagtgcgctttcattatataccaaaattgggatgacatgtttaacactttt

SEQ ID NO: 223923 - DNA, 258 bp, Gossypium hirsutum
attcgctgcccatttactttgttttcttaagactaatagccaataactttggcactctgttagagggcttcttcctctgccaatgcactctatttctcttgttcctccattcctattgtttcccttgctttttctctctctatatgcttttccactgtttaggatgggctgatgtatgctttttctcttgtatgggtgttgcatgttagtccttgtgctacctttggcttcactgtccatgctctggaccttcttgga

SEQ ID NO: 223924 - DNA, 367 bp, Gossypium hirsutum
  unsure (1)..(367): unsure at all n locations
acactctcaaattcagntaacaatttcacagtagttttcttcagtctctgtctgagccatggctgcagccatctccaccgtcgctgccgctgccgccgccaaccgagctctgggtgagtcagtcccaacctcagctttcatggggatgaaagagagctcatgattcaacagcacctggcaggttccttcgggatgttttaaggagatggcggcggagaatgagatagacgatgagacacagaccgaaaaggaccgatggaaagggtaggcttacgatatttcggacgaccaacaggacattactcgagggaaagggatggaggattccttgttcctagctcccatgaatgatggaactcactatgct

SEQ ID NO: 223925 - DNA, 312 bp, Gossypium hirsutum
ttatatctcaacctctctttccgtttccccgatttctccgccgtctacttccgggtccatattccggccacctcgctccgccgctacttacacttcgcaacaacagaaaggatcgacgaacggttacctatgccgtcaaggaatggcgacgtgcacgtcgtagtacgtagttcttgggattcccgtcggagcttcgaacgaggatatcttatcggcgtaccgccgattggcttgatttagccatccagacgtggcggcaatcgatcggaaagattcgtcggcggacgtgttcatgaagatccacgcggcgta

SEQ ID NO: 223926 - DNA, 236 bp, Gossypium hirsutum
  unsure (1)..(236): unsure at all n locations
cggacgcgtgggttttgctatagctttctctactagnaccctctacttgcaatggctgcctctatgatctcatcggctaccattgccactgcctctccggcactggctttcttggtcgctcctttctccggtctcttgtctgcctctgctttccctgtctccaggttggcctactacgactttacttctctcgcttgctttggcggtagatagcaatgcatgctggtgtggcctcc

SEQ ID NO: 223927 - DNA, 219 bp, Gossypium hirsutum
aatactataataaatgccgatttctcgcattgctgtaggatctgcatctgatgttggcctagctgatgccctcattgcagcttttgctgagtttatttcttagctcttttttgtttttgctggagatgagctcgggcatggcttttttctagctctctgacaatggctcttcaactccggctggtcttgtagctgcatcggaggcccatgctttcgctc

SEQ ID NO: 223928 - DNA, 298 bp, Gossypium hirsutum
cccacgcgtccggctaaacgttttttggactatggattccatggtcctactaagtcttggcctgttcctggcacactcatgattgaacccactgaaatagattgcatggcggagctcgataggttctgagatgctctcatctccattagggttgttattgctctgattgtgtaaggataagctgatatccactactaagttctgaatggagctcctcatccaccatctttgctcatgggtgatgcatggacttagccatattctcgagtattcgccgctttccctgcttcctggcttc

SEQ ID NO: 223929 - DNA, 267 bp, Gossypium hirsutum
  unsure (1)..(267): unsure at all n locations
gtccgagcccggtcgtactcatatccgcatcaagtctccaatgagaactgcctctggtcaaaggaacaatgtaggcaagggatgtcggcaaaaaggatccgtaacctcgggaaaatgataggctctgagggctgggcacgggggtcccagncccgaacccgtcggctgccggcgcactgctcgagctgctcccgcggcgagtgcgggtcgccgcgtgccggccgggggacggactgggaacggctccctcgggggccttccccgggc

SEQ ID NO: 223930 - DNA, 221 bp, Gossypium hirsutum
  unsure (1)..(221): unsure at all n locations
cccacgcgtccgcccacgcgtccgttcttttgtttacctgtagcatatagnaatagtaatgcagtaatagcaatggcctcctccatgatctcatcggcaaccattgccaccgagatccgctcctccccggcacaagccaacatggaggcccccttcaccggcctcaaatctgcctctgctttcccagtcaccaggaatgccaacaacgacatcacttctct

SEQ ID NO: 223931 - DNA, 297 bp, Gossypium hirsutum
  unsure (1)..(297): unsure at all n locations
cttgtcttctcctattatcgtcttgtccgtgtggattttgtggcctaatcctccgcctcccttcggtttgttttgtacggtcacaccctacttcggccgcctttaccgtccgagcttgttcttatgccgatgatgctagttttgtccgcgaatactgttgcatctccatgtcgaggtattttggccatggatgaatcatttgctacatgagggttgcggcttgcctcgtttggtctcgtgtataccgatgcaaaccggcaagcttaccgnacccttcttcgtgtctgcccctggcct

SEQ ID NO: 223932 - DNA, 290 bp, Gossypium hirsutum
  unsure (1)..(290): unsure at all n locations
ccctcgcgtccggaattttcccgttttccgacttctaaatcagtatttttgcatctacccgatatagcggtattttgatttaaggatcttatactgtcatatatcaatgatgagtcgtcctcaggaaccacatcgccctttcttccattttgcaaatcctttccgtaagtattcacataagggttctcagtttaatccttaacttcgntctttattgaatgattttgataccgccttatctatgaagctgctaaaacttgagccaaatgacatgggtgacatcctttgct

SEQ ID NO: 223933 - DNA, 260 bp, Gossypium hirsutum
ccctcgcgtccgccctcgcgtccgggcctctgctggtgatactcatttgggaggagaggatttcgattattggatggttaaccttttcgttctagtatttttgtggatgtatttgtaggatatttgtgggttcccctgtgcattgaggaggttgaggactgcttgagtgagtgcttagtggactctttcatcgacagctctaactaccatcgagatcgattcataggacgagggtattgacttttacaccacgataactc

SEQ ID NO: 223934 - DNA, 265 bp, Gossypium hirsutum
  unsure (1)..(265): unsure at all n locations
gcattatactcgtactaagttgtttcttgnagttgagcagctattatatcgtttctcctttctcccttctcttttgagtagaaagattataggaaggttacgccaaaggttaagtctactggtctgtgtgcttgctgttatactactcaaatctgtaggcgctagagtagggattacttatctgcaggaagccgnatcgaaatgagctgtttgtttggatgggagtcctccagcttaccatttagacatgggctctggcgctgga

SEQ ID NO: 223935 - DNA, 408 bp, Gossypium hirsutum
gtgatggagtgaggattttatcgaacacaagtttggagtttctgcaacgggttccagattctactgtatctatattcaaaattggtagcacatcaccagctgcattgctttatgatgccttggatcattttgaccggagaagtgccaaggcagatgaaaatttgagattgattcagtcatccttgcctgaggctgttgaagcctgcattgatgctgctggtcatgaatttgatgtttcacgtcaaagaactctattaagagctgcaagccatggacaagctttctgcagtacttttcaacgtgatcgcattcaggagatgtgtaaaaccttgcgggtcttaaatgctgtgcgtgatcctgagattggcatccttctcagtattaatcaatataagttgcttacaccat

SEQ ID NO: 223936 - DNA, 406 bp, Gossypium hirsutum
cgaagagacacagaccgaaaaggaccgatggaaagggttggcttacgatatttcggacgaccagcaagacatactcgagggaaagggatggtggattccttgttccaagctcccatgaatgatggaactcactatgctgtcatgagttcctatgaatacatcagccaaggtcttaaaacgtacaatttggacaacaacatggatggtttctacatcgctcctgcattcatggacaagcttgttgttcacatcagcaagaacttcatgtccctccctaacattaaggctcctctaatcctgggtatttggggaggcaaaggtcaaggaaaatctttccaatgtgagcttgtgtttgccaagatgggtatcaaccccatcatgatgagtgccggagaactggaaagtg

SEQ ID NO: 223937 - DNA, 318 bp, Gossypium hirsutum
  unsure (1)..(318): unsure at all n locations
caccaatccaaaaaaaccaaagatgcagtacaaaaacctgggcagatcaggcttaaaggtgagtcaactatcgtatggagcatgggttagtttcggtaaccagctcgatgttaaagaagcaaagtcacttctccagtgttgtaaagacaacggagtcaactntttcgacaacgccgaggtttatgccaatggtcgagccgaggagatcatgggtcaggctattagggaacttgggtggaaacgatcggatatcgtggtttctaccaagatcttttggggtggtcctgggccaaatgataaaggtttgtctagaaaaca

SEQ ID NO: 223938 - DNA, 301 bp, Gossypium hirsutum
gtggagagccttttttttgtgtagcgattctcagttagtcttttctttaagctgacagcttctctccagagttttataatgggtaaggagaaggttcacatcaaccttgttgtcattggccatgtcgactctggcaagtcgaccactactggtcatttgatctacaagctaggtggtattgacaagcgtgtgattgagaggttcgagaaggaggctgctgaaatgaacaaaaggtcattcaagtatgcttgggtgcttgacaagcttaaggctgagcgtgaacgtggtatcaccattgata

SEQ ID NO: 223939 - DNA, 370 bp, Gossypium hirsutum
actcaacattcccatttccaatctccagctcccaaggtaaatatgccgatcagaaacatagcggttggccggcccgaagaggctactcaccccgatgctctcaaggctgctttggctgagttcatctcaaccttgatcttcgttttcgctggatcgggctcaggaatggcctttaacaagttgactgacaacggagcaaccaccccggctggtctcgtagccgccgctctagctcatggcttcggtcttttcgtcgctgtctccgttggcgccaacatctcaggtggccacgtcaaccctgccgtcaccttcggtgcttttggttgcgggaacatcactctcttgcgcggcattctttactggatcgcca

SEQ ID NO: 223940 - DNA, 400 bp, Gossypium hirsutum
ttttactgcaaactgtgagcgagtgagtgagatggcttgctcagctacttcatgggccgcggctctcatctcctctaagccaagggctttctcctccaattccaagcccttctcccaatccctttctctccccaatcccttcactggtctccctgcccctctcctttctcgtcccgcctccttttccctctcccgcacctccccttctcgcaagtctttcgtcgtcaaagccaccagtgagcttccattggtgggaaatcctgcccctgattttgaggctgaggccgtctttgaccaggagttcattaaggtcaagctctccgaatacattgggaagaaatatgtgattctcttcttttacccgctggacttcacatttgtttgccccacagagattact

SEQ ID NO: 223941 - DNA, 357 bp, Gossypium hirsutum
gaccactctcgtgaccggtgtgtttctcctcctactatccgtcgccggcgtcggctccgctgctagatatatcaccggtgatgtcctccggttaccttcggaagcttcaaggttcttccaatggaggagcgatgatgatgaagttggtggcacaagatgggcggtcctgattgctggatctaatggatattggaattacaggcatcaggctgatgtttgtcatgcttatcaactcctaaggaacggtggtttgaaagaggaaaatatcattgtctttatgtacgatgatatcgctttcaatgaagaaaaccctaggcctggtgttatcattaacaatcctcatggcgatgatgttta

SEQ ID NO: 223942 - DNA, 356 bp, Gossypium hirsutum
gctcccatgggtcacattttgtacgatgaagtcatgaggtataaccccaagaacccgtactgtgctacattctttgtcttcactgactacatgagagctgccattaggatttctgccttgtgtgaagcaggagttatctatgttatgacccatgattccattggtcttggggaagatggaccaacccaccagccaattgaacacttggcaagcttccgtgcaatgcctaatgttttgatgcttcgtccagctgatggaaatgaaacagctggtgcatataaggttgctgttctgaacaggaagagaccttctattcttgcctctctaggcaaagctgcccaactccttgaacttca

SEQ ID NO: 223943 - DNA, 310 bp, Gossypium hirsutum
cttgcttttaaattttattcaaattttatttttaggtcaaataatcaatcgatttgaggaaaaaaaataaacaaaagaaatgtcgaaatcggtgatcgaaacgcctccgaagggcggatttagcttcgatctttgtaaaagaaacgagatgcttgcaaagaaaggcgctaatccgccttcgtttcggaaaactggtaccacaattgttggcttgattttccaggatggtgttattcttggagcagacacgagagcaacttgagggcctatagtttgtgataagaattgtgagaaaattcattacatggca

SEQ ID NO: 223944 - DNA, 322 bp, Gossypium hirsutum
cccacgcgtccgctcaaacccacctttttttctctttgtaattccgtagaacggatacttcaaccgaaaaaacaaaaaaaaaaaaacaaaccagatgtcttcggtttattcagatccgatccatggaacccacccggaaccaatcgatcacttcgaccgtcttcccgattctcttctccttttagtcttcaacatgatcggcgacgtgaaagcgcttggccgatgctgcgttgtttcgcgtcgtttccactccctcgtccctcaagttgaaaacgtcgtcgttcgtgtcgattgcgtcatctccgacgacgattattcccct

SEQ ID NO: 223945 - DNA, 319 bp, Gossypium hirsutum
cggacgcgtgggtctttgcaagaattgttggaggacttggtggcagagccgcagaggaaatcatcttcggtgaacctgaggtgacaacaggtgcagctggtgatttgcagcagattactggtttggctaaacagatggtggtgacatttggaatgtccgaaattggtccatggtcccttatggactcatcagcccaaagcgccgacgtcataatgagaatgatggcaagaaactcaatgtcagaaaaactcgccgaagacatcgatactgccgtcaagaggttatcagacagtgcttacgagattgcgttgcaacacat

SEQ ID NO: 223946 - DNA, 388 bp, Gossypium hirsutum
ctctcttctctttatatctcaacctctctttccgtttctccgatttctccgccgtctacttcccgctccaaattccggccacctcgctccgccgctacttacacttcgcaacaacagaaaggatcgacgaacggttacctaagccgtcaaggaatggcgacgtgcacgtcgttgtacgaagttctagggattcccgtcggtgcttcgaacgaggaaatcaaatcggcgtaccgccgattggctagagtttgccatccagacgtggcggcaatcgatcggaaagattcgtcggcggacgagttcatgaagatccacgcggcgtacagtaccttatcggatccacaaaaacgagccgtatacgatagtaagcttgtatggagaaaccaac

SEQ ID NO: 223947 - DNA, 381 bp, Gossypium hirsutum
gtctctctgttttactccacaaccactatcactaccattatggcttcggctactgtttctgtagccaaacccaaccttcagattcaggcaaaaggaaagggtgttggttttgcagatttctcaggcctacacaactcctctactagccttccctttgccaggaaaacctctgatgacttccattcactcgttgcttttcagacatctgctctaggaagcaataatggcgggtacaggaaagggatggcagaggcaaagctaaaggtggctataaatgggtttggtaggattggcaggaatttcttaagatgctggcatggccgtaaggactccccacttgatgtcattgccatcaatgacactggtggtgttaagcaggct

SEQ ID NO: 223948 - DNA, 352 bp, Gossypium hirsutum
cggacgcgtgggtttagctatagcatacactactagtacccactactagcaatggcttcctcaatgatctcatcggctaccattgccactgcctctccggcacaggctaacatggtcgctcctttcaccggcctcaagtctgcctctgctttcccagtcaccaggaaggccaacaacgacattacttctctcgcaagcaatggcggcagagtgcaatgcatgcaggtgtggcctcctactggaaagaagaagttcgagactctctcatacctccccgatcttacacccgtgcagttggctaaggaagtggattaccttcttcgctcaaaatgggttccttgcttggaattcg

SEQ ID NO: 223949 - DNA, 319 bp, Gossypium hirsutum
cttccgtctatcctccgtcaacacttcgttcttcgccgtcactgtcatgcacagcggcacaccccatcgcctcctcccatagagttccttccacttcgaattccttcgtcgcgttagaatcgtcatcgttaaagaccgttaactctatttcgagcgctaagaacaatagaaggaaaggcgttgtcggaaaggtgaggtcgagcctggagacggcgggagcaacggtggggcaggtgacggaggttacaaaggacaccttctggcccatcgttaacgccgcgggggataaaaccgtcgtcctcgatatgtatactcaatg

SEQ ID NO: 223950 - DNA, 332 bp, Gossypium hirsutum
ccaccacatacccttctgaaacctcacccacaccaaactccagaaccagcctccgttatcaatggcgatgatatctacatattgcccacatttcaacggacttcaccgatcatctcccaagctcgacagttctcaatctcaatctttccttcaacacatcaactctcagcttcgccttgcttcgtctcgtaaaccttgcagagctgttactgccatggccggttccggaaagttctttgttgggggtaactggaaatgtaatggaacaaaaagactccatcacaaagcttgtttctgacttgaacagcgcaaagttggaagactgatgttga

SEQ ID NO: 223951 - DNA, 392 bp, Gossypium hirsutum
cccacgcgtccggtttgttgagcttacagggatacccgttgcaagtactttgatgggtcttggagcctttccgatttcggatgagttgtcgttacaaatgcttgggatgcacggaactgtgtatgccaattatgctgttgataagagtgatttgttgcttgcttttggagtgagatttgatgatagggtgacaggaaaacttgaggcttttgccagccgggcaaagattgtgcatatcgatatcgactctgctgagattgggaagaacaagcagcctcatatgtcagtgtgttccgatgtgaaattggcattgcaggggataaataagatattggagaccacgggagctaagctgaatcttgattattcggaatggaggcaggagttaaacg

SEQ ID NO: 223952 - DNA, 396 bp, Gossypium hirsutum
tcggcctcttgttttgggatgaggtcgagttaatcgcctcaaccttcgcttacagcatagtccaagcctttgcctcttttgaagagcaatgggaagaaatatgcagtgatatcaaggacggcacactgagctcaaggataacactgcccaggatgcgaaaagccgtgttggatataatttctccaaacccgtgtttggcatcacagattgaagccatttgcagggactccaaagcttccaactggtatggcatcgttcccaggctgtggccgaatgcaaagtatgtgtactctatcatgaccggctcaatgcaaccctacttgaagaagcttaggcactatgctgtctcgttaccgctagtgagtgctgactacgggtcaaccgagggttggattg

SEQ ID NO: 223953 - DNA, 379 bp, Gossypium hirsutum
  unsure (1)..(379): unsure at all n locations
cccacgcgtccgcttcttcttcatcttcaaacccacaaattttttttaacaaagatcttatatagtgatagtgcaggcgatgaatctttggtcggacgataacacgtcggttatggaatcttttatgagctcagacatatctgctttatggccaccaccaccaccttcgncgncgccgcagcaatctcagccgtccgttcctctcaaccaagactcgctccaacaacgtctccaagctctcctcgaaagtgttcgtaattgttggacttacgctattttttggcaatcctcatacgattacgccggcgccgccgtgctcggctggggagacgggtattacaaaggggaaagaagattaagagaaagcaaagtcaaaagc

SEQ ID NO: 223954 - DNA, 366 bp, Gossypium hirsutum
cccacgcgtccggaaaaatggcttctgcttccgctactctcctcaagtcttcacctattatcgacaagtccgagtggattaagggccaaaacctccgccacccttcggtttgttttgtacggtcacaccctacatcggccgcctttgccgtccgtgctagttcatatgccgatgagcttgttaagaccgcgaaaactgttgcatctccaggtcgtggtattttggccatggatgaatcaaatgctacatgtgggaaacggcttgcctcgattggtctcgagaataccgaggcaaaccggcaagcttaccgtacccttctcgtgtcttgccctggcctcggtgactacatctcgggagctattcttt

SEQ ID NO: 223955 - DNA, 323 bp, Gossypium hirsutum
cccacgcgtccgagaagaagaaggtccttatagttaatacaaacagtggcgggcatgcagttatcggtttctactttgccaaagagctgctgggttctggccatgaggttaccatcttcactgttggagaagagggctctgataaaatgaagaagccccccttcaacagattctctgaaattacgagtgctggagggaagacggtgtggggagaccctgcagatgttggcaaggttgttgcaggggcaacctttgatgtggtgttggataacaatggcaaggacttggacactgtcaggccggtggtagattgggcaaagagc

SEQ ID NO: 223956 - DNA, 326 bp, Gossypium hirsutum
  unsure (1)..(326): unsure at all n locations
agaaatccttctgaagagcctgagttgaagttgaagaaatggcgtccaagtttggtgactcgtgcaaattagccacctccgacctcttttgccgccctcactcagcgttcctttgctgtaactgtgattccactacccacgccgccaatcacctcgcatcgcctcaccctcgtgtttgcctctgtcaagtctgcgagcaagcgccggctcacgtcacctgcaaggccgacgccgctgctctctgcgtcgcctgcgaccaacacatncactcagcaaaccctctcgcccgccagcatgtgcgccttcctattatccccttctatgac

SEQ ID NO: 223957 - DNA, 295 bp, Gossypium hirsutum
aaattcagttaacaatttcacagttgttttcttcagtctctctctcagccatggctgcagccatctccaccgtcgctgccgctgccgccgccaaccgagctctgggagtgtcagtcccaacctcagctttcatggggaagaaagtgagctcaagattcaacagcaccaggcaggttccttcgggaagttttaaggtgatggcggcggagaaagagatagacgaagagacacagaccgaaaaggaccgatggaaagggttggcttacgatattttcggacgaccaacaaggacatt

SEQ ID NO: 223958 - DNA, 326 bp, Gossypium hirsutum
cccacgcgtccgctaagactgtagacgcatacctggcggagatagcaactgcagttgaacttgccatctccaagttcaacggcatcgccaatctcgtccctaaaggagccagaaaggtggaggatgatctctaccgggccattgacgtctacctcaagtctcatccaaatctggacgagatagagagggagaaggtatgcagctccatggaccccctgaagctgtcctatgaagctcgagtgcatgcattccaaaacaagcgcttgcctgtgcagattgttttgcacgcattgtactatgatcagctaaagctaaggagtgggggg

SEQ ID NO: 223959 - DNA, 379 bp, Gossypium hirsutum
cccacgcgtccgcccacgcgtccgttctctagaggtctggtctactcaacactctctcctccctcttagcaaccaaagactcagatccgctcggatttctttgtcccagaactagaatggagacctttctattcacatcagagtccgtaaacgagggacaccctgacaagctttgcgaccaggtctctgatgctgttctcgatgcctgccttgcccaggaccctgacagcaaggttgcctgtgaaacatgcacgaagactaacatggtcatggtctttggagagattaccaccaaagccaacgtagactatgagaagattgttcgtgatacatgccgctccattggatttgtttctgatgatgttggtcttgatgctga

SEQ ID NO: 223960 - DNA, 377 bp, Gossypium hirsutum
aaaaaacaatgtcaggtcctcagtgctgttcgaatccaccaacattggattctgcaagtggagctggtcacgttgagaatcttgctggtctcaacacttatgtttctgggtctcttcaatctaagcttgctgtttttcttatctctgatattttcggatatgaggctccaaactttagaaaactcgcggacaaggttgcagcctctgggttctatgtggtggctcctgacttcttttatggagaaccctatgaccctaataaccctgatagacctttatctgtttggataaaggatcatggaccggataaaggttatgaggatgcaaagctcgtaattgacgctttgaaaagtaaaggagtttcatccattggagct

SEQ ID NO: 223961 - DNA, 362 bp, Gossypium hirsutum
gattatcaaggcttttgggtaactcggaaacccatgcaacaactggtgtagccggcacatttggatatgttgcaccggagtatgctatgacctgccgtgtatccgagaaggctgatgtctacagctatggagttgtgcttctcgagttgatatcagataaaaaagctttggatccttctttctcctcgcatgcaaatggtttcaatatcgtttcttgggcctgcatgatgctgcgacagggtcaagcaaaagatgtgttcactgcaaggttatgggatagtggtccgcatgaccatcttgtacaactgctgcacttggccattacatgcacagttgatagcctctcagcaagaccaactatg

SEQ ID NO: 223962 - DNA, 280 bp, Gossypium hirsutum
cccacgcgtccggggtcaccctggcaccaaatatggaatctctttccctgtcctggcgagatcatcttttggcattcgtggtgcacatgttcctacttcgcttagtgctttggtttgttgtgggtggtatgggatagagagttggattggaggtgaggctatctacctttttctcccaaactccattaaacaatcttccttttctcaacccttaccatggcttggcacttcccctcttgaattcgcttgttttattgccttttggttggtccagctggtc

SEQ ID NO: 223963 - DNA, 276 bp, Gossypium hirsutum
cccacgcgtccgcccacgcgtccgcataacaatacacaggcagtcttttttctgaaaactgagaatggcttccaccgccgtcctctccacttccacggtcagcagcacctcattcgtccgccgccagccagtgaggagcctatcctccctcccaaactttaagcaggctcttttcgggctaaaaccccaaagaggtgggcgtcttacaatggcagtatacaaagtaacgctgctcactccggaaggacctcaagagtttgagtgcccagatgactt

SEQ ID NO: 223964 - DNA, 306 bp, Gossypium hirsutum
cccacgcgtccgcccacgcgtccggtagtacgtaatattttaaccctcaacccccactatctgtccatctttcagtaagagaaaggaaatggagtttagttcagacgctaaccagcgcattgccaggctcgcagcccatctccaacctcagatggacgaaagttctattttgaggcgagctgactgtagagcgaaaggagggtcaccagggttcaaagttgctatcttaggagcagctggaggcattggccagcctcttgcaatgttaatgaagatgaatcctctcgtctcgggtcttcatcttta

SEQ ID NO: 223965 - DNA, 378 bp, Gossypium hirsutum
gttagctttagcatacactactagtacccactactagcaatggcttcctcaatgatctcatcggctaccattgccactgcctctccggcacaggctaacatggtcacccctttcaccggcctcaagtctgcctctgctttcccagtcaccaggaaggccaacaacgacattacttctctcgcaagcaatggcggcagagtgcaatgcatgcaggtgtggcctcctactggaaagaagaagttcgagactctctcatacctccccgatcttacacccgtgcagttggctaaggaagtagattaccttcttcgctcaaaatgggttccttgcttggagttcgaatgggagggaggattcgtgcaccgtaagtactcgagc

SEQ ID NO: 223966 - DNA, 382 bp, Gossypium hirsutum
attgttactcgtgactttgtcttttgctgttgttgccaccgccgacggtgcttgccaggacgacggccctgagttacctgcttgcaacaaccctttcaaattggtcaaggtgaagatctgggttgatggtgttgaaggtgaagatttgtctggtataactgcgagctttggagcatcattgcccgaggaagccaacaaaagttctaaattgcctgctgttttctcaaatcccctaaatggctgttctaattcttcttcaaagctaactggttctgtagccttgtccatacgtggtgattgtgactttgtaactaaggcaaaagttgcacagtcaggaggtgcttcagccttactggtgataaatgacaatgaagaactttac

SEQ ID NO: 223967 - DNA, 370 bp, Gossypium hirsutum
cccacgcgtccggtttttattctctagagtcttcccttgtccctgttaaaatctgtcactgtgatcattaatggccaccgctgaacctgaagttccagtcactgagcagcagcccgcggcagcagaggagccaaagccggcggaaaagcctgtgaaggagaagagacccagagctccaaaggagaaaaagcctaagcaacccaaatccgcagcacatcctccttattttcagatgatcaaggaggcgcttttggctttgaaagagaagagtggatcaagtccgtacgctatagcgaaatacatggaagagaagcacaaggcggtgcttccagcgaatttcaggaaaatcttaggtcttcagcttaaaaac

SEQ ID NO: 223968 - DNA, 294 bp, Gossypium hirsutum
gtgagactcttttgtataactgtagcatagtactagtaagcagtaatagcaatggcctcctccatgatctcatcggcaaccattgccaccgtgaactgctcctccccggcacaggccaacatggtggcccccttcaccggcctcaagtctgcctctgctttcccagtcactaggaaggccaacaacgacatcacttctcttgcaagcaatggtgggagagtgcaatgcatgcaagtgtggcctcctcttgggaagaagaagttcgagacactctcataccttcccgatcttaca

SEQ ID NO: 223969 - DNA, 392 bp, Gossypium hirsutum
cccacgcgtccggaagggtgcaaaggttgtgattgataggatcactgggcgcacaaaaggtgatgggtttgtcaggtttggcgatgaaactgaatataatcgtgccatgactgagatgaatggtgctttttgttcaactaggcctatgcgcatagggccggctactaacaagaagactggtgctgcacagcaatatccagcagcttcatctcaagggactcagaacgagaatgatccaaataatacaactatatttgttggtaatttggattctaacgtgactgaagaccatttgagagaggtcttcagcccatatggtcagttggtgcatgtgaaagattccacaaacaagcgttgtggattttgtcaatttgctgatagggagtgtgccc

SEQ ID NO: 223970 - DNA, 326 bp, Gossypium hirsutum
cccacgcgtccggaaccctaacattgggcctaaattccacgatgctgctgcctctgtctcgagcattgcagactttctccctccccgatcttccttacgactatggcgctcttgagcccgccattagtggagagatcatgcaactccatcaccaaaaacaccatcaaacttacatcactaactataacaaggctttagagcagctccatgaggctattcagaaaggtgattcttccaccgtcgttaagttgcaaagcgccatcaagttcaacggcggaggtcacgtcaaccactccattttttggaagaaccttgcccctattcgt

SEQ ID NO: 223971 - DNA, 330 bp, Gossypium hirsutum
cccacgcgtccgagagatcaagaaagcaaccaacaatttctcgaaagaccgaatcctaggtgccggtggctacggcgaagtctataaaggaatccttgacgacggtactccggttgctgtcaaatgtgccaagctcggcaacaccaaaggcaccgatcaagtcctcaacgaagtacgaatcctatgccaagtcaatcatcgaagccttgttggactactcggatgttgcgtcgaactcgaccaacctataatggtttatgagttcatcgaaaacggtaacctcttagatcatctccagagcccaaacattaatgaccgaagtctactcac

SEQ ID NO: 223972 - DNA, 265 bp, Gossypium hirsutum
aaaataaactgtttaacaatggcctttacaaccatggctctttcttcccaatcattcgccggtaaggcagtgaagttctccccttccacccctgaaatccagggaactggccgtgtttccatgaggaaaaccaccaagcctgttccttctggtagcccatggtacggtcctgaccgagttttgtacttgggtccactttccggtgagccaccatcttacttgaccggtgagttccctggtgactatggttgggacactgctggac

SEQ ID NO: 223973 - DNA, 378 bp, Gossypium hirsutum
atttagctatagcatacactactagtacccactactagcaatggcttcctcaatgatctcatcggctaccattgccactgcctctccggcacaggctaacatggtcgctcctttcaccggcctcaagtctgcctctgctttcccagtcaccaggaaggccaacaacgacattacttctctcgcaagcaatggcggcagagtgcaatgcatgcaggtgtggcctcctactggaaagaagaagttcgagactctctcatacctccccgatcttacacccgtgcagttggctaaggaagtggattaccttcttcgctcaaaatgggttccttgcttggaattcgaattagaggagggattcgtgcaccgtaaatactcgag

SEQ ID NO: 223974 - DNA, 360 bp, Gossypium hirsutum
cgaaaactgttgcatctccaggtcgtggtattttggccatggatgaatcaaatgctacatgtgggaagcggcttgcctcgattggtctcgagaataccgaggcaaaccggcaagcttaccgtacccttctcgtgtctgcccctggcctcggtaactacatctcgggagctatccttttcgaggagactctctaccaatctaccatcgatgggaaaaagatggtcgatgttcttgttgagcaaaatattgtccctggtatcaaagttgacaagggtttggttccactccctggttccaacaacgagtcatggtgccaaggtcttgacggtctttcatcccgcacagctgcctactaccagc

SEQ ID NO: 223975 - DNA, 274 bp, Gossypium hirsutum
cccacccgtccgaaaaaagaaataaaaacagtttcatttccattctaagtttgtgtttttgatttgccttttgtgggtttttttttataaaaaagttcagcaaaaatgtttattgagaattttaaggtggagagccccaatgtgaagtacacagagaatgaaattcagtctgtttacaactatgaaactacagagcttgttcatgagaacaaaaatggaacctatcaatgggttgttaaacccaaaactgtcaaatatgaattcaagactgata

SEQ ID NO: 223976 - DNA, 320 bp, Gossypium hirsutum
gtggattccttgttccaagctcccatgaatgatggaactcactatgctgtcatgagttcctatgaatacatcagccaaggtcttaaaacgtacaatttggacaacaacatggatggtttctacatcgctcctgcattcatggacaagcttgttgttcacatcagcaagaacttcatgtccctccctaacattaaggttcctctaatcctgggtatttggggaggcaaaggtcaaggaaaatctttccaatgtgagcttgtgtttgccaagatgggtatcaaccccatcatgatgagtgccggagaactggaaagtggaaa

SEQ ID NO: 223977 - DNA, 337 bp, Gossypium hirsutum
cctaacctacttccaactaatacccttttctcttcttcttcttcaactgagactgcttatagtggttcaaagagtgaacataagccctcaagtttcatcatggaaggtgaattacaggagccaaaagccggttctcaatcaattttgctcgaattggctgcatctgatgatctagtagccttcaaaagtgaagtagaagagaaaggtttggatttcggggaggcgagcttctggtatggtcggagaatagggttgagaaagatgggatttgaagagaggacgcctttgatgatcgcagccatttttggtagcatcgaaattttgaaatacatcattg

SEQ ID NO: 223978 - DNA, 282 bp, Gossypium hirsutum
  unsure (1)..(282): unsure at all n locations
atatttagctatagcatacactactagtacccactactagcaatggcttcctcaatgatctcatcggctaccattgccactgcctctccggcacaggctaacatggtcgctcctttcaccggtctcaagtctgcctctgctttcccagtcaccaggaaggccaacaacgacattacttctctcgcaagcaatggcggtagagtgcaatgcatgcaagtgtggcctcctactgggaagaagaaagttgagactctctcatancctcccgatcttacacccgtg

SEQ ID NO: 223979 - DNA, 251 bp, Gossypium hirsutum
  unsure (1)..(251): unsure at all n locations
ggggttaccaccggattgaagccggggatcttctcttaatgaagaagcaacttgaagtcaccgatttcgactcagcgcttcacggaacatttgaaacaagacgggttgttgcacacgacttgcggaacgccggcgtatgtggcgccggaagtcattggaaaaaaagggtacgacggagccaaggcggatattttgtcttgtggggtgattntatacgttcttctcgcccggtttttacccgttcaagatga

SEQ ID NO: 223980 - DNA, 383 bp, Gossypium hirsutum
  unsure (1)..(383): unsure at all n locations
acccacgcgtccggagagcactagcattagcactagcactagtagcaaccatggcctccgccgcatgtttcttgcaccaccacgcactcacaaccaatggcagatcatcatcattatcgccgtcgctgcgccaggtttcaaacatgaagcctacccagcaggtggtgtgcaaggctcaaaagcaggaagatgatggaagccttgtgtcccgtaggttggctctcactgtactcattggtgctgccgctgttggctctaaggtttctcctgctgatgctgcctatggtgaagctgcaaatgtatttggaaagccaaaaacagacacagacttcatgccatacagtngggatggattcaagctctcgataccatcgaaatggaac

SEQ ID NO: 223981 - DNA, 389 bp, Gossypium hirsutum
cccacacgtgtccggagacgtgctaatgggcgtccgatatattgctttgcctaatttgtaagctttgaggttaagtgaaaaaactatggctgaagagggacaagtaattgcctgccacactgttgagtcatggcagcagcagctccagatgggaaacgagtccaacaaactggtggtggtggatttcacagcatcatggtgcgggccatgccgttttatatcaccaatcctggtggatcttgctaagaagctgcccaacgtcatattcttgaaggtggacgtggatgaactgaaatctgtcgctcagtcgtgggctattgaggcgatgccaacttttgtgtttctgaaaggaggcaccataattgacaagcttgtgggtgcaaggaaag

SEQ ID NO: 223982 - DNA, 365 bp, Gossypium hirsutum
ggtgaatgctgctttcagagaaagtgcagagaaggagcttaagggtatcctttctgtatgcgatgaaccccttgtctcagttgatttcaggtgctctgatgtgtcctccaccgttgatgcatcactcaccatggtcatgggagacgacatggttaaggtgattgcttggtacgacaatgagtggggttactctcaaagagttgtagacttggctgacattgttgccaacaactggaagtgattcgaaatacttgtctgcagtgtgatatggttaatttttgctcacctcatttcttttcggctttcatcaagaatgtataattttaacgtggactgtatgcaataaaaatcgtgcttgcacttaa

SEQ ID NO: 223983 - DNA, 331 bp, Gossypium hirsutum
  unsure (1)..(331): unsure at all n locations
gaccggcgggagacccgggccgacccacacctgtcgcgagacggggtaatggccgcggagaattcaagttcgaaatcggcttcaacggctgattcctacatagggagcttaataagcttgacttccaagagtgagatcagatacgagggcgttctttacaacatcaacccggacgagtccagtattggattaagaaacgtacgatcatttggaactgaaggaaggaaaaaggatggtccgcaagtacccccgagtgacaaagtttatgaatacatattgttccgtgggagtgacattaaggatttacaagttaaatcttnaccacctacac

SEQ ID NO: 223984 - DNA, 312 bp, Gossypium hirsutum
cccacgcgtccgcccacgcgtccgcccacgcgtccgctatagcatacactactagtacccactactagcaatggcttcctcaatgatctcatcggctaccattgccactgcctctccggcacaggctaacatggtcgctcctttcaccggcctcaagtctgcctctgctttcccagtcaccaggaaggccaacaacgacattacttctctcgcaagcaatggcggcagagtgcaatgcatgcaggtgtggcctcctactggaaaagagaagttcgagactctctcatacctccccgatcttacacccgtgca

SEQ ID NO: 223985 - DNA, 380 bp, Gossypium hirsutum
  unsure (1)..(380): unsure at all n locations
caaattcagataacaatttcacagttgttttcttcactctctctctcagccatggctgcagccatctccaccgtcgccgccgctgccgccgccaaccgagctctgggagtgtcagtcccaacctcagctttcatggggaagaaagtgagctcgagattcaacaacaccaggcaggttccttcgggaagttttaaggtgatggcggccgaaaaagagatagacgaagagacacagaccgaaaaggaccgatggaaagggttggcttacgatatttcggacgaccaacaagacattactcgagggaaagggatggtggatccttgntccaagctccatgaatgatggaactcactatgctgtcatgagttcctatgaataca

SEQ ID NO: 223986 - DNA, 411 bp, Gossypium hirsutum
tataaatcagggtccttcgggagatcattggatatttctgcattcagcaactacaatgaacttcgcagtgaactggcacatatgtttggccttgaaggccagttggaggaccctctgagatcaggctggcagcttgtatttgttgaccgggagaatgatgttcttctccttggcgatgacccctggccggagttcgtgaacagtgtctggtgtatcaagatactttccccacaggaagtgcagcaaatgggcaaacgaggcctggagcttctaaactctgtgccagttcagaggctctctaatggcagttgtgatgactatgtgagccggcaggactcgagaaatcttagctctggtatcgcctccgtgggttctttggactactgaatgaaattcatccggttatgatac

SEQ ID NO: 223987 - DNA, 420 bp, Gossypium hirsutum
gccatcgttgctacacaacgagaccatggtagaagagatgatcgtaaatatagtaggatgaaatatttgattagttcttgggggattgaaaaatttagaaatgttgttgagcaatattatggaaagaaattcgagcctttccacgagttgccggaatggtaatttaagagttacttgggatggcacgagcagggtgacggtgctttatttttcgggctccatgtagataacggtcggattggaggaaaaatgaaaaagacactgagggaagtgatagagaagtataatttaaatgtgcgaatcaccccgaaccaaaacctcattttgtctgacattcgtagtgcatggaggcgtcctattaccacagttctcgctcaagctgggttgctgcatcctagatatgtggaccccttgaactta

SEQ ID NO: 223988 - DNA, 412 bp, Gossypium hirsutum
attacaccgagaggaaggcagctgagttgactaagatcattgttggtgttgttgaggcttgccattcacttggggttatgcatagagatttgaagcctgagaatttcttgttggttaacaaggatgatgatttctcactcaaggccatcgattttgggctctcggtgttctttaaacccggcgaagtctttactgatgttgttggaagcccatattatgttgctcctgaagtactcctcaaatgttatggaccagaagcagatgtatggactgctggagttatactctatatattgctaactggcgtgccaccgttttgggcagaaacacaacaaggaatatttgatgctgtgttgaaaggatatgttgacttcgactccgacccgtggcccctaatatctgatagcgcaaa

SEQ ID NO: 223989 - DNA, 392 bp, Gossypium hirsutum
gtttaaaatataagaaaaaagtcatacgcattgagcactgccggtcaggttattcgttgcaaagctgcggtggcatgggaggccgggaagccactatctatagaagaagtggaagtggcaccaccccaaaaacatgaagtccgtattaagattctcttcactgctttatgtcacactgatgtatactactgggagtgtaagggttacactcctctgtttcctcgtatacttggtcatgaagcctcatggatcgtggagagtgtgggtgagggtgtgaatgatttgaaacctggggatcatgtgcttcctatcttcaccggagaatgcaaagaatgtcgccactgtctgtcagaagaaagcaataacatgtgcgaactgcttaagatcaactg

SEQ ID NO: 223990 - DNA, 351 bp, Gossypium hirsutum
gccttctagaaatttccaagttcttcttcaaaaccctcacatcccattcgatcaaaagaactcaaatctttatcatccaccatgggaggaggaaatgcccaaaaatccaagatggctcgtgagaagaacttggaaaagcaaaaagctgccgccaaaggaagccagcttgattctaacaagaaggccatgaccatccagtgcaaggtgtgcatgcaaacattcatctgtactacaacagaagtgaaatgccgggagcatgctgaggcgaagcatcctaaatccgacctatacacatgttttcctcaccttaaaaagtagcacactggggaagtggagatggcttgtagcatg

SEQ ID NO: 223991 - DNA, 411 bp, Gossypium hirsutum
cttcaaaagtcaagtgaagcaaatggccatgtcatccacccccaacatcttattatggctcttttccattcattttttgctttcgttagtaaagatcaatgaggccaaagttcctgccatcatagtgttcggggactcatcggttgatgctggcaacaacaactatatccccaccattgccaggagcaattttgagccatatggtcgtgatttcaatggtggccatccaacaggtcggttctccaatggcaaaatcgctaccgacttcatctcccaggcgtttggtctcaaaggggccatccctgcttacctcgacccttcatatagtatatcggatttcgccactggagttaccttcgcttctgctggaaccggctacgacaatgccacttccaatgttctctcagtgat

SEQ ID NO: 223992 - DNA, 409 bp, Gossypium hirsutum
ccggaaacaagtggaacgacacagatccgacccgaatatgttcatagttacgtacacagccgagcacaaccaccctgctccaacgcatcggaattcactcgctggcagcactcgccagaagcctttcactccacaaacggtcaccgccggtgactcagtcaaaccttcctcatctaaacccgccgacagcttgtctccgacggcctccgtggatgaaggggttgtggttcaaagtacaaaggtggacagccgagaggatttggttgaagatgaaggggaagatgaatttgggatgtcggacacggcggtgagtgatgatttcttcgagggtttaaaaggactcgctgaaattgtcaccagaaattgctttcccgataactttccggcaaagtttgactttccttggact

SEQ ID NO: 223993 - DNA, 418 bp, Gossypium hirsutum
gttaggcaaacaggccatcttctttaaccagggaccctaccatgccaagttgaggaagcttgttctccgtgccttcatgcccgattccatcaaaaacatcgtccccaacatcgaatccattgccaaacattccctccattcattgcaaggccgtctcattaccactttccaagaaatgaaaacctacacattcaatgttgctctactatcgatattcggaaaggatgatcaagtgctttacagagaagatctgaaaaggtgttactatatccttgagaaagggtacaactccatgcccattaacctccctggtacgcttttcaacaaatcaatgaaagcaaggaaagagatagcccagattctagccaaaatcatatcgaccaggaggcaaacgaagcaggtggattgcaatgacttg

SEQ ID NO: 223994 - DNA, 411 bp, Gossypium hirsutum
cccacgcgtccgcaattccgctgtgattgttcttggagctacaaaccgttctgatgtcttggatcctgcccttcgtcgaccagggagatttgatcgtattgttatggtagagactcctgacaggattggaagagaagctattataaaagtgcatgcctccaagaaggaacttccccttggagatgatgttgatcttggtgacattgcctctatgactactggttttactggggctgatcttgcaaatctggtaaatgaagcagccttactcgctggaagaaataataaagttgctgtagagaggattgatttcattcaggcagtagaacgatcaatagctggcatagagaagaaaactgccaaattgaagggatgtgagaaggctgtggttgcaaggcatgaagctggcca

SEQ ID NO: 223995 - DNA, 416 bp, Gossypium hirsutum
cccacgcgtccgggaacaagccgaacgctacgaggagatggttcaattcatgcaaaagctcgtcctcggctctactcctgcttccgagctcaccgtcgaggaacggaaccttctctcggtcgcttacaaaaacgtaatcggatctctacgcgccgcgtggaggatcgtttcttctatcgagcagaaagaagaaggtcggaagaacgaggaacatgtggtgctcgtcaaggagtatagatcgaaggttgaatccgagttgtcggatgtttgcgctagtatcttgactttgttggactcgaatctgatcccatctgctgctgcgagtgagtcgaaggttttctatttgaagatgaaaggggattatcatcggtatttagcagagtttaaggttggtgatgagaggaaagctgctgctg

SEQ ID NO: 223996 - DNA, 416 bp, Gossypium hirsutum
tgcagttggagtttcaccatttagacgctttgtcatcggaagaaacaccggagagactcttcgacctccgcctccaacgcgacgcgctccgtgcagaaacaatcaactccctcgtttcaaaagccgttgctcgtaagcatccacgcgcccccggaaggcgtcctgggtttagtagctctgttatttcaggactcgctcaaggtagtggagagtattttacgcgcctcggcgtcggtactccgccgaggtatctttacatggtgcttgacaccggtagtgacgtcatttgggtccaatgttcgccttgtaagaaatgttactctcaatccgacccgatatttgacccgactaaatcacggtcattttccggtattccctgtggatcccaactttgccgtagtttagattcttcgggt

SEQ ID NO: 223997 - DNA, 411 bp, Gossypium hirsutum
cctaaatctcttttatttgcttctttcaccatgaccaagcagcaggctaactggtctccttacgacaacaatggaggatcttgcgttgcgatcgctggagctgattactgtgttatcgccgccgatactcgaatgtcaaccggttacaatatactgacccgagattactccaaaatatgtaaacttgcagataaatgtgtcatggcatcctcaggatttcaagctgacgtgagggctttacaaaagcaactggcagctaggcacttgatttatcagcatcagcacaacaagcaaatgagctgccctgcaatggctcaattgctttccaacacactttattacaagcgtttctttccttactattcttttaatgttttgggtggccttgataacgaaggaaagggttgtgtc

SEQ ID NO: 223998 - DNA, 405 bp, Gossypium hirsutum
gcttctccgtggatgatacacccattagagagttcaaaaacatggagtcgattggtgtcccatttcccaagaaccagcccatgagaatttactccagcttgtggaatgctgatgactgggccacaaggggtggtctggttaagaccgactggacccaagctcctttcactgcctcgtacaggaacttcaatgccgatgcttgtgtgtggtccaatggagcttcttcctgcaaatcaaatgccccatcttcttctacatcaacaaacaatgcatggttctctcaagagatggattcagcaaagcagcaaaggctacagtgggtgcagcagaattatatgatctacaattactgcactgacgccaagagatttcctcaaggtctacctccagagtgcaagatgtctt

SEQ ID NO: 223999 - DNA, 415 bp, Gossypium hirsutum
cccacgcgtccgatttttctctattgcagaataagttaaaataagaaccaactgatcattgatgcttatctgtttttcttcccattatcaacgacggtatatttttcttgtttgtaagaaatccacctaactttagacaaaaccagaaagaataatttgtcaagcaatataggtggaagccattaatgttcagattctgaaattaaactgataatgttgtagagtagattagggttgaaatataagtgtggactgactagcagtttgtcattgtcaatattggctactgaaaaatgctaatatgaatggatggcaggtgggagactgggaaatctgtattgtgacccattaatgacatcgggtgggcacaaaataagtgcgagacaacgatggacaccaaccgctgtgcaacttc

SEQ ID NO: 224000 - DNA, 412 bp, Gossypium hirsutum
cccacgcgtccgcccacgcgtccgattttctgttattattatttttttgttcatcaatgggattccctgtggtttacacagacgttttcgtacccaaattcttcgttcacacgctatcgtttttgggtttcatcagaaacctaatcctctcactttttaattacctcggactctccgatttcctcgaaaccgacaccgtttggccggaaaacccgacccgaaccacaccttttaaaccgccggtatccgctctcttgatccgtgaaatcctacccgtcgtaaagttcgaggaactcgcgttggtcggtggtggtgatccgccggagagttgcgccgtttgcttgtgcgagttcgaaggaaaggaagagatcaggtggttgaagaattgtaagcatgtttttcatagaacgtg

SEQ ID NO: 224001 - DNA, 413 bp, Gossypium hirsutum
atgctactcgtaccatatttttcttgactccgagcgggactctcaagccagtcgccattgaactaagcctccctcacacctcaccaaattcccgatccaaacgtgtcgtcacacctcctgttgatgcaaccacaaattggatttggcagcttgctaaggctcacgtttgctccaatgatgctggtgttcaccaattggttaaccactggttacgaacacatgcatgcatggagccttttatattggctgcacataggcaattgagcgcaatgcacccgatctttaagcttttggatccacacatgagatatacgctagagatcaatgccctagctcgccaaagcttgatctgcgctgatggtgttatcgagaactgcttcactcccggtcgctactgcatggagatgagtgct

SEQ ID NO: 224002 - DNA, 416 bp, Gossypium hirsutum
gtcggcagagattgaatctcacgtgataagatctaggtatgcagcaaggtgatcaaacggtgttgagtttaagacctggtggtggtcgagggaacagactttttggtggtccttcgtcatcttcgtcgtcatcatcatcctcgtcttcttcattagcatttggttccttttcttctgatcttcctctatttcgttcccatggcggtggcggtgcttcttctcttaaggctgcagactcacgttttgagggtcgtgaatgtgtgcggtacactagggaccaacttctacagcttagagaggctgtaaaagttgctgatgagattcttaaaatcaaacaagattttgaagtggagctcttcggtgaagataaaagctggagtcgtggagaaagcaatccttcaaattatagtcagaac

SEQ ID NO: 224003 - DNA, 413 bp, Gossypium hirsutum
cgactgcggccgaatattcattcggaagaagaaaggtggacagcttgtgcgcatcatggaagcagacaaacatgtggtcaaccgtattgagtctcatactcataccacagacccggctagcagtggaattgagagggacttcaagatatggactccaaaggctattgataaagctactcttcctactaacatagaacaggtatgtcttatcctaatctcttgcggtcaaaaaatattatacattttggggtattaataatgcaggttaagacatgaactgcattctgcttcgtcaacatgcttcttgacatggggataaaacagtggaaacgtcccacatgcttgttccttattgattatatcgtctttactagggacaagcatatatgatttcgttcatgacatagaaagat

SEQ ID NO: 224004 - DNA, 393 bp, Gossypium hirsutum
ccaccgccgtcgatctcgatccttatcctcgttttcaaacaagctcgaaaaagatggccaacgctgcatcgggaatggctgtgcatgatgattgcaagttgaagttcttggagctcaaggcaaaaagaacccaccgcttcattgttttcaaaattgaggagaagcaaaagcaagttattgtggagaagcttggtgaaccaaccgaaagctatgaggattttactaaatgtctccccgctgatgaatgtcgatatgctgtgtacgattttgattttctaacggccgagaacgtaccgaagagcagaatctttttcatagcatggtctcccgacacgtcaaggatcaggagcaagatgatttacgccagctccaaagatagattcaagcgagaac

SEQ ID NO: 224005 - DNA, 415 bp, Gossypium hirsutum; identical to SEQ ID NO: 195785

SEQ ID NO: 224006 - DNA, 408 bp, Gossypium hirsutum
gcctggtcatcataagggaaaatctaatggttcagtgcttgagttgaatgatgagcccatggttatccagaatagccgctgggcgagccttccgccagagctgttgcgtgatgtgatcaagagattggaagcgagtgagagcaactggcctgctcgcaagcatgttgttgcttgtgctgcagtatgcaggtcatggagggaaatgtgcaaagaaattgttagatgtcccgagttctccgggaaaatcacctttccagtttctctgaagcagcctgggtcaagggatggaaccattcaatgcttcattaagagagacaaatctaatttaacttatcaccttttcctttgccttagtcctgctttgcttgttgaaaatgggaaatttcttctttctgcaaaacggacccg

SEQ ID NO: 224007 - DNA, 415 bp, Gossypium hirsutum
ccataatcccttaacgaatggttctttgggtgttcaattgggatatttcaaagatgttttgccttcattttgttcatcttcttcagattgtaaagatttcctcaagaagtcgttaatagtgatgggagagataggaggaaatgattacaattatgcattccttcaaggcaaaaacactgtggagattctacactttgttcctcttgttgttgataccattgcttcagcaatcgcggagttgatagggctaggggcggtcactattttggtccctggaaaccttccaattggatgctccccagcatatctcacatactttcaaggttccgatatggcggattatgatcctttaactggttgcataacatggctgaaccaattctccgagttccacaacgaacagcttcaggaaaag

SEQ ID NO: 224008 - DNA, 418 bp, Gossypium hirsutum
cgttgagggctccccgctcttcattttctttactctcagaagccccgatcccatcttcaactccaaaaatgtcgggagaagaggttgccgttgcccaaccagaggcacccgctactcttggtgagccaatggacatcaacacagccttgcctcttgtggtgaggaagtcccaagctcatggtgggcttgctcgtggcttacatgaagctgccaaggcaattgaaaagcacaatgcacatctttgtgttttggccgatgactgtgaccaacctgattttgttaagctggtcaaggcactctgcgctgaccataatgttaaggtgctacgtgcacctagtgcaaaagctcttggcgagtgggctggtttgtgtaagatagattctgaagggaaagcacggaaagtagttggttgctcttg

SEQ ID NO: 224009 - DNA, 411 bp, Gossypium hirsutum
cgaccgtcggcgaagcggtctaagtttcgtaaattcctcgatacgttttgtacaccttccgattacttcagtgctatgcggcttatccttccttcactcgatcgagaacgtggaacttacggcctcaaggagtctgttctcgcaatttgcctcatcgatgctctcggcatgtcgagggattctgctgatgctctacgtcttatcaattggcgcaaaggtggagctaatactggtgctaatgctggaaactttgctcttgttgctgctgaggttttgcagcgtaggcaaggtacggtttccgggggacttactatcaaggagttgaatgagttgcttaatcgattggcttctgctgaaagcagggctgagaagactgcaatccttgctactttgattaataagacaaatgca

SEQ ID NO: 224010 - DNA, 411 bp, Gossypium hirsutum
gaaaaaaaagttgaaatcttttttgagcaatggaaggatcagtttttactccatcattggaaggaatgaagcatatcaaatctccggaaggggaaatgcttaccaagccttttttggatgtctgcaagttgattttgccagtcctagataagttcggatctgctatgagccttgtgaagagtgatgttggtggtaacatatcgaggttggaaaagaaatacgaaactgatcccgctaaatacaatcacttgtacagtatggtgaaagaagaggttgattgtaaaacagcaacagattcatctagttgtaccaatggtcttctctggttgacacgagcaatggatttcctcgtagaattgttccgcaacttacttgcacatccagattggactatgaccgaatcttgtacag

SEQ ID NO: 224011 - DNA, 407 bp, Gossypium hirsutum; identical to SEQ ID NO: 198368

SEQ ID NO: 224012 - DNA, 336 bp, Gossypium hirsutum
ggacggcctgttacagttgccaactgacaaagttctcctttccgaccctgttttccgtccattggttgagaaatatgcggctgatgaggatgctttctttgctgattacactgaagctcacctgaagctctctgagctaggatttgctgatgcataagctgatgattgcataagaggaagaagccaacaacacaatcctacacagacgttttaggttttgttttctctctaaagttggcttaaggaatgaatttgggtggttttttttgggaagattccggagacaagttattctcgacaatttcttctaaaatcatattccccatcttggtcatt

SEQ ID NO: 224013 - DNA, 406 bp, Gossypium hirsutum; identical to SEQ ID NO: 196735

SEQ ID NO: 224014 - DNA, 415 bp, Gossypium hirsutum
cccacgcgtccgcccacgcgtccgaaacgcaataattcaatccgacgatggtccacacattttagctggaggcctcaattccttggaggaaacagattactccacagagagatggactgatattgttaagtactatgaagaaattggtaaaccaacaccaaaggttgaagtaatgaaatacctgaagaataaacagtacactgatgccaaggatttctcaggggaatgtgagcccgtcgtcgtgattgccaaaggacaaagtgtgcaagggacatgcaagtacggtactcgggttgattacatactagcatctccgaattcgtcgtacaaattcgttccgggttcgtattcggtattgtcttcaaaagggacttcagatcatcacatagtgaaagtcgacgtagtaaaaacagat

SEQ ID NO: 224015 - DNA, 334 bp, Gossypium hirsutum
cccacgcgtccgaccgattaggggtgaagaggggtgcaaccgagatcaagcaacatccattctttgaaggtgtgaattgggctctaatacgatgcagcaccccacctgaggtgccaagaccaatggagagcgagatgcctaggatgcctgggaaactcgggccagtggagccagttggagttggtagcaacagtaaaaggatggtaggtcaggtaggaacagacgtgaaatctgggggtaaatatctggactttgagttcttctagttttcttaattacaggaagccgtgttgtattagtatccatttactcaatccccccgaaagtttgttca

SEQ ID NO: 224016 - DNA, 415 bp, Gossypium hirsutum
gtcagatggtaatgttcagtgctacatggcctgcagcggttcatcggttagctcaggagtacatggaccctaatcctgttaaggttgtgattggctcagaagatttagctgccaaccatgatgttatgcagatagttgaggttttagatgatcatgcacgttatgagcgattgactgctttgctcaagaaataccatgaatctcagaggaatagagtgttggtatttgtcttgtaccaggcagaagctgatcgaattgaaaatatgcttaagagaagtggctggaatgttgtttctatacatggtcgcaaagcgcaaaatgaacgcactaaggcactatcattatttaagaaaggaagctgtcctttgatggtagctacagatgtggctgctagaggattggatattccagatgt

SEQ ID NO: 224017 - DNA, 406 bp, Gossypium hirsutum
cccacgcgtccgttcgaagacgtcgagtccatcaaagacgagctcaaagaactcgagaggctaaacgacgacctttcagcgtctcacgagcgaagcaagacgttgcacaatgcgaaagccgggaaagaattgagagcaaagatggatgctgatgtagccatggccttgaaaaaagccaagctcattaaagttaggttggaagcgcttgaccgctccaacgcctctaaccggagtttacctggcttgggaccgggttcttcttcggacaggacgaggacgtccgttgtgaacgggctgagaaaagaagtgaaggattctatggagagttttaatgggttgagggaaaagatctcgtcagagtatagagaaactgttcaaagaagatatttcacgggtacagagaaaa

SEQ ID NO: 224018 - DNA, 407 bp, Gossypium hirsutum
gttctctctttcttcccatatttctcctctccaaatttctcgtctctttttttttctcaaagacaaacccacattcccctcgaaatgtcgttcgatgaagaagactctattgaacacaccctcctcgtagttcgcgaagtctccgtcttcaaaatcccgccccgctccacctccggcggttacaaatgcggggagtggctccaatccgacaagatctggtctggtcgattccgggttgtctcctgcaaggaccgttgtgagatccggttagaggatcccaactcgggtgagctttttgccgcttgtttcatccacccgggacagcgcgagagttccgtcgagccggctctcgattcatctcgatacttcgtgctcaagatcgaggatggcaatggtaaacacgcgtt

SEQ ID NO: 224019 - DNA, 413 bp, Gossypium hirsutum
cccacgcgtccgaaaaatttccgtttgtttcctgagcaaatctcgggaaggaataccctttttttccccctgttgttaactcgttgtgattgtgaagctttctttaagagaatcctagttaactcgacgcgtttacccggaaagaggtgaagatgtcaactcctgcaaggaagagattgatgagggattttaagaggttgcagcaagatcctcctgcaggaattagtggtgcacctcaagataacaacattatgctttggaatgctgttatatttggacctgatgacaccccatgggatggaggtacgtttaagctgactcttcagtttacggaggattatccaaataaaccaccaactgttcgttttgtatcccgaatgttccatccaaatatttatgctgatggtagcatc

SEQ ID NO: 224020 - DNA, 417 bp, Gossypium hirsutum
cggacgcgtgggcggacgcgtgggtgacaaacaatggcttccatgcttagctctggaactgttcttaggccaaccccatttcttggccaaaccaaaaatgctaaccctcttagagatgttgtctctttgggcactcccaaatatgcaatggttagttctttaggtttccctttcttttacaattttcttcttggggaaatgaactatggtatgggccagacagagtgaagtacttgggaccattttcagctcagactccatcttacttgactggagaattccctggagactatggttgggacactgctggtttgtcagccgaccctgaggcctttgccaggaatagggctcttgaggtcatccatggaagatgggcaatgttgggagcactaggctgcatcacaccagaagtacttg

SEQ ID NO: 224021 - DNA, 416 bp, Gossypium hirsutum
gcaagccactcataataatcctcaacatgttgctgtgcatgtcctagatggaagcccaggaacatgtgctccaaatccttctatggatataacttttcaggattctatatttcaccctatgggtgatattcatggacaagttaacctgtttgcaaatccagcggcatctgctaccactgcacatcagaataatgcaccaagatcaactcatcaggcgtttccaacgtttcatactccctttatgcatcttcatcccaatcaagaggactaccgatcatttctacacgtctcttccactttttcaagtctcgttgtatctactttattacagaatccagctgctcatgctgcagcaagctttgcagctacattttggccatatgcaaatgttcaaaattctgatgattctcctgctt

SEQ ID NO: 224022 - DNA, 415 bp, Gossypium hirsutum
cggacgcgtgggttttttttatttttttgaaacagaagagagaatccagtggaaaactggctgattctgatgtgaaagtaccagttaaacaagagaccggagctttggtggaggaattgaaccggattatcgctgagaacaagaagctaactgagatgctaacagttttatgcgagcgctacagctctttgcagaaccaatacatggaattggtgagcaggaactcgggaagtgatgcaacagctgcaacatcaaaaaagagaaaagccgagtgtgaggattatgtccctatgattggattcagtggaaaagctgagagcagctttagtgatgaagactcgtgcaaaaagcctaaggactgcatcaaagcaaaaatttcaagggcttacgtccgcacaaatccttctgataacag

SEQ ID NO: 224023 - DNA, 410 bp, Gossypium hirsutum
agggaaccttgttccccatgtgcggaatgaatctggcatttaaccgagaattgatcggccctgcaatgtactttggactcatgggagatggtcaaccaattggacgatacgatgatatgtgggctggctggtgcacgaaggttatttgcgatcacctcggatggggagtgaagaccggacttccctacatttggcacagcaaagcgagcaacccgtttgtgaaccttaagaaagaatacaaaggaatttactggcaagaagagttgattccgttcttccaatccgttgcccttccgaaggactgcaccaccgttcagaaatgctacattgagatctccaagcaagtgaaggcgaaactcggcaaggtcgatgactacctcaataagctggcggatgctatggtgacatgg

SEQ ID NO: 224024 - DNA, 420 bp, Gossypium hirsutum
attgtaagtgatgcaaacatgttcttcattgagaccattctggaacatcttggagtgaaggaatgtttctcagagctcaactcaaatcccagctttgttgatgaagaagggaggctgaggatcttcccttatcacgatttcaccaagacttcccatggctgcaatctttgccccccaaatatgtgcaagggggtgatcattgaaaggattcaagcatgtttagaggggaagaagaaaatcatttacctcggagatggcagtggggattattgcccaagcctaaggcttggagagagtgactatgtgatgccaaggaagaattttccagtatgggaattaatatgcaggaaccctatgctcatcaaggctgacattcatgaatggagtgatggcgaagacctggagcgggttcttctggat

SEQ ID NO: 224025 - DNA, 415 bp, Gossypium hirsutum
gaaaatgggagatcaatcaaccagaggagaagaattcgagaaaaacgcagagaaaaagctaaacagctggagcttttttggctcgaaatatgaagatgccgccgatctctttgataaagctgccaatttcttcaagctcgccaaatcctgggacagagctggatcaatttatgtaaagttagcaaattgtcatttgaaattagaaagcacccatgaagccgctcaagcttttgttagtgctgctcattgctataagaaaacatcgacaaaggaggcgatatcgtgcttgcagcaagcagtgaacatgttttgtgatattggaaggctcagtatggctgcaaggtattataaggaaattgctgaattatacgagtctgaacaaaacattgagcatgccattgatcattacgaaaag

SEQ ID NO: 224026 - DNA, 393 bp, Gossypium hirsutum
atcattgtttaccgtggtctatactttggaatgtacgactccctgaagccagtggttttgactggaaagatgcaggatagtttctttgctagctttgcccttggttggctcatcacgaatggtgctggccttgcatcctacccgattgacaccgttcgtagaagaatgatgatgacctctggtgaagcagtgaagtacaagagctcacttgatgcattctctcagatcttgaaaaatgagggtgccaagtctctatttaagggtgctggagctaacattcttcgtgctattgccggtgctggggtgcttgctggatatgacaaggttgcactcattgtgtgctgaaagaaaaattgttcggttggtgctttttcctttgggtattttttcctt

SEQ ID NO: 224027 - DNA, 405 bp, Gossypium hirsutum
cccacgcgtccgcttttctttgtaataatcgaactcccctcccgtcctctttcccgatttgtcttcttcattgccccgccatggcttgtgttagcttcgctaaactcaacgcgccgtcatcctcttggatcggtggccagcagtctctccctcaacgctccggatcatccgctcggctcgccactcgcagagtctcactcccgatccgtgctggcgcttacaccgacgaactcatcaaaaccgccaaaactattgcttcacctggtcgtggaatactggcaattgatgaatcgaatgcaacatgtgggaagagattatcttctattggcttagacaatactgaacccaaccgccaggcttacagacagcttctgctcacaactcctggcctcggagaatatattt

SEQ ID NO: 224028 - DNA, 403 bp, Gossypium hirsutum
cggacgcgtgggtgatgatgagcagctcctcctgacatattgaaaaagaccaactttttcatattcttcataaagtccctcagggtgatactcctcatgttaaagccaaacatgctcagctggttgaaagggatccagacgcagcaatagtactattctggaaggcaataaacgccgggcatagagtagagagcgcactacaagacatggcgggggtgatgacgctactcacccgcactgacgaagcgattgatgccatcacgtctttcatgggccgtcgccccaaacatgctcatgaatcactcgacaatgttctcattgacttatacatgatatgtgggaaagtagacgagcagattgagctattataacgaaagccacgattactataccgaggagagat

SEQ ID NO: 224029 - DNA, 395 bp, Gossypium hirsutum
cccacgcgtccgctctgatctaccccctatttggccgtcctcagaccaaaggctgagtcgtcgtaaatctggcccccgagctgctggcttcagtgtcttccttggttctggtgggagtggctctgatgtgtaccagaaagaagaggatgagtcatctactcgagcggattatgaatcagaatctgatgattcttcagtcaataattactcagttttgtcagggaatgggagtgatcaaggggttagcaggaaaatggttgagttggagcttgaacttcatgaaatgaaacagaagctacggatgctagaggaagaaaatacagatggttcagtaagaggggcaaaatgtaataattccgaacttcttgctagaattagggagtatgaagaaaaac

SEQ ID NO: 224030 - DNA, 416 bp, Gossypium hirsutum
tactccaggtattgtatatcagtgcaatctaggcactgagacaccagatatgaagatattccgtgaaattagtgttcctggatttgaccgctcagagtatgaagtcaatcaggtatttgtgccaagtaaggatggtacgaagattccaatgttcattgtgggcaggaagaacattaatttggatggatcacacccttgtttgctatatggatatggtgggtttaacattagtctcacaccaacattcagtgtgagtcgtattgtacttacaaggcatctcggtgctttttattgtgttgccaacattcgtggtgggggagaatatggagaggagtggcataaagctggtgctctttccaagaagcaaaattgctttgatgacttcatttcggctgctgagtatcttatatctgctg

SEQ ID NO: 224031 - DNA, 425 bp, Gossypium hirsutum
cggacgcgtggggaaacattttgatttcagaaactttttaagtcaaaagaaaaacaaaaaaagcatgcagccggagaatttcgagctctaccgtttcctcgccgaaaacggcgtcggatcctacggcggctttccttccggttccgagtttccggctatgcaaagcttctccagttcctcgacgtattaccctttggagatgtcgggtgttaccaccgaaacgacaccgcatgataaagcacttgcggcgttgaagaaccacaaggaggcggagaagcggcggagagagagaattaactcgcatctcaacaggcttagagcccttctcccttgtaattctaagacagacaaggcttcacttttagcaaaggtggtccaacgagtaaaagaactaatagagcaagccctcgagacaactgagctcg

SEQ ID NO: 224032 - DNA, 418 bp, Gossypium hirsutum
ctcctctctgtcgcctacaaaaacgtgatcggcgctcgccgtgcctcttggcggatcgtttcctccatcgagcagaaagaggaaggacgtggcaacgccgaccacgtctctgtcatccgtgagtacagggccaagatcgaggccgaattgtccgagatttgcgccggaattttgaagcttctcgacgagaagctcgttccggccgccgggaccggtgattccaaagtcttttacctgaagatgaagggagattaccataggtacttggctgagttcaagactggcgatgacaggaaagcggctgccgagaatacgctcactgcgtataaatctgctcaagacattgcgaatgctgagctggccccaactcatcctattcgattaggaatggctctcaaactttctgtcttctactatg

SEQ ID NO: 224033 - DNA, 410 bp, Gossypium hirsutum
ctgcgtttcccttttttccttcttatttcccttttttccttcattactgatgttgaaattccgctggaagaaccataacatatcagcttcaagtatcagaggagagaaattcaagattgctcctttttctctctataaattaattattattatcgaaaatggctatttcctttgtttatttgttaatcgacaatgagcgatcaatcggaggaattgcctctcatggctcccccaccgacactgaccccaacgagatcgacctcgaggccggtccagccgatcaaattcagtgtcaaatttgcctcgaaaccgacggtagagattttattgctccttgcaagtgcaaaggaacatcaaaatatgtacatcgggaatgtttagatcattggcgagctgtaaagatgtacctt

SEQ ID NO: 224034 - DNA, 402 bp, Gossypium hirsutum; identical to SEQ ID NO: 198389

SEQ ID NO: 224035 - DNA, 408 bp, Gossypium hirsutum; identical to SEQ ID NO: 198390

SEQ ID NO: 224036 - DNA, 417 bp, Gossypium hirsutum
catactataaggtcccatggtctcaccattgcaaggacacacatgcatgattggcttattcttgtattgcttgtggtgatatgggttgtcatccttatcattcatccattttatcgctttgttgggaaggatatgatggatgatctaagataccccttacaaagtaatacagttcctgtttgggctgtgccgatgtatgccgttctgttgcccatgctgatttttatctttgtgtacattcgtagaagggatgtttatgatcttcatcatgctgtactaggcctcttgttctccgttctagtgacggctgttatcactgattcgataaaaaatgcagttggaagacctcggccagacttcttttggcgctgtttcccagatggaaaggatgtttatgataaatggggaaatgtcatc

SEQ ID NO: 224037 - DNA, 378 bp, Gossypium hirsutum
tataaatcagggtccttcgggagatcattggatatttctgcattcagcaactacaatgaacttcgcagtgaactggcacatatgtttggccttgaaggccagttggaggaccctctgagatcaggctggcagcttgtatttgttgaccgggagaatgatgttcttctccttggcgatgacccctggccggagttcgtgaacagtgtctggtgtatcaagatactttccccacaggaagtgcagcaaatgggcaaacgaggcctggagcttctaaactctgtgccagttcagaggctctctaatggcagttgtgatgactatgtgagccggcaggactcgagaaatcttagctctggtatcgcctccgtgggttctttg

SEQ ID NO: 224038 - DNA, 386 bp, Gossypium hirsutum
tataaatcagggtccttcgggagatcattggatatttctgcattcagcaactacaatgaacttcgcagtgaactggcacatatgtttggccttgaaggccagttggaggaccctctgagatcaggctggcagcttgtatttgttgaccgggagaatgatgttcttctccttggcgatgacccctggccggagttcgtgaacagtgtctggtgtatcaagatactttccccacaggaagtgcagcaaatgggcaaacgaggcctggagcttctaaactctgtgccagttcagaggctctctaatggcagttgtgatgactatgtgagccggcaggactcgagaaatcttagctctggtatcgcctccgtgggttctttggactactg

SEQ ID NO: 224039 - DNA, 377 bp, Gossypium hirsutum
gtttaaaatataagaaaaaagtcatacgcaatgagcactgccggtcaggttattcgttgcaaagctgcggtggcatgggaggccgggaagccactatctatagaagaagtggaagtggcaccaccccaaaaacatgaagtccgtattaagattctcttcactgctttatgtcacactgatgtatactactgggagtgtaagggttacactcctctgtttcctcgtatacttggtcatgaagccctcaggatcgtggaaagtgtgggtgagggtgtgaatgatttgaaacctggggatcatgtgcttcctatcttcaccggagaatgcaaagaatgtcgccactgtctgtcagaagaaagcaataacatgtgcgaact

SEQ ID NO: 224040 - DNA, 385 bp, Gossypium hirsutum
cccacgcgtccgcaattccgctgtgattgttcttggagctacaaaccgttctgatgtcttggatcctgcccttcgtcgaccagggagatttgatcgtattgttatggtagagactcctgacaggattggaagagaagctattataaaagtgcatgcctccaagaaggaacttccccttggagatgatgttgatcttggtgacattgcctctatgactactggttttactggggctgatcttgcaaatctggtaaatgaagcagccttactcgctggaagaaataataaagttgttgtagagaggattgatttcattcacgcagtagaacgatcaatagctggcatagagaagaaaactgccaaattgaatggatgtgagaaggct

SEQ ID NO: 224041 - DNA, 326 bp, Gossypium hirsutum
gccttctagaaatttccaagttcttcttcaaaaccctcacatcccattcgatcaaaagaactcaaatctttatcatccaccatgggaggaggaaatgcccaaaaatccaagatggctcgtgagaagaacttggaaaagcaaaaagctgccgccaaaggaagccagcttgattctaacaagaaggccatgaccatccagtgcaaggtgtgcatgcaaacattcatctgtactacaacagaagtgaaatgccgggagcatgctgaggcgaagcatcctaaatccgacctatacacatgttttcctcaccttaaaaagtagcacactgg

SEQ ID NO: 224042 - DNA, 381 bp, Gossypium hirsutum
cctaaatctcttttatttgcttctttcaccatgaccaagcagcaggctaactggtctccttacgacaacaatggaggatcttgcgttgcgatcgctggagctgattactgtgttatcgccgccgatactcgaatgtcaaccggttacaatatactgacccgagattactccaaaatatgtaaacttgcagataaatgtgtcatggcatcctcaggatttcaagctgacgtgagggctttacaaaagcaactggcagctaggcacttgatttatcagcatcagcacaacaagcaaatgagctgccctgcaatggctcaattgctttccaacacactttattacaagcgtttctttccttactattcttttaatgttttgggt

SEQ ID NO: 224043 - DNA, 378 bp, Gossypium hirsutum
cggacgcgtgggtgatgattagcagctcctccagacatattgaaaaagaccaaccttttcatattcttcataaagaccctcagggtgatactccttatgttaaagccaaacatgctcagctggttgaaaaggatccaaaagcagcaattgtactattttggaaggcaataaactccggggatagagtatagagcgcactacaagacatggcgggggtgatgaagcaactaacccccactgacgaagcagattgatgccatcacgtctttcatgggccgttgccccaaacacgcttaagaatcacttgacaatgttctcattgacttatacctgaaatgtgggaaaggagacgagctgattgagctattaaaacgaaag

SEQ ID NO: 224044 - DNA, 380 bp, Gossypium hirsutum
cccacgcgtccgcccacgcgtccgattttctgttattattatttttttgttcatcaatgggattccctgtggtttacacagacgttttcgtacccaaattcttcgttcacacgctatcgtttttgggtttcatcagaaacctaatcctctcactttttaattacctcggactctccgatttcctcgaaaccgacaccgtttggccggaaaacccgacccgaaccacaccttttaaaccgccggtatccgctctcttgatccgtgaaatcctacccgtcgtaaagttcgaggaactcgcgttggtcggtggtggtgatccgccggagagttgcgccgtttgcttgtgcgagttcgaaggaaaagaagagatcaagtggttg

SEQ ID NO: 224045 - DNA, 361 bp, Gossypium hirsutum
ccaccgccgtcgatctcgatccttatcctcgttttcaaacaagctcgaaaaagatggccaacgctgcatcgggaatggctgtgcatgatgattgcaagttgaagttcttggagctcaaggcaaaaagaacccaccgcttcattgttttcaaaattgaggagaagcaaaagcaagttattgtggagaagcttggtgaaccaaccgaaagctatgaggattttactaaatgtctccccgctgatgaatgtcgatatgctgtgtacgattttgattttctaacggccgagaacgtaccgaagagcagaatctttttcatagcatggtctcccgacacgtcaaggatcaggagcaagatgattta

SEQ ID NO: 224046 - DNA, 385 bp, Gossypium hirsutum
gaaaatgggagatcaatcaaccagaggagaagaattcgagaaaaacgcagagaaaaagctaaacagctggagcttttttggctcgaaatatgaagatgccgccgatctctttgataaagctgccaatttcttcaagctcgccaaatcctgggacagagctggatcaatttatgtaaagttagcaaattgtcatttgaaattagaaagcacccatgaagccgctcaagcttttgttagtgctgctcattgctataagaaaacatcgacaaaggaggcgatatcgtgcttgcagcaagcagtgaacatgttttgtgatattggaaggctcagtatggctgcaaggtattataaggaaattgctgaattatacgagtctgaacaaaac

SEQ ID NO: 224047 - DNA, 375 bp, Gossypium hirsutum
gcttctccgtggatgatacacccattagagagttcaaaaacatggagtcgattggtgtcccatttcccaagaaccagcccatgagaatttactccagcttgtggaatgctgatgactgggccacaaggggtggtctggttaagaccgactggacccaagctcctttcactgcctcgtacaggaacttcaatgccgatgcttgtgtgtggtccaatggagcttcttcctgcaaatcaaatgccccatcttcttctacatcaacaaacaatgcatggttctctcaagagatggattcagcaaagcagcaaaggctacagtgggtgcagcagaattatatgatctacaattactgcactgacgccaagagatttcctc

SEQ ID NO: 224048 - DNA, 379 bp, Gossypium hirsutum
gcctggtcatcataagggaaaatctaatggttcagtgcttgagttgaatgatgagcccatggttatccagaatagccgctgggcgagccttccgccagagctgttgcgtgatgtgatcaagagattggaagcgagtgagagcaactggcctgctcgcaagcatgttgttgcttgtgctgcagtatgcaggtcatggagggaaatgtgcaaagaaattgttagatgtcccgagttctccgggaaaatcacctttccagtttctctgaagcagcctgggtcaagggatggaaccattcaatgcttcattaagagagacaaatctaatttaacttatcaccttttcctttgccttagtcctgctttgcttgttgaaaatggg

SEQ ID NO: 224049 - DNA, 281 bp, Gossypium hirsutum
cccacgcgtccgctgagggctgggcacgggggtcccaatcacgaacccgtcggctgacggcacactgttcgagctactcccacggcgagagcgggtcatcgtgtgccgacccgcggacggactgggaacggatcactaaggggcctttctcagtcgacgaacactcgactcataactggtacggacaaagggaatccgactgggtaattaaaacaaagcattgcgatagttcctgaagatgctcactcaatgtgatttatgcccagagctctgaatgtcaa

SEQ ID NO: 224050 - DNA, 326 bp, Gossypium hirsutum
catactataaggtcccatggtctcaccattgcaaggacacacatgcatgattggcttattcttgtattgcttgtggtgatatgggttgtcatccttatcattcatccattttatcgctttgttgggaaggatatgatggatgatctaagataccccttacaaagtaatacagttcctgtttgggctgtgccgatgtatgccgttctgttgcccatgctgatttttatctttgtgtacattcgtagaaaggatgtttatgatcttcatcatgctgtactaagccctcttgtctccggtctaatgaccgctgttatcactgattcgat

SEQ ID NO: 224051 - DNA, 379 bp, Gossypium hirsutum
gaaaaaaaagttgaaatcttttttgagcaatggaaggatcagtttttactccatcattggaaggaatgaagcatatcaaatctccggaaggggaaatgcttaccaagccttttttggatgtctgcaagttgattttgccagtcctagataagttcggatctgctatgagccttgtgaagagtgatgttggtggtaacatatcgaggttggaaaagaaatacgaaactgatcccgctaaatacaatcacttgtacagtatggtgaaagaagaggttgattgtaaaacagcaacagattcatctagttgtaccaatggtcttctctggttgacacgagcaatggatttcctcgtagaattgttccgcaacttacttgcaca

SEQ ID NO: 224052 - DNA, 383 bp, Gossypium hirsutum
cccacgcgttcgcccacgcgtccgaaacgcaataattcaatccgacgatggtccacacattttagctggaggcctcaattccttggaggaaacagattactccacagagagatggactgatattgttaagtactatgaagaaattggtaaaccaacaccaaaggttgaagtaatgaaatacctgaagaataaacagtacactgatgccaaggatttctcaggggaatgtgagcccgtcgtcgtgattgccaaaggacaaagtgtgcaagggacatgcaagtacggtactcgggttgattacatactagcatctccgaattcgtcgtacaaattcgttccgggttcgtattcggtattgtcttcaaaagggacttcagatcatc

SEQ ID NO: 224053 - DNA, 385 bp, Gossypium hirsutum
cggacgcgtggggaaacattttgatttcagaaactttttaagtcaaaagaaaaacaaaaaaagcatgcagccggagaatttcgagctctaccgtttcctcgccgaaaacggcgtcggatcctacggcggctttccttccggttccgagtttccggctatgcaaagcttctccagttcctcgacgtattaccctttggagatgtcgggtgttaccaccgaaacgacaccgcatgataaagcacttgcggcgttgaagaaccacaaggaggcggagaagcggcggagagagagaattaactcgcatctcaacaggcttagagcccttctcccttgtaattctaagacagacaaggcttcacttctagcaaaggtggtccaacgagta

SEQ ID NO: 224054 - DNA, 377 bp, Gossypium hirsutum
gcgggtttgaatcctcgtaccgtacgggaatacgatgaagcaataacacgagtgtcattaggttacaagtcagtggatgaatattactcaaattcatgtagttgtcatgtcgtacaacatgtccggatccctttgctttgcgtccaggctgcaaatgatccaattgcgcccattgaggcaactccttactcagatatcaaggacaactcgaactgcatgctgatagtaacaccccagggtggtcatttaggctgggttgccggtgatgacgcaccctttggagctccctggactgataatgtggtgatcgaattccttgaacatctgcaaaagaatgcatctaaacccgaatcatcttgagctatggagatagaaaa

SEQ ID NO: 224055 - DNA, 381 bp, Gossypium hirsutum
cccacgcgtccgttcgaagacgtcgagtccatcaaagacgagctcaaagaactcgagaggctaaacgacgacctttcagcgtctcacgagcgaagcaagacgttgcacaatgcgaaagccgtgaaagaattgagagcaaagatggatgctgatgtagccatggccttgaaaaaggccaagctcattaaggttaggttggaagcgcttgaccgctccaacgcctctaaccggagtttacctggctgtggaccgggttcttcttcggacaggacgaggacgtcggttgtgaacgggctgagaaagaagttgaaggattctatggagagttttaatgggttgagggaaaagatctcgtcagagtatagagaaactgttcaaaga

SEQ ID NO: 224056 - DNA, 379 bp, Gossypium hirsutum
cggacgcgtgggttttttttatttttttgaaacagaagagagaatccagtggaaaactggctgattctgatgtgaaagtaccagttaaacaagagaccggagctttggtggaggaattgaaccggattatcgctgagaacaagaagctaactgagatgctaacagttttatgcgagcgctacagctctttgcagaaccaatacatggaattggtgagcaggaactcgggaagtgatgcaacagctgcaacatcaaaaaagagaaaagccgagtgtgaggattatgtccctatgattggattcagtggaaaagctgagagcagctttagtgatgaagactcgtgcaaaaagcctaaggactgcatcaaagcaaaaatttc

SEQ ID NO: 224057 - DNA, 359 bp, Gossypium hirsutum
gttctctctttcttcccatatttctcctctccaaatttctcgtctctttttttttctcaaagacaaacccacattcccctcgaaatgtcgttcgatgaagaagactctattgaacacaccctcctcgtagttcgcgaagtctccgtcttcaaaatcccgccccgctccacctccggcggttacaaatgcggggagtggctccaatccgacaagatctggtctggtcgattccgggttgtctcctgcaaggaccgttgtgagatccggttagaggatcccaactcgggtgagctttttgccgcttgtttcatccacccgggacagcgcgagagttccgtcgagccggctctcgattcatc

SEQ ID NO: 224058 - DNA, 378 bp, Gossypium hirsutum
agggaaccttgttccccatgtgcggaatgaatctggcatttaacccaaaattgatcggccctgcaatgtactttggactcattggaaaatggccaaccaattggacgatccaataatttgtggctggctggtgcacgaaggttatttgcgatcaccttggatggggagtgaagaccggacttccctacatttggcacagcaaagcgagcaacccgtttgtgaaccttaagaaagaatacaaaggaatttactggcaagaagagttgattccgttcttccaatccgttgcccttccgaaggactgcaccaccgttcagaaatgctacattgagatctccaagcaagtgaaggcgaaactcggcaaggtcgatgactact

SEQ ID NO: 224059 - DNA, 322 bp, Gossypium hirsutum
atcattgtttaccgtggtctatactttggaatgtacgactccctgaagccagtggttttgactggaaagatgcaggatagtttctttgctgcctttgccttgggtgggttattaacaatggggcttgccttggattctacccgattgacaccggtcgtagaagaatgatgatgacctctggtgaagcagtgaagtacaagagctcacttgatgcattctctcagatcttgaaaaatgagggtgccaagtctctatttaagggtgctggagctaacattcttcgtgctattgccggtgctggtgtgcttgctggatatgacaa

SEQ ID NO: 224060 - DNA, 370 bp, Gossypium hirsutum
cccacgcgtccgcttttctttgtaataatcgaactcccctcccgtcctctttcccgatttgtcttcttcattgccccgccatggcttgtgttagcttcgctaaactcaacgcgccgtcatcctcttggatcggtggccagcagtctctccctcaacgctccggatcatccgctcggctcgccactcgcagagtctcactcccgatccgtgctggcgcttacaccgacgaactcatcaaaaccgccaaaactattgcttcacctggtcgtggaatactggcaattgatgaatcgaatgcaacatgtgggaagagattatcttctattggcttagacaatactgaacccaaccgccaggcttacagacagct

SEQ ID NO: 224061 - DNA, 371 bp, Gossypium hirsutum
attacaccgagaggaaggcagctgagttgactaagatcattgttggtgttgttgaggcttgccattcacttggggttatgcatagagatttgaagcctgagaatttcttgttggttaacaaggatgatgatttctcactcaaggccatcgattttgggctctcggtgttctttaaacccggcgaagtctttactgatgttgttggaagcccatattatgttgctcctgaagtactcctcaaatgttatggaccaaaagcagatgtatggactgctggagttatactctatatattgctaactggcgtgccaccgttttgggcagaaacacaacaaggaatatttgatgctgtgttgaaaggatatgttgac

SEQ ID NO: 224062 - DNA, 368 bp, Gossypium hirsutum
gcttgaatggcattacatggccagatcgaactcctcatcccaccttacacgaggttaagtatgtctatcaaccgatcaaggtttatctaagggaaagcacagttaagataaagaacactaatttttatgagacaacagaaggattggtgtttgaatgggctgttcttggggatggctgtgaacttggatgtggaattctctcccttcctgtgattgaacctcagagcagctatgatatcgaatggaagtctggcccatggtatcctctaggggcttcctcagatgccgaagaaatatttttaacaatcactactaaacttttgcactccaagaggtgggtagaagccggtcatgtggtttcatcgaca

SEQ ID NO: 224063 - DNA, 376 bp, Gossypium hirsutum
cttcaaaagtcaagtgaagcaaatggccatgtcatccacccccaacatcttattatggctcttttccattcattctttgctttcgttagcacagatcaatgaggccaaagttcctgccatcatattgttcggggactcatcggttgatgctggcaacaacaactatatccccaccattgccaggagcaattttgagccatatggtcgtgatttcaatggtggccatacaacaagtcggttctccaatggcaaaatcgctaccgacttcatcttccacgcgtttggtctcaaaagggccatccctgcttaccttgacccttgatataatatattagatttcgccactggagttaccttcccttctgctggaacccgc

SEQ ID NO: 224064 - DNA, 369 bp, Gossypium hirsutum
ccggaaacaagtggaacgacacagatccgacccgaatatgttcataggtacgggcacagccgagcacaaccaccctgcgacaacacattagaattcactttctggcagcactcgacagaagccttttactccacaaacggtcaacgacggtgaatcaatcaaaccttgctcatctaaacccgccgacagcttgtctacgacggcctccgtagatgaaggggttgcggttcaaagaccatatgtggacagtcgagaggatttggttgaagatgaaggggaagatgaaacttggatgtcggacactggggcgagtgatgaattcttcgaaggcttaaaaaggctcgctgaaattgtcaacagaaattgctt

SEQ ID NO: 224065 - DNA, 380 bp, Gossypium hirsutum
ccaatgcggccgaatattcattcggaagaataaaggtggacagcttgtgcgcgtcatgggggcacactgacatgtgcacaaacgtattgagtcccatactcataccacagaccctgttagcagtggaattgagagggactttaagacattgactccaaaagctattgataaagctactcttcctactaacattgaacaggtatgtcttatactaatatcttgtcgttaaaaaatataccacatgtctcggtattaataatgcgggttaagacatgaactgcatagtgctaagacaacatgcttgttgacatggggataaaacagaagaaacgcgccacatgcttgttccttattgtttatatggtctttactagggacat

SEQ ID NO: 224066 - DNA, 376 bp, Gossypium hirsutum
aattcatcgtctgtgcctgctcgatattggtcctttgttgacagatccgagactacatccatgttatggacttagctgatggccatactgctgcacttaggaaactttttaccacagagagtataggttgtgttgcctacaacttgggaactggatgtggtacatctgtgctcgaaatggttgcagctttcgaaaaagcttccagaaagaaaatccccattaaactatgcccaagaagacctggagatgctactgccgtttatgcttctaccgagaaagctcaaagggaacttggttggaagtatgcctatgattcgcatctctttcctagtgcattgttttattggaattacatggatcctctgttacatattcc

SEQ ID NO: 224067 - DNA, 375 bp, Gossypium hirsutum
ccataatcccttaacgaatggttctttgggtgttcaattgggatatttcaaagatgttttgccttcattttgttcatcttcttcagattgtaaagatttcctcaagaagtcgttaatagtgatgggagagataggaggaaatgattacaattatgcattccttcaaggcaaaaacactgtggagattctacactttgttcctcttgttgttgataccattgcttcagcaatcgcggagttgatagggctaggggcggtcactattttggtccctggaaaccttccaattggatgctccccagcatatctcacatactttcaaggttccgatatggcggattatgatcctttaactggttgcataacatggctgaa

SEQ ID NO: 224068 - DNA, 371 bp, Gossypium hirsutum
ggacggcctgttacagttgccaactgacaaagttctcctttccgaccctgttttccgtccattggctgagaaatatgcggctgatgaggatgcttactttgctgattacactgaagctcacctgaagctctctgagctaggatttgctgatgcataaactgatgattgcataagaggaagaagccaacaacacaatcctacacagacgttttatgttttgttttctctctaaagttggcttaacgaatgaatttgggtggctgtttttgggaagattccggagacaagttattctcgacaatttcttctaaaatcatattccccatcttggtcattgcaaaaaaaaacaaatcatcttgtgctattgagat

SEQ ID NO: 224069 - DNA, 338 bp, Gossypium hirsutum
aaatgagagagtactcgaactcatttgcttcacttctaggggtgttggccttttgccaaagcctcctccaactcattttcccaccccaactccgctttctctgtctcaagttcttcaaccgtatcttccatttgttctcttcctactgctacttcgacatcactgaaatcgacggcgttaacaccaacgaactctataacgctgtccaactctatctcagctcctttgtttccatcaacggcagccgcttgagcctcactcgcgctctcaattcaagcgccattaccttcggcctctccaacaatgactgcatcgtcgatacgttcaatggtgtcacc

SEQ ID NO: 224070 - DNA, 327 bp, Gossypium hirsutum
  unsure (1)..(327): unsure at all n locations
gattcgtctctctgtactcacttttcccgcctctaccgtcctcagctttctctctttcatttcttactaattttcttacaactatggttttctgggtttttggttacggttcactggtctggaacccggggtttgagtatgatgagaaagtcataggcttcatcaaggattacaagcgtggttttgaccttgcatgcattgatcatagaggtacaccagaaaatcctgcaaggacttgcaccttggaacacattgaangagccgtatgctggggtgctgcttattgtgttcggggcagtcctgaaggggaaagagcacatggagtac

SEQ ID NO: 224071 - DNA, 422 bp, Gossypium hirsutum
cccacgcgtccgattcgttactggaacaatcacatttccaacaatcttcccaagccaccatttcttatctccaaagcttccccactaaacgccatcgacttggccaagctcactcaactcgccaatcataactctctgtcttcccacattgaatctttttgttccttagccaatcttttctgctcattccaggaggactcctcgaaactagacgcagttgtcaagggtaaaggggatgcaaacttcgcagtgtattccagtaaaaactttaaaggttatggctcgttaagacgcggagggatcgactccttcaagaactactccgatgggttaaatactcccaatgagtcttttaagaaatacagcaggggatccaatgcccatagtgaagacttcacaagctatgccaaagatgccaacgt

SEQ ID NO: 224072 - DNA, 411 bp, Gossypium hirsutum
cttttcttctcttgtgacactgctaatattttttttattgtcgtctccggcgttcgaagatcataaaaaaccggagtcgtttcaaatggctacgagaacggatctagatgggaggccaataaagccgatgacgatatgcatgatcggtgccggaggcttcatcggctcccacctttgcgagaaattgatgtcggagacgccgcacaaggtgctcgccttggacgtttacaatgacaagatcaagcaccttctcgagcctgactctttcccttgggctggccgtattcaagtccaccgacttaacatcaagcacgattctaggctcgaatgcctcatcaagatggcagatctcgagataaatcttgctgccatctgtactccggcagattataatacgcgtccactagacac

SEQ ID NO: 224073 - DNA, 310 bp, Gossypium hirsutum
cccacgcgtccgcggacgcgtgggtgaacttatccatttatgataaaaacaaaagccttattatggatgaggatggttgtctaagatcgattgttgaagtcttgaggctcgggctcacaacggaggcgcgggaaaatgctgcagcaactttgttcagcctttcagctgttcatgactataagaagagaatagcagatcagggaggggcaattgaagccttaacaagggttgtgaaaagggggacgcccaagaggaaagaagatgcccgaactgctttatttaatctgtcgactcattcggacaattatgc

SEQ ID NO: 224074 - DNA, 415 bp, Gossypium hirsutum
cccacgcgtccgcttttctgggcaaggaaaggaaataattaattccctgaaaaaagttaagaaatttttggatcaatctgagattttctatttctttttctttgcagaaataaactttcccggctgattctcacgctaattttttttttcaaatttcattctcttattttattttatttcatattttgggaaatttagaacgataagcgaaaatgaatatattcagattagcaggggacatgacccatttgtttagtgttcttgttttgcttcttaagatccacacaatcaagtcttgtgctggcatttcactgaagactcaggaactctatgctattgtctttgctactcgttacttggacatattcactaatcatatctcgccttataacacaatcatgaagctaatattcct

SEQ ID NO: 224075 - DNA, 406 bp, Gossypium hirsutum
gtttgatatatttgaagcaaatgtgcctcgggatgatccacaaaggatgatgtttgagagggaagtaattgggagggacataatgaatgttgttgcatgtgagggaattgagagggttgaaaggccagagacatacaagcaatggcaggctaggacactgagggcagggttcaagcagattccattggatcaggaccttgtgaagaaagtgacaaatatggtccaatccaattatcatagggattttatcatagatgtggatggccgctggatgctgcagggatggaaggggagagttatttttgccctttcatgttggaaacctgtgaagaattaaatgtcatgaggaactatagggagcaaattgcagattagttttgattattcagtaaactaagactcacta

SEQ ID NO: 224076 - DNA, 416 bp, Gossypium hirsutum
cccacgcgtccgcccacgcgtccgattaaaaaaagaaagaaagcagggaaatgcttaatctatggaatcttctcttcctctcctttgttcatttctcatcattcagtgttactttgggtggggtgtcgggaaacccatttactccaaaatcctccttcattcgctattggaacaaagagctccacaaggaaatccccaacacccattttttactctctaaagtttcaccattaactgccgtcgactccgccagtttctcgaaactcgccgcccacaacaacctcgcttctcgtcttccttccttttgttcctccgctaaactcttttgcttccccgacttatcgcccagtctcgagaaacattccaaagacgttaacttcgccgtctacctcgacaggaacttcactaattacgac

SEQ ID NO: 224077 - DNA, 419 bp, Gossypium hirsutum
cggacgcgtgggcggacgcgtgggtttcgacatgttcacatttcagcagccatggagcagacactaaggccaatcttgcacaggttggtgccaggaatcaagccatgactcacaatggtttgcggtctttgaacaaggtcgataggttgcagatgaggaccaccaacgcaaaggctgtcgttacgaaagccatgaaacaggcagatcacaggcctttgggaaaaattatttgcggaatagggatgaatatagtgtttgtgtcagctgagtgtggcccctggagcaaaactggtggacttggtgatgtcctcggtggacttcctcccgcaatggctgccaaaggacaccgtgttatgacagtgtgtcctcgctatgatcagtacaaggatgcatgggatacaagtgtgttagttgatcta

SEQ ID NO: 224078 - DNA, 413 bp, Gossypium hirsutum
ctttacccgtcgccttcggcttcgcgatccttttgtctgttttctttagttttctctttttaaggttctcatggtctgtacaattatactatatcaatatacagagcaaagacccaatcgatttgaagatcagctgcttcgaaattcagataattgtttgtgcagctgagattgatacagaaaacatatatggctgcctttgcaactgccgaggcctgtgattcaaacacagcgcttttggcaagcggtgaactgcgtgctctagaaccgattttcaagatatacgggcaacgtcgttcattctcaggacccattgtaacactcaaggtgtttgaggacaatgtcctggtgaggcagcttcttgaaacccgcggtgaaggaagagttctagtcatagatggcgggggaagcaa

SEQ ID NO: 224079 - DNA, 378 bp, Gossypium hirsutum
cggacgcgtgggctgactcgtgggtttcgacatgttcacatttcagcagccatggagcagacactgaggccaatcttgcacaggttggtgccaggaatcaagccatgactcacaatggtttgcggtctttgaacaaggtcgataggttgcagatgaggaccaccaacgcaaaggctgtcgttacgaaagccatgaaacaggcagatcacaagcctttggaaaaaattatttgcggaatagggatgaatatattgtttgagtcagctgagtgtggcccctggagcaaaactggtggacttggtgatgttttcggtggacttccttccgcaatggctgtctaaggacaccgtgttatgacagtgtgtcctcgctatgatc

SEQ ID NO: 224080 - DNA, 413 bp, Gossypium hirsutum
atcgtgaacaccttttgaagggaactgtgatagtgatctttcagccggcagaggaagccggaaatggtgctaagcggatgatcggagatggggcattggaaaacgtagaggccatttttgcagtccatgtatctcacgaacaccccacgggtattatcggctcaaggcctggtcctcttcttgccggctgcggcttctttcgagctgttttcagtggaagaaaaggccttgccggcagctcccatcactccgtcgacccaatcttagctgcatcagctgccgtaattagtttacagggaattgtttctcgtgaatcaaatccattagattcccaggtcgtctcggtcacttctttcaatggaggcaataatcttgacatgatccctgaaacggtggtcatcggaggtactttc

SEQ ID NO: 224081 - DNA, 316 bp, Gossypium hirsutum
cggacgcgtggggtggatgcacattgacatggctgtgcctgtcttgaatgataagaagcatgtggcaactggatttggcatctcaactttggtggaatgggttctgaagaactcttcttcttaaatgaaagcttggaacatgctctgtcgtgacggtggcagaccgaaaaaggagaacaacctgttcgaggttgttgggttctgtaagatctgtctcatgaataagaagcttgttgttggaatactgctctgttttcctttgctttttgtagcttgttcctacaatgttataactacataaagcttttttacctat

SEQ ID NO: 224082 - DNA, 414 bp, Gossypium hirsutum
cccacgcgtccgcttttgactactaatcaagaccccagtctccatagcttccaaactttgagggtggctttgaataattatatgaaatcagtaaagaaaatggcgtgtgagatacttgaaatgatggctgatgggttgaagatacaacccaggaatgtgttgagcaagctgttgatggatgaagagagtgactctgttttcagggtgaatcattacccaccatgccctaatgttcaacctttgagtggtaatggcaatggcaatggggatgtgattggatttggtgaacacactgatccacaaattatctcagtgttgagatctaacaacacttctggtcttcaaatctctctaagagaaggaagctggatttcagtgccacctgaccaaacctcattcttcatcaatgttggt

SEQ ID NO: 224083 - DNA, 400 bp, Gossypium hirsutum
  unsure (1)..(400): unsure at all n locations
cggacgcgtgggcggacgcgtgggggagtggaggtcatgttatttggacatgattttggtgccacttggttttttgaccatcatattttatcattgttggttatggtataaggttaagactcagcccctctctaccatctttggaactaatgctggcggacgtcgcttctgggtctctgacatgattaaggacaacgaaaaaaagaacatcgtggcagtccaaacccttcgaaacacaattatgggatcgaccctgatggccacaacctccatccttttgtgtgctggtctagcagcggttatcagcagcacatacagcgtgaaaaagccgctcaacgattccatattcggngctcacggtgaactcatggtgtcactcanatatgtcaccatcttatgc

SEQ ID NO: 224084 - DNA, 408 bp, Gossypium hirsutum
caagctttggtgctccttgtcttcttgagaatgttctagcagagatggtcatctctgctgttcctagcattgaaatggttcgatttgtaaactctggtacagaagcatgcatgggtgtgctccgtcttgcccgtgcttttactggccgagagaagatcattaaatttgagggttgttatcatggccatgccgatccatttcttgtcaaggcaggtagtggagtcgctactttagggcttcctgactctcctggtgttcccaaagcagctacattcgaaactctaactgccccttacaatgatatatcggctgttgagaatctatttaacagtaacaaaggggaacttgcggcggttattcttgaacctgttgttgggaactctggcttcattccgcctaaacctgact

SEQ ID NO: 224085 - DNA, 397 bp, Gossypium hirsutum
acgagttgtcctcagtcttcccattttgttcatatttaaaggtcgaaatttagtacccaatcagcagataagaccgttcaggctgtgaaaatggaggggaatagcaacattgttccaagcatcgtcgtctatgttactgttcctaacagagaagcaggtaggaagttggctggaagcatcgtgaaagagaaacttgcagcttgtgtcaatatagtaccaggtctggagtcggtgtatctatgggagggaaagataaactcagatcctgaggagatgctcataatcaagacaaggcagtccctcttggaagctctaacagagcatgtgaaggcaaatcacgaatacgatgtgcccgaagttattgccttgccgatcactgagggcagcccccagtatc

SEQ ID NO: 224086 - DNA, 413 bp, Gossypium hirsutum
cccacgcgtccgttccattccaaaacccaggcagcagcatgtgtggaatacttgcagtccttggctgcattgacaactctcaagctaaacgctcccgtgttattgaactgtctcgaagattgaggcatagaggtcctgattggagtggactacattgccatcaaaattgttacctttctcatcagcgtttagctattgtagatccgacttcaggcgatcagcccctttataacgaggataagactgttgttgtcacggttaatggagagatatataaccataagcaattgagagaaaagctgaagtctcatcagtttagaactggaagtgactgtgaagtaattgctcatctttatgaagaatatggagaagattttgtggacatgctggatggaatgttctcatttgtcctt

SEQ ID NO: 224087 - DNA, 410 bp, Gossypium hirsutum
ctcctggcgatttagattaattaaatcgtaacagcatgaatttcctgcttggagctttcaagccggcatgcaatatcttgatcacattttccgatgctaaaactcgcaagcaggtccccatgaaaaaggaaaatggccaaatggttatggtaccgcttttccaaagtcaagaaaatattgctgggaagatctccatagaaccacttcaagggaagaaaattgaacataatggtgttaaagttgagcttctcggtcaaatagagatgtattttgacagaggcaacttttatgatttcacctctcttgtacgtgagttggatgttcctggggatatatatgaaaggaaaacttacccatttgaattttctacggttgaaatgccatatgaaacttatagtggtgtgaatgtg

SEQ ID NO: 224088 - DNA, 412 bp, Gossypium hirsutum
gtgaaattctgttctcatttttctttcaagaactaagcgaaaatggcagcagaggaaggccaagtctatggttgccacactattgaatcatggaacgaacagcttcaaaaaggcaacgaatccgaaaaattggtggtggttgatttcactgcttcatggtgtggaccctgccgtttcattgcacctttcctggctgaactagccaagaagttcccttctgttacctttcttaaggtggatgtggatgagttgaaggaagttgctaccgattgggcagtggaggctatgccgactttcatgttcctcaaggaggggaagattgtagacaaagtggtgggagcaaagaaagaagagcttcagcagactctgtcaaagcatatggctgtccccagtactacttcagcttgatttt

SEQ ID NO: 224089 - DNA, 396 bp, Gossypium hirsutum
caaaaaagaaaaatggcaaaatcagcggaggaagagaaccaacaagaagcttttggttgggctgctactgataattctggaatcctctcccctttcaatttttccagaagggaaaatggtgatgatgatgtcactttaaaaattctttactgtgaagtgtgccattcaaacctacttacttggagaaatgattggggttcaacctttacccttgttgtccttggcatgaaatttcaggtgttgtgaccaaagtggggaagaatgtgacaaaattcaatattggccaccgggttggggttggggttttggttggttcctgcaagacatgtgaatgctgcgagcacgaccttggagaactacttgcctcgtataatatttacctacaactcttacaat

SEQ ID NO: 224090 - DNA, 413 bp, Gossypium hirsutum
ggggaggctgggggagagaatgatgctgatgctgatgatgaaggtgatgaaagtgctcagaggacatcagaggatagtgagaatgcttctgagaatggtgaggtttttggaagtgattctggcgaaggtgaatcgagggaggagcaagaggaagatattgatcatgatgaacatgataataaagtggagagtgaaggggaggctgaagggatggctgatgcccatgatgcggaagctgatgttacattgttaccattttcagaacatttcctgctaactgtaaagccccttgcaaagtacgtcccttcaccattacatgagaacaagaaggattcacaagttttctatggaaatgactcattttacgtgctttttaggcttcaccatacattgtatgcgagaatacaatcagc

SEQ ID NO: 224091 - DNA, 409 bp, Gossypium hirsutum
caaaattggtccgtcagtcgggtcagttcatgttagtgttgttcagtcgggtccgatagtgatttgcaaaaccacttgcagtttagaaagagctccgatcgatctcactcaacagttaggtcaatagccgcttttgcaaatcgcctaaaccaagccaaaaaagcccccaaaactcgacaaggccatggtagttgctagttccaacccccacaacaaggagatgcaaatccgtagaagaataagcaacatattcaataaaagagaagaggattttccatcactgagagaatacaatgattacttggaagaagtggaagacatgatttttaaattgattgaaggaatagatgttcaagctattgagggagaaattaccattatcagcaagaaatgctgagcagatatgatc

SEQ ID NO: 224092 - DNA, 413 bp, Gossypium hirsutum
atgatattttcgtggccaagaaatcaatgttgcctacgatggcaacggaaggcgaccctgccgctgcattagccaacgctcgccatgaattcggtgaacatggtggtgttaacatgtccattgaagcctccgccactttcaccgtcatggaacctgagaccatgcgccgtatgttcgccggtgaactcggtcctgatcgtgatttcttcatctatagccgtcattttaaccccaccgtcttaaatcttggccgtctcatggcagccctggaaggaaccgaagctgcttattgcaccgctagcggtatgtctgctatatcatccgtgctgttgcaactctgcagcagcggcggacacgtagtggcatcgaggaccttatacggcggcacccatgcactcttaacacatttcttt

SEQ ID NO: 224093 - DNA, 415 bp, Gossypium hirsutum
catgagaatggaagatgattcatttccaggatctggtttagagaatggaaattacaacaacaacaacaacaagagcaaagggttcaaaacaaggaaagcctacttttactgggtgacaagggagcaaggctcgttcgagtggttcaaagggataatgaacgaagtagccgaaatggacgagaaaagggtgatcgagctccacaactactgcaccagcgtttacgaggaaggcgacgctcgatcggctctcataaccatgcttcagtcacttcaccacgccaagaacggcgtcgacgtcgtctccggaactcgagtgaaatctcacttcgccaagcctaactggcgtcaagtttacaaaaagatcgccctacatcatcctgacgaaagaattggagttttctactgtggggcacca

SEQ ID NO: 224094 - DNA, 408 bp, Gossypium hirsutum
accctacttactaaccctttaactacctatcttcttcacactctcttcgtgctcccgccgtatttcacttcccctctcttctctcttcttttccttccttccttccttccttctgtcaacaccactctctaatggcttcccttgctggttcatcaatctctatgcaacctcgccagaccctggctacaagcagggtttctgggttgaaattggtttcatttgtgaaccggggaagaagcagcctctcctttaggttgcgtccagatcgcttgcggatttcatgtgctgccaaaccagagacagtggataaggtatgtgaaatagtaaggaaacaactagccctaccaagtgacaaaccagtcacaggtgaatcaaaatttgctgaacttggagccgattctcttgata

SEQ ID NO: 224095 - DNA, 403 bp, Gossypium hirsutum
cccacgcgtacgcttccaaattatggttgcagtttcaagtgcgatgaacgggctgagaaaaggaaagagttctactataaactcgaggaaaaaactcatgcaagggaagtataaaagagcaatttgcaagccaagtctaaggaaactcaataagctgagattaatatgtttaggaagactctgaaattcaaagcgactccaatgccaagcttgtatcatgaacctacacctacaaaggtgggattgaagaagataccacctacaagagctaaatctacaaagcttggtccgaggaaaagctcaactacttcagacattgatcgtaacatcaataaatcaccaaccactcctgctaattgtggatgagacagcatctcagagcatctctgcctaagtgatttct

SEQ ID NO: 224096 - DNA, 406 bp, Gossypium hirsutum
gttccgcttctctagaggtctggtctactcaacactttctcctccctcttagcaaccaaagactcagatccgctcggatttctttgtcccagaactagaatggagacctttctattcacatcagagtctgtaaacgagggacaccccgacaagctttgcgaccaggtctctgatgctgtgctcgatgcctgccttgcccaggaccctgacagcaaggttgcctgtgaaacatgcaccaagactaacatggtcatggtctttggagagattaccaccaaagccaacgtagactatgagaagattgttcgtgatacatgccgctccattggatttgtttctgatgatgttggtcttgatgctgacaattgcaaggtcttggttaacattgagcagcagagccctgata

SEQ ID NO: 224097 - DNA, 400 bp, Gossypium hirsutum
  unsure (1)..(400): unsure at all n locations
cccacgcgtccgcccacgcgtccgctgcaagtgcgaatactgggaaagtaaatgtccctggaaaaccgccaatacagattcgtgaatcatcagatggtgttattacactggcaggatctactgaagttagtgtcagtacattaaaagaaatgggtgcgtgcttagaacagggatctttgagtagggctacagggagtacaaacatgaacaatcagtcaagtcgctcacatgcaatattcaccatcaccttagagcanatgcgtaaactcaaccctgtttctggagatggaaatcctaatgattctatgagtgaagaatatctttgtgccaagttacatttagtagatcttgctggatcagagagagcaaaaaagacaggttccgatgggatgcgttttaa

SEQ ID NO: 224098 - DNA, 399 bp, Gossypium hirsutum
atctcgcatgaatcttctcttctgataaaagtgcacttgctggaaagagtgtgcagcatgtttacacgactgcttctatctcctaaggaacctgcaggggacccccttcaaatcaaatccatggctttccaggaatgcacactgctgattaccaggattacactccatgcactgatcccctgaggtggagtaagtatggttcacacttgctcactttcttggaacgccactgtccaccgatgttcagagaggaagcactgcttggttacacctactgatgggtataagccacctattacattgcctatgatgcctgatgaatgctggtacacgaatgtgccatattataggatccttgatcagaaatctcatcagaactggctgacgaaacaatgcgag

SEQ ID NO: 224099 - DNA, 414 bp, Gossypium hirsutum
cccacgcgtccgcagatatacttcacatttagcaaaagaatttttttttccaacttgggtatttaactttactccatcttcctcctccttcttcttcctttttaggatctgggttttttccccccaattttttaaggttataaaaaaagaaaatggggagaggtagggttcagttgaagaggattgagaacaagatcaacaggcaagttactttctccaaaaggagagctgggttgttgaaaaaagctcatgagatctccatcttgtgtgatgctgaggtcgctttgattgtcttctcccacaaagggaagctctttgaatactccactgattcctgcatggagaagatccttgaacgctatgaaaggtattcttatgctgagagacagcttgttgctagtgagcctgaatctc

SEQ ID NO: 224100 - DNA, 410 bp, Gossypium hirsutum
gcgatatggctttgcagctatgggaaacgttgaaggaggcgataacggcgtatacgggtctatctccggccacttttttcacggttctagctctgttatgggctgtttactatgtagcaactggtctattcgggtcatccgatgaccatatccatcaacggtctacggctttcgaggagcagatggagccgctaccgccaccggttcagctcggcgagattaccgaggaggaacttaagcagtatgatgggtcggattcaaagaaaccactccttatggccatcaagggccagatctatgatgtttctcaaagcagaatgttttatggacctggtggaccttatgcgttgttcgccggaaaagatgcaagcagagctcttgcaaagatgtctttcgaagaaaaagatctg

SEQ ID NO: 224101 - DNA, 392 bp, Gossypium hirsutum
cccacgcgtccgccggtgaagaaacacccttgcaggtgcgcttgaatggggttgcgactttcattggttttgttggactcagtgtagcttttgctgttttggtcgtccttttagttaggtacttcaccggccatactgaagactcgaatggaagacaacaatttggtgcaggcaaaactagtgtgggaaatgctatagatggagccattaaaattgtcactgttgcagtcacaattgtagttgttgcggcgcctgaaaggcttcctttagccgacaccttaacccttgcttactcgatgaagaaaatgatggctgataaagctctggtgcgcaagctctctgcttgtgagaccatgggttctgcgacaacaatttgcagtgacaagactggg

SEQ ID NO: 224102 - DNA, 413 bp, Gossypium hirsutum
gggcttctcaaagttcttgctggcattgacactaacttcacggtcacttcaaaagcatcagatgaagatggggatttcgctgaactttacatgttcaaatggacaacccttctcatcccaccaaccactctcctcattataaacttggtgggggttgttgcaggaatatcgtatgccatcaatagtggctaccaatcatggggtcccctctttggtaagctattttttgccttctgggtgatcatccatctctaccccttcttgaaaggtttgatgggacgccaaaaccgtacacccaccattgttgttgtatggtcaattctgcttgcctccattttctctttgttgtgggtgcggatcgatcccttcacaaccagagttaccgggccagatgtagaacagtgtggaataaa

SEQ ID NO: 224103 - DNA, 413 bp, Gossypium hirsutum
ccaagatttccaccctatttataatttattaaacatggcattctatttcatgattcccttatttgcttccattttctttatttttctcttcaattttctgcttaatttgttcaaatccaaaaaatcccgggacttacccctcccgcctggcaccctgggttggccgtacatcggtgaaacctttcagctctactcccaaaacccaaatgtcttctttgcttccaagcagaaaaggtacggctccatattcaagacccatatacttgggtgtccctgtgtgatgatttccagcccggaagctgcgaaattcgtgcttgtcaccaagtctcacctcttcaagccaacgtttccggccagtaaagagaggatgttgggcaaacaagccattttctttagccaagtacagtaccatg

SEQ ID NO: 224104 - DNA, 409 bp, Gossypium hirsutum
tcctaatttattttacaactgtggttttatgctgtagaatgggtatttacgtttgatctttgcattagaatcatcaaataagggagagtccgatggggatataagccgtgagaggttagataggttatcaaggatgactgaaatagaagatcttcagggaccaaatactcttccactagcaccgctttgcattaaggtgactcctgtgatcaagtggttttaatagatgcttttctgtagataccttatttgtgtgtgcccaaaaccaggaccctcgggattattttgactctcaacaagctaatgcacttagaacttctggagatgcacttggtggaattgaacaaataaaatgtggtttgagcacccaggaggtgtatggttctttaagggagtccatctcatcgat

SEQ ID NO: 224105 - DNA, 411 bp, Gossypium hirsutum
cccacgcgtccggttttggttgggttgattatttcctcacttcccttcttttttgtttcatcgtgatcttttcatcaaccccttttgtttgtcatatagattgttgctattcttttaatcttttaaatattttttttccatgaggagagggagaggtgccgcagcggcggctcctgccgccgcggcaaacgccgtagctaggagaccggcactgcaacccggcggatctattaaagagccgagatacagaggtgttagaaaaaggccatggggcagattcgcggccgagattcgagacccctggaagaagaccagggtctggttagggacgttcgactcagccgaagaagccgctcgagcctacgatacggcggcgaggacactccgtggacccaaagctaaaacaaattt

SEQ ID NO: 224106 - DNA, 413 bp, Gossypium hirsutum
attggaagaacaagccaaggttatagttgcccctcgaagcaataatgagatggacgcatccaagttgaagaacgagttccccgatctgctaccaatcaaggaatcactgattaagtatgtctttgaacccaacaagagaacctgagccttttgagcagcagtttacaggaatagaattcggtattatcctatgttttttcttcatttagttattgcctggaatatcttttcagtttaattcatttgttataatcttgtcttccacctcattagtttccactagataactcttaaggtgttactattagatttaaaccattcattgttagtagctgcaccaagcagtatcctagtctgtacgtccattcttgaagaaacaatctataggtgctttacaaattgtcatctgcagg

SEQ ID NO: 224107 - DNA, 405 bp, Gossypium hirsutum
cccacgcgtccgctgagttggaatcgtcccgaaatttggaaactcagttggtaccggcccagaactacatggtaaggatgttgtcgtggaagaaaagacgattaagttttagatcgtcagcgaagaaaacagagctcttgggttttgactttgacgggcaccctcaaacctgttctgtcgttgactccgagaagggagaatattggtgggaagtgaaagaattagtgagcagaaatggaggagcaaggctgaaagctcaagtgttctttgcttcctttgaccaacgaagcgaaagagccgctggggagagtgcctgcaccgctctggtcgccgtcatcgctcaccggctccattcaaaccatgcctccatgccaacgagaccttgattcgataacctcataacac

SEQ ID NO: 224108 - DNA, 413 bp, Gossypium hirsutum
caccaacggagtcttgcttccccctcggcaagaggacatgacatccacactgacgggctggatcattgaatgactgaacgccgtaaaactgatcgatgcacagcactttatcgtgccggacggacactacatacccaagctggtagccgtgagagaaagtgccatcatccagatcctcaggaccatccccaacaaataatacatcatgacatagatcatccgggacgctctcaacagctgcaacggagatatgatagacgaggcattcactgccaaacatacagtcaaagtacccttcacatcacgtggaaaagagcgaattcaaggctagcaagataatgttcaaagctgctgctgacaggactagattcacatcctacagctctgactaccacacgtggagtgatgacttg

SEQ ID NO: 224109 - DNA, 413 bp, Gossypium hirsutum
cccacgcgtccgcggacgcgtggggaaaatttgagcttgttcaaagatggttgttgttggatgctactgcaaagagccagattaaggcatgcttattacagactttgtcttctccagtattcgatgctcgttcaactacatctcaagtcattgcaaaggttgctggcattgagctgccccaaaaacagtggccagaattgataggttcccttttatcaaatgttcatcagatcccagctcatgctaagcaagccactttggagacgcttggctatttgtgtgaggaggtctcccctgatgttattgatgaagatcaagtaaataaaatacttacggctgtagttcaaggtatgagtgcatctgaaggaaatattgatgtgaggcttgcagctaccagagcactttacaatgca

SEQ ID NO: 224110 - DNA, 411 bp, Gossypium hirsutum
gtgatgatccttggtccaacacagtcaccatatgaaggtggggttttcaagttggaactatttttgcctgaagaatatcccatggctgctcccaaggttcgatttcttacaaagatatatcatcctaacattgacaagcttggaagaatatgccttgatattctcaaagacaaatggagtccagctctccagattcgaactgtacttttaagtattcaagcacttttgagtgctccaaatcccgatgatccactctctgaaaacattgctaagcactggaaaacgaatgaggctgaagccgttgagacagcaaaggaatggacccgtttgtatgcaagcggtgcatgaagactgtttggtatcatttgccctcttaaaataacatattatgcagtgtaagctattccatgt

SEQ ID NO: 224111 - DNA, 413 bp, Gossypium hirsutum
ggatacctatactgttacaagtcctagcggagctcattcccgaacagattacagatcacttctccctgaaggtccctgtatccctgtgcatgcctttgggtttggtgctgatcacgatgcttcttcaatgcattcgatttctgatatatctgggggtacattttcttttattgaagctgaaggtgtgatccaagatgcttttgcacgatgcattggagggcttctaagtgtggtagtgcaggaggcgtgtcttaaattccagtgcactcacccaaatttggtaattaattcgataaaggcagggagttatcgaactagcatggcagctgatgccaaaacaggttctattgatgcaggagacttgtatgctgaagaagaaagagattttttggtgacggtcaatgttccaattg

SEQ ID NO: 224112 - DNA, 414 bp, Gossypium hirsutum
  unsure (1)..(414): unsure at all n locations
cggacgcgtgggcggacgcgtgggcttctggaacaatcgcagctccccctaggaagcctgtagatgtcccattctccagaaactatatgcctacttgggcttttgatcacattaagtatttcaatggtggctctgagattcagctccaccttgacaaatacactggtactggtttccagtccaaaggatcatacttgttcggacacttcagtatgcaaataaagctagtccctggagattctgcggngactgtcactgccttttatttgtcttctcaaaactcagagcatgatgagatagattttgagttcttgggcaacagaacagggcaaccatacattcttcagaccaatgtgttcactggtggcaaaggagacagagaacaaaggatttacctttggtttgacccaacaa

SEQ ID NO: 224113 - DNA, 398 bp, Gossypium hirsutum
ctcaagggaggaaaaagaacatggctccgaaatcacaaccggtcaacccaaatcccaacacgactatgaacgagatccgttaccgcggagtcagaaagcgtccatggggccgttacgcagctgagatccggaacccgagaaaaaaggcccgagtctggctcggtaccttcgacactgccgaggaagcagcgcgtgcttacgacgcggcggcacgagaattccgtggcgccaaggctaaaacaaatttcacctacactaacatcaatgacttcacgctaagccccagccagagcagcaccgtggagtcctcttctccgccgccgttggacctcacactcgctagcggatctatttcgctccccatgacggcgaatcatccggtgtttttcgttgatgtc

SEQ ID NO: 224114 - DNA, 409 bp, Gossypium hirsutum
gtcgatagctactttcaaagacagcttgaagaggatctttgggtcatttgcgttcgacgatgcaatagaggatatgctggagaagcaggaagatgggtactgagtcacttcgcaaaccgccttcaatgaagctgctggagtaagctcggttggggatgcagtatcgggagacgagttgtttctcttatgtatcaaagtccccgcaactgcgccaatgataacagctaacagcacgataatggagatgacgaggatgatgagacgccttcgtgtctttcgcttgaaagctcgttcttcagcctcgtctactttgccatagcccttgaaagacttgattgaatccattgcccaacgagatgaaaagataggacctctcttcgatgcttctttgtaaaatatgacaatatac

SEQ ID NO: 224115 - DNA, 359 bp, Gossypium hirsutum
ctctggtgctgtaaaagccttggtaaatcttctaggctcaggaacattgagaggaagaaaagatgctgctactgctttgtttaacttgtcaatctttcatgaaaataaggctcgtatagtgcaagctggcacggtgaaataccttgtcaagtttttggatcctgatagtgggatggttgacaaggcagttgctcttctctcgaacctgtccacaattgcggaaggtcgtttggcaattgtacaggatgacggtatcccagtactaatggaagttgttgtatcatggtcgccgaggggtaaggaaaatgctgtctctgcattgctgcaactatgccttaacagttccaagttttgtacct

SEQ ID NO: 224116 - DNA, 415 bp, Gossypium hirsutum
ttcaactgataatttcgaaagaggttttcgattacgctgatcgaagaattaaagggataagtaaacaagactggtagaatggctctagttgcgggtggatcgtcaacattgaaccccaatgcccctctgtttgttccggctgtttatcgccaagtggaggatttctcacccgaatggtggaaactggttacgacaacaacatggtaccgtgactattggatcagccagaaccaggatgaagatggcttttacgacaacacagaggatgatgtatttgatgtcaatgacattgttgatttgcttgcagatccctttgactttgtctctgacgaagatctccagttcgaagagttcatccaatctaatgaaatggaaaccatagcacctcctttaccgtcaaatggtggctttgaga

SEQ ID NO: 224117 - DNA, 317 bp, Gossypium hirsutum
ttcaactgataatttcgaaagaggtttacgattacgctgatcgaagaattaaagggataagtaaacatgactggtataatggctctagttgcggttggatcgtcaacattgaacccctatgcccctctgtttgttgcggctgtttattgccaagtggaggatttcatacccgtatggtggaaactggttactacaacaacattgtaccttgactattttatcagccagaaccagtatgaagatggcttcttcgacaacacagatgattatgtatttgatgtcaattacatagttgatttgcttgcagattcctatta

SEQ ID NO: 224118 - DNA, 416 bp, Gossypium hirsutum
aaaaaatcaaaatccctaatttcccccgctgctactgctagggtttctttctcttctctctcgcaactcaccaggtttctttggagaaaaaaagaaatgtctcgagtttacgtgggtaaccttgacccacgagtttcggagcgagatcttgaagacgagtttcgtgtctttggagttattcgaagtgtgtgggttgctagaaggccaccaggttacgctttcattgactttgatgatcacagagacgccgaggatgcaattcgtgaattagatggcaagaatggctggagagttgagctttctcataattctagaggcagaggaggacgtggaggcggaggcggaggtggaggtggtcggggacggtcgggtggttctgatttgaagtgctacgagtgtggtgaggctggtcattt

SEQ ID NO: 224119 - DNA, 402 bp, Gossypium hirsutum
  unsure (1)..(402): unsure at all n locations
cccacgcgtccgcccacgcgtccgcccacgcgtccgaaatgagaaggttcaggatctattgcttttggatgtcactcctttgtcccttggactcgaaactgctggtggtgttatgactgttttgattccgagaaacactaccattcccaccaagaaggagcaggtgttttcaacttactctgataaccaacccggtgtcttgatccaagtttatgagggtgagagagctcgaacccgggacaataattcgttgggtaaattcgagctctctggcattccaccagcacccagaggcgttccccagattacagtttgcttcgacattgatgctaatggcatcttgaatgtctctgccgaggacaagactactggccagatgaacaagattaccantacaaatga

SEQ ID NO: 224120 - DNA, 295 bp, Gossypium hirsutum
acgaggacaaggaaggtgactggatgcttgttggagatgttccttgcgagatgtatctaagatcagcgattttgctttggaacaaaaagaaatgtctggcgactacgtgggtaacctttacccaaaatcttgcgaaccagatcttaaacacgagttgtgtgtctttggagttattcgaaatgtgtgggttgctaaaaggccaccagggtacgctttcattgactttgatgatcacagagactccgaggatgcaattcgtgaattaaattgcaagaatggctggagagttgagctt

SEQ ID NO: 224121 - DNA, 420 bp, Gossypium hirsutum
cggacgcgtgggtgtatattgaaattttctttctcgattttctctttagccaaaaaagatgcagatcttcgtcaagactctaaccggcaagacgatcactctcgaggtcgagagctccgacacgatcgacaacgtgaagaccaaaatccaagataaggaaggcatccctccagaccagcaggcgtctgatcttcgccggaaaacagcttgaggacggccggaccttggccgattacaacatccaaaaggagtcaactctccacctcgtcctccgtttgcgcggtgggatgcaaatcttcgtgaaaaccttgaccggcaagacaatcactctcgaggtcgagagctccgacacgatcgacaacgttaaggcgaagatccaagacaaggaaggcatccccccagaccagcaacgtctcatct

SEQ ID NO: 224122 - DNA, 264 bp, Gossypium hirsutum
aaagagacggcgccaatcagctgtccgccttgaccgaccgtccggcatcgtcttggccctcgatttttcccttttgtaaaccttttttcaccaattcccgaaatggcagtgaaaccctccaaggccgaaaagaaaatcgcgtacgacgcgaaactgtgccagctcttagatgagtacacgcagatcttgatcgccgcagccgacaatgttggctcgaaccagctccaaaacattcggaaaggtctccgaggcgactcagttgtt

SEQ ID NO: 224123 - DNA, 409 bp, Gossypium hirsutum
caaccaaaaaaaaatggagaaattgagagtttgcatagtggtgttagcttgcgtggtggtatcggcggcagcccaaagtgcttccaatgtgagagctacttatcatctttacaatccgcagaacataaactgggacttgactgctgcaagtgctttctgcgccacatgggatgccagtaagcccttagcatggcgtcaaaaatatggatggactgctttttgtggtcctgctggtcctcaaggtcaagctgcttgtggccgatgcttaagggtgaccaacaccgccactggaactcaggcaacggtgagaatcgtggatcaatgtagcaatggagggctggatttggatgttaatgtatttaaccaacttgacacaaatgggattgggaatgctcaatgtcacctcact

SEQ ID NO: 224124 - DNA, 410 bp, Gossypium hirsutum
ctctgtcttccaaagaatttaagataaggggtaggaaatgagtgaaaattaagtaagatgatgataatggaatgggatcaacagcaagagaatcaaagccaaaaccagagagaagatagtgtgaatctcaatgtgaacaatggagtaatgtatgtgaaggtgatgacagatgagcagttggagactctccggaagcagattgccgtttatgcctctatctgtgagcaacttgttgagatgcacaagaatctcactgcccagcaagatcttacaggtgggagactgggaaatctgtattgtgacccattaatgacatcgggtgggcacaaaataagtgcgagacaacgatggacaccaaccgctgtgcaacttcaaatactggaacgtatatttgatgaaggaactggaac

SEQ ID NO: 224125 - DNA, 275 bp, Gossypium hirsutum
catttagtggtttaagggattttttcatttgtttcttcttacgctcgattacctcacgaaaagagaaaatgaccaagtgttacccaactgtgagcgaggaataccagaagtcagttgaaaaggctaagaggaagctcagaggtctcatcgctgagaagaactgtgctccactcatgctccgtctagcgtggcactcagctggaacttttgatgttaagaccaagacaggaggtccattcggaaccatgaagcatcctgctgagctcgcacatgct

SEQ ID NO: 224126 - DNA, 414 bp, Gossypium hirsutum
  unsure (1)..(414): unsure at all n locations
cccacgcgtccgaatttcaaagccttcttcaaagcttcaagatgcaaatttttgtcaagaccctgaccggcaagactatcacccttgaggtggaaagctccgacaccatcgataatgtcaaggcaaagatccaagataaagaaggaatcccaccaaatcaacagaggcttatctttgctagtaagcagctagaatatggtcgtacacttgctgactacaacattcagaaggagtccaccctgcacttggtccttcgtttgaggagtggtatgcaaatctttgttaagaccctcaccggcaagactatcacccttgaggtggaaagctcggacaccattgataatgtcaaggccaagatccaagacaaataatggatccctccagaccagcangngcttatctttgccggtaagc

SEQ ID NO: 224127 - DNA, 430 bp, Gossypium hirsutum
gatctcttgagggctgtaattataggagctgtgggcactccctaccatgatggtctcttgttctttgatgttttcttccctgctagctatcctaaaggaccccctcaagtttattaccactctggtggactgcgccttaatccaaatttgtacagttgtgggaaagtatgccttagtcttctaaacacatggtctggtaataagaatgagaagtggatacctggtatgtctaccatgctccaagttctggtatctattcaggctctaatcttgaaccaggatccgttctttaatgagcctggttgggctcatcatagaggcacgccacaaggtgaattactgtctcgacaatacaacgaggatacattcatattgtcactgaagacaatgatctactcaatgaggaggccaccaaagcattttgaggatt

SEQ ID NO: 224128 - DNA, 297 bp, Gossypium hirsutum
ccggaccaagccgtccggtttaatcttctctctggggtttttcgtttttcctagttctgctctgctctctggttcctgtttttccctctctttttggtattttggtttgattgaatcgattatgtcgaagaacattctggtgaccggaggagccggttatatagggagccacacagtgttgcagttgcttttaggcggatacaaagtggtcgtcgctgataatctggataattcctccgcggttgctatcaaaagagttgaagaactcgccggtcaattcggcagaaacctttcttt

SEQ ID NO: 224129 - DNA, 433 bp, Gossypium hirsutum
ctttcgtctcttaattttggttggatatcgaagatgtcaggaagaggaaagggaggcaagggtcttggcaagggaggagctaagcgccaccgtaaggttctccgcgacaacattcagggcatcacaaagccggcaattcgacgccttgcccgtaggggaggagtgaagcgtatcagcggcttaatctatgaggaaacccgtggagttctcaagatcttcttggagaacgtcattcgcgatgcggtcacatacaccgaacacgccaggagaaagacggtgactgccatggatgtggtttatgcgctgaagaggcagggtaggactttgtatggatttggcgagtagttgatttagggtctaggttttaaaataggggaagaattgtaagactcagttaaagttacaaagctgggtttggtgttctctggtataa

SEQ ID NO: 224130 - DNA, 390 bp, Gossypium hirsutum
cccacgcgtccggttttggctcggccaagactccatcaaggaagatcattccaacatcattgaccacactgttcttgaattattctaccaaggtgttggtttgaacacaactggtagtgtttgcaaacccgtctccggatccctacctgagttttctggcagtccaacaaaaaaggcgattctttcttgggctgtcttaggtttggatctggatatggaaaaattgaagcaaaaatacagcattctccatgttgaaaccttcaactcggagaaaaagagaagtggggtttcagttaggagaaaaacagatgaaactcttcatgtacactggaaaggagctgcagaaataatcgtagccatgtgctcagactattatgagagcaatggggg

SEQ ID NO: 224131 - DNA, 429 bp, Gossypium hirsutum
cggacgcgtgggatctgaaaccaaatttgcagtctaatgacattgcaccttttgtgaaggattacaaggaaggaaaagttccaccatatctcaagtctgaacctattcccgaggagaataaggaacctgtaaaagtggtggttgctgacacccttgaagacatggttttcaaatcaggcaaaaatgttctgcttgagttttatgccccttggtgtggacattgcaagaaattggccccaatcttggatgaagttgctgttcattatgaaaaagatgataatgtttcgattgcaaaacttgatgccactgcaaatgatattgtgggtgagaactctgatagtagaggctacccaaccatttactttagatcaacttgtggaaacattacttcttatgagggctatttgaccaaggaagacatcatcaact

SEQ ID NO: 224132 - DNA, 440 bp, Gossypium hirsutum
gggtcttagaaactgagaaggagatgataaacaatgggcaaaagcagttgtcaatgcctgacatagatttccagcaaaggcacgaagatgcagttgtgaccatgcgttaccctttggatgctcacccagtctctcaagtcttaaaagctttgaaggaaaatcaaattacagcacgtgaatctgacgtatcaacaacagataatgacaagattgtccacaccttcaccattggagccccaggtggtgctgccgaacaattgaaggaaaaactgttggatgctttatctaagtgaccaattgtaacagttgtgttgataatgtacatctaagcgaatgctgtgcatcaacttgtagaaaaatgggattctgcagcgactaacagattagtggctagtgccctttgtttcaatgaatcatatgtaccttaattctttttaaaa

SEQ ID NO: 224133 - DNA, 371 bp, Gossypium hirsutum
taaattccccagaatttgcttcagtaatggctgcctcagttatggcttcttcaggtgccgtcaagccttcattcaatgttgagaaatctggtgtaagaggggttccttcccttgctaggtccccttcttctttcaaggttgaagccagtggcggcaagaagatcaagaccgacaagccttatggaatcaatggtggtatgaacttgagggatggtcttgatgcctctggaaggaaaggtaagggaaagggtgtttaccaatatgttgacaaatatggtgctaacgtccatgggtacagacctatctacaacaccaacgactggtcttccagcggtgatgtctatgttggcggcactaccggattggcaatc

SEQ ID NO: 224134 - DNA, 420 bp, Gossypium hirsutum
cgttactcgcaccgttacaaacgttgctgaggaagaaacctacgtcatcacagctagaatgcatgcatccattgccatcgaaaccaggccttcagccatgactttgagacccggcgcatcaagaaagttctcagtcactcttaccactcgatcagtaaccggaagctactgcttcggagagatcacaatgaaaggcagcagagggcacaaggtaactataccagtggtggctatgggacactggcgatagacttaattggtaagcagaactagggagcattttcatctgcaattcgttttactacaaccttacaattattcaatcacaacactgaattacacggtcctcagttcattcaaacatggatttcagataatattttcacggatcattatacaattcacgattgtgattggtta

SEQ ID NO: 224135 - DNA, 429 bp, Gossypium hirsutum
  unsure (1)..(429): unsure at all n locations
gttttagagagagaaagagaaggccggttgttagacaagncacagagagagagacagagagagagatgtcgggaggaatagcgcgtggtcgactcgccgaggaacgtaaggcatggaggaagaaccatccccatggttttgttgcgaaaccagagacgttgcctgatggaacggtcaatttgatggtgtggcattgcacgatccctggtaaagcaggaactgattgggagggtggctacttcccgctcacgctccatttcagtgaagattatcccagcaagcctccaaagtgtaaatttccccagggctttttccacccaaatgtttatccatctggtactgtttgcctttcaatcctaaatgaggatagtggttggagaccagccataactgtgaagcagattcttattggaatccaagatcttctgg

SEQ ID NO: 224136 - DNA, 418 bp, Gossypium hirsutum
cccacgcgtccgcccacgcgtccgccagttttggattgggcaacacgtcttaaaattgctgctggtgcagctcgtgggatagcttatctccatgaagactgtcatcctcgtattattcatagggatatcaaatcgtcaaacattcttttagataacaactttgaagctcaggtttccgactttggacttgccaagttagctctggatgcaaatacacatgttacaacacgtgttatgggaacttttggatacatggcccctgaatatgcatcaagtggtaaattgactgagaaatctgatgtattttcctttggagtcgagcttttggagctaattactggacgaaagcctgtagatgcatctcaacctcttggtgatgaaagtctagttgaatgggcccggcctttactgagtcatg

SEQ ID NO: 224137 - DNA, 411 bp, Gossypium hirsutum
cccacgcgtccgggcttcactcgccatcacaatccgcaggtgccgttgccggagcccggaaaatttccaacggaaaacctattcccttcgtttcttccaattccctctcctttccctctttcaggccttgcatttcctcactgaaacccttaatcccaaccaaattctcctctctttcccctcgccaatgctcccctaatccctctccttctacctccccgccttccctcatatctcgcctccgcaacggcgaaaccctctatggcatcttcctcctctcattctcccccactttggctgagatcgtcgctttctctggctacgacttcgtagtcatcgacatggaacatggccccagaggaatccatgagtccctccaaatgctccgcgctgtcgccacgaccaacaccc

SEQ ID NO: 224138 - DNA, 432 bp, Gossypium hirsutum
cccacgcgtccggaccttgcaggtcgtgatctaaccgatgccttgatgaagattctgaccgagagaggttacatgttcaccaccactgctgaacgggaaattgtccgtgacatgaaagagaagcttgcttatgttgccctggactatgagcaggaactggagactgccaagagcagctcatctgttgagaagaactatgagttgcctgacggacaagtcattactattggagctgagagattccgttgcccggaagtcctcttccagccatctttcattgggatggaagctgctggaatccatgaaactacctacaactctatcatgaagtgcgatgtggatatcaggaaggatctctatggtaacattgtgctcagtgggggttcaactatgttccctggtattgcggaccgcatgaacaaggagatcact

SEQ ID NO: 224139 - DNA, 431 bp, Gossypium hirsutum
gacaatttcgtaggcataaactctttcaagtttttcatggtgtacaaggggacattgcatggtcgacgacaaggttctattacgagggatgaagaggtgtaagtctttaggtgcattggctatggttcatgccgaaaacggcgatgccgtgttccaagggcaaaaaagaatgatcgagctcggtattaccattccagaaggtcatgccctttctagacctccgatggtaatgacttaaaacgcaaccacaaccgcaatttaaacaaccttacacatgctttcttttggttgatatattgtaatttcgaggtagctagaagccgatgcaaccatgatggcgattcgtttggcgagtttcatgaacacgccgctatatgtcgttcatgtgattgtgcattgatgctatggaagagatagcttaagctcgaaaa

SEQ ID NO: 224140 - DNA, 420 bp, Gossypium hirsutum
aaagcttcctttatacgctttcaagaaggtgttcatggagcgtgaagaagatgtgggggggatggagaacacagagtctccagttgcatttcttgactcacttgttcttggagagtgggaggatcggatgcaaagagggctctttcgctatgatgtcactgcctgcgaaaccaaagtgattcctggtgaatatggctttattgcccagctaaacgagggtcgccaccttaagaagaggccaactgagttccgtgttgataaggtacttcagccctttgatgggaacaaattcaacttcaccaaagtcgggcaagaagaggtgctcttccagtttgaagcaagtgaagatggtgaagttcagttctatccaaccgctcccattgatgtcgaaaattcttctagcgtcgttgccattaacgt

SEQ ID NO: 224141 - DNA, 372 bp, Gossypium hirsutum
gcgtcccggccggaattccggtcggccaggggtccgtcatttaacgtaaaaggtcttccttgccctttttttcttttcggcggggatcttaaaggaacggttaatcggaccgttacggccgatttctcgtcaactttgggatcttctttgacacctcgggggttcaggttattcttacccggcggccttatggatcccgaatttgattatctggttaaggctttgcttattggggattctgggggtgggaaatcatggtttcctttgagggttggtgatgattcatatttggataggttcatcaagtccattgggggtggcctttaaattccggctgggggaccgggttggaaaacccttaaacttcaaatt

SEQ ID NO: 224142 - DNA, 377 bp, Gossypium hirsutum
acgcccacgcgtccgcccacgcgtacacggacgctttaacttttgcgaggtatactgaaggaactgcttttgagagacctattacatgcaacatctcttatgctgctatgaagctccactcggaaaggagaacaatttgagaagcaacagggctgcactattaagaggatagacacccttgaacaaaacccagcccataaggacttctacattccttaacctttagaagccatagcaactcatgaacaatatgctccttgcatctttggacaagatatcagatcacatgtgcgttcttttgatatgctgacaggacaggaggatggcaagaatgtattgagagcaagaaaatcacgtaaaagggcgcttacaggtcc

SEQ ID NO: 224143 - DNA, 432 bp, Gossypium hirsutum
gggacgcatggaatggctacaacctcaagagcactgaggaccccaaggtactaacaatctgacatataatgtttcatttttctctacttggcatacatgcatcaaagttcttcagtaagttgcctatattgtatttgcgcacagagataatgcaagaacaatcacatcgttgcccgtatctccttgttcaagccccttaagatacggtccagtacacaggagttgttttctttctcctcctcatccagcttatcagtttgtaggacagagtggtcataacttaggcgacttctctgggaacacatcaagaccaaacccgagatacactcatgatccttggtttgaagcgccacaactaaaagtacaaacaacaggcacctcgccaagaacaagacctatttgagattattgtaaatagaagtaggatagagt

SEQ ID NO: 224144 - DNA, 300 bp, Gossypium hirsutum
atttttgctggctatgcctcttcacgtctatacaaaatgtttaaaggaacagagtggaagaaaatatctctaaagactgcatgcttgttcccgggcatcgtctttgccatcttctttgtcttaaatgctctcatatggggccagaagtcatctggggctgtgccatttgggacaatgtttgctttggtcgtcatgtggtttggaatttcagttccacttgtttttgtgggtggttacattgggttcaagaagccagcttttgaagatccggcgaagacaaataaaattcccagccaaatc

SEQ ID NO: 224145 - DNA, 418 bp, Gossypium hirsutum
gagattttagagagaccaaccaccattggctgttccttctggggctgtcctaaagggatggggctcttcattccttagagggggaaaaaggacccaagcccttttgggtgccagctttggggccaaaggctcgccctcccctactgctggaactagaaagttgatcgttgtggcagccgccgcacctaaaaagtcttgtttccctgctgttagaggtggtggcaacttcattgaccctgaatggctcgatggatcgctccctggagactacggatttgacccactaggtcttggaaaagacccagcatttcttaaattggtaccgagaagctgagctgatccatggacgttgggccatggctgctgtcgtcggcatcttcgtccgccaagcttggaagtgcattccatggttcgaggc

SEQ ID NO: 224146 - DNA, 402 bp, Gossypium hirsutum
cccacgcgtccgccttgttgcagtcagcagaattgcaaatttataccgactttttgagaagggtccttgaaatattaaatgcgattttgacatatgcactgccacggaatcctgaggttgtctatgccattatgcacagacaggaagtttttcagccattcaagagccatcctcgctttgctgagctgcttgagaatatttataatgtattagatttttttaacagtcgtatggatgcccaaagaatggatggtgaatggtctgtagaaaaagtcctcctgttcataattaataattgtcgatcttggcgcggtgaaaggatgaagatgttcactcagttgcacttctcgtatgaacaagagagtcatcccgaggagttctttattccatacgtttggcaac

SEQ ID NO: 224147 - DNA, 401 bp, Gossypium hirsutum
  unsure (1)..(401): unsure at all n locations
cccacgcgtccggcacatacgattatataatagctttacgggagcaagatcaagagctacaaggtgtcggcgtccaacagagtccacaaatgtcccctgccagctcgcttactggattaagtagtgctagttcgttttctactttccaccggggtgcatggtgtacacccncacgcttgttccttgaagatcagtttgatgttgttcctcctgataccggatctgtaagttcgttcgggaaaaaaatggtcagggaggaaccaattaagaagaagaatccaggtgcagttaagatcagtccgtggacattggcacggttaaatgcggaagatgtttcaaaagccgctgctgaagcaaggtaaaagtccatattcctgcaccccgtggtgagacgtgatgcc

SEQ ID NO: 224148 - DNA, 428 bp, Gossypium hirsutum
cccactcgtccgcccacgcgtccgcccactcgttcgcccacgcgtccggccagcagggagcttggtggcgtctccgtaagaacgcacgcttttgatatcgtcaggtcagagattcaatctcgtcttctccctctattatcatcagttgctggtcaagaacaagttttagatttacaagatgtatttagaagattttcattcgataatatctgcaaattctccttcgggttagaccctggttgcctcgaattatcactgctagtatcagaccttgctgaagcttttgatttagcatcaaaattttcagcacaaagagcgctggcatcttcatctttgatatggaaggtcaaaaggctattgaacttgtgcacggaaaagcagcttaaagaagccattaaagtagcagatgaatctgctgaagagatgat

SEQ ID NO: 224149 - DNA, 184 bp, Gossypium hirsutum
gccgaacccttccgcccacccgtccggtgattgtcaaattccttgggaagacttgaatattggtgaaagaatggggctaggttcctatggagaggtctaccatgctgattggattggcacggaggttgccgtgaagaagttcctaaaccaggatttttctggtgctgctttagcctgaattcaa

SEQ ID NO: 224150 - DNA, 366 bp, Gossypium hirsutum
gtgaggaaaaagaagctccattctttggtggttaagggggggaaccaaaaaaaaaaattggagggcaaaaaggaggttgttaacctaggagccaccaagttttctgaaagacaaccttttgggccatcagctcaaacagccaaggcctccaaggagccaccaccggcaccattgtttgagcctggtgagctcaagtcatggtctttctacagagccggaatcgctgagtttgttgctaccttcttgttccttacatcactgtcttgactgtcatgggtgtctctcaatctaagaccaaatgtactactgttggtattcaaagcatagcttgggcctttggtagcatgatctttgctcttgtttatt

SEQ ID NO: 224151 - DNA, 168 bp, Gossypium hirsutum
gtctccacgcgcctaaaagcgcgggagtggaggggattattattgacctttggtgggggcttgttgaaaaggaaacacccgcttcctattatttgggtgggttcgcccagcttttctagatggcaaaaaaacatggccttaaattccaagctgtcatgtcattccatc

SEQ ID NO: 224152 - DNA, 427 bp, Gossypium hirsutum
  unsure (1)..(427): unsure at all n locations
acattttgtaatgatgggatctcgtgcacatcttgtaatggtcaactcttcatggggtcagtctcacatggagaagctttgcggtagtcctaaatgcattaagcgaggttatccaccttgtgatacttcaagacttcatgcacttcctttggaaaggtcggtggaaactccaaaaatcatatctgttgcacaatttcgtcccgagaaggcacatagtcttcaacttgaggcattttctgttgctataaaaaaactagataaacactctcgaagacctaagttgcagtttgtaggtagtttccgaaataaatcagacgaggaaagactccagaatntgaaagacaaagcagtgcaattgaacattcatgacaatgtggaattccataaaaacgtgatgtatagggacttggtaagtcttttgggcggg

SEQ ID NO: 224153 - DNA, 431 bp, Gossypium hirsutum
cggcaaatggggttgttgagttagggtcaacggaactcatcacgcaaagctcagagataatgaacaaggttcgggttttgtttaatttcaatatcgagatcgaagctggttcttggtgtatgagtaacaacactgctgatcaaggcgaaaatgatccctcttcgctttggattagtgacccacatgctggagtcgagtttaaggaaagcagcaacaccaccaccaccaccaatcatactagcaaccagaatcagcagactcagaagtcaattcagttctgcgacaatcgtagttccagtagtttaaccgagaatccgagttctattcctgctggaaatcatcaccagcagcagcagagtcatccggaggggcaaagtttatgcttgaatttttccgattatggctttgatgagagtagcagtgtgaggaat

SEQ ID NO: 224154 - DNA, 244 bp, Gossypium hirsutum
tgaccctgataagggcagtgacgaatgcggtggtgttggcattcttggcattgcttgggcttttggtgggatgatctttatccttgtttactgcactgctggtatctctggtaagtttcgactctcttcccctcatgtgtttgatgaaaaaggccattttttttccaacttcttttcgaagttgtttttcatggtttacagtaattgaggtaaaagaaaaccggatgatgatttagcagatgag

SEQ ID NO: 224155 - DNA, 286 bp, Gossypium hirsutum
cccacgcgtccggaaatctccaaagagttgcaaggcaagccagatctgatcatcggaaacgacagtgatggcaatatcgtcgcctccttgctcgcacataaattgggtgtcacacagtgcaccatcgcccatgctttggagaagacaaaatatcctgattcagatatctactggaagaagcttgaagacaattcccttttttctggccatttaccagctgtccttttgccatgaaccattcaaatttcatcatcaccaagtccttccaaggaattgccaggagcca

SEQ ID NO: 224156 - DNA, 200 bp, Gossypium hirsutum
  unsure (1)..(200): unsure at all n locations
cggaatcggaatttcagagtagaccgtacgcgtacgtgaccctgataaggtcagttacaaatgcggtggtgttggcattcttggcattgctagggcttttggtgggatgatatttatccttgtttactgcactaatagtatctcaaacaattctcttcattttcctggaaaattatctnctgtttccccagaaaaatttt

SEQ ID NO: 224157 - DNA, 426 bp, Gossypium hirsutum
atttgcaggcgctctcttgacattgagcgacccacttacaccaatcttaaccgtcttgtctgccaagtgatctcctctttgactgcttcacttaggttcgatggtgccttgaacgtggatgtaacagaattccagaccaacttggtcccttacccaagaatacacttcatgctttcttcatacgctccagtcatctctgctgagaaggcttaccatgagcagctatcagttgctgaaatcaccaatagtgcctttgagccctcatctatgatggccaagtgtgatcctcgccatggcaagtatatggcttgctgtttgatgtaccgtggtgatgttgtgcccaaggatgtcaatgctgctgttgccaccatcaagaccaagagaactattcaagtcgttgactggtgcccaactggtttcaagtgt

SEQ ID NO: 224158 - DNA, 415 bp, Gossypium hirsutum
aaaaaattgcagataaattctgcggtgattccaagggaaggagtaagcttggatggagcggaaatcacgaaatattgcaaaaggaatcttgcgagtttcaaagtacccaagaaagttttcatcacggattccgtgccgaaaacagctactggaaaaatccagaggaggatagtagcagagcatttcttgactcaaatgtctgccgctaaagtacccaaatttggagcttaaattcagcatttcttgtctattgcttagttgcttaggtacatatttaagcgactgtaatttattgtttgtgtaaaaggggattactaaagcaccatgttacatgtaattctgattagaaataattggaaagtccacattcataaacattttgatcatccaatcattctttgttttatcaatcaac

SEQ ID NO: 224159 - DNA, 422 bp, Gossypium hirsutum
  unsure (1)..(422): unsure at all n locations
cgaattgacccctcacaccactatcagtgtttgtgtctagttttataacttttccaactaaactggcaatagcttataatattttcttttggtacaggaatcccgacagacctggaaagcggatccaagctaagatcctatttggaaaaggcctcgacgagtcgaagtctaccatccacggctaaatagtgagatagtgcccagacactatacagggaccctgagtcagcaccacttcataatccaccatgctntgaaacttaacaaggtaatacccattagccgcatccattaaacggaagggttgtgagggttttcagagactgacgattccattatatagagccccatagcctatattacgccctagaagcttaaccaccaccgcagactccatattcttaaccagaatctttttaatt

SEQ ID NO: 224160 - DNA, 419 bp, Gossypium hirsutum
gctaaggaattttcatcttctgtgctgctagttttcctcattgggacaaaatatatcaggtgataaagggttggcaggaacctactcaaggggaataaagatcaaagaaaatggcatcttcaagctattcaaacccaccatgtgcagcctgcaaatgtttgagaaggaaatgcatgccagattgtatatttgcaccctatttcccaccagaagagcctcataaattcatcaacgttcacaagataatctgtgcaagcaatgttagcaaattgttaaatgatgttgccgccccatcaaagggaagaggcagtcaacttcctctcctatgatatctatgcaaggattaaagatctctgtttatggctgctttggagccaattttgtctctcaaaatcaatttttagacttcaaaatgattg

SEQ ID NO: 224161 - DNA, 352 bp, Gossypium hirsutum
cacgcgttcggtccaaccgccccttttgataaagactgttccattagctgtgggatatgtacagggtggggggccaactgggaatgtggctaaacccaaaaagggtcaaactgttgcagtttttggactgggtgccgatggtcttgccgccgctgaaagtgcaagggtttgtggggcttctcggatcatcgctgttgatgtgaaccccagaagatttgaagaagcttagaggtttgggattacagaaattgtgaaatcaaaagactacgacaagccaattcaagaggtgattgtggagattacctgcggaagagtggatctgcaatgtgattgtacaaggagcgttcaagcc

SEQ ID NO: 224162 - DNA, 410 bp, Gossypium hirsutum
aaaaaaaaggcagttaggaaccagaaaccaaggcaatggcttctcttgcgaccttagccggtgttcaaccaacgaccatcaagggccttggtggcagctctctcagtggaaccaagctcttggtgaagtcaactcgccagagtttcaaacccaaaaactacagggctggtgctgtggtagccaagtatggtgataagagtgtatactttgatttggaggatattggcaacacaactgggcaatgggacttgtatggatccgatgcaccttcaccgtacaacccactccagagcaagttctttgagacatttgcagctccatttaccaagagaggattgttgctcaagttcctgatcttgggaggcggttccctcggtctttacctcagtgccactgttttcgatgacctt

SEQ ID NO: 224163 - DNA, 427 bp, Gossypium hirsutum
  unsure (1)..(427): unsure at all n locations
cccacgcgttcgnccacgcgttcgtgaaaacagcagccaataaagaaggagaggaaggtgaaactggcactgatgaggtgaagaagagcaaccatgtcttgaggaagctggagaaacgacaacagaatcgcaagctcgatccacatatcgaggatcaatttgcaagtggtcgtttgttggcttgtatctcttcaaggcctggtcagtgtggccgcgctgatgggtatatcttggaaggcaaagagctggaattctacatgaagaagatccagagaaagaaggggaagggagctgcctaaaaattttgttatgggagcttttaacatatcatgtcagaatctcctctctgctacttttatctttttacaggacattcaagattgtattagtttttgaactttttagtttgaatgtcaactagtgggtt

SEQ ID NO: 224164 - DNA, 407 bp, Gossypium hirsutum
ggcggcttctgcttctatttactattttctcactctcctactcctttgtgccatccctgggaccttctccgagctcgttaaagagcagcctctggtgttgaagtaccacaatgggccactcttgaaggggaagatcaccgttaatctcatctggtacgggaagttctccccaacccagcgctccataatcgtcgatttcatcaactctttgagctctgccgtcaaacccaagattccgtcggcgtcgttttggtggaaaacgacggagaaatacaagtccggttcctccactttggtcgtgggcaaacaaatcctcctcgaaaattacccgctcggtaaaatccttaagaacccacacttgccagcgttggccgggaaattcaacggcgtaggtacggttagcgtta

SEQ ID NO: 224165 - DNA, 357 bp, Gossypium hirsutum
  unsure (1)..(357): unsure at all n locations
cggtgattccggtgtcggaaagtcaaatctgctctcgaggttcaccaggaacgantgtagcctctagtccaagtccactattgatcttgagttcgctacacgtagcttgaatgttgatggaaaggtcatcaaggctcagatttggtacactgctggtcaagaaaggtatcgtgccataacaagtgcctattatcgaggagctgttggtgcacttcttgtgtatgatgttacacgacactccacattctaaaatgtctagaggtggttaagagagttgagggatcacacatatcccaacattggagtcatgctcattggtaataaatcccatcttcgtcaccttgtggctgtctcaac

SEQ ID NO: 224166 - DNA, 407 bp, Gossypium hirsutum
ggggcggacgcacgcgtccggagatattaagccagataattttctaatgggcttggtaaggcgtgcgaataaggtatacagcaggcgactatggtctagctaagaaatatagagacagttcaacccatcagcacattccatacagggaaaataagaacctgactggaactgcaagatatgcaagcatgaatacacacttgggcattgagcaaagccgtagggatgattaagagtctcttggatttgtgcttatgtacttcctaaggggaaagtctttcttggcaaggcctgaaagctggcaccaataaacagaaatacgagaataatagtgagaagaaagtttctacttcaattgaggccttatgtcgaggttatcctacagagtttgcctcatacttccattattg

SEQ ID NO: 224167 - DNA, 360 bp, Gossypium hirsutum
gaaatagcaattaatcggagtatgcaattaaaatagtttgacttcatataaaaaagggtggttttttcttttttctttgtggtgtttggattttgggtttttttgagtcttttgataatgtcgtcgactacttcgtctgagatgcaagaaccgagcatcgacactgttaaattaagttacgaaatcttttcgattcttgatagtaagtttttgtttggctacgatgatcagcagaagctattgatttctgaaaccgatctcctcggcatttgaatctctgtcgttggttcatccgttctatttgaattcgttttcttcttatcaagaaccagatggtttaaatatgattttttgagtatt

SEQ ID NO: 224168 - DNA, 429 bp, Gossypium hirsutum
cccacgcgtccgaatcatcaaagccaaaatttcaagagcttatgtcaggactgaactatgtgataccagcctggtggtaaaggatggatatcaatggaggaaatatgggcaaaaagtcaccagggataatccctgtccaagagcttatttcaagtgttcttttgcaccaagttgccctgttaaaaagaaggtgcaaagaagtgttgatgatcaatcagttctagttgcaacatatgaaggtgaacataatcatcttcccccttctcaaatcgaggcaacatcgggttcgagccgccttggttcggtccctgttggttcgaccccagttaagtcatccggtccaaccattactctagacctcaccaattcaatcaagtcaagtgatgaagctagaaactcaaagccaaaactagattcaccagaagctac

SEQ ID NO: 224169 - DNA, 418 bp, Gossypium hirsutum
cccacgcgtccgcccacgcgtccgcagaaaataagatttctttggaaattaaaagcggtggctcttaattaattaattttttttacaaggctcaacggcaggagtaagcagaatcctgcaatcaaattccatccatagaatctggagtcgggactgtaaattatgagaacagttgacattcaattgtattggtgaagaccggaaggaacgtgtaatttattagagagtaaacaagacagagatgttctcactcttttatggactttataagtacctatttagcaagacagagtttcatgtactcattcttggaatcgacaaggctgggaaaacaaccttgttggagaaattgaaatccgtatactcaaacttggaaggtctaccacctgatcgaaattttcaaactgtgggcttaata

SEQ ID NO: 224170 - DNA, 403 bp, Gossypium hirsutum
gaaagatgtaatggagaattggtggcagagagtgacaagttagccgcgcaagatgggggagatggagatgacaatgcacgacgaccgcggcgtgaaaagttgaaggacatgcttcagaaaatggaggtacagcttaaaccattaatggaacaactcaacagagtaaaagatatgcctattccagaatttggaagtctccaagcatgggaagctcgagcaagtgctgctgggcgtgctgtaaatggtgattctggttctaatgatccttccaaaaattctcagggttatggtggcacacctatgccatttttttgggagacaaaggttgaagttgccttttctggtcttgatgggcaggaagatgtcagtctgaaagtgctgcaaatccctgaagttttgccac

SEQ ID NO: 224171 - DNA, 419 bp, Gossypium hirsutum
cccaccttcacccaaagcagacaaccctcctacgccgaacagcaagagaccgacagggtgacgaacttgcctggacagccgccggtgaagttccggcactatgctgggtacgtcaagctccgacctcaagactccaaagccttgttctactggtttttctaagcccaagatggagtttccgacaagcccctagttctttggcttaatggaggacctggttgctcatcagtggcctacggagcagcacaagaacttggtcctttccttattcgtagcaatggcactcgccttacttttaacaaattctcttggaacaaagttgcaaacatactgtttttggaggcaccagtcggagtggggttttcatacaccaacaattcccaagatttacataaactgggtgatcaagttacagcagc

SEQ ID NO: 224172 - DNA, 417 bp, Gossypium hirsutum
cagcatgtaatatgctttgttgctatgctgatgagttgaaggaaggattttttccttggattgatcaggttgccctgactctagttcctcttcttaaattttatttccacgaagaagttagaaaagctgctgtttcagctatgccggagttattgcgttctgcaaaattagctatggagaagtgaatggctcaagggcgtaatgagacctatgtaaagcaattgtctgattacattattccggctctagtggaggcattgcataaggaacctgatacggaaatatgtgcaagcatgttagatgcattgaatgaatgcgtacagatctctggtcctctgctagatgaaagtcaagttagatctattgtggatgagataaaacaagttatcacagctagtgctagcagaaaaagtgaga

SEQ ID NO: 224173 - DNA, 423 bp, Gossypium hirsutum
  unsure (1)..(423): unsure at all n locations
gcgaaatcaaaagccagcagcgctgcagctaaaagagcagtcgtttgacaattattcgcggagtgggtaaggttcacggatctctagctcgtgctggtaaggtgagaggccaaactcctaaagtggccaagcaagacaagaagaagaagccccgtggccgcgcttacaagcggatgcaatacaaccgccgcttcgtcaccgcagtggttggatttggcaaaaagaggggacctaactcatctgagaagtaagagatctatgtaggtgaaagaaggcaagaagccttgttgaaagctttgatggattttaagtctttgttttcttttgataatgtttttatgatactggtttcaaggattggattgaactnaaaaaaaaaaaaaaaatattattaatattttttttattataaaaaaaatatat

SEQ ID NO: 224174 - DNA, 423 bp, Gossypium hirsutum
cccacgcgtccgcggacgcgtgggctttgagcaaaacccttaagctgccgccatttttgctttcagcagcttgcatttgaaaagatggtgagggtcagtgttttaaacgatgcacttaagagcatgtacaatgcggagaagaggggcaaacgacaggtcatgattaggccttcctcgaaagtgatcatcaagttccttttggttatgcagaagcacggttacatcggagaatttgagtatgttgatgaccacaggtctggcaaaattgtggttgaacttaacgggaggctcaacaagtgtggggtgattagtcctcgttttgatgtcggagtcaaagagattgagggttggactgctaggctacttccttctagacaatttggatatattgtgctaaccacatctgctggcatcatggaccat

SEQ ID NO: 224175 - DNA, 389 bp, Gossypium hirsutum
cccacgcgtccgaaggaaaccaacaactacaatggcaactattacaatggtaacaatgaggccgtggttcactgagaaagggtggagtactaaggaaaaccagaatagcaacaactattacaatggtaacaatgaggccatgttcactgagaaaggatggagtactaaggaaaaccagaacaacaacaactattacaatggtaacaatgagtacaacaatgttgagaagcaaggtatgagtgatactaggtacttggagaatgggaagtactactatcgtgtgggttctgagaacaactactacccgaaccggttcgagaactcgaggggagtctgttcgaggaacgagttcaacgagaaccgttacaataacatgggaaagtacaatc

SEQ ID NO: 224176 - DNA, 304 bp, Gossypium hirsutum
gttgtgaactgtaatctactgtgctagacattacagcaagcaaagaaaaaatgacgagtggcaaagataataaggttgaagaggtaaaggaaagtgaataaatatctaaagcctttgcagcggttgccggagtccgaaaagaagtagacaagctctttgaaagagttgctgcattagaagtggctgtgaacagtgggacgaaggtaaccgatgaggaatttgttgtaccggcggagttgcttatgagagagttgctgaaattggatgggatcgaggctgaaggagaagctaggttacagcggga

SEQ ID NO: 224177 - DNA, 231 bp, Gossypium hirsutum
gagcaacgtttgggatgaacataacgctagggcgaagagatgttaaagattatgctgccaaggatatggtggatgtacttttgcaacttgctgatgatcccaatcttgatgttaagcttgaaaggcatggagtcaaggcatttagtcaggacttgatagctggagggaccgagagttcagcagtgactgtggaatgggcaatttcagagatgttgaaaaagccagaaatat

SEQ ID NO: 224178 - DNA, 418 bp, Gossypium hirsutum
gtttagtttttcaacttggttcttcgcccacatagaaaatactgtcagtgtactgggtggcataattcttatcatctggctatttgtggttctcataatcaactctagctacacggccagccttacctcaatccttacagtgcaacaacttagttctcccatcaagggcattgaaactttggtatcaagcaaggatcccattggctaccagcagggatcatttgcccgaaattatttaattgacgacctaaaaatcgatgcatcacggctggttgcacttaattccccggaagaatgtgctaaagctttgaaagatgggccccacaagggtggtgtggctgcaatggtggatgaccgtgcttatatagagctctttctctccaccagatgtgaattcagtatcgtaggccaagagttc

SEQ ID NO: 224179 - DNA, 352 bp, Gossypium hirsutum
cggacgcgtgggcaaatccctctctatcctttttggtttcttcatcggaaaaaaggggaagcccgtttcttttcagctcagaaatggatgtttacgagactggtttcatatctgaaaccccacaaagtgaagaagatatggacgtaaagaaaggtccatggactgaagaagaagacttcacgcttaaagcttatgttaatatccatggcgaaggtcgctggaacttagttgctcgcttatcaggattgaaaagaaccggcaaaagctgtagattaagatggctgaactatttgagaccggaagtgagacgggggaacattagtcttcaagaacaagcttttgattctttaac

SEQ ID NO: 224180 - DNA, 424 bp, Gossypium hirsutum
ttaggagaagaggattgcttaggtgcaaaagtggacggttcgagactaaggtacgttgacgatcagctccgacaacagcgagcgttgcagcagttggggatgatccaacacaatgcttggagaccccaaagaggattacctgaacgtgctgtttccgttcttcgtgcttggcttttcgagcacttccttcatccgtatcctaaagattcagacaaacatatacttgccaaacaaacagggctcacaagaggccaggtttcaaactggttcataaatgctcgagttcgactttggaagccaatggttgaagaaatgtatttggaggaagtgaaggaacaagaaaggaatggcagcgaagtgaaggcaaacaaaagtgtgcaaaaggagtcggagtccagctctagtgcccatcaagaaaatgtgt

SEQ ID NO: 224181 - DNA, 422 bp, Gossypium hirsutum
  unsure (1)..(422): unsure at all n locations
gttcattgnntacccatatcaatatcatttttttattgggtcattttggtgatcatggtgcaacttcaacggctactggaaactccaaaagccttgctattgaaagagcaagcaatgacttatgctcgtgggctggttgctgggtttgcaatgtaaaatatggaacatctcatttcctttgcagatgcatttggagcaaccaggttaagatgagaattcacctgcatcagataagacaccatcatcaactaccataaaatatcaagtgccagtgcaatggctaaatcacattccacagcatatgtataattttcaaggccagctacctcaatatcaatgatatcccttccatcctatgcagcctgtaccactttcgtattctatgaataatcaatggccttctaatacataccaaaaattat

SEQ ID NO: 224182 - DNA, 394 bp, Gossypium hirsutum
gtttttcaggttgaagaaatcctccttttgggttcgatctctggcttcaccaccgatgctagagatcggacatgccccaggtaatgcccttttcggcaaatacgagatcggccggctcctcggttgcggtgctttcgccaaggtttatcatgccagaaacctccgcaccggcctcagcgtcgctgttaaggtcatcaaccaaaagaacaggcagtgatgctcaatggtacaaggaactctggaacaacaagctgagacctgccctagtgggaaattagccgtacgtagtggtttggcttttgtggaaacgcagagatgaattcttgttgatttcaatatgggtgcatttgctattgttggtattattggtatgaattgattggtgaatgatgtg

SEQ ID NO: 224183 - DNA, 378 bp, Gossypium hirsutum
aaaaaggtctacgcctataactacactacggtatcaacgttcttcataatcctatcatgcaccattgccgttggtacaaacctcagccagttcatctgcatcggccggtttactgccgtatcattccaagtgcttggccatatgaagactattcttgtcctgattttaggattccttttcttcggcaaagaaggtcttaatctacatgtaatcctgggtatggtcattgcagttgcaggaatgatctggtatggtaatgcctcctccaagcccggaggaaaggagcgttggacttattcagcttcaagcgacaaatcacaaaaaccagacaatttattcggttctactgaaacagacgagaaggtttaaagattcgtt

SEQ ID NO: 224184 - DNA, 311 bp, Gossypium hirsutum
tttccaatacaaagctaaatattatcttttttagttccgccaaaagaaaccgaaaaaggtggaggaaatacaatcgttttctttttgaagtcgggttttagtttttggggagaaaaaaatgttgggagtatttagcagtgcgatagtgtctccgccggacgagctggtggcggccggttgccgaactccatcacctaagataacggcgggtgctctggtgaaacggttccttgagacgaactcctgcggcgtgtccatgcagatcggagaccatgtccaattcgcttattcttaccataaagaggctgctt

SEQ ID NO: 224185 - DNA, 425 bp, Gossypium hirsutum
cccacgcgtacgaccacgcgtacggtgatatgggttttcgtagtcggattccgattaggagggtgggctagcatgacgaatttcatcaaacaagtagatacgttcggattattcgccaagtgctaccaatgtccaccttcaccatcatcaaaacatcactgatataaatactccaatttgaaactcgaaccccttttttgtagcaccggcatcaccggagtccagtatatttcagtgtgtcgcagcttcttctctgtttggtctaccttggtctacaagtaatcaatgattgtgaaagggttttatggtattccctatatatatatatatattggtctatggaggcaaaaaagtaatctgtattcaagctggaattttcttcacatggcttgtttggatccaaaagaaaacaaattagttacagt

SEQ ID NO: 224186 - DNA, 414 bp, Gossypium hirsutum
ctctcagtttcttctttatcccctaaaactcttcagcaatttccctttgttaaccaaaatgagagagtgcatttcagttcacattggtcaagctggtatccaagttggtaacgcctgttgggagctctactgtcttgaacatggcattcagcctgatggacaaatgcccggtgacaaaacagtcggaggtggggatgatgctttcaacacctttttcagtgaaaccggcgctggaaaacatgtccctcgtgctgtttttttggatcttgaaccgaccgtaattgatgaagttagaaccggggcttatcgtcaattattccaccctgaacagcttattagtggcaaagaagatgctgcaaataactttgtcagaggccacttcacaattgggaaggaaatagtggatctttgcct

SEQ ID NO: 224187 - DNA, 408 bp, Gossypium hirsutum
gcttatgctggtagtgggaggtatagggaagccatggtggtttttaagaaaatggaggaagagggctgtaagcctactttgataacttataatgtggttttgaatgtgtatggtaaaatgggcatgccttggagtaaggtcatgactctttttgatgggatgaaaagtgatggaattgcccctgatgcttatacttataatacgcttataagtagctgtcgtcgagggtctttgcatgaggaagcggcttcggttttcgatgaaatgaaattggctggttttagtccagataatgttacttacaatgcattgttggatgtttattggaagtctcggcgtccgaaggaagctatggaggttttaaaagagatggaactttatgggtttgcccctagcattgtgacttat

SEQ ID NO: 224188 - DNA, 360 bp, Gossypium hirsutum
taagatcgtgtcttggatgaagtcggaaggggacaagttgtctaaaggggagagcgttggtgttgtggaatccgacaaggctgatatggacgtcgagagtttccacgagggattcctcgccgctattatggtggaggaaggcggcgtttctcccgtcggttctgcaatcgccctcttggctgagactgaagacgagatcgctgaagccaaagctaaatcgcagtcttcttcgaatagcactcctcaggtattagaagaaaagccaaagcaaattgaagaggcggctccggatgttccggctgctgctgctgctccatcagttccggtcgcaaaggctgtaactttggggtccgccgtaca

SEQ ID NO: 224189 - DNA, 422 bp, Gossypium hirsutum
gaaaaatgaagaaagtagagctgatattcgttccaacaccaggagccggccacttggccccaactgttgaattcgtaaagcgtctcatccatcacgatgatcgaattttggttactattctttccattgagtggcattcttcgggtttcgccgatgcctacaccgaatcgcttgctactttgcaatctgatcgaatccaggtaattcaagtttctcgggtagatcctcccccgttacatctttggaccttggcacccgaagcttttgtctatgcattaattcagagctacatccctcatgttagaaatgctgtcacaaatattttgtctatgaaatccacttcggattcaacccgagttgcaggcttagttcttgatctgttttgttcgcccatggttgatgtcgcaactgaactcggtctt

SEQ ID NO: 224190 - DNA, 422 bp, Gossypium hirsutum
cccttcgggggaagtccacaggccttcttgatcctaatttttctatcctgaaggctttgttgcatgcatctgttgctcggggtaagaaacttattgtggattgggttcctgctagtgaccttgaagatatgactgaaatagagaatcttgatgcttacaaggctgcgtggaagttgctcaagagtgcagatggtgttctggttcccggagggtttggtgatagaggggtgcaaggaaaaattttgcagcaaagcttgcacgggaaaacagaattccttttcttggaatatgtctaggaatgcatattgctgtcattgagtttgcacgatctgttctaggattgaaagaatgcaaatggcacttgagttcgattcctagcacttcaaaatccttggtttattatttatgcccgagggctcaaa

SEQ ID NO: 224191 - DNA, 390 bp, Gossypium hirsutum
gtgaaccatggggaccccggaaacgtcacgggagccatgccctgatcgaattctcgacgacattggtggtgcttttggcatgggtgctgttggaggtgcagcctttcacttcttgaaaggcacatataactcccctagtggttctcggttgctcggaggaactcaagcagtgcgtatgaatgcccctcgtgtcggcggtagttttgccgtttggtgcggtctgttttccacctttgaatgcactatggtctacgttcgacagaaggaagattcttggaactccattatagccggtgctgcaacaggaggttttcttttaatgcgttaaggaatttggtgctgttttctgatcagtcatgttcggtgagcattttgtttgctttgaatgaa

SEQ ID NO: 224192 - DNA, 414 bp, Gossypium hirsutum
gttcaggggagaggaagcttgatcagacacctacatgggcggtggctggggtttgtgctgttatcatcatcatttctattgtcttggaaacagttcttcacaaacttggaacgtggttcacagaaaggcacaagagtgctctgtttgaagccctggacaaggttaaagctgagctgatggttatgggtttcatttcgctgctcctcacttttggccagagctatattgccagaatttgtatcccaatagatgttgcgaataccatgttgccttgtaaatctgatagtgagcaaggcacctctgaaagcagtgaataataacaccgtctaagactgttatggtttgtaccgagatctttgtctactatttcaactgctcctaaatgcaaggaggggcattgaaccactttatttt

SEQ ID NO: 224193 - DNA, 444 bp, Gossypium hirsutum
cccacgcgtccgttcgaaactgctggcggggttatgactgttttgattccgagaaacactaccattcccaccaagaaggagcaggtgttttcaacttactctgataaccaacccggtgtcttgatccaagtttatgagggtgagagagctcgaacccgggacaacaatttgttgggtaaattcgagctctctggcattccaccagcacccagaggcgttccccaaattacagtttgcttcgacattgatgctaatggtatcttgaatgtctctgctgaggacaagactactggccagaagaacaagattacgatcacaaacgactagggtcggttgtctaaggaagaaatcgagaagatggttcaagaagcggagaagtacaagtccgaggatgaggagcacaagaagaaggttgaagccaagaacgcattggagaattatgcc

SEQ ID NO: 224194 - DNA, 411 bp, Gossypium hirsutum
caagctctctcttcctgtcttcgtctacttcgcctctttctctatggatccctacaagcaccgtccatcaagtgctttcaattcaccattctggactaccaattctggcgctccagtttggaataacaattcatctctcactgttggacccagaggtccaattctccttgaggactatcatctggtggaaaagcttgccaactttgacagggagcggattccagaacgtgttgtccatgctaggggagctagcgcaaagggtttcttcgaggttacccatgacatttttcaccttacatgtgctgattttctgcgagcacctggagttcaaacccctgttatcgtgcgatttttaacctgtattcatgagcgtggaagccctgtaaccctaaggattcttgtggttttgca

SEQ ID NO: 224195 - DNA, 434 bp, Gossypium hirsutum
  unsure (1)..(434): unsure at all n locations
gtgatgtttatgcattcggtgttgtgctgctcgaacttctattgggaagaaagcctgtagaaaaactagcaccagctcagtgccaatctattgtcacatgggccatgcctcagcttactgacagatctaaactcccaaacatcgtggatcccgtgataagaaataccatggatctgaagcatttatatcaggttgctgctgtagctgtgctatgtgtgcaaccggaaccaagctaccgtccattgattacggatgttctgcactcacttatccctcttgttcctatggagcttggagggactctaagagttacacaacctacggtcccttgaccctacanactgactctgatgtactgacatgactcgaaaatcaagaccgtattttgctacgatgacgactgccatgcaattttcgggtttgcatcaattaat

SEQ ID NO: 224196 - DNA, 407 bp, Gossypium hirsutum
gggacgcgtgtgcgaaccaatcttgacagggttgagactacttagatgtctagacacaggagccttcgggcggcggaggaggagggctttcaattcaccattctggactaccaattctggcgctccagtttggaataacaattcatctttcactgttggacccagaggtccaattcttcttgaggactatcatctggtggaaaagcttgtcaactttgacagggagcggatttcataacgtgtttgtcatgctaggggagcttgcgcaaagggtttctttgaggttacccatgacattttttaccttacatgtgctgattttctgggagcacctggagtttaaaccctctgtatcgtgcgatttttaacctgtattcatgagcgtggaagccctgtaacccttaggg

SEQ ID NO: 224197 - DNA, 428 bp, Gossypium hirsutum
tttttatttttttcagagccttcttcaccaaccttcgctctgttcaggccgtgatcttgggattttttttcattgttactatttttaagcttgctaaccccaacccagtcgctcttctttcattatctttcaaacccagatctttttcattgtttaaatgcttcgttgggttccctaccaggcctgttttcagctctaagctggtttcatcttttagcttgtcctctatatacacccacccttttaggggctccttggttgtcaggtgttctcttgctgatggaaacggtagttcagtgaagacgactactttgcatgatctgtatgaaaaagaagggcagagtccatggtatgacaacctttgctggccagtgaccgattttgtgccactgattgcaagtggtgttagtggtgtaactagcataccc

SEQ ID NO: 224198 - DNA, 414 bp, Gossypium hirsutum
ctggatggggggatgcgtttaaaatgaggtctttgttggtaggactgttatgccaggtggagctgacgtggaacaattacataagatttacacgaaatgtgggtcaccgttagactaatactgcaagaagtataagttgccgtatgcaaccttatttaaacataaggagccttatcaacgatgcgtaagggagacatttagagattgactaccatcatcactaatgcttatcgatactaggatcgcaattgatactgctgaacggttgactggcactgatgcattaagaagcgaattctttacaacagaaccttatgcttgtgaaccgtgttggttttcccaaatatacatccagtcaagagatagatgcaaaacgaagagatgattaagctcggagactcaaagctgtcggta

SEQ ID NO: 224199 - DNA, 404 bp, Gossypium hirsutum
gcccctgaagtcttacgaaagcattatggtccagaagcagatgtctggagtgcaggagtaattctttacattctcttaagtggagttcctcccttttgggctgaaaacgagcaaggcatatttgaagaggtattgcatggtgaccttgattttgattctgatccttggcctagcatctctgaaagtgctaaagatttggtgaggaaaatgctcatccgagaccctaggaaacggttaactgcacatgaagttttgtgccacccttggatacagattgatggtgttgctcctgacaagcctcttgattctgctgttttaagtcgtatgaagcaattttctgcaatgaataagctcaagaaaatggctcttagagtaattgcagagagcctatctgaagaagaaat

SEQ ID NO: 224200 - DNA, 421 bp, Gossypium hirsutum
cccacgcgtccgcccacgcgtccgtatgaagtgggttgaagatgtttgggtcttgagtatgacctggatcttttcaatgttgtcgctgttcctgatttcaacatgggagccatggaaaacaagagtctgaatattttcaattcaaagcttgttttggcttctcctgaaactgcttcagatgctgattatgctgcaattttgggtgttattggtcacgagtattttcacaattggactggcaacagagtgacttgccgggattggtttcagctcagcttgaaggagggcctcactgtgttccgtgaccaggaattttcatctgacatgggaagccgtacagtgaagaggattgccgatgtttcaaagcttcggaattatcaattcccacaggatgctggtcccatggctcatccggttaggc

SEQ ID NO: 224201 - DNA, 431 bp, Gossypium hirsutum
cccacgcgtccgcccacgcgtccggtagccaactgtgaataagtgaattgatatccaagcgttccattccatttccgtatagttcgaaaacacttaagtaccttcgatcatattttagtgtcaaaaaatggccgaggagcataccagcaaggcccctgagttggagagcaacgttagcggtgaaggagcagtggagagcaaggagcgagggttgttcgatttcatggggaagaaagaagaggagaagcctcaagaggaggtgatcgtaaccgagtttgaaaaggttaatatcgaagagacaaaggcagaggaagaaggtgaggagaagaagaagcatggtcttctgggagaagcttcaccgatcagatagcagcagctccagctcttcaagcgacgaggaagaaggtgaaggagaagagaagaagatgaag

SEQ ID NO: 224202 - DNA, 284 bp, Gossypium hirsutum
ctcagattatgaaaatgaaggtattgaatcagttaatagcacacctgggggagatccaagttattggtggatctattgcacacaatgtttaacttgcatacaagtttttttggatgcaagttccgattgatgctgtttttcagaaggtagaaatgaatgttattattggtgtcactcagtgataaggttattgaaagttttattaatctttggtatattacacgtctgtcacttcagattttctaatatttattaatttttttattttttatttacttttattt

SEQ ID NO: 224203 - DNA, 283 bp, Gossypium hirsutum
caagaacgtggtgaaccaagctagcaccagcacccaacatggcctgattagcacactgcaccgttgccgactgccttggcgtctctgaaatgctcggtcaccctgtgaatttcagtggtggagctaggacatcggctccaacaccatccaactcatacatgttcaagaccgttgctcttttcttcaagaagaaggcctgtctctcaaaggccaaagctagtgttgtcggcccggtcgatgaagaactggctaagtggtactgcacggacagaatgattttttt

SEQ ID NO: 224204 - DNA, 437 bp, Gossypium hirsutum
ctcaactccacgcaaagggccctctttcttggcgtctaattccttctcctttcctctggtgctgcttgtgatcgctgcctgcaccagtccaaggctgcttatttctccaaagcctctgctctttcagcgggagcttgtggatacggttccttggctttaggtttaagtggtggacaccttgctgctggtgtttcttctctttacaaagatggagccggttgcggtgcctgcttccagataaggtgcaagaattcaactctgtgcagcagtgaagggactaggatcacactaactgatctcaatcataataatgaaacggaatttgttcttagcagcagagcattcatggcgatggctaacaaaggcatcggccgagacattttgaaacttgggattgtcgacgtggaatataaaaggataccttgtgaatacaaaaa

SEQ ID NO: 224205 - DNA, 429 bp, Gossypium hirsutum
cccacgcgtccggttatttttccttccaattaagatgcagatcttggttaagaccctgagcggcatgaccatcaccctcgaagtcaagagttccgacacgatcgacaacgttaaggcgaaaatccaagacaaggaagggatcccaccagaccaacaacgtgtcatattcgtcggaaaacagctcgaagatggccggaccttggccgattacaacatccagaaggagtccaccctccatctcgtcctccgtctacgtggtggcatgcagatcttcgtcaaaaccctgaccggcaagaccataactttggaagtcgaaagctctgacaccattgacaacgtcaaggcaaagatccaagacaaggaaggcatcccaccagaccagcaaaggctcatatttgtcgggaaacaactcgaggacggtcgcacctt

SEQ ID NO: 224206 - DNA, 330 bp, Gossypium hirsutum
cggggcggcccaagccttcgggttttggccaaccttggcggcggggttaatgttgtttccgcctaccaggggttttgaaaaggatgaccaggaccttgagttggtcgatgattgtgtgcacctgtggacctattctatttaaaagtttaaatttatcagactcaatagaattggatcaatccttttttctggcgttaagggggagaactgaaccaagaattctctttctttatcatcaatcgaatcactgttcgcgacccaggattctattttcttatcaattcaaatcaccgcttcacgtgttttccttttttcttaatcagatgaaat

SEQ ID NO: 224207 - DNA, 417 bp, Gossypium hirsutum
ggaagacatgcaattcatggtgatggatggtctgcacccacaaaatgcagctctatatatggatggtcactacatgggtgatggtccttaccgtttgggcccatgatataatatgcaacagcgcattaaattacctgcctcagcaggaatatatatatatactaagtgtttgtttccattacatttcagccatagtatatgttagtcttccattgttttttttcttttttggttcatcccttaggattcagctttctcctacaacataatctagcatctttgaaaaaagcacccttatagtttcctgcctgcctattccttatgatgaatcgcgaggatgtggatccctgttgtcgggtccaggatgcctgcctgtgtttctcatgttcaaaggcaccgtgttgctaagtgtttgtt

SEQ ID NO: 224208 - DNA, 317 bp, Gossypium hirsutum
caaaattcatggctatcgcatgatctggatataacgagccaacaaaggggaaaatgggtggagaaaaattacatgatttacaattactgcactgacaccaagcgattccctcagggacttcccaaagaatgtagtgttcattaacagggattctaaatttgttatagcagatattttattggttaaatatatgaatgttttttaaatctttgttcactagtaagtcatatacttaaagacagattttgtgtgtaatttgttctatgttttgtaacgtgttatataagttcaatattaaatgttatcattctttttat

SEQ ID NO: 224209 - DNA, 430 bp, Gossypium hirsutum
  unsure (1)..(430): unsure at all n locations
caaaaaccacacaagaaaacaaacaaaggaacaataaaaaaaaaaaacattcgcagtttcagcaatggcagagtcgtcaaacaacgttgtcgagacgatcaaccgtgattgtcacgattntaagtctcttctctcttcttcagacagggatttcctcgttcgcaacaacggtgatcaggttaaaatcgatagcttgaaggggaagaaggttggattgtatttctcagcatcttggtgcggtccatgccgtagattcaccccaaatttaatcgaggtgtacaccgagctctcaacgaatgcgatttcgaggtcatttttatctcggcagatgaagatgaagagtcattcaatggttacttcttcaagatgccatggctggcaatccctttttctgattcagaggcacgcaagcgcttagatgagccgtaca

SEQ ID NO: 224210 - DNA, 428 bp, Gossypium hirsutum
cccacgcgtccggggaatcgaaataagcggcggcacgatcattccaggaggttggggggccgccgccatggctgtcgcggctaagacatgcgacgcatgtaaatcatcggcggcagctatcttttgtcgtactgattgggtctttttatgcttgaattgtgattccaatttccattccggtcacgaaagggtgtctatgtgtgaagtttgcgaacaagctccggcggctgtcacttgtaaagccgacgcggcggctctttgtgtcacttgcgacgccgatatccattcagcgaacccactggctcgccgtcacgaacgtgtacccatcgaacctttctacgacttcgctgattccatcgtcaaatcttccccttttagcttccttgtgccgacgacggatcataatggtactaattgtaaacaagaaa

SEQ ID NO: 224211 - DNA, 426 bp, Gossypium hirsutum
cccacgcgtccgattttctattttgttttctctccctccaattaagatgcagatcttcggtaagaccctgaccggcaagaccatcaccctcgaagtcgagagttccgacacgatcgacaacgttaaggcgaaaatccaagacaaggaagggatcccaccagaccaacaacgtctcatcttcgccggaaaacagctcgaagatggccggaccttggccgattacaacatccagaaggagtccaccctccatctcgtcctccgtctacgtggtggcatgcagatcttcgtcaaaaccctgaccggcaagaccataactttggaagtcgaaagctctgacaccattgacaacgtcaaggcaaagatccaagacaaggaaggcattccaccagaccagcaaaggctcatatttgccgggaaacaactcga

SEQ ID NO: 224212 - DNA, 417 bp, Gossypium hirsutum
cggagagggtggatttggctgtgtttacaagggttctctcaagagtcctgaagatccgtctgaaaagattgaagtagcagtgaaacagcttggtaaaagggggttgcagggccacaaggagtgggtgactgaagtaaatgtccttggtgtggttgagcatccgaatcttgtgaagctagttggttactgtgctgaagacgatgaaagaggaatccaacggcttttgatatatgaatatatgcctaatagaagtgtggaaaaccatttatctgtgcggtcagaaacaactctttcctgggcaatgagatttgaaaatagcccaagatgctgctcgtgggttagcatacctacatgaaggaatggagttccagatcatctttagggattttaaatcatcaaatatccttctagatgagc

SEQ ID NO: 224213 - DNA, 430 bp, Gossypium hirsutum
aaaaaaaaaaaaaaaaaggaaaaaaatggctatgcaattcaatcccatcgcttctcaaacgaagaaactcccttcatatgctcttccacccatggcaagtcttagatctcccaaggtttctatggtctccactcttccacctcgctccaaaggggttgaagatctgaaacggcctttcatggctccaaagctggtacaccaggcttcccacaccatgccacctgagaagattgaaatctttaaatctttggatgattgggctagggataacattctgattcatcttaaacaagttgataaatgttggcaacccaaggattttcttcccgatccttcgtccgatggatttgaagatcaagttagagaacttagagaaacgggcaaaggagattccggatgagtactttgtcgtgttggttggtgatatgat

SEQ ID NO: 224214 - DNA, 432 bp, Gossypium hirsutum
aaaaaaaaaaaaaaaatggaaaaaaatggctttgcaattcaatcccatcgcttctcaaactaagaaactcccttcatatgctcttccacccatggcaagtcttagatctcccaaggtttctatggtctccactcttccacctcgctccaaaggggttgaagatctgaaacggcctttcatggctccaaagctggtacaccaggcttcccacaccatgccacctgagaagattgaaatctttaaatctttggatgattgggctagggataacattctgattcatcttaaacaagttgataaatgttggcaacccaaggattttcttcccgatccttcgtccgatggatttgaagatcaagttagagaacttagagaacgggcaaaggagattccggatgagtactttgtcgtgttggttggtgatatgatcac

SEQ ID NO: 224215 - DNA, 427 bp, Gossypium hirsutum
aacataaacacaaaaaaggataaaaatggctatgcactgcaatcccatcgattctcaaactacgaaactcggtgcatatgctcttccacccatggcaagtcttaaatctcccaaggtttctatggtcaccactcttccacctcgctgcaaaggggttgaagatctgaaacggcctttcatggctccaaagctggtacaccaggcttaccacaccatgccacctgagaagatggaaatctctaaatctttggatgatcgggctagggataacattctgattcatcttaaacaagacgataaatgttggcaacccaaggattttctttccgatccttcgtccgatggatttgaagatcaagttagagaacttagagaacgggcaaaggagattccggatgagtacttttgtcgtgtggttggtgatatg

SEQ ID NO: 224216 - DNA, 410 bp, Gossypium hirsutum
ctcaatctctctaatcctcactttcttccccatcaaacacaccttcgattttcccaagggtgtagaagatggcagaaggtgaggatattcagccacttgtttgtgacaatggaactggaatggttaaggctggatttgctggggatgatgctccccgagccgtattccctagcatcgttggtcggccacgtcacaccggtgtgatggttggcatgggccataaagatgcatatgttggtgatgaagctcaatcaaagagaggtattttgactttgaaataccctattgagcatggtattgtgagcaactgggatgatatggaaaagatttggcattataccttttataatgagctttgtgtagccctggtagagcacccagttctccttactgaggctccacttaaccca

SEQ ID NO: 224217 - DNA, 275 bp, Gossypium hirsutum
cggacgcgtgggcaagaatgttgtttttggtgacagcagtgccttggggccggtaggtgtacgaattgttacacctgccatgacttcaaggggtttggttgataaggactttgaacagataggcgagttccttcaccgagccgtgacaatcactttgaacattcaaaagcaatatggttagcttttgaaggacttcaacatagggttggacaacaacaaggagatccaagagctgaaggttgatgttgagaagttctcattctcattcgattttc

SEQ ID NO: 224218 - DNA, 427 bp, Gossypium hirsutum
gcaaaagttgatgagtatgctcgcggaatgatcagtggttctggatcaacacttttcgaagaacttggactatattatattggacctgttgatggccacaacatcgatgatttagtttctattctcaaagaggtgaagactactaaaacaacaggtccggtcttgatccatgttgtcactgagaaaggccgaggttatccatatgcagagagagctgctgacaagtatcacggagtggtgaagttcgatccggcaactggaaagcaattcaaaggcaattctgctacccagtcttacactacatattttgctgaggctttgattgcggaagctgaggcagacaaaaatattgttgccatccatgccgcaatgggaggtggaaccggattaaacctcttccttcgccggttcccacaaagatgtttcg

SEQ ID NO: 224219 - DNA, 421 bp, Gossypium hirsutum
gttttctgagcagcttatccatcaatggcttcctttaacccaagtgggtacgaaaagtattcaggttcagcagcagaagcaaccaagtttggccaagacgccgccacgactgggattccagttagctcctccaacgcctactactccgacaattctcaaaccaccaacactcgtcctcagactaaaacgagagtcccttggtcatctggcctctgtggctgcttctctgactggagaaactgttgcataacatgttggtgcccttgtgtgacttttggccagattgctgagattgtagataaaggatcgtcatcgtgtggggtaaatggagcactttacacactgatagcatgcgtgacggggtgcgcatgttgctattcctgcttttaccgagccaaaatgaggcagcaatacatgttga

SEQ ID NO: 224220 - DNA, 418 bp, Gossypium hirsutum
ctttctcttaccttctccttgctccctgaaacagcttcagctcaactgggacaaaattactacgcgaaaacctgtcccaatgtagaatccattgtaagaaacgcggttactaagaaattcagacaaacttttgtcactgtccctgcaactatccgcctcttcttccatgattgctttgtccaggttcttttaaagagcacaaccattttccagtttttcaccatgttggagctgatgttattttatttatatatataacaatcattatgttgttttcagggttgtgatgcttcagtaattattcaatccaccggcagcaacaaagccgaaaaggaccaccccgacaacttgtcgttagccggtgacggtttcgacaccgtcatcaaggcgaaacaagcggtcgatgcggttccgagtt

SEQ ID NO: 224221 - DNA, 319 bp, Gossypium hirsutum
gatgataacaaagaggaaaaaaatgagaaaatacctgaccaacagaaaaaccatgattctggtaataaatcggacaaataacccaaagaggccccggtaacaactgctgatttgagggtgcaattgaaatgccagtgtgatggatgctttgataggattcgcaaaattgcctttgaaaccaaaggtgttcaagagtttgaaagtagacaggcagaaggagatggtcacagttaaggggactatggatgttaaggccttggctgatgctttgaatgacaagctgaagaaacatgttgagattgtagcttctaagaaagag

SEQ ID NO: 224222 - DNA, 432 bp, Gossypium hirsutum
caggagacgccatgaaaacgaccgtctcaaacttcgacatcccagcggcaagcatgtcgagcttcgacatactcagcgtagcgacgttcatattcatttaccgacgaatccttgaccccatcattgctagaataaaaacaaaccctaagggcctcaccgagcttcaaagaatggggatcggtctcgttatagctatactagccatggtggcagcaggagttgtcgaggttttccgattgaaatacgcgaacaaagattgcccaaactgcaacaacgcgagctcgttgagtatattttggcaaatccctcaatacatgctcataggagcatcagaagtattcatgtatgttggtcaattagagttctttaatggacaagcacctgatgggttaaagagctttggtagtgcactttgcatgacatccatatcat

SEQ ID NO: 224223 - DNA, 424 bp, Gossypium hirsutum
ctcaggttcagcctgttcatgtcccccctccaagcccctagtcttcagctcaataaatggaactaaaagaaagttgaatccaacatgggttttcaagctcttgttaagcttgcattgatatgctttcattctcttgcttggcctctctttgctttaggttatcctctacgtgcttccattcaggcaattgaggctaattccaacactgacaccaagaaattagttacttattggattatcttctcactgatttccttgttcgaacatgctttcatggggatccttcaatggcttccattttggccatatatgaagctaaccattgtctgttggatgatgataccccatttcgatggtgccttttatgtttataatcgatttgttcatccatgtttgtatatggatttgccaactatcattaact

SEQ ID NO: 224224 - DNA, 421 bp, Gossypium hirsutum
caatactcgaatgctaccataaatacaggcaacaatcaggcaacactggaagaataacaggctgtaagctttgtactttcagaacaccatcataattgtaccgatgtaagccattacctttatcggatactgagctaactgtgctgaaacatccacatacttgcttaatagcgtaagcagtacactttgggtgaaggcgggtgctaacatttatgcctattctcaaacgatcattttgttgcacatatttgctagtccaactcatgagtatctggacaccaagttcagcattagaagaagcgcctagcatcttaacaacttgtcctacagaattgcagacagagggcgttaacctgttatcagtacactggtgtttgctctcctaccgtccatctgagaactgcaaagctttacatgtgca

SEQ ID NO: 224225 - DNA, 425 bp, Gossypium hirsutum
atcttgtttaaaatataagaaaaaagtcatacgcaatgagcactgccggtcaggttatgcgttgcaaagctgcggtggcatgggaggccgggaagccactatctatagaagaagtggaagtggcaccaccccaaaaacatgaagtccgtattaagattctcttcactgctttatgtcacactgatgtatactactgggagtgtaagggttacactcctctgtttcctcgtataccttggtcatgaagcctcagggatcgtggagagtgtgggtgagggtgtgaatgatttgaaacctggggatcatgtgcttcctatcttcaccggagaatgcaaagaatgtcgccactgtctgtcagaagaaagcaataacatgtgcgaactgcttaagatcaactgcgaccgaggtgttatgcttgctgatgg

SEQ ID NO: 224226 - DNA, 420 bp, Gossypium hirsutum
aacacatctctatttctatcgcacttttattcccctattcctctctcggtctctcatccggaactctaaccctagccctctatcaggattcaaacatgaaaggaggtaaatccaagtcggatgccaagagcgccaagctctccgtgaataagaaatcaaccacgaaagctggaaagaaatcggggaaggcagctaaggatccaaacaagccaaagaggcctgctagcgccttcttcgttttcatggaggagttccgcgagcaatacaagaaggagcaccctaaaaacaagttcgttgctgctgttggcaaagccggtggagataaatggaagagcctttctgaagctgaaaagcgaccttatgttgataaggccgagaaacgaaaggtcgagtatgaaaagaacatgaaagcctacaata

SEQ ID NO: 224227 - DNA, 407 bp, Gossypium hirsutum
  unsure (1)..(407): unsure at all n locations
ggggnccgggcgacccagcattccgagttcttgagcagccatggagcagacactaaggccaatcttgcacgggttggtgccaggaatcaagccatgactcacaatggtttgcggtctttgaacaaggtcgataggttgcagatgaggaccaccaacgcaaaggctgtcgttacgaaagccatgaaacaggcagatcacaggcctttgggaaaaattatttgcggaatagggatgaatatagtgtttgtgtcagctgagtgtggcccctggagcaaaactggtggacttggtgatgtcctcggtggactttctcccgcaatggctgccaaaggacaccgtgttatgacagtgtgtcctcgctttgatcagtacaaggatgcatgggatacaagtgtgttagttgatct

SEQ ID NO: 224228 - DNA, 336 bp, Gossypium hirsutum
ggcagctttgacccattgggtcttgctgatgacccagaggcattcgctgagctcaaggtgaaagagatcaagaacggtaggttggctatgttctcaatgttcgggttcttcgttcaggccatcgtgaccggaaagggaccattggagaacttggctgaccaccttgctgacccagtcaacaacaatgcttgggcctatgccaccaactttgtccccggaaagtgaacttagagagtgagaagggatttgtcttgtttatgtttttatttgttggtgtgaatttaaatttgttgcacaatcaatgaaagtataatgtgaattttgtgtgctcaaaaa

SEQ ID NO: 224229 - DNA, 436 bp, Gossypium hirsutum
cttggccaccgtttttctctttgccttccctcttgtcaaagctcctttcgtctttctgctgccaaagaaggtaaaaccgaaacatcaacaattaaaaaaagaagaataaaggaataagctgcaaataatgtccaaatcaaaccctagtttccctccccagcaattatccaaatctctgaccaaatcgttcatggctcagaaccaagtcatggactcgcttacttcccacatctctctctaccattgccattctctctcccaaaatccaaaccctacccctaatagcaattcaaggtcttcgatcctcaggtggttctcatctctcaccatccatcaacgtcaagctcaactcacaaccgtcgattccaagttcacccagctcctcatccagatgctcggcaagcttcgtacacgtggccatggcttcttcattatt

SEQ ID NO: 224230 - DNA, 415 bp, Gossypium hirsutum
gctgttggcttttatctcgtcttgcaccatttgagagagggatatacgaggatatgtggctaatttgtgggcaccagctcagtgcttgtgaaatggaaaaagttatattctacacaatcattgaggatttttagccttgctgcaactcttataacatgtctgcccttaatggttcaacaaatccttgctccgaagcagaagggttttctctatgcgttgcttaatagttctttctcgtgctacttgttctcatttcaagtgcatgagaaatctattctgctttcgcttctggctcttaccctattagccctggaagaaagttccttgatattgtggttaacacacctagctatgttctctaatgttcctattttacaccgggaccaaactgggtttagcgtattatggttcttta

SEQ ID NO: 224231 - DNA, 388 bp, Gossypium hirsutum
ggaaacccggtcgaccacgcgtccgcgattttctattttgttttctctccctccaattaagatgcagatcttcgttaagaccctgaccggcaagaccatcaccctcgaagtcgagagttccgacacgatcgacaacgttaaggcgaaaatccaagacaaggaagggatcccaccagaccaacaacgtctcatcttcgccggaaaacagctcgaagatggccggaccttggccgattacaacatccagaaggagtccaccctccatctcgtcctccgtctacgtggtggcatgcagatcttcgtcaaaaccctgaccggcaagaccataactttggaagtcgaaagctctgacaccattgacaacgtcaaggcaaagatccaagacaag

SEQ ID NO: 224232 - DNA, 282 bp, Gossypium hirsutum
  unsure (1)..(282): unsure at all n locations
gggatatgtacagggtntggtgtcactgcaaatgttgccaaacccaaagagggtcaagcggccgcattttttggactgggtgccgttggtcttgccgacgctgaaggtgcaagggttggtggagcttctcggatcatcggtgttgatgtgaaccccaaaagatttgtagaagctaagaggtattgggattacagactttgtgaatccaaatgactactacaaacctgttcaagaggtgattttggacattacctacgttggagtgtgaccgcagtgtggata

SEQ ID NO: 224233 - DNA, 384 bp, Gossypium hirsutum
cccacgcgtccggtgaaaagaaattttgaagataaaaaaatccatcacggatctaagttgggcaaattctgttcaaatcgccggcgaaattttgatctgaaaatctaaaaatgtcgtccacattcagcggcgatgaaactgctcctttttttggcttcctcggtgccgctgctgccctcgttttctcctgtatgggagctgcgtatgggacggctaagagcggtgttggtgtggcgtcaatgggagtgatgaggccggagctggtgttgaaatctatcgttcccgttgctatggctggcgttttgggtatttatggtttgattattgccggtattattagttctgggattaactccaagggtaaagctttataccctttccgat

SEQ ID NO: 224234 - DNA, 425 bp, Gossypium hirsutum
  unsure (1)..(425): unsure at all n locations
gggcgacctgccactttccttgaagattttagaatcacttggtctgattctcatattaggcaaatcgatggagggagagccatccaacttgttctcgaccaaaattcaggctgtggatttgcttctaaaaggcagtatttgttcggacgtgtcagcatgaaaatcaagctcatccccggcgactccgccggaacagtcaccgccttttatatgaattctgatacagatgctgtgcgagatgagctagacttcgagttcttgggaaaccgtaccgggcagccatatacggttcaaaccaatatctatgcccacggaaagggtgacagggaacaaagggttaacctttggttcgatcctgctgcagatttccatacttactcaatcatgtggaaccatcatcagattgtgttctatgtngatgaagt

SEQ ID NO: 224235 - DNA, 399 bp, Gossypium hirsutum
aaggaatctagtgaatttcggtaggtcattgctagtcatgaaaatgcatggagaaccagaaactctgagtttgaggctgagcttgagcttaagcgcagaatggtggaagatgagattgaaatgaagagacgggcctgggagttaaaggagatggatataaataacaaggaggaccaaatttgtgaaagagaacatggtcttgatgttcgattgaggatattagcagagaaagagaaagatgtggctgagaagtcaaatctcatagatgtcaaagaaaaaaatatgagtgctttcgaaaaggaacttgagttgaagaaagctgctttggaaaaagaaaaggatgagatgagttaaatgatactagaccttcaaaaatcattgttgtcatttgaagataaa

SEQ ID NO: 224236 - DNA, 330 bp, Gossypium hirsutum
ttctgatctctgccccaaagcataaaagttcttatcttttacaatcacagggagctgcttatttattttcatggctcaaggagattctaacttccagcaagacatggctaaagaggaagaagaacagaggctgaaatacttggaattcgtgcaagtagccgccgttcacgccgctttttgcttcaccaacctttacctttacgctaaggaaagatcggggccgttgaaacctatcgtcgagaccgttgagggaacagttaagtgcgtggttggaccggtttatgataaataccatgattgtccctgttgaattcctaaaattcgttgatt

SEQ ID NO: 224237 - DNA, 292 bp, Gossypium hirsutum
atagcatccaaaatcaaatcctctgagaagaatctatgagaccaaacatagggttatttggagattcaattacgcaagaatccttcagatcatgcggctggggtgcttctctcgctgatacctactctcgcaaggctgatgttgttctttgaggctatggcggatacaacaccagatgggctttatatttgatgcatcatcttcttccttttggctcaactaaacctcctgttgctaccacttttttccttgtggctaatgatgcattttttccagggagatccagtgaaag

SEQ ID NO: 224238 - DNA, 304 bp, Gossypium hirsutum
ggaagagactacaacccttgggcctgctgtacgagacggagagcatgttttcggtgttggggacatttttgcatcttttaatgacactttcattcatgtgactgatttgtctggaagagagactatggttcgtattacaggtggtatgaaggtgaaagccgacagggatgaatcttcaccttatgctgctatgcttgcagcacaagatgtttcccagagatgcaaggaacttggaatcacggccctccacatcaaattacgtgccacaggaggttacaaaaccaagactcctggtccgggtgct

SEQ ID NO: 224239 - DNA, 310 bp, Gossypium hirsutum
cggacgcgtgggtcagtccatggcagcagtgagtttcaacattatcaaggactgcaaccggagcttttctttaagatgtcacatgaaatctacaactatggagaaggtttgataggaaaagtggctgcagatcacagtcacaagtggatagaaagaaccaaatgagcaggaaatcaacttcttgtcagcatggcataactctgcagactcacatcctaggacatgggaagcacagtttcaggccggaataaagaccatcgccttgattgcagttagagaaggtgttgtgcaactaggagctgttcacaag

SEQ ID NO: 224240 - DNA, 360 bp, Gossypium hirsutum
caaagctccaccgctaatccttcgataccgaaccatttgaagaacgaaaagcaatggcttgattcgagcaagcgccgcccggaaatgcgaaagctggggagaagatcttcaaaaccaagtgcgcgcagtgtcacaccgtagataaaggcgctggtcacaagcaagggccaaatttgaatgggcttttcgggaggcagtccggcacaactgcgggatactcttattccgctgctaacaaaaatatggctgtggtttggtcagagaacacattgtatgactacttgcttaatcctaagaagtatattcctgggacaaagatggttttccctggattgaagaagccgcaggatcgtgccgatc

SEQ ID NO: 224241 - DNA, 293 bp, Gossypium hirsutum
tttcatgggtacatctttccttttgcgtctgcttggaagctagcgaggaagatcattcggcggcagatacaggaccattgccatctctaccggtatacttatgacccttgaggtatactcccgtctcattttgccattatgaagaaagtctaaaggaaaaccaggtttaaccaacctacagagattggccataggcctagtgctatcaacgttgagaaaggcgggcggggcactagccgaaaagaaacaattggccgtggcgagaaccgtgggtgccaacacaacaacgctgg

SEQ ID NO: 224242 - DNA, 353 bp, Gossypium hirsutum
actctgtcgtatctctccttctaaaaccctacttatctcctcctcgcaaagccctagcccgttccttttttctttcatactaatcatccatggagttctggggtattgaagttaagtctgggcagcctattaaagcagatcctggtgctaactacgttatccatcttctccaggcttcacttggagagtccaaaaacaaagcagaatccgttccactctatgtgaaatgttgatggaaagaaacttattctgggaaccctttcccaccagatttgccctcaattatcttttgatttagaatttgacgaagagtttgagctctcccacaactggaaaaacgggagcgtatattt

SEQ ID NO: 224243 - DNA, 338 bp, Gossypium hirsutum
gttgttggaatgtgattttggggagagcaaatgtcattcaccaagcagcataatgcagatgtttcagagctccctcttctgcctacaacctcaaggagactcatatacgaggcgatctgcttttgactcaatgttggctggttgtattcctgtcttcttccatcctggctcggcatacacacagtacatttggcatcttcccaaaagttttaccacctattcagtgttcatcccagaagatgatatccgtaaaaggaatattagcatagaggagaggctcagtcaaatttctcctgagcaagtgaagatcatgagagagacagtcataaatctcattc

SEQ ID NO: 224244 - DNA, 229 bp, Gossypium hirsutum
gatttacggtgatggcaaaacaaagactttaatttccggcagccacaactgggttgatggaactcccacatttgctacagctactttcgctgcggcaggaaaaggattcattgcaaagagcattgggttcattaacacagctggtgcagcaaagcaccaagcagtggctatgcgggctggttctgatcactccgtattctaccgctgtgcatttgatgcctaccaagac

SEQ ID NO: 224245 - DNA, 293 bp, Gossypium hirsutum
cggacgcgtgggctgccaagaagctgaccctttaaaacgtaacagactacatggttgatggcatttgcaaacgtgctgaacttggttataactatggagttattctcattcctgaaggtcttattgacttcattcctgaggtccagcagcttattgctgaacttaatgaaattctggcacatgatgttgttgatgaaaatggcctatggaaaaagaaacttaccgatcaatctctgaagctttttgagttcttacctcaagcaattcaagaacaattgatgcttgaaagggat

SEQ ID NO: 224246 - DNA, 405 bp, Gossypium hirsutum
gtatcattcaaatcacgttggggggctgctgtttgtgcccagacacaacaaagtaaaaaggctacactgtggttaacagattgggctccggaaccccgtgatgtttattggcgaaatctggcaataccatttgtctctttgaccattcggaagctaattatatcattatcagtatttgccttggtatttttctacatgatacccatcgcatttgtgcaatctcttgcaaatttagagggtcttgaaagagttgctccctttcttaggccagttatagaactgaacttcatcaaaatcttcttgcaaggttttctttcccggccttgctcttaagatctttttgtatgttcttcctacaattttgatgatcatgtcaaaaattgagggacatattaccatattaac

SEQ ID NO: 224247 - DNA, 326 bp, Gossypium hirsutum
cccacgcgtccgcccattacttcattacattctcaagagaaatacccagagccaaaaaaatggccaaattattgctgttcattgcactatttgtggttccatgtcttgttagtgctacacgcatggtgaagaacccgttggtggttcaaggtcaagtttactgtgaccattgccgtgctgggtttgaaacaccaaagactagaaacatggctggtgccaaggttaaggtggtatgttccaaccggaagaccggtgatgtcgtgttcgagaaggaaggacacacggattcaaccggacaatacatgatcgctgtcttcgaagatcat

SEQ ID NO: 224248 - DNA, 360 bp, Gossypium hirsutum
cccacgcgtccgcgcttacgggaaagacgatcactctcgaggtcgagagctctgacacgatgcgacaacgtgaaagccaaaatccaagacaaggaaggcatcccgccagaccagcaacgtctcatcttcgccggaaagcaactcgaggacgggcggactttagccgattacaatatccagaaggaatcgactcttcatctggtcctgcgtcttcgaggtgggatgcagatcttcgtcaagactttgaccggtaagacgattactttagaagtggagagctcggatacgattgataacgtgaaagcgaagattcaggacaaagatagaattccaccagatcagcaaaggttgatttttgct

SEQ ID NO: 224249 - DNA, 350 bp, Gossypium hirsutum
cccacgcgtccgcccacgcgtccgcccacgcgtccgggacattataaggactccagcatgtccatctcgggctttgcctaggatattacgtggaggagatttctatgaggaacctgaagaagatgatgcacgagaatcaaaagaagtggcaaaggaaatcactaggcatatgcgtgaaaatcttatgggtcacaggagggatgaaacattactttcttctgtgttttccaatggttacaccggtgatgataggtcatgcaatagatctgaaaatgagtatcctgtggaaaacctcagtgattcagaagtcatgtcaccaacttctatacattcatgggattacatcaata

SEQ ID NO: 224250 - DNA, 429 bp, Gossypium hirsutum
gaccacgcgtcgatcgggaacacactttcatcaatttgtggtgccacctatcttgtccttcagaagagactgcgacttacggagatctggctgccatgagattgcctgatgatgttgaaggccttggaagttgtgagtacaccatggaaagaggagtagtgcacgcatgccatgcagggggcgtggttcatcagctagaaggctggacccatcacgaagttggggcaattgatgtcgatagaatcgatattgtctggaaagctgctctcaagcatggtttaaggccagtgtcaagcatgtaaaccagcaatgttccttatcataaattgtcatgaaacaaacaagaagcaaacaaaacaaagcagagaaaatgaatttcgaattttaaatattaatgttaatggccattttttacgattatcaagatac

SEQ ID NO: 224251 - DNA, 354 bp, Gossypium hirsutum
cccactcgtccgataactgtatggggatggtatggagggactcaaaaaagccaaaccggatactcttgtgggagccatggatgcttaacctgacaagcattatggatttcacgatatccgcaccaactacaactacaccaaaccaactctcgcatgcaatgctggtttggatggtgtacttgatgcattgtctgatgacaagttaactggaattgacatgtattccatattttctgcagttccaccaatgtttttcacactgtcaccaccttcagcaccttgaatgccattaatattcttttaagatcccttaaattgttccttttttgtgtgactttattcttattaattttg

SEQ ID NO: 224252 - DNA, 403 bp, Gossypium hirsutum
gctcaacgtgcccaaggccctgccaccgtgttggccatcggcacatcaaccccacctaagtgtgttgatcagagcacataccctgactactatttccatatcacaaatagtgagcacaagaccgagttgaaagagaaattcaagcgcatgtgtgaaaaatcgatgatcaagaagcgatacatgtaccttacagaagagattttgaaagagaatcccaatgtatgtgaatacatggctccttcactggatgctaggcaagatatggtggtagttgaggtgccaaagctaggcaaagaagcagccaccaaggccattaaggaatggggccagcccaagtccaagatcacccaccttgtcttttgcaccactagtggtgtggacatgcctggggctgactaccagc

SEQ ID NO: 224253 - DNA, 368 bp, Gossypium hirsutum
ctttctgtttctctggtttaaacatgggtatgggtttaaggtttcgatttcttttgattttatcttgagtaggtacactttccctctcagttttggggcgacctgccactttccttgaagattttagaatcacttggtctgattctcatattaggcaaatcgatggagggagagccatccaacttgttctcgaccaaaattcaggctgtggatttgcttctaaaaagcagtatttgttcggacgtgtcagcatgaaaatcaagctcatccccggcgactccgccggtacagtcaccgccttttatatgaattcttgtacagatgctgtgcgagatgacctaaacttcgagttcttgggaaaccgttcc

SEQ ID NO: 224254 - DNA, 290 bp, Gossypium hirsutum
ggccgacccacgcgggcgggagaattcagttttagaaggggatggaggatattgaacatcttttcgatcggaagtgacatgtggatggaggatcttttcagtcttgagctaatcatcacgacgagcatgagagggactttgtgttatgttgcgcctgagtacggtggatgtggctacttgatggagaaagccgatatttacagtttaagagttttgatccttgtgaatgtgtctggttagagaccattgcatgtgcttgcttcgcctattaagctcgaaaaggcaaactt

SEQ ID NO: 224255 - DNA, 370 bp, Gossypium hirsutum
aagtgctcgggttacctgtagggaagcacatatttttgtgtgccaccattggtgataagcgttgcatgcgagcctacaccccaactagtaacattgatgaaattggccactttgatctaatcggcaagatttacttcaaaagggtgcacccgaaattcccttacggtggcctcatgtcacaatatttggactttctccccctcggttcgtcactagacgtgaagggtcctttgggtcacatcgaatacaccggtcagggcaactttttggttcacggcaaacccaagtttgccaagaaactagcaatgttagccggtgggacagtgatcacccccatttatcaactcatccaagccattttaaaagaccc

SEQ ID NO: 224256 - DNA, 410 bp, Gossypium hirsutum
  unsure (1)..(410): unsure at all n locations
cccacgcgtccgatttgcaggcacgcataaagataatgctcccattgctacttctaattgattgaagaagagctctgaagtcaatggactaagcaaagatgttcagaagcttttgtggaaaaacaaaatgcgctttactaaagcggatgctgtagttaaatctcttggactggcggngcccaactggaaagtaaagaagctggtagataaggaggaagacgaagttggtttagatggttctcatgctgctgatgagaccaattgcaaaaaggtgcttgatgattcagttgactgttctgagtgtccttcaacatttccagcagcagttaatgctgaggaggcatgtgaaactgatgagttgagacccttgaagaaggccaagttactggttgatgaaaagtgctctgatg

SEQ ID NO: 224257 - DNA, 272 bp, Gossypium hirsutum
cccactcgtccgaggcaacactaactctggatttagttctggtttcaaggggtttggatgggggtccttgagaaggatggggctaaagtcaacgtggccgacttggtggggaagaccattctcttgtacttctcaacccattggtgcccaccatgccttgctttcacaccaagccattttgtagtttataacaatatcaaggaattatgtttatacatttgaagtgatttttatttcgagctacagggaccatatccttctttgttgacttt

SEQ ID NO: 224258 - DNA, 366 bp, Gossypium hirsutum
gcatttattagataaaaggtcgacgcgggctttgcccgttgctctgatgattcatgatggccccccaaaattaaagaaagatcaaaccgaccctttgcaattccaagacacaagaaccaagacacataccacgatggcaacaacgacggagaagcaagccatggttgttggaatcgacgacagcgagcacagtacgtacgcgctgcagtggatcctcgatcacttctttgctcctttcgcttccaatcctcctttcaagctcgtcatcgttcatgccaagccttctgcttcttctgctgttggtctcgccggacctggagctgctgatgtattgccctatgtggatgcggatttgaggaagatcgc

SEQ ID NO: 224259 - DNA, 405 bp, Gossypium hirsutum
aacaactttcagctgaaacagccgcttcctccaacatggctagagggttgaagaaacacgggaagaggctcaatgcccccaggcattggatgcttgacaagcttggtggtgcattcgcgccaaagccatcgtctggaccccacaagtcgagggaatgtttgccacttattctcattctgcgaaacagactgaagtatgctttgacatacagagaagtgattgctattcttatgcaaaggcatgttatggtagatgggaaggttaggactgataagacctaccctgctggttttatggatgttgtgtcaattcccaagacaaatgaagacttccgtctcctttatgacactaaaggtcgtttccgccttcatgccatcactggtgatgagactaagtttaagctct

SEQ ID NO: 224260 - DNA, 430 bp, Gossypium hirsutum
cgggggaccacgcgtccgttactttttatttttttcagagcctccttctccaaactccgctctgttcagcccgtgagcttttgagctttctctatggctaccatttccaagctctctaaccccaacccagtcgcttctctttcatcatcttccaaacccagatcttcttcatcgcttaaatgcttcgttgggttccctaccaggcctggtttctgctctaagctggtttcatcttctagcttgtcctcgataaacacccaccctttcaggggctccttggttgtcaggtgttctcttgctgatggaaacggtagttcagtgaagaggactactttgcatgatctgtatgaaaaagaagggcagagtccatggtatgacaaccttttgcaggccagtgaccgatttgctgccactgattgcaagtggggtt

SEQ ID NO: 224261 - DNA, 304 bp, Gossypium hirsutum
cacggtccctgtgtctctggtgcgcacaacactatagtgactgcaagagctgggaagagagcttgtgtccagtcttgtgtcaggtttgcttacaattggtcctcgctttggtggtgcaattgatgatgctgcacgatactttaaagatgcttacgataggggtcttacaccttatgaatttgttgaaagcatgaaaaagaagggcatccgtgtgcctggaattggtcacaggatcaagagaggggacaacagagataagagagtagagcttctccaactgtttgctcgcacaaatttcccatct

SEQ ID NO: 224262 - DNA, 385 bp, Gossypium hirsutum
ggtgcctgcagctgaagcaactattgaagctactgctcaagggattgcatgaatgctttgcgctcatggaccggaggtggaatggagaatatgtacaatatgggaagctgcttatggtctgattcccttgagctcttcagctgttgatcttccagaaattattgtttcaaccccattgcagcctcccatactatcatggaatctatacatacctcttcttaaggtgctcgaataccttccacgtggaagtccttctgaagcatgtctcatgaagatatttgtggcgactgtagaagctattcttcagagaacatttccacctgaatcccccagggagcaaaccagaaaaacaagatacagcataggttctggctcaaagaatctc

SEQ ID NO: 224263 - DNA, 403 bp, Gossypium hirsutum
caacgagttcattctgaattattatagagctaattggcctctcaaggaagctctctttagcatctttcgttggcataatgaaacacttaatgtttggacgcatttacttgggtttgttctatttttgggattaacaatggcgaatttgattgaagtcccacaagtatcggatctcgttgccttcttaaccagttcttttcctattagtggcgacagcaatgtttctcaagatcccttgctgggaacaacgacgaatctcgtcgatttaaagcaaataacggcttcggaacctgacgtttcgccggtgacgcggtggccgttctacgtattcttagccggctccatgttctgcctcctatcaagtagcatttgccacctcttttcgtgccactcgcaccatctg

SEQ ID NO: 224264 - DNA, 329 bp, Gossypium hirsutum
ggaccatcctgagttgtgatttttgaaacactatctgccgattatcctctgaactatttgggggtttccgcttcttaaatcagccaaaaaaaaacctacacctttatctctttgtgttgaaacgatcaaaagaaggaatgggttctgaaggatcaagcgtcgtctagcctaggaatttcagattgctacaagaactctagagaggtgaaaaagagaattggggatggaactgtccgctattgaaagcaccatgctgatgtcgtatacatgcaatcttgtactggctctatcattggcccccctaatactgctcatgaaggacgcatcta

SEQ ID NO: 224265 - DNA, 406 bp, Gossypium hirsutum
cccacgcgtccgtcaaaatcaaatccaaaatctctctgcgattttctccaaagggatcagcaattaggggggagaaatggggctgacattcacgaagctttttagccggctttttgctaagaaggagatgcggattttgatggtgggtcttgatgcagccggtaagactaccatcttgtacaagctcaagcttggagaaattgttaccaccattccaaccatcggatttaatgtggagactgtggaatataagaacatcagtttcactgtgtgggatgttggtggtcaggacaagattcgtccgttgtggaggcattacttccagaatacacagggtctcatcttcgtggttgacagcaacgacagagaccgtgttgttgaggctagggatgaattgcatagaatg

SEQ ID NO: 224266 - DNA, 389 bp, Gossypium hirsutum
cccacgcgtccgtttctttctaaatacttccatttttttgattttttttaagtgaaggaacagtgaaaagcaacaggaaatggcaaatatagatatcgatgggatcttgaaggagcttcccaatgatgggcgtatccctaaaaccaagatcgtttgtactttgggtccggcttcacggtccgtacctatgatagagaagctgttgagggctgggatgaacgttgctcgcttcaatttctctcatggcagtcatgagtatcatcaagagaccttggataatcttaggtctgctatgcacaacaccggcatcctttgcgcggtcatgcttgacaccaagggccctgagattcgaactggattcctgaaagatgggaaaagctgttcaactg

SEQ ID NO: 224267 - DNA, 444 bp, Gossypium hirsutum
  unsure (1)..(444): unsure at all n locations
ccggggcagacccacgcgtggcggccacgcgtcncggaaaaatggtgataagcagtgttcttgtccttatcagcagtgaaggtagttgagtggaactaggtgtcttcactcaagatggagatggcccaactacagcgacggggaacatttctggtcttaagcctggcctccatgggttccatgttcatgccctaggggacacaacaaatggttgcatgtcaacaggacctcacttcaatcctgctggaaaagagcatggtgctcctgaagatgtgaatcgccatgctggtgatctaggaaatgtcactagtggtgctgatggctctgcgagtttctctattgtcgacaaacagattcctctctctgggccacactccattattggaagagctgtcgttgtccatgctgatccggattaccttggcaagggggggcattagctta

SEQ ID NO: 224268 - DNA, 416 bp, Gossypium hirsutum
gccactcatacgctccctgctttgctctgaaacgtgcaagtctttctgcaacggcgaccgtctatccaactactgtgttggaagatgaacatccactatccgtagagttccacatcgatatagagatactgtggactattttggagactgcggagaccgcttttctccagcctgtaccatcatcataattcgctcaagatggtgaacctaccaagactatcaaggcccctgcaggcttggattctgtgctttacaatacgaacgccatctacacgatttcgagttctaaggcttttcgtatctctttcacggattctgcttgtaggggctgtggagtcacggtttacacgaagaaatacatctataccattgatgatgactgctttgatgctcaagatccatttgactatgacatc

SEQ ID NO: 224269 - DNA, 401 bp, Gossypium hirsutum
gtatcattcaaatcacgttggggggctgctgtttgtgcccatacacaacagagtgaaaaggctacactgtggttaacaaatggggctccggaaccccatgatgtttattggccaaatctgacaataccatttgtctctttgaccattcagaagctaattatatcattatcagtatttgccttgacttttttctacatgatacccatcgcatttgtgcaatctcttgcaaatttagagggtcttaaaagagttgctcccttccttatgccatttatagaactgaacttcatcaaatctttcttgcaaggttttcttcccagacttactcttaaaatctttttgtatgttcttcctacaattttgatgatcatgtcaaaaattgatggacatatatccatatt

SEQ ID NO: 224270 - DNA, 391 bp, Gossypium hirsutum
cggacgcgtgggtttcgacgtttctccctaaccctaagcctgtgccctcttcccattttgctcaattcgagttcacctccggcaccacttccaccaccacagcttccaccccgtggcagaccacgtgacatgagagaaaggagtagatcaccaatcaggggtgcacctccacccatttccaaaatcaaagatgcaaatcttatgagaaggccaaaaagaagttgacaatattagaggctccaaatattcttacaattgcattgaagagatttcagtccggtaaatttggaaagcttaacaaagcggttcggttccctgagtttttgatatcatgaatatacatgctctatggagtagtggtccatttggatatcatgaatgcagcattttc

SEQ ID NO: 224271 - DNA, 392 bp, Gossypium hirsutum
atttttctcagtttggttctttaaaagaaagaacattttttttctttttttgctttgctggtgtttggtggttgatctcttcttttgcttcttcatgttctcattttcatgtctaagcccatagagcatgattacataggtttatcagagcagcagctcccttcaatggagaaaagctctgataaaaaggatggtttacacttgaaagatactgagttgagactcggtttacccgggtccgagtcaccggagagggaggatcatgaccaaaacgtgctttcactgaagagttttgtgtcaggggcaaaaagaggtttttctgacgcactcgatggtggcggtaattgggttttctccggcggcaagggtggaggaactgaagagttgtttct

SEQ ID NO: 224272 - DNA, 414 bp, Gossypium hirsutum
  unsure (1)..(414): unsure at all n locations
cccacgcgtccgaccacatctgtcagctctaagagtatggttgggatgttcaacagttcgcagcttgatttatatcatcgtggcatgtgtgcttgcagctaaagacggagctaatgcaccaccccgagattatagcatacatggggaatcttctagcagaatttttacaactataggagcatctgcaaatcttgtgtttgcattcaatactggaatgctaccagaaatacaggcaacagtgaggcagcctgcagtgaagaacacgctgaaagctttgtactttcagttcaccatcggagttgtaccgatgtttgccattacccttatcggctactgagcttacggagcttcaacatncacatacttgcttaatagcgtaagcggtcactttggtgaaggcggctgctaacattt

SEQ ID NO: 224273 - DNA, 365 bp, Gossypium hirsutum
cggacgcgtgggcgcagagggagagagagagttgaaacgatttcgtttttggtgatagaaaacaaatggcggtttcatcatgttcatttactcttagccctagggtttgtaatccatattcttcatttgagtgccgtccagatcccgatttctccagtgcgccgatcggggacaagcctcgtcttgcctccagccgaagggtgacggcttcgtcgctttacgccggaggtatcagtagccgaggtttgtcttctctgatctttcgtttcccgccgaatttcgtgcgccagcttagcatcaatgctcgccgcaactttagcaatatcggtgttgcgcaaatagtcgctgctttcggggcgaatggt

SEQ ID NO: 224274 - DNA, 414 bp, Gossypium hirsutum
cggacgcgtgggctcggatcatcgctgttgatgtgaaccccagaagatttgaagaagctgggaggtttgggattacagaatttgtgaatccaaaagactacgacaagccagttcaagaggtgattgtggagatgaccggcggaggagtggatcgcagtgtggagtgtacagggagcgtccaagccatgatttccgcttttgaatgcgtccatgatggttggggtgtttgtgtgctggtgggtgtgccaaagaaagacgatgcattcaaaactcatccaatgaatctactaagtgagaggacccttaagggtgctttttattgcaactattaaccacgcactgatattcccatggttggtcgacatatatttgaacagggagctggggcttggatttggacaaagtcatcacaca

SEQ ID NO: 224275 - DNA, 406 bp, Gossypium hirsutum
gacgaagcttgtgctttatttcaccggagccaccaacattctctacactttcggcggacgagtgccgtcagcgtggaaattatgcatgcaatgtggaagcctcaaaaattcaagtacatatatttattggccacactttacgtttttacccttacacttccgtcagctgctgccgtttactgggccttcggtgacgaactcctcaaccattccaatgccttctctctcctccctaagaatggcttccgtgacgccgccgttatcttaatgcttattcaccagttcataacatttgggtttgcttgcacaccgctgtacttcgtgtgggagaaagtaatagggatgcatgacactaaaagcatttgtttgagggcattggcacggcttgccggggtgatcccgatat

SEQ ID NO: 224276 - DNA, 377 bp, Gossypium hirsutum
cttgcttatgcctcttatggttgcctgtcttattatggcagcatcaggtagcaacttccacaacgattttgacatcacatggggagatgggcgtggtaagattgttaacaatggcgaggttctcactctctccctcgataaacaatctggttctggtttccaatccaagaatgagtatctttttggcaagattgatatgcagctcaagcttgtccctggaaactctgccggcactgtcactgcatactatttatcatcaaaaggaacaacgcgggatgaaattgatttcgagttccttggaaatctaagtggtgacccttatattctacacacaaatgcgtttagtcaaggaaaaggcaacagagaacaacatttct

SEQ ID NO: 224277 - DNA, 403 bp, Gossypium hirsutum
agaagaaaaaggaaacaaaagatggcaattgagattcctagagtgaaacttggaactcaaggatttgaggtttgagattttgtttcctactagtttatattagttaagaaaatggcgttttcttttggggggtaaaatctattattttttggttgctgcaggtttcaaagctgggatttgggtgcatgagtcttacaggtcacgatcattcagtgtcagatgaagatggcatagccatcattaagcatgcagtcgaaagaggagtcactcacatcgatacagccgacctctatggacccaaaactaacgaaattctggtcggaaaggtatcctttcggcatctcttcaagttgaatcaaattgaaactgagagcgattctttcatgttctcaatttccaacac

SEQ ID NO: 224278 - DNA, 344 bp, Gossypium hirsutum
gcgcccacgcgtccgcccacgcgtccgcccacgcgtccgcaaagttcttgaatgctagtgttgggtttggtagatcttgttttcaaaaggatatattgaatttaatatatatatgtgaatgcaatggattagccgaagttgcaaattattggaaacaagtgattaaagtgaatgattatcaaaagaatcgatttgtaaatagggtggtctcgtcgatgttcaacacggtttccggcaagaaaattggtataatgggatttgcattcaaaaaagatacgggtgatacacgggagactccacctattgacgtattgaaaaggcttgtttgggggataaggctttgg

SEQ ID NO: 224279 - DNA, 412 bp, Gossypium hirsutum
gctggattctatccatttctcaatcaagaaagcatctaaactggtcaaagaaattggtaggcaggttgcgactgataagtgcattatggccttgttgtttcttattgtcattggtgtcatagccatcataatcgtgaagctggtgaatccaaacaacaaggacattcgagatattccaggtttagcaccacctgcaatgaacaggcggctactttggactcctaattgaagaatttgaatgaaccacctgatgatatttcgggactatttgcagccaccatgaattgaagagtccctactacttatacctcggggcccggggggctacccttgttggagaactggtatggtcctgcagttggattttattgttagaatagtcttgggcattcattaaaaaggttttaaaact

SEQ ID NO: 224280 - DNA, 382 bp, Gossypium hirsutum
gcatcaaatgatgagcagggcagaacgagtcctcctggcagtggaagaatgtatgttaggagggcgcaggatgttgtttctagcatgttggcgaaaggttctgccatacgacaatatgcagttaacaaagctaaggcttttgatgagaaacatcaattgagagccagtgcatctgccaaggtcatgtcgtttgaccggagagtcgggctgactgagaaactgactgtaggaatctcagtggttaatgagaaagtaaaatcagtggatcaaaggttgcaggtgtcggataaaacaatggctgcaatatttgcagcagagaggaaaatttatgacacgggatcagccgtcaaatctagcatgtacgtaactgctgggacagctt

SEQ ID NO: 224281 - DNA, 277 bp, Gossypium hirsutum
cccacgcatcctctcaggtaagtatattgagtttacgagagtttaaacttaaaaaaaaaagaattaatgggtgaaaagtgggcttaaactattttctttatatcattccaagttgggtcttcaaactggaacttcatgtgcaggaaccatggggcggtctgggacacaagcagagtcccaaatggagccctgcaattcacatttggggtgacatctgagtttgtttggaagagtattctggcaaaaagtgtgctttcagctgagtggataactggag

SEQ ID NO: 224282 - DNA, 259 bp, Gossypium hirsutum
tgctatcagaaaggtttttgagtgtctgtcgaatatagaaaggattgaaggcggtataggttggatattgtcaacatacattaccatatctgagatacagtcttttctagtctctggaggcttgaatgctaatgattttgatgctttcatctgcaatagcggtagtgatctcttctattcaactattaaccctgtagatggtccctttgtaattgacttctattttcactcacacattgagcaccgttggggtggggaa

SEQ ID NO: 224283 - DNA, 386 bp, Gossypium hirsutum
ggtcaagttaatgtttggatatttcggattctagttgtttagttggacaggtttgaattgtcaactttcttttatgatccaatataatcaaattataaatgagttcaagttgattgaatcaactttttgaattcaggtattttcccgaaggcatcgacatctacttcgagaacgtctggggtaaaatgttggatgctgtgattctcaacatgagagttcatggtcgcattgccgtctgcggaatgatctcacaatacaaccgtgatctacctgtaggggtacacaatctaatgtcgattgtttacaagagagttcgaattgaaggattcgcgacagttgattactatccacatttttcgaaattcttggactttatactgccttac

SEQ ID NO: 224284 - DNA, 344 bp, Gossypium hirsutum
ctcatgttggtggcatggatttgatgaaaaatggtggggtacactctcctgagcagatgggccacctttaccctggcaggaaccctatgatttcaatgccgacatctcttgattctcctaatgaacgtgttagaagcttctcacaccgtagaaatgaactgaattctagtaatgctgataagaaacaatatgaacttgacattgaccgcatcatacgtggggatgacagcagaacaacacttatgattaaaaacatacccaacaagttcacttcaaagatgcttctggcagccattgatgaacattgtcgaggaacttatgattttatttatttgccaattgac

SEQ ID NO: 224285 - DNA, 407 bp, Gossypium hirsutum
cggcggtccgggttcgttggccccaccgaacggagacgtcgggttggacggcatgatcagagtgatcgcccacgagttagccgagctctccacaaacccactggtgaacgcatggtacgccggagaggaccccaccgcaccgacggagataggagacctctgtgaagggttgtacggtaccggcggcggcggagggtacatcggtcaagtcatgagagaccagaaagggaaaacgtataacatgaacggcaacaaaggaaggaaattcatggtgcaatggatttggagccctgttttgaaagcttgtgctggtcccaatgctttggattaaatttaatattatttttctgggttttttttccattgaaatcatcagattcatttccatggaatcttgatttttgcat

SEQ ID NO: 224286 - DNA, 364 bp, Gossypium hirsutum
gtaggtcaactacaacaagcgctttcttcttcctctgcctttactcttcgggttatctcgctgcttcaacaactcctctcttccccaaagacgccctccccaccaaatctggctaccttcctgtcaaccacgccactggttctgctattttttatgccttctatgaagctcaaacccccacttcccctctctccaaaaccccacttctcatttggctccaaggtggccctggatgctcctccatgattggcaacttgtttgagctcggaccatggcgtgttgtctcttctcacatgaaaaacgctcataatttgactcttgagcgcaatccatgttcttggaaccgcttatttggtcttctttt

SEQ ID NO: 224287 - DNA, 385 bp, Gossypium hirsutum
gccgccggcattcctggcatcaactttggccttgcaagcggactaccaggcaagtgcggtgtcaacatcccttacaagatcagccctagcactgactgcagcagcgtcaagtgaaattttggcatggaattttcatcagctagtggaagccaaaataatgatagctacagaataaaaatggatgtttaaaatccatccgtagggatagcagaggagttatcctaattttagagttgtgcgttgtgtactaggtcgctttttgcgactatgtaatactatctttatctacaaattaatatcactcataaaaaaaaaaaaaaaataaaaaaaaaaatataattatttagcattttataaaaattatataaattaagtgggggcggcc

SEQ ID NO: 224288 - DNA, 313 bp, Gossypium hirsutum
ggttgggttagagctgattcgtaaggtttgcagaacaaatcgtcgggagaaagggaagtagataaagattattatatctttactaaaagccccctcaactgcagttacttatgaatgtgctggcacccatgtttctatgtgaagtgctcctactgctattagagctgctgcaaacacttattgtcaggtttttgtttcttacagcgattacaatgtgcagcttattgtgctagatctgacgaatgagcccaaagcttttcatcgagataataacgctgattcgatcatagatgtgcttagggcactttcaagt

SEQ ID NO: 224289 - DNA, 379 bp, Gossypium hirsutum
gttttgcattacttcgttttggtttttttgctttgctctgaaactccaagctctcatcagtggcggatccagcgactatctcaccagccacgctgttgaaagatgagcttgacatcgtgattcccaccattaggaacttggatttcttggagatgtggagaccctttttccaaccttaccatctcatcatagttcaagatggcgatccttcaaaggccatcaaggttcctgaaggctttgattacgagctttacaacaggaacgatatcaataggattttgggtcctaaagcttcttgcatctctttcaaggactctgcttgtcggtgctttggatacatggtttccaagaagaagtacatctataccattgacgacga

SEQ ID NO: 224290 - DNA, 403 bp, Gossypium hirsutum
  unsure (1)..(403): unsure at all n locations
cccacccttccaaacctttttcattttccaaactaaaaccaaacaaccagctcaaagcttgcggccatggccttccgccttagcaacaatcttgttggaatcctcaacttcataaccttcctcctctcgatccccatcctcggagccggcatctggcttagtcgagaaggcgtgacggaatgcgaacggtttttggacaagcccgttatcgtaatcggagtcttcctcatgctcgtctcacttgcgggactaatcggcgcgtgctgtcgcgtcacttggctactctggctatacctagtcgtcatgttcctcctcatcgtgctcngcatcgtcttcaccatctttgctttcgcggtgacgaataaaggtgctggagaagctttgtctgggaaagggtacaagg

SEQ ID NO: 224291 - DNA, 396 bp, Gossypium hirsutum
gggttctctctggattccctattttccaaatcggtattgttagggatttgacgcggatgcggatcgggtaacgaaccggaagatgatagacaattgcttgggagctcaaagatctagaaagatccagagaactctccgtcattgcaaggtcaccatcctctgcctcgtcctcaccgtcgtcgtcttacgtggcactatcggagccggtaaattcgggactccgggccaggacttcgtcgagatccgggaccacctctattcccggaaacaaggcgaaccgcatcgcgtcctcaaagaagtccaaacgacgtcgtcagataaccacgactgcgccgacaccaacgccggcaccaataactacaacgagttcgacataaataagatcttaatcgacga

SEQ ID NO: 224292 - DNA, 388 bp, Gossypium hirsutum
ggaaacccggcgggacgccacgcgttcgaatggttttttatatcaaacccatatccattttatgaccattacccatcaatcaagacatggcatgctctggattattgtttccaaaggaatcccatccataaacttaagagacccaaaggccaaaacgttgataattcaagcttgccaggagtttgggttcttcaagctgcttaaccatggcgttcctattgaaaccatagccagattagaagccgaagctcttaacttctttaatcttccccggtctgtgaaagacaaagccggtcctgccaacccctttggttactgcactaaacggattggacccaatggagaattgcgattgattgaatatctccttattaaacaccgtcaaaac

SEQ ID NO: 224293 - DNA, 412 bp, Gossypium hirsutum
  unsure (1)..(412): unsure at all n locations
tacaatgtcatggtaattgaccttcttggacctagcttggaagatttgtttaactactgcaacaggaagctctcgttaaaaacagtgttgatgcttgctgatcaattaattagtagagtagaatatatgcattcgagaggttttcttcaccgtatataaagcctgataacttcttgatgggcctagggcgcaaggcaaatcaagtatatatcatcgactatggtcttgctaagaagtatagggatcttcaaactcataaacatatcccatacagagaaaacaagaacctaacaggcacagctcgctatgcaagtgtaaacactcaccttggaattgagcaaagccggagagatgatgtggaatccattggttatgtgctcttgtatntcctgagaggaagcctttcttggca

SEQ ID NO: 224294 - DNA, 415 bp, Gossypium hirsutum
  unsure (1)..(415): unsure at all n locations
catcaccaaacttacatcactaactataacatgtgtctttggagcagctccatgacgcggtggataaaggtgattcttccaccgtcnttaatttgcaaagcgccatcaagttcaacggcggaggtcatatcaaccactcaattttttggaagaatcttgcccctattagtgaaggaggaggtgtgcctccacatggttctttgggttgggccattgataccaactttggttcattggaattattgattcagaagatgaatgccgagggtgctgttttgcatggctctatttgggtgtggcttggactgggcatggatttaaagattcttgtggtttaaaccacttcataatattatccacttgtgacctactgtccatatttagtttcctcgcttgtgatacatgttttgttgca

SEQ ID NO: 224295 - DNA, 226 bp, Gossypium hirsutum
gactttctcagtcttcccatctcctaaggtctttgatacagttgtggagccttacaatgggactttgtctgttcaccaattggttgaaaatgctgatgagtgtatggttctggacaatgaggccttgtatgacatctgtttccgcacacttaagctaaccactttcagctgtaagctctaacctggatctatgttttttgtttggccaagatttttgctaaaagtt

SEQ ID NO: 224296 - DNA, 413 bp, Gossypium hirsutum
aatccgaacctgttgcaataaaaggcccctatggtctttaatctttgacctttttgagatatggcaacctacttttggttgctggtggaattgggataacaccatttcttagcatactgcatgaaattgctgcaactcaagggaatggcagtagcagatatagattaccatccagaatccagttgatatacgttgtcaagaaatcacaatacattggcttgttaaaatcagtttcttccctactgcagaaccacccctcaaacaaatgtcatctgaaactaaaagtttttgtcacccaggaaaagcagtgtggtgcaacactaggagaaatgcttaatgaggcatctcaagtgcaatgggttcatttcggcttaaaaggtccaatttactcaatacatggaccacaaagcttg

SEQ ID NO: 224297 - DNA, 411 bp, Gossypium hirsutum
gaaaaagaacccagtcttctgatctctgtcccaaagcaaaaaagttctcatcttgtgggaggcacagctactgcttatttattttcatggctcaaggagattctaacttccagcaagacatggctaaagaggaagaagaacagaggctgaaatacttggaattcgtgcaagtagccgccgttcacgccgctttgtgcttcaccaacctttacctttacgctaaggaaagatcggggccgttgaaacctagcgtcgagaccgttgagggaacggttaagtgcgtggttggaccggtttatgataaataccatgatgtccctgttgaattccttaaattcgttgattccaaggcgggtgaattcatgaccaagcttgttccgctagtcccttcattcatcaaacaggtcttaa

SEQ ID NO: 224298 - DNA, 413 bp, Gossypium hirsutum
  unsure (1)..(413): unsure at all n locations
cggacgcgtggccggacccgtggaaaaacccttggcataatcctaatcccaacactaacggcacgaatcgttcacaagggaaccgtaagaagcgttctcccaacacctcccctccttctcgtcccaccgtcggtcgccccaaagctccggccaagaatctcgtcatgggtcaagtcaagatcctcaaacgcggcgaagatcttaaacaatctaagccggataagcatgtgaggttcgcgaaggaaaatgttgatgtagatctggtttccaccgactgtttgggtccagatcccgggtccgtcccgacccagatccgactcaccgagtcagaaaacaacggaagtaaggttctcccggtctcgttctacgctgggtctgcctntataacatctccccctccaagttctgttccg

SEQ ID NO: 224299 - DNA, 413 bp, Gossypium hirsutum
aaatttcaatcccaattcccctttgcatggcaaaagagttgatatttttcttggtttttgttgttttttcatcgaacccagttttttctcacttcatcttcaacgggtttcatgattcatgcgaccaaatgagcttaaatggagttgcagacattacaaagaatgggttactccgtttaaccaatattagccaacgtgcaattggcagagctttttactcatctccttttcagttcaagaactccagcaatggcaaagctttttctttttcaacagcttttgctttcgccatggctcctgcgtacccaacccttggcggccatggccttgcttttgttctttctccttcaaaagaaattgcaggttatcacagtcaatatctaggcttgcttaatccaagtaatcatcatggg

SEQ ID NO: 224300 - DNA, 315 bp, Gossypium hirsutum
agaaggttcagagattttagagagaacaaacatcaatggctgctacatctggggctgtacgagatggattaggctcttcatttctttgtgggggaaagaggagccaagcccttttgggtgccagcattggggccaaaggctcgccctcccctactgctggaactagaaagtttatcgttgtggcagtcgtcgcacctaaaaagtcttggatccctgttgttagaggtggtggctacttcattcgtccctgattggctctgctgatcgctccctggagactacggatttgacccactattgttttggaaaagaccc

SEQ ID NO: 224301 - DNA, 305 bp, Gossypium hirsutum
caagaacatatggcagcatgtggttcgaaagaggaagaatgagtggaaggagtttgagcggtcaggaagtgtagaagaaggggaccggcagcctaaacaatctgacgatgcttattactcgtccttggcttatgaaaggaacttgaaaggcttaaaaaaaagaggaaagatgaggaagaggaaaccgatgagagggatgatacttctacgctgaaaaagccgagggttgtgtggtctgtcgagctccatcaacaatttgttgcagcggttaatcaactaggcattgataaagctgttccgaaaaa

SEQ ID NO: 224302 - DNA, 415 bp, Gossypium hirsutum
cccacccttccggttcttttgccgccgaattttttttcagagatttgttttttttcgctggttgcgatatggggaagatcaagatcggaatcaacggatttggaaggatcggccgtttggttgccagagttgctctccaaagtgaagatgttgagctcgttgctgttaacgatcctttcatcaccaccgattacatgacctacatgtttaagtatgacagtgttcacggtcaatggaagcaccatgagcttaaggtgaaggactcaaaaacccttctctttggtgaaaagcctgtcactgttttcggcatcagaaaccctgaagaaatcccttggggtgagactggagctgattatgtcgttgagtctactggtgttttcactgacaaggacaaagctgcttgcccattgaaggg

SEQ ID NO: 224303 - DNA, 406 bp, Gossypium hirsutum
ggtgcatagagcttgtgcagaaagagaaattcttgatatgttggaccacccttttcttccagcattatatgcatcatttcagaccaaaacacatatttgtttgattacggattactgtcctggtggtgaacttttcatgcttttggacaggcaaccaacgaaggtcatgaaggaagatgcagtaagattttatgctgcagaggtggttgttgcattggagtaccttcactgtcaaggttggttaaactcaaatataccaacaaatctgatagtattaattaagtgatcgatcaattctttcagtgattatgtttctcttcttacagggattatatacagagatttgaagcctgaaaatgttctacttcaggacaatgggcatgtagccttgaccgattttgattta

SEQ ID NO: 224304 - DNA, 414 bp, Gossypium hirsutum
gaaaatacttgtgagtcaaaatattcacaagactgcgattcctttcatcaacaaggggtggaaacctgctgatatgctagaatctgaaaaactcgaaaaaggaatacaagattgtgtgatggagatgattaagaaaagagaagacaaagttgtgagtggagaagctgatagcttcggcactgattttctgggattactagtaaatgcttatcatgatttggacgataaaaacagggtttcattggaagacttggtaggtgaatgcaaaacaatctactatgctggacgggaaaatgttaattcattgcttgcatggatagacttgcatttggcaatccatggagattggcaagaaaaagcgagaagagaggtgattgacatatttgtgaaccaaaatccgtatcttgaaggcat

SEQ ID NO: 224305 - DNA, 406 bp, Gossypium hirsutum
cggacccgtggccggacccttgggtggaactgttggtcgtggaggattgggcaagctttgcatgcgaggaagcaattccagtcgtggagtgactactgttggcctgagggccatttctcgtgggtgtccttctctaagggttctttccttgtggaatttggctactgttggagatgacggtctttgtgagattgctgagggatgtcaccagctacagaagcttgacctttgccactgtcctgctattactaatgagtctttgcttgcccttgcaaagggctgccctgatttgactgatctgaccattgaaggttgtgcaaacattggaaatgaaggtatccaagcaatagctcgctgctgtcccaacctaaagtctgtttcgatcaaagattgcgcccttcttgga

SEQ ID NO: 224306 - DNA, 417 bp, Gossypium hirsutum
cagctttcgatcaatggcaaccctgacaacctcacactttgtttcgacaagttctcatttgaggagccatggagcagacactaaggccaatcttgcacaggttggtgccaggaatcaagccatgactcacaatggtttgcggtctttgaacaaggtcgataggttgcggatgaggaccaccaacgcaaaggctgtcgttacgaaagctatgaaacaggcagattacaggcctttgggaaaaattatttgcggaatagggatgaatatagtgtttgtgtcagctgagtgtggcccctggagcaaaactggtggactcggtgatgtcctcggtggacttccttccgcaatggctgcctaaggacaccgtgttatgacagtgtgtcctcgctatgatcagtacaaggatgcatgggacac

SEQ ID NO: 224307 - DNA, 422 bp, Gossypium hirsutum
  unsure (1)..(422): unsure at all n locations
gccaacaaccccttaattcccgcaaaaatggcccgccgtcccgcccgttgttaccgttcgggcaggaccaagccgtaccccaagtcgaggtccaaccgcggtgtccccgaccccaagatccgcatcttcgatcttggccgcaagcgcgccaacgttgacgacttccctctctgcatccacctcgtctccaacgagtatgagcagctgagttccgaggccctcgaggccgcccgtatttgcgccaacaagtacctcgtcaagacctccggcaaggacaagcttcacctccgcgtncgcgctcaccccttccacgtcgtccgcatcaacaagatgttgtcctgcgccggtgccgatagactgcagaccggtatgcgtggtgcctggggcaagcccaacggcactgtcgcccgtgtcaacattgg

SEQ ID NO: 224308 - DNA, 411 bp, Gossypium hirsutum
ggcctcctctgtttattcgcttcagctcattacttcccgtgctctctcgtcctccggcggcaaatcaaaatgtctctggtggcgaacgaagactttcagcacattttgcgtgtactgaacaccaacgttgatggaaagcagaagattatgtttgctttgacctccatcaagggtattggaaggcgtttcgctaacattgtttgcaagaaggctgatgtcgacatgaacaagagggctggtgaattgactgcacaggagctggacaatctcatgaccattgttgcaaaccccaggcagtttaagatacctgactggtttttgaataggcagaaggattacaaggatgggaagtattcccaagttgtgtctaatgctctcgacatgaagttgagagatgacttggagcgattg

SEQ ID NO: 224309 - DNA, 428 bp, Gossypium hirsutum
ccacgcgtccgttatattcaattttttaagtttcttccttaaaccacccaaagcttttaatcgcagctttggtggaaaacagacttctttttatatataaaaatgagacgaaactgcaacttggaacttcgtcttcttccttctagttatcccagcgacagtcacgacatgatggaagcaagaattgaaagcccagaaacccagcagcaacagctaacaattttctacaatggaagagtttgcgtatctgatgttacagagcttcaggcaaaagccattctaatattagcaaaccgggaaagagatgaaagaatgaaaagtccgacgggatgtgaaccggtgtcgccgacgttaaaatcccaggtgaatagcccaaacacatcactttccatgaagagatcgcttcaacggttcctccagaaacgaaa

SEQ ID NO: 224310 - DNA, 416 bp, Gossypium hirsutum
cccacgcgtccggttttgtatttcatactcatttagcccctttcattagcatcgaaatcagctccagttttctttatcactgaaaaatgtcttgctgtggtggaaactgtggctgcggttctggctgcaagtgtggcagtggctgtggaggatgcaagatgtacccagacctgaacgttgccgagatgaccacaactgagactctggttcttggtgtagcaccccagaaagcacactttgagggagctgagatggaattcggggctgagaacggctgcaagtgtggagacaactgcacctgcaacccttgcaattgtaaatgattagagaccaaagccaaagctccctggaagcagagacgcctttgtctttaagaaataatatgttttgttgtttatgtgtttttagaataaagt

SEQ ID NO: 224311 - DNA, 394 bp, Gossypium hirsutum
ctcgtgtacatcgcgtggctttcctatcttcattttttcgcactctccgacgaaagaaaccaggggaaaatgaccaagtgttacccaaccgttagcgaggagtaccaaaacgccgttcaaaaggctaagaggaagctaagaggtctcatcgctgagaagaactgtgctccactcatgctccgtctagcgtggcactcagctggaacttttgatgtcaagaccaagaccggaggtccattcggaaccatgaagcaacctgctgagctcgctcatgctgctaacaacggtctcgatattgcagtcaggcttctcgagccgatcaaggagcagttccctatcctttcatacgctgacttctatcagctttgctggtgttgtagctgttgagatcacc

SEQ ID NO: 224312 - DNA, 418 bp, Gossypium hirsutum
gccgtttcttcctttacctcttccgaatccgttttttccaccctcaaaggacatcagtaggcgggcgcggctaccgctggcttcgtaacgcccaccagtgttttgccccaaacatcaggtgactggtccgattttcccgctaatttttatctagaactttgtcaggcgtttaaaatgttagacaaagataacgacggggttatatcaagaagcgagctcgaggctctgcttggcaaggtcgcaaggcagccgcccagccgggacgaggtttccttgatgttgagcgaaatggactgtgacggcgacggctacatcaacctggaaacgttgatgaaccaggtggttggaccggcttgcgacgaacccgcctgcgaaccggaactgagggagacttttgatatatttgacacggatcatg

SEQ ID NO: 224313 - DNA, 414 bp, Gossypium hirsutum
cccacgcgtccgctaagacaaagtttcaagtcattcacatgctttgtttaatttttgtctgaacatcaaatatttttcccaggttttcttcaatctgcatgcgaaaaagaaacatggggttctctaaactgtttgttataattcttgggttgctcttagctctcaccctggatcagtgcactgctcaagaattcagatgtagctccccgagttcatgccgtgcacttgtcgggtacatcaccgtcaacaacaccaaccttggcgctatccaatcgcttttcaacgtcacgagcttccagagtctcctcggagccaacgacttgcctctttccactccgcgcaaccgcaccatagctgcacgacatctcatcagagtccccatcaattgtgcttgttacaacggaaccgggactt

SEQ ID NO: 224314 - DNA, 412 bp, Gossypium hirsutum
tgcttatttttagggttcattttttcttcttttaataacctaaatttcatttctccatcccaaaaatccttggatcaggtccgagcttgtggttgttaggcctctttgatcaactaagtttcatgtctgatctcgacgtccaaattcccactgcctttgatccctttgccgatgcaaatgctgaggactcaggtgcgggtgcaaaggactatgtgcacattcgtgttcagcaacggaacggtaggaaaagcctgacaactgtccaggggttgaagaaagaattcagctacaacaagatactcaaagacctcaaaaaggagttttgctgcaatggcaccgtggtccaagaccctgaattaggccaggttattcaacttcaaggtgaccagcgtaagaacgtatctaccttcct

SEQ ID NO: 224315 - DNA, 417 bp, Gossypium hirsutum
tgaaaataacttacaagcgctcactggagtaaccttgggtgaaggcacaggtgcagcaatgtcagacgatgaggatgaacttcaaatggacttctccatggatcaatctgggcccgaaggccatgatttaatgggttttggtcccttacttcccacagaatctgaaagatctttaatggagagggttcgtcaagagctcaagattgaactcaaacagggtttcaaatcaagaattgaggatgtgagggaggaaatattacgcaaaagaagggctggaaaattaccaggtgacaccactacagtgctcaagaactggtggcaacagcactcaaagtggccatacccaactgaagatgacaaggccaaacttgtggaggaaactggattgcaactaaagcaaatcaacaactggttcat

SEQ ID NO: 224316 - DNA, 427 bp, Gossypium hirsutum
caatgccggtggggttaccataacctctctgtagttgaagatgtagttgagaattacaggaaggcccaaatcccacggtgatgtgatctggaatgatgatgatcatatggatggccataaggacttcaccctcaaccccgtaaactaccctcgtccgaagcttcttgcattcctggacaaaatacatagcagaggcatgaaatacattgtcatcattgatcctggaattggtgttaattccagttatggtgtataccaaagaggcatcgccaacgatgtatttatcaagtatgacggtgagccttacttggcccaagtgtggccccggggctgttaatttccccgacttcctcaaccctaatactgttgcatggtggggtgatgaagtcagacgtttccatgaacttgtccctgttgatgggctctg

SEQ ID NO: 224317 - DNA, 398 bp, Gossypium hirsutum
ttcttgtggtgcctagtacagggacagccagcatacttgtcaatgcgccttttgggatgaagcggctctgaaggcttggccacccattctgtccaagaatcggaacaatgggcttgggagactttcaattcactccctatgctcatggatgcatactcagaccaagaaagatcacagctggcactaatccaaaggttccttgctggggtgttcagtcttagtgagcatcatccatatcaatcaccaccccgctgtacggattcatatgtggatgccatgaaggaccttcgtcagctttcttggctcgagagatttgtctctgtaataagtgacaactactacgaagactatatccaatgaagctgtgtagatgattccaatgttaggtaataagttgc

SEQ ID NO: 224318 - DNA, 377 bp, Gossypium hirsutum
ctcacacttacgctaaaattcaagacaaggaatgcttccaaccagacaactaccgcgtaagcttggtcgaaaaccagctcgcggacggccataccttgatcgattacaacattcacaaggaatttaccctccaccttgtcctgcgtcttcatgggggtatgcagatcttaaccaaaacctaaaccggcatgaccatcaccctctaagtcgagagctctgacaccatcgataatgtgcaggctaagattcgagtcaaggcaggcctgccaccagaccagtagcgtgttatatacgtcggaaaacagcttgaggacggccgttccatgatcgattacgacatccaaatggaattcaccctacaccttgtcttacgtatt

SEQ ID NO: 224319 - DNA, 412 bp, Gossypium hirsutum
ggcttagtgggttatgctgtgatgaaaactgttcaccttataatgaatctgtaggcgatggactcagagctttgctaactccaaaacttgccagcatgttgagagatcatgtaccaaaagacctactgtcgaagctgaatacaaacctagagtcaccagagataatctggaactcttcaactcgagcagaattgctgaaatttgtggaccatcaaagatctagccaatgcccagatggttcgtatgacctgaaagattcttatgtctttgcctatgaagcactgtcaaaggaactttttgttggcaatgtgtatttgatggtttataatgatcaacctgactttgagatctgtgaaccagaagcatttctgtgtggctttaattgactttatagcttttctagtgcacaatc

SEQ ID NO: 224320 - DNA, 410 bp, Gossypium hirsutum
aaactggcctaactttggagataattttggatctgaaacagagagagagagtatgaatcggcaccacgatccaaaccctttcgatgaagaagaagtcaatccattttcgaatggtggttctgtcgcacctgcacgaccactggcatccgaacctttgggttttgggcagaaacatgatgctactgtggatatacctctggattcaatgaatgattctaagaaaagagaaaaggagctcgcagcttgggaagctgatcttaaaagaagggaaaaggatataaagagaagagaagatgctgtttcccaagctggtgtttctgtagatgataaaaattggccaccaattttcccgattatacatcatgatatagctaatgagataccggttcatgctcagaggctgcaatatc

SEQ ID NO: 224321 - DNA, 417 bp, Gossypium hirsutum
aacagaaataatgtccaaagatcactggcctcgtgtattcaggtgcaatggacatattatgctgagattcatagaagatgtccaagtctactggaaatttcaggacattgcgccaggcaattgaggaattctctgctgatgctactagattctctctagctgatgctggggatggcgtggatgatgcaaactttgtgtttgagacagccaatactgcaattttgcgccttacaaaagagattgcatggatggaagagattctggctgcagaatcgtcgttgaggataggtcccccatctacctatgctgatcgggtttttgaaaatgagataaacatcgctgtcaagatgactgagaagaattatcgagattatatgtttcgagaggctctcaaaactggcttttatgatcttcaat

SEQ ID NO: 224322 - DNA, 407 bp, Gossypium hirsutum
cccacgcgtccgcggacgcgtggggaaaaatgaagaaagtagagctgatattcgttccaacaccaggagccggccacttggcctcaactgttgaattcgtaaagcgtctcatccatcacgatgatcgaattttggttactattctttccattgagtggaattcttcgggtttcgccgatgcctactccgaatggcttgctacttcgcaacctgatcgaatccagctaattcagctttctccggtagatcctcccccgttacatctttggacattggcacccgaagcttttatgtatgcattaattcagagctacatccctcatgttagaaatgctgtcacaaatattttgtctatgaaatccacttcggactcaacccgagttgcaggcttagttcttgatctgttt

SEQ ID NO: 224323 - DNA, 398 bp, Gossypium hirsutum
accttctcctctaattattgttttgctttttatatttattgtaaatacattttttaaaatttacctttggttggtgggaagggtaaatttttttggcttataaatatcgacgcctgtgccaattggcatcccagcaaaacaaagcatcaaaaccccaagagtttcacctcaacaaaacacctacaaagcaaatatgccaattgagagctcttccactaatggcccaaccgtctgtgtcaccggtgccggtggcttcatcgcctcctggattgtcaagcttcttcttgaaaaaggttacactgtcaagggcactgtaaggaacccagacgatcccaagaattgtcattttagagagcttgaaggagcaaaggagaggctatctcttcacatagcttacc

SEQ ID NO: 224324 - DNA, 416 bp, Gossypium hirsutum
cccacgcgtccgcccacgcgtccggttttaagctgcaattcgaaaccccccagggaaaaaggaagggaaaaacacatccaaagaacccaagtcctgccctattgcatgcctttaaatttgatttcatggatgtaacaagcacaccggatagaaaagaaatggatcggatcaaaggtccatggagccccgaagaagatgagttgctccagcagctggtacagaaacatggccccagaaactggtcttcgatcagcaaatcaatccccggccgatccgtgaaatcctgtcggctccgatggtgcaatcaactgtcaccgcaagttgagcaccgtgcctttaccctggaagaagacgagaccatcatccgagcacatgccagggttcggtaacaagtgggccaccatagcccgactctt

SEQ ID NO: 224325 - DNA, 411 bp, Gossypium hirsutum
cccacgcgtccgcgaattacaaggaatgggttttgagagaggatggggagatactgcagcgcatgttctggagacgatgcatcttctcttggacatccttcaggcacctgatccctctatattagagacattccttgggagagtgcctatggtgtttaatgttgtcattctgtctccacatggatacttcgggcaagcaaatgtattaggtttgcctgacactggtggtcaggttgtttatatactggaccaagtgcgagccttagagaatgaaatgcttctaaggataaagaggcaaggacttgatattacttccagaattcttattgtgaccaggttaatacctgatgcgaaaggaactagttgcaatcaacggctggaaagagtcagtgggacagagcatactcatat

SEQ ID NO: 224326 - DNA, 407 bp, Gossypium hirsutum
gagggcttaaagcgaggcgctaggcgagagctagagtgagaggcggaaaagggaggaatgggagcctgggctatcgctgttcatggtggcgctggtgtcgaccctaatctccctaaggaaagacaagacgaggctaagagactcctcactcgttgccttgatattggcatctctgctctccgctctaatgtccccgccattgacgtcgttgaacttgttgtgagagaactggaaacagacccgctgttcaactccgggcgtgggtctgctcttacggagaaaggaacagtagaaatggaagccagcattatggacgggcctaaaaggagatgcggtgccgtttctggcttaaccacggttaagaacccaatcttcctcgcccgtctcgtcatggagaaatcaccgca

SEQ ID NO: 224327 - DNA, 406 bp, Gossypium hirsutum
cattcttgaagcttctgtagagttacttcccttgtacttcaattcagaccagggaagtaagtcgatcaattgttccgactatggctggggagaacagggtgccaaaactcctgaaatatcatccattcttgaagcttctgtagagggtgatgagtttcttgaggatgctaaccctagcaagaagctgaaaccaagttccgacaatgttatgcctgccgaagacaactccgcgaagaccttgtcggacgagctgttggctttggacaaccagatgaaatacttccaaatgccgccatttattgaaggaaactgggacgccactattgatgctttcctcaatggagatgcaacacaggatggtggaaacccgatggatctttggaactttgatgatttccctaccatg

SEQ ID NO: 224328 - DNA, 413 bp, Gossypium hirsutum
gcaatttttataccacagaaatcagttggtagagttatgttgcccaaattagctgtcaagtttgagaggtacttgatgggggaggtacgatgacaatcccttaaacacctttttccctttttcaaatgaatgcttgagatgtcttaattcattttatgatttcaacttcagttagtttcggtcggtgctgaagtaggaaaagtggagcttggaaagaaggttcttttctcggatataaatgcttatgaggtggatttgggaatagatactaggcacgtgttttgtaaagagtttgacttgttaattgaagttgattgaagtttcttctggtcttttgttttaagatgaagaatcaattgtatttcaaaattgagcagtaattgtatttcaaaattgagcagttcttacttaca

SEQ ID NO: 224329 - DNA, 370 bp, Gossypium hirsutum
gtgtaacttgatcggtcctacaccgcacactttacaagaacttcaagatacaactgtggggtctcttttatctgcactgatgcaacactgcgatccacctcagaggcggtttcctttagagaaaggtgttcctccgccgtggtggcctacgggaaccgaggaatggtggccgcaactcgggttacccaaagatcaaggccctccttcttataagaaaccccatgatttgaaaaaggcttggaaaggtcggggttcttacagccgtaatcaagcatatctcacctgatattgcgaagatccgaaagctcgtacgacagtctaagtgcttacaggacaagatgactgcaaaagaaagcgcaacttggctcgc

SEQ ID NO: 224330 - DNA, 351 bp, Gossypium hirsutum
  unsure (1)..(351): unsure at all n locations
cgcccacgcgtnccgctcttcatggttgatgctatcgatgagtatgcagttggtcagctcaaggaatttgagggcaaaaagcttgtgtctgcaaccaaagaaggtttgaaacttgacgagagcgaagatgagaagaaaaagaaggaagctttgaaggaaaagttcgagggtctctgcaaggttatcaaggatgtattaagtgacaaggttgaaaaggttatagtatctgaccgtgtggttgattctccttgctgtttggtcactggcgagtatggttggactgccaacatggagagaatcatgaaggcccaagctttgagggataacagtatggcaggatacatgtcaagc

SEQ ID NO: 224331 - DNA, 380 bp, Gossypium hirsutum
ggaaaaacaaaagcctcttccttagctaactgtctaagcggctactttataccgcatctgagccatgatcatcccagaaaagaaccgccgcgagatctccaagtacctcttccaagagggcgtttgctatgcgaagaaagactataatttggcgaagcaccctgaaattgatgttccaaatcttcaagtaataaagctgatgcaaagcttcaagtcaaaggaatacgtgcgtgaaacttttgcttggatgcattactattggtaccttacaaatgatggcattgagttcttaaggacttacctgaaccttccttctgagattgttcctgctactttgaagaaacaagctaaacctgctggtcgttccatgggcccttccg

SEQ ID NO: 224332 - DNA, 192 bp, Gossypium hirsutum
ggaaaaggttcgggttaaataataatattgcctagcattatggccacagaggaggataagtttagcacgattaacttcgaagagacggagttgcgtttagggttgcccggcgccaatggaaacgacggtgaaactaccaaaaacaacggaaaacgagggttctcagagaccgttaatttgaagcttaacctt

SEQ ID NO: 224333 - DNA, 304 bp, Gossypium hirsutum
attagacactactagacttgtagaaatgcaaggtctcgtcttgttgccggtactccttggcgccacctaccatatcgctctttccgcgaccaacgttacggtggcggacgggctgttagataatggtaactttgagcaagccccgaatgcctcaaacatgaagggcacggttgttgtggggcgttatgcaataccaggatgggtaaacgaagggtttgtggaatacataaagtccgggcaaaagcaaggcgtcatgttgttggtggtgcctgagggagcctattcagataggttgaggaacgag

SEQ ID NO: 224334 - DNA, 399 bp, Gossypium hirsutum
cccacgcgtccgaaaatgtctacgatgttttcatgagtcggaaagatatgaaaacattgtggatcttactttagagatatatggttgggttgaatcattggaagatgcactaactcagtttacgacacccgaagatttggatggcgaaaacatgtaccggtgtggaaggtgtgccggttatgttcgggctcgtaagcagttgtgcatagatgaggctcctaatatactgacaattgtcttaaagcggtttcaggagggaaaatatggaaaaataaacaagtgtattacttttcccgacatgctcgacatggttccttttatgactggaacaggtgacattcccccactttacatgctttatgctgttgtggtgcatttggataccctgaatgcattttt

SEQ ID NO: 224335 - DNA, 390 bp, Gossypium hirsutum
  unsure (1)..(390): unsure at all n locations
aatcnaaacaagggatgaatgaattcatattttaaancgngagnatcggtcgggtgcggcaccgtaatttagttcaactcttgggatattgccggcgtcaaggtgagctacttttggtctatgactacatgccaaatggaagtctggataagtacttgtacaaccagccgaagctcacccttaactggagtcaaagattcagagtcatcaaaggtgtagcatcaggattgttttatctacatgaagaatgggagcaagttgttattcacagggatgttaaggctagcaatattttgcttgatagtggactaaatggaagattaggagattttgggcttgctagattatatgatcatggaactgaaccacaaactactcatgttgtgggca

SEQ ID NO: 224336 - DNA, 173 bp, Gossypium hirsutum
  unsure (1)..(173): unsure at all n locations
cgcgnncgccaggnncaaagcatcaaagtattcggttttttttctaggacggatcacgattggtcttgcggctctctggaactggttcagaaggtgcaactatccgtctgtacatcgagcaatatgaaaaggatccatcaaaaataggaagagattcccaagaagctcttgcc

SEQ ID NO: 224337 - DNA, 372 bp, Gossypium hirsutum
ctcacctaactgaaaactatggtgcttcaagagacctatctgagaaacaagctcctatgtgcacagggcactcatttcctcacaatattgaccattgtctgacatgggctcggtctgagtttgagggtctactggagaaaactcctgctgaagtgaatgcttatctgtccaacccagttgagtataaaactgcacaaaggactgctggcgatgctcaggcaagagataatttggaacgtattcttgaatgcctcgagaaagagaagtgtgtgacattccaggattgcatcttctgtgctcgtctaagatttgaggacttttttgtgaatcgtgtaaagcagtttattatacatttcccgagatgctgcaacc

SEQ ID NO: 224338 - DNA, 293 bp, Gossypium hirsutum
ctcgcctccttatcaacacttacgctatatgaagagatcccaattcatgggataatccgcttcaatttaatcccaatagatttcaagattcaaacattgatcttaaagatcaagattttcggtttttaccatttggcggtgggagaagaggttgccctggttatactttcggtcttgccaccgtcgagatcgcacttgctcgcctcttgtttcactttgactgggaattgccttacggaattcatactgatgatgttgatgttgatgaaattttcggccttgcatcgaggaaa

SEQ ID NO: 224339 - DNA, 390 bp, Gossypium hirsutum
attctatatatgttctatttttttttctcattctctttgaaaaccacttcatatttagcaggatgataagaactcaaaacataaactaactaacaacaacaaaattccccaacttaggtatatttaaaaaaaaatcatgggaagaggtagggttcaattaaaaaggattgaaaacaagatcaacagacaagttactttttccaaaagaagagctggtttattgaaaaaagctcatgagatctctgttctttgtgatgctgaagttgctttaattgtcttttcccataaaggcaaactctttgagtactccactgattcctgtatggaaaagatacttgaacgctatgaaaggtattcctatgctgaaagacagcttgttgctactgaatc

SEQ ID NO: 224340 - DNA, 403 bp, Gossypium hirsutum
cggacgcgtgggcaaactccgaaagaggttccctttgtttccttatctaccatattcgctgctttgaatttttttgctgtttttcaatgagtaccactcttaaatcaagcttgctttgttttattgctgttgtgggaattgtggctgcggctgttaccattgttgtagttgcagttccagaaggattgccatttgctgtgacaatgattttggcttatttggggaagagaaagatgggagatccagcaatggtgagaaagctctttgcttgtgaaacagagagctctgccactgcaatttgtactgacaaaacaggtactcttcaagtgacaaaattttgggttggtcaagaatctatggaggacggaggtggttcaatttctccatttgttgttgaattgat

SEQ ID NO: 224341 - DNA, 258 bp, Gossypium hirsutum
ctagctttaaacactatctcatgtcaagaagattgactggtagggaagaccaaaggctacagacttaacattgaccatcataactcttcccaacaaataacacattagcttatatggattatacaacacaatacttggagaccacaaagaggactaccataaagagccggatctgatcttcaagctatgctctttgaacacttgctacacctatatcctaaacactgagacacgcacatgcttgctaaacaaacaatg

SEQ ID NO: 224342 - DNA, 338 bp, Gossypium hirsutum
cccacgcgtccgatagatatggcttcggctgtattcattgagccactacctgttatggggtttgttgctcagctactaggcaaggatttattgtcaaggccattgtctgattctgatcgtgtgaagattaaaaaggcactcagaggagtgaaagtcgaggtaacccatagagggaatgtacgtataaaataccgtgtttcaggattgacttctcagcctactagagagttagtgtttcctgttgatgataattcaaccatgaagtctattgttgaatactttcaagagatgtatggctttacaattcagcatacacatctaccttgtctttaagttgg

SEQ ID NO: 224343 - DNA, 399 bp, Gossypium hirsutum
cggacgcgtgggcaccggcggcggcggatatggcggtggggaagaagctcgacgtcggaaggaaatctccatgttgctatcggatcccctcgacgaaggccttggccactccttttgctacgtcagacccgacccaacccgactctcttcgtccaaggtccattccgaggaatccaccacgactttccgtacgatctccggcgcctccgtcagcgccaacacgtacacgccgctctcgacggcgctggtggacccgtacgtcagctacagcaacggctgcttcgatagggcggcggctttcgagagcaccacatcgttttcctcgatcccgctgcagccgatccctaagagcttgataaattcttcccgtcccatgtccggtagcctagtttcaagttc

SEQ ID NO: 224344 - DNA, 399 bp, Gossypium hirsutum
cccacgcttccgcccacgcgtccgcccacgcgtccggaccttgctaagattgcaaggaacgatggtaaaaccgtcctccattcagcggcaagaatggggcacttggaagtagtgaaatctttgctcagcaaggatccaagtacaggttttagggtagacaaaaagggtcaaactgcactacatatggctgtgaaaggtcaaaatgaggagatagtgctggaattgtttaaacctgacccttcagttttgggcttggaagactgtaaagggaacactgcattgcatattgcaataatgaagggccgtactcagattgtacgttgcttgctatcggttgagagcataaacatcaactcaacaaacaaggcttgagaaagcccacttgacattgccgaaaaa

SEQ ID NO: 224345 - DNA, 390 bp, Gossypium hirsutum
cccacgcttccggatatttttgaacaagcaaattaaagctctcactacctaaccttcaaagccccctcccacctcctttgtagattagaaaactaaagatcaaaagataggcaactaggaaacaaaaaagataagtgaaagatgtcaactgcttcttcattgtgttcatcaactcagattaatggctttggagggggacttggggttctaagaacccatgtttctcaacccaagacactttcttttacaagaaggagaatttctacggtagtgaaggcaacatctcgagttgataaattctcaaaaagcgatatcattgcttctccatctattctctctgctaatttcgcaaagttgggggagcatgtgaaagcagtagaagttgctggc

SEQ ID NO: 224346 - DNA, 387 bp, Gossypium hirsutum
ctcccaacgctgatccgatcacagttgcctacatgtcttgttcttcatcatcgggcgcgggggaagatgactagggaatccactcttacaggaaaggaggatatcatgccgtccggatcggcgatccattcgccgctggtcgttacatcgctcacaggaagctgggttggggtcagttctccactgtttggctcgcttatgatacccaatcctctaaatatgttgctctaaagatccataaaagcgcacaacaatttgcacaagctgcacttcatgaaattgatgtcctttcatctattgctgacggagacccctcaaactcgaagtgtgtggtgctcctgattgaccactttaagcacaatgttccaaattgcccacatctattca

SEQ ID NO: 224347 - DNA, 189 bp, Gossypium hirsutum
cggaaaaatcacatttacaggctcaactgttttttttaagaagttaatggctggtgcccgtcagacttttaaaagggtatcacttgaactcggaggtaatgccccctgcattgtatttgatgatgcatacctggatgtggcagttaaaggaacacttgcatcaaaatttcgtaacagttgacagacttg

SEQ ID NO: 224348 - DNA, 398 bp, Gossypium hirsutum
gccaaaaccaagcatcatttcagttaaaactatataaaaaaagctccaattagtatggggcagtataaaatccaagaacctcaattcctctctttgaaagtgtacgatttaaacatatacccagattttaattttgttgatttgggtttgatttgaagagagaataaaaatcttttcaatggggagtttaggagctcttgtgaaacacccagatgatttttatccattgttgaagctgaaaatggcttcaaggcatgccgagagacagatcccatcagagcctcactgggctttttgtttctctatgcttcacaaagtatctcgtagttttgctctcgttattcaacagctcgacatcgagcttaaaaacgctgtctgcatattttatttggttcttc

SEQ ID NO: 224349 - DNA, 403 bp, Gossypium hirsutum
gaattctccaaaagtgttacccccaatgtatgtttgtgaaataagtgatcaagaagcgggggagaatattcctggaacagaagtcaatgcaaaacctagtgttgttccaagggacaatcctattggtaaaaactttagcaattctgtaaaagaatccatcaccttttcaaagacaaaaccaggcatgctgctcaaaccagctcatgttaggagaccatctgtcaacatgtttgaggttgtaaagctgtctgctacagttgattcaggaactcctggcaatgtaaaaagcggtttatacattgcaacggatctgaattctcaaagtaggcttgtattagaatgattgagtttgaaaattatgtgatttaaaggactcaaattattcatagtgttttatagaaat

SEQ ID NO: 224350 - DNA, 401 bp, Gossypium hirsutum
cccacgcgtccgcaaattcagagcttcctccaaacatggtcttagctcaagtctcagctgccctttctcttaccgttcatgatgtctcccctatcatctctccaaaaacaacccacaaactttctcgtgtacccatttccagtttttcaggaactggttccatttttgccactggttcccctttcttgataagggaatcatttaaccaaaggaaacctgtatgtaaagcaacaacatttaccattacatgtgagcaaagcaccaaggggggtagcaccaacagtttggatgaatggcttggcaggcttgctatggttggttttgcagtagccattactgttgaaatatccactggcaaaggactcttggagaattttggccttacaacacctttgcctaca

SEQ ID NO: 224351 - DNA, 404 bp, Gossypium hirsutum
cccacgcgtccggttgggcattttcaccattcttgatacatcagttttgatggccgtcggtgttttactccgtcggctctttggggacagtctggtttgctttatggctaaataaggcttacagttcacctattgaggatcctgaacttctgccccaagagaaaaagcttattgttaccaactgtatttccaagcagccagttaaaacaataccttggaagttaatcttgtcaaaaccacctgtatgggcccttatagtgtcccatttctgtcacaactggggaacgtttattctcttaacatggatgcctacgtactatcatcaagtcctgaagttcaacctcacagattcagggctcatttgcgttttaccctggcttacgatggcattttctgcacatctt

SEQ ID NO: 224352 - DNA, 311 bp, Gossypium hirsutum
ggaaaacccgggcggataagtaaccaccaacgcttggcggatcaaaatcaaccgatccgatcgcttttttttttttctttgtgtttggggatgtttttccacgattttgcggtcagtggtgaaagggggaattgggtgttcggacggtggaggaacaaggatgccgtctcagggagatctggatcgtcagatcgagcacctgatggagtgtaagccgctgtctgaggcggaggtgaaggcgttatgctagcaggcacgagcaatactagtggaggaatggaacgtacagcctgtgaagtgtccggtaacgg

SEQ ID NO: 224353 - DNA, 410 bp, Gossypium hirsutum
cacaaaaccaaatcatctttgctttgctattttggttcgttttgctaagaactggctaacgcacgagcaaaaaatcgtggaggaaaccaacaagaaccaagcggtggttcttgccctctatgaagccttaaacacacgagacgtcaacaccgttcaccaaatccttgctcccgatctagagtggtggttccacggtccacccactcaccagtttttgatgcgcttactcaccggcgcttcatccgacgatcctttccttttcgaggtcgaccctgttttagtcaccgcctttggatccaccgtcatcgtcgaaagctgtgacaacagctccgtcgatctcctgggttcacgcttggactgttcgtggttggacaatcacccaagtgagggagtatttcaacacttttttt

SEQ ID NO: 224354 - DNA, 394 bp, Gossypium hirsutum
  unsure (1)..(394): unsure at all n locations
cgcgtttatgcagtattgttgttgaaatcaattttggagatggctggtccaatgcagctggtcaatttgagacctgaattattcnttgaattagtcaaagttttgtgtgatcaaatttctcagcgggccacgaaagctgctctaaaattgttggtctatacctgtccattgggaagaaacaagattaaagcatctgcatcaggcgtggtaccggtcttgatcaacatgcttcttgattcatcagagaaaagggcttgtgagatgatactaacagtgtttgacgcagtatgctgatgtgccgaaggccgattggaacttataagccatggaacatggcttgcaattgttcaaagaagatacttaagatctttcatgtttcaagtgaaatggcatt

SEQ ID NO: 224355 - DNA, 390 bp, Gossypium hirsutum
attccttctgagtcaaaccacaacgaaggaagaaatcaaagatgacaaccgtcaggagcctggggtccccatctattgttaaagctccaaccccaaaccgatttacaagtcccatcgtcagggccccaacatctcttggatctgttaaaaccatctctagatctttcggcttgaaatgttcctcaaatcaacgaacatcaatggcaatgtacaagattaagctcgtaggaccaaacggtgaagagaatgagtttgaagtccccgataaccagtacatcttataagcagctgaagcagcaagagtagagctgccttattgttgcaaagctggagcttgctctatatgtaccgcaaaggtcgttttaggtacggtacatcaaccagaagcca

SEQ ID NO: 224356 - DNA, 403 bp, Gossypium hirsutum
tctgaatctgatcaatcaacacctgaaatggataacttacaaacaacaactactagtagggtactacccagcactagaagcagctcgtagccagccatggatgaagagtacgatgtcatagttctaggaactggtctcaaggaatgcatcctcagcggtcttctttctgttgacggactcaaggttctgcatatggataggaatgattactatggaggagagtctacatcactcaacctcattcagctctggaagaagtttagaggaaatgataagcctcctgctcatttgggctctagcagagattataatgtggacatggtccctaagtttatgatggcaaatggcactcttgtgcgtgttcttattcatacggatgttacaaagtatctttacttcaaag

SEQ ID NO: 224357 - DNA, 398 bp, Gossypium hirsutum
  unsure (1)..(398): unsure at all n locations
gatgaatcaaaatcaatgaatccccatggcgagttggaatgggattctgataatgacagcggaacccttgcaaaaattgagccaacaaaggctgaggaagaagcttttgcaagagggttacagattgcagatttctggaaagaagctttgatattgagttcattacatcatccaaatgttgtttctttctatggtatagttcgtgatagtcctgacggattcttagctactgttgctgaattcatggttaatggatccttgaagcagtttttacagaagaaggacaggactattgatcgtcgtaagagactcatcatagctatggatgttgcatntgggatggaatacttgcatgggaagaacattgtacatttgatttgaaatgtgaaaatttgttg

SEQ ID NO: 224358 - DNA, 400 bp, Gossypium hirsutum
gagggaaaaatccagggaatggtgatggaagagaagctgcagaggtcatggcaaaggatggcaagaaaaatgacctgattttaaggtcgtctggttttgtaaacattgatggttccaacaactttgcctcggttttctccaaaaggggcagaaaaggagtgaatcaggattgtactattgtatgggaggaatttggatgtcaagcagacatgctgttttgcggcatcttcgatggtcacggtccgtggggtcattttgttgcgaaaaaggtccgagaatcgatgccgtcgtccttgctttgtaattggcaagagactctagcttaggcatcactcgacccgtagttcgatttggaattatataaaaagccttacaggtttcatatatggaagcattctta

SEQ ID NO: 224359 - DNA, 408 bp, Gossypium hirsutum
tccagtgtctgtacttgaaaccggtagcgcttgctcatctgcaaagccggcacctatcagggctaagctaagtttcctggtgaaacgtgaccgaagcaagcgcaggcgagcatctacctttaacctgcagttcacattgcctttcatatcctccacaggatctacttccttggttggttctgaatcagaatcagaaagccatttaacagagaaatctgccaaaaagagatagaagaaaaagaacctgacatggctttcaggttcctgtgagatcgacaaatcctcctccgaagagactgctgttgttaggaaatgtacgcactgtgaagttacaaaaactccacaatggagagaaggacccaagggtccaaagaccctttgtaatgcatgtggggttcgctacaggtc

SEQ ID NO: 224360 - DNA, 394 bp, Gossypium hirsutum
cccacgcgtccgaccacgcgtccgcccacgcgttcgacagggaccttcctgtaccaggacgggatttatctggtgttcattttgcaatggaattcctacatgcaaatactaaaagcttgcttgatagtgatctccaagatggtaactacatatcagctaagggcaagaaagtagtagtcatcggtggaggtgacactggtacagattgcattgggacatctatccggcatggatgtagcagcattgtaaatcttgagttgcttcctcagccaccgcagacaagagctcctggcaatccttggccacaggggcctcgcatattccgtgtagactatgggcaccaagaagctgctaccaaatttggaaaagacccaagatcctatgaggttttgac

SEQ ID NO: 224361 - DNA, 159 bp, Gossypium hirsutum
tccactcttactactacgattacctccattcctctttcagggaccttcctataccaggacgcgatttatctaatcttcatttttcaatcaaatttatacattccaatactaaacgcttgcataatagttatctacaagattttaactacatatcacata

SEQ ID NO: 224362 - DNA, 335 bp, Gossypium hirsutum
cccacgcgtccggtgctgatgactacttagttttctccgacgctgaagggatgcaaaagggtgctgattcacttgattatatcattgacactgtgcctgtttttcacccacttgagccttacctttcattgttgaaattcgacggcaatttaatcttgactggtgttattaacacccctcttcagtttgtttcccctattggtcatgcttgggagaaagtcgattacagggagttttattgggagcatgaaggaaacagaggaaatgcttaacttcttgtaggaggaaaatttgacctcaatgattgaggtggtgaagattgattatttcaacac

SEQ ID NO: 224363 - DNA, 399 bp, Gossypium hirsutum
cccacgcgtccgcccacgcgtccgcccacgcgttcggacttgaataaggtggtgaaattgtgtgaaaggtgcctgatagcttgtgctagttatcctgagtactggatacgatatgttttatgtatggaagccagtggaagcatggaccttgctgataatgcgcttgcacgtgctatgcaagtctttgtcaagaggcaacctgagatccatctttttgccgctcgattcaaagagcagaatggggacataccatgtgctcgagctgcatatcaacttgttcacaatgaaatttcacctggttttcttgaagcaattattaagcatgcaaatatggaacgccgtctggggaaacttgaagatgccttctctttatatgagcaagctattgccattgaaaaa

SEQ ID NO: 224364 - DNA, 404 bp, Gossypium hirsutum
gtttgagggaaaattttcaccggatatgaaattggaagatcttttgaggatttatgatcaggagaagcttaaattcttgacctcatttgttggtcagagagtcaaagtaaatgtgctaatggctgacagaaagttcagaaaacttatagtttctctgaggccaaaagaaaaggaagagttaatagagaaaaagagaaatgttatggccaagcttcgtgttggggatgttataaaatgttgcatcaagaaaataacttattttggtatatttgtggaggttgaaggcgtgcctgctttgattcaccagacggaagtatcatgggatgccaccttggatcctttgtcacatttcaaaattggtcagattgtcgaggccaaagtccaccaattggatttcacacttg

SEQ ID NO: 224365 - DNA, 435 bp, Gossypium hirsutum
ggaaaacccggcccgacccacgcgtccgcagcaaccacaaaaaaaaggagagttaaaagagtttttaaaaggaatctgcaaaagaaaagtgagcaacttgtacaagatttggagcaacattgaaggatatagcaatggaaaggagagtgaattacgagaatgatctcaatctcatggcaactgagccaagattgggattgccttgttgtggtgatgatgagccccaaagaaaaacaaatcccagtatcagaaataataaaagaactgtacctgagatttctgaggtatcgagttctgagagcaattctagcattacaatgtctgggagtgatgatcaagacagtccctctcctgccaaggaacaagttgtaggatggccaccaatccgttcaaacaggaaaaattgcttacaaagttccaagagaaatgaagttg

SEQ ID NO: 224366 - DNA, 360 bp, Gossypium hirsutum
cccactcgtccgataggggtgaaatgatttatgtctgaaaatccaggttttccattggtgggaatcctatctaccactttctaggcacctctactttcagtgaatacactgttgtccatgtctgccaggttgtcaagatcaatcctgaggcttctcttgataaagtttgtgttctaagctgctgaatgtccatagtttttggttccactgttaattttctaatcccaaatagggtcaatccgttgcaatatttggactaggttctgtctgtcttgcttctgttgaatgagctagagtttttggggctaccatattcatttgatgtctattttgaacctctaatccagatttctaactaat

SEQ ID NO: 224367 - DNA, 335 bp, Gossypium hirsutum
cacggaaggctgctttgattgccttggctgtttttgccactgaacccagtgaagcaggagggcttaagttcttatcgtcaccacatgggaaggatgagtactcacaatgggttgttgcaagtcagagaagtcttcttgaggttatggctgagttcccatcagcaaaaccttctcttggtgtattttttgctgcagtatctcctcgtttacagcctcgttattattctatctcatcctcccctaggtttgtacctgccagggtttatgtaacctgcgctttagtttatggtccaacttcaacggggttgttcacctgggtgagtgctcaacattga

SEQ ID NO: 224368 - DNA, 403 bp, Gossypium hirsutum
cttaaatattgcctctctctctctctctctctcaagtctgaagcagtaaaatcgaaaggatgggtcaagggacaccaggcggtttgaaccggcaaggtcttcccggggaccgtaaaggcgacggatcgaacaagaaggaaaagaagttcgagccagccgcaccccctgcgagggtgggtcggaagcaacgaaaacaaaagggtccggaagcggctgctcgacttcccacagtaaccccactcagcaagtgcaagctacggctgttaaagctggagcggatcaaggattatttactaatggaagaagagttcgtagccaatcaggaaaggcttaagccccaggaagagaaagccgaggaagaccgatctaaggtcgatgatttgagaggctccccgatgagttg

SEQ ID NO: 224369 - DNA, 388 bp, Gossypium hirsutum
aaacccgggcggacccacgcgtccggaaggcttgactgacgatgacattcgaactgctattcagaatgcaactggtcctagatcgtggctatttgtacctgaagtcccgtttgaagtgcttgttagaaggcaaatagcacgtttgctagatccaagtcttcaatgtgccaggttcatatatgatgagttaataaagattagccatcgctgtatgatgaatgaactgcagcgatttcctgttctaaggaagcatatggaccaagttgttggaaattttctccaagaaggtcttgaaccatctgagacaatgataggacatatgattgaaatggagatggattacataaatacttcccacccaaattttattggtgggagcaaggctgta

SEQ ID NO: 224370 - DNA, 360 bp, Gossypium hirsutum
gcaatgatgaaacaacacacaagtacaagggctttatactgttatgaccgaatcagaacggtgtgaatcccttcgccattgcaagtgggttgatgaagtcattcctgatgctccatgggtgatcgatcaagaatttctggataaacacaatattgactacgtggctcatgattcacttccctatgctgatgccagtggagctgcgaatgatgtgtacgaatttgttaaagctgctgggaagttcaaggaaacaaaacgaactgatgggatttctacgtcagatatcataatgagaattgttaaagattataaccaatacgtgctgtgtaacttggaccgtgggtattctaggaaagagct

SEQ ID NO: 224371 - DNA, 427 bp, Gossypium hirsutum
  unsure (1)..(427): unsure at all n locations
acgcgtncgcggacgcgtgggtttggacgatatctgtttcaggactctcaagttaactactcctagctgtggtgatttgaacgatctaatctctgcaaccatgagcggtgtgacatgctgccttaggttccctggccagctcaactctgacctccggaaacttgctgtcaacctcattcctttccctcggctccacttttttatggttggatttgctcctctcacctcacggggatcacagcagtatcgttctttaaccgtcccagaactcactcagcagatgtgggatgctaagaacatgatgtgtgctgcagaccctcgacatggttgttacctcacaacctcagccatgttcaagggttagatgagcaccaaagaggtttgtgagccaatgaattacggtcaaaacatgaactcatcctacttc

SEQ ID NO: 224372 - DNA, 341 bp, Gossypium hirsutum
cccacgcgtccgaatttctcttttcttttcaaattatcattcaccatctttctcggggggtttgagatctcaagctggtttattacgttttaatataggttgagatggcttcgaccactctaatctgcgatacccagccatggaaggacttgaaggctcatactgaggatatcaagaaatctcatcttcgtgatttgatgaacgacaaagaacgatgcgaatcgatgatgggtgagtttgatggaatgtttttggactactcaaggcattgcgccactcttgagaccatggattatctctttatattagctttggctgcttctttctatacaactaattta

SEQ ID NO: 224373 - DNA, 426 bp, Gossypium hirsutum
gttcttagcgttaaccgcactttcgaactgggttttttcaccataaatggtgagtctgattggtatttaggaatttggtactcttcgatcccgactcaaacccgggtttgggttgcgaatcgtgaaaaacccataaaaaatatcaccggatcttcactggaaatcaccggaacggggcggttggtggtgaaggaatcgccggattccgtcgtttggcagagcgacaacgttgaaaaagcgaaaaggtttgtttttttagagactgggaatctcgttttgtattcttcaaatgggttaaaagtatggcaaagctttgattttccgacggatacgtggttgcctggcatgaatttaaccgcccagcaagctttaacttcatggaagagctcgttcgacccatcaccggggcttttctctttgaggcta

SEQ ID NO: 224374 - DNA, 420 bp, Gossypium hirsutum
cggacgcgtgggtagaaattaaagagagtttgatttggtttttagggtggaggcttaaggaggatccttccttttacttttatcgtttggcttttgtcagccactcttttcttgttcttgttcgtcaacgcctccaacacatattacttaatcaatattttcttcatctgattttgatcggagcatcagtctggttagaagggatctcatggccactactggaaacaagaacatcaatgctaaattagttctacttggggatgttggagctggaaagtctagtcttgttttgcgcttcgctaaagggcaatttgttgaatttcaggaatcaaccataggtgcagcttttttctcccaaacattggctgtgaatgatgcaactgtgaagtttgagatttgggattcagctggtcaagagag

SEQ ID NO: 224375 - DNA, 412 bp, Gossypium hirsutum
cccacgcgtccggaacaaacaacaatggctgctacatctggggctgtactaaatggattaggctcttcatttctttgtgggggaaagaggagccaagcccttttgggtgccagcattggggccaaaggctcgccctcccctactgctggaactagaaagttgatcgttgtggcagccgccgcacctaaaaagtcttggatccctgctgttagaggtggtggcaacttcattgaccctgaatggctcgatggatcgctccctggagactacggatttgacccactaggtcttggaaaagacccagcattcctcaaatggtaccgagaagctgagctgatccatggacgttgggccatggctgctgtcgtcggcatctttctcggccaagcttggagtggcattccatggttcg

SEQ ID NO: 224376 - DNA, 427 bp, Gossypium hirsutum
  unsure (1)..(427): unsure at all n locations
gcccacgcgtccntataattgaaagaaaagatttatggttctgctagagaaactttgggatgatagagtggccggacctgaaccggaacgtggccttggccggctgaggaagatcacaaccaccccacccttgtccaccaaagatgaggcttcatcaatggcgatgccgacgagtccgacgacacctgggacaccgtcgacgccggtgtcggctcgtagggacaacgtgtggaggagcgtgttcaatccaggtagcaaccttgcaaccaaaggtattggcgctgaagttttcgacaagccttaacctaactctgctactgtttatgactggctttacagcggggagacccggagcaagcatcaccgctgattgggcgatggctgacggcggctgagggtagcaaaaccacttgcagaaggttgctgc

SEQ ID NO: 224377 - DNA, 412 bp, Gossypium hirsutum
gtttgtacgacggaagggcaagactttgctaaagcagtcccatcagacaaacttcggacagcaaaacacgtaaaacccgcatcgagaaacagagtttcttgccgcgaaaaggcggggccaagtggggtccgagtcaactcagcgcgagtcaagctgaaagcaatggatacctggggtaacgacgaccggattccgctggctcaggtggtttccgagttggtaaagggatggtttcaagaggctcttaaggaggccaaggctggtgataccaacatgcaagtccttgttggacagatgtattgcaatggctatggtgttcctaaagatgttcaaaaggggcgtgcttggattagtaaagcttcaaggagcagatcttcagtatggaatgttagtgataagcattcaggttata

SEQ ID NO: 224378 - DNA, 424 bp, Gossypium hirsutum
gttgggttaagggatcctcctcggaaagaggttcgtcaagcaattgaagactgcaaaggagctgggattcgtgttatggtcattacaggagacaataagaacacagcggaagctatttgtcgcgaaattggtgtattcggatatcgtgaagatatcacttccaggagcttaacggggaaggagtttatggatcatcctgatcagagaaatcacctgagacagaatggaggtctattattttctcgagctgagccaaggcacaagcaggaaatagtgaggttgctgaagcaagatggtgaagtggttgcaatgactggggatggagttaatgatgctcctgccttaaagttggctgatattggagtagcaatgggcatcaccgggacagaggttgcaaaggaggcctctgacatggtgctagcag

SEQ ID NO: 224379 - DNA, 412 bp, Gossypium hirsutum
gaagatctctgtgaaagttgcgggaatccactggcattatggaacccgatcccatgctcgtgaactcacagctgggtactataacacaaggtaccgagatggttacctcccgatcgctcaaatgctagcacgtcatggtgccgttttcaacttcacttgcatagagatgcgggatcatgagcagccccaagatgccttgtgtgcaccggagaagctagtgaagcaagttgctttagcaacaggagcagcacaagttccacttgccggggagaatgcacttccccgttatgatgaatacgcccacgagcagatcttacgagcttcatcgttgaatgtcgatggctcagcagttgatagagagatgtgtgcatttacgtacttgaggatgaacccatcgctctttcatccgggc

SEQ ID NO: 224380 - DNA, 414 bp, Gossypium hirsutum
tggagcttcttcgtcctggaagtggacagtgttatcctagcaatgaagattttgatagggaagtggatgatcttcagcatccaaagtactatattatctggaacatgaatatcagcactcacatttatccagagtttgttgttagtttcaagatctccaatgctgaaaggcatttgattggaagtgagactaatcatgctgtttcaggcgtcactgcatctactccaggacttcaaggtcgtttaccagtattatcatctgccggtgaattggggagtattaatcaccaaacctcataatcaggtggatcccacgaaaatgatcctagcctgggttcaaacacttcaaagacccctaaatctccttggatgccttttccaatgttgtttgctgctatctcagacaaaatccctc

SEQ ID NO: 224381 - DNA, 423 bp, Gossypium hirsutum
  unsure (1)..(423): unsure at all n locations
ggaagggtccgcccacgcgtccnaaaaaaagagtctaacaatttatggttaaaattgtaatcttgagatctgatcagaaggttgtggacgagagaatgagctctaanaggaaggtgttgcaaggtaacacgacgaggacgcgtgtagggaagtacgagcttgggaaaacctttggcgaggggagctttgcaaaggttaagttcgctaagaatgttgagactggcgagtgcgtcgccattaaaattctcgaccgtgaccaatttctccgtcaccgaatggtcgaacagataaaaagagaaatatcaacaatgaagcttatcaagcatcccaatgtcattaaaatatttgaggttatggcaagttagacaaggatttatatcgtcatctaatttgttgatggtggcgatctttttgacaaaattg

SEQ ID NO: 224382 - DNA, 369 bp, Gossypium hirsutum
cccactcgtcctcccactctttctcccactctttctttcacgcttccgaaaaaaatcatacgcagatgagctctgctggtcaggttattcgtcgcaaagctgcggcggcatgtgaggcggagaagccactatcgatagaagaagtggaagtggcaccaccccataagcatgaagtccgtatcaagattctcttcactgctttatgtcacactgatgtatactactgggagtgtaagggttacactcctctgtttactcgtatacgtggtcatgaagcctgaaggatcgtggagagtgtgggtgtagggcgcgaattatttgtaaccttgagatcatgttctccctatcttctcctgagtatacatatat

SEQ ID NO: 224383 - DNA, 414 bp, Gossypium hirsutum
  unsure (1)..(414): unsure at all n locations
cggacgcgtgggcggacgcgtgggttaaaatataagaaaaaagtcatacgcaatgagcagtgccggtcaggttattcgttgcaaagctgcggtggcatgggaggccgggaagccactatctatagaagaagtggaagtggcaccaccccaaaaacatgaagtccgtattaagattctcttcactgctttatgtcacactgatgtatactactgggagtgtaagggttacactcctctgtttcctcgtatacttggtcatgaagcctcagggatcgtggagagtgtgggtgagggtgtgaatgatttgaaacctggggatcatgtgcttnctatcttcaccggagaatgcatagaatgtcgtcactgtctgtcagaagaaagcattaacttgtgcgaactgtttaggatcaactg

SEQ ID NO: 224384 - DNA, 414 bp, Gossypium hirsutum
cttcacttcgacaaagaacccaatatgaggaaacgtttacttaccattcttctggcagcgattatttccgccggagcaacggcggtaaaggctcaaaactgtggttgtgcagaaggtttatgttgtagccgttgggggtattgcggaaccggcgatgattattgcggcacagggtgtcaacagggtccttgtaatccgccgccagctctgaacaatgttttggtggcggatattgttacaccggagttctttaatgggatattggatgttgcagaagacagttgtgaagggaagaatttttacacgagatcggcgtttcttgaagcattgggtccttatcctcagttcggaaggattgggactgttgatgattctaatcgggaaattgcagctttctttgcgcatagtcacgca

SEQ ID NO: 224385 - DNA, 420 bp, Gossypium hirsutum
gaaaaagatgatgattgaaagggatgatttaaacgttgttggaatttggggtattggaggatcagggaaaacaactttggctaatgaaatttgtagagataatcaagttcaaagttacttcaacaacagaattttgttcttaacggtatcacaatcaccagatctggaacagctgagggcaaaaatatggggatttattacaggaaacgagcctttgaattatacaaggaaatcgcagtgtgagtggggaagtggaccgcaagctctagttgttttggatgatgtctggtcgttgccagtacttgaacaattgagttttaaggtcccgacatacaaaaccctggtaatttcaagatttaagttcccaagacgtgttgttaatgaagtttatgaagttgagttgctggaagaagatgaatc

SEQ ID NO: 224386 - DNA, 422 bp, Gossypium hirsutum
ctcttgatgcctgttcagacttgagtattaaagttgatgaactttcaaatggttcgtccgcatttgcattggttattagaggagggtgtagttttgaagagaaagtaaggagagtgcaaaaggcaggatttgaagccgctattgtctatgacaatgatgatgatggtgtcttggttgcaatggcagggaatgcagctggcattaagatacatgctgtctttgtttccaaagcttctggtgaaatactcaaaaagtttgctgggtctactgatatggaactgtggctaatccctagctttgaaaactcagcatggtcgatcatggccatctcctttatttctctacttgccatgtcagcagtgctggcaacttgtttctttgtacgcagacatcgcattaggcgaagaactccacagtcctct

SEQ ID NO: 224387 - DNA, 417 bp, Gossypium hirsutum
cttcggttgagattgtcaagttgttgcttgatgcatctgctgatgctaatcgtgttgatgctaatgggagcaagccaatcgatctggttgtgccggctttaaaatccttgagtagttccaaaagaaaggtgatcgagttgttgctgaaaggtgttagtggctgtgttcttaacgagaaggatgaatctgaaaagacggtgttgcctcagttgttcaaagaagggtctgagaaaaaagagtatcctattgatgtatcattgcctgatatcaacaatggtatctatggaactgatgatttcaggatgtatacctttaaggtgaagccttgctcaagggcatactcccatgattggaccgagtgtccttttgttcatcccggtgagaatgcgaggaggagggacccaaggaagtaccctt

SEQ ID NO: 224388 - DNA, 419 bp, Gossypium hirsutum
cccacgcgtccggataaagtcaggttcaacctctgagatctctccagaggccctgagaaggatgaaaagggttaagaaggtaacaaagatgtcagagaaagtggccactggaattctttcaggtgtggttaaagtgtctggattcttcacaggttcaattgttaactccaaagttggcaagaaatttttcaacctgatgcctggagaaatcgttcttgcttccttggatggatttaataaggtttgcgatgcagttgaagtagcaagaaggaatgtcatgtctaccacatctgtggtgacaacaggacttgtttcacaaaggtatggagaaaaggcaggaaaggttacatatgaagggcttgatgcggcaggacatgcaattgggacagcttgggctgtgtttaagattagaaaggctc

SEQ ID NO: 224389 - DNA, 386 bp, Gossypium hirsutum
attttccaccacaagcgtgtccagaaggttcagagattttagagagaacaaacaacaatggctgctacatctggggctgtactaaatggattaggctcttcatttctttgtgggggaaagaggagccaagcccttttgggtgccagcattggggccaaaggctcgccctcccctactgctggaactagaaagttgatcgttgtggcagccgccgcacctaaaaagtcttggatccctgctgttagaggtggtggcaacttcattgaccctgaatggctcgatggatcgctccctggagactacggatttgacccactaggtcttggaaaagacccatcattcctcaaatggtaccgagaagctgagctgatccatggacgtttggc

SEQ ID NO: 224390 - DNA, 410 bp, Gossypium hirsutum
cccacgcgtccgaacttaccaactcaaaaaccccaagttttcactttcaaaaaacttcccacattcaccatgtctggcacgtgcggcaactgtgactgcgctgaccgcagccaatgcacgaagaagggaaacagcaacaccatgatcgttgagactgagaagagctacatcaacaatgttgagatggatgctccagctgagaacgatggcaagtgcaattgcggtactggctgcagctgcacagactgcacctgtggccactaagccaacatacaatggtcatgcttcagatcatggcatatatagggatctaaataatgaatttaaggttgaataatttggttctgttgtaagttgagtggtgacttatatctgtcagttaacctttctctccttactatgatgtaatg

SEQ ID NO: 224391 - DNA, 406 bp, Gossypium hirsutum
cttcaaggaatggaggtgaggcaaatagtctcaccagtaatctggaaaatatttcttttgctgctaaatccaggcactccaatgatgcaaaacctggaagagcaatttcacgggcacagtataaacctgaaaagtggatgctccctgaaaaagcagaacattcactgactcaactaaatcttgcaattgttgggcatgtggattctggaaaatcgacgctctctggtagactgcttcaccttttgggaagaatatcccaaaaagaaatgcacaaatatgaaaaggaggccaaattacagggaaaaggatcctttgcttatgcttgggcattggatgaaagtgctgaagaaagagaaaggggaattactatgactgtggctgtggcttattttgattcaaaaagata

SEQ ID NO: 224392 - DNA, 264 bp, Gossypium hirsutum
cccacgcgttcgcccacgcgtccgcccacgcgttcttttacgcgtccgaaaaaaatcatacgcagggagcactgctggtcaggttatgccctgcaaagctgcggtggcatgggaggcggggaagccactatcgatagaagaagtggaagtggcaccaccccaaaagcatgaagtccgtttcatgattgtcttcactgctttatgtcacactgatgcatactactgggagtgttagggtttcactcctgtgtttccttgtttact

SEQ ID NO: 224393 - DNA, 421 bp, Gossypium hirsutum
cttgttttcaaaatagccactggttgtagccgaacggaacggactgcttcaattgtttcaccgaaagcagtttcagattccaagaactcgcagacatgtcttgaccccgacgctagtcgaagtgttttggggattattttgggaggtggagcagggacaaggctatacccactaacaaagaagagagctaagccggctgttccattaggagcaaactataggctaatcgacatccctgttagcaattgtttgaacagtaacatatcaaaaatctacgttctgactcaattcaattctgcttctctgaaccgccacctttcccgcgcttatgctagcaacatgggtggctacaagaacgaagtgttcgtcgaggttcttgctgctcagcagagtcctgagaacccgaactggttccagggga

SEQ ID NO: 224394 - DNA, 405 bp, Gossypium hirsutum
cccacgcgtccgcccacgcgtccgttttttgtttcttatcttgttgttggtctggaaatggctgcactctctctttttgcttccaagttttgttgctaacagtatatctttgaaagtcagttgatattacaattattcccttcccaaaccttgcatcatcaatcatggttcctttcatttatgttgttcttttcttagccatgtctggccattcaagtgccaactattgcttatgtaaagatggagtgaatgagcaaacacttcagaaaaccctggattatgcttgtggagcaggagctgattgtactccaattaatcaaaatggtccttgttataatcccaacactgtgaaagatcactgcaatttatgcagtcaatagctatttccaaaagaaaggtcaagct

SEQ ID NO: 224395 - DNA, 421 bp, Gossypium hirsutum
cccacgcgtccgttgctgatacactagagaggtacaacaggtgcacctatggagcattggaacctggtcaaacagaaattgagacacagagaaactaccaggactatttgaagctcaaagcaaaagttgaggtccttcaacattcacaaagacattttctgggggaagaattaggagacttgggctctaaggaacttgagcagcttgagcatcagttggacttctctttgaagaaaatcaggtcattaaagatggagcatatggttgagcagctttccaaacttgaaagaaaggaagaaatgctactggaaaccaacagaaacctgagaaggaagttggatgaaaatgcttcaacactaagatcaacatgggaaactggggagcaaagtgttccatgcaacctccagcgtcctccattttt

SEQ ID NO: 224396 - DNA, 420 bp, Gossypium hirsutum
ctcaggcatcaccatggcaacctctgctatccaacaatctgctttcgctggccaaacagctttgaagcagtccaatgagctcgtctgcaagatcggtgccgtcggtggtggtcgcgtttccatgcgtagaaccgtcaaaagtgctccaaccagcatctggtatggccctgaccgcccaaagtacttgggtccattctctgaccaaatcccatcatacctgaccggtgaattccctggggactacgggtgggatactgctggattatcagctgacccagagacatttgccaagaaccgtgagcttgaggtgatccactgtatgtgggctatgcttggtgcccttggctgtgttttccctgaaattctttcaaagaatggtgtcaagttcggagaggcggtttggttcaaggctggttccca

SEQ ID NO: 224397 - DNA, 343 bp, Gossypium hirsutum
gcagaagattatgtttgcattgacctccatcaagggtatcggaaggcgattcgctaacatcgtttgcaagaaggctgatgtcgacatgaacaagagggctggtgaattgactgcacaggagttggacaatctcatgaccattgttgcaaaccccaggcagtttaaaatccctgactggtttttaaataggcagaaggattacaaggacgggatgtattcccaagtcgtgtctaatgctcttgacatgaagttgagggatgatttggagcgtttgaagaatatctggaaccaccgtggtctgaggcacttctggggcctttgttttcgttgtcagcacaccaag

SEQ ID NO: 224398 - DNA, 409 bp, Gossypium hirsutum
tcatgatggtgtggatattctcagtctctctgtgggaccaaatagtcctccaacagacacgatgaccacatttttaaatccttttgatgctacacttcttgcagctgtcaaagctggtgtttttgttgcacaggcagctggaaatggaggtcctttccctaaaactttggtttcttatagcccgtggatagcatctgttgcagctgcaattgatgatcgtagatacaaaaaccatctgaacttgggaaatggaaaagctttagctggacttggattgtccccttctactcattcaaatcaaacctacaccatggttgctgcttatagatgtgctactagattccttagcgacaaagtttagtccctcggactgccaaaggccagaagttttaaacaagaaatttggtga

SEQ ID NO: 224399 - DNA, 418 bp, Gossypium hirsutum
cccacgcgtccgctccattttctctgaaatccaatggatccagtaagcagttggggcaatggctccctcgactccgtcgatcccgaaatccatgacctcatcgagaaagagaagcgtcgccaatgccgcggcatcgagctcatcgcttccgagaacttcacttccttcgccgtcatcgaagccctcggcagtgccctcaccaacaaatactccgagggcatgcctggtaaccgttactacggtggaaacgaattcattgatgagatcgagaacctctgcagatctcgcgctatccaggcttttcacctcgaccctaccaaatggggtgtcaatgtccagccttactccggtttcccggccaacttcggtgcttacacggccggtctccagcctcatgataggatcatgggactcgatt

SEQ ID NO: 224400 - DNA, 412 bp, Gossypium hirsutum
cccacgcgttcgcccacgcgtccgcccacgcgttcgtccacgcgtccgcttagccaaaaaagtcaaggacccttctcatctttccgatgatggaacttatgcaatgaaaaaagttctcgttcagaataatgagcagttggaattggttcgtgaggagatccgtgtttcatccttgtttagtcaccctaatctgctttcacttcttgatcatgaagcatatttgttatttcctgttcatttggatggaacattactggacaattccaatgctatgaaagctaaaaaggaattcttttctacctcagatgttcttcaaatatttcggcagctgtgtgcagggctgaaacatatgcatggtcttgttcctccatatgcacataatgatgtcatgccaggaaatgttattttaacc

SEQ ID NO: 224401 - DNA, 359 bp, Gossypium hirsutum
aagcttcaaagtccctttacgatgccaaggtgctaccaactaccttgataccaaagcaagggggcaacatgtatactgcatctctttatgctgcctttgcatcccttattcacatcaaacacagtgaattggcaggaaagcgggtgattttattctcttacggaagtgggttaactgccacaatgttttcattgcgattccatgaaggtcaacatccctttagcctatcgaacattgcatcggtgatgaatgttggtgggaaattgaagtcaaggcacgagtttccccctgagaagttagttgagactatgaagctcatggagcatatgtatggtgccatagatttcgtgacaagcaaa

SEQ ID NO: 224402 - DNA, 408 bp, Gossypium hirsutum
tggattttcattttatcctaacgctttcattcattgctttcacactaatggtgtttcagtacaaagctcgaacaagaaggcttcctcctggtccatggaagctccctattataggcaacctacaccaactcggtgactcatcccataaatccattcaaagactctcccaacaatatgggccgatgatgtttctgcaactcggtgccgttccaacactggttatctcttccgcagatgctgcaatggcgatcttcaaaggccccggcggcggccatgatcttgccttctctggtcgacctactaatttatacgttgcgaagaagctaagttatgaatataacggtttaactttcgctccttatggtgaattattgggggaaatgaggaagattgcattaacggatcttc

SEQ ID NO: 224403 - DNA, 416 bp, Gossypium hirsutum
aaaagccccttctgtcaatttccacattcatgcaggctgctaggaacaatgttctcctagccgttccggcacttctttatgccatcaataactatctgaaattcatcatgcagctttatttcaatcctgcaactgtgaagatgctgagcaacctcaaggttttggtaattgctgttttgctgaagatgattatgaggcgcagattttctgtgatacagtgggaagctcttgctcttttgctcattggaattagtgtaaatcagctgcgttctttacctgagggtagtacaaagttgggtcttcacgttacaaccggtgcttacatctacacattgatctttgtaactgttccatctttggcttctgtctacaatgagtatgcttcttaagaagtcagtttgtgacaagcatttatc

SEQ ID NO: 224404 - DNA, 427 bp, Gossypium hirsutum
ccggtttggaattccgggctcaggcgtacggccttcttcttcttcgattaatatttctcttctctaatccacctaaagctccttcaagtttttgagaaacgcaatatattaaaaaaaggataactaaaaacacctttttgaggttttgcgatggcatcgaagcggatcttgaaggaattgaaggatttgcagaaggaccctcctacatcatgcagtgctggtcctgttgctgaagacatgtttcattggcaggcaacaatcatgggtccaccagacagtccatattctgggggtgttttcctagtgactattcattttcctccagattatccctttaagccttccaaggtggcatttatgacaaaggtattccaccccaatatttacatgcacggaagcatttgcctagacatcttgaaagagcaat

SEQ ID NO: 224405 - DNA, 416 bp, Gossypium hirsutum
cccacgcgtccgcccacgcgtccggctttttcaactccctcatcgatgcttacaatgaactttttttttcttcaactaacacaccattaccagattccttatcaaattgaaactctaaataagcaacaacacgacgttcaaattcggtgacctgaaagttgaaacagcccaatatatttgcaatttgattatcagccaaatctgggttttatttactttgttgcagagatggcaaaatcagttgaaaatagagctttaaagaaaggtgcatggagtcctgaagaagataagaaattaattgcttatattaagagatatgggatttggaattgggcagaaatggctaaaccagcaggattgcaaaggtcagggaagagttgtaggcttcgttgggtgaattatttaagaccgggaat

SEQ ID NO: 224406 - DNA, 127 bp, Gossypium hirsutum
gaagaacttaacatggatctattcaggaagtgtatggaaccagttgagaaatgtttgagggatgctaagatggacaagagcactgtccatgatgttgttcttgttggtggttccactagaattccaa

SEQ ID NO: 224407 - DNA, 402 bp, Gossypium hirsutum
cccacgcgtccggtttccagcagattcagaagatggagtgggaaattttggaggttaaaagtaagcattggttgaacgctgttaaaggggcggttaaaacggtgttttatggagagagattactctgtgatcaagtgtttgcaatttcgtcttccatcagggaatcttgtttcactgatgtttcaaaggaaggagctttggctctgtttggattcccagaaaatgtagccaagtgcaagaaaactcccgagaaaatgttccgtatcttggatttatatgaggcggtttccgacctttggcccgagattgaatcaatctttagcttttaatccacctttaccgttcgatcgaccgcctgtaacttcttaatcaggctcagcgatgcctttagaacgattttta

SEQ ID NO: 224408 - DNA, 431 bp, Gossypium hirsutum
acgagaagcaaggaaactcttcgacttgaatatctcccaattcttctgaaaagattgaccgatccgcttcgagacatgcctaaggatgaagctgttaagcaggttttagagtttatgaacgcttactcaataagccaagaggatttcgatacaatcgtggagttatctaaattccagggctatccaaatccaatggaaggcattccatcagctgtcaaagcagcactgacaaaagcatacaaggaaggaagcaaaacacgaattatacgagctgcagatttagtaactcttcctggaatgaaaaaagccccaaagaagcggattgctgcaattctagaaccatcagatgatgtattaaggggaggagaatggtgacgaattgccagaaaatgatgagaacacttcagactcagaggactttgaaggtacta

SEQ ID NO: 224409 - DNA, 226 bp, Gossypium hirsutum
gcggtggcatgggaggccgggaagccactatttattgaagaagtggaagtggcaccaccccaaaaacatgatagtcgtattaagattctcttcactgctttatgtcacactgatgtatactactgggagtgtaagggttacactcctctgtttcctcgtatacttggtcatgaagcctcatggatcgtggagagtgtgggtgagggtgtcaatgattagatacctg

SEQ ID NO: 224410 - DNA, 208 bp, Gossypium hirsutum
cccacgcgtccgtgcagcagatgctcattggactgatttgatgaccataacacgaggggtgttgaacgagcaatcctaatatcccgtgtctcgtggtgatttcaccatcatgctcaatcacatcgttcttggctgcaagtatgttagctcttttgttaacaaggcgggttttgtcaaactcattgtacttgctggtgtgatcaaaatt

SEQ ID NO: 224411 - DNA, 293 bp, Gossypium hirsutum
tcgaacaaaatcaactgcttcacaatggcctttacatccatggctctttcttccccatcattggccggtaaggcagtgaagttctccccttccacccctgaaatccagggaactggccgtgtttccatgaggaaaaccaccaagcctgttccttctggttgcccatggtacggtcctgaccgtgatttgtactttggttcacttttcggtgagccaccatcttacttgaccgttgagttccctggtgactatggttggtacactttttgtctcttattttatccccgaacctt

SEQ ID NO: 224412 - DNA, 401 bp, Gossypium hirsutum
gtggattccttgtcttgaatttgatgaggtggtggctgtccacagggagaatagcagcggtccagggtactatgatgggaggtattggactctatggaagctgccgatgtttgggtgcaacgactcttctcaagtcctgaaagaaattcacgagtgcaaaaaggcataccccaatgcttatatccgttgcctggcatttgacaacaagcaccaaggtcagtgcatgtcctttgtcattcacaaacctaattgaaaccaccaccaccgactgatcagcagctagctgcctactgggttttccccaatctattcctattcctttttattagtagaataatgctatatgaactctttttcttctgtcttctcgatggatgacaataggacagtcggtggatgat

SEQ ID NO: 224413 - DNA, 388 bp, Gossypium hirsutum
ggacgctaggcaagatatggtggtagtttaggtgccaaagctaggcaaagaagcgggcgcggattgccattaaggagtgagaacaacaaatgtgctcgtgtacttgttgtgtgctcggagattactgctgttacctttcgtggacctagtgacactcacctagacagtcttgtggtgccaagcattgtttggtgatggtgcctcagctgttataatttttgcagaccccgtgcccgaaatcgttaagcccatgtttgaactattctcatcatcccaaacgatcttgccagatagtgatggtgcgattgatggtcacctttttgaagtttgtcttacattttaccttcttaaggatttttcggtgcttatctctaaaaatatagaaaat

SEQ ID NO: 224414 - DNA, 277 bp, Gossypium hirsutum
tcttccacttaattacccgcctctcgcaacaaatctcagcccttgagctaacacacccgcttgtcaccattatggctagagggttgaaaaaacatttgaagaggcttaatgccccttttcattggatgcttgacaagcttggtggtgcttttgctctcaagccatcatttggtcctcacaagtctagggaatgcttgccattgatcctcattctgcgaaacatgatgaaatttgctaacacctataaagaacttattgttattcttattcaaaggct

SEQ ID NO: 224415 - DNA, 427 bp, Gossypium hirsutum
  unsure (1)..(427): unsure at all n locations
gcgggtcgatccacctanacattacaatttcanattctttttttaagggcagttgaatcttcgtagtgaacggtgtaattgatcacatggtgatctaactccctcattgcaaaggataacaggacgctttttttgtaatgggaaccaatattgtatccctcatcattcttgttaggacaaaacaaagaagagtttattgctgctttaccagttgatgaattgattgagaaagctgacggttttgctggtgtttttcctgagcacaagttttagattgtgaatgcgcctacaagccaggaaacatatattttgaatgactggtgagggggttaattattctttttcttttaataaatcattcattgtcttatttttggctttttcaacctactcatctcgaagtgcttttcgcattgttttgaccgaa

SEQ ID NO: 224416 - DNA, 420 bp, Gossypium hirsutum
aatcatcttacggctcgcagaccaatctatataaacaactgcaagcttggagagaaaacgcttcattggtaaatccacctccagaaatataggtcataaaagccaaaggttctctttgctaccttaaggcaacaattgacgcctggttgccccctcatgctgtgtataatattgtcactgttcctgataaccggagagtttttaaaaacgttaaggtgagtgtactagtttcacccacaataataaatcagaagttttgtatcatgttacaattaccctatgttgcttctactctttatttttcccaaatcacccatgtttgacaagttttcatattgtgggtacgaggatatgatccttaaaagaaccttttatgcatgaaagaatttgaaacacacttcaagtccgagtaacattaac

SEQ ID NO: 224417 - DNA, 437 bp, Gossypium hirsutum
cccacgcgtccgcggacgcgtgggtttggtttcaggtataagggtgggaaatctatacggggatccaatatcagcctctgttgggcacaagatcactgctagacagcgatggactccaaccgcatttcagcttcaaattcttgagaatatatatgagcaaggaactggaacaccaagcaagcaaaaaatcaaagagatggcatctgaactagcacaacatggtcaaatctctgaaacaaatgtatataactggtttcagaataggcgagctcgatcaaaaagaaagcttcaatcctctacagattcagttaatgcagaaacagatatgagcacaaaagagaaaaggactaaaccagtagatccggacttcattaccaacatttcacaaggagttgaaagcttctatttccaagcttctatttcacgaggctatgatt

SEQ ID NO: 224418 - DNA, 425 bp, Gossypium hirsutum
cccacgcgtccgcccacgcgtccgcggacgcgtgggcaagtgtgttcggtggtgcagctgggccaccaaagggaggcaaccctgattccaacacactgatcagcgatatgaccactgtgatatgtttatatgattatcattcacttgacagaactggaaggaaagagaagggagtgacagcacttgacccaagagccaacgactttgacctcatgtatgaacaagttaaggctctcaagagcggtattgctgtcgacaagcctatctacaaccatgtttctggtctcttggatcctcctgagctaattaagcctccaaagatccttgtcatcgagggactgcaccccatgtttgatgaacgtgtgagggatctgttagacttcagtatatatttggatatcagcaatgaggtcaaatttgcatgg

SEQ ID NO: 224419 - DNA, 427 bp, Gossypium hirsutum
  unsure (1)..(427): unsure at all n locations
ctgaatgaaagtgaaaggaaaaagttggctgaggagcttgaagagaatgctgttcaaaatagtgcactacatttggctgctttggagcaaaaaagggctgatgaaaatgtaatgaaattggctgaagatcagaagaggcagaaggaggaacttcacaacaggataattcaacttgagaaaaaattagatcaaaaacaggcattggaactggaaattgagcaactgcgaggatcactgaatgtaattaggcacatgggagatgaagatgatnatgaagttcttgagaaagtggatgcaagtcttaaagagttgagagaaaaagaggcagagcttgaagacttagaagcattaaaccaaactcttattgtaagagagcgcaagagcaatgatgaactgcaggatgctcgcaaagaattgattaatggat

SEQ ID NO: 224420 - DNA, 416 bp, Gossypium hirsutum
agcagtccggtccttcacctgctgcggcacctggtttaagtgttcaatttgatggaaaatctaatagccgttccttggacattgactttgaggaaaggctgaaagcaattagaagggctgcacttgaacaaaagaaggtagaggaacaaaaagaatttggaccaattgactatgatgcacctgttgaatcagagaagaaaacaattggtcttggcactaatattggagtaggaatagctgttgcggtctttggtctagttttttcccttggagacttcctaccaggaagtgtcaatccacctgaggaagctgcagtgattgacaagaaactgtcacgagaacagaaagctattcttgagactaggctggcacagtttgaggcaacactaagtacctctccagaagatgaaactgca

SEQ ID NO: 224421 - DNA, 425 bp, Gossypium hirsutum
caaggcaaaggcaacagagaacaacagttttatcttttgtttgaccctacaagaaacttccacagctattccatcatttggaaaccccaacacatcattttcttggtggataacatccccattagagtcttcaaaaatgctgaatccattggtgtaccgttccccaagagccaacccatgaggatttactctagtttatggaatgctgatgattgggccacaaggggtgggttagtgaaaactgattgggcaaaagcacctttcacagcttattacaggaacttcattgccaatgcttgtgtctggtcaggaagaagttcatcatgcgctaaaactaacttggtcttcgccgttgcatgggaaacaaacgaactttgttgcaccaggaagaagaatgattataatggtttcaaaaatttttcatg

SEQ ID NO: 224422 - DNA, 433 bp, Gossypium hirsutum
tcgagctctttataacctatccatctccccatcaaacatatccttcatctcggaagctgatttgataccttttctgctgaatgccttgggggacatggaagtcagtgaaaggattctttccattttgaacaatgtagtatccactccagaaggtagaaaaggcattagtattgcaccagaagcattcccgattttggtggacgtgttgaattggaccgattcgccagggtgtcaagagaaggcatcgtatattcttatggtaatggcacataaagcatatggagatagacaggccatgatcgaagctggcattgtttcatcattgcttgagctaacacttttgggtagtacattggctcagaagagagcttctaggatcttgaggtcctgagagtcgacatagggaagcgagtttcaaaaaacttcggtggga

SEQ ID NO: 224423 - DNA, 377 bp, Gossypium hirsutum
gaaaaggactgttttcttgtggctctgatgggaatgttgatgtgcaagtgaaggaagagctagtagtgaacctgagacaaaaaaaattattaagaaaggcaatacagtttgttctgattctgtcccgaaagctcggaagaaacctagatttgttgtgcatgcagctggtgatgtaaggatctcatgttatggatacagatggcgaaaatactttcagaaaatgttgaaaggaaattctaatcctaggaactactatatatgcacttctgctgggtgtcctttacgtaatgcttatttatacagctttctgagtattctatatgctttttattataatacatataaagggtgtttatttatctttatcttgccttttt

SEQ ID NO: 224424 - DNA, 424 bp, Gossypium hirsutum
attttctctcttttacttccttgcttttctccaattgcaaccatggctttgaaaggtttggttgagggaggcattgcatctatcgtcacccgcgcttcaactcatcctctcgaccttatcaaggtccgtatgcaacttcaaggtgaatcccatctccctaatccttcccttcaactttatcgtccggcacttgccgtcaactctgctgccgttgggaatgtttcgatctcgcaacctcgtgttggtcccatttctatcggtgtccgtatcatccaattggaaggtgtagcggctcttttctccggtgtctccgccacgatgcttcgacaaacgttgtattctactacccgtatgggactttatgaaattataaagaacaaatggactgacaaggaaactgggaatttgccacttacgagcaaga

SEQ ID NO: 224425 - DNA, 428 bp, Gossypium hirsutum
cccacgcgtccgacgagatcgagcttctcaaatgatttctcgattacacgacttcgaaaaccaaggctaattcttctcaccatcaccatcacgatacggcgttgttttactatctaatcaaatcgaaactccagctcgatttcaacaagaatcagttagtcgagaagcttcgaagattgaagaagaaatataggaacgtgatgaataagatcaattcaggtaaagaattttccttcaaaagccctcatgatcaagctacttttgaaatttctagaaagatctggagtagtagtgttggcaaagtagaagataatgttttagattatgatgaaaataatattacttctactactactactaacatcaatttactcgatgaaagtggagagaaaaagaatcttactccgaaatccgcagccaataagaga

SEQ ID NO: 224426 - DNA, 300 bp, Gossypium hirsutum
ctctctctctcttattagaaattagacactactagacttgtagaaatgcaagggctcgtgtggttgtcggtactcctttgcgccacctaccatatcgctctttccgcgaccaacgttacggtggcggacgggctgttagataatggtaactttgagcaagccccgaatgcctcaaacatgaagggcacggttgttgtggggcgttatgcaataccaggatgggtaaacgaagggtttgtggaatacataaagttcggtcaaaagcaaggtgacatgttgctggtggtgcctgagggagcc

SEQ ID NO: 224427 - DNA, 409 bp, Gossypium hirsutum
gaaaaatctaatgacgattctccggagaacaatcctatgtataccactgtttatgtgggcgacctcgctccagaggttacatcagctgatctccacagtcatttccatgccctcggagcaggaactatcgaagatgtccgtgtccaacgagacaaaggtttcggttttgtgaggtacagttcacacgatgaagctgctctcgccattcagatgggaaatgctcgaattctttgcagtaaaccaatcaagtgctcatggggtagcaaaccaaccgcactgggaacaagctctggtcctctttctccaccaacagctgcacatatggctggtggtgctcaagtaatgaacatgatgcattcacaaggtcagtatgccgttaaggcacatgcagtcatgggaatgatgtggt

SEQ ID NO: 224428 - DNA, 427 bp, Gossypium hirsutum
gaaaaaatggataatttgatttctctggtgaacaagattcaaagagctccactgctcttggtgatcatggagaggcaagcgccttgcctactctttgggattccttaccggcgatcgccgtcgttggtggtcagagttcagggaaatcttcggtgttggaaagcgttgtcggcaaggattttttacctcgtggatccggtattgttactcgtagacctctggtgttacagcttcataaaagtgatgaaggaaccagagaatatgctgagtttcttcaccttcctagaaaaagaattaccgattttgctgctgttaggaaggagattcaagatgagacggatagagaaactgggcgaactaaacaaatatctagtgttccaattcatcttagtatattttctcccaacgttgtcaatttgactctggt

SEQ ID NO: 224429 - DNA, 378 bp, Gossypium hirsutum
tccgtctttctccaaagctggcaaagaaagtgtccggtgatctatgctggaagctactacccatggtggcccgatgaacttcctatgttgcgtcaaggcaacattggtgcagccaagttggcccttgagaagaatggctttgccctccctctttactctgattcttccaagggtgcttatgtccttcaaggggctggtgttgctgggattattctccctgaatcagaggagaaagtgattgcaattcaagaagggtgatgcatttgctcttccatttggtgtcatcacctggtggttcaacaaggaggacactgtatttggggtcctttttatggtggatacctcaaaaggccctaaaccatgccggtttactgattt

SEQ ID NO: 224430 - DNA, 275 bp, Gossypium hirsutum
cttgtttaaaatataagaaaaaaaatcatacgcaatgagcactgctggtcaggttattcgtttgaaagcttctgtggcatgggaggcggtgaagccactatcgatagaagaagtggaagtggcaccaccccaaaagcatgaagtccgtattaagattctcttcactgctttatgtcacactgatgtatactactgggagtgtaagggttacactcctctgtttcctcgtatacttggtcatgaagccttagggatcgtggagagtgtgggtgagg

SEQ ID NO: 224431 - DNA, 328 bp, Gossypium hirsutum
ccatctcaaagactgcttttaggtttgttggggaatgtgctgtggttcaaaatctgaactgggtccttcaaatttcaccatggaaggtgagctacaagagcataaaattggtgctctatgtaaatgttcgcttttgcttgaattggctgcttctaatgatctagtggcctttaaaaatgaagtagaagagaaaggtttggatcttggcgaagcaagtttgtggtatggtagaagaatttggtctagaaagatgggatttgaagaaaggacgcctttgataattgctgccatgttcggtagcgtggatgttttgaaatacattatttgg

SEQ ID NO: 224432 - DNA, 419 bp, Gossypium hirsutum
tacaaactcaaaaaccccaagttctcactttcaaaaaacttcccacattcaccatgtctggcaggtgcggcaactgtgactgcgctgaccgcagccaatgcacgaagggaaacagcaacaccatgatcattgagactgagaagagctacatcaacactgctgtgatggatgctccagctgagaacgatggcaagtgcaagtgcggtactggctgcagctgcacagactgcacctgtggccactaagccaacatacaatggtcatgcttcaggtcatggcatatatagggatctaaataatgaatttaaggttgaataatttgtctgttgtagtttgtgtggtgacttatatctgtcagttaacctttgtatcctttactatgatgtaatggctatgcttatggccttatctggttaatg

SEQ ID NO: 224433 - DNA, 419 bp, Gossypium hirsutum
cccacacgtccacagggttcttactgttcttggtatccaccttccgacgttggctgcagggattcattccgacccggaacacccattaacagggcttctaacagcttcaactcgcaaacgcctgcagaatggtcgcattcactgtcgacggtttcacctactgaagctgctggagtcatagctcttttaaaagacaaaagtgttgatgagttacggaagctttcgtctgataaggatgcatacaatcagttcttactatcagctgatcaagttaaaattcaaaacaatatacgagatgaactacgaaacgagactttgcagcttgctaggaacaatttgtataaagaaccacaaataatggagctaagaaaccagtgcaggattattcgcacaaccgaattggctgctgctcaggaaaa

SEQ ID NO: 224434 - DNA, 225 bp, Gossypium hirsutum
cgtggttatacggttcttcacatagctgcaatgcgtaaagaaccgtcggtgataatgtcgcttttagcaaaaggggcatctgcttcggagttgacgttggatggacgaagtgcttttaacatctgccagagattgacgagaccgaaggattatcacgcgataactgagcatgggaaggaaacaaattaagatcggatatgcatcgatgttttgtatagagaaatt

SEQ ID NO: 224435 - DNA, 426 bp, Gossypium hirsutum
cccacgcgtccggcaagtgatggaaaaaaacattattcaataatagattcttaaggaaagaaaagtggcagagtaagggagggaaaatggaaactgatgatacaggtagaaaaatggaggaggaattaggaggcaataagagattgagtgaaacccctcccgatgatgattgttgcccaatttgctttggtcccttcactgttccttgtcgatctaattgcggccattggtattgcggaagttgtattttgcaattctggaactattcctcggcgtcaaagccatgcgggtgtcccatgtgtacctgcatgattgttaatttgatgccagaggcatcgttggaacaacaaccacagaaccaagaagttgccgaggtgcttaaaagtgtacggaggtataaccttctcttttttggaggtgcacgtg

SEQ ID NO: 224436 - DNA, 414 bp, Gossypium hirsutum
gagatctcctcccacaactcctccacctcctcctctatggaataacactgaccctcgattggctcagagtcacgccattaaagctcgccaaggttacattcacactccaccttcacgttcagacagggtcattgtgttcctcaacacacaaaacacgatcaatgggaatgttcggtggtcggtcaacaatgtctctttcgcacttcctcatacaccttacttgatcgcactcaaggaaaatctaacccatgtgtttgatcaaaccccacctcccgatgggtacgatttccagaattattatatccgtatagtacaagagaacagaaatgctaccttcagcaatggggtttacaggttgaactttaactcaactgtggatattatacttaaaatgccaacttcatgagtcttggt

SEQ ID NO: 224437 - DNA, 322 bp, Gossypium hirsutum
gcccacgcgttctgccagaattcgacgtcaccgttcgttcagacaacggcaacgacaagatggggatttactacgagaaaggtagctccatcaatgtttactaccaagacgttaatctcagtaacggcgcgttgccggttttttaccagccaaccaataacgtaacactgttcaaaacggcgctgaaaggctccggcatttaactaaccgccgccttgcttaagttcatttccaatgatcaaaataaaggaacggtgccgtttactttgaagctgagagcgccggttaagattaaagctggatccgttaagacgtgtaaaat

SEQ ID NO: 224438 - DNA, 385 bp, Gossypium hirsutum
cccacgcgtccggtgcttggagttggcatctattggtgatctgaaactcgttgagcggggacaaaactataccctagcccctgaatctagcaagcaaataaaatccaacatcaaggtgtcatcaaccgataccggattcatatttggcaacattgtttatgagacttcgaatgtgcttgaaagaactgttgttgttcttaatgacattcatattgatatcattgattatatttctcctgccgtttgtaccgattcttcattcataacttatgttgtctgatatttatttggtaaaacaatgttgtctgggacactgtaatccaatattataaggaattcctttatcatattaatcaagtcaacctatttttaaatttcccacacc

SEQ ID NO: 224439 - DNA, 431 bp, Gossypium hirsutum
cagagagctacagcaatggtaccatgagtctgtccatgtaggccatgctgatctcagcggagagtcgtggtggccctcattgaagacaacggatgatctagtttccatcctaaccaccctcatttggctcgcttcggcccaacacgctgcacttaatttcggacagtacccttatggtggctatgtccccaaccgtcctcctctgatgaggagattaatacccgatgaaaacgacctcgagtatgctaatttccttgctgatccacaaaaatatttcctatcagcgttgccaagtttattacaagcaacaaagttcatggccgtggtcgacaccttatcgacacactcacccgatgaggagtacttaggagaacgacagcatccgtcgatttggtctggtgacgccgagataatcgaagccttttatgggt

SEQ ID NO: 224440 - DNA, 387 bp, Gossypium hirsutum
cccacgcgtccgggtggatctgggatggacctcataagcaaagcaaggacactttctggggctgtaagcgacccttcaaagctacccaaatggaattatgacggttccagcacaggtcaagcccctggtgaagatagtgaagtgatcctatatcctcaagctatcttcaaagacccattcaggaggggcaacaatattcttgttatgtgcgatgcttacacaccagctggtgagcccatccccacaaacaagagatgcaacgctgccaagatatttagccatcccggtgttgctgcggaagagccctggtatggaattgagcaagagtacaccctgttgcagaaagatgttaaggggccaattggatggccttttggtggctaccct

SEQ ID NO: 224441 - DNA, 418 bp, Gossypium hirsutum
gggtcatcccacttttgctttcgtaagagagggttcagtttcagacccagttaagggaggggttattaacaatttcaagaacttaggggttcatctgttgtatggggatctttacaatcatgagagtctggttaaggcaataaagcaagctgatgtggtgatatccgcggtaggttcgatgcagttagcagatcaagttaagatcattgctgccattaaagaagctgggaatgtgaagaggtttttcccatcggaattcggaaatgatgtggaccgggttcatgctgtatagccagcgaaaacagcattctcaaccaatgctcaaatccggcgtgctattgaggctgagggaatcctctacacctatgtgtccagtaactgctttgcaggctattttttttctgtgttgtcacagcca

SEQ ID NO: 224442 - DNA, 428 bp, Gossypium hirsutum
ctcactgctgcttgctgtttaaaactatatacatgtaggttttgccatgataaatgcagggaccattcaggggataggaaggctacaactgatatgatgtgcatgagctgcctgaaaatcctgcctgttggaccattttgcacgacaccttcatgtggcgagctctcaatggcaaagtactactgcaacatctgtaaattttttgatgatgaaaggaatgtctatcattgcccattctgcaatttatgccgtgttggaaagtgacttggtgattatttttttcattgtatggtggtgaagtggtgtgtggccaaaaagattgtctaccacaagtgttcaataaaagtgttataaataaacttttctattatgctatgattttttattcacattaattgaaagcgtaagagcactttcatgtttttatt

SEQ ID NO: 224443 - DNA, 424 bp, Gossypium hirsutum
tgaagatgtgttacatactcttaaattttctctggattaattgaacaatgggacactaaaaatggtctattttttcaggaacgcactattcattaaatgtaaaggaaaaggttcaaagagtggagcctcctctagatgttatggttgccaaggcacatgaattaaaattacaacacggcacattgtactgttcatgatccaacagatgcagcacgttagtccttaatgtataggctcacgttagatgatcagtgatcggcatagatgcccacagtgcaaagggaacaaggtttctcatgaaaagaaggtgcttggaagtcatattgagaaaggaatgagagatggtcacaaaattacatttgagggacaagctgatgaggcttcatatacaataactggagacattttttttgtattgtaacaa

SEQ ID NO: 224444 - DNA, 297 bp, Gossypium hirsutum
ggcttagttgctttcctgaaagctgtacctttctgatttccctgaattttgcctgcgttgtaggataagtgaacttaggagctcttgaaagacttgtgtcaagatctcccaacctcaatagtttacgactaaaccgtgcggtcccgcttgataccctccaaaaactattgatgcgagcttctcaactggtggacttgggaatcgggttcttatgtacatgatccattctcttaggcccttaacaaatttaaaatagcctttcaaaggtgcaaatcaatcatgtatttatcggtgttt

SEQ ID NO: 224445 - DNA, 431 bp, Gossypium hirsutum
cccacgcgtccgatttctctgtctatgacaagtacctaaatggactagaaagagtgataaaaaggatgaagagccaatcagaatcatctcttctgtctgctgttcgacaatcaagaggagaaaagatactcgaggtggatgggacagtcactactcaaccagttcttgaacatgttggattatcaacatggccaggtcggttaatactgacagatcatgcattgtactttgaagcccttaaagttgtatcttatgataaacctaaaagatatgatttgtcaaatgatctaaagcaaatcgttaaacctgagttgactggaccatggggtactcgactttttgacaaggcagtcttgtacaaatcaattttcatatcagaaccagttgttatagagttcctgagcttaaagggcacactcggcgtgattact

SEQ ID NO: 224446 - DNA, 413 bp, Gossypium hirsutum
agaatacagacaaatgctcattcaagctattcattcctgtgcaattaagttcccagggggggcaagcacagttgtgcatcttcttatggatttcttgggtgacagtaatgttgcttcagccattgatgttgtggtttttgttcgagaaataattgagactaaccctaaacttagggtctccattataacaaggctattggatacattctatcagatccgagctgcacgggtttgctcctgtgccctttggatcattggagagtattgcctatctctatctgaagttgatagtgggatggcaaccataaagcattgccttggagagctacctttctactccgtttctgaggaagggtgagcttcttgtgcttttaataaaacttcacaggcatactccattactgtcttcttaa

SEQ ID NO: 224447 - DNA, 421 bp, Gossypium hirsutum
gcgccaaatatcgagggtcgagggccatcacggtctttttgtcataagtttatgtgaccggggctacttcacttctccaataggaaaagaaaaaaaccctagcggctacactcttccctcactttctaaactaacagaataaatcaatcacggaaatggagttttctcaagccgacttcgatcgccttttagtcgccgaaaacactcgtaaaacgtctgaagtgaactacgctaaggaccctcttgatgctgagaatttaaccaaatggggaggggctttactcgaattaactaatttcagactgtttcagatgcaaaacagatgataaatgattcaatctcgaaattggatgaggcgatgatgattaatatccattcaagcacctaaacttttggggtgctgggaaactgctctttccat

SEQ ID NO: 224448 - DNA, 426 bp, Gossypium hirsutum
  unsure (1)..(426): unsure at all n locations
gggcccggaatcccgggtccgccccacccgtccgaatttatggggaggnnttttaaaatagggccctgttaacccagttaaggggtcctgctgtagcaataccttctgatgaaaaaatagctttgctgggggccatccagtctctgtttgaaggctcaatgtacacctttgtgttcctttggactcctgctttgagccccaatgatgaggagatccctcatgggtgtatctttgccacgttcatgttggctttaatgctgtgaagctcccttgcctctcgattgatggctcgctcatcacccaaggtagaaagctacatgcagaattgttttgtgatttcctctgtctctctcgtgctttccattataaccaatttcttggtcgcacctctcaaagtgaaaggcgggagaatctcatttgcaggtt

SEQ ID NO: 224449 - DNA, 372 bp, Gossypium hirsutum
cccacgcgtccgcccacgcgtccgggactattgtttgggatcagtacccacaggggcgatggggtgattctcgaaatccatcgtatggtgcactatccgactatcagttcatgaggccccgtgcacgtgacaagaaacttcaggaagaatgggctactcctttgaaaagcattgatgacattcaagagaaatttaaaaaccattgtctgggtaagttgagaagtagcccttggtccgagtttgatggtcttcagccagagacaaagatcatacatgaacagctaggaaagatcaatttgaagggcttccttaccatcaatagccaaccagccgtcaatggggaacgctctgattctccatctgtcggttggg

SEQ ID NO: 224450 - DNA, 417 bp, Gossypium hirsutum
cccacgcgtccgtgcagattgagagagcagacttttcttgcccttcttggtttcctgtgggtgcaaaatccttgattcatagaattctagacccaaatcctcaaactcgtattacaattgagcaaatcaggagcgatgagtggtttaacaagggctatgttcctgtcagacttcttgagtatgaagatattaacttggatgaagtaaatgctgtttttgatgatccagaggttgataaggaagaaaggggtaatgagccttcacgaaatgaggatatgggtcctttgagtcttaatgcatttgacttgatcattctttctcaaggcttgaaccttgcaacgctttttgaccgtgggaaggacaatatgaagtaccagacacgatttgtttcacaaaagccagcaagggtggttcttt

SEQ ID NO: 224451 - DNA, 347 bp, Gossypium hirsutum
acccttccgtcctaatttcctggtttccagtgagatgaaccctatttccaactggtcttaatagttccatctctttctttttcttctatggattttttgtttaaacttcttttatttcctttttgaaacaaagtaattgccttgttgatttgcaagcaaattttggtaaagttcttaagtatttgagtttagatcttctttgagagtgccgctatgggagtgaagagttttgttgaaggaggcatagcctcaatcgtggccgggtgttcgacccacccgcttgatttgatcaaagtccgaatgcagctccagggtgaaagccatgttcccaatccggctgttcaaac

SEQ ID NO: 224452 - DNA, 393 bp, Gossypium hirsutum
tcgcttaactggtcatattctcaagtgccacatcttgttttgactgatgcattatttgctagcattgggaggtcagatggtgctgaggtgaacagatgcttacaatatctgcaggatgtctcatgttatgtgaacttgaaacaatgtcttgtgattgcaggaagcttgtgggttgctagttgaattggaagctggcgcaactatttagaccgtttgtacattggctatgatgctgaacatacattaccagatctgtatgagaggtatgatgagcagatagatagctatgttcacagaatgcttgcacagtttcaaaattactataaagagctgtatcctgagatcgtgagcatgatgcccataaggacgttcaagctttagacacacgtctag

SEQ ID NO: 224453 - DNA, 449 bp, Gossypium hirsutum
ccggtacggaccggccgggacgaaccacgcgtccaaacgttccgaaacccaccaaaccaatgcccattttttggctccaatctctttaatccagctgggtaatactggcttaagctgccaactttaaccaagacatcgaagttccttggggtgatggcagggccaagattctcgaaaccggaaaccttttaactctaaccctcgacaaattctccggctctggttttcaatccaagaaccagtatctgtttgggaagatcgatatgaacattaaactggtcccaggcaactctgctggcactgttaccacttattatcttcgttcggaagggtcgacatgggatgaaatcgacttcgagttcttggggaacctaagcggagacccatacatagtccacaccaatgtatatacacaaggcaaaggtgacaaagagcaacagttctacctt

SEQ ID NO: 224454 - DNA, 387 bp, Gossypium hirsutum
cccacgcgtccgacttgatgaagctccgatctgtttacaaggatgcttttgttgagaaacatggtgtcaagttgggatttatgtcgggatttgttaaagctgctgttagtgcacttcaacatcagcctattgtaaatgctgtaattgatggggatgatattatttatagagattatgtagatatcagcattgctgttggtactccaaaggggcttgtcgttccggtagttcgtgatgctgacaagatgaattttgctgagatagagaaaacaatcaacaaccttgctaagaaagcaaatgatgggaccatttcaattgatgaaatggctggaggctcatttacgatatccaatggtggtgtctatggcagtcttttgagtaccccca

SEQ ID NO: 224455 - DNA, 415 bp, Gossypium hirsutum
gtctaattggaatatatcatgactggtgcgaaggtttctctacgtatccaagaacatatgagctgatgcatgctaatggtgtctttagcttgtatcaagataagtgtagctttgaagacatccttctggaaatggatcgcattttacggcctgaaggagctgtgatattccgggatgatgtcgatgtcctaaacaaggttaggaaaattgctggaggcatgagatgggacaccaagatgaatgatcacgaggatggtccccttgtgccagagaaaattctagttgcagttaaacagtactgggttggtggtatcaaaggaaacagtacatccagtgctgaataaaccaacatcaacaggtcaagtagttcaaggtaaaactaaaaagcaaaggttaaaatctcgaactgatgatg

SEQ ID NO: 224456 - DNA, 388 bp, Gossypium hirsutum
cccacgcgtccgctggaatgggatctgatctttttggttcctatgctgaatcatcttgtgctgcacttgttgttgcttccatctcttcttttggcatcaatcatgagttcactccaatgttatatcctctcatcataagttctgttggtatcattgtttgtttaatcacaaccttatttgcaactgatttctttgaaatcaaggctgttaaggaaattgagccatcattgaagaggcaacttatcatatccactgttctcatgactattggaatcggggttgttagttgggtagctcttccatcttcctttaccattttcaactttggagatcagaaagttgtcaagaactggcaactattcttatgtgttgcttgtggtctttgggc

SEQ ID NO: 224457 - DNA, 405 bp, Gossypium hirsutum
cccacgcgtccggttggtagaatcattattggccttacatactttataatctttctttgtttttgttgttttttacaaatggatgcttcacagaaaactattcttgttattggtggtgctgggttcattggcactcacacagtggtacaactactcaatgaatgttttaaagtgttaattattaacaatcttaataactctgttattgaagttgttgatcaggttaaggaattagtggttcctgagctctctaaaaaactccagctcaacttgggtgattcgaggaatagggatgacttggtcaagcttttctctaaaacaaagtactgccaactgaatatatactataatattttttggtttattggttgcatcacaatggtccattaatttattggcatttta

SEQ ID NO: 224458 - DNA, 421 bp, Gossypium hirsutum
  unsure (1)..(421): unsure at all n locations
aagagagagtcgagaaaggaaaacagagagcaagagataatgaagaccatactctcatcagagaccatggatatccccgatggggtcaacatcaaagtgaaggctaaaatgatcgaggttgaaggtcccaggggtaagcttacacgtaacttcaagcacctcaacctcgatttccacctcaccaaggacgaggagacgggcaagcgtaagctcaggatcgaggcctggttcggtactaggaagaccagcgccgncatccgtaccgccctcagccacatcgagaatctcatcaccggtgtcaccaaaggttaccggtacaagatgaggttcgtctacgctcactttccgatcaacgcctcaatcactggcggcaacaagtccatcgagatccgtaacttccttggcgagaagaaggtgcgta

SEQ ID NO: 224459 - DNA, 402 bp, Gossypium hirsutum
attcaggggacttaagaggagggaatatgaagctttcaaagattgcattgaggagatgagcgagagcgtggacaggctgagcaaatcagtgcaagagctcaagtacatgggtcaagccaagggtcaggatttcttgtggcacgttagcaatgtggagacctgggttagtgctgcactaaccgatgagaacacttgtgtggatgggttcgcaggaagggctttggatggtaagattaaggcctccatcagagctcgtgtcattaatgtcgctcaagtcaccagcaatgctttgtcattggtgaaccagtttgcctccaagcagtgatcaacctagccgctggttgctcttgcagtaaaagtggaaaaaaaaaaaagtggtccagttgtggtcaatggttactt

SEQ ID NO: 224460 - DNA, 397 bp, Gossypium hirsutum
cccacgcgtccggaaaaagaatttttggatcaaatagagaaacataagcggcataagaggtgtaaggaaaatgcagatcttcgtgaaaaccctaactgggaagaccataaccctagaggttgaatccagcgacactatcgacaatgttaaggctaagatccaggacaaggaaggtatcccgccggcccagcagaggttgatcttcgccggaaagcagcttgaggatggtcgtacacttgccgactacaatatccagaaagaatcaacattgcatctggttctgaggcttcgtggtggcattatcgagccatctttgatggcattggctaggaaatacaaccaggacaagatgatctgccgcaagtgctatgctcgtctacacccacgtgccgtgaac

SEQ ID NO: 224461 - DNA, 408 bp, Gossypium hirsutum
tgaggctccagatacaataactggagacattgtttttgtattggaacaaaagaaacaccccaaatttgataggaaatttggggacgacctttatgttgaccacaatctcagtttgacagaggctctatgtgggtttcagtttgccctgactcaccttgatggcaggcagctcttaattaaatcgaaccctggcgaggtcattaagcctggtcaatacaaggctatcaatgatgaaggtatgcctcaccatcagagacctttcatgaagggcaagctagtcatccagttccatgttattttcccagaatctggggtattttcacctgagcaatgccggaagatcgagagtatattgcccatgaggcctagtaagcatttgacagacatggagcttgatgactgtgaaga

SEQ ID NO: 224462 - DNA, 351 bp, Gossypium hirsutum
taactgtcacaaagattccgaatcatgtagcaattaatatcgctcttgagctcaagaagctgctgatagacaacagccttttggatgtctcacagtctgatttggaagttaatctttttaagctaatggagcggcgtggttatggggaagagtatataaatcggctcaagatgattaccagatttcaccatcaaagggttcctttggtgattcttgtttgtggaactgcctgtgctgggaagcctacaatagccacacaacttgcacagaggctgtacttgccttatgtatcacagacagctatggtttatgaatcgctatgcacatcaactacatgcaacattggcatcc

SEQ ID NO: 224463 - DNA, 407 bp, Gossypium hirsutum
ggcgaagcaagcgcaagtttttggtttgcaaactctgttttgtataccgtcggcaaatggggtgtggtgagttagggtcaacggaactcatcacgcaaagctcagatataatgaacaaggttcgggttttgtttaatttcaatatcgagatcgaagctggttcttggtgtatgagtaacaacactgctgatcaaggcgaaaatgacccctcttcgctttggattagtgacccacatgctggagtcgagtttaaggaaagcagcaacaccaccaccaccaccaccaccaatcatactatcaaccagtatcagcagactcagaagtcaattcagttctgcgacaatcgtaattcagtagtttaacccagaatccgagttctattcctgctggaaatcatcaccagcagc

SEQ ID NO: 224464 - DNA, 411 bp, Gossypium hirsutum
acttggtttggcaggacctcacggtggtgttgcctaactttggtaataaaccaaccaaaaggttgcttcaaggacttagtggatatgctgagcctggcagaatcatggccattatgggtccttctggttccggaaaatctactctgctcgactctcttgcaggtagacttgccagaaatgtggtcatgactggaaatatccttttaaatggaaagaagaagagactagagtatggtgctgttgcttatgtaactcaggaggatgtgatgttgggaactctaacagtaagagaaactttaacatactcagctcatttaaggcttccgaccacgttgagcaaagaagaagtgaaagacattgtggagggaacaatcatagaaatgggtcttcaagactgtggtgacacagtga

SEQ ID NO: 224465 - DNA, 395 bp, Gossypium hirsutum
taggaattgtgggtattaaagatcctgttcgctctggtgtcaaagaatctgttgcaatgtggcgttctgctgggattactgtacgaatggttacaggagacaacataaacactgcaaaggctatagccagggaatgtggaattcttacagatgatggcatagccattgaaggtccggatttcagagagaagagtcaggaggaaatgcttgctttaattcctaagattcaggtgatggctcgttcttctcctatggacaagcatactcttgtaaggcaattgcgaagtatcgctgctgccttgaagacgatacctgtatgagccactatacttacaatgctgtctttcgagtgaatagcaagaaaagtttctttgctttatttacgacgagtgatt

SEQ ID NO: 224466 - DNA, 392 bp, Gossypium hirsutum
gctgtttattcgcttcagctcatcacttcccattttctctcctcctccctcaccaaatgaaggtgtctctggtggcgaacgaagactttcagcacattttgcgtgtgctgaacaccaacgttgatggaaagcagaagatcatgtttgctttgacctccatcaagggtattggaaggcgtttcgctaacattgtttgcaagaaggctgatgtcgacatgaacaagagggctggtgaattgactgcacaggagctggacaatctcatgaccattgttgcaaaccccaggcagtttaagatccctgactggtttttgaataggcagaaggattacaaggatgggaagtattcccaagttgtgtctaatgctctcgacatgaagttgagagatgac

SEQ ID NO: 224467 - DNA, 394 bp, Gossypium hirsutum
accacgcgtccgagagccgacatccggtaacatgtggatacgtttggcattcatggcagccatgaaagggtataaagtggttctaactatgccttcttacacaagcttagagagaagagtcaccgtgtgagcatttggagctgattgaattctcacagatcccacgaaagggatggtgggaacaccgaaaaaggctcatgaccttttggagtccacaccgtatgctgtcatgttgcaacaattgtgaaatgctgccaacactcaagtgcactatgaaacaacacgtcctgagatatgggaggatactcttggcaaagttgacatcttcgtaatgggaatcaggagtggtggtgctgcttctagagcaggacagactcatatatgccaaaatgct

SEQ ID NO: 224468 - DNA, 379 bp, Gossypium hirsutum
cttccgttttgttttcctaactgggtttaaaggattccaccttccaatcaagctatttccctatggcgggcaatttgcaaaaggaatccacttcttcccatgagaaatcgactttgacaccggaaagcaaaagttctaacccagaaacatccaccgccgagaacaaaactttttccactgggccgtttcaaccagcacaggctggagctttccctaccactatgcctgggtttgtgccacccaatccttttgatttctcagccatgagtggccttcttaatgatccaagcatcaaggaactagctgagcagatagctaaagatccttcattcacccaaatggcagaacggctcactaagacatttcaaggggcaacaac

SEQ ID NO: 224469 - DNA, 411 bp, Gossypium hirsutum
gcccaaactaaaccaactaaaagctggcaaccatggccttccgcctaagcaccaatctggtgggaatcctaaacttaataaccttcctcctctcgatccccatcctcggagccggcatctggcttagtcgagaaggcgtgacggaatgcgaacggtttttggacaagcccgttatcgtaatcggagtcttcctcatgcttgtctcacttgcgggactaatcggcgcgtgctgtcgcgtcacttggctactctggctttacctagtcgtcatgttcctcctcatcgtgctcggcatcgtcttcaccatctttgctttcgcggtgacgaataaaggtgctggagaagctttgtctgggaaagggtacaaggaataccgacttggtgattactccaactggttacagaagagag

SEQ ID NO: 224470 - DNA, 406 bp, Gossypium hirsutum
cccacccgtccgcccaaatataacaacccaatcttttttccgccgctctctttcttccttcagacaccatatcttagggtttctcctcctctctacctccaatgggaaagggaactgggagttttggtaaacgaaggaacaagacccacacgctctgcgtcagatgtggccgccgcagcttccacctccagaagagccgttgctctgcctgtgctttcccctctgcccgtaagaggacatataactggagtgtgaaggctatccgaagaaagacaaccggaacaggtaggatgaggtatcttcgccatgttcctcgcaggttcaagacgggtttcagggaaggtactgaagcagcaccaaggaagaaggttgcagcagcttctgcttaaaaggcaaaattgtaatg

SEQ ID NO: 224471 - DNA, 408 bp, Gossypium hirsutum
taataaacgccttctttcttcttcttcttattcctttattgctttttagaatttttctgaatcgaaaatgagagagtgcatttcgatccacatcggtcaggccggtatccaggtcggaaacgcttgctgggagctttactgtctcgagcatggaatccagcctgatggtcagatgccaagtgacaaaactgtcggaggaggtgatgatgcttttaacacctttttcagtgaaactggtgctgggaagcacgtccctcgtgccgtcttcgtggatcttgaacccactgttattgatgaagtgagaactggtgcttaccgccagctcttccacccagaacaactcatcagcggcaaggaagacgcagctaacaactttgcccgtggtcactacaccattggcaaggagat

SEQ ID NO: 224472 - DNA, 292 bp, Gossypium hirsutum
gttggtattgagttgtggcaggtgaaatcgggatcaatgtttgataacatcttagtcgctgatgatgtagagtatgccaagaaactagctgaagaaacatggggcaagcagaaggatgctgagaaggcagcatttgaggaggaagagaagaagaaagaggaagaggaatcgaaggatgagccagttgattccgatgctgaggacgacgatgatgatactgatgatggtgaaggaagtgagtcggattcaagcaaagatagtgctgaggaagatgcagtacaacatgatgagc

SEQ ID NO: 224473 - DNA, 361 bp, Gossypium hirsutum
tttaaaggcaccagaaaacctttttaaagcttatgtgagggatattatatcggcatttgaatatgagactgaatgccaaaagctaattgcccatttaaagaccttggcttcaacactcaaagatcctgtccctagtattgaacgttttgcagatacatataaaatggactgtcccgctgctttaaatcgtttggtgacctcttgggttccagccacggtggagcaacgggccgcggcggcttgcctagcgactacctcggctgccattgtggctggatgtgtgcagaatttattactgccatggattcattgaaactcaacatggtggcttgtgatcaagtgtacccattgttgtctgacc

SEQ ID NO: 224474 - DNA, 383 bp, Gossypium hirsutum
agccttccgtttttgtttcggtgtgtttaattcgcaagggattttttcactcaaaaaaaaattgcaggctgcggggcccggaagagaggcaaagagagcaatggcaaagcacgaagaccttcggttccggtttactctttactagaactggtctacggcgaaagatcttagctggaagaagctcagcttaggttcgatcaatttaagtccaagtttgtcaaagtctttggtcatcctcccgatgtcttcgctcgatcttcagggagagtgaacttaattggagaacacattgactattaaggatactcaatgttgcctatggcaatcatgcaagacacgattgtggcaatcctgaagcacaaagaaggggaggctgaaaagct

SEQ ID NO: 224475 - DNA, 355 bp, Gossypium hirsutum
agccttccggggaggcgtcgggattttcaacttcgttttggagggttgtcccattgcgtgacttgctcaaacgatgtgggatctacagcaagaaacatggcgccctcaatgtgtgtttcgaaagagctgagcatttgccccgcgggggggggtccaagtatggaactagcattaagaaggaattcgccatggacccaacttgggatattatattagcttacatgcaaaacggggaacttttaaccccggaccatggctttcctgttcgaatcattataccagggttcatcggccggagaatggtgaaatgggtgaaaccgatcattggtaccacgaaagaatctgataattttta

SEQ ID NO: 224476 - DNA, 405 bp, Gossypium hirsutum
tatcaacctcagcaaaatggttcgatgtcagttttgaatatgaagggaagggaattggaagatcctgctaccaaggcttatatgaaggcaatggcagctagagctttatggcatcttgccaaggggaattcatctatatgtcggagtatcaccgagtctagagcattgctatgttttgcagttttgttagaaaaaggaagtgacgatgtgcagtttaattcggctatggcattaatggagattacagctgtggcagagcggtacaccgatttgagatggtctgcatttaagccgaattctcatgctgaagcttgttctttatcacttattgaagatcattgagaaggcctattcggagtagctgatttcttgtatcaaggcttttttatcttggcaaggactttt

SEQ ID NO: 224477 - DNA, 349 bp, Gossypium hirsutum
cccacgcgtccgcccacgcgtccggccccattcgttttcagatcattcgcatccgtaccatgctggaccaggatctttcttctgcctttgttgcctgtggcgtttttggttatgttaataatgtgggcttggtctaagaccttcctcatcagtttctacaatcttagaggccatttgcaccagacatgggttgttcctagattcggctttcagtatttcttaccatttgcaatggagggcatcaataagcgcatagaggaggccattctaagggctgataggataggggtgaggtcatcagccttgctgcattaaataagaacgaggctctgaatggaggagggacact

SEQ ID NO: 224478 - DNA, 411 bp, Gossypium hirsutum
aaaactctcacttttccctttcctctcaatcttcttctcttatttccgccatggaaatagggctcctttccttcccttcccccaaacccccgctttcccaaaccctaactctaaaacccaccgccccattcctccgaccttccaaacccaacctcccttctttcagaccatccccattcccttccatcagagccgccatttcccgaaccaagaaggaagaaaccgtcgaaactgtcaaaacccagttggagaactgttacctcttggcagccgtcgaatacaagggcttcaccgtccagcaattccaggacttgcgccgatcgcttcccgaaacgtcgaaactgctcgttgctaagaacactctggtcctgaaagccatcgaagggactaaatgggaggccttgaaacctt

SEQ ID NO: 224479 - DNA, 386 bp, Gossypium hirsutum
cccacgcgtgcggaatcgattacgagtacggcttcggccgttcggagaaccggatttgactggagtccgacatagccaacgtgaaaccgacccatgtattcaatgccgccggtgtcaccggtcgtccgaacgtcgattggtgcgaatcccataaggtcgagaccatcagaaccaatgtggtcgggacccttaccctcgctgacgtttgcagagacaaaggcctcatattgattaattatgctacaggttgtatctttgagtacgatgaggctcatcagatcggaacgggtatcgggtttaaggaagaggatactcctaatttcatcggttccttttattctaagaccaaagctatggtggaggaattgctcaagaattatgaaaat

SEQ ID NO: 224480 - DNA, 415 bp, Gossypium hirsutum
gattgttttaaccgcactttctgagacagaccgttattatgatgcaattgcagttcaacgggcggtcactgctgctaaaaaggactctgcattctcaagtccaaagactcaatcatatgtatcagaggttataacaacatcgccctctgtgaaccatggtgttaaattgcctattgttcctcaactccacaaggttccaagagcactgccattgagagtagctgccatgtttaaagtattggtgcctacgctatttgagaaacagggggctcaactacttgcagttgcttttcttgttgtctcaagaacatggatatcagatcggattgcttcattgaatggaacgactgtgaagcatgttttggagcagaataaggcagcccttatccgattaattggtataagtgttcttcaa

SEQ ID NO: 224481 - DNA, 416 bp, Gossypium hirsutum
ctttaggttgggttgcacttgagggaaagaaaataaaagaagaagaagcttgaatctatttgtttgaagatggagggtaaagaagaagatgttaagctaggagcaaacaagttctcagagagacaacctattgggacatcagcccagacagacaaggactacaaggagccaccagcagcacccttctttgagcctggtgaactcaaatcatggtctttttacagagctggtattgccgagtttgtagccaccttcttgttcctttacatcaccgtcttgactgtcatgggtgtgtctcagtctaaaaccaaatgtgcaaccgttggtattcaaggcattgcttgggcttttggtggcatgatctttgcccttgtttactgtactgccggcatttcaggtggtcatattaaccccct

SEQ ID NO: 224482 - DNA, 413 bp, Gossypium hirsutum
cccacgcgtccgctttatttatttatttctcttttcgctctttcgctctgcatttccatttgtctgatccgaaatacgaataacccattttggatccggcattctcttgtcagatccaaaaccctccatttctttttttcttgcgttaaaaaatggcgacaatggagagcttgatcgggcttgtaaacaaaatccaaagagcctgcaccgtccttggcgatcatggcggccaaggaatgtcgctatgggaagctcttccttctgttgctgttgttggtggccagagctctgggaaatcttcggttttggagagcattgtagggagagatttcttgcctcgtggatccgggattgttacacggaggccgttggtgttgcagcttcataagacacaatcaggggcggaatatgca

SEQ ID NO: 224483 - DNA, 416 bp, Gossypium hirsutum
cttgacattccatctgtcgatatggttattaattatgatatccctacaaactctaaggattgcatccatcgtgtgggtagaacagctcgtgctggaagatctggtgttgctatctcactagtcaaccagtatgagctggagtggtatcttcagatagaaaagcttattggcaaaaagttacccgagtatcctgctcaagaagaggaagtcttgcaatacttagaaagtgtcacagaagccaagaggctatcacagatgaaacttaaagaaattggaggcacaaaaaagaggaggggcggagatgatgatgatgaggatatagagagatatctaggcgtcaaagccaagtccttcaagaaaggtaagagaaaatgagattacctgcttgttatgttatctttttgtctgcatctacc

SEQ ID NO: 224484 - DNA, 271 bp, Gossypium hirsutum
taaagatgtaacagatgcaattcagaaggtagcttcatcttatgactgcaaaattgttgaaggtgttcttagccatcaactgaagcagtttgtgatagatggaaacaaagtcatactcagtgtctccaacccggatacaagagttgatgatgcggagtttgaggagaatgaagtttatgcagtagatatagttgcttcaactggtgaaggcaagccaaaactattggatgagaagcaaaccactatttataagagagcagttgacaagaat

SEQ ID NO: 224485 - DNA, 409 bp, Gossypium hirsutum
gtgatccttacattcttcacacaaatgtgttcagtcaaggcaagggtaacagagagcaacaattctatctctggtttgacccaactgcagatttccacacttattccatcctctggagcccccaaagtatcatattctctgtggacggtacacccattagagagttcaagaacatggagtcaattggtgtcccatttcctaaaaatcagccgatgagaatttactctagcttgtggaattctgatgactgggctacaaggggtggtctggttaagactgactggaccctagctcctttcactgcctcttacaggaacttcaatgccgatgcctgtgtgtggtccaatggagcctcttcctgcaaatctactgctacatcaacaaacagtgcatggctctctcaagagat

SEQ ID NO: 224486 - DNA, 367 bp, Gossypium hirsutum
acccttccgcggcccgtgggttttgcccatttaactgctctctttttgatcgtctccaagagagagatctggtgacagctaccgtacacattcacacacacattcactgaatgggtcgagtcatccgagctcaacgtaagggtgctggttccgtcttcaaggcccacacccaccaccgcaagggtcctgctcgtttccgcagcctcgacttcggtgaacgaaatggctacctcaagggtgttgtcaccgatgtcatccacgaccctggccgtggcgctcctttggcccgtgtcgtcttccgtcaccctttccgttacaagaagcaaaaggagcttttcgttgccgccgagggtatgtacactggaca

SEQ ID NO: 224487 - DNA, 418 bp, Gossypium hirsutum
cgcttatcaaagtgactccagacccgaaacgcttgccttctgcttgtttcaacccaacgcgggacgagttgactcggggaacggaatcaagtacatgaacatgtttgatgctcaggttgattcagtgcattctgctttgagtgctatggggttcaaggatgtcgagattatggttgccgaaacgggatggccatatagcggcgacagtaatgaggtcggacctagcattgagaatgcaaaagcctataacgggaacttgattgctcatttgaaatcgatggtcgggacaccgttgatgcccgggaaatctgtggatacttacctctttgcactctatgatgaggacttgaaacccggtccctgttctgaacgggcatttggactttacaagccggacctttccatggtatatgatgtt

SEQ ID NO: 224488 - DNA, 398 bp, Gossypium hirsutum
gtttaaaatataagaaaaaaaatcatacgcaatgagcactgctggtcaggttattcgttgcaaagcgtgcggtggcatgggaggcggggaagccactatcgatagaagaagtggaagtggcaccaccccaaaagcatgaagtccgtattaagattctcttcactgctttatgtcacactgatgtatactactgggagtgtaagggttacactcctctgtttcctcgtatacttggtcatgaagcctcaaggatcgtggagagtgtgggtgagggtgtgaatgatttgaaacctggagatcatgtgctccctatcttcaccggagaatgcaaagaatgtcgccactgtctgtcagaagaaagcaataacatgtgcgaactgcttaagatcaactgcgac

SEQ ID NO: 224489 - DNA, 407 bp, Gossypium hirsutum
ctcaccgccatcggccgacgtcctcccttcttctttcataattcatatcacatctcaaatggtgattattttccctttaatttatacccttttcgtgtttatatacttgcaagttcgtatttgggtaaattcaatttcaagctaattctttttaaataaaaggaggaaaaacagattttatagtgaaaatcatgaaggtcgtacaccgagacctatttcccaatggccctggcagcgtcaagatgataccagtggattcagaggatctctggtttgcttacaatttgatagctactggggattgggttatggctcgaactgtcaggaaagttctaagggagacagccggtggaagagatgcagagcgtgttgccctgaagttggaaataaaagtcgaggccatagat

SEQ ID NO: 224490 - DNA, 343 bp, Gossypium hirsutum
gctggactcaattcggagaacacttactcggcgtttcattcgacttgcggttcacttcttcaaatgactgtaccaacgtgggcgcggctccccctatgttttgcaggagctccagctttagccgcttgtacccttgtttgactgacacctgtggtgacctcccactcaaagagaacgattctgaagacatgctagttttcgggtaccttagagatgctttaaccgtcggttgggccccctccgatcactcttccccgacttttccgccaattaaaccgaacctcaagagattccgaccgagacagcggtgaaagaggttcctacggtggctaatgcggcggtt

SEQ ID NO: 224491 - DNA, 415 bp, Gossypium hirsutum
gcgctggtgcccgctttgctaaatggcgtgctgtccttaagtttagtgctaatgaaccaaccgagctggcaatccaagaaaatgccaacgggctagctatgtatgctgccatctgccagcaatgtggccttgtccccattgttgagcctgaaattcttgctgacggatcacatgacattcaaaagtgtgcttgggggtccatttgctaaaaatcagccgatgagaatgtactctagcttgtggaattcttgcttgaaggtactctttggaagcctaacatggagccccccggccctgacttcctttagtgtctcctacaagaacttcaatgcccatgcctgtgtgtgttccaatggagcctcttcctgcaaatctactgctacatcaacaaacagtgcatggttctttcaagaga

SEQ ID NO: 224492 - DNA, 297 bp, Gossypium hirsutum
cgtccacgcatccttccaaattgagagagcacacttttcttgccctcaccggcaacctgtgggggcagagtttttgattcatagaagtctacacccaaatcctcaaactcgtattacaattgagcaaatcaagagcgatgagtggtttaacaagggctattttcctgtaagactccttgagtatgaagatattaacttggatgaagtaaattctgtttttgatgatccaaatgttgataaggaagaaaggggttatgagccttcactaaatgaggatatgggtcctttgagtcttaa

SEQ ID NO: 224493 - DNA, 402 bp, Gossypium hirsutum
  unsure (1)..(402): unsure at all n locations
cgggccggcccaacccgtccgtcaacctgaaaaggacttggaagaacctgttgttagtcgctcgagctattgttgccatggggggccttgttgatgtcagcgtcatctcctccaggaacactggccagcgagctgtgctgaagtttgccgctgccacaggagccactccaattgctggccgcttcacacctgggaccttcactaaccagatccaagcagccttcagggagccccggcttctagtggtgactgatccccgggctgaccaccagcccctcacagaggcctcttacgtcaacctgcccaccattgctctntgtaacacagattctcccctgcgctatgtggacattgccatcccatgcaacaacaagggagctcactcagtgggtctcatgtggt

SEQ ID NO: 224494 - DNA, 401 bp, Gossypium hirsutum
ccggcccgaccgacgcgtccgagaacatccgcagccctgagggcagccgcaagtacccttcccgcacatcccgtgacctcgggatgtgccactctgactgaaagagcggagagtcctggatcgaccctaaccaaggctgcaacctggatgccatcaaggtctactgcaacatggagacaggtcagacctgtgtgttccccactcagccctctgtgcctcagaagaactggtacatcagcccaaaccccaaggagaagaagcatgtctggtttggagagagcatgaccgatggattccagttcgagtatggaagcgaaagttccgatcctgccgatgtcgctatccagctgaccttcctgcgcctgatgtccaccgaggcctcccaaaacatcacctatcac

SEQ ID NO: 224495 - DNA, 389 bp, Gossypium hirsutum
acccttccgaatggatcctaaccagggatcacctgaagacgtatttaaagtttactgcaatctggagaggggggagacatgcatttccgcaaacccagccagtgttccacggaaaacgtggtgggccagcaaatcccctgacaataagcccgtgtggtatggtctcgacatgaatagaggatctcagttcacatatggagattacaagtcccctaacacagctattactcagatgacctttctgcgccttttatcaaaagaagcctcccagaaccttacttatatatgtaagaacactgttggttatatggatgatcaaactaaaaaccttaagaaagctgtggttcttaaagggtcaaatgacttagaaataaaaggagaaggaaaca

SEQ ID NO: 224496 - DNA, 310 bp, Gossypium hirsutum
cccacgcgttcctttaactacttcctttcccttaaaatttttattattattgcacccaaaaaagcccgagaaagttcaatttcaaaagggaacttcaaatttttcttcaattttgaacaaacttaaattcaagaatttaaggaagcttttaattttatttatcaaaacaaggattgcattatttacaaggaagatctttcggacaacttttccgccattggcccttttaattttaataattaagaacttcacccccttattaaagaaaccattcggcctattaactttactttctttcttaccatttttt

SEQ ID NO: 224497 - DNA, 393 bp, Gossypium hirsutum
cccagagtcgccgcggtttcctgcttcaacagttcttgaacggaacccggtgctcgacgggtccgacccccgccggccgctttgagcctgagccctttgcaacttcgtcgctccgccgctccagcgtcgcctccgcgcctcgcccagccgccatcatgaccaccgcgtctccctcgcaagtgcgccagaactaccaccaggactcggaggctgccatcaaccgccagatcaacctggagttgtatgcctcctacgtctatctgtccatgtcttgttattttgaccgggatgatgtggccctgaagaactttgccaaatactttctccatcaatctcatgaagagagggaacatgctgagaaactgatgaagctgcaaaaccagcgaggtggac

SEQ ID NO: 224498 - DNA, 455 bp, Gossypium hirsutum
  unsure (1)..(455): unsure at all n locations
cgagcccacgccgnntccgggcctgggctgcnntttcggtattcgcaccttcgcaagtccactacttccttannatagtcagctaccgtggcgttgcgagctgtcggtatcnagtgcttcggcaacccatgcctggaacactctgatgctcgcttgcccacaccagatgcgattacaagtgggcaagaagctacgctgaacagatgtttcagggaacttattctttgttctgcaatagttggatttatctacgggtatgtggctgaacagttcgggtggaccgtctacatagatatggctgggtttgctttctcgtgtttgctgacacttcctccgtggcccatctaccggcgccatcccctgaagtggttacctgttcaagactcaggcacagaagacaagaaatcaggggacagaaaaattaagaggcatgctaaaaataactgattgggact

SEQ ID NO: 224499 - DNA, 235 bp, Gossypium hirsutum
  unsure (1)..(235): unsure at all n locations
ccggnctcgganaacccgggcggacccacgcgtccggtagcctacatggaccaacagactggcaaccttaagaagtccctgctcctccagggctggaacgagatcgagctcaggggcgaaggcaacagtcgattcacctacagcacgcttgtggatggctgcacgagtcacaccggaacttggggcaagacagtcatcgaatacaaaaccaccaagacctcccgcctgcccatca

SEQ ID NO: 224500 - DNA, 412 bp, Gossypium hirsutum
cagaggcagactcacaggccacccgagccattttgaatagcctgttccttctggccatcctggcggctctgtccgtggcagccctgtgctatgaatctcacgaatgcatggactgctatgaagtcagtcccttcaccaaccggagaaatgccaacacctttatatccactcagcagagatggcacgctaaagcccacgaaagagtccgggaactcaacaagcctgcccaggagagcaacacagaggcctgtgatgactacaagctgtgtgagcgctacgccctgatctacgggtacaacgccgtctacaaccgctacttcaggcagcgcgcgggatccaatatttagcgcaaggaaacagtcgctttgttacggagtctggtttcatattcccctgcagtagcattaccgat

SEQ ID NO: 224501 - DNA, 415 bp, Gossypium hirsutum
ctttgccatgcgacctttttttggctataacttcggacactacctggaacactgggtgagcatggagggacgaaaaggtgcccggctgcctcgtatcttccatgtcaactggttccggagagatgaagcaggccgcttcctgtggccaggctttggggaaaacgctcgcgtgctagactggatctgccgaagattaggaggagaagacagtgcccgagagactcccattgggctcgtaccaaaggaaggagccctggatctcagtggcctccgagcaatagataccagtcagctgttctccatccccaaggacttctgggaacaggaggttcgtgatattaggagctacctgacagagcaagtcaaccaggatctgcccaaggaggtgttggctgagctcgaggccctggaagag

SEQ ID NO: 224502 - DNA, 378 bp, Gossypium hirsutum
  unsure (1)..(378): unsure at all n locations
agccttccggccggtgctaaaataactcaagctatgaggagcccttgtcacccatctaagccagctaatgcagctcccaacggcgacaaggccagagggatctgnagctctctgacatgcacatgagggacctggtgggcatgggacacccacttctaccaaagtgagcccacaaatggaatgtagaagatgtctatgagtttatccgctctctgccaggctgccaggagatcgctgaggagttccgtgcccaagagattgacgggcaagccttgctgctgctcaaggaggaccatctaatgagcgccatgaacatcaagctgggccctgccctgaagatctacgcacgcatcagcatgctcaaggacctcctagagt

SEQ ID NO: 224503 - DNA, 411 bp, Gossypium hirsutum
ccagcaccgagtctgccaactttcactgaagccagcttcaactttcactgaagccagccgtctctctctctctccaccatgcagatctctgccgcgcttctgtgtgtgctgctcacagctgctgctttcaccgtgcacgtgtgggcccaaccagatgggaccaattcatccacttgctgctatgtcaagaaacaaaagattcccaagaggaatctcaagagttacagaaagatcaccagtagtcggtgtccctgggaagctgttatcttcaagaccaaaaagggccatgaagtctgtgctgaagcccatcagaagtgggttgaggaggccatagcatacttagacatgaaaacttcaactccaaagccctgaagacagatgcctgaacagaaaccaaccctgaagtcaaga

SEQ ID NO: 224504 - DNA, 410 bp, Gossypium hirsutum
gtttgagctcacaggcatacctccagcaccctttggggttcctcagattgaggttgcttgtgacattgatgccaatggcatcctcaatgtttctgctgtagataagagcacaggaaaggagaacaagatcaccatcaccaatgacaagggccgcttgagtaaggaggatattgagcgcatggtccaagaagctgagaagtacaaagctgaggatgagaagcagagagataaggtttcctctaagaactcgctggagtcttatgctttcaacatgaaagcaactgttgaggatgagaaacttcaaggcaagatcaattgatgaagacatacagaagattcttgacaagtgcaacgaaatcatcagctggctggataagaaccagactgcggagaaaggaagattttgagca

SEQ ID NO: 224505 - DNA, 342 bp, Gossypium hirsutum
agaaatctttgggcaagtatggccctgtcagtgtggcagataccacaggaagtggagcaggagatgctaaagacgatgatgacattgatctcttcggatctgatgatgaggaggaaagtgaagacgcaaagaggctacgagaagaacgccttgctcagtatgagtcaaagaaagctaaaaagcctgcagttgttgcgaagtcttccatcttgttagatgtgaagccttgggacgatgagacagacatgacgaaacttgaggagtgtgtccgaagcattcaagcggacgggttggtgtggggctcctctaaattggttccagtgggatacggaattaaaaagc

SEQ ID NO: 224506 - DNA, 161 bp, Gossypium hirsutum
cggtttctggcacagccctgaatgtgaatttgttcgtcactgcatcgacaagtcccaggagcgggtggaaggaaaggtgcaggtatctgtcttcaagggccaggtgtaaatccttggccgggagtctccactttcactatacaatgaagagctggtgagca

SEQ ID NO: 224507 - DNA, 419 bp, Gossypium hirsutum
  unsure (1)..(419): unsure at all n locations
gggaaccacagctgatgccatgtgtcctatcctagagtttgaagcagatcgccgagcttgcatcatcaccatcaactctttcggcacagagctttccaaggaggaccgtgccaagctctttccacactgtggccgactctaccctgagggcttggctcagctggctcgggctgatgactatgaacaggtcaagaatgtagctgattactacccggaatacaaactgctttttgagggtgcaggtagcaatcctggagacaagaccctggaggaccgattctttgaacatgaggtgaagctgaacaagctggccttcctgaaccagttccactttggtgtcttttatgcctttgtgaagcttaaggaacaggaatgtcgcaacattgtgtggattgctgagtgcatngcccagcgccatc

SEQ ID NO: 224508 - DNA, 415 bp, Gossypium hirsutum
aaaggatccccaccctgagggaagcagttacatagtgcctctgccataacctcaccgtcgtcttcgatgtcaaaggccatgcagatatggcttctgctgctctaaagaatatatacatggaatttccccagctgtacaacaacagtatggtctgctcattcttgccggaagtcatctataaaatgagacaaacagatcagaaggtaatcacagccctgactcacaggccttggagcctgagccacactggagacgggaagcctcgctacagcgtcttttggaagcagtctgtgtttgtggtgttggacatcttgcttgactggagcatgcacaatgtcttgtggtacctgtgtgggatttcagccttcctcatgcagaaggattttgtctccccggactatttggaagaagtggt

SEQ ID NO: 224509 - DNA, 425 bp, Gossypium hirsutum
ctggaccccctggccctcccggtcctcctagctgtggttatgacttcagcttcctgccggagccaccttaagagaagtctcaagacggtggccgctactaccgcgccgatgatgccaacgtggtccgtgaccgtgaccttgaggtggacactaccctcaagagcctgagccagcagattgagaacatccgcagccctgagggcagccgcaagaaccccgaccgcacatgccgtgacctgaagatgtgccactctgactggaagagcgcagagtactggatcgaccctaaccaaggctgcaacctggatgccatcaaggtctactgcaacatggagacaggtcagacctgtgtgttccccactcagccctctgtgcctgagaagaactggtacatcagcccaaaccccaagtgagaagagcatgtc

SEQ ID NO: 224510 - DNA, 314 bp, Gossypium hirsutum
gttttaaagggccagtgtgccgccgcccccttttccctccatgctcctttcggtgccgctcctggttggcctcctcggcctggctgccgcagaccctgccatctatttcaaagagcagttcttggacggagatgcctggaccaaccgctgggtcgaatccaaacataagtctgattatggcaaattcgtcctcagtttctggcaaattctacgggggaccaggaagaaggataaaaggtttgcagacaagccaagatgcccgattttacgcgctgtccgccagattcgaacccttcacaacaaaggccagacac

SEQ ID NO: 224511 - DNA, 258 bp, Gossypium hirsutum
acccttccggttgaaccacccgccacaatccaaatttttgttaataccctaacaggaaaaaccataaggctgggggttgaaccttgggccactataaaaaatgtaaagcccaaaatccagaataaggaaggatttcttcctgatcagcaaagtttgatctttgttgttaagaagttggaaaatggccgaactttgtttaattacaaaattaaaaagaagtcaattctcaatttcggcttaaaacttcgggtggcccct

SEQ ID NO: 224512 - DNA, 341 bp, Gossypium hirsutum
gtcggagcgtgaagggcctggtggcagtaataaccggaggagcctcgggccttggcctgtctacagccaaaagactggtgggacaaggagccacagctgtacttctggacgtccctaactcagagggtgagaccgaagccaagaagttaggaggaaactgcatatttgccccagcaaatgtgacctctgagaaggaggtacaagcagctttgactctagcaaaagaaaagtttggccgtatagatgtggctgtcaactgtgcaggcattgcagtggccattaagacataccacgaaaagaagaaccaggtccacaccttggaggacttccagcgggttatc

SEQ ID NO: 224513 - DNA, 427 bp, Gossypium hirsutum
gccatctcgcctgccattccttgacattgcacctctggacatcggtggtactaaccaagagttccgtgtggaggttggccctgtctgtttcaaataagtgaactcaacctaaattaaaaaacaaaaacccctgaaaaaaactttctctttgccatttcttccttttaaaaacaaaaaaaaaaaacaaaactgaaagctgaatccttccgtgttttctatgcacctacatcttaaactgtgggcaaaagagaaggattggtcagagcagtgtgcaatatgatccagataagtcccctccctcaggccctccccaaaacgtttgcagtgttatttctgtgggtttttttttaaacactctgacacctgttgtggacattgtcaacctctgtaagaaaacccaaataaaattttaaaaataaaataaaaa

SEQ ID NO: 224514 - DNA, 404 bp, Gossypium hirsutum
aaaatggattccaccgagccaccatacagtcataagagatacgaggaaatcgttaggggggtcagcacctacattaagaaaattggctacaaccctgacacagtagcatttgtgccaatttctggttggaatggtgacaacatgctggagccaagtgctaatatgccgtggttcaagggatggaaagtcacccgcaaagatggcagtgccagtggcaccacgctgctggaagctttggactgcattctgccgccaactcgtccaactgacaagcctctgcgactgcccctccaggatgtctataaaattggcggcattggcactgtccctgtgggccgagtggaaactggtgttctcaaaacctggtatgggggtaccctttgctccagtcaatgtaacaactg

SEQ ID NO: 224515 - DNA, 285 bp, Gossypium hirsutum
  unsure (1)..(285): unsure at all n locations
cctagcacccacccgtaacatgcgcggacgggcacctatctaacattgtatggtcccgcccacattctgggccggcggcggtgcgtcattggagccatgaacgggnaccccatctgcagcgcgctgccccacatcccctaccacaagctcgccgacctgcactacctcagccgcggcgcctcaggaaccgtctcgtcggcaagacacgccgactgcccgttgcgggtggcagtgaaacacctgcacattcacacgcctgtgttcgacagtgaaagaaatgatatc

SEQ ID NO: 224516 - DNA, 367 bp, Gossypium hirsutum
  unsure (1)..(367): unsure at all n locations
atccgaaaagacctgtatgccaacacagtgctttttgttggtaccaccatgtatccaggcatggctgacaggatgcagaaggagatcacagccctggctcccagcacaatgaagattaagatcattgctcctcctgaacgcaagtactcagtctggattggcggctccatcctggcctcactgtccaccttccagcagatgtggatcagcaagcaggagtatgacgagtcaggcccctccattgtccaccgcanatgcttctagatggactgagcaggtgccaggcatctgctgcatgagctgattctgaagtatcgatttgcccctgcaaatgtacacacctcatgctagcctcatgaaactggaa

SEQ ID NO: 224517 - DNA, 344 bp, Gossypium hirsutum
  unsure (1)..(344): unsure at all n locations
gacctacccgtaacatggcggcacgggcacctatctagtattgtatgtttcggggccaatcttctgggccgcgctggcgttcattgtggccaagcaggtactgnctgnccgaaaggtggtggttgtacgctgtgagggcatcaacatttctggaaatttctacagaaacaagttaaagtatctggcctttctccgaaagcggatgaacaccaacccgtctcgaggcccctaccacttccgagccccaagccgcattttttggcgcactgtgcgaggcatgctgccgcacaagaccaaaaaaaggccaggctgccctggaacgcctcaaggtgttggatgggatc

SEQ ID NO: 224518 - DNA, 260 bp, Gossypium hirsutum
  unsure (1)..(260): unsure at all n locations
ggagatgccatctgagcgcctgtgcaggagcatccgtcagcgggcagcctgtggccagctcaatgacttcctgcaggagtacagcagccaggggtgccaggtgtgagggcgtcggactctggatccctgagctcagccccagggtcagggcctctcacgaagcagggcctgcttaacagggtaaataaaataaaacttttgaccgtnaaaaaaaaaaaaaaaaaaaaaaataaaaaaaagaaaaaaaaaaaaaaataaaa

SEQ ID NO: 224519 - DNA, 303 bp, Gossypium hirsutum
ctcggaccctgtagccgccgcgatgttgatgctcaagaagaaccggattgccatcgatgggctcctttttaaggaaggggtgatggttgccaaaaaagacgtccacatgcccaaacaccccgagctggcagacaagaacgttcccaaccttcacgtcatgaaggccatgcagtctctcaagtctcgaggctacgtgaaggagcagtttgcttggagacatttctactggtacctcacgaatgagggcatccagtacctccgagattacctgcacctacctccggagatcgtgcccgtcaccct

SEQ ID NO: 224520 - DNA, 314 bp, Gossypium hirsutum
ctcaaatctcctgctcatcctcgtaaattttattatcatcaccatggcctaaaatcccaaggtgttatatgacatgactatcggtggacaccccacatcacatattgtgatggacctgttctcagattgcactaatcgcactgctgagaactttcgtgccctctgtaccggctagaaaagcgacagccgcagccgtaagctgctgcactacaaaggctactgtctacatcgagtgatccataactttatgtgccaaggaggtgacttgaccgacagaaacggtaccggaggtgaatacatatacggatccaagt

SEQ ID NO: 224521 - DNA, 434 bp, Gossypium hirsutum
  unsure (1)..(434): unsure at all n locations
cacaccctcaggagattgcttcaatcttggtgcatgttaaacgcttcccttggaatcgaaagggtcccgaccccaaagccacccatcagcaaggctcagattgtcaagcttctcatcgatgccaagtcaccgcagcaacagatcaagtgtctcgacactcttaaatcaatcgcaaccgagaatgctactaacaaaaggtgcatggaatcatccggcgcagttgagttcttggcttctattgtctgtaattacgaccctacagccaccgaagaatcattagattacgagttcgactcaataaaaccgattgatgaagctntaagcattctgtacagtctccaactctcagaagcttctctcaagaaccttatgggcaaaaacggtgattttattttgtccttaaccagngtaatgcaacgtggaagctatgagtc

SEQ ID NO: 224522 - DNA, 419 bp, Gossypium hirsutum
  unsure (1)..(419): unsure at all n locations
ggagcattcgcggcacctgacaaaatacattgttcacctgccctcccaaaaacaaggagtgggaagataatgcggaggattctgaggaaaatcgcggccagacagttggatgaactcggagacacaagcacactggccgatccaggtgtagtagaccagcttattaaacttgctgatacctgaaactgaaacagaaaaacacactaaagtacctagtcaaagaaccaactcaattgcacacttgttgctggatatcattcccatttcgacagtgagttcagtatctttctggctctttatttttatcttgatggcttatatagcttcatctagtttgatttttaagtacttaatttgtctcttttttttacccatctttggaggttgcttcatccatattgatatntttattttctaaa

SEQ ID NO: 224523 - DNA, 360 bp, Gossypium hirsutum
  unsure (1)..(360): unsure at all n locations
gccaaagcctgccattgacccttaacaattcattcatcaaaaaaagcttttcctctccatgttcgattccatatttgttctgcgctctctgtttctgtggttgtgttttaggatttgagagatcatggcgtcgcaagaatacttggacaagatgaaggtccgtcaggagtatcggaatctctggcacacggatctcatgagcaccattcaacgcgaccctccttattgctgcttggctttttggtgtggcccatgtgtatcctacatgctccggaaacgagctctntataatgacatgtcaaggtatacatgttgtgctggttatatgccatgcagtggtaggtgtggtgaaagtaaatg

SEQ ID NO: 224524 - DNA, 434 bp, Gossypium hirsutum
cggacgcgtgggttaaaatataagaaaaaaaatcatacgcaatgagcactgctggtcaggtgatgcgttgcaaagctgcggtggcatgggaggcggggaagccactatcgatagaagaagtggaagtggcaccaccccaaaagcatgaagtccgtattaagattctcttcactgctttatgtcacactgatgtatactactgggagtgtaagggttacactcctctgtttcctcgtatacttggtcatgaagcctcagggatcgtggagagtgtgggtgagggtgtgaatgatttgaaacctggagagcatgtgctccctatctttaccggagaatgcaaagaatgtcgccactgtctgtcaaaagaagcaataacatgtgcgaactgcttaggaacaactgcgaccgaagtgttatgcctgctgatgggaaaa

SEQ ID NO: 224525 - DNA, 429 bp, Gossypium hirsutum
cccacgcgtccgtgaaactccttcactttggttttgtaatttcgaggtcacctgttactgaatttcgaaaaatggtgtcccaaaccattgatgtgttgaagaacgagctgcctctagagcaggagcttgtggttttgcctgaagatgttgtcactggccttgttcttgtcgatatcatcaatggcttctgcactgtcggtgctggaaacctggccccaagagaacccaacagacaaatatcaggaatgatcagcgaatcagtgaggctggcaagacttttctgcgacaagaaattgcctgttatggcgtttcttgattctcatcatcctgacaagcccgaggatccttatcctcctcactgcattcaaggcaccgatgaatctaatttggttccagctttgcaatggatacaaaacgaaacaaacgtga

SEQ ID NO: 224526 - DNA, 367 bp, Gossypium hirsutum
  unsure (1)..(367): unsure at all n locations
cccacgcgtccgcttagagctgttctttggttataggaatatttatttcgctggaaaaggcattggtggttgtttctcatgatcganattttcttaatactgtttgcactgatattattcatctccatgatttcaagctccagttctaccgtggaaattttgatgattttgaatcagggtatgaacagcgtcgtaaagagatgaataagaagtttgaaatttatgaaaagcaggtaaaagctgcaaaaaggtcagggaatcgagttcaacaggagaaggtaaaagatcgagcgaagtttgcagcagcaaaagaagcagcgaatagcaagggaaagggcaagggcaagattgatgaggatgaaacttc

SEQ ID NO: 224527 - DNA, 335 bp, Gossypium hirsutum
aagaaaatgaatcactctgacaacagtgaccatccttagcttccatccatcaagatccgggatgcttcctcccctaaccacccctcctccgccgctacccctactcctaccgctggcgcccgccgtaggatcggtgtagccgtcgacctctccgacgaatcagctttcgccgtccgttgggctgtccaaaactacctccgacccggtgacgccgtcatcgttctccacgtctcacctacctccgtactctatggagccgactggggcccactcccccacaccccacaaagcgcggaaaccccggagtcccagaagcaaatagaagacgaattcga

SEQ ID NO: 224528 - DNA, 430 bp, Gossypium hirsutum
cgaccaccggcaatttaagcaacggtactatgaattccttgacaactttcaagttcccgatggacccattttcttaaaaatttgtggggagtcttcttgcagtggcataagcaatgactatctcggcgttttggccaagaagtttggggctgccgtggtttcacttgagcatcgttactatgggaaaagcagcccttttaagtcacacacaacggaaaatctgaaatatctttcatctaagcaggctctctttgacttagctgttttccgtcaatggtatcaggaatccttaaacttgaagcgaaataaaacaggtgctgagaattcatggtttgtttttggcatttcatactctggtgctcttagtgcgtggtttcgtcttaaggttcctcaattaacatgtggaagcctggcaagttctggtgttgtt

SEQ ID NO: 224529 - DNA, 337 bp, Gossypium hirsutum
gcaaatgctattgctttacactcaatacataccatattagattctaccacgccgctcacaggcgggactaatcctgctgagaagaccaccgtcccagagaaaaagactactcactctctcaaacacattgccgagtagaagccaactgccggttagaagctttccaaagaaggcggcgcgcacggagacaagaaggacaatatgccaagaagagcgctgagacctacacgatctacatcttcaaggtccttaagcaagtccatcctgatatcgggatctcaagcaaggctattgagatcatgaacagctgcatcaactatgtcatcaagaagcttgc

SEQ ID NO: 224530 - DNA, 404 bp, Gossypium hirsutum
acccttccggttctggctacagcatcgtccgactccaccgtttgtttgtttgatgtacgaaagctgactgtaggttttcatgttttaagcagccacagtggagaggtcttccaggtagaatgggatcctaatcacgagacagtgctggcatcttctggtgatgataggagattgatgatttgggaccttaacaggattggagaagagcaattagaaattgaattagatgccgatgatggccctcccgaacttctcttttctcatggaggccataaagctaagatttcagatttctcgtggaacaaaaatgagccatgggttatttctagtgtagctgaagacaacacacttcaggtgtggcaattggcagagagtatatattgagacgaggatgacactcaaac

SEQ ID NO: 224531 - DNA, 388 bp, Gossypium hirsutum
tgcagagccttggggttctgcaaaagctaacattaatcaagcacatcttgccaaccagtggaagaacatgcagatgcttgataatggcaacaaaggtggaaacaacaacaacaagaacagcaacagcaacaacaacaacaacaacagcaaccgactcggtgcactgtttgcaagaaacgggtcgggttgaccggattcaagtgcaagtgcgggattacgttttgcgggtcacacaggtacccggaaaatcatggatgcacgttcgatttcaagaagattgggcgagagaagattgcacgtgccaatcccgtggtcaaagcagagaagatcgtgaggatttgagaagaagaagatggaaagccgattgaccctttgacttttaatgagt

SEQ ID NO: 224532 - DNA, 419 bp, Gossypium hirsutum
aaagattcaactcccaaaaccgaacccagtacaccataatctcgaaaccgttttgaaaagtgctttactgctccttttgctgcttaaaaacccaacacccataacttgttttttactcaattcaatggatattccaagtcaaacgtgtgacgtccccttctccaagtcttattctatgcttgctgaaagggtagagccatcttcatcttctgaagggggcattggtggccagcgagctgttcactctgacgaggaagtgcttttactagcgaccaacaagcctaagaaacgagcagggaggagggtattcaaggagacgcggcatccggtttttagaggtgttcgaaggaggaataatgataaatgggtatgcgaattgcgggagcctaataaaaagactcgcaattggcttggaacgt

SEQ ID NO: 224533 - DNA, 418 bp, Gossypium hirsutum
cccacgcgtccgagcaaacaaacaagccgccagtcatgagtaacatctcatcctctttcactctctcccaatgtcaacaacaacatctcttggaaaaactcgatgtcttcaacgtcaaaggcagagataaacgcggtcgtaatgttcttctcatcatcggcaaatactttcctgctcgcatggttagtagtgaggttctgaagaagtatttagaagaaacgatttaccccaaattagggggcaaaaccgttctcggtggtgtatgtacatacagatgttcaaaagagtgaaaattttcctggaatatcagttcttcgatcagtctacgatgctattccgatgaacctcaagaacaatctcgagtttgtttatttcttgcatcctggattacaggccagacttttccttgccacctttg

SEQ ID NO: 224534 - DNA, 412 bp, Gossypium hirsutum
cggacgcgtgggtgggggtgaagatagccaaagcaatggggcatcacgtaacagttataagctgatctgataagaaaaaagtggaggctttggagcatcttggtgctgatgactacttagtcagctccgacgctgaagggatgcaaaaggctgctgattcacttgattatatcatcgacactgtgcctgtttttcacccacttgagccttacctttcattgttgaaactcgatggcaagttaatcttgactggtgttattaacacccctcttcagtttgttacccccatggtcatgcttgggagaaagtcgattacagggagttttattgggagcatgaaggaaacagaggaaatgcttaactttctgtaagagaaaaatttgacctcaatgattgaggtggtgaagatgga

SEQ ID NO: 224535 - DNA, 375 bp, Gossypium hirsutum
aagaggggttaaagtggttgttgtatttgacgttatgatgtctggacttcctacacacggggaaacttttgctggcattgatatagtttactcaggagagtcttgtgctgatgcatggatcgaaaaggaggttgtagctctgagggaggatgggtgccccaaagtctgggttgtgacttctgatcattgtcagcagcatgcagcacatggagcgggagcctttatttggagctccaaggcattggtttctgagattaaagcttcacagaaggaggttgagaggatgcttctagaacaaagatctacgtcttttcaaggtaaactattgaagcacaatctcgatactgaaggtgttgatgctcttaaggatctaag

SEQ ID NO: 224536 - DNA, 234 bp, Gossypium hirsutum
atttgagcagcagcagctaaagcagatcccaaatatgaagtttaatatcgcaaatccgacggctggttgccagaagaagctcgagatcgatgacgaccagaagcttcgggcatttttcgacaagcggatctcgcaggaggttgctggagatgctttaggcgaggaattcaagggctatgtttttaaagatcatggggaggtttgcgacaaggcaagggattcccggatgaaagc

SEQ ID NO: 224537 - DNA, 379 bp, Gossypium hirsutum
cccacgcgtccggccgttttctctctggccagtaatattgcacctagtgttatttttgtgggtggggttgatagcatgttaggaagaccagagaatccaggtgaacacgaggctatgcgtaaaatgaagaatgaatttatggtaaattgggacggtcttcgtacaaaggataaagaacgagtgttggttcttgctgctactaaccggccatttgaccttgatgaggcagtcatccggaggcttcctcgaagattgatggtaaatttgccagatgctccaaacagagaaaagattttaagagttgtattggccaaagaggatttttcactcaatgttgattttgaaactattgcaaatatgacttatggatattttggaa

SEQ ID NO: 224538 - DNA, 429 bp, Gossypium hirsutum
  unsure (1)..(429): unsure at all n locations
ctggattctattgatcgaaaaagcaacctgtttaatgcttttctaaagttatccaacggaattataggaggtacagaaaaggcaagtttaatggagaaagcagaacaaaatgttagtggtagtaggtttccggttttgaggtcgaagaagtacatttttgtgatagctgtggattgtgattcagtctcggatattcctaaaataattaagacaatcatggacgtagcaggaaaagagaattctattgggcttatattatcgacatccttgtcaatatctgaggtacactcccttcttatctcgggaagcataagtccattggatttcgatgctttaatctgtaacagcggtggtgatttatactatccttcaaccagttcggaagatggtactgngcttcccttcactgtagacttggattatcaatcg

SEQ ID NO: 224539 - DNA, 435 bp, Gossypium hirsutum
  unsure (1)..(435): unsure at all n locations
tcggccaacccttccggttttttaaccgccaaaaaatttttttttttggatacaatgcatacatgggcctataacctcctagcctttaaatctaaggtagatccgtgcttaagcatgctcgaactaatgtcatctgaattgtggcaatagcaacgatgccaactgagctaatgctcaatcagcaatcaaaaaaagtttggatggaaagttattacagtttacaatttacaaaatatatatttcaatagctggtgttacaattatnttgtatcgatttcttggcccaccaattggcattgtggatattacatgaccctgttcattatttngcagttgattacctcctattcattgtccgagatgttaacgttcatccaaactctgatgaggtagcagaggctaaatacgtgaaccgtgaccaactgaaggagtact

SEQ ID NO: 224540 - DNA, 218 bp, Gossypium hirsutum
gtcaaaactttaaccggcaagaccatcaccctcgaagtcgagagctctgacgaagagctggatacccccacgaagacgtaagacaaggtggagggtggattccttctggatgttgtaatcggccaaggtacggccgtcctcgagctgttttccggcgatgataatacgctgctggtctggtgggatgccttccttgtcttgaggtttagacttgacat

SEQ ID NO: 224541 - DNA, 369 bp, Gossypium hirsutum
acttccttggcgagaagaaggtgcgtaaggtttatatgttggaaggggttgccattgcgggatccgagaaggtcaaggatgagatcgttttggatggtaatgatattgaactcgtgtctcgttcagcagctttgataaaccagaaatgtcatgtgaagaacaaggatattagaaagtttctcgacggtatctatgttagcgaaaagggcaggatcgccgaagaggaatgattgttatctcaagtcatagttatgggtgccatgttatttttctgttatggtaatttctttggtagcatggttttttggtgttttacctctttatttggattacagctgctggagtagaaagatgtttaatctttatttg

SEQ ID NO: 224542 - DNA, 311 bp, Gossypium hirsutum
gaggagccaccatggacatgatcaaagatgcttgtgagaattggggtttctttgagctgacgaaccatggaatatctcatgaactgatggacactgtggagaaactgacaaaggagcattacaaaaagtgcatggaggataggttcaaagaaatggtgacaagtaaaggtcttgaagttgttcaatctgagatcactgacatggattgggaaagcactttcttcttgcgccacttgcctgaatcaaacctttatgaaattcctgatcttgaatatgattacaggaaggtgatgaagcaatttgcagtggag

SEQ ID NO: 224543 - DNA, 432 bp, Gossypium hirsutum
  unsure (1)..(432): unsure at all n locations
cgaaacccggcgaccacgcttcgctttactgtaatttttcttttctccggtaattttatccgaaaccgtnaaccgcattgggggtgattgcattagcaactgcaccaccttaagccactggatcgttccgaacaaggcgatcaacgaacggggtttctcggttcaggatgtccgtccgatctggctccgtttcaatggctgcggctcccatgttaaccaagctacagcaagactgcgccactcctttgccggtccttcgcaacgtggccgcctccatgtctgatgatatccgtgcaggccttgccgttgatggcggcagcgatctcaagatgatcctcagctacgtcgatagtttgcctactggggatgaaaaaggattgttttacgctttggatctgggaggaacaaattttcgtgttttgagggttgaat

SEQ ID NO: 224544 - DNA, 430 bp, Gossypium hirsutum
ctcaattctccatcttttctttctttctttttttactccttagtttttattttcattggtgtactttttgaacataaatctgatcgtagaggatctcattctcatggccaccactggaaacaagaacatcaatgctaaattagttctacttggggatgttggagctgggaagtctagccttgtgttgcgctttgttaaaggacaatttgttgaatttcaggaatcaaccataggtgcagctttcttttcccagacattggccgtgaatgatgcaactgtaaagtttgagatatgggatacagctgggcaagaaaggtatcacagcttggcaccaatgtactaccgaggagctgcagctgcgattattgggcttcatttgaaagagccaaaaattgggttcaagaacttcaagcacaaggcaatcctaata

SEQ ID NO: 224545 - DNA, 384 bp, Gossypium hirsutum
cggacgcgtgggcttcattaaacggattctagattttaggaaagactgggaccttcgagggaaccaaccaattgctggaaattactacccggttaaccttggaatctatgtccaagatgatagcacagagctctcagtgttggtggatcgttcagtgggggcatccagcttagctgatggccaaattgagctgatgcttcacaggaggttgattcacgatgatatcagaggtgttggtgaagtattaaatgaaacagtttgtgtctctgaaggatgtgatggtttaactatccttgggaaattgtatctccgaattgatcatataggagaaggggcaaagtggcgttccacggttggccaagaaatatattccccacttctttt

SEQ ID NO: 224546 - DNA, 433 bp, Gossypium hirsutum
gtaaaaggttcggttccaatcaaggagatgaaaaatcaagctgtcacggagaacgggcggaaacggaaaaggtcaatgcaggcgaaagaaaatgggattacgacaaagttaagcaccaatgattcgattaaacctgtggggtatcgacaaaatggtagcaggcgcaaaaacaaacctcaacgggctgccgaagctattgttgagtgcaaatgacgaggttttgaataaccgtcaccgtgtcttttaccttattttttcgtactaaaagtaatgcttgtttgcttgctcgtgtatggattccgttttttccattttgtcacatttgattcgtttgtgtagtctcggaattcaacttcggggtttttcgatttgatgatgttactaatgttttctattatacaaaaaaccgagaacgtgtgtgtttttgcacagt

SEQ ID NO: 224547 - DNA, 406 bp, Gossypium hirsutum
cccacgcgtccgcccacgcgtccgaggagaggaaacatatatgtggaatgactggagatggtgttaatgacgctcctgctttaaagaaagctgatataggtattgctgttgctgatgctacagacgccgcacgaagcgcttcagacattgttcttacagaacctggattgagtgttattatcagtgcagtgttaactagtagagctattttccagaggatgaagaactatactatttatgcagtttccatcacaatccgtatagtgtttggatttatgcttatcgctctcatttggaagttcgacttttcaccgttcatggttttgatcattgccattctaaatgatggaactattatgaccatctcaaaggatagagtaaagccatcttccttgcctgatagctg

SEQ ID NO: 224548 - DNA, 434 bp, Gossypium hirsutum
  unsure (1)..(434): unsure at all n locations
cttccgccaacccttccgccaacccttccggcaggacttttttaaggtattggactgaaggtggctgccgcagaaatgttcctgttggaggtggttcaaggaagaacaagagggctttatcatcatcatcaccaccacgaccatcagcttcatctaaaaagcttggtgatctaacaaccccacctactcctaaaaaccctaaaatccatgaaggtcaagaccttaacctagcttacccaccaccaaccgaggactataatagcttgccaaagttcgttgaggtgccctatagccacaaaagcgaccatccgaactctacctcctcttaactcatctcaatgctatngagctcttgaagactgntattaattcaagaggcttgagttcgttcatgtcgatgtcngtttctgattctaatacggtatactcaagtg

SEQ ID NO: 224549 - DNA, 397 bp, Gossypium hirsutum
  unsure (1)..(397): unsure at all n locations
cccacgcgtccgaaatcgatgactcaacacattgtcatcctggctttggtgcactacgggggagtctgtgtccgatgctgggaaatcgatgactcaacacaatgttggtgctctggtggttgttaaacctggagagcagaaataaattgcgggtatcatcacagagagagattatcttaggaagataatagtacatggaagatcatncaagtcaactaaagttgggacatcatgactgaagagaacaagctcatcacggtcacacctgagaccaaagttctgcaagcaatgcaattgatgacagataaccgaatcagacacattccagtgatcaatgagaaggaaatggtaggcatggtttncattggagatgtggttcgtgctgtggtgagcgagc

SEQ ID NO: 224550 - DNA, 340 bp, Gossypium hirsutum
ttcgcagttcgcacgctctcatcattttcctttggttccgtcagtcttcccaaacaccttggtggccgagaaaaaaaaagctcaagagagaagaccatggccgatcaacttacggacgatcagatctctgagttcaaggaggctttcagcctctttgacaaggatggcgatggttgcattactaccaaggagctggggactgtgatgcggtcacttggtcagaaccctactgaggcagaactccaagatatgatcaatgaagttgatgctgatggaaatgggaccattgattttcctgaattccttaacctaatggcaaggaagatgaaggattctgatt

SEQ ID NO: 224551 - DNA, 411 bp, Gossypium hirsutum
cccattcgttcgaacttttgtaaaaaatgacttccaacaaagttgtttagaaataaaactccaagattccgggggggactaatcgaacctaggctctgaaaaaagattactgaggacagtgcttgatatcccttttgccttcaaaagagttgaaaccatgctctatagagccaactttgatactgaagtacaatatttgaggaagtctattcaaaccctcgaggaagcgagtgacgaattgaagaacagcatgctattcctcaaactccttgaagctgttcttaggacaggaaaccggatgaatgttggaaccaaccggggtgatgctaaagcttttaagcttgacacccttttgaaacttgttgatataaagggaactgattggaaaactacactgctacactttgtggt

SEQ ID NO: 224552 - DNA, 368 bp, Gossypium hirsutum
cccacgcgtccgcccacgcgtccggaaattctttcgccccacactcatttctgcactgtatgtggaaaaggattcaagagagatgcaaatttacgaatgcatatgaggggtcatggagacgagtacaaaacaccaggggcccttgcgaaacccactaaagaatccagctctgaaccaactattattaagaggtattcctgcccttatgctggttgcaagcggaacaaggatcacaaaaagtttcagccactgaagaccattttatgcgttaaaaaccattacaagagaacccactgtgacaagagctacatttgcagcagatgcaataccaagaaattctcagtaattgctgatctgaaaactcatga

SEQ ID NO: 224553 - DNA, 382 bp, Gossypium hirsutum
tccgagttcaaacaaagcattttcataacccattttttttcttcaaacacaaatcagagggagaaaaaagaatggaagtggagggttcatcgaagaagatgatagcaacacaagcagagatggtggagaacaaggtccccatcccgtacagggatcaatgtgcacatcttctcatcccgctcaacaagtgccgccaagccgagttttacttaccttggaaatgcgagattgaacgccactcctatgaaaagtgcgagtacgagctcgtcatggagaggatgctgcagatgcagaagatccgtgaagaagaggccaagttgacacaggctgggaaacagggcgtttctgttcctctcattcccaaaactgctaatgcttaagc

SEQ ID NO: 224554 - DNA, 433 bp, Gossypium hirsutum
ctgtgcaggacctgaagaggaaggtagagatatctgagaagggcaaaaaggggaaaggaggggaatatggtacggtaaaagagcagctagaagaagctgaggaagctatcacgaaactatctgattttaatcgcaaattgatagtgcatgctggagacccttcacggtcccttcttgatgggaaacctgcaatagattcggatgggagcggaagtggtaggaggcagcgaatatcagaacaagctcgaaaagggtcagaaaagattgggcgcttgcagttggaggtgcagaaaattcaatttctcttattgaagcttgacgatgaaaaagaaagtagaggtcgaaccaaaatcaccgaacacaaaacaactgttttattgcgagactatctttactgtggtgtaagaaacatcaagaagaggaagaactcact

SEQ ID NO: 224555 - DNA, 408 bp, Gossypium hirsutum
cggacgcgtgggtgatgccaaggctgaactggagaagaggactgagaaatttgatatcatggttggagatttagcagatcctgttgaaggggggccttgctatcaactttatacaaaatcattttatgagaaaattcttaagcccaaactcaatgaaaatggcatttttgtcactcaggctggcccagctggaatattcactcacaaggaggtcttttcctctatataccacacaatcaggcaggttttcaagtatgtgttggcatacacagctcatgtgccatcctttgctgatacatggggatgggttatggcctcggatcaaccattctccattggtgctgaagaaattgacaagaggattgctgaaagagtagatggtgaattactctacttgaatggctcttc

SEQ ID NO: 224556 - DNA, 436 bp, Gossypium hirsutum
aaaaaacaatgagaaaagcagggccaagaaaggatggtaactacacgaatccatgtttaacgatgcatcagccatgggcttcattgttagtttatgggatcaaacgtatagaaggcaggtcttggcctgctccaatcagaggccgcctttggatacatgctgccagtaaagtcccggatgaatctacgatcaaagcaatggaggatttctatagggaaatttacgcattgaatggaattaccgatattaaatttccagaacattaccctatctcaagactgctagggtgcgtcgaagtggttggctgtttgacatgtgaagaattggttcaatgggaggcactacctgaagcggttaggctagaaggacaaactgatttttgctggctctgtgaacaaccaaagaaattgttagttccattcgagatgcgaggata

SEQ ID NO: 224557 - DNA, 382 bp, Gossypium hirsutum
atcgatctttcccaaccaagaagagcagcttctgtagagcaaagggttcagagaggggaggcattataaaggaagacccctgttaagacccgaaacccagatcttatacgtggcgtaggcaagtattccaggtctaagatgtaccacaagcgcggcctttgggctatcaaggccaaacacggtggcgtcttccctcgccatgaccccaagcctaaagcacccgtcgcccccgagaaggctcccaaattataccccgctgaagacgtcaagaagccgctacttaataagcgcaagcctaaacccaccaagctcagatcaagcattactccagggacggtcttgatttttgtggctgtaagatttatggggaagagagttgttt

SEQ ID NO: 224558 - DNA, 421 bp, Gossypium hirsutum
  unsure (1)..(421): unsure at all n locations
ttttgctttcttctctttcttctccatatttatctctgtggagaacccatccccctgctggggggtttagcagttaaaaagagaaaaacaaaagtatggcgaccgccactgtccccgccgccgtaaggcagctttctcctaaagaagccgacatccaaatgatgttggccgccgaagtccatctcggtaccaaaaactgtgacttccaaatggagcgttacgtcttcaagcgtcgcaatgacggaatctacatcatcaaccttggcaagacctgngagaaacttcaacttgctgctcgtgttattggtgctattgagaaccctcaggacatcattgtccaatctgcaaggccctatggtcagagagctgtactgaagtttgcacagtacactggttgtcatgcaattgctggaaggcacac

SEQ ID NO: 224559 - DNA, 407 bp, Gossypium hirsutum
ggagcaagaagaagatgtcccggtttgccccactctaccgaagatcgaagtccccggaaaacgtcttgatctgattgctgtcaagcttccttgtaggaatgaagggaattggtctagggatgttgctcgcttgcatttgcagcttgcagctgctaatcttgcaacctcggccaaggggttttatcccgtgcatgttctttttgtttcgaaatgcttcccgataccgaatatgttcccttgtaaagaacttgtcttacgaaaaaacaatgtcgggttatacaaaccagacttgaatgtgttgagagaaaagcttcagcttccaactggttcttgtgaacttgcactcccaattgggatcaaagagccaacatattcagggaatgcatctcgagaagcatatgcaacga

SEQ ID NO: 224560 - DNA, 403 bp, Gossypium hirsutum
gcaacgcgtacgtccaatcctacatgcaacaagtcagcgatggaaatggatggagatggaggaaaaaatggaaaaatggctggtgctgctactattgacggaaatatagtccaagctcctctgggtgctttgccccgaccttggccaccaaatgctgatgcttatgaaggtagccaattctcataaagataactgaacatttctggctggccgggtgtgtcatggcaaaagctattcaagactgacggcttttagatctgcctatgtcaatggcattttataaacttgtgcttgctcaagagctagatcagcatgatatactgtcctttgacaccaaacttggcaaaattctgcacgaattgcatgacacttgatcgtcgaaagcaatatctaggatcattgg

SEQ ID NO: 224561 - DNA, 335 bp, Gossypium hirsutum
cccacgcgtccggaaagagtcaaccctccacttggtgcttcgcctgcgtggtggaatgcagatatttgtgaaaactttgaccggtaaaaaccattacgttggaggtggagagctccgccacggttgttaatgtaaaggccaaaaccaaaattaggggggtattccaacttaccaaccagaggttgatttttgccggaaagcagctcgaggacgggaggactcttgcggactataacattcaaaaggagtcgaccctgcatttggttttgcgcctaaaaggagggatgcaattttttgtcaagacctggactggaaaaacaataaccttgaaggtt

SEQ ID NO: 224562 - DNA, 405 bp, Gossypium hirsutum
cccacgcgtccgcttggaagatcgttcatcccttatggcagatattcagaatataaagccaacccatgtttttaatgctgctggtgtgactggtaggcccaatgttgattggtgtgaatctcacaaaacagaaacaattcgcaccaatgtggctggaaccttgaccttagcagatgtttgcagagaacatgggcttttgatgatgaattttgctacagggtgtatattcgagtacgatgcaggacatcctgagggctccggcattgggtataaagaggaagacaaacccaatttcactggttccttctattcaaaaaccaaggctatggttgaagagctgttgaaagaatatgacaacgtctgcactctcagagttcgaatgccgatctcatctgacctaaacaa

SEQ ID NO: 224563 - DNA, 393 bp, Gossypium hirsutum
aactctgtaaaatctgtggaattcaaagctcaagctgagaagtctgcaaaaagaaagaggaagagccaatatcgaggaattcgacagcgtccatggggtaaatgggctgctgagatccgagacccgaggaaaggggttagggtctggctaggaactttcaatactgctgaagaagctgcaagagcttatgattctgaggcacgaagaattcggggtaagaaagcaaaggtgaacttccctgatgagatgccacgcacctctccaaaacgtgtgattaagacaaatgatgagaaaccacttcccatgtcaaatttgagccctgttgaaccaaatatcaaccagaatttcaattgcttgaacaaaccagagcaggtcttttatgataccatgggt

SEQ ID NO: 224564 - DNA, 393 bp, Gossypium hirsutum
tcagggtggagtgagcaaataagggtttgctcggcgatgtcattagaggggcctcttgatgatggatattgctggcgaaaatatgggcagaaagatattcttggatccaattttccaagggcatattatcgatgcactcatcgttactcgcaaggctgcttagccggtaagcaagttcaaagatcagacgaggacccaacaatattcgaggtgaaatatcgtggaagacatgcctgtaaccaagtccctcacttggttgctacgcccaaagagaaaggcaatcattatcgggaaaagcagcaagttgaagagaaacaaaagcaatccagggaaatgtggtgagtttggaaccaggctaaagtttaaacagaggacttggcaacagagaggaca

SEQ ID NO: 224565 - DNA, 401 bp, Gossypium hirsutum
cccacgcgtccgcaagtttcgaattttgctctttagtccctcaatttatatttgaaattcagtaaggtcctaaaatgggcactgctcaaagcagggaagatcggatcaccgattcagaatccgatgaaggctatgaagaagaagaagaagaggaggaggagcaatacgacgacgctttaagcgatcatcaaaacactcaatcttcatcttcaacttcaacttcttcaggtactcagaaaagcctcgacgatatcgatgctaagctcaaatccttgaaattgaaatacaattctcagcaatcaagccataatctcaaaaacccagtgaagctttaccttcatataggcgggaacacacccaaagcgaaatgggtaatctctgaaaagctcacttcttatagt

SEQ ID NO: 224566 - DNA, 398 bp, Gossypium hirsutum
tttcctcccttgaatggtgttgttgcagacatggccgtttaactcatgatgagttgcaggaacggtgacagcttcgcagccaaaatggaagaaaacgccgtcaaagaagccgctttcgggctcgaaagggttgagaaactcatcaaattactttctcaaactcaacagcagcagcaaacttacagttataatcaagagaaataccaagcttcctctatctcaacaacatctaattccctggatttggaaatggactgcaaagctgaggctgatgccgccgcttcaaggttcaagagagttatctctcttctgggtcgaaccaggaccggacatgctcgtttcagacgagcccctgttcaacccgatcaagagcaagaaaccaaggtttattacgcaac

SEQ ID NO: 224567 - DNA, 404 bp, Gossypium hirsutum
ggatcgtactcttcgaacgtcaaccttgctgtttagaactcctcatggaatgatgagaaacagctccaagatatgtacctgagccggaaatcatttgcttttgactgtgatgccccaggtgcaggtatgactgagaaaaggaaagtctttgagatggctctaagcacagcagatgccactttccaaaatcttgattcctcagaaatttcactgactgatgtgagtcactactttgactcggatccaacaaacttagtacaaaacctccgcaaggatggaaagaagccaagtgcatacattgcagataccaccactgcaaacgcccaggttcgaactctggctgaaactgtgcgactagatgcacgaaccaagttgttgaaccccaaatggtatgaaggaatgat

SEQ ID NO: 224568 - DNA, 346 bp, Gossypium hirsutum
ctcaatctttatctccttcaattgtttgtttttgggttagaaagctctgtttttttattaccctgttcatcaaaaagcttcaatctttcaaccatgttgcttaaagcttcccctgctttttctttgttgaagaatccccaagttgaaactcgggttcctctgttttcaagaaacggttctggggttgggtctggggctgttgttgtttgtgctaccaaaggagccaataataagccattaacaggtgtgatttttgagccttttgaggaagttaagaaggaacttaatcttgtcccaactgtgcctcaaatgtccttggctcgtcaaaagtttgctgatgagtgtg

SEQ ID NO: 224569 - DNA, 392 bp, Gossypium hirsutum
  unsure (1)..(392): unsure at all n locations
ctcaancnnnancnccnncaanggggngnnnnngggnnagaaagcncngnnnnnggaggacgccnnncancaaaaagcggcaagcnnncaaccangnngctnaaagcttcccctgctttttctttgttgaagaatccccaagttgaaactcgggttcctctgttttcaagaaacggttctggggttgggtctggggctgttgttgtttgtgctaccaaaggagccaataataagccattaacaggtgtgatttttgagccttttgaggaagttaagaaggaacttaatcttgtcccaactgtgccttaaatgtccttggttcgtcaaaagtttgctgatgagtgtgtagctgccatcaacgaacaaattactgtggagcacaatgtttcata

SEQ ID NO: 224570 - DNA, 404 bp, Gossypium hirsutum; identical to SEQ ID NO: 198513

SEQ ID NO: 224571 - DNA, 397 bp, Gossypium hirsutum
ctctaatacacccactgtaaaaaaaagagagaaatctgatcagacggtgaaaatgggtggccttgaaactgagagaacaaccacaggatgggctgccagagatccttcaggagtattgtctccttacacttacactcttaggtattctctaattttgctgttttgttttttaattttgttcaaggttcatttctggttcgtacatggtgatttgctgtaataataatcgtgtttgcaggaacactggtcctgaggatgttttcgttaaggttatgtgctgtggaatctgccacactgatcttcatcaagccaaaaatgatcttggcatgtcaaactacccaatggttcctgggcatgaagtggttggtgaggtgttggaagttgggtcagatgtaag

SEQ ID NO: 224572 - DNA, 400 bp, Gossypium hirsutum
ctctaaatggattggcaatagatgagtttaaagcagtgacaaaggaagtttgcaagctaccatctgtcctctcttctgcactttttagaaaaatagatgtagactggaccggaatagtgaccagagatgctttcgttaagtattgggttgatggaaatatgctgacgatggatatagcaactcaaatatttgaaattcttaagcgtccaggctgcaagtacctcactcaggttgacttcaaacctgttcttcgagaacttttggcaacccatccaggattagaattcctgcgaaacacgcctgaatttcaagatagatacgctgaaactgtcatatacagaatattttatcacatcaatagatcgggaaatggccgtcttaccctcagggagctcaaaag

SEQ ID NO: 224573 - DNA, 403 bp, Gossypium hirsutum
cccacgcgtccgcggaagtcattggaaaaaaagtgttacgacggagccaaggcggatatttggtctggtggggtgattttatacgttcttctcgccgggtttttaccgtttcaagatgataacttggtggcgatgtataagaagatttacagaggagatttcaagtgtccgccatggttctcacctgaagctcggaggctaatatccaagcttttagacccgaacccgaaaacccgaatcgccatctccaagatcacggaatcatcttggttcaaaaaatcaatccccaagactaaaacaactaaggaagaaatagaattcgaagcattcaatggagagaaatcttctaaacccgagaccttaaacgcattccacataatttcattgtcggaaggcttcgatt

SEQ ID NO: 224574 - DNA, 402 bp, Gossypium hirsutum
cccacgcgtccgcggaagtcattggaaaaaaatgttacgacggagccaaggcggatattgggtcttgtggggtgattttatacgttcttctcgccgggtttttaccgtttcaagatgataacttggtggcgatgtataagaagatttacagaggagatttcaagtgtccgccatggttctcacctgaagctcggaggctaatatccaagcttttagacccgaacccgaaaacccgaatcgccatctccaagatcacggaatcatcttggttcaaaaaatcaatccccaagactaaaacaactaaggaagaaatagaattcgaagcattcaatggagagaaatcttctaaacccgagaccttaaacgcattccacataatttcattgtcggaaggcttcgatt

SEQ ID NO: 224575 - DNA, 400 bp, Gossypium hirsutum
aagaagggcacttgcagattacctcaaccgtgaccttccctacaagtcatcgcccgatgatgtttatttaacaaatggatgtactcaaggaatagaagttgttatatcaattctttcccgccccggtgccaatattttgcttcctagaccgggcttcccactctatgaagcttggtgtgcttataaccatcttgaaatgcgtcattatgatcttcttcctgaaaaaggttgggaggttgatcttgatgctgtagagactcttgcagatgagaacactgttgctatggttattataaatccaggcaacccttgtggaaatgtcttcagctatgaacatttgaacaagattgcagagacagcaagaaagcttgggattttggtcattgctgatgaagcttat

SEQ ID NO: 224576 - DNA, 358 bp, Gossypium hirsutum
ctcgaagtcattcactgcagatgggccattttggtagctcttgggtgtgttttcccggatgtgttgtctaggaacggtggcaagttcggtgaagctgtatggttcaaggccggttctcaaatcttcactgagggtggacttgactacttgggttacccaagcttgatccatgctcaaagcattttggccatctgggctcgccaagttatctttattggagccaacattggctaccgtattgcctgtggaccacttactttattttctgaccaaattttttctttttgcatcttttatccattgggggcttggttttttactttatttacttttttttcattctcaacgattattttta

SEQ ID NO: 224577 - DNA, 397 bp, Gossypium hirsutum
cccacgcttgagagagctcgacctatattatttgtagtttgtcttctaacttcagcattgggtggcatggcctttaccattcagtttgtaagagaatttacccgattgggtttgaaccaatcagttggtggggtattggccttagcgttctcaagggagctaagtcctgtggttacatcaattgtggttgctgggcgtattggcagtgcatttgccgcagaattaggaacgatgcaggtctccgagcaaacagacacgctgagagttcttggatcaaaccctgttgattatttggtgacacccagagtcattgcttcctctttagctttaccatttttgactctaatgtgtttcacagtagggatggcatcaagtgcgctgctggctgatagtgttt

SEQ ID NO: 224578 - DNA, 315 bp, Gossypium hirsutum
cccacgcgtccggcgagaagtgagaaactattgtaaacctctcataatattctgagcttttttctctttttgtttcctataattttgatctgagccaaggttgataatcgagtttttataagcggttgatcctggcattccaaaatttgaattgtgtggctgaatgatctatggagactaagggagggaaaaagaagtctagtagtagtaagtcattattctacgaagctcctctcggttacagcattgaagacgttcgaccaaacggtggaatcaagaagttcagatctgctgcttactccaactgcgctcgca

SEQ ID NO: 224579 - DNA, 395 bp, Gossypium hirsutum
atttggttaaggtagttttgaaggggtttcgaattctgggtttaattcgttttggtgggggtgatacccaggtttatgcagatggaatccataacacctatacaactagtatctcgggctcttattgatgaccaaactgttcgctcaacacgattgtgaaaacgagatcaacacacaggtgttacaggaagaatagagcatgtgccgccgaatgtccatggactgtctatctgcgatatcatcctgtatataggccagatttccagaggcacaagtgaacacatatcgacacgtgcttatgctctctcgaaacatgctaacgttttgcataccaaggagctttgccacagatttaagcaggtgggtgccaacgtgactgttgactgtgttcattc

SEQ ID NO: 224580 - DNA, 404 bp, Gossypium hirsutum
cggacgcgtgggtttcatgatcatctttgcttgtattcaaattgttcttagccaaatcccagattttcacaagctttcatggctttcaatccttgctgctgtcatgtcttttacttatgcttccattggtcttggactctccattgctaaagctgcaagtgggggagaacatgtaaggacaagcttaactggtgtacaagtaggggttgacgtgtcaggctctgaaaaggtttggagaacattccaagctattggggacattgcctttgcttatgcttactccaccgtcctcattgagattcaggatacaataaaagcgagtccaccagaaaataagtcgatgaagagagcgagtggtgtcggtgtcacgacaaccactttattctatgtactttgtggcattg

SEQ ID NO: 224581 - DNA, 384 bp, Gossypium hirsutum
gtagtctcttaacttgccagtcaacttcctgcttttcaattgcggtaaggaggcatggtgaatggctgcacagagacgtttgcttttcaagctgacattaaccatcttgttagtttaattatcaacactatctacagcaacaaggagatctttattcgcgagctcatcagcagcgcttctgatgcattggacaagattagattccagagtaagacggacaagagcaaacttgatgctcaacccgagctgtttatccacattgtccccgataagacaaacaatactctatcgatcatagatagcggtattggcatgactaacgcctattaggtgaacaatcttggtaccattgctaggttctggactaaagaattcatggaggca

SEQ ID NO: 224582 - DNA, 399 bp, Gossypium hirsutum
cggtgagtgcaaatcctaccagcctgccattaacgcctttaagcaataaggaatggcccatggcccattcctgcactaaaatcaatcaaaaaaaaggaatcaaaattcaaaaccttgttcttttatccactgctttaaagctctaaatcaaattattacgtaggaacttatagcaatttatccctcttcatgggttgctcttcttctctcccagatcggagttccgggcggtccactggacttaacaacgcggacaatcctgaaggtcccgatgccaaaaatctacgcgtaaagctggtcttgttaggtgattctggagttggaaaaagttgtattgttcttcgctttgttcgtggccagtttgaccctacatctaaggtaactgtaggagcttcattc

SEQ ID NO: 224583 - DNA, 402 bp, Gossypium hirsutum
aaaaccctaattttgtctctcccaagagacgaatggaagggaaaaatggtgttttacgttcggagcccggccagaagctggcgattacaccattttcatgggtcttgacaagtacgagaacgaggagctcatcaaatatggcttcatcgaagatatctggttccatgtggataagatgtcttctgcccatgtttatttaagacttaaaaagggtcaaaccattgatgatataagcgaaggtgttctcgaagattgtgctcagcttgttaaagctaattccatccaaggcaacaaggtgaataatattgatgttgtttacactccatggtccaatttgaagaaaactccttcaatggatgttggccaagttggctttcacaattccaagatggttcggactgt

SEQ ID NO: 224584 - DNA, 400 bp, Gossypium hirsutum
ctgatccctcaaagcctacagaaaaaaaaaggatagcaaaaaatggcagaaagaggcggcggagaacgtggcgcttttaggcgcggcttcggtggaggaaggggtgaccgtggtccaagaggcaggcgccgtggccgcaaggacgaagaggagaaatgggtacccgtcacgaaactcggccgtttagtcaaatccgggaaaatcacgtccctcgaacaaatttacctccactctctccctatcaaagagtaccaaatcatcgaccagctcgtcggcccttccttgaaagacgaagtcatgaagatcactcccgtccagaaacaaacacgtgccggccagcgcacgcgtttcaaggccttcgtcgtcgtcggagacggaaacggacacgtcgggttgggtg

SEQ ID NO: 224585 - DNA, 404 bp, Gossypium hirsutum
ggttctataaacttctcttatcttcaacacttgactctcaagtgttttactctacgcagcagaagcagaagccaaaaaggcacaaggctataagaagagaccatgccaaagaacaaggggaagggaggaaagaacagaaagagagggaagaatgaagctgatgatgaaaagcgcgaactcgtgttcaaggaagacggccaagagtatgcccaagtgcttcgaatgctaggcaatggccggtgtgaagccatgtgcatcgatggtactaagcgcctttgccacatccgtgggaagatgcataagaaggtttggattgctgccggtgatataatccttgttgggcttcgcgactatcaggatgataaggctgatgtgatcctcaagtacatgccagatgaagcaag

SEQ ID NO: 224586 - DNA, 393 bp, Gossypium hirsutum
gaaaatctttccagtttcaattttctcacaacataactgaaaatgtcttgctgttcaggaagatgtggctgcggcgctgattgcaagtgtggcagtggctgtaacggatgcagtatgttccctgacataatagagaagactacaactgagactattgttcttggtgtggcaactcagaaaatgcactttgagggatctgagatgggagttggggttgagggtggatgcccgtgtggagacaactgcaaatgcaacccttgcacttgcgggaagtgaacaacaaagagaagcagagtggcctttgtcatgttaactaaataaattctattactttagtatgtatcagcaaatcttcatgaggattttggtcttaattatgtgtaatgtggcttt

SEQ ID NO: 224587 - DNA, 402 bp, Gossypium hirsutum
cccacgcgtccggcagaaaatatcacaaatcttcttctccttctcagaaatcttagtatcatcacgatggcctcaaatcccaaggtcttctttgacatgacgatcggtggtcagcccgctggtcggattgtgatggagcttttcgcagattgcactcctcgcactgcggagaacttccgtgccctctgtactggcgagaaaggcgtcggccgcagcggtaagcccctccactacaaaagctcttctttccgtcgtgatccctaactttatgtgccaaggaggtgacttcaccgccggaaacggtaccggaggtgaatccatctacggatcaaagttcgctgacgagaacttcatcaagaagcacactggtcccggtattctctcaatggctaacgctggacc

SEQ ID NO: 224588 - DNA, 360 bp, Gossypium hirsutum
cccacgcgtccgaaaaaaaatggcgacaatcaatggtgagactgcaatggaaaagaccttggggtctataagaagctttagtaacaacaacaacaacaaggaggtgtttcttagagcagataagatagatttcaagagctgggatttgcaactggataagcacttgagcagggcctggtctagggacagtgatggttcaactctcacaaagaaggaagaatgggaaattgatttggctaaacttgatataaggtatgttatagctcatgggacttatggcaccgtttaccgtggcgtttatgatacccaagatgttgcagtgaaggtattggactggggggaggatgggattgccacggt

SEQ ID NO: 224589 - DNA, 385 bp, Gossypium hirsutum
ccattatagatgctttctttcttatacgcttggtcctccagtttcgtacagcttacgggggtgccatcatctcgggtttttggacgaggtgaacttgtgatagatcctgcacaaatagccaagcggtacttgcagcgatatttcatcattgattttcttgcggtggctccattaccacagattgttgtttggcgatttcttcaaagttccaatggttcagatgtactagcaacaaaacaggccttgttttttgttgtcttgcttcagtacatcccgaggtttcttagagttctacccttgacatcagaaatgaaaagaacagcaggtgtctttgctgaaactgcatgggctggagctgcatattatttgctattatatatgcttt

SEQ ID NO: 224590 - DNA, 394 bp, Gossypium hirsutum
tgcagctttttgacaattttcttagcggtaccattcctcagctgctcggagtatacagcccactttgggtggttgatttttcggacaaccatctgacaggaaaaatacctctttatctttgtcgacgtgctaaccttattttattaaaccttggagctaataatctgcttggagatatcccaaccgggattaagaactgcaagacgttagtacaacttcgtctggttgtaaaccgcctcaatggtagctttccttctgaattatgcaaactggtgaatctttcggctattgaattggggcagaacaacttcactggaccagttccatcagagatcggaaattgccaaaagctacaaaggcttcatattgcagagaatcaatttaattccgatct

SEQ ID NO: 224591 - DNA, 403 bp, Gossypium hirsutum
aaaatccttccagtttcaattttctcacaacaatactgaaaatgtcttgctgttcaggaaagtgtggctgcggcgctgattgcaagtgtggcagtggctgtaacggatgcagtatgttccctgacataatagagaagactacaactgagactattgttcttggtgtggcaactcagaaaatgcactttgagggatctgagatgggagttggggttgagggtggatgcccgtgtggagacaactgcaaatgcaacccttgcacttgcgggaagtgaacaacaaagagaagcagagtggcctttgtcattttaactaaataaattctattactttagtatgtatcagcaaatcttcatgaggatttggttcttaattatgtgtaatgtggcttttctgctatgtc

SEQ ID NO: 224592 - DNA, 399 bp, Gossypium hirsutum
caacagccaccaccacatacccttctgaaacctcacccacaccaaactccagaaccagcctgcgttatcaatggcgatgatatctacatattgcccacatttcaacggacttcaccgatcatctcccaagctcgacagttctcaatctcaatctttccttcaacacatcaactctcagcttcgccttgcttcgtctcgtaaaccttgcagagctgttactgccatggccggttccggaaagttctttgttgggggtaactggaaatgtaatggaacaaaagactccatcacaaatcttgtttctgacttgaacagcgcaaagttggagactgatgttgatgttgttgtgtcacctccctttgtttatctcgatcaagtgacagcttcattaaccagtcg

SEQ ID NO: 224593 - DNA, 404 bp, Gossypium hirsutum
ctttgaagcaagtattgggagaagaagcagggaataggaacaagagagcagatctggaagtgataacattgatggagtttcaggcgacgatcaagatgccgccaacaaccgtcctaggaagaagagataccaccgccacactcctcaacaaatccaagagcttgaagctctctttaaggagtgccctcatcccgatgagaaacagagattggagcttagcaaaaggctttgcttagaaaccaggcaggtgaagttttggttccaaaaccgccgtacgcaaatgaagactcaattggaacgccatgagaactctttgctgaggcaagagaacgacaagcttcgagctgagaacatgtctattagggaagctatgaggaaccccatttgcaccaactgtgggggtc

SEQ ID NO: 224594 - DNA, 399 bp, Gossypium hirsutum
cccacgcgtccgatcatttttattccgctattttctctctccccaaacacccttttaagccaaaaagaagacaatggccgatcagctcaccgatgatcagatctctgagttcaaggaggcctttagcctattcgacaaggacggcgatggctgcattactaccaaggagctcgggactgtgatgcgatcacttgggcagaaccctactgaggcagaacttcaagatatgattaatgaagttgatgctgatggaaatgggaccatcgattttcctgaattccttaacctgatggcgaggaagatgaaggatactgattctgaggaggaacttaaagaggctttcagggtttttgacaaggatcagaatggtttcatatcagctgctgagctgcgccatgt

SEQ ID NO: 224595 - DNA, 395 bp, Gossypium hirsutum
cccacgcgtccgtgtctttgcagtggagttttttttgacgagggatggtcaggtgtagatcggccatctttatgagttgggtattccactcctagatggccagcaataattcagcaattctgcctttgactgaccttctttgtttctattagattctactaaatgaagtagctccaagacctcataatagtggtcatcacactattgagtcctgctatacatcacagtttgaacagcatttgcgggctgttgttggtcttcctctcggtgatccatccatgaaaactccagctgctatcatgtacaatctactgggtgaggatgaaagggagccaggtttcaaagtggctcatcaacttatagcaagggcactggagattccaggagctactgct

SEQ ID NO: 224596 - DNA, 140 bp, Gossypium hirsutum
  unsure (1)..(140): unsure at all n locations
atagtcctcatgtactacgcaaactttctttcttcccccgaaggctacttccataccgttatctgcaacgccaaggagttccggaacaccaccgttaaccacgaacctccatttncatatcatgnnggacaaacccaccg

SEQ ID NO: 224597 - DNA, 408 bp, Gossypium hirsutum
tccactcttacgtcacagcgtacgcccacatgcgtttacaaatttgaatttctgggacatgcgggcgtcgccaaacatggagaaaaccaggaaacttgtcctattttcatgcctgctgctggtttctttcttagcttcatcgtctgcccaaacctgtcttaaccatagcttttccaacaggcaatacgccaactgcagtgaccttccagccttgaactgtttcctccactggacatatgatgaagcagctggtaccgttgaggttgcctttagacacaccggaaccacctcatccaggtggtcggcgtggggcatcaacccaagcggaccaaccatgttgaacacccaggctctggtcgcctatgtcaactccagtggcatccctcatgctttcaccacatccatcga

SEQ ID NO: 224598 - DNA, 402 bp, Gossypium hirsutum
cccacgcgtccgctagaattgaaagttgtttgttttctgggaaaattttcattacaggaatggctacatctcagttaacagcatcatcaatgacagtatcagtaaggaatttggcttcatttgaaggattaaggccatcgtccattgtgaaattctcttcctttggatctttaaagcccgggtctttgactcaaaggtcctttaagggtttggttgtaaaagcggctactgttgttgctcccaagtacacctcgattaagcccttgggtgatagagtgttggtgaagatcaaagaaacagaagagaagacagagggtggaattttgctaccaacaacagcttaatcaaagcctcaagggggtgaagtggttgccatcggcgaggggaagacaaatgggaaga

SEQ ID NO: 224599 - DNA, 386 bp, Gossypium hirsutum
  unsure (1)..(386): unsure at all n locations
cccacgcgtccgcagctttggaggtcggtgaccttggccaggaaattggagccaaccaaaacgacgacgtttaggatggcggtgaattgccgccacaggttggacccaaagctggagccgtactacttcggaaacgctattcagagtattccgactttcgcctcagcaggtgagttgcttggaaaggacttgagctgggccgccgatatactgcataaaaacgtggtggcgcataacaatgatacggtgcggaaaggtgtagcggattgggagaagcagccgaggttgttcccattgggtaacgctgacggtgcatcaatcaccatggggagctctcccagattcccaatgtacaataatgatnttgggtggtggcgacctttggc

SEQ ID NO: 224600 - DNA, 371 bp, Gossypium hirsutum
cccacgcgtccgcagctttggaggtcggtttccttggccaggaaattggagccaaccggaaggactacgtttaggatggcggtgaattgccgccacaggttggacccaaagctggagccgtactacttcggaaacgctattcagagtattccgactttcgcctcagcaggtgagttgcttggaaaggacttgagctgggccgccgatatactgcataaaaacgtggtggcgcataacaatgatacggtgcggaaaggtgtagcggattgggagaagcagccgaggttgttcccattgggtaacgctgacggtgcattaatcaccatggggagctctcccagattcccaatagtcaataatgattttgggtg

SEQ ID NO: 224601 - DNA, 403 bp, Gossypium hirsutum
aacccaccaaaacccatgtgctcaaatacataatctcttcaagggtttttggggtttcggaggagttcaactcaatccaccaagttccccgagtaccagatgccctctgtcacttggggtgttgttcaaggcaaaaaagagaagctagtgaaccgtgtcaaaatctgtgattatcttaagaccttaggaattatccctgatgaattagagaatctagaattaccctctactgtaaaagtgatgtctgagcgtgtccagtttttacagaaacttggattaactattgatgatatcaacgaataccctttaatgcttggctgcagtgtccgtaaaaacatgatacctgtattaggttacttggaaaaagtcgggattccaaagtcaaaactaggggagtttgtta

SEQ ID NO: 224602 - DNA, 403 bp, Gossypium hirsutum
agaaaaacagagaaagagtacttcctttttctttttcttttggttctgttttcactgccatggcgaaaacgcaaacaccccatatagcgattctgcctagtcctgggatgggtcaccttattccactcgttgagttcgctaagcgatttgtacagcaacacaatttcactgtcacttttgttatccccaccgctgattctccttctaaagctcaaatatcaaccctggattcccttcccagccctatagattatgtttttcttcctcctgttgacttgagtgacctccctcaagacgcaaagattgaaaccgtgatttctttaacggtggctcgctctctgtcgttccttcgggatgctttgaagtcgctggccgcaaagacaaaactcgtcggtttggtggt

SEQ ID NO: 224603 - DNA, 401 bp, Gossypium hirsutum
cccacgcgtccgaagacatctactgatgagttttcttatatacatgtacgaactgcgagagggagggtaactattgggacggctccaacttttagaagtgctgaacgagctgagaaacggagggagtttcaccaaaagttagaggaaaaacaccaagctctggaggccgagagaagccagtatgaggccaggctcagtgaagagcaagaggcggccattaagcaacttcgaaagggcctgtttgtcaaagcaaacccggtacctagtttctactatgaaggacctccaccaaaggttgaactgaagaagctgccattgactcggccaaagtcaccaaatcttacccggagaaagagttgtagtgacgtagtccactcaaccgaggatgaaaaggcaaaaag

SEQ ID NO: 224604 - DNA, 408 bp, Gossypium hirsutum
ggttgttttagttaaaaaaaaaactcaataaattaaaagagaagagactacaaagaatcgggatttcctcgccgataaaagatggtttatgcctattaccatagctggctttattgccgggacgatacttatctcgagcttcataaaaaccgccgattactccatactatgttcgctcgccaaaaccagatccatagccgtagaggaatactcctcctcgccggtccaactccaagctatcatccactacgccacttcatcaatagtcccgcagcagaacttcaaggagatctccgtaacctttgacgtactcaagaaacgctctccttgtaatttcctcgtctttgggctcggctacgactccctcatgtggacctccctcaatcccaatggcaacactattttcct

SEQ ID NO: 224605 - DNA, 418 bp, Gossypium hirsutum
ctcagatacttggtcgaggaagaaggcaaagcacagccaaaatgtcgtcgtttttgcaatcacttttggatccgaaggggagctggttagcttctttgcgatatgaaagcccttaccacacgcctccgcaaatacggccttcgttacgacgatctgtacgatccttactatgacttggatatcaaggaggcgttgaatcggctgccccgtgagattgtcgatgctcgtaaccaacgccttaagcgtgcaatggatctctccatgaagcacgagtatctcccagaagatcttcagaaaatgcagacaccatttaggagctatcttcaagatatgcttgctcttgtgaagaaggagagagcagagcgagaagcattgggagctttgcctctgtatcagcgaaccattccttaaggggttt

SEQ ID NO: 224606 - DNA, 407 bp, Gossypium hirsutum
cggacgcgtgggtggaatttcttggcttattccatttgtgtatggccatccaccattgggtgggcgtgacactgctgcataggttggtttacctgtgcttcttgttgttagtcaatatgtttcaatggagctgatgaagccaccccagacagatgatccagcccaaaagaacacacttcttgttttcaagtttcttccgcttatgattggttactttttattatctgttccgtcatgattatttatttactggttcactaacaacgatcttagttctgtacaacaagtgtggcttttcaaattttgtggtgcttaacctgttgtttatttttattgctaatttaattttttttgcttgtcattattattttcatttattattctttttttctttatatatttttttt

SEQ ID NO: 224607 - DNA, 400 bp, Gossypium hirsutum
caaattcttggagcatgttttggatgaacataactctaggcgaagagatgttaaagattatgttgccaaggatatggtggatgtgcttttgcaacttgctgatgatcccaatcttgatgtcaagcttgaaaggcatggagtcaaggcatttagtcaggacttgatagctggagggaccgagagttcagcagtgactgtggaatgggcaatttcagagatgttgaagaagccagaaatatttgccaaggctacagaagaactagacagggtaattggcagggaaagatgggtagaagaaagggacattgtgaacctaccttacatcgactcaattgccaaagagactatgcgtttgcaccctgtggcacccatgctagtgcctcgcatgacccgtgaagat

SEQ ID NO: 224608 - DNA, 394 bp, Gossypium hirsutum
cgaaagagaaactaagaaacgtaaacaaaattcttcaagaaaacgaaaggagaaggagcttgctgggagattcaagccaaaatatcttcttcttttttttttgcgttggttgaaggaggaaggagatgaagagttgtgagctctgtaagttagcggcgacaacgtcttgtgaatcggaccaagccagtttgtgctgggattgtgacgctgtattccacggggcttacttccttgtggcgagacatgtgaggtgtctgctctgttacgctttgcagtttctcactccgtggagagccactgtttccaagcttggtcgcacttgtcttcttctgtgtgtggtgcatatacttttgttttcctaaaatgtacttttcttatattgactattactttt

SEQ ID NO: 224609 - DNA, 466 bp, Gossypium hirsutum
cggaccggaaggcccgcccagccgcacccgtacgaccacgctctttatggtccatgtaagcgttagattctttctgagtatggcatcgtggctcagggtatgtcaccagctagggtgaacgatcaataccttacaaatcttcttctgaagatcaatgctaagcttggaggtcttaattcaatgctaactattgagcaaacaccttcaatccctatgatttcaaaggttccaactatcatccttggaatggatgtatctcatggttctcctgggcagtctgatgtgccttcaatagctgcggtggttagctccaggcaatggccattgatttcccgctatagggcatcagtccgtacacagtctccgaagcttgaaatgatagattctcttttcaaaccagtttctgacaaaggggatgagggtatcatgagggaggctctcttagacttttatacaagttcaggga

SEQ ID NO: 224610 - DNA, 367 bp, Gossypium hirsutum
gataaataagcgtttgtctcagatttttgaagattgcctttaccaagcagacagcccgtaagtggactggtgggaaggctccaaggaagcaacttgctaccaaggctgcccgtaaatctgccccaaccaccggtggtgtgaagaagcctcatcgctaccgtcctggaactgttgctcttcgtgaaattcgaaagtaccaaaagagtactgagcttcttatcaggaaattgcctttccagaggcttgttcgtgaaattgcccaggacttcaagactgatttgcgtttccagagccatgctgttctagctctccaggaagctgcagaggcataccttgtgggtcttttgaagacaccaacctttgtgcg

SEQ ID NO: 224611 - DNA, 478 bp, Gossypium hirsutum
cggaactccaggcccggcccagccgcacgcgtacgcccacgcgtccgattgttcccatccccttatagctaagcatttggatcctgatgaatgtgcgtgggcttatgggatgaatatatttgatctccgcacttggagaaagacgaatataagagaaacatatcattattggctgaaagagaacctgaagtcgaacctaacaatgtggaagcttggaactctgccacctgctttaattgcatttaaaggccacattcatccgattgacccatcatggcatatgcttggcttgggctaccagtctaagaccaatatcgagaaagcgaaaagagctgcagttattcattacaacggccaatcgaaaccatggctgcagattggcttcgagcatcttcggccattttggaccaagtatgtaaactactccaatgattttgttaggaactgccacattttggaattgtagttaacggggtta

SEQ ID NO: 224612 - DNA, 443 bp, Gossypium hirsutum
caaattcatccatggcttcttttgctacttccaatgttgttgttctgtattttgttgtgttaggctggtggattcatttcaatgcagaagcgaggaggcttggtgggtctgtccctgagtcggatcaaacccacagccattgctgttccaataccacaatggccctcttctaactggcaacatctctgttaatctcatttggtatggaaatttcaagccttctcaacgtgccattgtgtccgatttcatcaattccctcgcctcttccaagcttgtttcacctcaaccctcggttgctacatggtggaaagccatggataaatactatcacctcaccaacaaatcttcttcccttgtcatttccttgggttcacaaatcctcgatgagagctactctttggggaaatcactaacaaatgaacaaatactgcaattagcatcaa

SEQ ID NO: 224613 - DNA, 340 bp, Gossypium hirsutum
gtgcaagcacccacaacccgcttgcaacaaacctttcatccgtagcggaagaatgtttcacaggaaggtccagcacccaatgcatggttccctctgatttcttccaatgaagcctgcctctatccaacatgaaaactgaaggccttaccaaaggatgaccttaccaaaccttgcaagctcactgcctttttgtggtacaaggctggtttgacacacattgtcagcgaggtcggagtatccacatctatgcttcacatgtcggatacatgttaatctgttacaatcattgaaacccctcctatggagaatgctggccgctatgcatatatcttgacaccac

SEQ ID NO: 224614 - DNA, 447 bp, Gossypium hirsutum
gtaccggaattgacgggccgggccgacccgtccggccatgtcctgctcccttgccctatccaactctctcgttctttccccgcccatgtctctttggcgtgacaataccccgagcgtgtctccgtcacccgaagctttgaatttatcgttgactcacctcaaaccttcgtcgtctccttcttccccttgttcgccttttaggcttcgccttcaaaaacctccgtccgggtctctattatcttcttctgtttcaacgtcagcgtcttcatcggattcgggttcaactgcgggtcttggtccgcgatcggcgtcggcgatattgaagaggaagaggccaacgaggctggatataccaatgggccacgacggcgttgcatttttggtgccggcgacgccgtgtgaagttatgagagaggtggaaagaagagggatgtggatattctgttt

SEQ ID NO: 224615 - DNA, 405 bp, Gossypium hirsutum
acgcatgcggaaaaacagagaaagagtactttctttttcttcttcttttggttctgtttgcagtgccatggcgaaaacgcagacaccccatatagcgattctgcctagtcctgggatgggtcaccttattccactcgttgagttcgctaagcgatttgtacagcaacacaatttcactgtcacttttgttatccccaccgctgattctccttctaaagctcaaatatcaaccctggattcccttcccagccctatagattatgtttttcttcctcctgttgacttgagtgacctccctcaagacgcaaagattgaaaccgtgatttctttaacggtggctcgctctctgtcgttccttcgggatgctttgaagtcgctggccgcaaagacaaaactcgtcggttt

SEQ ID NO: 224616 - DNA, 425 bp, Gossypium hirsutum
  unsure (1)..(425): unsure at all n locations
cgggccgacccacgcgtacggtcaaagaaccttcttctctgtctctacttttttcttatattactcatacaaatttcaggcgaaaccattaaatccctcacatacaaaaatgggtgattcaaaggtcgaaaccatctccagattagctcaatggaggatcgacaactttagtccttgttcttacaaaaaatccgaccccttcaaggtcggtctttggaactggcacttgtctatagagaagaatcgatatatgtatattcgattatttcccgagccatctcgtgtgtctaaggagcaaccctccttatgctaaatttatactcangatctctaatgttggtgctaatcctagactttatatctccccaattcatgatagaccgctgcgaacatgccatgaactttattggcctgttgattctaca

SEQ ID NO: 224617 - DNA, 404 bp, Gossypium hirsutum
tagagagcacatgaatgagtatgctgatgtctttttgaggaccctagtcctagcatatcggcagctttcataaaatgagtgcgaggtgtttaatgagaaaatgactgaggcaaagaactcagttagtgcagatcgcgaaaccttaattgatggagttgcataaatgattgaaagggatctaattctcttaggggctacggctgttgaggacaaactccaaaatggggtccctgactgcattgacaaacttgctcaagctgggattaagctatgggtattgactggagacaagatggagacagccatcaatattggttatgcatgtagtttgcttagacaaggaatgaagcagattataattaatttagacactccagaaatccagtcattagagaaaactggag

SEQ ID NO: 224618 - DNA, 392 bp, Gossypium hirsutum
ggtgatttgagctttttgcgtttcttgttcggtttagtaatttgcaaagatgcagaacgaaggagggcaaaatatggatcttgacattccccgaaaatgctcggccactaacaggctcatcacctcaaaggatcacgcatccgtgcagatcaatgtcggtcatttggatgagcttggccgatacactggcacattctccacctttgctctttgcggctttgtccgtgctcagggcgatgccgatagcgctcttgacaggctttggcagaagaagaaagccgaagtcaaacagcagtagtcggatacctttttattaccggtctctgaactcgggagggaaaattcttggcaatgactgttaaattcaagtttgtttaggtagataaagtttg

SEQ ID NO: 224619 - DNA, 375 bp, Gossypium hirsutum
cgacccgtccggagggtatataggtgttgagtattatggaagaactgtttgtatcaaaattctccctatgggggtacacatggttcagctggagtcggttttgagccttccagagactgaagccaaggttacagagcttcttaagcagtattgcgatcaagggaagacaatgttgcttggggtggatgatatggacatatttaagggtattagtttgaagctgctagcaatggaacaactacttttgcagcatcccgagtgtcaagggaaggtagtgctggttcagatagcacttccagctagaggccgaagaaaagatgtgaaagaggtgcacgaagagacatattcaactgtgaagcggattaatgaaacttt

SEQ ID NO: 224620 - DNA, 442 bp, Gossypium hirsutum
  unsure (1)..(442): unsure at all n locations
tgaattcccggggcgcgccgacgcgtccgcccacgcgtccgcaaaaacctaaattcacgaaacttatttagaagaaaacatccctgctggctgacggccgtgcttcacctgcgtggcccgtcggccgttccccctgctggtgccagctttacatttctcctctgtccaccggcttccgcctctactcctcatctttcggctgccgccaccgtccgtcactctctcgacgaaaaaaaaaatgggaggtccttcacggcagtgtcaagtttgcaaccaaactcaatccaaatacaagtgcccatcttgtcttgttccttactgttctctggcatgtttcaagacacacaaaggaacccccagtgtgaatttgnngtccatcgataatgctgtaacaacttgtgtcaagcccggagtcaccaatgatgcagtaccccccagtgtc

SEQ ID NO: 224621 - DNA, 422 bp, Gossypium hirsutum
gtggttatttctgttctcttttgggggtttgcctatcagataacgactgtagatgaagcagagggattctatcctctgttcggacttggagccaatattgcccttattttctcaggtcgaactgttaagtacttttctaatttgaggaaaaatttgggtcccggagttgatggttgggccatctccttgaagggaatgatgagcattgtggtattaatggggctggccatctgtttcctttactggtgggtgaataagtttgttcctcttcccacacgtagtatgaagaagaaggaaaagcctaaaatgggaacaatggagagcttgaaattcttggtgtcttccaagtacattcgggatcttgctactttagtggttgcatatggtattagcatcaaccttgtcgaagtacctggaaatcg

SEQ ID NO: 224622 - DNA, 440 bp, Gossypium hirsutum
ctcttttggaaatcccttctcttcaagcatcgtttatttcttctttcaaaaccccagccctgagagggcgcatccctttccctttcctctaaaccccgacttccttctgcattttccgtctccttccgtgacaacctgcggttttcgcgcccctcctctagaccgcaacgccgtttcttaatcataacagcttccgctgcatctatctctagcaaacctaccgtactcgtcgccgagaaacttggcgaagcgggtttgacgctgctcaaggagttcgccaacgtggactgttcttacagcctctctcccgaagagctctgcaccaagatctcgctttgcgatgccttgattgtgcgcagcggaaccaaagtcagccgcgaggtctttgaatcagctggcgggagattgaaagttgttgggagagctggtgttgggatcga

SEQ ID NO: 224623 - DNA, 439 bp, Gossypium hirsutum
  unsure (1)..(439): unsure at all n locations
gtccggcttctactcctgagccactctgtcaagtaatgttttttgttggggattaagaccgctctgggaaggtctatgaaaaggcgttgggaatgaagctagtaaagaaggtggataggcctgaatataagtactccatagctatgatggggtatgcagaagaacatgagactactgttcttgagttgacttacaattacggagtgactgaatataccaagggaaatgcatatgcacaggttgctattagcactgatgatgtatacaaaagcggtgaggttgtggaacatgttatacaagagcttgngggaaaggttactcgtaaaccggggccaattcctgggatcaacactaaaattacctctttcctagatcctgatggctggaaaactgttctggttgacaatgaggactttctgaaggaactcaagtaggcact

SEQ ID NO: 224624 - DNA, 447 bp, Gossypium hirsutum
gcgtccgttttcccaaacttcccatctctttcccaaatgattctttttgcaatggaggcttttagtagagacggcgttttcagccaaaattggtgcttattataatctttgtcaccttagttgttctcacaataatccctgtactttaccctttgatagggtatcctttatacgtctcaaaagcctcatcttccaggcccttgcccaccaccgcatacgagtctcaacaacccgaacccctgccttcgataaagatatccgaaggagaggactgtgacatattcttgggggaatgggtgccgaaccacgccgtgccgtactacaccaacacgacgtgctgggccatacacgagcaccagaactgcatgaaatatggaaggcctgacactgagttcatgaaatggaaatggaaacctgatgggtgtgagctacctgtgctgaacccag

SEQ ID NO: 224625 - DNA, 431 bp, Gossypium hirsutum
cgtggagagccttttttttgtgtagcgattcttatttagtcttttctttaagcttacagctgctctccagagttttataatgggtaaggagaaggttcacatcaaccttgttgtcattggccatgtcgactctggcaagtcgaccactactggtcatttgatctacaagctaggtggtattgacaagcgtgtgattgagaggttcgagaaggaggctgctgaaatgaacaaaaggtcattcaagtatgcttgggtgcttgacaagcttaaggctgagcgtgaacgtggtatcaccattgatattgccctgtggaagtttgagaccaccaaatactattgcaccgttattgatgcacctggacaccgtgactttatcaagaacatgattaccggtacctcacaggctgactgtgcttttctcattattgact

SEQ ID NO: 224626 - DNA, 436 bp, Gossypium hirsutum
cccacgcgtccggaagggacttgtaagaattttatttgtattgttgatgaatccaaatgggtgaagcatttgggagggagtggcttagccatgcctgttgaagttgtccccttttgctggaaattcacagctaataaactccaaaacctgttcgaagattcgggttgtgtggccaagctgaggaatgattctaaagggaaaccctttgtaacagataatgggaattatattgtggatttgtatttgaagaaagacattggggatttgcaggtggcaagcgatgctattctgaggattgctggtgtcgttgaacatggcatgtttcttgatatggctacgactgttattgttgcaggtgagcttgggatcaccatcaagaacaagtagaaactgcgaaaaaaattactcttttaactatttttttttacatatacta

SEQ ID NO: 224627 - DNA, 414 bp, Gossypium hirsutum
cggacgcgtgggctgcaattgtcggtggttctattgtatcaaccaagattggagtgatgggagtcactcttggccaaggttgatattctcatactgggtggaggaatgatgtttaccttctacaaggcccaaggatatgcggttggatcttcacttgtggaagaagacaaacttgatctagcaacatcactccttgagaaggccaaggcaaaaggagtctctctcttgctccccactgatgtggttgttgctgacaagtttgctgctgatgctaacagcaaggtggtgccagcgtcagggatcccagatggttggatgggcttggatattggacctgactccatcaaaacctttagtgagtctttggacactacccagaccattatctggaatggaccaatgggtgtgtttgag

SEQ ID NO: 224628 - DNA, 409 bp, Gossypium hirsutum
ggaatctcgaagttggcattcctgttttcctcgtggacggaatcaagcttctcgtgtatgctggggaatatgatcttatctgcaactggcttggcaattcaagatgggttcatgcaatggaatggtctggtcagaaggagtttgtagcatctcctgaggttcctttcatagtagacggtgcacaagccggagtcttgaaaactcatggagctcttggcttccttaaggttcatgacgcgggtcatatggttcctatggaccagcccaaggcagcattggagatgctgaaaaggtggaccaagggtacactatccgacgccagtgattcagagaaactggttgccgagatgtgagttccattacttcagcgccagaatcaaatcttgttagcctttataatgggaataag

SEQ ID NO: 224629 - DNA, 440 bp, Gossypium hirsutum
  unsure (1)..(440): unsure at all n locations
cccacgcgtccgggaaagaggggataatagactttctttctacctacaaatacgaaatggatgctggtagatacattggtgagatcccgaaagaaggcgagaagaagagatcaccagcatggtgtgatcgaatactctggtcagggaaaggcataaaacaactttcttataaacaatcagatataagactttcggatcatcgaccagtcagttcaatgttcttacttgatgttgaagtcttggaccataggaagttgcaaagggctctcaatgttagcactgctgctgttcatcctgtggtttccttcgatgaaaatggagaaccagaattttaaccataaccaggaaatccaacaactcaatgagatgaaagaaaaggttactccttcatgaaactggctccaagctgccatgcanggatatcaataatacattacata

SEQ ID NO: 224630 - DNA, 415 bp, Gossypium hirsutum
ctcgctttcaatctgtctctctattgaagcagtgcaatgggtacgaaaagcaagactcaggggttcgcttttctgctactgttatccactgctcattccttctatctccctggtgttgcacctcgtgatttacaaaggggtgatcctctttatgtaaaagtgaataaattatcctctacgaagacacaacttccatatgactattactacttgaaatattgtaagccatccaagattgtgaacaatgctgagaatttgggggaggtactacgaggtgaccgcatcgagaactccgtctacacctttgaaatgagggaggatcagccttgcaaagtagtctgtcgaataaaactcgatgctgattctgccaagaatttcaaggaaaaaattgatgatgaatatcgagttaatatga

SEQ ID NO: 224631 - DNA, 431 bp, Gossypium hirsutum
cgacaagattggaccgaaaacgaattcaatgcctttgttcttcgtgaacgagaaggtagaaggccggtggtaactggagatctcaacattacgttggtagatggtgtaggtactgttgataatgtgattttcaccgacaattcgagctggataagatgtcgaaagttccggttgggagctagaattgtgcaaaggagtgctggtgaagtgacaatcagggaagctacaagtgatgcattcatggtgaaggatcatcggggagaattgtacaagaagcactacccaccgctccttcatgacgaagtatggcgtctcgaaagaatagcaaaagacggagccttccataaacgtttggcatataaaaacgttcataccgtgaaggacttcttacggttgcttgttaccgatccaatcgcactacgcaatatact

SEQ ID NO: 224632 - DNA, 423 bp, Gossypium hirsutum
gccggagcgaaaatccgagaggaagaaatgatcgtgtgcgtcgccgtcgttggccatggggagaatcctctctacatacagagcttcactgacgccgatgatgctttgaaactccaccatatcgtacattgctccctcgatgtcgtcgacgaacgagtgaacaatccaaaaaaatcaggaccgacattgaatgagacctttctgggattactttatcctactgagaattataaagttttttcaggaggttccatgctgcatatgttgatgctgtctcgaacccatttcatgttccgggtaaaaagattacatccaggacttttgcagatagagtgagcaccattgtccagtcatttggtcttagttcatctgtgtgattctggtttgtgttaaagtcccttggatagctttaatttaactagc

SEQ ID NO: 224633 - DNA, 439 bp, Gossypium hirsutum
tttttaataaaaaaatataattttgagctcaatgaactttctttttgttctttaatatgttggcatcatcgaagctatacagaaggaatctgaacaaaaagaagattacaaatagctgaaaaggttaattgaaaaaagtttaaaaaaatgggtgaaacggagaatcatcagcaccaccaccacccaccgccgccacaagtggttgctccgccggctgctcctcctcctaatttcgctctttcaaggggacctacttggactccagctgaacaacttcatcaacttcaatactgcatccactccaatccttcttggcctcaagcacttttattggcattccaacacttcattgtgaatcttggtacaacggtgttaattgcaagtactatggtgcctcgtatgggtggtaatcatggtgataaagctcgggttattcaag

SEQ ID NO: 224634 - DNA, 430 bp, Gossypium hirsutum
aaaaaaagggaaagaaaagtttttatggcttcctttgacaaaaatgcgagcaaaatctggaagagagctaacgttactggaagtacgagcagccaagaggtgcatttcaggggagtaaggaagaggccatggggtaggtacgctgccgaaatcagagatcccggaaagaaaagccgtgtttggcttggtactttcgatacggctgaggaagctgccagatcctacgacgcggcggcgcgtgagtttcgtggacctaaggctaagaccaacttccctttaccggatgaaaccaactgttacaagggccagaaccagcagagccctagccaaagcagcacggtagaggaatctggaagcccaacggtggagcgtggagtcaacactgtgaccggggcagtagggagattccctttcgcgtgccaccagcagc

SEQ ID NO: 224635 - DNA, 379 bp, Gossypium hirsutum
aattcaagcaggagccaagaaagtgctgattacttccttaggtaagggtgacatccccacctgggtggttggagtgaatgctgacacctacaacccaaatgagcctatcatcagcaatgcttcttgcaccaccaattgccttgctcctttcgtcaaggttctggaccagaagtttggtatcatcaagggcaccatgactaccactcactcgtacaccggtgaccagaggctacttgatgctagccaccgagacctcaggcgtgctagagccgcagctctcaacatcgtcccgacttcaactggtgcggcaaaggccgtggcccttgtactccctactctcaaaggcaaacttaacggcatcgcattgcgtgtaccaaca

SEQ ID NO: 224636 - DNA, 427 bp, Gossypium hirsutum
ggaaaaaagaaagaaaagtagagagatctatgtgggggcgactgtaaccagagaacacgccagtttttcagagaaaaaaatgggtgggaaaagtaccatggctgctcttttagtaattttagctgcaaatctgttgcagagtacttatggcagaacttacacagtgggagactccaccggttggggaatccctgctaataataacgatgatttttatgatgattgggctgacaataaagatttccttgttggggatgttctagtgttcaactttactaatgggcaacataatgttgtcgaagtgaccgaagttggttacgatgcttgcaacgctgcaaatcctgtatctacggtgagcaccggaccggcgaggattacgcttaacaagacaggggagtactactttatttgtggtattcctggtcac

SEQ ID NO: 224637 - DNA, 319 bp, Gossypium hirsutum
  unsure (1)..(319): unsure at all n locations
cccacgcgtccggctgaattgaaggagctctattacatgggcttgtctgattgttctgctagtgattgctctgttgtcacccttggttccaacaatagcaacgtaagtttgaatctgaaggcaacagagctcaggcttgggcttcctggatcacaatctcctgaaagaaatcctgaactttgcttgttaagctctgctcaacttgatgagaaaccccttttccctttgcatccttcaagtgatggtcactgctttccatctcaaaagactgtaacttcaggcaaccnaaagaggcttctctgatgcaatggatgggttc

SEQ ID NO: 224638 - DNA, 407 bp, Gossypium hirsutum
  unsure (1)..(407): unsure at all n locations
cggacgcgtgggttaagctaggagcaaacaagttctcagagagacaacctattgggagatcggcccagacagacaaggactacaaggagccaccagcagcacccttctttgagcctggtgaactcaaatcatggtctttttacagagctggtattgccgagtttgtagccaccttcttgttcctttacatcaccgtcttgactgtcatgggtgtgtctcagtctaaaaccaaatgtgcaaccgttggtattcaaggcattgcttgggcttttggtggcatgatctttgcccttgtttactgtactgccggcatttcaggtggtcatattaaccccctgtgacctttggattgtttctagcaaggaaactgtcacttacaaaggcattgntctatatgatcatgcagt

SEQ ID NO: 224639 - DNA, 430 bp, Gossypium hirsutum
gaagaatatggtccatgggttccctttattggaactatgttgctatttattttcgcttctaactggtcgggtgctctgttaccttggaaaatcatacaattacctcatggagagttagccgcacccacgaatgatataaatactactgttgctttagctttactcacgtcagtagcatatttctatgcgggtctttcaaaaaaaggattggggtatttcagtaaatacattcaacccactccaattcttttacctattaacattttagaggatttcacaaaacccttatcacttagttttcgacttttcgggaatatattagctgatgaattagtagttgttgttcttgtttctttattacctttagtcgtccctatacctgtcatgttccttggattatttacaagtgggattcaagctcttattttgc

SEQ ID NO: 224640 - DNA, 420 bp, Gossypium hirsutum
aaaagattcttcattttaatttcgattatgttgtctgtttgtgtaattgttgttttgggagtgtcgtcaaacacgtcgtttaagatatcgtcggatcattactccgttaagatttacggatttgaattagtcaatgaattcccccacgatccccgtgctttcactcagggccttgtttatgctggaaatgaatccttatacgagtcaactggactttacaagcagtcaactgttcgcagagtagctattcagacgggaaaggttgaggttcttcacaagatgcctgattcattttttggagagggtttaacccttctcggtgaaaggctgttccaagtaacttggttgacgaaaattggtttcatatatgacacaaaaaatttgcagaaattagatcgatttacacatcagatggaagat

SEQ ID NO: 224641 - DNA, 436 bp, Gossypium hirsutum
cgtttataccgctgttaaatacctccataaacattatcccctcagaaaagtagaagctggtcggtcccattaaccctaaatacacaacaaataaaattacttcaaaacaataggatggcagaagcagaggtaggatctggtgaaggaaagccccaagagatgtcgttgaaggataaagggaatgagtttttcaaggctgggaactaccttaaagctgctgctctttacactcaggccattaaacaagacccttcaaatcccactctttatagcaatcgagcagcagcgtttctacatttggttaaacttaacaaagcgctggctgatgctgagacaacaattactttgaaacctcagtgggaaaagtgtgttttggtatatttcagggatattttcgaaaaggatgcattttagaggctatggaacgatatgacga

SEQ ID NO: 224642 - DNA, 436 bp, Gossypium hirsutum
  unsure (1)..(436): unsure at all n locations
tgctgactgtggtcataaaattggtttaaatggtgtttataacggtagaatctggtttgacggtgttcgagtgccgagagagaacttattaaattcagttgctgatgtttcacctgatggaaaatatctaagtgctataaaagacccagatcagagatttgctgcattcctggcccctctaacagcaggccgtgttaatattgcagttaatgcagtttaccagtcaaaggttggtttagctattgccattagatatgctttaacaaggcgggctttttctcttaaaccaaaggaacctgaggtcttattgcttgattacccaagtcatcaacgacgactcttgcctctccttgcaaagacgtntgctatgagttttggagcaaattactnngaaatgctgtatgtgaagaggacaccccagtcaaacaaaatcatt

SEQ ID NO: 224643 - DNA, 428 bp, Gossypium hirsutum
  unsure (1)..(428): unsure at all n locations
atctcttcaaacccatctgtcaaaacaaccctctactcattccatccatgacgcttggctcaggaggatccagtgttgtggtgcctcggaacttcagattgctggaggagcttgagcgtggagaaaaaggtattggagatggtactgtcagctatggaatggatgacggagatgacatttacatgcgctcttggactggcaccattattggtcctcataatactgtacatgaaggtcgaatctatcagctgaagctgttctgtgataaagattatccagagaagccaccaagcgtccgttttcattcaagaatcaacatgacttgtgttaaccacgaaactggagtggtggaaccaaagaagtttgacttcttgcanattgcaagaggagtataccatggagggattactgacacagctgaaaaagga

SEQ ID NO: 224644 - DNA, 436 bp, Gossypium hirsutum
gggaagcaaagatatgcagctaacagtgtttcctttgttctgccagacactcctttgagactggccgactatttcaaaattggaggagtcttccggcctgggagcatatcagataatccttatggtggagggatataccttgacacttcagttctgaatgctgattatagggcttttgttgagattgtatttgagaacactgagaacatcatacagagctggcatctcaatggctactctttctttgtcgttggtatggacggagggcaatggacagcagctagtaggaacggatacaacctacgtgacgcagttgcacgttgtactactcaggtgtatccaaaatcatggacagccatatatgtggcacttgacaacgtggggatctggaacttgaggtctgagtactgggcatacagtaccttgggcagcagct

SEQ ID NO: 224645 - DNA, 406 bp, Gossypium hirsutum
  unsure (1)..(406): unsure at all n locations
gcaacataatcaaccatttttctccttctcagaaattttagtatcatcactatggcctcaagtccgaaggtcttctttgacatgacgatcggtggtcagcccgctggtcggattgtgatggagcttttcgcagattgcactcctcgcactgcggagaacttccgtgccctctgtactggcgagaaaggcgtcggccgcagcggtaagcccctccactacaaaagctcttctttccatcgtgtgatccctaactttatgtgccaaggaggtgacttcaccgccggaaacggtaccggaggtgaatccatctacggatcaaagttcgctgacgagaacttcatcaagaagcacactggtccccgtattctctcaatggcntaacgctgaccgngaactaaacgatctc

SEQ ID NO: 224646 - DNA, 373 bp, Gossypium hirsutum
  unsure (1)..(373): unsure at all n locations
cggaatgcagggccgacccgcgcgtcgcgttccataaagttaagagcaaaagcaatgagcagagtatgctaagctttgatcatcaatggcggagaagagtttcaagtacgtgatccttggcggtggtgtanctgctggatatgcggcgagagagtttgccaagcagggagtgcatcctggtgagctagcaattatttccaaggaggcggtggctccatatgaacgacctgccctgagcaaagcatatctcttccctgagggagctgcaagacttcctggtttccatgtctgtgttggaagtggcggagagagattgcttcctgagtggtacaaggaaaaaggaattgaattgatccttagcacagaaatagtg

SEQ ID NO: 224647 - DNA, 397 bp, Gossypium hirsutum
agacattctgcgacatcaggctgtgaatattgtgtcagctcggcttggtcgggcagaacgctgctctcattagagaagtaggcgaatatatgtccgatgcaaatgctcacctttggagcatgaggcgcagcaaggcaaactttttgcgactgacatcggtcttctcgggattattttcggctggaaaatggtttggtgaagtttgcacgtggaagaaccctattacaacagtgctggttcataccctattcgcaatgctcgtttgtttcccagagctgattttaccaacggttttcttatacatgttccttatagggggttgggaactatcgttatcgaccaaggtaccctcctcatatgaacactagtctttcttggccgatgcaggttcttctga

SEQ ID NO: 224648 - DNA, 396 bp, Gossypium hirsutum
ttggggtgcaatggcttatgtccatattatagtaagccaaaacacgagtttcaatgttcttatggaccatatggctgcccctatgctgcgtcataacgcacagccattggtgatattcctcatctagtggcccacctaaaagatgatcacaaagtcgatatgcacaatggttgcacctttaaccaccgctatgtcaaatcaaatccacatgaggttgagaatgctacatggatgctaacggttttcaggtgctttggtcagtacttttgcctgcattttgaagcattccatatcggattagctcctgtttatatagcattctagcggcttatgggtgacaataatgaggcaaagaactatagcttcagcctcgaggtgggtgggaacgggaggaaa

SEQ ID NO: 224649 - DNA, 304 bp, Gossypium hirsutum
accacgcgttcgaatttactttcatttaaaaataacccacagaaaatgaccaagtgttgcggcaactgtgagcgaggaataccagaagtcagttgaaaaggctaagaggaagctcagaggtctcatcgctgagaagaactgtgctccactcatgctccgtgtagcgtggcactcagctggaacttttgatgttaagaccaagacaggaggtccattctgtaccatgaagcatcctgctgagctcgcacatgctgataacaacggccttgatatcgccgtcagacttatctagcccatcaaggag

SEQ ID NO: 224650 - DNA, 275 bp, Gossypium hirsutum
ggatgcgttgaatccttgcgacggtaagaacattaatggtaatgagaatcatgaagagtggggatagcagagcaagtggaacgaagaccaatggtgttgatagcagtgataacgaagctgaaagcagtgtgaatgaaagcgggaacagttcgcgtggcggaatgaattcgaccgagaagagggaagggaacaaaagggccgcaagagcagacattgctccgagcggtagacattatagaagtgtttcaatggatagttttatagggaatatgaac

SEQ ID NO: 224651 - DNA, 361 bp, Gossypium hirsutum
gggaccaccccgtccgcccagccgtccgttcaacttcccttagctcttcatgattccaccttgtcggcggttctttggagcttaagaggaagaagcattctttcactcccaaaatgtcagatcttcaagcaccccttcgcccaaagaggaagaagggcttggtggactttttggtccagtttcgttggatttttgttatattttttgtccttcctttttcaactctgtattactttctcatatatcttggagatgtcagatccgagatgaagtcctacaagcagcgtcagaaggaacatgatgaaaatgttttgaaagtagtgaagcgtctcaaacagaggaatccaaaaaaggatggtct

SEQ ID NO: 224652 - DNA, 316 bp, Gossypium hirsutum
taaataaaattgaagatcttctttggaaaccactgggtgcaagcaactcacaaactgcacgagtttgggttgcacatttaaaaattccatcttcagatcttcattctacagttgaagttagtgttggacattctaagggaatcatttcaacaagagggtttgaatatagccatccttcaatgttttcatttaaagtacgtgtacagcctatggaaagagatttctctcaagtttctgttgcagaaagtatttcattgagagaagaaagttttaagatctatggaacacaatcgggggaatcaattatttacctttt

SEQ ID NO: 224653 - DNA, 405 bp, Gossypium hirsutum
gtccgcccacgcgtccggttttcgatttttgtattaattttcgccctttggtgtttttctaattcgggcagtgaggtgaagaaaaatgtcttgctgtggtggaaactgcggttgcggctccggttgcaagtgcggcggcggcggcggctgcggctgcggcggttgcaagatgtaccctgagatgaactttgctgagcaaaccacaactgagacacttgttcttggcgtggcaccccggaaagtgaactttgatggagctgaaatggaaactggggctgaaaatggctgcaaatgtggatataactgcacttgcaacccttgcaattgtaaatgaggggaaaaaaaaaaccgaagcatattatggaagctgatctaaataatatatgatgtaattggggtttttat

SEQ ID NO: 224654 - DNA, 327 bp, Gossypium hirsutum
agctaatttattttctttatagaaaaaaaatattgtggccatatctaagattgcaactggggatggtcatggtgaagactcaccttatttcgatggatggaaggcatatgagaccaacccttttcatcccattgatagacctgatggtgtcattcagatgggtctagctgagaatcagctttgctttaactttataaaaaagtgggtcatggaacacccagaagcgtctctgtgcagtgcataaggtgttaacaaattctctgagacgcgtctgttccaagactatcatgggatgcctgctgtcagagaggctgttgcaaaatttat

SEQ ID NO: 224655 - DNA, 386 bp, Gossypium hirsutum
gctaatttagcgctcacagaacagccaccattttttgaattttatgatccaaagacacggttctatacatctccaagattcttgcctcctaccaaagttgatgaatgcaagattgttgactccataatttcacatgggtgtttcttgcgagaatgtagtgttcaacactctatagtcggtgtgcgctcacgtttggagtccggcgttgatcttcaggataccatgatgatgggagcagactactaccaaaccgagtccgaaatagcatctctgctagcaaaagggaaagttcctattggtgtcggacagaataccaagatcaagaattgcataattgacaagaatgccaagataggaaaagatgtaatcatatcaaacactgatgc

SEQ ID NO: 224656 - DNA, 394 bp, Gossypium hirsutum
  unsure (1)..(394): unsure at all n locations
acccacgcatccnactaatttaactctcacattacaaccactaaatggtgaactttatgaaccaaacacaccgtgctattcatctccaagatgtctcgcctcctaccaaaattgatgaattcaagattgctcactccataatttcacatggttccttcttgcgagaatgtaatgttcaacactctataatcggtgtgctctcacgtttgaagtccagcgttcatcttcaagataccatcattattgtagcagactactaccaaacccaatcctaaatagcatcctttctaccaaaacaaaaatatcctattggtgtccgacaaaataccaatatcaaaaatcgcataattgacaagaatgccaagataggaaaacatgttatcatatcaaacac

SEQ ID NO: 224657 - DNA, 395 bp, Gossypium hirsutum
cccacgcgtccgcacgattctgaaattttgccttccgctccatctctacatcacaggagtggcgacagatgttgcagcccccgccaccgccgcacccaaagacccaacccaacctcaccttgaagtaaaactcttcaaccgctggagcttcgaggaagttcaggttgctgatatctccttgagtgattacattggtgtccaagcttcgaagcatgctacctatgtgccacacactgctgggaggtactcagttaagcgtttcaggaaggctcagtgcccaattgctgaaaggcttacaaactcacttatgatgcatggcccaaacaatgggaagaagcttatggcagtcaggattgtgaagcatgccatggatattatttatctcttgactgatc

SEQ ID NO: 224658 - DNA, 400 bp, Gossypium hirsutum
attttctcaaaaatgtcgctcctccaatcctttgtctatcctccgtcaacacttcgttgtgggccgtcactgtcatgcacagcggcacacccgatcgcttcctcccatagagttccttccacttcgaattccttcgtcgcgttagaatcgtcatcgttaaagaccgttaactctatttcgagcgctaagaacaacagaaggaaaggcgttgtcggaaaggtgaggtcgagcctggagacagcgggagcaactgtggggcaggtgacggaggttacaaaggacaccttctggcccatcgttaacgccgcggtggataaaaccgtcgtcctcgatatgtacactcaatggtgtggtccatgcaaagttatagcttccaagtttcaagaattatctggaaaat

SEQ ID NO: 224659 - DNA, 404 bp, Gossypium hirsutum
cacgcgtccgcccacgcgtccgctttattcaggtgtcaagatttattggtgatgtttacttgaagaaaccggaggtttatagagatccaatctttcaacgattcggaaaccctgttccccttaaaagaccagttatcacggcagaaccctccatccttattagaaagcttaagccccaagacttatttctgatatttgcatcagatggcctatgggaacagttgagcgatgaaaccgcggtagacattgttttcagaaacccccgagctggtattgctaagagactggtaagtgccgcacttagagaagttgcaaagaaaagagagatgagatacggcgatattaagaaaatcgagaagggaataagacggcatttccatgacgatataaccgtgatcgtcatt

SEQ ID NO: 224660 - DNA, 358 bp, Gossypium hirsutum
  unsure (1)..(358): unsure at all n locations
agccttcggctttatttggacttaaggtggcttttggcaaatttgccaccgaaggttagtttcaagaaggcaattggaagtgtgagtgtttctggccataagtttgtgggttgtccaatgccttgtggtgttcagatcacaaggatggaacacatcaatgtgctttcaagcaatgttgaatacctagcatcaagggatgctacgatcatgggaagtcggaatggtcatgctcctcttttcctttggtatactctcaatagaaaaggttataaaggatttcaaaaagatgttcagaaatgcctcagaaatgctcactacttgaaagaccgactgcacgaggctgngatcagtgctatgc

SEQ ID NO: 224661 - DNA, 398 bp, Gossypium hirsutum
gttacactcctctgtttcctcgtatacttggttattaagcctcagggatcgtggagagtgtgggtgagggtgtgaatgatttgaaacctgaggatcatgttcttcctatcttcaccgtataatgcaaagaatgtcgccactgtctgtcagaagaaagcaataacatgtgcgaactgcttaggatcaactgcgaccgaggtgttatgcttgctgatgggaaaaccagattttccatcaaccgcaagcctatctaccactttgttggaacctcgacttttagccaatataactgtcctccatgttggccaggttgccaaaatcactccaaccgccccgcttgataaagtctgtcccattagctgtgggatatgtacaggttttggggccactgtaaatgt

SEQ ID NO: 224662 - DNA, 370 bp, Gossypium hirsutum
cccacccgaacggtgcccccaattctcacggtttctcctattctcttatctcctctataggcggcggaaattgtggttcggacgctaccgatgacacgaatgttacatcgactgacactgggaataacatggatcaaaagatagatgttgaagaattggtgaataggcgagtgtctgaaagagagaaaggtgatgacaaaactgattccatcacgtgttgaatatcatcatccatgcttactgacaactataactacaactctgataatatgttcaattctctgaacgaagaggaggacaaacggaaggccaacctcctgaggaacagagtgagtgcgcagctatcaaggcatcacaagaagcatcacgt

SEQ ID NO: 224663 - DNA, 369 bp, Gossypium hirsutum
cttattattgcttcagatggtatttgggatgttttatcttcagacatggctgccaaggggggtcggggattaccagcagaccttggagcaaagatggttgttaaggaagctttgaggtcgaggggcctaaaggatgatacaacctgtctggttgttgatattatcccgtctgaccaaccggtcctaccttcaactccaaggaagaagcagaatatgctcagttcaattcttttcaggaagaaatctctaaatttcacaaacaagactacaaataaactttctgccattggaagtgtgtgaggagcttttttgaagagggttctgctgtgcttgccgaaaggttgggtaggattttcccacaaatgcaac

SEQ ID NO: 224664 - DNA, 320 bp, Gossypium hirsutum
gccaggaatagggctcttgaggtcatccatgtgttgatgggcaatgttgggagcactaggctgcatcacaccagaagtacttgagaaatggcttagggttgatttcaaggaaccagtatggttcaaggcaggagctcaaattttctcagaaggtggcttggattacttaggcaaccctaacctagtccatgctcaaagcatcctcgccgttctcggattccaagtcgtcctaatgggactcttcgaaggattccgcatcaatggcctccctggtgttggtgaaggcaatgatctttaccctgggggccagtactttgacc

SEQ ID NO: 224665 - DNA, 272 bp, Gossypium hirsutum
tacgtgcctagagatgaacaatttgaggagtctaagcagaacgctttctctgcagggaaggttagagcagtgctacacaacttgttgccgcagttgaaagccagcatttccgcccataaccgcgaccttaactccttttccgatattgatggtctttacaaagaagggctccttctcaaattaggctttcacgaaacagtgaagaagttgccgaaaatggtcagcaaattacaagaatctagtgaaggactcctcaaatatgaaacccctaa

SEQ ID NO: 224666 - DNA, 353 bp, Gossypium hirsutum
caaaattctttttcattcaaaaaaagctattttttttgtagttacttgtttcgttttttgggtttagttgattctttgtagttcacaaaaaatggtttccatgtcaaagattgctactggtaatggtcatggtgaaaactcaccttattttgatggatggaaagcatatgaaaccaatccttttcaccctattgatagacctgatggtgttattcaaatgggtctagctgaaaatcagctttgttttgaattcatcaaaaagtggctaatggaacacccagaggcttccctttgtactgcagaaggtgtaaacaggttcaaagagactgcacttttccaggattatcatggga

SEQ ID NO: 224667 - DNA, 400 bp, Gossypium hirsutum
ccagaatcaacgtaagaattagggttgtgtctataaatggcgattgcagcgcgcatcagagccactctccctctctttcacaggcttttgagatccgattccctgccttctcacactcccagagctgctcttcaccgaactctactttgtcccgaactgtcgaggaaatattccacttctccgaagaaggacgagaatgttaaggtgcctttggctttgtttggtggatctggaaactatgcatctgcactgtaccttgcagccgtaaaaggaaatgctctggacaaggttgagtctgaacttcttgaccttgttcaggcatcaaaaaacagtcaattcttttcttaattcaactaaggactggtcagtacctgcagagccacgggtcaaagccattaat

SEQ ID NO: 224668 - DNA, 372 bp, Gossypium hirsutum
  unsure (1)..(372): unsure at all n locations
ccggnccggaaaaaccggggcggcccaagccgtccgaatgaaccatcctggacaaattggaaacggattttctcccagtcctcgactgccacacctgggggattgctgttaagtttgctgaacttttgaccaagattgacaggcgatctggtaaggagcttgagaaggaacccaagttcttgaagaatggtgatgctggtatgattaagatgattcccaccaagcccatggttgtggagaccttctccgagtacccacccttgggtcgttttgctgtgagggacatgcgtcagaccgtggctgttggtgttatcaagaatgttgagaagaaggacccaaccggtgccaaggtcaccaagtctgctgctaaaa

SEQ ID NO: 224669 - DNA, 387 bp, Gossypium hirsutum
aagcaagcaagaaggcaggttgagttagcttatcacgagttggccaaggcaaagagagtggggcaacaagcacaagctgaatcagcaaaggctcaagctttaaagaaccatgcagtcaagcaaatcaactccactatttttcaagtcacttgccatgcttgtagacaccgatttcaagcaacaatacctcccgaagagaactctctagttgtgagttacatttcgtcagctataacagaaggtgaagttgaaaacgatagtcttacaaatctaacaaaacctactaacatataaaccaatatatatgtgtgtgtatgtgtgagagtgtgtataaggtgttaatactcgtctttccttcttatatataccaaaaaatggttggttcta

SEQ ID NO: 224670 - DNA, 379 bp, Gossypium hirsutum
cggacccttgggggatggataaatatcctccattttctagccaaaatggatttcaatctggggcagtccttacaccagaaagaaattgcccacatttccaattggtggaagcagctaggtttagccaaggaattggagtttgctagggatcaaccaatgaaatggtacatttggtccatggcatgcctcactgatccaaccttatcagagcaaaggattgatctcacaaagcccatgtccttaatctacataatagatgatatttttgatgtttatgggacacttgatgaactcactctttttgtgcaagttgtggagaggtgggattatgctgcatgtgataagctaccttattacatgaaaatatgcttcaaagctc

SEQ ID NO: 224671 - DNA, 363 bp, Gossypium hirsutum
cccacgcgtccgcccacgcgtccgcccacgcgttctcccacgcgtccgcccacgcgtccggcgcgcgtccgcacaaactcccatcacccgagatcatctttccccttcagaatggcggctgcaaccatggctctctcttccccatctttcgccggaaaggccgtcaagctctctccttccgcccctaaaatccaaggcaatggccgtgtttccatgaggaaaaccgctaccaaggctgctccctctggaagtccatggtacggtcctgaccgagtcttgtacttgggtccactatctggtgagcctccatcttacttgaccggagaattccctggtgactacggttgggacactgctggactc

SEQ ID NO: 224672 - DNA, 305 bp, Gossypium hirsutum
ggctttcgaagcttctagaagttccacatatttcaatgggtaccctcgttagacaagagcttaatccccactcttctctttacaaacagattgcaaatgctgtgaatgaagggaagcttgttccagaggatgttatttttgctttattgtctaagaggcttgaagaaggttactatggtggtgaaaatggtttcattcttgatgggattccacgaaccaggatccaggctgagattcttgatcaaattaccgatattgatctggttgtcaactgtaaatgtactgaagagcaaatgttgaagagc

SEQ ID NO: 224673 - DNA, 361 bp, Gossypium hirsutum
gcagaagcctcaagaaaggatgaatgttttgtttattgttttacgtaccagtaattatggggctgaaccaatgctgaaatcttgtggtgttaatataaactctaatttcacccaagtggatggacgtattctgccagcaccaaggttaagagtcggcaacggtgaagatttctttccaaggaatgggcgttggaattttaacaacaagaaattggtggagccatctaggattgaaagatgggctgttgtgaacttctcggctcctcgttgtgatccaaacaacattgcaagggatttgattcgttgtggagaaatgaaaggaattcgtattgatcccccatttgatatattcaatgagatg

SEQ ID NO: 224674 - DNA, 394 bp, Gossypium hirsutum
cccacgcgtccgcccaattcaccaatgtttgcaaattttcatggcgattcctatccctctgttgttctcttctccctctttcctttcctctcccaaatccttacctttattcttcaaacccaaaattaacacctccaaatccttcaatcttcactttcatgctaatgttgcctcctcttccactttgactgctatggaagtcggtgaagatttaccgcttgattatggtgattggcttcccaaacccgatccagaccagcgccgaagagctggcattttgctccacccgacctcgtttaagggagcttatggtattggtgattttggtgaagaggcttttcgattcattgactggcttcatttagcgggctgctccgtttggcaggtgcttccc

SEQ ID NO: 224675 - DNA, 385 bp, Gossypium hirsutum
gaattctgttacaattccatcttactttaaggttttataaacctttcaacattatccttggtggaagggacctcgtgtcctatggtatagttaagtacattattaaatagatgacttaatcttgggaatgccatcataagcaggtagcagattttggtctttcaagagaagagatggtagacaaacatgcagcaaacatacgaggaacatttggatatcttgatccggagtatatatccacaaggacctttactaagaaaagtgatgtctacagcttcggggtattgctgtttgaactcatagccggcagaaatcctttacagggtctcatggaatatgttgagctagtaagatctctctttttgctttgttaaaaggttaagct

SEQ ID NO: 224676 - DNA, 350 bp, Gossypium hirsutum
cttcgctttttttttgggggttttaccttatcctttgtgtgtttattcatcaatcccaaagtcgggggggatggttcaaagttcattttcgaccccgttcttgatcaaaacgtaccagctggtggatgatccgatcaccgacaatgtgatttcatggaatgaaaacggcacgtcttttgtcgtttggaaaactgctgattttgcaaaagatttgcttcccaattatttcaagcacaacaacttttccagctttgtccgtcagctcaacacttacggatttcgaaaggttgttccagacaaatgggaattcgcgaacgagaactttaagcgagggcaaaaagagcttttgt

SEQ ID NO: 224677 - DNA, 395 bp, Gossypium hirsutum
gtccctatggtggaaactctgtgcagatcccgttctctggttcgtctagcacaatacccgaagcgacaagcaaatccttctccatttcaatcgccaacaccttcctcatctaataatcctcctcaagctccgcatggtgccttagcagcttcaagtcacatgagttctgcaaattctccagcaatgaacatgcctatacagcagccagctctttccagtgaggcggatcccaatgaatcccaaagctctgttcagaaaatcattcatgaaataatgtctagccaacttaataacactggcggcatggttggtgctggcactctaggcaatgatgtgaagagcataaatggaatgctgccaccgagtaacaacacagttctcaacggtggcaacac

SEQ ID NO: 224678 - DNA, 330 bp, Gossypium hirsutum
ggaatggatcctcatacagagaatagtccttatcgaggattcatatacacttcgttcgaggaaagggcaacttttatttcccatgggaatacaggcaggctggccaaggagtatggggatattaacttggctcaaatttgtggtagcattgcctcagatgagaagcgccacgagacagcctataccaaaatcgttgaaaagctgtttgagattgatcctgatgaaacagtccaggcatttgctgatatgatgaagaagaaaattgccatgccggctgagttcatctatgatggcagagattataacttatttgaccactactcagctgtc

SEQ ID NO: 224679 - DNA, 380 bp, Gossypium hirsutum
cccacgcgtccgtgtctccggtgtttctctatccgaagctcccggcttcctcaaaggggggggcggtgctccggctaacgtggccattgctgttgctagactcggaggcaaagcgtcatttgtcggaaaacttggggacgacgagttcggtcatatgctggccgatattctcaagcaaaacagtgtctccggtgacgggatcttgtttgaccaaggcgctagaactgctcttgccttcgttacgttacgcgccgacggagagcgtgagttcatgttctataggaatcctagcgccgacatgctgttgaagccggaggagttgaacgttgatcttatcagatctttcaagggtattcactatggaaccaataagtttgatc

SEQ ID NO: 224680 - DNA, 383 bp, Gossypium hirsutum
gagaatcttgtttaaaatataagaaaaaaaatttttcgcaatgagcactgctggtcaggtggtgcgttgcaaagctgcggtggcatgggaggcggggaagccactatcgatagaagaagtggaagtggcaccaccccaaaagcatgaagtccgtattaagattctcttcactgctttatgtcacactgatgtatactactgggagtgtaagggttacactcctctgtttcctcgtatacttggtcatgaagcctcagggatcgtggagagtgtgggtgagggtgtgaatgatttgaaacctggagatcatgtgctccctatcttcaccggagaatgcaaagaatgtcgccactgtctgtcagaagaaagcaataacatgtgcg

SEQ ID NO: 224681 - DNA, 380 bp, Gossypium hirsutum
  unsure (1)..(380): unsure at all n locations
cccacgcgtccggttaaaactttccttctttgtatcgctctttagcttttgttttttgggaatggattcacaactttccttgtggttttgctccatgtccactgctttctgcttcttcttcttctctttcaccctcttgttttctttgttttccttattgatcttcgttttgaggttgaagctctggtgtacttgtgaaatctgccaggcttatcttacttccagttggaccaaagatttcgataatctttgtgattggtatactcacctncttaaaaattctgccaccggaaccatccatatccatgttcttggcaatatcatcactgcaaatcctgccaacgtcgagcacatgcttaaaaccaggtttgaaaactacc

SEQ ID NO: 224682 - DNA, 319 bp, Gossypium hirsutum
aacagactgtgtcctatatggatgaagtgacaattgctgtttatacgaacaccaccgctggaaatatcccatacctaaaacttcacccactgagaatatattcaacactaccggagagctgatgatcgcacaacaagatgaggtttagagaaaattgattggaccaaagctatcggtcatagcttatgacaaggactctcacattgaatgatcttctagtacaggaccagcaaactaccccacatacagtatgaactggtgggagggcactacttatcaaactcttaatgccatgtaaactaaaagatctaggtgagtt

SEQ ID NO: 224683 - DNA, 270 bp, Gossypium hirsutum
  unsure (1)..(270): unsure at all n locations
gttgctctatgccatgcacttggtcatgtttctatcaatgtctcctttgcagctgttggtntttttttcacccacactatcaaagctcttgagcctttcttcaacgctgctgcttcccagttcatacttggacaatcaataccaatcactctatggttgactcttgctcctggtgttatcggtgtatccatggcatcactgactgagctgccattcaattggaccggttgcatcagcgcaatgatatccaacatctgcttcacttacagt

SEQ ID NO: 224684 - DNA, 384 bp, Gossypium hirsutum
ctcgcccaataaaaaaccaaagaagacctttgttaaaccaaaaatggctctcaccaactcgccattcttcccaccaactccatccttcaatctcagccatcaacgccgttctctaaggctaagccattgtctgtccttcggatctccgccgtccattcttctgactcgcctaagaaccccgtcgtctccgacaaatccgtcaagcagccctctactgctccactcgctgctaccaaatctgctaccgcgcccaccactgctccaccgaagaatgcggttcctgggaaatggaccgtggatagctggaagtcgaaaaaggctttgcagttgccggagtatccggatcaggcggagctcgagtcggttctcaagactctcgatgct

SEQ ID NO: 224685 - DNA, 406 bp, Gossypium hirsutum
cacaaatggccctctttctttgcgtcttattttttctcctttcttctgcttctgctggtggtcgctgcctgcaccagtccaaggctgcttatttctccaaagcctctgctctttcagcgggagcttgtggatacggttccttggctttaggtttaagtggtggacaccttgctgctggtgtttcttctctttacaaagatggagccggttgtggggcctgcttccagataaggtgcaagaattcaactctgtgcagcagtgaagggactaggatcacactaactgatctcaatcacaatgaggaaacggactttgttcttagcagcagagcattcatggcgatggctaacaaaggcatgggccgagacattttgaaacttgggattgtcgacgtggaatataaaag

SEQ ID NO: 224686 - DNA, 414 bp, Gossypium hirsutum; identical to SEQ ID NO: 197176

SEQ ID NO: 224687 - DNA, 385 bp, Gossypium hirsutum
cccacgcgtccggaggcgagaccaagaagtatctgagcaagatgataattccagttcggtgcttcacctgcggaaaggtcattggtaacaaatgggacacttatcttgatcttctccaggccgattataccgaaggagatgctcttgatgctttgggattggttcggtactgctgtaggagaatgcttatgactcatgttgacctcattgagaagcttctgaactacaacacattggagaagtcggagaccagttgagggaacatgtagaatctaagggtttgttgcagtttgtgtgagtgcctgtcaatgatggccgtgatctgaatccagaaaaagggagggaaggactttaaatagtactagcctagtttgttttctttagc

SEQ ID NO: 224688 - DNA, 386 bp, Gossypium hirsutum
cttggaggcaagaaactggaatgctgataaatttaagaaaatgctggaagagaccatgggggggagatccacctataagcctgaggaaatacgttggcacgaagttgcagtggaaggcgagactggaaaagtatacagggcaagctttcatgaccgacatggtagaacagttcttatactgcgaccaggaaagcagaacaccacatcgttggacaatcagcttcgccatttggtgtatctgatagagaatgcaatcctaaaccttccagagacccaagaacagatggcatggttgatagactttactgggtggacattgagcacaagcgtgcccatcaagtcggctcgcgacactattaatctattacaaaaccactaccccgaga

SEQ ID NO: 224689 - DNA, 409 bp, Gossypium hirsutum
tacacaaagatctgctgaaaaatgaatgccctcacattgttgttgggacacctggaagggtgattggctctggctagagacaaggacctttcattgaagaatgtcaggcatttcattcttgatgaatgtgacaagatgcttgaatcactcgacatgaggagagatgtgcaggaaattttcaagatgaccccccatgataagcaagttatgatgttttctgctacgctcagcaaagaaattcgccccgtttgcaagaaatttatgcaagatgtaatattccgtggccaatactacttgaatttagaaagtatctttttaattcattcccagctttcaacaagagttatgtaaaattttaatcttggtaggtccatcactatatgcttgctactggtgttgcttgggtgca

SEQ ID NO: 224690 - DNA, 224 bp, Gossypium hirsutum
tcatatatgcatattctggaattatggtatcatttcttaagtatgagaactgaagtgagagcgagaagctctcaatggatttgatgcgagaattgtgctgcaatcttgggacaattagagctcctggcattggtttggtttacaatgaagctgccaaaggagtaccagctatatttggccattttctaactacactccctgcaatccactccatgatcatcttt

SEQ ID NO: 224691 - DNA, 389 bp, Gossypium hirsutum
gccgtccgttcctttctacaatgtaagaacctaaaaacaaattataaatgcaactttgcactttgaatggcggatatccatcacagcactaatcatgttccttctgaagacttggcgggcatctgcatttggagtttatggttacttgaatttcaccagaaatggcttcttggaacactccaagaaattcaaacccgaagatatggaaatacgaatagaggggaagaactgcgtggtcacaggagcaaattctggcattggttttgctactgctgaggctcttgcatcatgtggagcaactgtctatatggtgtgtcgtaacaaggagaaaggagaaaccgctctttctaaaattcagtcttcaactggcaatccaaatgttcatttgg

SEQ ID NO: 224692 - DNA, 437 bp, Gossypium hirsutum
gtgccgggaaggaacgggcgggccgacgcattcggttggggtttttgttggtatgcgctttagaatgttgtttgaaacagaagaatcaagtgttcgccgatacatgggtacaatcactggcataagtgacttggatcctgtccggtggccaaattcacattggcgatcagtcaaggttggctgggatgaatcaacagctggagacaggcagcctagagtctccttgtgggagattgaaccattgacaacattccctatgtatccatcaccatttccattaagacttaagcgaccatggccagcaggattaccttctttccacggcatcaaggatgatggtctaggcatgaattctccacttatgtggctacaaggagatgcaggtagaggaatgccatctctgaattttccagggattggagttacaccgtggatgc

SEQ ID NO: 224693 - DNA, 426 bp, Gossypium hirsutum
  unsure (1)..(426): unsure at all n locations
cggattgaangggcgggcccgacgccatgcgttcgttctcactatgcttttttatatatatgtttacattttggctcctgtggatgagaaacccggttaggaagttcttaacttgcccattcgtagaagaacactaaagggtttcaagatctaaacttttgtttttcaattgaatccaaagattggttttcagctttggtaaatgggtttttgtttttgggtttagtttgggtatagcttgctttttgtaagtttacaagctgatgctgcagctgaaggggatgcaattgttgagggtactgtttatattgatgggaaagctcccattggtatcatagattatgatttacgttgtgctactttggattggtggcctcctgagaaatgtgattattggacatgcaaatggggtcttgctggacttct

SEQ ID NO: 224694 - DNA, 396 bp, Gossypium hirsutum
ggcaactctaccgagctagaggtggaagacttttagaccatactatcaaaggcattgggcgttgggcataaccgtgccatatgattgtcagcttggggtttgcatgacttgccctgctaagctcttaagtggaaccgttgatcaaagtgaaggtatgcttagtgatgatgttatagaccgtgggtttgcattactttgtgtagcttatccaacttcagattgccatatcaggactatccctgaagaagaactgctttctttgcagttaaaaacagctaatgattgacactgaaactgtttttgtgtgtgtctgtatgttggatgctgtgtttttatcttgaacgaaatggagttaaaacctaatttgatatcttcataggttattttcccagattg

SEQ ID NO: 224695 - DNA, 355 bp, Gossypium hirsutum
aaggggcttatgaaataaaggcacacccttggttcaaagacattgaatggggcagattatgtcaaatagaagctgcgtttatgccagaggttaacagtgacctggacacacaaaactttgaaaagtttgaagagttgggggctcaagtacaatcttcgaccagatcgggtccctggagaaagatgctttcttcgaaggatgcaaattttgtaggttatacgtacaagaatgttgagattgtcaaggagcatcatcttccaggcattgctgaggtgaagaagaaaagcaatgcacctaagagaccttctgtgaaatcattgttcgacactcctggacctcctgatccctcaacaaa

SEQ ID NO: 224696 - DNA, 380 bp, Gossypium hirsutum
aagaaagaaagaaaacatgtctcttgtgacagaagagataaaagcgagtgcatcagagatttaccatggagatgagatatgccaagagaaatccaagtttttgttggaggaagtaggcatgccaagggggcttttgccacttagagacatcgaagaatgtgggtacgtgaaggacacaggtttcgtgtggctcaaacaaaagaagagcatcacccacaagttcgaaaagatagggaagctggtttcctatgcaactgaagtcacggctgtcgttgagaaaggcaagatcaagaagctgactggggtgaagaccaaagagcttttggtttggatcacactgagtgatatccaagtggatgatccctccactgggaagatca

SEQ ID NO: 224697 - DNA, 410 bp, Gossypium hirsutum
gcttaggagaaaagagaaaaaaacaatgtcaggtcctcagtgctgttcgaatccaccaacattggattctgcaagtggagctggtcacgttgagaatcttgctggtctcaacacttatgtttctgggtctcttcaatctaagcttgctgtttttcttatctctgatattttcggatatgaggctccaaactttagaaaactcgcggacaaggttgcagcctctgggttctatgtggtggctcctgacttcttttatggagaaccctatgaccctaataaccctgatagacctttatctgtttggataaaggatcatggaccggataaaggttatgaggatgcaaagctcgtaattgacgctttgaaaagtaaaggagtttcatccattggagctgctgggttctgttggg

SEQ ID NO: 224698 - DNA, 377 bp, Gossypium hirsutum
tcgcgccgtgcacccgggccaccagattatcctccatctaagccgccaactgcgcccccggctgagccaccagtgcatccaccgacatatcctccaccatcgccttctccagctaagccgcctacttatcctaaaccacaaaggagcctagtggctgttcagggcgttgttttttgcaagtcatgcaaatacgctggatccaacaccctgttgggagcaaaacctattttgggcgccactgtaaagctgacatgcaagaacaccaaatacaagcaagaggccactgcgaaaactgacaagaatggctatttcttcctgcaagcaccaaagaccgtcaccagctttggagcccacaaatcacagtgtctctagtatca

SEQ ID NO: 224699 - DNA, 418 bp, Gossypium hirsutum
cccacgcgtccgcccacgcgtccggtccaaccgttcctcttgataaagtctgtcccattagctgtgggatatgtacaggttttggggccactgtgaatgttgctaaacccaaaaagggtcaaactgttgcagtttttggactgggtgccgttggtcttgccgccgctgaaggtgcaagggtttgtggggcttctcggatcatcgctgttgatgtgaaccccagaagatttgaagaagctaagaggtttgggattacagaatttgtgaatccaaaagactacgacaagccagttcaagaggtgattgtggagatgaccggcggaggagtggatcgcagtgtggagtgtacagggagcgtccaagccatgatttccgcttttgaatgcgtccatgatgggttgggtgtttgtgtgctggt

SEQ ID NO: 224700 - DNA, 411 bp, Gossypium hirsutum
cccacgcgtccgcggacgcgtgggaaaaaaacattcgtctttcgctgatctaaaaattgggactttaaactgcgcaagagtggctggggagatggaaatcaaaaagggtattgctgcagcaggaaaacccattgctgatcgtcatgttattgatgacggcttgattcaaaagattgtatatgatgctcttgtttggagttctcttcatggccttcttgttggagacagaaatgatcagaggtctgggaaactacctggtgttggcatggtgcacgctccaattgctttgatgcccacgtcatttccagaatcttactggaaacaagcatgtgaactagctccaatttgcaatgagctaatcgatcgtgtaagtttagatggaaagtttctgcaagactccctagctaggac

SEQ ID NO: 224701 - DNA, 292 bp, Gossypium hirsutum
tcggcaagagtgcttggatgtgtataaaaggaaggttgagcatgctgcagaattaagagcggagcttcttgtgaccttgtcagatgccaaactacaactttacacacttgcattagctcttggtgacaaacgaattgttggcgctgatactgtgaaggcatggctgacaatcaaggcgcaacttgctgctatagcaccaacgcttgaacagctgtggaaacacatagaggagagagttaccgagttttgtgttgtacaatcacatattcagaaggaatgtggtgcaattact

SEQ ID NO: 224702 - DNA, 412 bp, Gossypium hirsutum
cccacgcgtccgtatggttgtcgacaaatattttaacaaggagctggggctggatatggacaagttcatcacacactctgtgccttttgccgatataaacaaggcattcgactacatgctccagggtataggtctgagatgcatgattcatttggatgcttaagagagtgttgctgctgtatatttgcccaaccaaggatcaaaactctaatgttttgtcctactatgtgttatatttatgtgcctacttaagctacctttcccggttatcaagagtgcccatatagaactctctctctctaaaaaaaaaaaagagagttctttatatggagttttatattatgtgatgagagaataaattatcttgtaaaagcttgctttgttaatgaaaataattcctattactatgaaa

SEQ ID NO: 224703 - DNA, 408 bp, Gossypium hirsutum
tttcgaaccggcaggacttaacgtacagtttcttgccggcgaatgggttgaccgacgaagtgaaagccgtcttcacgagcgccttccagaaatggtcaaccgttacgccgctgactttcacacaagtggattcctactcctcggcggacataacgatcgggttttacactggagaccacggagacggcgagccattcgatggggttttagggacgttggcccacgctttttctccaacgagcggaaggctccatttggacggggatgagaactgggtagtttctggtgatgtgacgaaggcatcggtgtcgacggcggtggacttggagtcggtggccgttcatgagatcgggcatctgttgggtttggggcattcgtcggtagaggatgcgattatgtacccatcga

SEQ ID NO: 224704 - DNA, 407 bp, Gossypium hirsutum
taaagtaaaaaacttcggaaaaaatctcaaatccagaacccaaaatctcatctttccattagagcgcagctctcattcctctcgattttctttcactttgttcgcctcttcgattatcaattccgctctcagattcttgaagcaagcgaagttcaattctccaccctacatcagaagaaaactctgattccccaaaattagggtaatctcaatccctaaaagatgccggccaccgcagggagggttcgaatgcccgcgaacaaccgggtgcatagtagcgccgccttgcaaacccacgggatttggcaaagtgcaatcgggtatgacccttatgctcctaataaagatgattcaaaaattcatcgagtcagatgactgccgctgctgaacccgatgggtgaaacgca

SEQ ID NO: 224705 - DNA, 412 bp, Gossypium hirsutum
gaacccacccaaaaccaaaacccttccaaagaattggctctctccgtttcccatttgtatctgaaaattgcaatccatttcaaaccccccttaaaacccttgaaatcatggcctttgcagagtcccaaaaccccttacgagtttatagaatcccgcagtccaggtacatcgactccgtccgctggctttcaccggtttctccctccgacagattcgcagccatcgcctattccgacgctgataccaactctccctccatcgaaatcgcatacgttgacccaaacccacaaagctcgtctccaaccttaacccctcaatcttcatggacctcaccttctcgcatttcgtccctcagaaccgcccactctacccctcagcccctgctcgctgccgccactttctccggttcact

SEQ ID NO: 224706 - DNA, 332 bp, Gossypium hirsutum
  unsure (1)..(332): unsure at all n locations
cggaaannccggggcggcccaacccgtccgcgatatgaacattaaactggtcccaggcaactttgttggcactgttaccacttactatcttcgggcggaagggtcgacatgggatgaaatcgacttcgagttcttggggaacctaagcggagacccatacatagtccacaccaatgtatatacacaaggcaaaggtgacaaagagcaacagttctacctctggttcgatcccaccaaagactttcacacctactcccttctttggaaccctcaacgtattatcttctctggtgatgggactccgctcagagagttcaagaacttggaatcga

SEQ ID NO: 224707 - DNA, 402 bp, Gossypium hirsutum
cccacgcgtccggctatgctaccatacaaagtcttgatctcatcaagcttgtaagccactgtccaaggttgcagcgtcttttggtacttgattatgttgaagatagtggccttgaagaacttgcttctagttgtaaggacctacaggagttacgtgtgttcccatctgacccatttggtgcagagccaaatgtatccttgacggaacagggccttgttgctgtttctttgggttgtcctaagctacggtcagttctgtatttctgccgacggatgtctaatgcagcgttagtcaccattgcccagaatcgtccgaacttgacccgttttcgtctatgtataattgagcctaaaacacctgattacctgacccttgagccactcgatgttgttttggagccat

SEQ ID NO: 224708 - DNA, 388 bp, Gossypium hirsutum
ggaaaatcatccacaacgaaatagaactctaccacactcgatcaggcactcccaaatgcgagaaactatctgacctcatctccgatgagtgggcttacttttggcttttcaaagctgcctacttcactctgtttttcatcttctcgctcctctcaacagccgcagttgtttacaccatcgcctgcatatacacagctcgggaacttaccttcaacaaagtcatcagcgtcgttcccaaggtctggaagcggctgatggttactttcttatgtattttcatcgccatgtttttataccacgtcgcagcattggctatcttgattggttgcgtggtttcaatcggaggaaagcaatttggtttcgcggtgttcgttggtttagcgatttt

SEQ ID NO: 224709 - DNA, 422 bp, Gossypium hirsutum
acccgtccggaagcaatcagtctggatttgtttattgacttataagttggcgctaatggtctcttcttctgtcattttatggattctcgaagatgattgagtactgagagagaaaagggactccccccccctttctttgtgtagaattaaggaaagctattgacgttattgacttcttgctgatagaagtatggtgttagttttagcaataggagaccttcatattcctcacagggcacctgatctgcctccaaagttcaagtccatgcttgttcctggcaagattcagcacatcatttgcactggcaatctctgtatcaaagaagttcatgattacttcaagactctgtgtcctgatctgcatattactcgaggtgaatatgatgaagattcccgttatccagaagacaaaacactgacaa

SEQ ID NO: 224710 - DNA, 374 bp, Gossypium hirsutum
cggacgcgtgggctaccatagtgcgattgttttgtacgaaaccaacaaagaaaagcgggcagtgaggagcaacagcagcaacaatggtgaagttcctgaagccaaacaaggcggtggttgtccttcagggtcgctacgccggtcgtaaggcggtgatcgtcaaatccttcgacgaaggaacccgcgaccgcccttacggtcactgtttggttgcagggattaagaaatacccaagcaaagttatccgaaaggactcttccaagaaaacggccaagaaatcccgcgtgaaatgctttctcaagctcgtcaattaccagcacgtgatgccgacgcgttacaccttggatgtggacttgaaggatgtggtcaccgtc

SEQ ID NO: 224711 - DNA, 403 bp, Gossypium hirsutum
cacagccaaaaaacagagagctaacttgctctgttttctctcatcatctttctttctccccgttagttctcacttcatatatactttatatcaacgatgtcggtaaaagagtgcggcaatcacgggaagtaccgccggaaaatcttccgtcgagtcatcgccggcatcctaattttcattctaatcgtgctgataacaattcttctcatatgggccatcctccgtcccagcaaacccaggttcatcctccaagacaccaccgtctacgctttcaacgcctgcacccgtaaccttctcacctccaatttccaagtcactctatcttctcgaaaccccaacgacagaatcggcatttactacgaccggctcgacgtttacgccacctaccagaaccaacaaatta

SEQ ID NO: 224712 - DNA, 410 bp, Gossypium hirsutum
gagagatatcactaacgataccaaagggtcgcaattggatccctcggaatcgacatttttgggtttagatgataataggttgtgtcaatgggatatgagagatagaaaaggggtggttcaaaacattgccacaagtgattcacctgttttgcattggtctcaagggcatcaattctcgagagggacaaattttcagtgctttgcgagcactggagatgggtcaattgtggtcggatcacttgacgggaagattcggttgtattcgaagacatcaatgaggcaagccaagactgcatttcccggtctcggttcaccgatcactcatgtggatgttacctatgatgggaagtgggttttgggcacaactgatacgtatcttgtccctcattgcactctgtttacagataaag

SEQ ID NO: 224713 - DNA, 406 bp, Gossypium hirsutum
gcaaaattgaagctgaaagcggggagcagaccgtcatgggttggtttggcagctgctttatgggttcagatatcagctgggaacgccaccaacttcacactctattcttctgctctgaaatcggtgtcggggttcagtcagcaacagctcacgttcttgggagtagcaaatgatattggagagagtgttggactcctccctggtattgcctgtaatcgtttccctccttggactgtgctgcttgttggggtctttgcctgtttcttgggatatggtgttatctggcttgatgttagccaaactattcatcctctgccttactgggtgttatggatcgcacttgtggttgcctctaatagtaatgcatggtttagcacagcagtgctagtaactaacatgagaaatt

SEQ ID NO: 224714 - DNA, 416 bp, Gossypium hirsutum
aaattttcttgagtcgtgaggttccaagagaattcctgctttttgtcattcctgcttttggaggtattgtttcttgggaaggagatggagctccattcgccgaatctgatgatagcatcactcatcagattgtggacagaccaacccagggacatgtatatctttcaagagaatatgttcaacctcagtgggtttatgactgtataaatgcacggatcatcttgccaactgagccatatatggttgggagggacccacctccacatctgtcgccttttgttgatgatgaggctgaaggttatgttcctgattatgccaagaccattagacaactacaggctgctgcaaaaagtgatattcaacctttgcctggcaccggaaatgatgagttggatacctcttaaaatatgttggca

SEQ ID NO: 224715 - DNA, 415 bp, Gossypium hirsutum
ctctgcactaggccagctttaaatccagttctttcgtgagaacaagttaatattgcggaatgggcaatgacttggcagaagaaaggtatgttggatcaaatcatggactctaatctggtggggaaagtgaatcccgcttctcttaagaaatacggagagacagctgaaaagtgcctggctgagcacggcgttgacaggccatccatgggagatgtattatggaaccttgaatatgctcttcagctggaagagacttcatcagcactaatggaaccagatgataacagtaccaaccatatcccagccattcagacaccacttgagccattcgataacagtgtgagcatgattgacggtaattctggcactgatgatgatgctgaagatgccgctactagtgcagtattttcacaac

SEQ ID NO: 224716 - DNA, 391 bp, Gossypium hirsutum
  unsure (1)..(391): unsure at all n locations
cagtgataccatagacaatgtcaaggccaatattcaggataaagagggcatccctcctgatcagcagaggttgatttttgctggtaagcaactagaagatggccgaaccctagctgattataacatccaaaaggagtccactcttcacctagttttaaggcttagaggaggaaccatgatcaaggtgaagactctcaccgggaaagaaattgaaattgacattgaaccaactgataccattgatcgtatcaaggaacgggttgaagagaaagaaagaattcctccagttcagcaaaagcttatatatgccgggaagcaacttgcagatgacaagacagcgcgngactacaatattgaaggtggctcagtgctgcatcttgtgcttgcactg

SEQ ID NO: 224717 - DNA, 372 bp, Gossypium hirsutum
atctcagtaagcgtcccgaggaaatcggtgctgttgaccagggccatatgtttggttacgccacagatgaaacccctgaattgatgcctttgacgcatgttttggcaaccaggcttggtgctcgcctcactgaagttcgcaagaacggaacttgcccttggctcaggcctgatggcaagactcaagtcaccgtcgagtattacaacgataagggtgccatggtgcctgttcgtgtacacaccgtgctcatttacactcaacatgacgagaccgggactaacgatgagatagctgctgatttgaaggagcatgtcatcaagccggttatacccgagaagtaccttgatgagaaaaccattttccaccttaacc

SEQ ID NO: 224718 - DNA, 352 bp, Gossypium hirsutum
cccacgcgtccggttcatttgattttctgggttttcccccccgttatttttagtatcagcagttgtcttttttttttctttagttttgccttgttgaaagctcaagttcgaagaaatggctgagcgtgctctcactcgcgtccacagtctccgtgagcgtttggattccacgcttaccgcccacaggaacgagattttggctttgctctcaaggattgaaggtaaaggaaaaggaatccttcttcatcatcaaatcattcttgagtttgaagctatccctgaagagaaccgaaagaaattagctgatggtgcattttttgaaatactgaaagccagtcaggaagccatcgtg

SEQ ID NO: 224719 - DNA, 378 bp, Gossypium hirsutum
cccacgcgtccgcccacgcgttcgcttttctctttactccacatctcatattccttcatttctttctaaatacttccatttttttgattttttttaagtgaaggaacagtgaaaagcaacaggaaatggcaaatatagatatcgatgggatcttgaaggagcttcccaatgatgggcgtatccctaaaaccaagatcgtttgtactttgggtccggcttcacggtccgtacctatgatagagaagctgttgagggctgggatgaacgttgctcgcttcaatttctctcatggcagtcatgagtatcatcaagagaccttggataatcttaggtctgctatgcacaacaccggcattctttgcgcggtcatgcttgaca

SEQ ID NO: 224720 - DNA, 400 bp, Gossypium hirsutum
ctgaaaaaaaaaatcacctactctctcactttgctctcttcttgttcctgtcctctgtcaccaaactatcgccgacaacctctccaaaagaatggcatatgaagggattctgttggggatgggtaatcctctccttgacatttcgttagtcgtggacgaagagttcttgaaaaaatatgatatcaagttgaacaatgcaattttagctgaggagaaacaccttcccatgtatcaagaaatggcatccaagcccaatgtagagtatattgctggaggtgctactcaaaattcaatcaaagttgcacagtggatgcttcaaattcctggtgcaactggttacattggctgcattgggaaggacaagtttggggaggaaatgaagaagaactcaaaagctgct

SEQ ID NO: 224721 - DNA, 394 bp, Gossypium hirsutum
agaaaatacttttgtttccgctttgctcgtcaattccgtggtagatctgggacactgcaatttggtttcagagagggaaaactttaagcaaaattcgaactttgtgattttctttttcattctgggtacaaagttaaaaactgacaaaacggtgttgatcgcaattcatggagaattcgagtaaccctgatggtgaagacacaagaaatcagacaataccttccacttcttcaacatcctcctccgatgattaccgtttgtttgatcgtcaaggttctcttcaccagtttctaggtggtggtaaagcggctgatatactcttgtggaagcggtggagtgtttctctcggtgtcattgttgttgcttctgttgcttggctcatatttgagtggtc

SEQ ID NO: 224722 - DNA, 410 bp, Gossypium hirsutum
cccacgcgtccgcccacgcgtccgcccacgcgttcgtccacgcgtccgcttttgaatgcaaatatatcatgtcctaccagcaaggggaggatttctattacatggatgaagattttgtagatgacatggatgaagacaactacggtcaagctggtggagatgtggatgctgatgaatatgacatgctgaccaaggtgaccgatacgacttctgcgcaagcgcggaaggggaaagacattcaggggattccgtgggaaagactgaacataactagagaaaaatataggttgacaaggcttgagcagtataagaactatgagaatatgccttcttccggtgaagctgttgacaaggaatttaaacatataaagaagggtgggaactactatgaattcttctacaatactaga

SEQ ID NO: 224723 - DNA, 386 bp, Gossypium hirsutum
gccttattacatctgggcccatctcctctgggccactaaattcctccggtgctcctcggaaagtgtctggtcctctggaatctatgggatcaatgaaaatcaaaggttctgctgtagttcataatcaggctgtgaatattcttggccaaaatgacgacttttctttcaagaggaacttccccaaactaatattatatgcactgatactgctctttgtaatgggtttcattgctggtggttttattcttggagcggttcacaatgccattctcctcatcgttgttgtggttcttttcggtactgttgctgcattatttgcttggaactcttgctatgggagaacagctattatgggtttcattgctggttatccagatgcagagctt

SEQ ID NO: 224724 - DNA, 416 bp, Gossypium hirsutum
cccacgcgtccgctttcctccattttttttccaactgaaaaaaagggtctctctttgttttcttatacagagattgcttgtaagggcttcttgctgatgtgcagtggttcaaagagtgaacttgttccttcaaatttcaccatggaaggtgaattacaaggatgtaaacccgatgctctatctaaatgctcggttttgcttgaattagccgcctctgatgatttggtagccttcaaaactgaagtagaagaaaagggtttggatcttggtgaggcaagctactggtatggtagaagaatagggtccaaaaagatggggttcgaagagaggatgcctttgatgatcgctgccatgttcggtagtatcgatgttttgaactacatcgttggtaccggaaagattgatgtgaatagagc

SEQ ID NO: 224725 - DNA, 422 bp, Gossypium hirsutum
cccagtttcaagtcctactacttttcgggttctctcatactcgggccagttggacaacccaagaacattcgaaccaccccactcctaaaaagcccacaccgaccttcactttactatgttaacctaaccggaataagtgtaggccgggttcaagtccccattgccccggaatacctagcgtttaaccccaacaccggggcagggaccataatagattcgggtacggttgtaacccgattcgtccagcccatttacaaggcaatccgagatgagtttgtgaagcatgtgaaaggtccatttacaacaattggagtatttgatacatgctttgatgctacagcagaagctgaggcacctttaataacattacatttcgaaggcttgtcgatgacattgccaatggaaaacagcttcttgcacac

SEQ ID NO: 224726 - DNA, 418 bp, Gossypium hirsutum
gtgatgttctttttgatcctcatagtggtgaaatctatgatcgagatgaggatcacttggcgattgatgatggagcttcttggaataatgccacgcaagattgcattaggtgggcgttattcccgagactttttcaacagatatggagacttgaggcatatacgcaggttacatttttggcctctcgataaggtgcttatggagaagtataatttcagcgagcaagatgctaaagacatggcggacttcctcattccaatccttgattttgcccccgaaaagagacccacagcagctcaatgcctgaaccatccgtggatcagttctggccctcagctgctacaactttccacaactgctcccaaacagcacggagatgatggtacatctaaaagggaaaggaaagataaggatgaca

SEQ ID NO: 224727 - DNA, 421 bp, Gossypium hirsutum
cccacgcgtccgtttagatctcaacagcaatacatggggttcttgttctgatcatcaagaaactgtgaaaaatgcattatcaagagacaagaacagtacagaagagggcctgctgactattggattaggacattcaaaactaaaagctggccgaactggatttaaaccttacaaaaggtgttctgtggaagccaaagaaaacagagtgatgaacactggcagtcaaggtgaagagaaatgtcccaagagggtacgcttggaaggggaaccttcaacttgacttttacacaattgcatacaattaacaaaggcaaagtttgtttgttgaatgcaatctctaatgttcttcccccatatcttatttccttttcatatgttgatcttaaaagacttttattcgattgcagctcacgagactttt

SEQ ID NO: 224728 - DNA, 407 bp, Gossypium hirsutum
taggaaggccatgttaaagttacgcatgaagcctgttactggtgtaagcagggtcaccattgagagaacaaaaaatgtgctatttttcatctcgaaacctgatgtctttaagagcccgaattcagagacctatgtcattttcggtgaggctaagatagaggatttgagctctcagctccagacacaagctgcccagcagttcaggatgccagacattggttctttggcagctaagccagacacttctactgcagctgctgcaccggctgatgaggaagaggaagaagttgatgagactggtgtagagcctagggacattgacttggtcatgacacaggctggggtttcgagggccaaggctgtcaaggctctcaagagtaacaatggtgacattgtgagtgctatta

SEQ ID NO: 224729 - DNA, 413 bp, Gossypium hirsutum
  unsure (1)..(413): unsure at all n locations
ttaacattttccaaacttctattactacatgacagtaccgaaagacatgtgataaatcttgttgcgcagatctacatcgagaacaaacagcagtgtcgactactcgtttagatcgcaaattaactagagtaggcatatagttccatgatgctcttcaaactgtaatagtaatctttgagggtaactgtaaattccagagctttttgtagaaattttttaaatcggtatgtaataataagttgttaggattcgagctagtgctttgtaatagtttgtaggcacttctgaccgaaaatcaactccttggagttccgctagaaggattntgcaaatcttttgggcagtgtctgctgggaaggtacttagcactagttcagacttccacatattatntgatgcatcaatnaaatctg

SEQ ID NO: 224730 - DNA, 393 bp, Gossypium hirsutum
cccacgcgtccgcccacgcgttcgcggactcgtgtggtccgaggaacccttccatggatggcaccagagcttctgaacggcagtagcagtcttgtctcggagaaggttgatgtcttctcattcggtattgttatgtgggagcttctcactggagaagaaccatatgcagacttgcattacggggctattattggtggtatcgtaagtaatacactacgaccaccggttccagaaggctgtgacccagaatggatatcattaatggagagatgctggtcatacgagctaccagagagaccgagtttcaccgagatagcaaatgagttacggtcaatggcagcaaaaattcaaccaaaggggcaaatcccataaaataaagaaagcataaaactc

SEQ ID NO: 224731 - DNA, 404 bp, Gossypium hirsutum
  unsure (1)..(404): unsure at all n locations
gaaacattcctttggattgcagacctgaagaacttcgaattccatttgagagattcggacttgttcgagatgtgtatattccgaaagattactatacaggggctcctcgagggtttgcgtttgtgcagtttgtcgattcttatgatgctgccgaagctcaatggcgcatgaatgggaagatatttggtgggagagagatatctgtcgttgttgctgcggaatcaaggaaaaggccagaggagatgcggcataaagcaaggcaaagaggaccatcgggatacggnggacgatcatcttattatgggcgttcccggtctcgttcagcatcttcaacgcgctctcctngccgtccttcaggttctagaggccgatatcgctcaaggtcgtactcccctgcttcaaga

SEQ ID NO: 224732 - DNA, 378 bp, Gossypium hirsutum
cgacaccctgccgccgcaacaatgaagtacaactcgcgtgtctcctcctctcgccgcaagagccgcaaggctcatttcacagcaccttcttccgtccgccgcgtcttaatgagcgcacccctctcatccgatctgaagtccaagtacaacgtccggtctatgccggtgcgcaaggatgacgaggtccaagtggttcgtgggacctacaagggacgcgaagggaaagtggttcaagtgtaccgccgcaaatgggtgatccacatcgagcgcatcacgcgcgagaaagtgaacggttccaccgtcaacgttgggatcaacccatccaaggttgtcatcaccaagctgaggctggacaaggataggaagtctttgctggat

SEQ ID NO: 224733 - DNA, 397 bp, Gossypium hirsutum
ccaaccccaaaatccttgttaacacattcgatgctttggaacacgaagcattaaacgccattgaaaatttcaacatggtaggcatcggacctttaatcccatcttctttcttgaactcaaatgactccttggataattccttgagaaccgatctttttcaatccgattcaaaagattacatccaatggttagactccaaaccaaaatcggccgtcgtttacgtttccttcgggagctatgctgtgttaacgaagcaacaagtggaggaaatcgctcgagctttaatatccagccggcgaccctttttatgggtggtgaggaaccggaaaaatggaggcgaagaagagaaagaagaagataaactgacttgcagggaagaattggaacagtttgggat

SEQ ID NO: 224734 - DNA, 343 bp, Gossypium hirsutum
cccacgcgtccgcccacgcgtccggtgatctcggtgttgttggggcggctgatggaccgtcgtactctgatgatacgggggaggatatgttctctatgttcattgatatggataagttcaattcttcttctgcaacatcgacttttcaggttggtgagtcgtcagcccccgccgctgctccggcaactgctcatatggctgctgctgcatggactgggatgaatggtgagaaccagagtgttactgttgggtcttccgagaaaccgagggttaggcaccaacatagccagtcgatggatgggtcgaccagtattaagccggaaatgcttatgtccggtgcgga

SEQ ID NO: 224735 - DNA, 347 bp, Gossypium hirsutum
cggacgcgtgggtgttaatccacaaacggagtttttgaaaacgattcataagttagctgatacggttattagagggttgtttaagtattggcctttgactaattgttagaaggaagttctcttcctcggggaacttgaggaagtacttgaagcaacacagtctgtggagttccaacgatgtatggttccgcttttcagacagattgcacgttgcctcaatagcttacatttccaggggaacgagattcctaacaattttctttattgctggaacaagtcttaaccaagatcaagatcaaagtactgcactaagttatatatgcaatcattgcaatactttggcttca

SEQ ID NO: 224736 - DNA, 412 bp, Gossypium hirsutum
gccgtatttcacttcccctctcttctctcttcttttccttccttccttccttctgtcaacaccactttctaatggcttcccttgctggttcatccatctctatgcaacctcgccagaccctggctacaagcagggtttctgggttgaaattggtttcatttgtgaaccggggaagaagcagcctctcctttaggctgcgtccggatcgcttgcggatttcatgtgctgccaaaccagagacagtggataaggtatgtgaaatagtaaggaaacaactagccctaccaagtgacaaagcagtcacaggtgaatcaaaatttgctgaacttggagccgattctcttgatacggtcgagattgtgatggggcttgaggaagagtttggaatcactgttggagaggacaatgccca

SEQ ID NO: 224737 - DNA, 364 bp, Gossypium hirsutum
  unsure (1)..(364): unsure at all n locations
cccacgcgtccgagcaagccttgcacaatggccaccatcacctctgccgctgtcgctatcccatctttcaccggccttaaagccggtgcaaccgcagctaaagttagcgccacagccaaggttgcagcctctccagtcccaagggtcagcatcaaggcctccctcaaagacgtcggtgttgctgttgcggcaactgctgcaagcgcaatccttgccaacaatgccatggccattgaagtcttgctcggcagtgacgatggnggtctggctntcattcccaaagaattcagcgtaagcccaagggagaagattgtgttcaagaacaatgccggattcccacacaatgttgtgttcgatgaggacg

SEQ ID NO: 224738 - DNA, 348 bp, Gossypium hirsutum
caggaaacaattcatcattgatgttttgcatcctgggaggcccaatgtttccaaggcggagttgaaggagaagcttgctagaatgtatgaggtgaaggacccaaattcgatctttgtgttcaagttcaggactcattttggaggtggtaaatctactggatttggtttgatatacgattctgtcgagaacgcaaagaagtatgagcccaaatacaggctgatcaggaatggactcgacaccaaggtggagaaatcaaggaagcaaatgaaggaaaggaagaacagggctaagaagatccgtggagtaaagaagaccaaagccagtgaagcagcaaagaagaagtgagc

SEQ ID NO: 224739 - DNA, 416 bp, Gossypium hirsutum
cctaactccgacatcttcaataatttcttgcgttgatctttgttagagattagctttttagtggtgcattatgggaaagatcaagatcggaatcaatggatttggaaggatcgggcgtttggttgcgagagttgctctccaaagcgatgatatttagctcgttgctgctaacgatcctttcatcaccactgaatacatgacctacatgtttaagtacgacagtgttcacggtcaatggaagcatcatgagcttaaggtgaaggactcaaagacccttctctttggtgaaaagcctgtcacagttttcggtatcagaaaccctgaggaaatcccatgggctgaggctggagctgagtatgttgacgagtctactggtgttcttactgacaaggtacaggctgctgctcacttgaagg

SEQ ID NO: 224740 - DNA, 356 bp, Gossypium hirsutum
  unsure (1)..(356): unsure at all n locations
gtcctataccgattgggcttcccgcgttgaagaggactccctacctaagcttttctcctcgactcttaagtctcgcaaaaacgacatccctgttaagacactgttgacggttattgaaggagagcaatctgatggagatgtgctgattttccctgaaatgatcaaatacaagggtttgaccgagggtgatctggatggctttgttgaggatgtgcttgtgaatggcaaaccatgggcttccggagtgcaggaaacgtttactgggtcttatgtctntgtgtgtgctcatggtaatcgtgacaagagatgcggtgtatgtggaccgatcctgattgaaagctgaatgaggagattgc

SEQ ID NO: 224741 - DNA, 350 bp, Gossypium hirsutum
tcgaggacgcgtgggctctctctctctctcactctctctctctcacggattctctttctctcttttgtaccggggctcttttagccggcggtctgtactggttcgtttgcgttttaggccccgcagagcagaagggcaagcgagctgtcgatctctccggcggttccatttccgctgaaaaggttcgagacaactacaagcagtattggtctttcttccgccgcccaaaggagatcgaaaccgccgagaaagtcccggacttcgtcgacactttttacaatctagtcactgatatatacgaatgggggtggggtcaatccttccatttctctcctttcattccggggaaa

SEQ ID NO: 224742 - DNA, 375 bp, Gossypium hirsutum
gaaaaaagtagaccggcggcagtcctcccccctttctgtgttgtagccaacaagaacacccggcacacaaaatgaagttcaacattgcaaacccaaccactggttgccaggagaagctggaaattgacgatgaccagaaactccgagccttttttgacaagaggatctcacaagaagtcagtggtgatgcccttggcgaggagtttaagggctacgtatttaagatcatgggaggctgtgacaagcaaggttttcctatgaaacaaggagttctcacacctggtcgtgttcgtctgttgcttcacagaggtactccttgcttccgtgggtatgggaggagaaatggagagcttagccaaagagagatccaggctg

SEQ ID NO: 224743 - DNA, 323 bp, Gossypium hirsutum
atggggcaccatctaataatagaatgagcattgttgatgagatgtacctagcttctctgattaacgaaggacgggaagtgtatgaaaacggagcaactgatcccacagccttccctgctgaaacacttctcaaaatggtgacaattaatggtgcaaaatcagtactctgggacaatgaaatagggtcgcttgagattggcaaaaaggctgacatgggtgttagtaaccctttctcatggcctatggaggctattcatgaaagcatctccaaccttgtgtattgcgtgcgaactgagaacattgtctctggaacgagcaatggc

SEQ ID NO: 224744 - DNA, 439 bp, Gossypium hirsutum
  unsure (1)..(439): unsure at all n locations
ccggaccggaaggcccggcccaggcgaccgctttaaaagaccgattgaaagagcttggttatgagctttacgatgaacagctgggcaacatattctggcgcttcaaagcagtagctgaacaaaagaagagagtcattgatgctgatctaatagccttggtttcggatgaagtttttcaacctgaagttgtttggaagcttcatgatctgcaggttacttgtggaactcttggtctttctactgccacagttaaactcattggtgctgatggcgaggaacatgttgcatgctcagttggaactgggccagtagattcagcttataaagctattgatctcattacaaaggaaccagttacacttcttgagtactccatgaatgccgntacagaaggcattgatgctatagccaccacccgcgttctaattcgtgctgagaa

SEQ ID NO: 224745 - DNA, 340 bp, Gossypium hirsutum
gacaaatcgggtatgctcttgtacccatgattgctaggggagtcatgttgggtgctgaccagcccgtgatccttcacatgcttgatatcccacctgctgcggaggctttgaatggtgtcaaaatggagttggtggatgctgcatttcctcttctaaagggtgttgttgctacaactgatgctgttgaggcatgcactggagtcaatgttgctgtcatggttggtggtttcccaaggaaggaaggaatggagaggaaagatgttatgtcaaagaatgtgtctatttacaagtctcaggcttctgccttggaacagcatgcagcttctaacttgaaggtttt

SEQ ID NO: 224746 - DNA, 388 bp, Gossypium hirsutum
  unsure (1)..(388): unsure at all n locations
ctctaactcaactccacacaaatggccctctttctttgcgtcttattccttctcctttctgctgcttctgcttgtgatcgctgcctgcaccagtccaaggctgcttatttctccaaagcctctgctctttcagcgggagcttgtggatacggttccttggctttaggtttaagtggtggacaccttgctgctggtgtttcttctctttacaaagatggagccggttgtggggcctgcttccagataaggtgcaagaattcaactctgtgcagcagtgaagggactaggatcacactaactgatctcaatcacaataatgaaacggactntgttcttagcagcagagcattcatggcgatggctaacataggcatgggccgagacattt

SEQ ID NO: 224747 - DNA, 415 bp, Gossypium hirsutum
ccgggaataaccgccgggaccgacgcgtccgccagcagtggttcctctatgattctagacgatcttcattacaccaccaccagcaacaacagcgggaccggatgttatttcatggagagcaacgatggaagctcttctgtcaaggctaagattatggctcatcctcactaccaccgtctcttagctgcctatgttaattgtcaaaaggtaggagcgccacctgaagtggtggctaggttagaggaagcatgcgcatctgccgccactacgggtcctactaggaccggctgcataagcgaggaccctgcactagatcagttcatggaagcttattgcgagatgctgactaaatacgagcaagaactcactaaacccttcaaggaagccatgcttttcctccaaagggtcgagtgtc

SEQ ID NO: 224748 - DNA, 313 bp, Gossypium hirsutum
agccttccgattaaattaaaaggattccttctttctagtggtgttgttctctcgaaatccgatgcctccttagtcattcaaattactgacgatttgtgcatgtatgttctggtatatgttgatgatataataattacaggagattcttcttcagagattgacacgtttgttcatcgtcttcactctgaattttctctcaaagatttggggccacttaattatttttttggtattgaagtgcatcggtcttctgctggggagctccacttgtgccaaaaagaatacattctcaaccttgatcggtgtcgtatga

SEQ ID NO: 224749 - DNA, 368 bp, Gossypium hirsutum
ttggtttaaaatataagaaaaaaaatcatacgcattgagcactgctggtcaggttattcgttgcaaagctgcggtggcatgggaggcggggaagccactatcgatagaagaagtggaagtggcaccaccccaaaagcatgaagtccgtattaagattctcttcactgctttatgtcacactgatgtatactactgggagtgtaagggttacactcctctgtttcctcgtatacttggtcatgaagcctcagggatcgtggagagtgtgggtgagggtgtgaatgatttgaaacctggagatcatgtgctccctatcttcaccggagaatgcaaagaatgtcgccactgtctgtcagaagaaagcaata

SEQ ID NO: 224750 - DNA, 331 bp, Gossypium hirsutum
atggctatgtacaggaagatatacaacggtgagtttcgttgtcctaaatggatgtccagcgatatgaaacggttcatttctcgactcctggatacgaatcccgttacaaggatctcccttgatgagatccttaaggatccatggttcaggaagggttacaaagagcccaagttccacgaggagcaacccaaggatgacgctcaggcctcaagctcgaagctgaatgcattcgatttgatatccttctcctcgggtttgaacttgtcggggttgttggatgagtctcacgattacggtgaacggttcatattgagagagtccccagagaaat

SEQ ID NO: 224751 - DNA, 397 bp, Gossypium hirsutum
gcagcgtaagataagaaagcatggagaaagattttgggaaggagattatggagatgagggagtattataggaagggaaacaccaaacatgtaacatggaggagggctcagctcaaaggcttgctatcttttcttgcggaaaaagaggtggaaattttcacggttttaaacctggatttagggaagaattatgttgaagcatttcgtgatgaggtaggacttttaaagaaatcactgaatcttgcattgaaggatttgagaacatggatggcaagcaaagaggctaaacttccttcaattgcactgctttcatatgctgaattgggtcctgagcctcttggccttatccctggtatctcttcttggaactttcccatgggattgtccttggagccttt

SEQ ID NO: 224752 - DNA, 410 bp, Gossypium hirsutum
  unsure (1)..(410): unsure at all n locations
ggtcgatccggaggacctccaagcatccgtataatatgcattgatgaccctacatcagcttgtggcagaggaggaggacttgaaatagtgnngcanaaactacgcaaacttgctgagtcatgtaaggtaccctttgagttccatgctgctgctatttctggcactgaggttcaacttgaaaaccttggtattcaacctggtgaagccattgctgtaaattttgccatgatgctgcatcacatgccagatgaaagtgtggacactcagaaccatcgggacagactgttgaggttggccaagagtttgtccccaaaggtggtgactctcgttgagcatgaatcatatacatataccgacttcttatttcccgttttctagagacaatgggttattttttgcttatttttgaa

SEQ ID NO: 224753 - DNA, 322 bp, Gossypium hirsutum
cggacgcgtgggctgaaggcatctatagtgcacttgagaagttggggattgactggggcagggtcggttcacagctggaagacgagggagtggagtctttcaagaagagctttgacagccttctcgacacattgcaagagaaggcaaacactcttaaatttgtgatttcttagatttgctgtcactgcaaacacaataaaaacaagcgggtgttggttcctgctgtaaaagaaagttggtgagcgagcgttatgtgagacgttgaatattatgtaatatgaagcagcgagtgtttgtttaatggaacttttgttttgtgctt

SEQ ID NO: 224754 - DNA, 330 bp, Gossypium hirsutum
ttttcttttaagctctccttctctcaattgttatatggcatctcaagccagtctcctcctgcaaaagcagctcaaagatctttgtaagaatccggttgatggtttctcagccggattggttgatgagaacaatatctttgaatggagtgttacgattattggaccacccgatactctttatgaagggggattttttaatgccatcatgagctttccacctaattatccaaacagccctccagcgaaaatttacgtcagagatttggcatcctaatgtttatgctgatgggtgtgtttgcatatcaattcttcatcctcccgggtgatgat

SEQ ID NO: 224755 - DNA, 356 bp, Gossypium hirsutum
ccgcccacgcttccgcccacgcgtccgcccacgcgttcttttaatcgtttagctggtcctataccagagtctttatccattgaagcttataatggtagcttggttggaaacccgggcctttgtagttcaaccaaccgatctttcaagcgatgtcaattgggttccggcatgtcaaaagatgttcatacgattatagtttgtttcgtgatcggcgtgacggtcttgcttgtttcgataggatgcttcttgtatttgaagaggactgaaaaagataaaaatggtgatggtcattcattgaaggaagaatcatgggatgttaagtctttccatgttttaactttcactgaagatgaaat

SEQ ID NO: 224756 - DNA, 400 bp, Gossypium hirsutum
cccacgcgtccggatttttaaaagtaacttttctttcatctgcttcctgaactaagttgaaaaattggtattctagagaggaaaaagaatggaatttgcagagttgagagaagccatagagcaaatagaggtggtggattctcatgctcacaatattgttcctttggattcttcttttcctttcagcaattcacgttctgaagcaactggccacgccttatcctttgctcctcactccctctctttcaagaggagtttaagggatattgcagaactctatggcactgagtcatcattggatgccgtggaatagtatctcgcagatcatctggcttgcaagccattagttcaaagtgctttaaagctgcaggaatctcggctattctcattgatgatggac

SEQ ID NO: 224757 - DNA, 359 bp, Gossypium hirsutum
gaaggttctcttccagtttgaagcaagtgaagatggtgaagttcagttctacccaagtgctgggattgatgttgagaattctccaagtgttgttgccataaatgtcagtcctattgaatatggacacgtgctgttgattcctcgaatccttgaatgcttgccccagaggatcgaccgtgagagcttcttgcttgcactttatatgacagctgaagctgggaatccatatttcagattgggttataacagcttgggtgcatttgctacaatcaaccaccttcacttccaggcttactacttggctgtgccctttcccatagagaaagctccaacgaagaagataaccactttgtatgatg

SEQ ID NO: 224758 - DNA, 332 bp, Gossypium hirsutum
  unsure (1)..(332): unsure at all n locations
aaaaagctcaagcaattataccagaaagcacttgctgtcaagtctgcaataccacatcctaggatcatgggaataattcgtgaatgtggtggcaagatgcatatggctgagcgtcaatgggctgaggcagccacagatttctttgaagctttcaagaactatgatgaagctggaaatcagagacgtatacaatgcctaaaataccttgttctagctaacatgctgatggaatctgaagttaatccttttgatggccaggaggcaaagccgtacaaaaatgaccctgagattttggcgatgacaaacctngtagcagcctatcaacgaaatga

SEQ ID NO: 224759 - DNA, 367 bp, Gossypium hirsutum
cggacgcgtgggtctctcttcctctctctctctgctccgggaactactgaaatccctggcgataatcaatctcttagcaaagggccaagctatagacaatggcagaaggcgaagaggatctgccgagggatgctaagattgtcaagtcactgcttaaatcaatgggcgtggaggactatgaacctcgcgttatccatcaatttctcgagctttggtatcgctatgtcgtggatgtactgacggatgcgcaggtgtactctgaacatgccggcaagcaaaccatcgattgcgatgatgtcaagcttgctattcaatctaaagtcaatttcaactttttcgcaacccccattcaaagaggggccttttg

SEQ ID NO: 224760 - DNA, 433 bp, Gossypium hirsutum
cggccggaatcccgggtcgcccacgccttccttcgccgtttcgcctttcgttattggttcaagatttggttttgatctgatcagatcggatgaaaatatcaaaacatgtttgggagagcaccgaagaaaagcgataataccaaatactatgagattttgggagtatcgaaaaacgcttctcaagatgatctaaagaaagcttatagaaaagccgctattaagaatcatcccgataaaggcggcgatcctgaaaagtttaaagagttggctcaagcttatgaggtgctgagtgacccggagaagcgtgagatttatgatcagtatggtgaggacgcccttaaagaagggatgggcagcggtggcggtggccatgaccctttcgatatcttccagtcattctttggtggcaattctttttggtgctggttgaagc

SEQ ID NO: 224761 - DNA, 393 bp, Gossypium hirsutum
agccttcgcaaccaatccaaaaaaaccaaagttccagtacaaattcttgggcagatcaggcttaaaggtgagtcaactatcgtatggagcatgggttagtttcggtaaccagctcgatgttaaagaagcaaagtcacttctccagtgttgtaaagacaacggagtcaactttttcgacaacgccgaggtttatgccaatggtcgagccgaggagatcatgggtcaggctattagggaacttgggtggaaacgatcggatatcgtggtttctaccaagatcttttggggcggtcctgggccaaatgataagggtttgtctagaaaacatattgttgaaagaaccaaggcgttcctgaagaggcttgatatggattatgttgatttgctctattg

SEQ ID NO: 224762 - DNA, 408 bp, Gossypium hirsutum
tcgcccaagccttccggaaaaaccttccatattggtatctaaggtggatgaaccatcgaaatatggggtggtggtgatggaagaatcaacaggacaagtggacaaattcgtggaaaaacctaaattgttcgttggaaacaaaatcaatgctgggatttatctgctgaacccttctgttcttgatagaatcgaactgagaccaacctcgattgaaaaagaggtcttcccgaagattgcagccgagaagaagctgtatgcaatggtcctaccagggttttggatggacatcggtcaaccaagggactatattaccggactaagactctatctagactcccttcgaaagaaagcttcacctaagttggccactggtccaaacgttgtaagaaacgttttggttcatgagac

SEQ ID NO: 224763 - DNA, 378 bp, Gossypium hirsutum
gtcgattcagccagacaaagccttgtgatttggttaaaaccgctcctacaacagaacgggggaaaggaattggtagatcctgggctaggagacaattatgatccaagtgaaatgaaacgtacaatgataaccgctttcatgtgcattaatcactcggccagtaagcgtccaaccatgataagggttgtggagttgctgaagaacaaaaagagtccggtagagggtgagctgaaatgttgtggtgagagaggaataattgcagacagcttggatttgcaagattatagtcgaaccagctacctaaatgacttaaatcgtcataagcaactggttatggagtgacaggcttatttgttgtctgaaaattttgaacaaaaa

SEQ ID NO: 224764 - DNA, 357 bp, Gossypium hirsutum
cccacagcgtccgggaaaaccagattttccattatctgcaagcctatctaccactttgggggaacctagactattagccaatatactgtccaccatgtcggccaggttgccaagatcagtccaaccgacccgcttgataaagtctgtcccattagctgagggatatgtacaggttttggggccactgtaaatgttgccaaacccaaagagggtcaaactgttgcagtttctggactgggtgccgtcggtcttgccgccggtgaaggtgcaagggtttgtggcgcttctcggatcatcgatgctgatgtgaaccccagaagatttgaagaagctaagacgttagggattacagcattt

SEQ ID NO: 224765 - DNA, 402 bp, Gossypium hirsutum
gtcaatcctgttaacggcggagccggccgttctttgcgtggggcgcgtggacttgaagggtcggtgatcgagactttccccaccatgatttactctgaagttaaggttcataagatcggtaaaggagctctggagtgcgcagtttgtttgaatgaattcgaagacgacgaaacgctgcgtttaataccgaaatgcgatcacgtttttcaccctgaatgtattgatgcttggttggcttctcatacgacctgccccgtttgtagagctaatctcgctcctcaaccaggtgattctggagtgagtcaacccactgagttgaatgagaccgccaccgagacacctcgaggctccgaacgacagcagtgactcggaaatggaaggagaagaaaggagaataaacaa

SEQ ID NO: 224766 - DNA, 291 bp, Gossypium hirsutum
cccacgcgtccgcccacgcgtccgcccacgcgttctgctctctcatcctgcttctggtcggggcaatcttaaaagactccccttttaactcacaactctctcgagttctgtaatgggtaaggagaaggttcacatcaacattgtggtcatcggccatgtcgactctgggaagtctacaaccactggtcatttgatctacaagcttggtggtattgacaagcgtgtgattgagaggtttgagaaggaggcttctgagatgaacaaaaggtcatttaagtatgcatgggtgct

SEQ ID NO: 224767 - DNA, 360 bp, Gossypium hirsutum
ctgctatttggttgcttgtttccactctggctgttgctcgagcgtttctgtatttggctgaggctagagtggataagaggcataggacaatggcgaagtgggtgcttggacaggacatgactgtctcggagtttcttgctgctgatattgacaacaatggttttgtgagcaaatccgagtttgtgatatacaagctcaaggagatggggaaggtatcagaaaaagacattatgcagatcagcgagaagttcgataggctagatgctggcaactgtgggaagataactcttgcagatcttatggagcatcatcattaatctgcaagtaaccttgcttataatcatcgttatgatacgggaa

SEQ ID NO: 224768 - DNA, 398 bp, Gossypium hirsutum
gacagactgcctacttttttagctggctgcttattgtttgcctctagagaaagcccagacgaatggtttttttgttagctggtaaaatatgaaaagcacaagtattgcgaccgccactgtccccgctgccgcaaggcagctttctcctaaggaagccgacatccaaatgatgttggccgccgaagtccatctcggtaccaaaaactgtgacttccaaatggagcgttacgtcttcaagcgtcgcaatgacggaatctacatcatcaaccttggcaagacctgggagaaacttcaacttgctgctcgtgttattgttgccatcgagaaccctcaggacatcattgtccaatctgcaaggccatatggtcagagagctgtactgaagtttgcacaataca

SEQ ID NO: 224769 - DNA, 413 bp, Gossypium hirsutum
agccttccgcccacgcttccggaccttgcagcattagtggtgtgttacttccgccacgaagaacgcctaagggccctggaaacaccttttccatgtaaagactgatcagatgaatcttggagcaatgcacgttatgttcacattgacagattacaatggcgcacacattgaagttaaagcagttgaggattataagtttttgaatccttcttatgtcccagtgttgagacagttagaatccgcatatttgcagaagttttacttcgagaacacgctcgaaaatgccacgaaagatactactaacatgaagtttatgaacccaaagcatctgtcaattgtgaatcacttgacgttttatttaccagagatgtatcccacactgcataggatactgttcttggacgactatattg

SEQ ID NO: 224770 - DNA, 398 bp, Gossypium hirsutum
ttcgccaactgggcccagtgctcatcctggaaatttttcactgtttcacctttcacagccggggaccaagtcttctacttcgaaaataatccatgcgattacttccaaggcggcaaagtaaaagcaatgacactttccctctcggttttagttgccattgaaatgttcaactcccttaatgccctctctgaagatggaagtctcttgacaatgcctccatgggtcaacccttggctcctcctggccatgtctgtgtcattcggcctgcacttcttgatcctctatgtgccattccttgctcaagtattcggtatcgtacctttaagctttaacgaatggctgctggttctggccgtcgcattccctgtgattttgatcgacgaagtgttgaagttcgt

SEQ ID NO: 224771 - DNA, 410 bp, Gossypium hirsutum
cccacgcgtccgcttggttcaagaaatcaatacttaagactattagaaccaaggaggagctggaatttgaagccttcaatggcgagaaatcatccaagcctgagactctgaacgctttccatatcatttccttatccgagggcttcgatttgtcaccgttgtttgaagagaagaagagagaagagaaagaggagctaagattcgctacaacaagtccagcgagcagtgtaatatcgagactggaagaggtggccaagtcgatgaagttcagcgtcaagaagagcgagtcaagtgtaagactgcagggtcaagaatgtggaaggaaagggaaattagccattgctgctgacattttcgcattaacaccgtcgtttctggtggtggaagttaaaaaagaccatggtgatacc

SEQ ID NO: 224772 - DNA, 400 bp, Gossypium hirsutum
aattattgaagctgcactgaaaagggacccctatgaggctgagttcatacaatctgtcgaggaagctgttcatgctttagagagagtgattgcgaaaaatccccattatgtcaacatcatggagcgcttgttagaaccagaacgtatgattatttttcgagttccatgggtggatgatagaggtgaaacacatgtcaatcgaggcttcagggtgcactttaaccaggcattgggtccatgtaggggtggtattcggtttcatccaaaaatgaacttaagtgttgccaaatttctcggttttcagcagacattaaagaatgctttatcaccctacaaactaggaggggcagcaggtggaagtgattttgatcctaagggaaaaagtgataatgagatcatg

SEQ ID NO: 224773 - DNA, 368 bp, Gossypium hirsutum
tttaaagaccctaaccggcaagaccatcacccttgaggtggaaagctccgacaccatcgatggtgtcaaggccaagatccaagataaagaaggaatcccaccagatcaacagaggcttatctttgctggtaagcagctagaggatggtcgtacacttgctgactacaacattcagaaggagtccaccctccacttggtccttcgtttgaggggtggtatgcaaatctttgttaagaccctcaccggcaagactatcaccctcgaggtggaaagctcggacaccattgataatgtcaaggccaagatccaagacaaagaagggatccctccagaccagcagagacttatctttgccggtaagcaactag

SEQ ID NO: 224774 - DNA, 387 bp, Gossypium hirsutum
gacggggaacaaaaacatacaaactatgaccatgggtgctgcaggcgaggccatggaattgaaaatttcagctattcgcataacttggtagactgaagctttattgggtttctctatggcgattttagttctttttggttgagggaggaagtgattcaagcatggtacatggatgatagtgatgaagatcagaggcttccccatcaccgtgaacctaaggaatatgtatccttggataaactttctgagcttggagtactcagctggcgattggatgctgataactatgaaaatgatgaagagttgaagaaaattcgtgaagaacgaggttactcctacatggacttctgtgaggtttgccctgagaagcttccaaattatgaggag

SEQ ID NO: 224775 - DNA, 415 bp, Gossypium hirsutum
agccttcgcttaaatctaaaatctaatctgcaccagccgacttcttggggaggagacctgcaaggtgttatgggcaaatcaagaataagccataccccaaatctcgatactgccgtggtgtcccagatcctaagatcagaatttatgatgttgggatgaagaaaaaaggtgttgatgagtttcctttctgtgtccatcttgtgagttgggagaaggagaacgtctcaagtgaggcattggaagctgcccgtattgcctgcaacaagtacatggccaagtttgcagggaaggatgctttccatttgagagtgcgggttcatcccttccatgttctgcgtatcaacaagatgctttcatgtgccggtgctgataggcttcagaccggaatgaggggtgcttttgggaaacctcaatg

SEQ ID NO: 224776 - DNA, 370 bp, Gossypium hirsutum
ctttcaaacaggctttgaaaacttgcacaaaaaacaatccgcaaacatgggtaaggagaagtctcacatcaacgtcgtggtcatcggccacgtcgactccggcaagtctaccactaccggtcacttgatctacaagtgcggtggtattgacaagcgtaccatcgagaagttcgagaaggaagccgccgaactcggcaagggttccttcaagtacgcatgggtcctcgacaagctgaagtccgagcgtgagcgtggtatcaccatcgatatcgccctctggaagttcgagactcccaagtacaacgtcaccgtcattgacgcccccggtcaccgtgatttcatcaagaacatgaacaactggtccctccca

SEQ ID NO: 224777 - DNA, 413 bp, Gossypium hirsutum
agccttccgccaacgcttccgcccacccgtccggttatcgatttctactacccaagatgagctttggtggggaaagggctcacccaatattgaaatggacgagcataccttcatggtgaacagagaaagagctgttgattacttgaattctctggacaaggttttcgtgaatgatcaattcttgaactgggatccacagaacagaatcaaagttcggattgtgtctgctagagcttatcattcattgttcatgcataacatgtgtatccgacccactcctgaagagctggagaatttcggtactccggacttcactatatacaatgctgggcagttcccgtgtaatcgttatacacactacatgacatcctctactagcatagatcttaatcttgctaggaaggaaatggtca

SEQ ID NO: 224778 - DNA, 373 bp, Gossypium hirsutum
agccttccgccaacgcttccgcccacgcgtccgttaatgtcatcttaataggagtgcacggaatgcctggggttggcaagactacgcttgtgaaagaagttgtcagacaagtcaaagaagataagttattcgactcggtggttatggctgttgtgactcatactcctgacgtccagaaaattcaagatcaaattgcagatatgttgggattgaaatttgaggagcaaagtatgactggtagagcaagtcgtttgtgcgaaaggttgaagaaagagaagaagattcttgttgttttagatgacgtttgggcaaaactggacctgatggaagtggggattcctttgggagaagaggatcagggatgcaccatact

SEQ ID NO: 224779 - DNA, 416 bp, Gossypium hirsutum
agccttccgccaacgcttccgcaagtcttcaaccggatggaatgctactgctggaaattgtatgatcccgggtggggggttttcagcatttctgagggaagaggagggtaagctgatgagaaatggaagcggtaatggggttagctcaaatggtaatttgatggggaagaggaaggttaggcctgaacaagttattgaagctgcaacacttgcttccaatggccaacaattcgaggtcgtttactacccaagggcgagtactcctgagttctgcgtgaaggcctctttagtgaaggctgcattgcagatccggtggtgctcaggaatgaggttcaaaatggcattcgaaacagaggattcttctcggattagttggtttatgggcactatatcttcagttcaagtcgcggatcccc

SEQ ID NO: 224780 - DNA, 338 bp, Gossypium hirsutum
ggaacgtgttggagtgcttaagaacagggagatttttattgtcagctacaggacactacatgtgcgagatgctgacccacacgagtgtgcaactctgctaagcaatagactgacaatcggtaaaagaacaaagccatggatttcgctatccacgggcacgggtatcacgtggtctatcattgatgatgcgctgtagaagctagctgctcaggctgctgcttaaacctatcatatatagagttgttaatgtgcagaacgactctgtggatgaatgctggcttgaccttgcctaactgctagagggtgttacagataaaggttttaataatgcattcata

SEQ ID NO: 224781 - DNA, 289 bp, Gossypium hirsutum
aaaaaggagtccaagctatatggggctcacttttatgaaatagctgctgatgctccaaagggtaaaaaaataacatttgatgactcggatgatgaaaactgacgcacatggcctgcagtaaaatatgtagaattggttaatagaaactggtacacactatttttaattttatgattttccgccatatttatttactttttttaaaccagttttgttaaagcattaattgatctgaatattcatcattctgttgttactataaaacctagatttgattattttcattgat

SEQ ID NO: 224782 - DNA, 391 bp, Gossypium hirsutum
agccttccacccttttttacctgggtttaatttcctctggaactaaaactgttgggccggcaagaaaactgtagaatcatgggagtgccggaaactgatccattggctcaattgagcttgccgccggggtttcggttttatccaactgatgaagagcttttagtgcaatatttatgcaggaaagttgcagggcatcatttttctctgcaaatcattggcgaaatcgatttatacaaatttaatccatgggatttaccgagtaaagctttgtttggtgaaaaagagtggtattttttcagtcctagagacagaaaatatccgaacgggtcacgacctaatagagttgcagggtccgggtactggaaagctaccggaactgataaaattatta

SEQ ID NO: 224783 - DNA, 399 bp, Gossypium hirsutum
  unsure (1)..(399): unsure at all n locations
cccacgcgtccgtagagagttcaaaaacatgtattcacttggtgtcccatttcctaagggcgagccgatgagaatttactctagcttgtggaatgccgatgattgggccacaaggggtggtttggttaagaccgattggacccaagctcctttcactgcttcttacaggaacttcaatgccgatgcttgtgtgtggtccaatggagcttcttcatgcaaatcgaatacttcaccgtcttctgcatcgacaaacagaacatggttctctcaagaaatggattcagctatgcaacaaagattgcagtgggtacaaaagaactacatgatatacaattactgcaatgatgctaagagatttcctcaaggtctacctncaaagtgcaatatgtcttaaaagac

SEQ ID NO: 224784 - DNA, 403 bp, Gossypium hirsutum
cccacgcgtccgttaaaatataagaaaaaaattcatacgcaatgagcactgctggtcaggggattcgttgcaaagctgcggtggcatgggaggcggggaagccactatcgatagaagaagtggaagtggcaccaccccaaaagcatgaagtccgtattaagattctcttcactgctttatgtcacactgatgtatactactgggagtgtaagggttacactcctctgtttcctcgtatacttggtcatgaagcctcagggatcgtggagagtgtgggtgaaggtgtgaatgatttgaaacctggagatcatgtgctccctatcttcaccggagaatgcaaagaatgtcgccactgtctgtcagaagaaagcaataacatgtgcgaactgcttaagatcaactg

SEQ ID NO: 224785 - DNA, 390 bp, Gossypium hirsutum
tcggccaacccttccgccaacccttccgccaacgcgtttttttttggtcttttttcactccaacacggaactttgaacccactgtaaccgacccaccctccaagttgaacatgaatccagtcgattgctcggaaagtgggttcggagttaacttaaaatccgatcccaaaaaccccaccttttacgacgacccggagatgagttactcccttgaaaagccggtgaaagattgggataaaaaacgagcagagtggttgaagcaccatccttctttcgccgccggagcacgtgaaagaatcgttcttgtaactgggtcccaacccaagccatgtaagaatcccattggtgatcatttactcttgcgtttctttaagaacaaggttgattact

SEQ ID NO: 224786 - DNA, 350 bp, Gossypium hirsutum
cttccgttttccttaacttaactctcccaaaaaaaaaaaattcagttttagggtttaagactagaagacgtaaaatctagggtttagggttttcatttttctgtttggtgtaagtgagaagggcaaaaatggtggctgacagaggaaagaaggcgaaactagaagagaagggagtcgaagagaactctgaacaaattgatggcgcactcgtcttttccatcgagaaacttcaagagatccaagacgagcttgagaagatcaatgaggaggctagtgagaaagtgttggaagtggagcagaaatacaatgagttacgcaagccagtctatgataagcggcacgacataatc

SEQ ID NO: 224787 - DNA, 406 bp, Gossypium hirsutum
cggacccgtggggtcagcgaagagttggtatatttggggatgttttccatttcaattggcggtgaattcaattccaacattaacccatttagctccattgagtattttcgctgatattgtggatcttggggcgatgggagcggtgtttgttgaggatgtgtcacttatcatgaagcaaagcaacgagattatcgcttttgggggtctctccgtgttcttctacggtatgggcgttgctgtttatgcgtttgaaggtattggtatggtttttccaattgaatctgagatgaaggaatccaggcactttggcaaaatattggcactgagcatgggattgatttctttaatgtatggagcatttggtgcacttggttactttgcatttggtccagatacaaaagacatc

SEQ ID NO: 224788 - DNA, 413 bp, Gossypium hirsutum
cattgaggaaggcccatttaaggcaatgtacaattatttttcaaccgccaacatacagatcgacggggatttcagtgcaaagctctcaagatatgggtgcgttggtcatatcccagagatggaagagatctccagtaattcagttgctgtggcaaatatatccgtagagactctggagagagggcgcctaactccaaagagcaatgtttggagttttgggatcattctacttgaattactcactggccggaagaaccttgacaaccgttatcccaaggaagagaggaacctagtgaagtggagccggccattcctagccgacgattgtagattgtcactcatcatggatcctcagctcaaaggtcgctttcctatgaaagctgcccgtacggtggctgacattgcacaaaggt

SEQ ID NO: 224789 - DNA, 410 bp, Gossypium hirsutum
ctcctttttccatgttctattgcttgaatcaattaattccgcaaccttactatcattcagggtcgaatttaaaactggtagtctaacatgcgataaacctggaatccagttatcacgactgatcgaaatatttgtgcctgtacccaccagtcagcataatccttcagctaaaacacccttagtagcccaaatactcttccatgtatatgaaacgttgttttcccaaattggaatttaagaaatcaacttttggaaaatacttcgcttttaatacttttcctactaaaggatttggattgttcaagatacgccacccctgtttagctaaaagggaaatgttaaattgagccatatttctgaaacccaatccaccctcgtctttaggacgacataaatacttacattgacac

SEQ ID NO: 224790 - DNA, 399 bp, Gossypium hirsutum
caaaaaaaaagaagaaagaaaattcaaaatcatggtatcaaaatctctttgcaatacctggggtctttcctcaacaacctgctttccgaaacaccgatccagaaaaccgatctccacgacgacgccgaagatattcgcttcgagaagatcggataacgatgacttgagctgcagcggcgttggtggtggaggaagacggcgactcgtcgatgaaaacatgattgttctacggaaaagaatacacgagattaagatgatagagcggaactatgaaccgccggcggattggatggagtgggagaaacggtattacacgagttacgattcgattatatgtgatgttttgggcgttttacaatcgcagttgatgaatactcggccaagcttagctttagggat

SEQ ID NO: 224791 - DNA, 409 bp, Gossypium hirsutum
cttccgcccacccttccgacctaattaattttcctttaataaactgaataatcaaacctctctttgggtgtttctttcattaaactctgtgtctactctcaggattttctgcgtattgttgtttccttgaagaacatcatgccatggcagtcaagcatgaaaatatatatttttctcaatattgtttgaattaagatcattattattaagacatgtcttgcaatgggatggctttttttccggccaatttcatgctccaaactcctcatgaagaagatcatcatcatcaacccccaacttccatcaatcaaatgcttccttcatgcacaccccaagactttcacggtgttgcaccatttctggggaagagatcaatatcatttgctggtatagatcatgtatgtgaaag

SEQ ID NO: 224792 - DNA, 392 bp, Gossypium hirsutum
agccttccgcccacgcgtccgggcgttggctctgccattgcttacaacaagttgacaactgatgcagcccgagatcccgatgggctagtcgccattgctgtttgccatggatttgctctctttgttgcagtggctatcggtgccaacatctcaggtggccatgtcaaccctgcagtcacttttgggttagctcttggtggccaaatcaccatactaactggcatcttttactggattgcccaacttcttggatccattgttgcttgcttcttgctcaaggctgtcactggttgcttgacagttcctatccacggtcttggagctggagttggagctattcaagggagggtgatggagatcatcatcacatttgcattggtttacacagtgta

SEQ ID NO: 224793 - DNA, 385 bp, Gossypium hirsutum
aatttggtgaagatgctcttaaagagggtttgggaggaggcggttcttctcagggggcatttgacatatttgagtcatttttcggtgggggagccttcggaggcggtggtagctcgagaggaagaaggcagaagcgaggtgaagatgtagtgcatgctcttaaagtttctctggaagaattgtacaatgggacgacaaaaaagctctctctttccaggaacgcaatatgcagtaaatgtaaagggaaaggttcaaagagtggagcctcctctagatgctatggttgccagggcacaggaatgaaaattacaacacggcagattggactgggcatgatccaacagatgcagcatgtttgtcctgaatgcagaggcttaagtgagat

SEQ ID NO: 224794 - DNA, 432 bp, Gossypium hirsutum
cgggtcgcccaacccgtccgattttctagagagaaagagagagtttcttcttcgctgctgcggaaggtttattttctttcccagagaataaaagctttttctgcagtagcgttcaagtttttaccaatccaaaatttcaatttaaagaaaaaggagaaaacagaaatggctcgctctttctcaaacgctaagcttttctctactttcgttgtcgatggaatctctaacgttatctccagacgaggatatgcggcggcgtcacaaggaattgtgtcgagtggaataagaggaggagcaggaaggagcgctgctgcggtagtcaagaaaacaggggaagagatgtctggcggagctaaagagaaggtttcatgggttcccgacccggttacccgatgctacagacccgagaactgtgccaacgagatcgacgtg

SEQ ID NO: 224795 - DNA, 327 bp, Gossypium hirsutum
cccacgcgtccgcaagaattcaactctgtgcatttttgaagggactaggatcacactaacggatctcaatcataataatgaaacggaatttgttcttagcagcagagcattcatggcgatggctaacaaaggcatcggccgagacattttgaaacttgggattgtcgacgtggaatataaaacgataccttgtgaatacaaaaaccagaacttagctgttagagttgaagaatcaagccaaaaaccaaattacttggcaattaaattgatgtaccagggtggtcagactgaagtagtagccatggatgtagctcaggttgggtctgc

SEQ ID NO: 224796 - DNA, 340 bp, Gossypium hirsutum
cccacgcgtccgcccacgcgtccggcttcaaccatcaccatgtttttatgggctcttttgtggatcgcattgacggcgtcgtatttgagcttccagagtttcgttgattctggtagccgatatttcagtgcttcatggggtggtatccaatgggaaaaacaagtccgtaactccgctcagatccatcgttccggaggcatgtccgtcctggtgactggagcggctggtttcgtcggtacacacgtttcccttgccctcaaaaaacgcggagatggagtcgttgggcttgacaatttcaacaactattacgacccttcgttgaaaaaagcgaggaaatcgc

SEQ ID NO: 224797 - DNA, 289 bp, Gossypium hirsutum
cccacgcgtccgcaaagcttcaagatgcaaatttttgtcaagaccctcaccggcaagacgaggacccttgaggtggaaagctccgacaccatcgataatgtcaaggccaagatccaagataaagaaggaatcccaccagatcaacagaggcttatctttgctggtaagcacctagaggatggtcgtacacttgctgactacaacattcagaaggagtccaccctccacttggttcttcgtttgaggggtggtatgcaaatctttgttaagaccctcaccggcaagacta

SEQ ID NO: 224798 - DNA, 421 bp, Gossypium hirsutum
caacttgctccatttcacgctctctttagttgtttttgccgtcaatggccacaatatggcggccattctcgaaggttttccagattactctgtttacaatagtttcctcacccaaacaaagctggccgatgagattaacacccgagagaccatcacttgccttgtcctcaacaatggggctatgtctgccctcacatccaaacaccccctttccgtcgtcaaaaacatcctcagccttcacgttcttctggactactattaacccccaaaaagctccacaaaatctttgatggcactacccttaccaccacgctttaccaaactactggtaatgccccctgaaacccttggtttcgtcaacatcacccaccttcaaggtggcaaagtccgcttcggctccccaatttctggcttcaaactt

SEQ ID NO: 224799 - DNA, 391 bp, Gossypium hirsutum
  unsure (1)..(391): unsure at all n locations
gaagtttcctttctcgattttctatttagccaaacaagatgcagatcttcgttaagactctgaccggcaagacgatcactctcgaggtcgagagctccgatacgatcgacaacgtgaaggccaaaatccaagataaggaaggcatccctccagaccagcagcgtctgatcttcgccggaaaacagctcgaagacggccggaccttggccgattacaacatccaaaaggagtcaactctccacctcgtcctccgtctgcgcggtgggatgcaaatcttcgtgaaaaccttgactggcaagacaatcactctcgaggtcgagagctccgacacgatcgacaacgttaaagcgaagatccaagacanggaagggcatcccccagaccagcaacg

SEQ ID NO: 224800 - DNA, 395 bp, Gossypium hirsutum
  unsure (1)..(395): unsure at all n locations
gttccgcttctctagaggtctggtctacttaacactctctcctccctcttagcaaccggagactcagatccgctcggatttctttgtcccagaactagaatggagacctttctattcacatcagagtccgtaaacgagggacaccctgacaagctttgcgaccaggtctctgatgctgttctcgatgcctgccttgcccaggaccctgacagcaaggttgcctgtgaaacatgcacgaagactaacatggtcatggtctttggagagattaccaccaaagccaacgtagactatgagaagattgttcgtgatacatgccgctccattggatttgtttctgatgatgttggtcttgatgctgacaattgcaaggtctngggtaacattgagcagca

SEQ ID NO: 224801 - DNA, 284 bp, Gossypium hirsutum
attttgtctgcttccatttatgagcctttttgatttgggactactggtggtaagcgtggggaaatgattgaagtcgcggcttttcttgctcatgtcggcgccaagacatcttgtggagatggtgtcatagacggaggaccgttggcttggggtctttgcttcaagagagaaatgagtcctagccaggattactgtgatgattactacaaatacatgtatccatgtgcccctggagctcaatactactgccgtggtgctttgccaatttactggaactacaacta

SEQ ID NO: 224802 - DNA, 398 bp, Gossypium hirsutum
gaaacgctctccttcctccttaaatttcccccgtttttaactttcttctgcaacacccgatggtgagtaacagcgtctagattcatacattcggaattcagcaacaatgtgcgggatcttcgcttatctgaactacaacgtcaagcgtgacagacgttttattctggagatcctctttaacggcttgaggaggttagagtacagaggctatgattctgccgggatttccattgattcttcttcttcttcggatccaaatggacagctttccttttctcctctcgtcttccgccaagaaggcaacatcgattcactcgttaaatccgtctacaaagatgtcgcatcgattaaagtgaatttggagagcttttctgtgtcatgctggaatagcacatacc

SEQ ID NO: 224803 - DNA, 409 bp, Gossypium hirsutum
cccacgcgtccgctttctctgcgaacaaactaagtctctagccatgggaaacaccgagggggtcctgaaccagatcatggaactcaaattcacgtccaaatccctgcagcgccaggccaggaagtgcgagaaggacgagaaatctgagaaattgaaggtcaagaaggccatcgagaaaggtaacatggacggagctcgtatctacgccgagaacgctattcggaagcgcactgagcagatgaactacctccgcctcgcgtcacgcctcgatgctgtggttgccaggctcgatacccaggctaagatgaccaccattaataaatccatggctaatatcgtcaagtctctcgaatcttccttgaacacaggcaatttgcagaagatgtcagagacaatggatcaatttgag

SEQ ID NO: 224804 - DNA, 429 bp, Gossypium hirsutum
cggtcgaccacgcgtccgcaagtactcgctatcttcttccttgccacaccatttgttaatccactggttctcaatcatcgactgatgtgtcatcgttttgttattgactggtttcctggccaccattcttatgcgagtcctgaagaatgatttcatcaagtatgcacatgatgaggaatcggcagatgaccaggaggagtctgggtggaagtatattcatggtgatgtgttcagataccccaagcacaagtccttgtttgccgccgcccttggttctggcacccaactcttcactcttacaagtttcatttttatccttgctctagttggggtcttttatccatataaccgaggagctcttttcactgctctggtcgtcatttatgcccttacatctggcattgctgggtacactgcagcttctttcta

SEQ ID NO: 224805 - DNA, 426 bp, Gossypium hirsutum
  unsure (1)..(426): unsure at all n locations
cgttgatttntgatccagacgggtaatcatgcccgatcatgaatctatagccgttggcccggccctgaagaagcggnctcatccagatgctcttaaagcagctttagctgagttcatatcaacgttaatcttcgtttttgctggatctggttcaggcatggcttttaataagctgaccgacggcggtgcaacaactccggctggtctcgttgccgcctctctagctcacggatttgcgcttttcgtcgctgtctcagtcggtgctaacatctccggtggccatgtgaatcccgccgttacattcggtgctttcgttggcgggaacattactctnttacgtggtatcctttattggattgctcaactncttggctcaaccgtcgcttgcctgttacttaagttcgccactagtggcctgtgagtacc

SEQ ID NO: 224806 - DNA, 419 bp, Gossypium hirsutum
aaacatcaccaccaccaccatagtccaacatttttataacaatggctgccatcacaaacgccgctgctacatcctccttcatggggacactcttccccgacgtctacacaagttcagggagattcgtcgccaggtttggctttggcggcaaaaaagcagctcccaagaaagtctcgaaacgaaccccagaccgccctctatggtacccaggagcagtggcgcctgattggctcgatggaagtttggtgggtgattacgggttcgacccgttcgggttagggaaaccggcggagtacttgcaatatgatttggattctttggaccagaacctggctaagaattcggctggtgagataattggaactaggaccgaggttgccgacgtgaaggcgacgccgtttcagccttacagcgaggta

SEQ ID NO: 224807 - DNA, 416 bp, Gossypium hirsutum
ggaaaacaagggaaaaagaaaaccctagctttacctttttgttctttgtgaaacatcagagggcagagatggatctttcatagatttcacctcagatctctttctctttgtaaaagaaaattgggtttacttatttatttgggtcggattgggttggtttggttttagaaaagaaggaaggcgatgtcaaccccagcaaggaagaggctgatgagagacttcaagaggttacagcaggatccacctgctggtattagtggggctcctcaagataataatatcatgctttggaacgctgttatttgtgggcctgacgatactccttgggatggaggcacgttcaagttgactttgcagtttacagaggattatccaaataagctctcaactgcccgtttctctcacgaatgtttatt

SEQ ID NO: 224808 - DNA, 402 bp, Gossypium hirsutum
cccacgcgtccgaaaaaaaaataagtgatctgtttatattgaagactttatttctgtggcatgcattatgagtactgctggtcaagtcatccgttgcaaagctgcggtagcatgggagtcggggaagccactgtcaatagaggaagtggaagtggcaccaccgcagaaggatgaagtccgtattaagatactcttcacttctttatgtcacaccgatgtctacttctgggatgctaagggacaaaaccctctgtttcctcgcatactaggtcatgaagctggagggattgtggagagtgtaggtgagggggtgactgatctaaagccaggtgatcatgttctccccatcttcacggtggaatgcaaggagtgtccccattgtttgttagaagaaagttacat

SEQ ID NO: 224809 - DNA, 224 bp, Gossypium hirsutum
cccacgcgtccgtgctgatgggaaaaccttttttttcatcaacggcaagcctatcgaccgctttgtttgaaccttgacttttagccaatatactgacgtccatgttggccaggttgccaagatcagtccaaccgtcccgctttgataaagtctgtcccattagctgtgggatatgtacaggtaatggggccacttgtaatgtttctaaactctaaaagggttaa

SEQ ID NO: 224810 - DNA, 424 bp, Gossypium hirsutum
  unsure (1)..(424): unsure at all n locations
cccacgcgtccgcccacgcgtccgccaattcaaggaagttgagggctcagaggaaataatcgaggctgaccttgtcctgctagccatggggttccttggccctgagtcgacactggcggaaaaattaggtgtggagcaagacaatcgatcaaacttaaaggcagagtatggccgcttcacgaccaatgtggatggagtctttgcagctggagattgtcgacgcggtcagtcgttagtcgtgtgggcaatctcagaaggaaggcaagctgctgcacaagtcgacaaatacctgactaaggaagataaggacacaagtgtagagggtgagaaccaagattccgtcaagcggcaccaagaccttccccaaaagcagcanactgtcatgaaatagatgatccatcagattgttattgtttgcgacatt

SEQ ID NO: 224811 - DNA, 427 bp, Gossypium hirsutum
  unsure (1)..(427): unsure at all n locations
gggcggccgacgcgtccgcccttttcttcctatctatagttngtggtttaatatgtaagctgcaacattatatgaatgttgatcttttaatttataatatctatatccaggtaaaccatacaaaactagaacttcacaatgtctttatcaaaaagctttacatagagaatctgtttgaagaaatgttacaggaacctgatgagattgcttctaagagaaaacgtactcgagaaacactccgagttctccaacatgcattcatgacattggactagttgccattggaagctgaaacagtatataggggatacagtttgtgatcggatccaacatgcttgccaaatatccactgactgccaacatcatcaatatactctactggtggttcagactatgcctattcatcttctcctaaaaacccaaaatc

SEQ ID NO: 224812 - DNA, 433 bp, Gossypium hirsutum
  unsure (1)..(433): unsure at all n locations
cgagaagtgangaaactatttgtaaacctcttcatattatttctgagcttttttctcttttttgttggcctgataattttgatctgagccaagnngttgataatcgagtttttatannagcggttgatcctggcattccaaaatttgaattgtgtggctgaatgatctatggagactaagggagggaaaaagaagtctagtagtagtaagtcattattctacgaagctcctctcggttacagcattgaagacgttcgaccaaacggtggaatcaagaagttcagatctgctgcttactccaactgcgctcgcaaaccatcctgatattcgtaacgcaagtgcccccttctgaccactgttaaagtggtcaatttatttttatttgctttattacttagtattaatatctatcttcggccggctttcttcccct

SEQ ID NO: 224813 - DNA, 418 bp, Gossypium hirsutum
gtggctttgggttgtggccatgataatgaaggcttgtttgttggagcggcggggttgcttggacgtgcgggggtggacccttgtctttaacatcccagattaaagcgacatcgttctcttactgcttagtggatcgtgattcgaccggctcgtcgactttggacttcaactcgggtttaccggccgactcggtgatcgctccattaatgaagagccggaaggtgaatacgttttattacatcggtctcaccgggttcagcgtaggtgggcaagcggtaaacatttccccggggctttttgaaatcaacgagtcaggagagggaggagtgatcatagactgcgggactgccatcactcggctgcaaactcaggcatataacgcgctgcgagacgcgtttgtgaaacagacacaagggtt

SEQ ID NO: 224814 - DNA, 288 bp, Gossypium hirsutum
gacggattgcctaggtttcgagctggttgcgtgttgattgcggttagagaaggtggggaagagaagggagttttgggtgatgggaggctatggagattccaggactgtctcgggagtttttccagtggacgagtattataaggatgctttggtgatggaattgaagggaaatggtggtgggaaatggagggaacttggggatatgtggggggcatgggagactcctaggtttggtaaaatcgttattgcggaggatgaagatgggtgttgtccttctgttattttcat

SEQ ID NO: 224815 - DNA, 403 bp, Gossypium hirsutum
gaagaaaaaaaaatatggagaaatgctagctatttaaagacataagatctgggaacttagggggagcgagtctaatgcctgacaagcaaaccaaagaacttgtcaacatgaagactatcgaccgtgatcataatatacactagaatgtggcaagagagattataaatcatagatcgcttcatcatacaaatataattcgggtcaaagagagtgcattgactactacacatatagcaattgtgatacgagtatactgctaatggcgagctcttttagcgaattagcaacgctggaatgcataatgaagattaggccagatatcttttccagcagctgaactcaagagctagctactgtcattgcatacaaatatgccatcgaaatttgtaattagagaatactt

SEQ ID NO: 224816 - DNA, 409 bp, Gossypium hirsutum
aggatactgatgtcaactgtgtcttatgcccttttaatccagatgatggtgtaagttgggtgcaggaattacaaatatctacaatgttcactcatcaccagaagattgttgtagtggatgctgcaatgcctaatggagatccagagaaaaggagaattgtgagctttgttggaggtattgatctttgtgatgggagatatgacacacctttccattccctgttcaggaccttggacaccgctcaccatgatgatttccatcagccaaacttcactgatgcttcaatcaccaaaggtggaccaagggaaccttggcacgatatccactcccgacttgaaaggccaattgcctgggatgtcttgttcaattttgagcaaagatggagaagacaaggcggtaaagatgtgct

SEQ ID NO: 224817 - DNA, 346 bp, Gossypium hirsutum
cccacgcgtccgccaaaacctgttcatcattaggttcagtggtgccatctggtcccaaggcggctactcaagaaaagagagattcaaacaaggtagtggagctgaaaagggttttcgccacctttgacaagaacggtgatgggttcataacgaagcaagaattgagggaatcactcaagaacatcagggtgttgatgacggagaaagaggttgaagatatggtagtgaaagtggatgctaatggagatgggctgatcgatttcgatgagttttgcatcttatgtcagaccatagatggtggtactgatgcaagtggtaccacattaaaagaagatgatgggatgaa

SEQ ID NO: 224818 - DNA, 284 bp, Gossypium hirsutum
tccacttcataataatgtggctgattctgttgcacaagagggtcaacaaccggagaaacaaactgcagaaaatgttgattaagcagtgatggaacttccggacgccaacatgaatccagaagatttatggatgagtcattccaaggtggttcaccctaaaccttacagaaaggatagttcttcttggaaagctattcaaaaggtacttgatagttggagaaaagataggtctaaaacattttatgccctaaaaaccattgtgatcaggggacactggcattttt

SEQ ID NO: 224819 - DNA, 450 bp, Gossypium hirsutum
  unsure (1)..(450): unsure at all n locations
gtccgcccacgcgtctcttttttgttcactcccctctttcttttttcctttgttttgagcagcttaaaaggatgggctagtgtaggaacgggaatggatttgttncctaaacgccaaatcggtgtcgtctaccgcagccaccacgacaaggtatctnggtnncgcggatgaagaccgaagaatctcgtcacttcaagaaaccgaaatggatcctctcaaggccgctcgatgnngaccgtcgagttcgtgcctggatctcaaaccattatccgtctaaaaagctcttacaacaggtatcttactgcttccaaccagccctttttacttgggatgacgggtcgaaaagtgattcagacactgcctaggaggctcgactcgtcagtcgagtgggaacccattagagaagggtgtgaagtcaagctcaagactcggtacgggaactttttgaga

SEQ ID NO: 224820 - DNA, 417 bp, Gossypium hirsutum
  unsure (1)..(417): unsure at all n locations
cggaagaagtccatgtntgctccaaggaaggactcattatttgagcttggactgctttagaagataaagtacttacatcatatattcatgttcatggtgaaggcaaatggagaaacctccccaagagagctggtttgaagagatgtggcaaaagttgcagacttagatggctgaattatcttagaccagatattaaaagaggcaacatctctcatgatgaagaagaactcattataagactccataatcttcttggcaacagatggtcttttaatagctggaaggctacccgggcgaacagacaatgaaatcaagaactactggaacactactttaggtaagagagctaaagctcaagcatccattgaagctaaaacaataccaaccgagtctagactcaatgaaccctcgaaaagt

SEQ ID NO: 224821 - DNA, 418 bp, Gossypium hirsutum
gatacattcagcaagccttgcacaatggccaccatcacctctgccgctgtcgctatcccatgtttgaccggccttaaagccggtgcaaccgcagctaaagttagcgccacagccaaggttgcagcctctccagtccccaagggtcagcatcaaggcctccctcaaagacgtcggtgttgctgttgcggcaactgctgcaagcgcaatccttgccaacaatgccatggccattgaagtcttgctcggcagtgacgatgggggtctggctttcattcccaaagaattcagcgtaagcccaggggagaagattgtgttcaagaacaatgccggattcccacacaatgttgtgttcgatgaggacgaaatcccaagcggcgtcgacgtatccaaaatctccatgcctgaagaagagctactc

SEQ ID NO: 224822 - DNA, 392 bp, Gossypium hirsutum
gatcttccaatctcccaccatccagaataaaagtgtatggggctttcttttgctaagttggtcagtcgcctgttttccaagaaggaaatgcgtattctgatggtgggtcttgatgctgctggtaagactaccatattatacaagttgaagctcggagagattgtcaccacgattcccactattgggtttaatgtggaaactgtggaatataagaacattagcttcaccgtttgggatgttggaggtcaggacaagattcgacctttgtggaggcactacttccaaaatactcaagggctaatctttgttgtggatagcaatgatcgtgatcgtgttgttgaggccagggatgagcttcaccgtatgctaaatgaggatgagctgagggatgc

SEQ ID NO: 224823 - DNA, 416 bp, Gossypium hirsutum
cccacgcgtccgccgtgaaacacatatggttcactgagtccaacagccggagaaagacccggggtagtgccccgatgttaaccaaacatgacggtaaggcaaaagaatttgaagccgaggtccggacattgagctcaataagacatgtcaatgtggttaagctttattgcagcattactagtgaagactcaagcttgttggtgtatgaatacttgccaaacggcagcttatgggatcggttacatacgagtaagaaaatggagcttgattgggatacaaggtacgagattgcaatcggagctgctaaaggactcgaataccttcatcatggatgcaaaaagccggtgcttcaccgagatgtaaaatcaagtaacatattgttagatgaatatttgaagccaaagatttcggatttc

SEQ ID NO: 224824 - DNA, 445 bp, Gossypium hirsutum
gggccgaccgacgcgtccgaattccacgattttctttagagttttaaatttgttcttttcttccaaaatcaaatccaaagggagagaaaatcccaccaaaaaaatggcgatttctaatgacaacaacaacgacgagcaccatgaatcgagtcctcttttgagcaaacaagtggcagaccaagatttgaaggagaaaccaagtggtaaaaaggcaaaagaagctgccgccgaggtgccagctcatccggtagttgctaccggagatgggtttgggtggacagctgatgggttgccgttggtccaccggagtgtcgtcggagaacccttgggtcgatctcaatggaactcatctctccttgcttgtcttggccgtaacgatgaattttgcagcagcgacattgaagtttgtctccttggaagcttggtcccttgtgtgctatatgga

SEQ ID NO: 224825 - DNA, 421 bp, Gossypium hirsutum
atccatctcaaagactgcttttaggtttgttgtttaatgtgccgtggttcaaaatctgaacgtgtgccttcaaatttcaccatggaaggtgagctacaagagcataaaattggtgctctatgtaaatgttcacttttgcttgaattggctgcttctaatgatctagtggcctttaaaaatgaagtagaagagaaaggtttggatcttggcgaagcaagtttgtggtatggtagaagaatttggtctagaaagatgggatttgaagaaaggacgcctttgataattgcttccatgttcggtagcgtggatgttttgaaatacattattggaagcggcaagatcgatgtgaatgacgcttgtggtaccgatggagctactgctttgcattgtgctgttgctggaggttcggattctttggttg

SEQ ID NO: 224826 - DNA, 426 bp, Gossypium hirsutum
gtgaatacatgttggaagataggccttgcaacgattgctgccttcatttttgctgcgaggcctgcgccttgtgtcaagaatatcgcgagctcaaaaaccgtggcttcgacatgtcccttggatggcatggaaatatggcgaggcagcaaaatcaaggcctccaaatgccatcggctccggtgatggaaagtgacatgaaaagataatttcatctatattttggatggttctctatgatatttattttattattgttgttattattcatgtgatgccactgtggctccaatgatggagaagtggcatgaaaaagatattcgcacctatatttaggacggttttcgattaaagtctttcatttgatgtgagtgtggttgagtgtcgtcattatatattaaagtcttgtacatttgatatattacatta

SEQ ID NO: 224827 - DNA, 414 bp, Gossypium hirsutum
ctgcactgctggtatctctggaggacacatcaactcatcagtgacctttgggcttttcttggctgggaaggtgtccttagttcgagccatattttatatggctgctcaatgtttgggagccatatgtggatgtgggctagtgaaggcattccaaaagtcatattacaacaagtatggaggaggagccaacagcctcgctgatggatacagcactggaactggttttgcagctgaaatcattggtacctttgttcttgtctacactgttttctctgcaactgatcccaagaggaatgcaagagattctcatatccctgtcttggcaccacttcctattggatttgctgtgttcatggttcacttggcaactattccaatcaccggcaccggtatcaaccctgctcgtagttttgg

SEQ ID NO: 224828 - DNA, 411 bp, Gossypium hirsutum
aaatacacaagaaaaaaaaacaagtgatctgatatattttagactttatttctgttaacatgggtgatgagtactgctggtcaagtcatccgttgcaaagctgcggtagcatgggagtcggggaagccactgtcaatagaggaagtggaagtggcaccaccgcagaaggatgaagtccgtattaagatactcttcacttctttatgtcacaccgatgtctacttctgggatgctaagggacaaaaccctctgtttcctcgcatactaggtcatgaagctggagggattgtggagagtgtaggtgagggggtgactgatctaaagccaggtgatcatgttctccccatcttcacgggggaatgcaaggagtgtccccattgcttgtcagaagaaagttacatgtgtgatctt

SEQ ID NO: 224829 - DNA, 403 bp, Gossypium hirsutum
tccaagtcaaagtttcaaagttaactcttgcctttgatgaaaatggattttcttggaattttggtgttgtcttctcttgccatgttgaagacgattcatggacatggaggtgcatggtctaacgctcacgctacattctatgggagcagtgatgcgtctggtacaatgggtggagcatgtggctatggaaatctttacagccaaagctatggcacaagcactgctgcattgagcactgctctattcaacaaagggctcgcttgtggggcatgctttgagatcaagtgtgttaatgacaatagatggtgtctcccaggctccattatagtaacagcaacaaacttctgcccaccaaacaacgctctcccgaataatgcaggcggatggtgtaaccctcctttac

SEQ ID NO: 224830 - DNA, 421 bp, Gossypium hirsutum
ggaagagcatttggccgtcaagcacttcttattttaggggcaacttgagttcaaggctggcgtctttgtccccaagagggctccttttgatctctttgatacaaggaagaagcccaacaacattaagctctatgtgagacgtgtctttatcatggacaactgcgaggagttgattcctgaattcctcagctttgttaagggtattgtcgactcagaggaccttcctttgaacatctcaagagaaatgttgcagcaaaacaagatcttgaaggttatccgcaagaacttggtaaagaagtgcattgagctcttctttgaaatagcagagaacaaggaagattacaacaagttttatgaggcattctcaaagaaccctaaagctttgtatccatgaggactctcagaacaggactaaaattgc

SEQ ID NO: 224831 - DNA, 362 bp, Gossypium hirsutum
  unsure (1)..(362): unsure at all n locations
ctaccatgtagcagcacaaggntggccatcggcgtgcggtgtgcggctggtgggtcttagagtttcagatcctcagaaaatgcaaagttgaatgatccaaagcatacgggagatcacacggaagcaacacagcgatgaagaaatctttgcagtcctgcaggagtgctttatggatcctaatgaaactgcccaaaagcttctttatctggatatatctcatgaggtgaaacgaaaacgcgacaagaaaaaggagacagctggggtacaaggacgaggaggtcgaggcagtcgagcgaactattacacatcatctagtaaagatgctggagttgcaaggaatacatctgctcgaagggataact

SEQ ID NO: 224832 - DNA, 412 bp, Gossypium hirsutum
atctttgtacagaacaatgtctgttgtaatttgtaatgacccgtctgggcagaacttgtttgtggtgattgtcaggtttcttgagacctttgttggctctatgtctgcaggggttggagttggatttacttctgctctactctttaagtatgctggactagatattgacaatcttcaaaacttggagtgctgtctttttgtcctttttccttacttttcgtacatgcttgcggaaggtcttggtctctctggtattgtctcaatattgttcacaggaattgttatgaagcactacacattctcaaatttatcagaaaattctcagcgttttgtatctgacttttttcacttaatatcatcattggctgagacattcatatttatatacatgggtttcgatattgccatggaa

SEQ ID NO: 224833 - DNA, 410 bp, Gossypium hirsutum
cccacgcgtccggttaaagccactgagccaaacttttttcgaaacgatgcgcgccaaactcagctgaggcaaccgagtcaacccaggcttcaccgttaaagaagaaaacggaggtgttagcttcggttggctgggccgaacactcaccgtcgcatctgcttggcgttaaacttggctttccctcatttctctctctaataataaaattatgatattattattaatggttattatatttctaacgttttccttagaagaaaaagaatatgaaaaagcaagagaaaaaaaatatcccaccaaacccaaataataaaaaggagtgtttggataggaagaaatttctgcgtcttattaatgttttttttttacatttttgtgtgtggaatgaagtgttcgggataatgctgact

SEQ ID NO: 224834 - DNA, 276 bp, Gossypium hirsutum
  unsure (1)..(276): unsure at all n locations
cggacggctctgtataatgacatgtcaaggtatacantgtttgtttgttatatgccatgcagagggancggttgttatagtaaatgtcccccgttccgcctttgcactgaggttttcctctgctttggaaactccttggcttcaacccggtttctgctgcaagatgaattcaacattcaaacaacaaaatgtgacaactgcatcattggtttcatgtttttcctgcaacaagttgcctgcatattttccatatttgcaattattgttgtaatgtta

SEQ ID NO: 224835 - DNA, 423 bp, Gossypium hirsutum
aaacgatgaaggaatgccgatttatcagatgccttttatgagaggtaaactgtacatgtggggtcactgttgacttccctgactcgttgaccccggaccagtgcaaggcactagaggctgtgcttcctcccaaggcatcggttcagctgactgacatggagctggatgagtgcgaggaaacaaccctgcatgatgttaacattgaggaagtgatgcgtaggaaacagactcaagctcaacaagaagcttatgatgaagatgaggacatgcatggtggtgcgcagagagtacaatgcgctcagcaatgataaaaaaaaagcctaatgtccgagacacagacggtggtttttggcgatggaatgtactgtggttaaaaaaaaaaaagaaagaacatttgagagtaagatttctcaaaacaatttt

SEQ ID NO: 224836 - DNA, 412 bp, Gossypium hirsutum
aagaatggcaagttcctccattatttttctttttctttcccttctatgcattgtttgcgaggccagatctccaactgctgcaagatcaggtgcctcaaatttcatcaaggcttcatgtagtgccaccaaatatccatcactttgcatccaatctctcgcagcttttgccccttcaatccagcggagcccacgccaactggctcagactgccctttcggtgagcctagagagggcaaagtccacccaggcattcgtctccaaaatgaagaaattcaggggacttaagaggagggaatatgaagcaatcaaagattgcattgaggagatgagcgagagcgtggacaggctgagcaaatcagtgcaagagctcaagtacatgggttaagccaaaggtcaagatttcttgtggcac

SEQ ID NO: 224837 - DNA, 395 bp, Gossypium hirsutum
cccacgcgtccggaaaaaatgatgaggtttcagtttaagcctgttagaagacaagaagccattggtgggttgtttgtgttgcttttcccagttcttttgccttgtttttttgcttcattcagccatgcttccccttcaacattcttggagtggagtgttccgaaacctcgacatttacggttactcgcgagtgccttacaacgtgaaagttctgatggagaaccgactgatctttgggctcctttggctgaccaagggtggagaccatgtcttggtggatccgtaaacgccccaccgttgccccagaaatctgaaggatatcttcaggtctttcttgatggagggcttaaccagcaaagaatggggatatgtgatgcggttgccgttgttaaaat

SEQ ID NO: 224838 - DNA, 435 bp, Gossypium hirsutum
  unsure (1)..(435): unsure at all n locations
cgttttattctctcttcttagnnaacaaaaagcatcgttatttttttcagttttacctgaaatttcnagcggacggagactttttacctgaaaatgttgaactttttagcatcggaaaagcntttcaannttttcgttatggaaatgtactccaagtaccgattgattnccgatttaantgatgctggacttcaattcggagaccacttactcggcgaatcatccgacttgcggttcacttcttcaaatgactgtaccaacgtgggcgcggctccccctatgttttgcaggagctccagctttagccgcttgtacccttgtttgactgacacctggggtgacctcccactcaaagagaacgattctgaagacatgctagttttcgggtaccttagagatgctttaaccgtcggttgggcccccttcgatcactct

SEQ ID NO: 224839 - DNA, 417 bp, Gossypium hirsutum
cccacgcgtccgagcttaaaccaggtttgagctactattcaaaagatccacaggctgctgcgaattgattaacttctcttcttgacaaggcataaagtgttgttctgctagatttacgatcaaagactgctgtgagagttggggcaactgctggtctgagggcattaggaggcgaggcatttgataaaatttgcaatcggttagggaacttttgaaaagtagaagcacccttaaatccgaggcaaatggggtcaaaattctggacggctctcaagaaggttcttatgagtgggtgacaataaattacctactagggaatttgggaaggacatattaagacacagttggcatagttgatcttggtggtggatcttgtcaaatggcgtatgacatcttcaagaatgctgctttaagagc

SEQ ID NO: 224840 - DNA, 275 bp, Gossypium hirsutum
  unsure (1)..(275): unsure at all n locations
ggttggggtgtttgtgtgctggtgggtgtgtcatataaagacgatgcattcaaaactcgtcgaattaatctactaagtgagaggacccttaaagntnctttttattgcaactataaaccacccacttatattcccatggttgtctacaaatatttgaacaaagagcttgtgctttatattgacaatgtcatcacacactctttgccttttgcctatattaacaatgcattctactacattcttcatggtatacgtcttaaattcattattcattt

SEQ ID NO: 224841 - DNA, 392 bp, Gossypium hirsutum
  unsure (1)..(392): unsure at all n locations
ccgggccgacccacgcgnccgcccacgcgtccgcaataattctctttctgaaatacntgttcaaacatgggtatgggtctgacgtatttatttcttttgatgccacccccccctcttacactttccctctcatttttggggctacctgccactttccttgaagattttagaatcactttttctgattctcatattatgcaaatctatggagtgagagccatccaacttgttctctaccaaaattcaagctttggatttgcttctaaaatgccacatttgttttgtcgtttcaacatgaatatcatactcatacctcacgactccgtcggagcagtcacctccttttatattaattttttttacataatcttattctatatttatctatactt

SEQ ID NO: 224842 - DNA, 420 bp, Gossypium hirsutum
gcaaaaacaaacttctttcttataataaaattaaaaactatggtgaaggaggaactgtacatggaccgtacccagcgttttccggtgtccaatttcacttgacgtgatgaaatctccggttagcctttgtacgggcgttacctacgatcgttccagcatccaaaaatggctcgaatctggtcacgacacctgtccagccaccatgcaggttcttccctccaaggatttcatccctaaccttactctccatcgtctaattaatctctggatccagtcttctactctccggccaggctctaactctccacggcttcttccggcgacgccttcggcgatcttcgaggttcaggctaagctattgatggagaaggttgagagggagggctgcgtcgattctttgtctagggttgccgagttcgt

SEQ ID NO: 224843 - DNA, 269 bp, Gossypium hirsutum
aggaccggcccgaccgacgcgtccggccacgcgttcggctaccttaacacaccttaccttcttaaaaaccccaagttttcactggcagaaaactttccacattcaccatgtctggcacgtgcggcaactgtgactgcgctgaccgcagccaatgcacgaagaagggaaacagcaacaccatgatcgttgagactgagaagagctacatcaacaatgttgagatggatgctccagctgagaacgatggctagtgcaattgcggtactggc

SEQ ID NO: 224844 - DNA, 419 bp, Gossypium hirsutum
cgattccctccagcctagattctcataattgtgtttctcctctgcaaaggctttattctccggtcgcttcgttgaatttctatcttcttttgatctgaacggagtttggtaatccagttttcgtcttctgttgattcaggaaatcttagtttttgaattgcgtgactgaatgatctaatggagtctaaaggtgggaaaaagaagtccagtagtagtaagtctttattctacgaagctcctctcggatacagcattgaagacgttcgaccaaacggtggaatcaagaagttcagatctgctgcttactccaactgcgctcgcaagccatcctgatatactcacaagcgtgccgtctgaccactagtagtggttaataaaactgttatttggcttgttagttagtgttagattatttcccc

SEQ ID NO: 224845 - DNA, 400 bp, Gossypium hirsutum
atcaggttggacttaaaggggaagattcaggtctaccatgtggaagttcatcggaatgggtggcgcggcccgcattgccaaagaatcaacccctaatatggtacaagacaaattttgatgcccctactgggaatgaccctgttgctttagacttcatggggatgggaaagggtgaagcatggatcaatggacagagcattggacgatattggcctgcctatatcgcttcaaacagtggctgtagtgactcttgtgattatagaggaccttatagtgcaaacaaatgccgcaagaattgtgggaagccatctcagcaattgtatcatgtacctcgttcatggttgaaaccaagtggcaacattttttgtattgttcgaggaaaatggttgggatcctacac

SEQ ID NO: 224846 - DNA, 414 bp, Gossypium hirsutum
cccacgcgtccgcaaaaccaagcatcattttagttaaaactatataaaaaaagctccagttggtatcttccagtataaaatccaagaacctcaattcctctctttgaaagtgtacgatttaaacatatacccagattttaattttgttgatttgggtttgatttgaagagagaataaaaatcttttcaatggggagtttaggagctcttgtgaaacacccagatgatttttatccattgttgaagctgaaaatggcttcaaggcatgccgagagacagatcccatcagagcctcactgggctttttgtttctctatgcttcacaaagtatctcgtagttttgctctcgttattcaacagctcgacatcgagcttaaaaacgctgtctgcatattttatttggttcttcgagctc

SEQ ID NO: 224847 - DNA, 406 bp, Gossypium hirsutum
tccaaacacaattcactaaagcaaaaacagtttgtagaagaaggaatggccgcctcgggtaggtacaatttccatttttcccagttccgcaagaaacccatccattttttacattcatattttcgatttgatgatttgtctctttgggttgatcttgtttaatatttctggggttttgtgattgtttcagataaagttcaagaactgcatgtatatgagatgaatgaaagagatcgtggtagtccagcttaccttcgtttaagtcagaaacctgttaactcacttggtgatattgtcccttttagcaacaaagtaagtttttttttttctgaattaatttatcgaattaaccaaatagttattgatatatatgtaattacagatatataggggagatatggagaaa

SEQ ID NO: 224848 - DNA, 386 bp, Gossypium hirsutum
cccacgcctaccaaaaaccctaacaatcctttcttttaagcacagcttaaatgtgaaggagaggatgattcaaatattctcgaaaaccctaaccaccatgaccataactctcgaggtcgccagcagcgacaccatcgataatgtcaaagccaagatccaagacaaagaaggaataccccctgaccaacagcctttaatttatgctggtaaacaacttgcatatggccgtacattcactgattacaacattcaaatagaatcaactctacatcttgtattaaggtttataggtgcaattatagagcctttttttaaggatttcgctcttaactacaaccaatacaaaatgatttgtcctaagtgttattctcgggtgcattccttaa

SEQ ID NO: 224849 - DNA, 336 bp, Gossypium hirsutum
  unsure (1)..(336): unsure at all n locations
gaacaagcanccncaaatgncaaagngatttgttttgaaanacgcacngcaagggccgaacgctatatttaaaaccacgggagctaacctcaatctngattattcagaatggaagcaggagttaaacgagcataagctgaaattccctttgagttacaagacctttgatgaagctattccacctcaatatgcaattcaggttcttgatgaattaactggctggaatgcaattataagtaccggttttggccagcatcaaatgtgcgctgctcaattttacaagtataagaaaccttctcaatggttaacgtctgggtgattgagttctatgggatt

SEQ ID NO: 224850 - DNA, 414 bp, Gossypium hirsutum
  unsure (1)..(414): unsure at all n locations
cgtccggtaagaactgttgctgcattcaattccnagaacttaatttttcgccttttctcctcaaacgggcaggctccattgaaacactgcttttggaaaggacaaattgcaggaagcgggttcggggtagctcaatttgcactatatgcttcttatgcacttggtctttggtatgcttcatggcttgtgaagcatgggatctctgatttttccaaaacaatccgagtctttatggttcttatggtctctgccaatggtgcagccgaaacattgaccctggctccagacttcatcaaaggacgtcgagccatgcaatcagtctttgaacttcttgaccgtaaaactgagattgagcctgatgacccggatgccacacaagttccagaccggcttcgtggagaagttgaactaaag

SEQ ID NO: 224851 - DNA, 414 bp, Gossypium hirsutum
  unsure (1)..(414): unsure at all n locations
gttgcttcatgagaaaatttcagacaaagcttactgttttgacgatgtcataagggttttggctagaagaagcaaggcacagatcaatgcaactctgaatcactacaaaaatgaatatggaaatgacataaacaaggacttgaaggctgatcctaaggatgagttccttgcactactaaggtccacagtgaagtgcttggtctatccggaaaagtattttgagaaggttcttcgcctagcaatcaatagacgaggaacggatgaaggagctcttactagagttgtttgcactagggctgaggttgatctaaagatcatagcanatgagtaccagcgaaggaacagtgtcccactgactcgtgccattgtcaaggacactcatggagactatgaaaaattgctgctggtacttgc

SEQ ID NO: 224852 - DNA, 406 bp, Gossypium hirsutum
cataaatcctctgctctgcaaaaaaaatctaatgtcaaaaatgagttcttcaggtttgaaatgtaccttgcttgttccgcttatggttgcttgtctcatggcatcatcagccagcaatttccacaatgattttgacataacatggggagacggccgtggtaaaatcgtcaacaatggagaggttctcactctctcccttgataaagcttctggttctggtttccaatccaagaacgagtacctattcggcaagattgatatgcagctcaagcttgtccctggaaactccgctggcacagtcactgcttactatctatcttcgaaaggatcaacatgggatgaaattgatttcgagttccttgagaatttaagtggtgacccttacattcttcacacaaatgtgttc

SEQ ID NO: 224853 - DNA, 409 bp, Gossypium hirsutum
ttggtgtgggaattgacgagtggtggaaaaatttacttttttgggttatcggtggtgtggcgccgcatctttttgctgttttccaagggcttctcaaagttcttgctggcattgacactaacttcacggtcacttcaaaagcatcagacgaagatggggattttgctgaactttacatgttcaaatggacaacccttctcatcccaccaaccactctcctcatcataaacttggtgggggttgttgcaggaatatcgtatgccatcaatagtggctaccaatcatggggtcccctctttggtaagctattctttgccttctgggtgatcatccatctctaccccttcttgaaaggtttgatgggacgccaaaaccgtacacctaccattgttgttgtatggtcaattct

SEQ ID NO: 224854 - DNA, 413 bp, Gossypium hirsutum
gtgctgcaacccttccatctaaaatgaatttatttacttaccttgagtacggaaaatgatcggatgttctgaaactacaatcctatgttgttgttccccaacccagggatgatcaagttcttctccaagttgtagctgctgggattaaccccattgatttcaaaagaatgcttggaatgttcaaaaacagtgattcccctttacccatcattccagggtatgatgtagcaggcgtggtggtgaaagtggggagccaagttaagaaattcaaggaaggggatcaggtgtatggagatataaatgaaaaggccatggatcacccaacacaatttggcactatagctcaatacactgttgttgcagagaaactgttggctttaaaacccaaaaatctcagctttgttgaagctgca

SEQ ID NO: 224855 - DNA, 397 bp, Gossypium hirsutum
  unsure (1)..(397): unsure at all n locations
tctttggttaagcactttcnatacanccgatgttttttccttggcttatgataaagcagcgtccgaacttattggtgattttgcgagactcaacttccctaaccttcgtcaccaaggttcccatatcggtggcgagttcggtgaatacaagcctttgcattcctctgttgatgctaagcttcaagctatttgtgaaagtttggaactcaaccaaaagcaagcgaacaacaagaagacgaagaaattatcgaaggagaacaaagtccaattggctgagcctgaggaaaagacagtgaatgtggagaactccccctcatctttatctccggttctgtcggagaatgaggggtcgacagaatcttcacctttgtcggatcttaccttctcggacttcaac

SEQ ID NO: 224856 - DNA, 413 bp, Gossypium hirsutum
cccacgcgtccgcccacgcgtccgctatgattgttctctgttcctcaaggatcaccctgggggcagcgacagtattcttatcaacgccggaaccgactgcaccgaggagttcgacgccattcactccgacaaagccaagaaaatgctagaagattatcgaatcggtgagttgttaacgtcgggatatgtttccgactcggcggggtcctcgcctaatacttccgtgcatggagcgtccaacatgagctttttagctcctattaaagaagttgcgcccacaagacctgtggcgcttattccacgtgagaaaatcccatgcaaactcgtcgaaaaaacatccatctgccatgacgttcgtcggttccgattcgcgttgccgtcggaagatcaagtgctcgggttacctgtaggga

SEQ ID NO: 224857 - DNA, 400 bp, Gossypium hirsutum
cccacgcttacgttttccttaacctatattattttccaaactaaaaccaaacaaccgggtcgaggcttgtaaccatggccttccaccttagcaacaatcttgttggaatcctcaacttcataaccttcctcctctcgatccccatcctcggagccagcatctggcttagtccagaaggcgtgacggaatgcgaacggtttttggacaagcccgttatcgtaatcagagtcttcctaatgcttgtcttacttgcgggactaattggcgcgtgctgtctagtcactcggctactctggctttacctagtcgtcatgttcctcctcatcgtgctcagcatcgtttttaccatctttgcttacgcggtgactaataaaggtgctggagaagctttgtctgggaa

SEQ ID NO: 224858 - DNA, 364 bp, Gossypium hirsutum
  unsure (1)..(364): unsure at all n locations
ggatgaagggaagctaaacaaagtcgaggtcttttcaaaagaattcttggctgcagacgggggaggaaaggttgtctcgtttcaagccttttccaagttcgaaaacacagcaaatgcatttgaagcagtaactaaactacttgaaagcacgcccagcaaaggtttgcgcaagttcttacgtgctcattgacatggtagaaacactaggagtggctgatatcaaaacttggaaatgcaattaatgcaaaactgaaaattgattgtgttcacaataatgctgttatggagctactcanatgggtgcgaactcaattgacacaactcatctctggtctaggagcacaagattagtctcctatgagtc

SEQ ID NO: 224859 - DNA, 415 bp, Gossypium hirsutum
  unsure (1)..(415): unsure at all n locations
cccacgcgtccgcccacgcgtccgcggacgcgtttgtttccgtggtccagggaatgcctctgggagaagcctctgaccaatatttttggtttggccgaccccaattagttcttcatctgattcattttgcattatttcaggttttcattagttctacttcaattgattcttgaatataagtgtagcttccctttaacaataaatgaatatgggattaaaatcctaacttcgattgttcttgtttggatacgtaacttangtgcatgggaacattagtaaagaccatgaaaaaacttcttccttgcttagtttatatatgaggggttctgattttaataaataacaaaaactaacattgaaggtgtgtgatttccttcttggaggtcaacccagctagaaagtcctttggttaatg

SEQ ID NO: 224860 - DNA, 422 bp, Gossypium hirsutum
  unsure (1)..(422): unsure at all n locations
cggaaaaaccgggccgaccgacgcgtacgggagaaacttaacccaaagctatacaaataggttcnaaagatagatcaaagaaaacgcccgccgcatgttgttttgtttcaacgcaanttggtccaaaaatggctaacatgcttggaactgacgatgatttgaacttcaaagagaccgaactgtgtcttggtttgcccggtggaatcactgttgttgctgcatgtaatgaaatggaaagttcttcttccccaaagactaatggcaagagaggcttctctgagactgttgatttgaagcttaatcttcaatccaaagaatctaccatggatctaaacaagaaccttgatgacaatggttctaaagaaaaatcaggttctgccaaaaatcctgcaaaacctccttccaaggcacaagttgtgggt

SEQ ID NO: 224861 - DNA, 420 bp, Gossypium hirsutum
ccacccgtccgggccaagaagggttcaaccaactgatagtcatatttttgctgaaagagttagaacagagaggggcggtgaaaggatcaagtccctacactatctatctcacccttgcaataaggtgactggtaaagcagttatgttagatgaaatcatcaactatgtgcagtcattgcaacgccaggtcgagttcctatctatgaagttggctactgtgaatccaaggatggatgttaacatggaaacacttttatcaaaagatatgttccaatctcgtggattgttcaaatggggtttggacagaatcaagcacaatgctatcaaggttcaatagctccaggccaagtgaaaattgagctatagaaaccaccattaaacaacacctgattcagagatggctttgtaaataggaaggat

SEQ ID NO: 224862 - DNA, 408 bp, Gossypium hirsutum
  unsure (1)..(408): unsure at all n locations
cggacgcgtgggctaatttcccccgctgctactgctagggtttctttctcttctctctcgcgactcaccaggtttctttggagaaaaaaagaaatgtctcgagtttacgtgggtaaccttgacccacgagtttcggagcgagatcttgaagacgagtttcgtgtctttggagttattcgaagtgtgtgggttgctagaaggccaccaggttacgctttcattgactttgatgatcacagagacgccgaggatgcaattcgtgaattagatggcaagaatggctggagagttgagctttctcataattctagaggcagaggaggacgtggaggcggaggccgangttgaggggtcgggaccgtccggtggtctgatttgagtgctacgagtgtggtgaggctggtcatt

SEQ ID NO: 224863 - DNA, 387 bp, Gossypium hirsutum
gcgcgacccgaaatcttacaaaatcaatggccatgcgtgacaataaatctacgaagacaccgagcaaccgggcgggctgaatacccacgctctcggatctgaaccaggcctatggacccgattcccacagcgattcctatgatccccaggagtactacactggaggcgagaaaagtagcatgcttgttcaacatccttcaaagaaacatgatgcttctgaaagcctcaatcaagctaggcaactgggaactccagaaggtcctctcgagcatactcgtacatcaagttcaacaagtcttactggaacccgtagattactctcacgggaaactggtccttctgcacctcaacaagctgattccattattcacaacatagttttctgga

SEQ ID NO: 224864 - DNA, 411 bp, Gossypium hirsutum
cccacgcgtcctcccacgcgtccgctatgattgttcttggttcctcaaggatcaccctgggggcagcgacagtattcttatcaacgccgcaaccgactgcaccgaggagttcgacgccattcactccgacaaagccaagaaaatgctagaagattatcgaatcggtgagttgttaacgtcgggatatgtttccgactcggcggggtcctcgcctaatacttccgtgcatggagcgtccaacatgagctttttagctcctattaaagaagttgcgcccacaagacctgtggcgcttattccacgtgagaaaatcccatgcaaactcgtcgaaaaaacatccatctcccatgacgttcgtcggttccgattcgcgttgccgtcggaagatcaagtgctcgggttacctgtagg

SEQ ID NO: 224865 - DNA, 332 bp, Gossypium hirsutum
cgcgtccgaacaaatacggattttatgcatgaataaggtagtttttttagagaaaaagaaggaattgttgaagggtgctgagcagttcaaagatgttcctggctatggaaggattttcatgatctcaggattgaagggctctggagtagaagatcttactaaatatctcatggaacaggcagttcaaaggccttgggatgaagatcctatcacaatgagtgaagaagtcatgaagaatatttcattggaagttgtccgggaaaggttactagatcatgtgcatcaggaaatcccatatggtattgatcaccgtttggtagactggaaggagt

SEQ ID NO: 224866 - DNA, 420 bp, Gossypium hirsutum
ccgacccacgcgaccggaaatctgacaaaatcgatggcctcgcgtgacatgatttttgcgaagccctcgagcagccgggccgcttgaatacacacgctctccgatctgaaccagccctatggacccaattcctacatccaatcatatttatccccaaggaatcttacattaaagccaaaaaaagtgccatccttgttaacaatctttcaaaaaaaaataatctacatcaaattttcaatcaagctaggcaactggaacctctaaaaggtcctttctagcatccttgtccatcaagttcaacaagttttactggaaccggtagatgactgtcaggggaaactgttccttctgcacctcaacagcctgattccattattcacaacatagttttttggaccaacggtttcaccgtggatgatg

SEQ ID NO: 224867 - DNA, 398 bp, Gossypium hirsutum
ggtgccattgctgccattcttgttgccttttcttttgtagttagcctcccattgtgcgccgcactaattcctgcgttaaggcccgaaaatcacatattcttcatgatcaaggcttttagctgccggtgttatccttgcaacggcgttcgatcacatcctcccggatgcttttaaaagcctaacttcaccatcccttaaataaagtagtccatggggcaaattccctttctctggtttcattgacatgatgtcagcgatagagacattaatgatcgatgcatttactacatggtattataagagacaacatcttaagtaacataaacatgttaatgctgcagatcaataacatgcaaacatgtacatcttcatacacatcccatacacggtcattctca

SEQ ID NO: 224868 - DNA, 411 bp, Gossypium hirsutum
cccacgcgtccgctcgattatcttgttggagctgtggcaaatcccaagaagccattggctggaattgtcggtggttctaaggtatcaaccaagattggagtgattgaatcactcttggccaaggttgatattctcatactgggtggaggaatgatgtttaccttctacaaggcccaaggatatgctgttggatcttcacttgtggaagaagacaaacttgatctagcaacatcactccttgagaaggccaaggcaaaaggagtctctctcttgctccccactgatgtggttgttgctgacaagtttgctgctgatgctaacagcaagttggtgccagcgtcagggatcccagatggttggatgggcttggatattggacctgactccatcaaaacctttaatgagtctttg

SEQ ID NO: 224869 - DNA, 404 bp, Gossypium hirsutum
acaaaatcaactgcttcacaatggcctctacaatcatggctctttcttccccatcatgcgccggtaaggcagtgaagttctccccttccacccctgaaatccagggaactggccgtgtttccatgaggaaaaccaccaagcctgttccttctggtagcccatggtacggtcctgaccgagttttgtacttgggtccactttccggtgagccaccatcttacttgaccggtgagttccctggtgactatggttgggacactgctggactctcagctgatcccgagacctttgctaggaaccgtgagctcgaagtcattcactgcagatgggccatgttgggagctcttgggtgtgttttccctgagctgttggctaggaacggtgtcaagttcggtgaagctgta

SEQ ID NO: 224870 - DNA, 412 bp, Gossypium hirsutum
tgagagtatagtagaaaaaaggaacaaaaatgtttgatgttttggtggaagtaggtccttatgcccgtttgtttatacgcaattttgggtgttggtgcctttgtttttgttgcgagcgagctgtggaagaagatggtgctgcggaagcttaacggggaatattccgggaccagtaatattcctccggggagtctagggttgccgtttatcggggaaactatccagtttatggctgccattaatggtgagaaaggtttttatgacttcgtacgtgtacgaagtgaaagatacgggaattgcttcaaaaccaacatatttggcgagacgcatgtgtttgtaaagagcaccgaatcagccaaaacaatactaaacaatgagctgggtcgattcacaaagacgtacataaagtcaa

SEQ ID NO: 224871 - DNA, 428 bp, Gossypium hirsutum
  unsure (1)..(428): unsure at all n locations
cccggaaggaccgggccgaccgacgcgtccgattccttctcctttcttctgcttctgcttgtgatcgtttcctgcaccagtccaaggctgctgatggctccaaagcctctgctctttcagcggnagcttgtggatacggttccttggctttaggtttaagtggtggacaccttgctgctggtgtttcttctctttacaaagatggagccggttgtggggcctgcttccagataaggtgcaagaattcaactctgtgcagcagtgaagggactagtatcacactaactgatctcaatcacaataatgaaacggactttgttcttagcagcagtgcattcatggcgatggctaacaaaggcatgggccgagacattttgaaactcgagattgtcgacgtggaatataaaaggataccttgtgcatacaaa

SEQ ID NO: 224872 - DNA, 334 bp, Gossypium hirsutum
gcatgaagggaagctaaacaaagataatgacttttcattataatcatcggctgcagattcaggacgaatgttgtctcattgcaagccttttccaagttccaaaacacaacagaagcattgcaagcaccaacgaaactacttgaaagcacgcccagcaaaggttcactcaagttcttacgtgctcattgttatactaaaacactaggagtgaatgattcaaaacttggaaatgcaattaacgaaatactgaacattgactgcgttcacaataatgctgctatcgagctgcttacaggggtgagaactcaatcgacagaactcatatctggtctaa

SEQ ID NO: 224873 - DNA, 395 bp, Gossypium hirsutum
cccacgcgtccgcccacgcgtccggtttcttcttcgctgctgcggaaggtttattgggtttgccaaagaataaaagctttttctgcagtagcgttcaagtttttaccaatccaaaatttcaatttaaagaaaaaggagaaaacagaaatggctcgctctttctcaaacgctaagcttttctctactttcgttgtcgatggaatctctaacgttatctccagacgaggatatgcggcggcgtcacaagtaattgtgtcgagtggaataagaggaggagcaggaaggagcgctgctgcggtagtcaagaaaaccaggggaagagatgtctggcggagctaaagagaaagtttcatgggttccccgacccgttaccggatgctacagacccgagaact

SEQ ID NO: 224874 - DNA, 410 bp, Gossypium hirsutum
cccacgcgtccgcggacgcgtgggacaggcattttcactcttccttgtttttccttggtgttgatagcagcgagtcatgtcgggttattattattacgatggtcaggcggatcagtacgaggcgcactatctcgatgcctgctctctttgtcgcaaatcgcttcgcgattccgatattttcatgtacagagggaatacgccgttttgcagcaaagagtgtagacaagaacagatggagatggatgaagcaagagaaaagaactggaaatcgggtagatctcttagaaaatcagatgcccagaactccactcctaacaaagctgtacggacccggcacggttgctgtggcctaatcccatcatcttgctttttttagcagactgatgtatcaattttgagttagacaaaaa

SEQ ID NO: 224875 - DNA, 402 bp, Gossypium hirsutum
atctgattccatggtgccactagtttatggttgttatgtgagtaattcaagtggtggggcggttttcatggccggaagtttgattccagaaaaagttgccaggaagatagtggtatgtgatcgaggaggtagtgcgagggtccaaaagggtgttgtggtgaaggatgcttgtggcataaggatgattttgacaaacacagatacttttggagaagagttagtcgctgatgcgcatctcttaccttcagcagctgttggacagaagaccggggatgcaatcaagaaatatatatcttctactggtgagccaacagccaaaattggtcctggaaccacaaagttgggcgttcaaccatcaccagtggttgcagcattcagttctagaggtccaaacccagtcac

SEQ ID NO: 224876 - DNA, 411 bp, Gossypium hirsutum
  unsure (1)..(411): unsure at all n locations
cccttttataaacacaaaaacacatggttttagtaaaangaagtctagtccaggcacgtatgcgggggggcttaaaagtttatgatgatgcgctcactcgcacagaacctggacttgttccccctgaggtacaagttcatggcttgaaccagtctcaccccatgaacaattcattgatggtatagccactcgtgatgtcaccatcgataaaaattcaagccttcgggctcgaatttacttgccggaggaggaaaatcccaagtttccgatcatacttcatttccatggcggtggcttttgcatcagccaagctgattggttcatgtactatcagttntacactaggttagccaaatcgattccagctattgtcgtctcggtttacctcaggccagcacccgagaacaagct

SEQ ID NO: 224877 - DNA, 398 bp, Gossypium hirsutum
cccacgcgtccgcccacgcgtccggggaaccctttaagccgtagtcaagaaagatggggagggggtgtgggcactgccccccgaagaccttactgctagggtcaagaagttgatggaaggtttaagatccgagttcggcgggccacagttcgagccccacgtcacggttgttggggccatcagcttaaccgctgatgatgccttggccaagttcaggtcctcttgtgatggccgcaaagcttataatgccaccgtcgatcgtgtggctaccgggactttcttttatcagtgcgtctttttgttgtttcatgccactcctgaggtggtggaaactagtgctcattgtagtagccattttgttacaagaacttaaacaccatacatgccacacttaagcc

SEQ ID NO: 224878 - DNA, 383 bp, Gossypium hirsutum
  unsure (1)..(383): unsure at all n locations
cggacgcctgggtggtgggtgaaccaaagttgtttgttttatagggnggaaaaacccgnctccagacatggtttatttcgtttgattgaatcaatcatttccgatgaacaacaagaagaaacaggcccattttacgtgctggatttgggtgctacgaggtccctagtcgagacatggttccataatcttcccatggttcaacctttctatgcagtcaaatccaaccctaaccccgctttcctcaaagaaatggcagctctcggcaccggctttgactgtgcaagccttcctgagattgaaaccattttatcgcttggggtttcgtctgatcgaatcgatttcacacacacatgctaacacgagtctcacatcaagtatgcaac

SEQ ID NO: 224879 - DNA, 336 bp, Gossypium hirsutum
ggcagctttgacccattgggtcttgctgatgactcagttgcattcgctgagctcaaggtgggagagatcaagaacggtaggttggctatgttctcaatgttcgggttcttcgttcaggccatcgtgaccggaaagggaccattggagaacttggctgaccaccttgctgacccagtcaacaacaatgcttgggcctatgccaccaactttgtccccggaaagtgaacttagagagtgagaagggatttgtcttgtttatgtttttatttgttggtgtgaatttaaatttgttgcacaatcaatgaaagtataatgtgaattttgtgtgctcaaaaa

SEQ ID NO: 224880 - DNA, 409 bp, Gossypium hirsutum
aagttattgttaagaggggcattatggctgaatctcttactgctcttgagaaagaaaacgtgagggtaggtcaagaagaaattaaacggaaacggggtccaaatagagaatatgtctatgaagttagaacagatggaaaggcttgctcttggtacgaatagtattcttaacgaaatgagacagagggttgaggacttgtttcaaaacttccagacagacgcaaccagctgctgaaaacgaacaggagcttactcgtgtgaagcacgatttcgagtcctagaaatcttatctcagtcgtcttattagtgtaagagaaactcttctttcatcggagaagcagattcaaaccatcgagccactctttgaacgactagttgcaaagacaacacaactcgaaggcgagaaaaag

SEQ ID NO: 224881 - DNA, 409 bp, Gossypium hirsutum
caaggttataatgggtctttcaggagtcctgctttataccaaaggcgtgctgcatatggcgggtactccaatgctgctctgcagcatcctgtccgggcttttggagacctgtctatggttccatcaacagcttctgctatttgcgttcaggctcctgctgagaaaggatttagcggctttgctattgatttcctcatgggtggagtttctgctgctgtatcaaaaacagctgctgcaccaattgagcgtgttaagcttttgattcagaaccaagatgaaatgatcaaaagtggaaggctctctgaaccttacaagggtattggtgattgtttcaagcgaacaatcaaggatgaaggatttaggtctttgcggagagggaacactgccaatgttattcgttatttcccta

SEQ ID NO: 224882 - DNA, 413 bp, Gossypium hirsutum
cacccttccgaaaaaggtatacccagaatattttatttttctcaaagaaaagaaagatgagccgtaggttttcggatcaggtgagagtaacctctgaaaacctgctggagggtcctaatgatgatggctacagttggagaaaatacggccaaaaggatatccttgaagccaaatatccaagaagctattacagatgcacctatcgaaacacccaaaactgctgggctacaaagcaagtccagagatcagatgaagatccgaccctctttgaggtcacatacagaggaattcacacatgtgcaaatggcaaccacgcagttccatccccagaaaaacaacataaatcaaacacaaacggccttaataataccaattaccaaccattgcaatcacaagatgtcctctcagagttt

SEQ ID NO: 224883 - DNA, 413 bp, Gossypium hirsutum
cccacgcgtccgcatcggtaaccccttttttattttttgaagtgccgctttcttgggggggagcatttcagtgaactctgttggacttgaatttgagatttgtaaactgtttgagtgtttggaaagacatcaacacgcaccaaagtttctactctttattgtagaaagatgagtctcttccagacagagatcaggactaaaacctcgatttcatacgtcacgatttcatggttctgaggatgcggaagatgatataagtatttttttcctccttttgtgccagtcaatcagatattgatgatgactcattcaatgtatggaacttaaggaaatgcagtgcagcagctcttgatgttctatcaaatgtgttcggggatgaaattcttccaactttgatgcctattatttaggcc

SEQ ID NO: 224884 - DNA, 414 bp, Gossypium hirsutum
  unsure (1)..(414): unsure at all n locations
cccacgcgtccggggttttcgagctttgttcgttaatttttgtgtataagtaacccaatgacgacgattatggatgcagaacatgacaagtatancatgattaatttcgaagagaccgagttccgtttaggattacccacaggcattgaaaatgataatgaaaccgccaaaaataatgggaaaagagggtattcggatatggttgatttgaagcttaacctttcaacaacaaangaagcatcggtggatgaagctgagaagatgaaggagaaaaacactgcaaagccccctgctaaggcacaagtagtaggatggccaccggtcaggtcctttcggaaaaacatcatgaccggtcagaagaacagctccgacaacaagggtgagaaaaccggcagtggcaacaccattaacact

SEQ ID NO: 224885 - DNA, 415 bp, Gossypium hirsutum
tttctttataggtgtcagaaacgatgtggtttattaatctagtcaagctcttatggagaagggggcggtcgaggcttttgaggttgccatggtgaggactcaagctcgaatagttgaaggggatgctggtaaggtaatttgcaaggaagcagagaggttgaagccagcagcagtggttatgggaactcgtggtagaagcttaagtcaaagtgtatttcaaggaagtgtaagcgagtattgcttccacaactgcaaatccgcacctgtcataatcgtacctgggaaagaagctggagatgaatcactgatatagtggcaaaggcaatggttaacttgagaaaccattagtcatggaatcgatttgtttgcttgtagcactgtatgtaaatatagattgcttggttgtttatttgaa

SEQ ID NO: 224886 - DNA, 381 bp, Gossypium hirsutum
cttgtttaaaatataagaaaaaagtcatacgcaatgagcactgccggtcaggttattcgtggcgaaagctgcggtggcatgggaggccgggaagccactatctatagaagaagtggaagtggcaccaccccaaaaacatgaagtccgtattaagattctcttcactgctttatgtcacactgatgtatactactgggagtgtaagggttacactcctctgtttcctcgtatacttggtcatgaagcctcaaggatcgtggagagtgtgggtgagggtgtgaatgatttgaaacctggggatcatgtgcttgctatcttcaccggagaatgcaaagaatgtcgccactgtctgtcagaagaaagcaataacatgtgcgaact

SEQ ID NO: 224887 - DNA, 249 bp, Gossypium hirsutum
  unsure (1)..(249): unsure at all n locations
aaaaaatttaagtcaaaagtcaaaaatgagttcttcatgtttgaaatttacctttcttatggctcgtatggttgcctgtctcatggcancatcagcaagtatcttccacaatgattttgacatcacatggggagatggccgtggtaaaatcgtcaacaatagagaggttctcactctctccctcgataaaccttctggttctggtttccaatccaagattgatttttttttcgccaggattattttcca

SEQ ID NO: 224888 - DNA, 392 bp, Gossypium hirsutum
  unsure (1)..(392): unsure at all n locations
ctttgtggtcgttgcttctatctctctccaaatttattttattttgctttgagatactgncgggcggtaagatgatagtgctcctattgaaagcctcttattttcaatggccctgatgggggtcttgctaatatatgcacttttctgcatttttaaattgtttcctagcagaagttgccaaaaagaaaaagaggaaaattaaaggcaaaaaaaagaaggagcccttgaagcagactgatcctccatctattcccgttgttgagctttttccgtccagggagtttcctgagggtgaaattcaacagtacaaggatgataatttgtggaggactacctctgaggagaagagagacttggagcgatttgaaaagccaaaatataatgcagtgcga

SEQ ID NO: 224889 - DNA, 400 bp, Gossypium hirsutum
cccacgcgtccgcccacgcatacacagactctttttagaaggtttacatccagagctgggcgaggattgaccaatgtcgagtgacacactgtagtgagaatcaagttttttactatggtgaggatcccaaacaaaggaagagtccatctggcaaagccaatcgaccaggattgcacacagctggagtggattttggtgctttttggaagatggaaggtcaccttgatgttaggtatttatattccaataacattcatgcaatgcttaatacttatggagtgcaagctgcaagagaaaccataattagcgagatcagttatgttttcacatcttatgcgatcggtgtcaatattcaccacctaacacttattgctgattttatgacccactctggaaggca

SEQ ID NO: 224890 - DNA, 372 bp, Gossypium hirsutum
gaagaagatgatgttcatttagctccaagcttttttgatgatgcccctagaactacgaatgccgtgttagattctgccactgatatgaactccactccatcacggccatcaggccgtgttgttggtattataaagaggaactggcactcttattgtgggtctttggaaccaatgtctatgcctgctgggactggaagctttacatctgccctatttgtctccaaagatcatagaattcctaagattcggatccaaacccgacagcttgaaaatcttttggataacaggataattgtggcagttgattctggggaccgtcaatctcggtatccttctggtcattatgtacgagtcattggaaaaataagtgat

SEQ ID NO: 224891 - DNA, 409 bp, Gossypium hirsutum
ctcatgcctccacggtaattacttacaaaacaatcctggtccatctcttcagccttggggtgctcagtacttaagctaactgagtggtcctacagtaactgtgaatccctctcgtcaaatgatgattggatggccggaaaaatagtgctttgctttgcttcagactacaatcagagcttgttaaatgatgctatattgtctgtcaaagcggcgggtgggttgggagtgattgtttctaggagttcaagtaattattatccatatgctatgaacttcccatgtcttcaagtaacctatgaaactggaactcagatcctgtattacattcgatctacaagtaatccccaagtaagactgagtccatcaagaacgcatatcggtaagccagtgtcaaccaatgtggcatact

SEQ ID NO: 224892 - DNA, 386 bp, Gossypium hirsutum
  unsure (1)..(386): unsure at all n locations
ccgactccttgatcaaaaacaacattgtttagttttcaagaaaaccactcaacccagctagattttgttaaattaggggttctgaccttcncattcattttaagaatacacgagaaactgactttgcaaatcgaaagctaacattcacgaaagcaaaaaggtactttaaaaatttatttgccaaagcaaactaattcatttcagccccttttgagttgaattcgggctatctgactagcttaaaaactccaattttaatgaacaaggccttcgtcctcacaaataagcaaatttcattctgatttggttaaaaattgccgagagcaatcctaaggtgaaaggcttggatgtaaattcacttattgcatctcacatccaagtaaacc

SEQ ID NO: 224893 - DNA, 416 bp, Gossypium hirsutum
  unsure (1)..(416): unsure at all n locations
gttgacttccctgactcgttgaccccggaccagttcatttcactagaggctgtgcttcctggaaggcatcgtttcagctgactgacatgganctggatgagtgcgaggaaacaaccctgcatgatgttaacattgaggaagtgatgcgtaggaaacagactcaagctcaacaagaagcttatgatgaagatgaggacatgcatggtggtgcgcagagagtacaatgcgctcagcaatgataaaaaaaagccgaatgtccgagacacagacggtggtttttggcgatggaatgtactgtggttaaaaaaaaaaagaaagaacatttgagagtaagattctcaaaacatttgtgtgttttggtagtcctttattttttggttttaatagtgcaagtattttagtaattgaaatggtgt

SEQ ID NO: 224894 - DNA, 411 bp, Gossypium hirsutum
gtagagcttctttctatctatatccttatcagctttcattagatggcaggaatcgcctttgggcgcgttgatgattccttcagtttggggtctgtcaaggcctaccttgctgagtttatctcaactttggtgtttgttttcgccggcgttggctctgccattgcttacaacaagttgacaactgatgcagccctagatcccgatgggctagtcgccattgctgtttgccacggatttgctctctttgttgcagaggctatcggcgccaacatctcatgtggccatgtcaaccctgcattaacttttgggttagctcttggtggccaaatcaccatactcactggcatcttttactggattgcccaacttcttggatccattgttgcttgcttcttgctcaaagctgtcact

SEQ ID NO: 224895 - DNA, 406 bp, Gossypium hirsutum
cttcttgcctcctttcatggatgatatgcctaatcttagagcacttattataataaactacggtacaactgaggcaacgcttctgaatttctctgttttcactaatctgacgaatttacggagcctatggcttgaaaaggtgttggttcctgaattgtccaacaccactgctccattgaggaacttgaggaaactatctacggttctctgtaaggttaataacagcttcaatccatcagttctagacctgcccatcatcttccctcgtctaaccgagctcgtaatcgatcattgtgatgatttagttaagctgcctgtaagcatttgtaaggtgaattcacttcaaagtctcagcataaccaactgccacaggttatctgaattgcctgctggtttcggcttgctg

SEQ ID NO: 224896 - DNA, 374 bp, Gossypium hirsutum
gagaaaattagtaaggattttatgcagcaattgttggagctgcactggcgaggagatgagaaaaactctttatccatcaacgaagtgaaagctttgcttctggatttgatggtcgccggtacggatacagtacccactgctgtagagtgggcaatgaccgaactattacgccatcgagataaaatgacgaaactcgtaaaggaattggatatggtggtcggaaaccagaacactgtggaagactctcatatacctcaacttgtctacttggatgctgtcataaaggagacacttcgtcttcacccggttgctccattgctaattcctcatgtgcccagtgagaccactgttattgggggatttactgtccctaa

SEQ ID NO: 224897 - DNA, 369 bp, Gossypium hirsutum
taaaatctcacctctctttctcatttgcatgcttttcatttcctccgccactcccattcttggttgtggttcatgtggcactggcaaagcaccaccaaagccccctaaaggccccattacaatccctcccattgttaatcccccaatcaacctccctcccattctaaatccccctgtgacagtccctccggtgacggtggttcctcccataattactaagccaccaagtgggaaaccttgcccgtcggccacttgccccattgacacattgaaattgggtgcatgtgtggatctgcttggagggttggttcacattggccttggtgacccacttgtgaatgcatgttgtccagtccttgcaaggcttgt

SEQ ID NO: 224898 - DNA, 379 bp, Gossypium hirsutum
ggggaagtgcttggtttaaaaaaggattgaatgtcgaacagaaaaaattggaaaaggaaaatgagcaagcttctccgaacatgggtccctccgccccttgtgggaatagcaatgacagtgctgagactaaacaagaatcagttcaacttccaagtctaaatgcttttgatctaatctgtggatttgatctgtcaggattgtttgacggagtttctgaaaagagagaaacgaggttttcgtccagacaacctgcctcagtcatcatctctaagctggaagaagctgctagacatttgagacttaaggtgaaaaagaaggatgcaggtgtgctgaaaatggaaaggctaaaggagggtagaaaggggatcctgtcgattga

SEQ ID NO: 224899 - DNA, 374 bp, Gossypium hirsutum
aaaaaaaccaaagatgcagtacaaaaacctgggcagatcaggcttaaaggtgagtcaactatcgtatggagcatgggttagtttcggtaaccagctcgatgttaaagaagcaaagtcacttctccagtgttgtaaagacaacggagtcaactttttcgacaacgccgaggtttatgccaatggtcgagccgaggagatcatgggtcaggctattagggaacttgggtggaaacgatcggatatcgtggtttctaccaagatcttttggggtggtcctgggccaaatgataagggtttgtctagaaaacatattgtggaaggaaccaaggcgtccttgaagaggcttgatatggattatgttgatgtgctctatt

SEQ ID NO: 224900 - DNA, 370 bp, Gossypium hirsutum
gcttcagcagcaaagaaaagactctccaaggtttatctcaagaaactaagaaatctaagcatgcctggaagtagaattccagattggtttacacaagatatggttaccttttcaagccacaaaacccgtgatctcactggggtgataatcgcagttgttgtttccattaaccatcatataccagatgaactgagataccaactgcctgccgtgccggacattcaagcacagatcttcaatggcgagcaggcaataatgaccactgcattgaacttaattggggtacctagaaccaaccaagacaatgttcacttgtgtcgatatcccgcatatcgtcccttggtttccatattgaaggacggttttaaga

SEQ ID NO: 224901 - DNA, 358 bp, Gossypium hirsutum
cccacgcgtccgtttgttttctctccctccaattaagatgcagatcttcgttaagaccctgaccggcaagaccatcaccctcgaagtcgagagttccgacacgatcgacaacgttaaggcgaaaatccaagacaaggaagggatcccaccagaccaacaacgtctcatcttcgccggaaaacagctcgaagatggccggaccttggccgattacaacatccagaaggagtccaccctccatctcgtcctccgtctacgtggtggcatgcagatcttcgtcaaaaccctgaccggcaagaccataactttggaagtcgaaagctctgacaccattgacaacgtcaaggcaaagatccaa

SEQ ID NO: 224902 - DNA, 375 bp, Gossypium hirsutum
cccacgcgtccggaaaaacatagtatattgtcattaggagtcaatggcagggattggtaaaacggctccagatttcgaggacttattgccggcgatggcggagaagctggggggagacgggctgatgagggagttgtgtaatgggttcaagctgttgatggacgaggagaaaggggtgatcactgcggcgagcttgaagaggaacgctgctgtgctggggttgcaagatttgagagacgatgagctggcgagcatggtaagggaaggtgatctcgacggcgatggggctctcagtgaaatggaattttgtgtgttgatgttcagattaagccctggcttgatggaagagtcccgattattgctggaagagatgct

SEQ ID NO: 224903 - DNA, 375 bp, Gossypium hirsutum
ctcagcttaattcagctgaaaatggcaccttcatctctgccacaaacaccgccgtccgccgtggttattgtcctcttcttactcttctccacggcattgctttgtgaatcaaggttaagcttagattactactccaaaacctgtcccagtttcaccaaaatcatgcaagacaccataaccaacaagcaaatcaccagccccacaaccgccgccggtgcactccgtctatttttccacgactgtcttcccaacggttgcgatggttccatcctcatatcttccaccgcattcaacaaagctgaacgtgatgccgacatcaacttatctctccctggagatccatttgacctcattgttcgagctaaaacagccctt

SEQ ID NO: 224904 - DNA, 372 bp, Gossypium hirsutum
caaaaataaagaagatcagctatcgtaaaatgtctacgtcaccgtccgtcaccgaactccaggtggagaactttacgttccctccgacggtgaagcctcctggttccaccaaaaccctgttccttggtggagcaggggagagaggattggaaatccaagggaagttcataaagttcaccgcaattggagtttacctggaagatagcgccgtgaattgcctcggcgttaagtggaagggtaagagcgcggtggagttaacggaatccgttgagtttttcagagacgtggttacaggtgattttgagaagttcatacgggtgacaatgatattgccattaacgggtcaacaatactctgagaaagtatcagaga

SEQ ID NO: 224905 - DNA, 408 bp, Gossypium hirsutum
gtccggaaataccggggcggaccaagccgtccgaataaggaacattctgctgaggtggttaaagaaaagggcaaccaagcatacaaagataagcaatggcagaaggctattgggttttatactgaggctatcaagcttagtggcaataacgcaacatattatagcaacagggccgcagcatatctagaactaggaagtttcctccaagcagaagcagattgttccaaagctattagccttgataaaaagaatgtaaaggcatacttacgaagaggcactgctagagagatgcttggttactataaggaggcaattgaggattttagctatgctctggtgcttgaaccaaccaataagagagcagccctttctgcagataggttaaggaaggtatttcagtaagtgaat

SEQ ID NO: 224906 - DNA, 379 bp, Gossypium hirsutum
  unsure (1)..(379): unsure at all n locations
cggacgcgtgggttgatggacatgatatcaaagtaaaaggaaaaatatccgtcaagagcgcaaaaagattcctgctcaggatttgacaatgaaacggctcagaggttatgaaattaaggccaatcactgggattccttctacaagttctaccggaatactactgataataagtggggcagtccatacctaacaagagatttctttcacgaaatgggatcaaagatgggagatgatgtgttactcgtagttgccgaaaaaagggacgagcttgttgcaggagctctgaatctcattggaggcgatactatatatggacgcttatggngatgtgaccctcaagtctattatccgagcttgcattttgaagcatgttattat

SEQ ID NO: 224907 - DNA, 375 bp, Gossypium hirsutum
ccaacccgtccgaatgatgtcaattaacaaagggaaagaaatagctgaaggttcttcaggaccggctgctgttgctgttggtgctgttgttggtggtgttggtgggggtgaaccagcggaatccaccgccgttgagcaggtacgagtcgcagaagagacgggattggaacacgtttggtcagtacttaaggaaccaaaggccaccggttgcactttctcagtgtaacgctaatcatgtccttgaattccttcgatatctcgatcagttcggtaagactaacgtgcacttacaaggttgcgtgttcttcggacaaccggagccgccgagaccatgtacgtgccctcttagacaagcttggggtagtctcgacgctc

SEQ ID NO: 224908 - DNA, 379 bp, Gossypium hirsutum
cggacgcgtgggtgcagtcaaggaattcttgaaagaggagccgtatactgctcaagaggttgagaaaattactcagaaggatcttccatcaatcttgcgtgataacccaacttctttagatgtgctaaaagcggccaagcatttcaagttgcatcagagagctgctcatgtctactctgaagccaagcgtgtttatgctttcaaggatactgtggcatcaaagttaagcgaggaggaaaagctcaagaaactcggcaatcttatgaatgaaagccaccacagctgtagtgttctttatgaatgcagctgcccggagttggaggaaattgtaaaagtatgccgagacaatggcgctatgggagcaaggcttaccggagct

SEQ ID NO: 224909 - DNA, 378 bp, Gossypium hirsutum
ctcttctcgaaaatcgccaaatgtcgtctcaaggaagacgctgccagggtttacttccagcagctcgtttccgccgtcgatttctgccacagccgcggcgtttaccaccgtgatttgaagccggagaatcttctcttagatgaagaaggcaacttgaaggtcaccgatttcggactcagcgctttcacggaacatttgaaacaagacgggttgttgcacacgacttgcggaacgccggcgtatgtggcgccggaagtcattggaaaaaaagggtacgacggagccaaggcggatatttggtcttgtggggtgattttatacgttcttctcgccgggtttttaccgtttcaagatgataacttggtggcaatgtataag

SEQ ID NO: 224910 - DNA, 376 bp, Gossypium hirsutum
caaaagccaagagtgaagtcgaaatccttaaaaatcagttacaagcagttgtagcaactgatgatgcaactagaagaagcatagctgatccagcagttcagacatcttgctcggatcagtcattaaaaacaatgatggaaatttgtgtccgatgtctgctaaaggaccctgcagagagaccctctgttgaggacgtgatgtggaatttgcaatttgctgctcaagttcaggatgcatggcgtggagattcccagagcagttctcctggctgctctccttcccaacctgctatcctccctgttgccttccattagtgataactttcaggatatggcaacacaagtggaacccttggtttgtttgggaggatagagaa

SEQ ID NO: 224911 - DNA, 377 bp, Gossypium hirsutum
gaaactgaatctatctattttcgaggctgaagaaaaatgaagacctctttaagaagattgcgaggattggcacatcacaagcacggtggggaagccaagcagcggccagatgttctagctttgcctcaacttgacgagctcgctcaagcttctcaggatatgcaggatatgagagattgctacgaaggcttactttatgcagctgctgcaactacgaattgtgcttacgaattctcagactcattgcgggaaatgggtacttgtcttcttgcaaaaactgcattaaatgatgatgaagaaattggtaaagtattactaatgctaggaaaagtacagttcaaactccagaaacttcttgacagctatcggtctcatat

SEQ ID NO: 224912 - DNA, 370 bp, Gossypium hirsutum
cccacgcgtccgcccacgcgttcttccacgcgtccggttttctgaacccgaggacgaagaagtagatggctccggttttgccctctttgacgtgatcctaactgggtcgggttccccggaattcaccctcaatgggaaattcaacaaagcccttgagccacgcatcctataagctgccttatcataagccaaagccgcatcctcagctgtctcgaaagtgcctagccaaactcgagccccgtttttagccggatccctaatctctgccgcgaactttccccacggcctttgccttactcctctgtaatgcttccctttggcaggaaccaccgtgggaaccgccgcattcgccaccgtaggaacctctttc

SEQ ID NO: 224913 - DNA, 374 bp, Gossypium hirsutum
ggaggtgtgtggaatcttcaaagaagaccaggaggaagaatccttcccttttttctttttttccccagaaagagcgattcctttcccttcccttctagttcctcgtttactttttcttcttctttcccttctgattataataagatttgggtttcgttatcctctgaaactctcgtctctggtttgaaaggagattgaaaaaatatggctgaagaacatagatgtcaagcaccacagttatgtgccaacaactgtggatttttcggaagcccgacgactcaaaatctctgctctaaatgttatcgcgatcttcaacttaaagaacaacaatcttcctctgccaaacaagcctttaatcacactttcgttccttc

SEQ ID NO: 224914 - DNA, 363 bp, Gossypium hirsutum
gcaaaagcaaatactgaagtgaaagttatttgctgacactgagcctcaagaaccaaataaaacaaagaatggaaaacaggtcgaccgatcttcatgtggttccaatacaccttcttctagcgacgtggagatagatgtattggaaaataacaaggaagacacggaacaaaaggaagattcgaaggcagctgatgcaaatcattcacaagttgaatgtaacaatcgccggggcagaagcagtaccaacctgagtgattcttggaaggtggtatctgaagggggccgactggcttttcaagctctcttctgcagagaagtactaccacaaagcttttctgctgctcatgacagaaagaataagga

SEQ ID NO: 224915 - DNA, 368 bp, Gossypium hirsutum
cccacgcgtccggtaagatgttgcggaaccgatttcattattcacatactcataatagtactgttggtgttgttcgctgggatgatgtccggccttactttaggccttatgtccttgagtcttgttgatcttgaggttcttgccaagtccggtactcccactcatcgtaaacatgccgcaaagatattgccggttgtcaaaaaccagcatttgttgctttgtacgctacttctatgcaatgccgctgcaatggaggcacttcccattttccttgatagtctggtcacagcatggggtgctatcctaatttcggttaccttgattcttgtgtttggtgagataataccacaagctgtttgttctcgata

SEQ ID NO: 224916 - DNA, 365 bp, Gossypium hirsutum
catttctcaactcacaaagctcatttatttttgaaacagtttaaccccccttcaaaaagaaaaaatacatggtgaagccaacacagactgaggcaaccacgaaccatggctcggacccgaccggtaatggttcaaagtacaagggtgtaaggaagaggaaatgggggaaatgggtatccgaaattcgacttcccaacagccgcgaacgtatttggttaggttcttacgactcgccggaaaaagccgctcgggcattcgacgccgctcagtattgtttacgcggcactggagcaaagtttaactttcccgataacccaccggatatagccggtgcaacgtcacttggcccacatgagatccaagcg

SEQ ID NO: 224917 - DNA, 377 bp, Gossypium hirsutum
caaaaccctaacggctacagctttagaattcaagcctttcgaccatggcggatgttgagacggaggtggcggcggctggagtgcccaagaagcgaacattcaagaagtttagcttcagaggtgttgatttggatgctctccttgatatgtccactgatgagcttgtcaagctctttcctgcccgtgctcgcagaaggttccggaggggtctcaagagaaagcccatggctttaatcaagaaacttcgcaaggcgaaaagggaggctccaccaggtgagaagccagaaccagtcagaacccacctccgaaatatgatcatagtacccgaaatgattggtagcattatcggtgtgtacaatggcaagacattcaatcag

SEQ ID NO: 224918 - DNA, 371 bp, Gossypium hirsutum
cggacgcgtgggcggacgcgtggttgtttatcaatttgaggacctgtttgctaaaaggaattcgccggtggctcatgctgttggattttgggattaccattcttttattttggctgcttccatttatgagcctttgggttttgggactactggtggtaagcgtatgcaaatgaaggaagtcgcggcttttcttgcacatgtcggcgccaagacatcttgtggagatggtgtcatagacggaggaccgttggcatggggtctttgcttcaagagagaaatgagtcctagccaggattactgtgatgattactacaaatacatgtatccatgtgcccctggagctcaatactatggccgtggtgctttgccaa

SEQ ID NO: 224919 - DNA, 379 bp, Gossypium hirsutum
cttgaatgggtctgaatatgttcctacttatgaagacaaagatggagattggatgcttattggtgatgtcccatgggagatgtttgtcgattcatgcaagcgtttacgaatcatgaaaggatcagaagcgatcggacttgctccaagagcagtggagaaatgcaaagaacagaagctgatgctagcttcattacaaaacaacaatctgagttgagaatcaagtgttactaagataaaaagaaaagagagcagcaaaccggttcgaaagggatcgagcagggagtttgaatgtgttcatcagcatgaagaaaaaaacgagaagaaattattaagagacaagaaatctatatgaaaaatgtttacgagactttgttttaat

SEQ ID NO: 224920 - DNA, 364 bp, Gossypium hirsutum
  unsure (1)..(364): unsure at all n locations
gaaagggatgtccgggctctatgggatcatctcttggccttctgggaaaattaagagggtaggccactctttaaggaacctccaacttgtgatggattcagtccaaggtgctaagggtgccattaaaatagggtggttttactaaggcttcccggacctaagttaaccaaccctttctggtaatggcctttcttcgtctttgaagatcagggggcattcaaagccatctgaacctcaacttgagaactgcatgttcagccaaggagctgctgctctgaagtctccatcttcttcatgcagccggagctctggttcaagtacctntggagacacaaccagggccgaaaactggtgccagaatcta

SEQ ID NO: 224921 - DNA, 377 bp, Gossypium hirsutum
cggacgcgtgggctttttattctttcttttagaacaaaaagcatcgcaattttcaggtttacctgaaatttcagcttacgaacttgttttacctgaaaatttgaatttttagcatcggaaaagctttcaattttcgttatggaaatgtacccaagtacgattgattccgatttaatgatgctggactcaattcggagacacttactcggcgaatcatccgacttgcggttcacttcttcaaatgactgtaccaacgtgggcgcggctccccctatgttttgcagtagctccagctttagccgcttgtacccttgtttgactgacacctggggtgacctcccactcaaagagaacgattctgaagacatgctagtttt

SEQ ID NO: 224922 - DNA, 315 bp, Gossypium hirsutum
cttgaagaagaatttgggtttgagatacctgataatgaggcagacaagatcggcactatcaatcatgctgttgagttcattgcttctcaccctcaggcaaagtagagtgaaaagtataaactcttattctttgctttcactttgctcatgtgagacatggaaactacattggataattccctaacctccacgcctggtcaaatatgcctgtagtgtcctctgggtgtgttattgaggaggattaggattgttttgtatatttactgcttcaatggtattgttccaattcataaaatgcaacacattttggtgggg

SEQ ID NO: 224923 - DNA, 373 bp, Gossypium hirsutum
gaaaaatacaggccgagcaaagtctctgtcatcgtcggcaacgaagatgccgtgtctcgactccaagtcattgctcgcgacggcaacatgcccaatctcatcttatccggtcctcctggaactggtaaaacaactagtattttggctcttgcacatgagcttttggggccagtctataaggaggctgttttggagcttaatgcatcagatgacaggggtatagatgttgttcggaacaagattaagatgtttgctcaaaagaaagtaactttacctcctggacggcacaagataattattttggatgaagctgacagcatgacatctggtgcacaacaaggccttgaggaggacgatggaaatatactcaaac

SEQ ID NO: 224924 - DNA, 375 bp, Gossypium hirsutum
cccacgcgtccgctcaaagaaaaaattgagtgtcagtttgaaagtgttcttcagatatggctatgaaacaagttgctaattctgctatcaaagcaattgccaattctgggtcatcctctcttcttaccagacaactccatgcttctccagggagcaaaaagattgttggggtgttttacaaggccaacgagtactttacgaagaatcccaactttgttggttgtgtggagggagccttggggttgcgcccatggctggaatcacaggggcatcagtatattgttaccgacgacaaagaaggaccggactgcgaacttgaaaagcatatccctgatctccatgtgctcatatcgaccccattccacccggcttacg

SEQ ID NO: 224925 - DNA, 370 bp, Gossypium hirsutum
cccacgcgtccgtttgagaaatcaaagagagctttaatttatgaattcatgccccatggatccttggatgggttcatttatgatagaggattgcatcatcgaagttgtcgattggagtggagaactttgtatgacattgcacttggcattgctagaggactcgaatacttgcatcaaggttgcaacacaaggatcttacattttgatataaaacctcacaacatccttttagatgagaacttctgtcccaaaatctctgatttcggtttgtctaaattatgtgaaagaaaggagagtattatttccatggcttgtgctaggggaacaataggttatattgctccagaagtgttttgtcgaaactttggcg

SEQ ID NO: 224926 - DNA, 340 bp, Gossypium hirsutum
cccatgcgttcatctaactattgtttaagcgacggtacttaaagaaaggaaaacgccatggctcctagatcaaaacccagcccgattagcccgaatgccgacccgagttctaaggagatccgttaccgcggcgttaggaagcgcccatggggccgacacgcaggccagatccgagatgcgaggaaaaagactcgggaatggatcggaaccttccacaccgccgaggaagcagcgcaggcttacgatgcgactgcccaagagttccgcggcgcttatgcgaaagctaatttcgtcgccaacaacgtcaacgacttcacgcgcagctctaggcagagcagta

SEQ ID NO: 224927 - DNA, 379 bp, Gossypium hirsutum
acaaaaccctccaaaaaagactttgtactgaatgtcgcagttgttggagaaggcgaaggacttcgtggtggataaggtggccaacataaagaagccggaggctagtgtctcggacgttgatctgaaacatgtgagccgtgagtgcgtcgagtatggcgctaaggtctctgtctccaacccctacagccattccatccccatttgtgagatctcttacaatttcagaagtgctggaagagggatagcatcagggacaataccagacccggggtcattgaaagccagcgacacaacgatgctggacgtgccagtgaaggtaccgtataacatcttagtaagcttggtaaaggatattggtgcagattgggacattgactat

SEQ ID NO: 224928 - DNA, 377 bp, Gossypium hirsutum
caggatacgagtacgatgaggagtcatttgagaagatatttagacgcatatatgcttcctttggctcatccgcaccctatacggtatttccggactcacaacccttcctgagatgggctcgtgaaaagggtattaaagtggggattataagcaatgctgaatatcggtaccaagatgtgattcttccagccttgggtttgaaccagggaacagagtgggactttggtgtgttctctggtcttgaaggtgtagagaaaccagacccccggatctacgagattgctcttcaaagggctggaaatattgctccagaagagactctgcacgtcggtgacagcatgcgcaaagattatgtaccagcaaggagtgtggggatg

SEQ ID NO: 224929 - DNA, 372 bp, Gossypium hirsutum
gggtttagagacgaaatggcatcttaaaggaagactcccgtcaagaccagaaacccggatctgatccgtggtgtgggaaagtattccaggtctaagatgtaccacaagcgtggcctttgggcaatcaaggccaaaaatggcggtgctttcccccgccatgatcccaaacctaaggcccccgctgccgctgagaaacctcccaagttttacccggctgaggatgtcaagaagccgctccttaacaagcgcaaacctaaacccaccaaactcagagcaagcattacaccagggactgtgttgattttgttggctggaaggtttatggggaaagagagtgttttcttgaagcaacttacttctgggctccttttg

SEQ ID NO: 224930 - DNA, 371 bp, Gossypium hirsutum
gctgcaccgattgttataaagacatggagagatctaccagtgtttgcatcttttgtttcctcttcttacatgtccttactgtgttttcaccatgaataattctgggttagctgttgaagtctcaaaggatagaaatggaactgatcagattcttcttcggaatcctcgtggggcatctgcaaaggttagcttgcatggaggacaggttctttcatggaggactgaccgaggtgaagaattgctgttcacaagcagcaaggcaattttcaagccaccatatgctgttcgaggaggaatacctatatgtttcccacagtttggtcagcgaggatcgctcgagcaacacggatttgcccggaacaggacttgga

SEQ ID NO: 224931 - DNA, 368 bp, Gossypium hirsutum
caaggatacacttgcagatgatttacttgcccctgttttgaaggctttgatagatagaacaaagttggacccaagcgaagtttctgatatagttgtgggtacggttttggcgcccggctcacaaagaggaattgagtgtaggatggctgcattctatgctggtttccctgatacggtacctattagaactgtcaacaggcaatgttcatctggcctacaagcagtcgctgatgttgctgcttccataaaagcaggattttatgatattggcattggtgctggattggagagcatgacaactgacaaagttgttcctggggttcccaaagttaacgcaaaggtagagagctttgctcaagcccgggatt

SEQ ID NO: 224932 - DNA, 186 bp, Gossypium hirsutum
caactaagtttatgtctgatctcgacgtccagattcctactgcctttgatccctttgctgatccaaatgctgaggactcaggtgctgttgcaaaagagtatgtgcacattcgtattcaccaacgcaacggtaggaaaagcttgactactgtccaagggttgaagaaagaattcatctacaacaaga

SEQ ID NO: 224933 - DNA, 377 bp, Gossypium hirsutum
atcgcctgatggttcgagcaccacagctcacacaccttgggacagggtcctttagcccatcggatattgtaaggcaaggtgatcaggaaccagattatgtaacctcttatgctgcctgcagatccttagtttgtctctctgggtttagggaaataattccagattatctgcctgcaatataccctgtttgcgcaaatctgacatctatgaattgcagctatgctaacattactgccgaacagcttaagccaattataagcaagtgccacaagctccagactttctgggttcttgattcaattcgtgatgaaggactacaagcagtcgctgcaacatgcaaggacttacgcgagcttcgagtttgccctgttgatgct

SEQ ID NO: 224934 - DNA, 246 bp, Gossypium hirsutum
agcccaagagaaaaaagacgggcgggtggaatttaaacgttagaggcactcgaacctccgatcctaaactccctttcaaagtgtctagcgtccctcaaacaacccccttcacagccgtcttgaaattttcaaccacccaattcaaaacacctcctcaaaccaattctatcatcaccaatgattgcctgggaatcaatccccaacaaactcatgaaatgcctcctcaaacatggatcggaactcctc

SEQ ID NO: 224935 - DNA, 378 bp, Gossypium hirsutum
gttgatttcactcagccttcagcagtttatgacaacgtaaaacaggcaacagcgttcggtctgagaagtgtggttcatgtgcctcggattacggttgacacaatatcagcattatctgcattttgcgagaaagccagcatgggttgcctagttgcaccaactctgtccataggatctattctcctccagcaagctgccatttcagcttccttccactacaacaatgtagaaattgttgaatcaagggcgcatgcaacagatcttccctcaccagatgccatccagattgccaacaacctctccaaccttggccagatctacaacagagaagacctttcaacagatgtttcggcaaggggtcaagtcctaggtgaagat

SEQ ID NO: 224936 - DNA, 379 bp, Gossypium hirsutum
gatttagacactattacactcctggtaaaagagggactgggtctcgttcttctgatcaagaaaggaagaaaggggtgccatggactgaagaagaacacaggcaattcttaatgggtcttaaaaagtacggtaaaggggattggagaaatatttcacgcaatttcgtgactacccgaacaccgactcaagtggcaagtcatgctcagaaatacttcatcaggcaggtcaccggggggaaagacaagaggaggtccagtatccatgatatcacaacggttaacgtccctgatactccctcttcgtcaccggatcactgcaagcattcgtcttcaagtgattcttctgcagtcatacaggcacagcagcaagctaaactagc

SEQ ID NO: 224937 - DNA, 383 bp, Gossypium hirsutum
gctttatccgatctttagggtttttttcttatttatcttcttgaattctctcaggagagccctaaatacctcggatcaggtctcagcttgtggttgttaagcctatttgatcaactaagtttcatgtctgatctcgacgtccagattcctactgcctttgatccctttgctgatgcaaatgctgaggactcaggtgctggtgcaaaggagtatgtgcacattcgtattcagcaacgcaacggtaggaaaagcttgacgactgtccaagggttgaagaaagaattcagctacaacaagatactcaaagacctcaagaaggagttttgctgcaatggtactgtcgtccaggaccctgaattagggcaggttattcaactgcaagg

SEQ ID NO: 224938 - DNA, 385 bp, Gossypium hirsutum
ctttttgttgggaaaatttcagaattctttaaaagcgaaggagagaaatggcgagcggggggaaagtgtcttttaaaggcactcttacctctgatcctaagctccctttcaaagtgtttagcgtgcctgaagcagccccttttacagccgtcttgaaattcgcagccgaggaattcaaagtccctcctcaaaccagtgctatcatcaccaatgatggcgtgggaatcaatcctcagcaaagtgcaggaaatgtgttcctcaaacatggatcggaacttcgcttgattccccgtgacagggtgggagccttttgaaataacaaaaacttcatttgttatctctgagtgagaagactggttatgactttgtttggttatggatcctt

SEQ ID NO: 224939 - DNA, 374 bp, Gossypium hirsutum
cccacgcgtccgattttgtaattccttcggtaacctttttccccttgctcataactttgttggaatctgtttatatgtatatatatatacacacaaaaaaataggctattctttctggctgttccgctggaggattggcttcgatattgcactgtgacaggtttcgagctctccttcccgcttctactaaagtaaagtgcatttcagatgctggcttcttcctccatgcgcaagatgtctcgggagggaagcacatagaagaattctatggcaaagtggctagactacacgtattgtctctatcgattctttacttgaactttattgaagactttttttaatatatatatgattgtgatctgctccataagaat

SEQ ID NO: 224940 - DNA, 373 bp, Gossypium hirsutum
aaacccattttcaatttttttttctattgcaaaattttctgctttttgttttgtctgaaactgaagccatgggagggatatcggggttgcttatgaaatttccctcattgatccactttttgttgtctctcctggagaaaatccctgcgagattgcctatgccaattgagaaattggtttctcgtgtttcatatcctcgcaccggcaggcacttgcagcgctataataacagaggcttccgcttagttgttgggtgcattccctacagatacagggaaagcgaagatgccaagtcaattgaggaagcgattgaagttcttgtaataaatgcacaaaatgggaaagggatattattccccaaagggggttggga

SEQ ID NO: 224941 - DNA, 370 bp, Gossypium hirsutum
cggacgcgtgggttcaaatacacttaacaaaggaacctttggtggaagagtatagcatagctgcttctgtgtggaagctgagttcatgtgatctatgtgagattgcccgtaattcagtctaccagtcaggtttttctcatgctttgaagtcccactggattgggaagcactactacaagagagggcctgatgggaatggtatacacaagacaaatgtacctcatatccgggtggaatttcgtgacacgatctggagagaggagatgcagctggtttacttgggcaaggctgatatccgtacagatgttgacaagtaatgttgaacatacggcacaaggatcctttcttgaatgttacaagtatatttaga

SEQ ID NO: 224942 - DNA, 378 bp, Gossypium hirsutum
aaaatggattacatttacgaagattagctcaacaactttgtcaacagtggtgcactttctgaacttgtggttgctttttcacgcgagggacctaccaaggaatatgtgcaacataaaatgatggagaaggccttggacatctggaacatgatttctgaaggaggttacctatatgtgtgtggtgatgccaagggcatggctaaagacgtgcatcgaaccctactcactattttgcaagagcagggatgtctagacagctcaaaggctgagagcatggtgaaaaatctgcatacgaccggcaggtatctgcgtgatgtatggtaactgactacaccatgaaaatgcagaaagaaaagaaatggctttatatattatata

SEQ ID NO: 224943 - DNA, 379 bp, Gossypium hirsutum
gttcgaatttgcattaactcttgctgttgcttcttcaactctcattttattgtctctgaaaaagagaaatggtttctgttggagattccagttcaagcaggtctccgttgggtcgaaacatttgcactcaaggttcggcttcgacttcgacggctaaaaaagaccgacacacaactggtcgttccatgcgtacgatacgctccaatttctaccaaaacgacgacagcagctgctcctttactagctccgtcccccaaaggtccggatgtgtctccgaaaacctcaccgaatccgtcatcgacatgcgtctcggccaactggcttccaagagcaacgccaaatctgttaagtccgactcagaaaccgagggctttttaga

SEQ ID NO: 224944 - DNA, 382 bp, Gossypium hirsutum
gaaaggtttgcacagactgatggaattgttccagttgggagaggaaggggaccttcttggagatctgaaacgtctgatgattgggatttccctgcgtttaatgcatcaaggaatggacaatttcaatcaagaagagctccagctagcagcggcctggatggtagatcacccaaatcagaacacgagagtgatcagattggtggcaggagaggttgggacaagggtcccgggcctgaaagacttggtgaaggaccttcagctagaagtgtctggcaggcatcgaaggatgaagctaccttggaagcaattcgtgttgctggggaggacaatggagcatctcgaactggacgtgtgcctgaattaaccgctgaagctctaggag

SEQ ID NO: 224945 - DNA, 386 bp, Gossypium hirsutum
ctcaccattgttccaagtttgttgttaactaagttagaaccagcagccaacatggcctgattagcagcctccaccgctgccgcctcccttggcgtctctgaaatgcttggtaaccctctgaatttcagtggtggagctaggtcatcggctccaacaccatccaactcatccactttcaagaccgttgctcttttctccaagaagaaggccgctcctccaaagcccaaggctgctgctgtcgccccggccgatgaagagctggctaagtggtacggtccggacagaaggattttcttgcctgaaggtctgttagacagatcggagatcccagagtacttgaacggagaagttcccggagactatggatacgatccgtttggtctgag

SEQ ID NO: 224946 - DNA, 384 bp, Gossypium hirsutum
cccacgcgtccgcaaaacacaatatggcgatggctgtggcgaacttaacaaaacatgtggattctgtctcagatgctctctctgctgcaaagaagcatttgactcaacgcatgcagaacctggatgataaaatggaaacacagaaggaaatctcgaagagcattcaaacaagtgtggaagaggctcatatgaatctgtctaacattgaatatgatttggatgcactgcagagaatgatatctggtttggatggcaaaattggttcattggaatacaagcaggatcttgctaatgctggcgtgtgcgaccttcgtaatatggttggtggaaagaaagcaaacatgcctgaagctctgcacgagcaacttaaactttctgggaaat

SEQ ID NO: 224947 - DNA, 375 bp, Gossypium hirsutum
gaaaagatggggtggttggtgttttaaatattggtgtttcggatcttacagacggaaaaagcgaattggacctgctgttcctgtttctgaaacgagttcttcccgtgctaatatgcccgctgctgaaattccaacccaagccgttacagtgacacttccctttgttgcacctccttcctctcctgcatctttccttccatctgaacccccttctgctgctcaatctccagctgggttagtgtctctcacctctatttctgccagtatgtactccccagggcctgcttcaatttttgcaattggcccttatgctcatgaaactcagttagtttcaccacctgttttctccaccttcaccactgaaccttcaactgc

SEQ ID NO: 224948 - DNA, 288 bp, Gossypium hirsutum
cggacgcgtgggctggactggaccctgttgcagttctctgtgaggttgtagatgatgatggatccatggctagattaccaaagcttcgccaatttgctgagcgggagaacttgaaaattatatccatagctgatttaattaggtataggagaaagagggataaattaattgagcttgctggtgctgcacggattccaactatgtgggggccattcaccgcccattgttacaggtcgatattggatgggattgagcatatagcaatggttaagggtgagattggagatg

SEQ ID NO: 224949 - DNA, 383 bp, Gossypium hirsutum
ggtttttgcagtttgatgagcagatggatcaagttgcaatagaacaaatactacgggttgttttcctagatcctgagcgtccttgtcctgctctggaaaaattgaagtgtcaattagatgaggctgatgctgcgctggaggcacgcaaaaagcctccagaggattcaggtccaaggatcattggggaaggactcgtcatagatgaatggaaagaacgaagggagagatacctagctcgacagcaggttgaaggagtagactcagcttaaagtggcaattctcataatttgctttatatcatgtgattgaaatctgatataatgatcatctcgtgcatatatacccgtcaaatcttttaatgttaaccttaaaagggtgtcatc

SEQ ID NO: 224950 - DNA, 383 bp, Gossypium hirsutum
tttttcttacgttttccctgacaagttttagatccatctcttggaatcaaaaagaaatggccaacaacaacaatctagaggaatccagccctcttttgagcaaacaagttagtgttgaagaagatgagaagaagaatctaaatgttaacaactccaccgacgtggcagcttcgccggcagctaggaccggagctgggttcgggtggaccgccaatggtctgcccttggtccacgggagtgtcgtcggagaacctatgggccggtctcagtgggattcctccctcctcgcttgtcttggccgtaacgatgagttttgcagcagtgacgttgaagtttgtctactaggaagcgtggccccttgtgtgctgtacggaagcaatgtt

SEQ ID NO: 224951 - DNA, 379 bp, Gossypium hirsutum
gttaaagttcagaccctgtcttcttctttagttgcaggggccaacaagcatgggacaaggcgtttggcaaggccaaactcgggttcttataattataaaaccacgttcaagtattcaatggcgttgatcgtggctttgccgattggtactccgccgcagactcagcagatggtgttggacactgggagtcaactgtcgtggattcagtgtcataagaagcttgctaaaaagccgcctcctacggcgtcgtttgatccttctctttcttcttctttcagtgttttgccatgtaaccatcctctttgcaagccacggattcccgattttaccctccctacttcctgcgaccagaaccgtttgtgtcactattcgtactttt

SEQ ID NO: 224952 - DNA, 384 bp, Gossypium hirsutum
aaccgtacggccacccttccgaaaagagctgctgaatctgtctctcatgagggaggatcccctactggtgtcagtggaagcagtcaagttgtgggatggccacccataagagcttataggatgaacagcttggtgaaccaagcaaagtctcaaagagctgatgaaggagacagtggaattggtgaaaaagataaacccaaagatgctttgaagaagaaacttaattacaatggtaacaaaatcagttcaacaactactgttaatgaaaaaggacatcttgggtttgttaaggtgaatatggatggaaccccaataggaaggaaagttgatttgaatgctcattcttgctatcagagtttggctcaagcacttgaggatatgttc

SEQ ID NO: 224953 - DNA, 387 bp, Gossypium hirsutum
cccacgcgtccgcccacgcgtccgtccactcgtccgcgacccccattgctgaaaacccagaaagaaaaatatggggagaggaagagtggagctgaagaggatagaaaacaagattaacagacaagtgaccttctctaagagaagaaatggcttactcaagaaagcttatgagctttctgtgctttgtgatgctgagattgctcttatcatcttctccaatcgtggcaagctctatgagtttagcagctcagggtatattaatacaaaactacgttaaacaatctactcatagtcctttttcatttctttctctatccttaactttagatattctcaagttttctagtcatttacatctactttggttatggattgtgcataatggtt

SEQ ID NO: 224954 - DNA, 425 bp, Gossypium hirsutum
cccggtccggtattccgggcgggccgaccctcgcgtccaactggattggctcctttcatgggattccttcaggaaaggcttgcactgaaagaagctggtgctgagttgggtccatctgtattgttctttggctgcagaaaccggaaaatggatttcatatatgaagatgagctcaacaactttgtcaacagtggtgcactatctgagcttgtggttgccttttcacgtgagggacctaccaaggaatatgtgcaacataaaatgatggagaaggccaaggacatatgggacatgatttctcagggaggttacctgtatgtgtgtggtgatgccaagggcatggctagagatgttcatcgagctcttcacactattttccaagagcagggatcactagacagctcaaaggctgagagcatggtgaa

SEQ ID NO: 224955 - DNA, 388 bp, Gossypium hirsutum
aagcaacctgcaacagaatttatctcctttacgaatagcttccatggtaggacgatgggagcccttgctttgacgagtaaagagcactatcgttcaccatttgagcctgttatgcccggagttactttcttggagtatggcaacatacaagctgcaatagatcttattaggaatgggatgattgctgctgtatttgtagaaccagttcagggtgaaggtggaatatacagtgcaacaaaagagtttttgcaagctctgcgttccgcttgcgatgatgctggatccctcttggtttttgatgaggttcaatgcggattgggtcgaactggttatctctgggcacacgaagcatacggcgtattcccggatatgatgacacttgcaaagc

SEQ ID NO: 224956 - DNA, 232 bp, Gossypium hirsutum
aatctatcaaactcgatcaaccattaacaattaatcctaatgtgggtggatttggtcagggggatgcagaaatagtacttcaagacccactacgcgtccaaggtcttttgttcttcttggcatctattgtttttgcacaaatctttttggttcttaaaaagaaacagtttgagaaggttcaagtgtccgaaatgaatttctagatctgtggatttatcaacatcaaatttgt

SEQ ID NO: 224957 - DNA, 387 bp, Gossypium hirsutum
tggatggatcatctgattttgtgctcacttacgaggacaaggagggggactggatgctggttggggatgttccttggaagatgttcctttgctccgtgaagaggcttagaatcatgaggacatccgaggctactggattggctccacgattgcacgagaggaactgccagagacaaagaagcaagcacatctagaatatgccagcaaacatacaaatcaaaatggaaatacggaatagttaagccactttgactgagtaaagtttgaactccgaagacttggtttgttctcgattacaatattattttgttacatgttttcgtcaacctctcaattacagtcttgaggaatagttgccatacttattgaaaggcaccaatatctcag

SEQ ID NO: 224958 - DNA, 386 bp, Gossypium hirsutum
cccacgcgtccgctcaaatgacagttccaaggaaagacgggcacgcgtcgctatactatttaggtcccaaggaaagcccggctccgattcatcggcaagactgcagtcactggtgcttacccggagtgcccgacgcatggaacgagctactctatgctgtgttcctcaagcaatccaccaatcacacattcaactcatcatcaacattatgaagcaacaaaggcgtgtgattctccattgttgaaacctcttaatttaaatacaccatcatcacctatacagaaagatagaagaaatttttacaatgaattttggaataggatcacaggttgttggtccatcattttggcagtgttagaaaatgtaatatttgattgaaggacgct

SEQ ID NO: 224959 - DNA, 383 bp, Gossypium hirsutum
gcaaggcttccaacctcagaggagctcgatgcctatgcacatgagcaatgggagtgtttcttgctgcaacttataagttcaagacaagcccaaaaatcaacgagcttcagctcttccatgatgagaatttttcagcgaggtcttttgcgtcagagagataaagaagctccaagattaaccgagagtggtttccaattcttgttgatggatacaaatgctcagctttggtatattatcagagagtatatctccaattcagaggagcaaggtgtcgatcaagcacacttaatcagcttttttgctagaacttaattttcatacccctggagaggcatatagtttagatacactgactgatgaccagacaactatgatcaaggacc

SEQ ID NO: 224960 - DNA, 383 bp, Gossypium hirsutum
gagcttctttctagctatatccttatcagctttcaaagatggcaggaatggccgttggtcgctttgatgattccttcagtttggggactgtcaaggcctaccttgctgagtttatctcaactttggtgtttgttttcgccggcgttggctctgccattgcttacaacaagttgacaactgatgcagccctagatcccgatgggctagtcgccattgctgtttgccatggatttgctctctttgttgcagtggctatcggtgccaacatctcaagtggccatgtcaaccctgcagtcacttttgggttagctcttggtggccaaatcaccatactaactggcatcttttactggattgcccaacttcttggatccattgttgct

SEQ ID NO: 224961 - DNA, 385 bp, Gossypium hirsutum
ttagcgttggtctcaagccctttctttcaaaatcaaagtctgatgtggtctctgcaattgtcttcaaagggatcaacaactagggaagagaaatggggctgactttcaccaagctttttagccggctttttgccaagaaggagatgcgaattttaatggtgggtcttgatgcagccggtaaaactaccatattgtacaagctcaagcttggagagattgtcaccactattcccaccatcggatttaatgtggagactgttgaatataagaacatcagtttcaccgtgtgggatgttggtggtcaggacaagattcgtccattgtggaggcattacttccagaatacacagggtctcatctttgttgtggatagcaatgacagaga

SEQ ID NO: 224962 - DNA, 378 bp, Gossypium hirsutum
cccacgcgtccgctcactcactccttttgcccactttctttacctgctttgctggaaacccaagtaatcaccggtcaaatagaaggatcagttttttcttttcttttcaagatcagacggtggttagttgaggggggaaatatgagctgcaacggttgccgagtgctccgaaaagggtgcagggagacatgtgtgttacggtcaagcttacgttggatcgaatcccccgaagcccaaggcaacgccaccttatttctcgccaagtttttcggccgtagtgacttactttctcttatctcttctgtacctgaatcccaacgccctgctttgtttcagtctttattgttcgaggcatgtggtcgtaccgtgaatccggtg

SEQ ID NO: 224963 - DNA, 412 bp, Gossypium hirsutum
  unsure (1)..(412): unsure at all n locations
aattcccgggcgggacccaccctcccaaaaaaaaaaaaccaggtgaccggttttttggaagacttttatttctttaacatgcaggatgagtcctgctggtcaagtcatccgttgcaaagctgcggtagcatgggagtcggggaagccactgtcaatagaggaagtggaagtggcaccaccgcagaaggatgaagtccgtattaagatactcttcacttctttatgtcacaccgatgtctacttctgggatgctaagggacaaaaccctctgtttcctcgcatactaggtcatgaagctggagggattgtggagagtgtaggtgnaaggggtgactgatctaaagccaggtgatcatgttctccccatcttcacgggggaatgcaaggagtgtccccattgcttgtcagaaga

SEQ ID NO: 224964 - DNA, 383 bp, Gossypium hirsutum
cggacgcgtgggcggactcgtgggttatcttcctggcaaaaggttatattcgggctggggagccaggagaggctgagtcactcctcaactccatgggcaaatttggtgtgcaaccaaatgttgtaatcttcacaactgtcattagtgggtggtgcactgctggaaaaatgaatcatgcagccagagtttatgagaaaatgtgtgaaatcggcgttacccccaatttggctacttatgagacactgatatggggatatggggaagcaaaacagccatggaaagctgaagaactcctgcagattatgaaagagaagggtatctctgctgagaggagcaccatacagctagtagcggatgcttggcgtgccattggtttactaaat

SEQ ID NO: 224965 - DNA, 367 bp, Gossypium hirsutum
gtatcgatggtgtccaagctacttgagctgccattttctggcattttcaaccaaaatgctgcaaaatcttcctcacccatttctcattttacacctagaaatgctttcaaagttatggcaacgagtttcggtgcaaatgtttatcgctctcttggaatttcccattcttcttcttcaaacataagattttcaaagaagccaagggtggatgagagtgagaaccttactctcaacagtataagacagtccttaattcgacaagaagatagcataatatttagccttttggagagagctcagtactgttataacccagacacatataagcaagattcattctccatggatggatttcatgggtctttgt

SEQ ID NO: 224966 - DNA, 380 bp, Gossypium hirsutum
ggataatgcgggcaactcaaggtgccctcattgtagcttccactcttcagattgtccttggcttcagtggcctttggcgtaatgttgcgaggtttttaagtccactttcagtcgttcctttggtatctctagttggttttgggctttacgaatttggctttcctggggttgccaaatgtgtggagattggactgcctcagctaattcttatagtatttgtctcacagtacgtgcctcatgtgataaagtctggaagaaatgtctttgatcgatttgctgtcttgttttcagtggtgattgtttggatttatgctcatttactcactgtgggtggagcttataatggtacagcaccaaaaacacaaacaagctgtagaact

SEQ ID NO: 224967 - DNA, 385 bp, Gossypium hirsutum
taagaaaccaaagaaaacctttgtttaaccaaaaatggctctcaccaactggggcattcttcccaccaactccatccttcaatctcagccatcaacgccgttctctaaggctaagccattgtctgtccttcggatctccgccgtccattcttctgactcgcctaagaaccccgtcgtctccgaaaaatccgtcaagcagcccgctactgctccactcgccgctaccaaatctgctaccgcgcccaccactgctccaccgaagaatgcggttcctgggaaatggaccgtggatagctggaagtcgaagaaagctttgcagttgccggagtatccggattaggcggagctcgagtcggttctcaagactcttgatgctttccctccg

SEQ ID NO: 224968 - DNA, 381 bp, Gossypium hirsutum
ggccaaccaaactcaacgcatgcgtacatatacaaaggtgcaaaagcgtgggtgtgtaggaaggtcaattgatgtgacccgctacaaagggtatgatgagctcaggcatgatctagcgcgcatgtttggtatagaggggcaactggaagatccgcaaagttctgactggaaattagtttacgtggatcatgaaaatgacatattacttgttggtgatgatccttgggaagaatttgtaagttgtgttcagagcataaagatactgtcatctggggaagtacagcagatgagcttggaaggtgatcttggaaatgtggcagttccgaatcaagcttgcagtgggactgacagtggaaatgcatggagaggacaatatgatgg

SEQ ID NO: 224969 - DNA, 380 bp, Gossypium hirsutum
gagaaagcactgaaaaagcataaccttggcctctgcttctctcctcaagactggaccagttttagacaagtctgagtgggttaagggtcacacccttcgccaaccttccacttctgtggtgaggtgccaccctgttgcaccctccggactaactgtgcgtgcaagctcatatgccgatgagcttgtcaagactgctaaagctattgcttctcctggccgtggaattttggccatggatgagtccaacgctacctgtgggaaacgtttggcctcaatcgggctagaaaacacggaggctaaccgccaagcctacaggacgttgcttgtttcagctcctggccttggtcagtacatctcaagtgccatcctctttgaggaaa

SEQ ID NO: 224970 - DNA, 384 bp, Gossypium hirsutum
cccacgcgtccgcgtttacggactcttactagatgctctaactgtcggctgggcaccggccgataactctacgacgaatttcgcgctgatcaagccggaaccgcaagaatttttaccgcagacatcggtggaaaaagtggatacggcggcggagaggacggttcctgctgtggttcctgccaaagggaagcattacagaggcgttaggcaaaggccgtgggggaagttcgcagctgagattagggacccggctaaaaatggcgctcgggtttggttaggtacttttgagacggctgaagatgcggctttagcttatgatagagcagcttataggatgcgtggctcaagagctttgttgaattttcctctgagggtgaactctgg

SEQ ID NO: 224971 - DNA, 386 bp, Gossypium hirsutum
gccacacctccatcagaatcagaatcaatttctgaaaaaaatgcaaaccctagggaggaccaccacaaccatgaccataaccctcaacgtcgctttcaacaatactatcgacaatgtccaggccaagatccatgtcacggcaggccttccaccataccacctcagattgatcctcgctggaaagcacctcgcacatggccactcccttgctgactacaatattcacatagattcaaccttgcatctgggtctgagacttatcgatcccattatcaagccttcttctatggcattcactcagaaatacaaccactatcagatagatctatcctaagtgttacgctcgtgtgcacccctgtgccgagaactactggaaacacaagtgt

SEQ ID NO: 224972 - DNA, 383 bp, Gossypium hirsutum
ggcgagggaaggaaaacctgatagggtgaaaaatgccagctggtcacggggtccgatctcggactagggatctgttttccagacccttcagaaagaagggttgcatcccattgtccacttacctcaggacctacaagatcggtgactatgttgacgtcaaggtaaatggcgccgttcacaagggtatgccccacaagttctaccatggccgcactggtcgtgtctggaacgtcaccaagcgcgccattggcgttgaggtcaacaagcaggttggtaaccggattataaggaagaggattcatgtcagagtggagcatgttcaaccttcaaggtgcactgaggaattcaagctgaggaagctgaaaaatgatcagcttaaggca

SEQ ID NO: 224973 - DNA, 393 bp, Gossypium hirsutum
agccttccgctggtcaaacctttgtgagacctttttcttaacctcgcttgattttccgggtcgggggggaaggaaatggttgggagggaattcctcctccggcggaatttggaattccattggaccccctgaggaagtgattaaattggggagtctttgaatgctggagagggcccttctccggatgttgttgagagtgtggttagccctccatttttgttccttcctttggtaaaaacttcactgagacctgagttccaagtcgctgcacaaaattgttgggtcaagaaaggaggtgctttcactggtgaagttagtgcggagatgcttgtcaatttgagcattccttgggttattattggtcattctgagaggagacttattttgatggag

SEQ ID NO: 224974 - DNA, 381 bp, Gossypium hirsutum
gtggatatgaaggggttcgcgaaattgagaagcgccttacaaatactgtaggggggagtgcaacttcggggcaagtggataactgggtgtacgaagaggctaattcaactttcattcaagatgagaacatgttgagcaggctgatgaacaccaatcccaactcgttcaggaagttgattcaaacattcttggaggccaacggacgtggctattgggaaacttcggaggagaatattgagaagttgaggcagttgtattcagaagtcgaagataagattgaaggtattgatcgatgaaccgtaaaccaaatagcttctaaaatggcaaatatttgatgacttacttgagcccctccctttaggatgagctgaaacactcgtg

SEQ ID NO: 224975 - DNA, 352 bp, Gossypium hirsutum
ttaccatcgaaaccactccgggtttctttatcactgaaaaagggctggctgaggtggaaactgtggctgcggttctggctgcaagtgtggcagtggctgtggaggatgcaagatgtacccagacctgaacgttgccgagatgaccacaactgagactctggttcttggtgtagcaccccagaaagcacactttgagggagctgagatggaattcggggctgagaacggctgcaagtgtggagacaactgcacctgcaacccttgcaattgtaaatgattagagaccaaagccaaagctccctggaagcagagacgcctttgtctttaagaaataatatgttttgttgtttat

SEQ ID NO: 224976 - DNA, 383 bp, Gossypium hirsutum
cggacccgtgggggcggccctgaggcgtcgcgttacgtttgcgataacttgttgagcgactttcgagccatgacagccgaatcagaaggagctgtcactgctgagaccattcaaagagcttttcgacaaactgaagaagggtttacggcccttgtgtcggagttatggagtactcgaccaaatatggcaacggtcgggacgtgctgtctggttggggtaatatatcagcaaacactttttattgcaaatctcggtgattcacgcgttgtgctcggcaagaaagttggcaacaccggaggaatggctgctatgcagttgtcaactgaacacaatgctaatatcgaggctattagacatgaacttaaggaattacacccgactga

SEQ ID NO: 224977 - DNA, 384 bp, Gossypium hirsutum
gggaaatgaagctgtttctcattctgttagcaccaactttattttctggcagggatatgatgacacaagcgaggggaggaaagtttgcacctattacaaactagattcaattcccgtagtgctggttattgacccaatcacaggacagaaaatgcgctcctggtttggaatggttcaacctgagagtttgctggaggacctggttcaattcatggatggtggcccaagggattatcatgcaactctgtctcataaacgtccaagaggaagctcagttactccgcaacaaaaaattaaagtgtcaacagatgaaaccaatgaagataaggaaatgttgagagcaatagcggcttctatggagaatgcgaaagactctattaaaac

SEQ ID NO: 224978 - DNA, 381 bp, Gossypium hirsutum
cccacgcgtccgcggacgcgtgggttccattcttcacttcgccaaagaacccaggatgaggaaacgtttacttaccattcttctggcagcgattatttccgccggagcaacggcggtaaaggctcaaaactgtggttgtgcagaaggtttatgttgtagccgttgggggtattgcggaaccggcgatgattattgcggcacagggtgtcaacagggtccttgtaatccgccgccagctctgaacaatgttttggtggcggatattgttacaccggagttctttaatgggatattggatgttgcagaagacagttgtgaagggaagaatttttacacgagatcggcgtttcttgaagcattgggtccttatcctcagttcgg

SEQ ID NO: 224979 - DNA, 381 bp, Gossypium hirsutum
cttgaacaagatcgatcatttagcttgaaactctcatggcgggtgggagggtcggctcttgtaataatactaatagtgttggtggttctagtaatctctctgttttacttcaaaatcaaagggttccttcttcttctgagcctatggatcctcttttcattccaagaccaggctcttccccttattctttctttgtttcaggtacgagatcgatggtaagctttgaagacttccatggaggaaacagatcattctttagaagttttgatgaagaagagaatggagatgaagatcttgatgagtattttcatcaacctgagaagaaaagacgactcactgttgaccaagtccagtttctagagaaaagtttcgaggtggaaa

SEQ ID NO: 224980 - DNA, 380 bp, Gossypium hirsutum
  unsure (1)..(380): unsure at all n locations
gtttgtccctgctgaatccttacattcctaacttgagtgcttcatggttgttagaaagatcaatgtctgcaaagaaacantctaatgttccaccggattttattaacgagcttcttgacataaacttcaagagtatggagaggcttggagaccctgtgctaagaccgtttcttcaagatgtcatacagtttggacctcttgccaagacattaagcctcgtgatgctaactaagcctcaaattcttccatcgatattcaagcaagttgacatccctgttctcatcgattggtctcgacattttttcatgctcggatattatacgtttctctcgacctacatggatcctgttataaggtcatggttaaatggtttgccatcg

SEQ ID NO: 224981 - DNA, 385 bp, Gossypium hirsutum
cccacgcgtccgcccacgcgtccgttttgattgatgggttgtgcaaacaagggagactgaaactcgcaaatgggctgttgggtaagatgataaaaaagggaatagaaccggatgaagtgacatttacctcacttatggatggattttgcaaatcaggtaacactggaggtgcatcaaagcttttgaagatgatgattgaaaatggttgtttgaagacttgtcatgccttcaactcaattcttcatgttctgagcaaagaatgtgagttggtaaaacaatatgccttgtttggaaagatcctaaagcatggtttgggcccttctgttgtgacttacaccatattagtaggcgcactttttcaagctgacaaggttgaccagtcctt

SEQ ID NO: 224982 - DNA, 381 bp, Gossypium hirsutum
acacaaccccatcacatcccctcagatccatcaaacaaagagcagtgaaaaatggatcttaagttgcttgtgattaagagaagatgacttgtgataagagagggcagttcggtgataccactttcaccaaagtttttgttggtggtttagcttgggaaacccagaaagatacaatgaagaagtattttgaacaatttggtgatatcttggaagctgtcgtcattactgataaagctactggcagatctaaaggctatggatttgtgacgtttcgtgaaccagaagcagccatgagagcttgtgttgatgctgctcctgtgattgatgggagaagggctaattgcaatcttgggtttttgggtgctcaaagatctaaaccct

SEQ ID NO: 224983 - DNA, 384 bp, Gossypium hirsutum
ctcaattgatgaccagtcatcacactatttgtcaaaagaccaaccccttgtaaagatggtggatcctattctgaaatccttcgacacgaagcaagttgaagccattggggaggtcgtaaatgcttgtgtcgaccccgaacccaaacggagaccaaacatgagagaagttagtgcaaggttgagggagattattggaatttcacctgatggtgcagtccctaaactttttcctcttcggtgggctgagcttgagattgtctaatgaattttgatgatatatatatgtaggcgagctatgatttgtatttatttatagggttaatggaaactttgatgtatatactttgagatagggtggaaaatttgggaaatcttcgtttttat

SEQ ID NO: 224984 - DNA, 379 bp, Gossypium hirsutum
cgcaagcaaaaaatttaaagttcgataatactttattttgataaaaataaaaaggcgatttctcgaatcgcagtcgggtctccggccgaagccggccaagctgatgcactcaaggctgctttagccgagttcatttcagtgcttatttttgttttcgccggtgaaggctcgggcatggctttcaacaagttgaccgacgatggctcctcgacaccggcgggtttagtagctgcggcattggctcacgccttggcgttgtttgtggcggtttcgatcggggctaacatttccggcggacacgtaaaccccgccgtcacgttcggtgctttcgtgggtggccacattacattggtgaggagtattttgtattggatagctc

SEQ ID NO: 224985 - DNA, 401 bp, Gossypium hirsutum
cagccttccggcccaccaaaaatgttggctttgccagttgcttctgcagggggcctagttggctgcgtggttttgggccataggaaaatctttgtctgcacccctttgactcggtcttttaaagagttgccacctgggtcagttaaagtggtggtcgcggaattactgtagggaatgacccctgaatggaaactcaaccactgggaggctacaaaggtcatgtggggtgggacgtgacggagagtgtgaagtttatgactcagtgaagaattcatggagtcggccaggacgcatgccctcaaacattaaggtgccactatcacttaactttctgtctcaagctgtttctgttgataacacactttgcttcatgcggtcggaccctgaagggattgtgtcct

SEQ ID NO: 224986 - DNA, 399 bp, Gossypium hirsutum
gaccaagccttccgaccaagataaaaaggattttgctttgcctaattggtaagctttgaggttgactgaaaaaactttggcggaagagggacaagtaatcgcctgccacactgttgattcatggaaccagcagctcgagatgggaaaccagtccaagaaactggtggtggtggatttcacagcatcatggtgcgggccatgccgttttatatcaccaatcctggtggatcttgctaagaagctgcccaacgtcatattcttgaaggtggacgtggatgaactgaatactgtggctcaagagtgggctattgaggcgatgccaacttttgtgtttctgaaagaaggcaccataattgacaaggttgtgggtgcaaggaaagaagaattgcagcagaaaat

SEQ ID NO: 224987 - DNA, 427 bp, Gossypium hirsutum
  unsure (1)..(427): unsure at all n locations
ttccggtacttaccgggtcggagccgacgcgtnccgaaacatcctttcttcatgagagaaagatgttatgagccaagtgtagctcaattggccggagggcgatgaggatactttacaaggtganccgntnagggtgatgacaagtatcttattgcaacagccgaacagcccctctgtgcttaccacgtggatgattggatccagccctcggagctacctataaggtatgctggattttcgtcttgctttcgtaaagaagccggttcacatggccgtgatactttggggattttccgggttcatcaatttgagaaagtggagcaattctgcattaccagcccaaatggcaatgattcgtgggacatgcacgaggaaatgttgaagaactctgaggaattttatcaggagataaagctaccttatcaaa

SEQ ID NO: 224988 - DNA, 421 bp, Gossypium hirsutum
ttccgttactgcccgggtgggcccacgcgtccgaaaacccgttcgctgaagaaggagatgattaagttaatcctttctcggatccaggtgggagagggaaggcatctggccagtctaaatttggtggaggtctattttcaaagaatgttccaagtgctccacttgcatcaaactcaagactttcaccactacctcctgaacctgctggtttcaattatggtcatgaggcaacaattgacattcctcttgatacagcttcaggaggatcacgttatcaggatttgaagaagaaggagaaggaacttcaggctaaggaggctgaactgagaaggcgggagcaggaagtgagacggaaagaagaggcagcagcaagagctggaattactttggaagagaaaaattggcccccattttttccaat

SEQ ID NO: 224989 - DNA, 382 bp, Gossypium hirsutum
gttttcttttgatttcgtgttttgttgatttatactcgttgttgcgatggggagggtttctgtgggtgcggcggtgggttgtgcggtggccgtgtgtgccgcggcggcgttggtggtacatcaccggatgaagagttctgggaagtgggcccaggctcaatctatactgaaagatttcgaggataagtgcggcacgccgatttcgaagctgaaacaggtggcggatgctatgaccgtcgagatgcacgccgggctcgcatcggaaggcgggagcatgctcaaaatgataattagctacgtcgataatctccccactggtgatgagaaagggctgttttatgcgcttgacctcggtggcaccaatttccgtgtgctacgtgtt

SEQ ID NO: 224990 - DNA, 380 bp, Gossypium hirsutum
tttgcaacaattagggaccagcatcactttgactcgcaagatcatgcagtgcaggggttttgttggtcctgcggttgctcttgttggcttaactgcagcaaaaactccttcaactgcatctgcttggcttagtctagctgttggacttaaagcattcagtcattgtggtttccttgtcaaccttcaggagattgctccacattattctggtgttttacacggattgtcaaatactgccggaacattcgctgctattattggaacggttggagctggtttctttgtggagctggtgggatcattccaaggatttttgttgcttacatcgctcttatacttccttgctggtctattctacattaaattttccactggagaga

SEQ ID NO: 224991 - DNA, 383 bp, Gossypium hirsutum
cccacgcgtccgctcagcttaattcagctgaaaatggcaccttcatctctgccacaaacaccgccgtccgccgtggttattgtcctcttcttactcttctccacggcattgctttgtgaatcaaggttaagcttagattactactccaaaacctgtcccagtttcaccaaaatcatgcaagacaccataaccaacaagcaaatcaccagccccacaaccgccgccggtgcactccgtctatttttccacgactgtcttcccaacggttgctatggttccatcctcatatcttccaccgcattcaacaaagctgaacgtgatgccgacatcaacttatctctccctggagatccatttgacctcattgttcgagctaaaacagc

SEQ ID NO: 224992 - DNA, 382 bp, Gossypium hirsutum
ctgatttttcttggttagcatatgtctcaaaggcctaacgttccccactcttcttcaatagcttttggtctccattctcatctcctggtttccagtgagatgaaccctaattccaactggtcttaatagttccatctctttctttttcttctattgattttttgtttaaacttcttttatttcctttttgaaacaaagtaattgccttgttgatttgcaagcaaattttggtaaagttcttaagtatttgagtttagatcttctttgagagtgccgctatgggagtgaaggattttgttgaaggaggcatagcctcaatcgtggccgggtgttcgacccacccgcttgatttgatcaaagtccgaatgcagctccagggtga

SEQ ID NO: 224993 - DNA, 377 bp, Gossypium hirsutum
ctcactcgccgtctcgcctctcgcttattggttcaagatctggttttgagctgagcagatcggataaaaatatcaaaacatgtttgggagagcaccgaagaaaagcgataataccaaatactatgagattttgggagtatcgaaaaacgcttctcaagatgatctaaagaaagcttatagaaaagccgctattaagaatcatcccgataaaggcggcgatcctgaaaagtttaaagagttggctcaagcttatgaggtgctgagtgacccggagaagcgtgagatttatgatcagtatggtgaggacgcccttaaagaagggatgggcagcggtggcggtggccatgaccctttcgatatcttccagtcattctttg

SEQ ID NO: 224994 - DNA, 391 bp, Gossypium hirsutum
acccttccggagaataccaaaaatgtgaattttgttcttaagagcggcgccaacgccagttcggagcaagattccggagtggttcacgtccccaggagtttggaccacttatatcttgatggtcttcatttcatagctcctcgttttatctctctttggcacctctgctggtacctcttggacatttgttcatctcgcgcatttctttgtcacatatcacttctttcactggaagaagggaacaccgtttgctgatgaccaatgtatctacaactgtttgacttggttgtagcaaatagacaatggcatgcaactgacacggcacaggaagtttttgactgttgtacctgttgtgctgtaccttatcgcctcacatacaacagattatcaa

SEQ ID NO: 224995 - DNA, 386 bp, Gossypium hirsutum
acccttccgcggaaaggttttgactgctaactttaaaggaaggccggcgtttgaagccgttggccagtcagctttgatttacttgttgctttctcaaaaggaaatgtggatggataaagtgtttctcgagaatcagtattatttgcatggttattgggcaggtttggttgataggtacgaggagatgatggagaaatatcatccaggtttgggagatgagaggtggccgtttgtgactcatttcgttggttgcaaaccctgtgggagttacggagattaccctgtcgagaggtgtttgcgcagtatgcaaagggcattcaactttgccgataaccaggtgcttaagctgtacgggtttagacatagaggattgttaggccccaata

SEQ ID NO: 224996 - DNA, 386 bp, Gossypium hirsutum
gaattttgaggtttcaattcgcccctatgtaagatattatttcggtggcacatagttagtctcctttcaagtttctcccgtctatccacatgaggcacccaaagttaagtgcaagaccaaggtctaccatccaaatattgatttggaaggaaatgtttgccttaacatcttacgtgaagattggaaaccggtgctcaatataaacactataatctatggtttatatcatcttttcacggaaccgaattatgaggatcccctcaatcatgaagctgctgcagtgttgagggataatccaaagatgtttgaatccaatgtgaggagggctatgtctggcgggtatgttgggcaaacctttttcccacggtgtgtctagctttagcaag

SEQ ID NO: 224997 - DNA, 420 bp, Gossypium hirsutum
tccggtccgccattgccgagccacgcgtccgggaaagcaagctttctgttgtctgtgagatagtactcgacaggtgcttatcaccatcgagagccaccggtgagggttgcgacaatatgaccatggtcctggtacagttcaagaaaccaatcaagtgtgcctcatcttcggaggagcaatcctcccaatccaaatcagccgacaatgaattggagatagagggaactcaagactagtagctgcaaccgttgtcggaaggatcagatgacctgcttgttttccttgaatattccgatatgcatatgtagatggcttttagaaggaatgcaattgatgacacattaagaaagaatatatgtccttttttgtttcttgtatttgaatcattaaattgtgatgtttttttttatgaaaataaca

SEQ ID NO: 224998 - DNA, 384 bp, Gossypium hirsutum
gttttgtacgataagaaaggcttatttatttggcagagttttgaccacccaacggatacacttttagtaggccaaaccctgagatccaatggtccaagcaagctggttagccgcacgtctattgccgatggctccgaaggaccttacagctttgttatggagcaaaggtttttaaagatgtactacaaaaccaagaattcaccattgcctttgctctattacaggtcctatgagtttgggaatgggcaaggttccttagcaaatctcaaattttactgctcaccagagaccgaacaagcttatgcttacgagctggggttcacatttgatatgaaaggctctactagttcaggaacctacattttgtcaaggcctaaatacaat

SEQ ID NO: 224999 - DNA, 368 bp, Gossypium hirsutum
cccacgcgtccgctcactgctcttttttttttcctctccttttagttgttgttgcttcttcatcttcattattattattattattatttttcttcttctatggccacactatgatctatcgctacgcttttgtctagttagatcttttttttttgttggtttttttcctcggcatggctgacgataaggaaatgtctacccctgttgttgaccggaacgatcccgtcaccggtcacataatttccacaactattggtggcaaaaatggagaacctaaacagaccattagttatatggcagagcgtgtagttgggacaggatcattcgggattgttttccaggcaaaatgtttggaaacgggagaaact

SEQ ID NO: 225000 - DNA, 377 bp, Gossypium hirsutum
  unsure (1)..(377): unsure at all n locations
ctttgagaagctgctgatggttgctgctggaaatagtggcgtgggagttaggatggagggagcggtgatcactgagtggaaagatattcctatggagctgctgttgagaattgtgccttttgtcgatgatcggactgctattgttgcttccggtgtttgttgtgggtggagggatgctatttgcttcggcctcacacaactcagtctctcatggtgcagaaagaatatgaacaacttggttctctctcttgctcctaaattcaccagattgcaaactctaatactgcgtcaagagtatccgcagctcgaggacaatgctgttgaggctattgcaaacttttgtcatgatatacaggagctggacctaagcnaaagtt

SEQ ID NO: 225001 - DNA, 430 bp, Gossypium hirsutum
ccgaacggaatgtccggcgccgaccgcacccgtccggagcgaccttttctttttgcaacaaattgactttcaattgatggtgaagccaatctgcacaacacattcttcagcatcacaaacagagtatgcctccgacataaacaccaacagctgcagcagtaatagcagtagcagtagcagtagttccaagtataagggagtacggaagaggaaatggggaaaatgggtgtccgaaattcgacttcccaacagccgtgagcgtatttggttaggttcttacgactcgccggaaaaagcagccagggcgttcgacgcggctctttattgtttacgtggccgtgatgccaagttcaatttccctgaaaatccaccagagatcgccggtgggacgtcgcttagcccgccggaaattcaagtggtggcagctagg

SEQ ID NO: 225002 - DNA, 390 bp, Gossypium hirsutum
cttaaacgaacattttcacagctttataacacaatatgactaaggatattgagacgcacggcggagcaaggcggcggagcggagttctcagcgaaggactaccaggacccaccaccggcaccgttgattgacttggaagaactcaccaaatggtcgctttatagggcggcgatcgctgagttcattgccacccttcttttcttgtatgtcacggtgttgactgtgatcgggtataaagtccaaaccgacccggtaaagaatactgttgacccggattgtggtggtgttggtatacttggtattgcttgggcttttggtggcatgatctttatccttgtttactgcactgctggtatctctggaggacacatcaacccggcggtgacgttt

SEQ ID NO: 225003 - DNA, 398 bp, Gossypium hirsutum
gtcgtcaaacaacgttgtcgagactatcaaccgtgattgtcacgattttaagtgtcttgtctcttcttcagacagggatttcctcgttcgcaacaacggtgatcaggttaaaatcgatagcttgaaggggaagaaggttggattgtatttctcagcatcttggtgcggtccatgccgtagattcaccccaaatttaatcgaggtgtacaccgagctctcaacgaagggcgatttcgaggccatttttatttcgccggatgaagatgaaaagccatccaatggttacttctccaagatgccatggctggcaatccctttttctgattcagaggcacgcaagcgcttagatgagccgcacagtgtgaagggaatccctcacctcgtgctcttggatgaaa

SEQ ID NO: 225004 - DNA, 393 bp, Gossypium hirsutum
  unsure (1)..(393): unsure at all n locations
ccgccccaacnccanatttaaacttatctttttccacagtctgactaagggggagaagccgactcttttttctgacacaaataagcaaatatcttcgaagcaggccatcgaggcctagttggttctgccatagttcgtaaccttcagcccttaggctttacaaacgtgctactccgaacccatgccgatctggaccttactcgccaatccgacgtcgaatccttcttcgccgatgagaaacctcactatgtcgtactagctgccgctaaagttggtgggatccacgccaacaacacttaccctgccgatttcattgccatcaacctccaaatccagaccaacgtcatcgattcctcttaccgccacggcgttaagaaaatcctcttcctcggt

SEQ ID NO: 225005 - DNA, 363 bp, Gossypium hirsutum
cccacgcgtacggatacccttgaatattcagccaaagctcatgaagctgagaagctccagttccacgctctgacgtgtcctcaatacactgtgagaggctggatgaactggagcccttgcacgtgctgcacgtgatgccctctacaacactgaagcctccaaatggtgaacttcaggcaatcaggtccttatggaattagcttgcacaaggcctgccaaccaactgcttcacgcatggcaggcttatcatgctcgttataagaagtcgctttgagaggacgttgctcatcacacgactggcgactatcgtacagctcctctacctctagtgagttcatacacatatgatggagaggaggtgaa

SEQ ID NO: 225006 - DNA, 255 bp, Gossypium hirsutum
ggaaatttgaaggaaaaaggaaatttcacttaacagatctaaacaattgtcctgtgttggaatggtgcgcggcgaaatggtggagatggtggcgcgagaaaccgacgaagagctttcattgttgccacatcagagcaatgttgatcgatcatggcggttgaacttcgatggcttccagttatccccgaacacaaagacaaaaagcctcctcgtagcctccatgattgccttggggttttaggtccggaagataat

SEQ ID NO: 225007 - DNA, 296 bp, Gossypium hirsutum
cccacacatccggttctacttccttatcggccgcccactattttaagtctcttgttttttttttatacaggtatttcctcattcgcaacaactgtgatcatgttaaaatctatagcttgaaggggaagaaggttggattgtatttctcatcatcttggtgcgttccatgccttagattcaccccaaatacaatcgaatttttcaccgtgctttcaacgaaaggcgatttcaaggtcatttttatcttttcagatgaagatgaagagtcattcaatggttactgctccaagattcca

SEQ ID NO: 225008 - DNA, 401 bp, Gossypium hirsutum
  unsure (1)..(401): unsure at all n locations
gaacggncggggggagccacgcgttctnccacactttcncccacttttccttttatcccaagaccatcgcttgnggagactgtgtatctacatttgccatcccccctaggctcttaactggtccggctgtcatggctgccgcttctattgcagtagggtttgcgcggcacactcctccgtgtcgccatcgttcatgcggctctgccacaatgaattgtaccattttttttcgccaaggaatacaatgttcaccctgctattcttagcactgtctttatcttttgggatgttgatagcattaccaataacgctggtgtactatattcttctaggattgtgagggaacttccatagtaagccacttttattaacaggagttttctcattgttgatagaattta

SEQ ID NO: 225009 - DNA, 447 bp, Gossypium hirsutum
  unsure (1)..(447): unsure at all n locations
accgggaacggaccgggctcgacccacgcccgtccgcgtgaccgnnngtggggttcgtaaccaattgtctgtgtctcactttcannagctgcagctacccgctgatgcgaaccaatcaaggtntgcttgcaccatcaanggaccaatgtgtctgtctcaggtcctcccagagncgtttctaagggccttcggtttggagcctgttggtgctaggctcacctgctctttgcaaactgacctcaaggacttggctcagacgtgtgttgatgctaccaagctcgctggtttcgctcttgctacatctgctcttgttgtctcgggagcaagcgctgaaggagttccaaagcggctaacctacgatgaaatccaaagcaagacatacatggaagtcaaaggaacaggaactgctaaccagtgcccaaccatcgatggtggtgtcgactcttt

SEQ ID NO: 225010 - DNA, 403 bp, Gossypium hirsutum
cccggaaataccggggcggaccaacgcgtccgttcaagattggaggctgcattggcagcatccaaaattagaactccaagattcccggtgatatcaaatgtcgatgctcagcctatgcaaatccgagactataaaaaaatactagcccgtcaggcaacttctcctgttcagtggggaaaccacagtgaaaaactttgctaaccaaaaggatgaaaaagagttatgaattggggcctggaaaggtcatagctggcattgtgaagaggaatggataaaagtgctgagattgagaacattggtgcttgaggagggtttttttattagttgtggctagtccaccattcatattgaataaggtgttaatgcaacttggaagttgaggttttatgaccagacatattgc

SEQ ID NO: 225011 - DNA, 427 bp, Gossypium hirsutum
  unsure (1)..(427): unsure at all n locations
ccgttccggaaanacccgggcggcccaagccttccgaaagcccttgttaactttccagcatcctattccaagtaaaaaatggttgaggagggtaaggctgtggttcccgagtcactattgaagaagaataagaggaatgaagaatgggaacttgctaaaaagcaggagcttgaagtgccaaagaagaagaaagttgagaaccgcaagctgattttctctagagccaagcagtatgcaaaggagtatgaggctcangaaaaggagttgattcaattgaagcgcgaggccaagttgaaaggagggttttatgttgatccggaagctaagcttttgttcatcattcgaattcgaggtattaatgccatgcacccaaggacaagaaagatcttgcagctcttgcgtctgagacagattttcaatggtgttt

SEQ ID NO: 225012 - DNA, 377 bp, Gossypium hirsutum
cccacgcgtccgcccacgctttcgttaacccaagatcatcgcttgtgggagactgggtagctacatttgccatggccgttaggttcttaactggtccggctgtcatggctgccgcttcgattgcagtagggttgcgcggcacactcctccgtgtcgccatcgttcaggcggctctgccacaaggaattgtaccatttgtgttcgccaaggaatacaatgtccaccctgcgattcttagcactgcggttatctttgggatgttgatagcattaccaataacgctggtgtactatattcttctaggattgtgagggtactttcatagtaagccagagatatgaacgggagttttccaggggttgatagaattgatcaaa

SEQ ID NO: 225013 - DNA, 286 bp, Gossypium hirsutum
gtttcctctgtatatcaaaattctttttctcgatgttcgctccagccaggatggacgctgttcttactaacgactctaaccggcccgaccttcactttggaggtgaaaagctccgtcacgttctacaacgtccagaccaatatacagcatggggaaagcattcctgcgtaccagaactgaatgatcttagtcacaaaacagatggaggcctgccggaccttggccgcttccaacatacaaaatgagtcgactgtccacctagacctccgttagcgcggtgggatgc

SEQ ID NO: 225014 - DNA, 387 bp, Gossypium hirsutum
cccacgcgtccgcccacgcgtcctgtaggaaactgaagccaaagctatacaaataggatctaaagatagatcaaagaaaagggtcgaagcaagttgttttgtttcaatggaagttggtcgaaaaatggctaacatgcttggaaccgagcatgatttgaacttcaaagagaccgaactgtgtcttggtttgcccggtggaatcgctgttgttgctgcaggtaatgaaacggaaagttcttcttccccaaagactaatggcaagagaggcttctctgagactgttgatttgaagcttaatcttcaatccaaagaatctaccatggatctaaacaagaaccttgatgacaacggttctaaggaaaaatcaggttctgccaaagatcctgc

SEQ ID NO: 225015 - DNA, 390 bp, Gossypium hirsutum
tcactgctcactctctttaactttcgttcatctccattattgtttcagatcgtaggatcaaaaccaaattttcgtttaatttatacatataaacacccaaaaacaaaaagggcataaaaaaaggagattcaatggggatcttctccttcaatgccatagctttggccttcttattagccattatctctggcgccgtcaatgcttgcccttcttccgaccgagaagcattgctagctttaagttcatcgttaaaggagccttatttaggcatcttcgtcatggaaaggcaccgattgttgttccaactggtacggtattagctgtgaccccaccactcaccgagtcaccgacgtttccctacgcggtgagtccgaagaccccattcttcaa

SEQ ID NO: 225016 - DNA, 435 bp, Gossypium hirsutum
  unsure (1)..(435): unsure at all n locations
cacgcccgtccgtcccacgtcgnntccggccacttactcctctataatacctnncgaaggctttaggtatgatgagaatgcgtgaaggggaagtctcttcctnnacttgaagaagggttggataccaaccctgacaaggattccattntgttcccatnttctggtttntgagggtgataaccatgattgagaggtcnntaccaacttggactggtacaaagtggccctacancttcttgaaggcttcttgaccagatcaattgagcccaagagggccttcagacaaagcctctccgtctaccacttcaggatgtgtacaagattggtggtattggaactgtcccggttggtcgtgttgaaactggtgtcttgaagcctggtatggttgtgacctttggtcctaccggtctgaccactgaagttaagtctgttgag

SEQ ID NO: 225017 - DNA, 385 bp, Gossypium hirsutum
cccacgcgtccgaagaaaaccagtcattgtttaatgttaagaatctactttgggatggtggttctgcttgggatgcttggttcagctgtgcttctaatcaagtagcacaagtgttgttaactctaccatattcattttctcaattgggcatgctatctgggattctgctacaagttttctatggaattattggaagttctttcaaggttaaggcgtgaagtggaggagcagttggaaagcctgatgaataacaaggtagagatatcatatgagaatgctatgtagtagccagcaatggtattgaagagcaaagagctgaatggtatcatgaaagtgctcgtcatttaagagtaatccttgatcatgaacaggctgtgattccaag

SEQ ID NO: 225018 - DNA, 388 bp, Gossypium hirsutum
ttttaatttagttattagggcaagtgttccgaagttggacctggatgcagttttggaacagaaaaatcatttagcgagagctgtggaaaaggaactggaaaaggccatgtcacattatgggtacgagatggttcaaactcttatggggatattgaccagatgagcatgtgaagagggcatggatgagattaatgcagcggcaagaatgaaggtggctgccaatgaaaagctgaagcagagaagatattgcagatcaagagagcagaaggagatgccgagtcaaagtatctggctgggcttggtgtagctcggcagcgataggctattgtagatggacttagagacagtgtgctggccttctctgagaatgtacctggtacatcatcaa

SEQ ID NO: 225019 - DNA, 257 bp, Gossypium hirsutum
ctttcctctgtttgcttccgtcactactcaaaaaccgtacacaaaatgggcagggatctgagcgacgagcaagtctcatcaatgaaggaggctttcactctcttcgacaccgacggtgacggcaagatcgctccatcggagctagggatcctaatgaggtctctcggcggtaaccccacccaagctcaactcaaagctattatcgctgaaaagaagctcacggcgccctttgacttccctcgcttttttgatctcat

SEQ ID NO: 225020 - DNA, 380 bp, Gossypium hirsutum
aaatattcagaatttccgtacaactttgagatgcatgagattttgggcaaaacgtcgtggtgtttattctaatgttgctggttttcttggtggtataaactgggctttgcttgttgctcgcatatgtcagctataccctaatgctttgcccaatatgttagtttctcgattttttagggtgtatacccagtggcgttggccaaaccctgtcatgctttgtgcaatcaaggaaggatctcttggtcttcaagtttgggatccccgaaaaaatcctaaagatagatatcatttgatgcctataattactcctgcttatccttctatgaactctagttacaatgtgtcatcaagtactttgcgaatcatgacagatgaatttc

SEQ ID NO: 225021 - DNA, 386 bp, Gossypium hirsutum
gttaaacgcggctttctctctatttcttttctgcagcgagttactgagtgaacgccacgatggccgaacgaatccaccccggcgactcaccaccgtcttccggcgaacactcgaattccaagccagctcctccttcttcagataaaccaattccacaacccggaacttacgtcgtccagatcccgaaggaccaagtctaccgcgttcctccgccggataactcccgccgctacgctcatctgtcgaaaagtaagtcgagtcgcagcacctgttgccgctgctgttgctgcttgttaacaactatcctctctctcctccttgccgccgccattgccgctgctgtgatctacttcgttctcaagcccgaagctccaaactactccgtc

SEQ ID NO: 225022 - DNA, 390 bp, Gossypium hirsutum
gagatattgagagagaaagaggggttacagttaaacccaaaaagaagcaaaaggaagaatggttggtgatggaaagttgttcactttggctcaagtctctgagcacaacacccccaaagattgttggctcatcatcaacggcaaggtttacgatgtggcaaaatttttggaagaccatcctggtggcgacgaagtgttattatcagcaacagggaaggatgccacagatgattttgaggatgttggacacagtgatagtgcacgagacatgatggatcaatactatgtcggagagatcgacatctcaactatccccaagaagacgacatataaacccccgaaccagccacactataatcaagacaagacatccgagttcatcatcaagct

SEQ ID NO: 225023 - DNA, 379 bp, Gossypium hirsutum
caatctctccttttagctcagaacgctcttcactctgtgtagaaatgccgttcgagaaggtacgttgagatcgggagagtcgctctcgttaactacagcaaagactacggcaagctcgtcgtcatcgtcgatgttgttgaccagaacagagctctagttgatgccccagatatggtgaggggccaaatgaactttaagaggcttcaattgactgatttcaaaattgacattcctcgtgttccaaagaagaagacactgattgaagcaatggaaaaagctgatgttaaaaacaagtgggagaatagctcatggggtaaaaagctgattgttcaaaagaagagagcatctctcaatgacttcgacagattcaagatcatgt

SEQ ID NO: 225024 - DNA, 388 bp, Gossypium hirsutum
gcgcttcttggattctgttcagtacaattctaatagcattctccgttatgagggtgtctttggaccaggatatgtgagcacaggaggaattgaaacaacaaaagaatttgtggggaagttagatcttaagcctggccaaaaggtcctagatgttggctgtggcattggtggaggtgacatttatatggctgaggaatttgatgttcatgttgtgggcaacgacctctctgtaaacatgatatcctttgctcttgaacgagctactggactgaaatgctcagtggaatttgaagttgctgattgcaccaagaaggtttatccggacaacagttttgatgttatctacagccgtgacactattctacacattcatgacaaacctgcactg

SEQ ID NO: 225025 - DNA, 451 bp, Gossypium hirsutum
  unsure (1)..(451): unsure at all n locations
aattncccgggntcgagcccacgcnnngtccgcccacgcccgtccgctttttttggaaaaacttgatatcagcnnatcggtgttgtctggaagtcgtttgggatacccattaaatttcttcgcatgaacccaaatcaatgttttaaggtacccccgtacaagaataaacttgagcttacctctcaacatacaacaaccagacttgtgagaagtccaagganctttgaaggatttaagcatgatctaagaagtcgtggactatgccttgtaccggtctcgagcacgttcccgatgacacatgagtcgacagttgatttttggacaccaacatttggaggaacatttaggtagaaaggaagagaaatggtgggaaaggggggcatagatatggaaatggaagagatattgtttataaatatttattaggaaggaatcctcgacaagttgttcg

SEQ ID NO: 225026 - DNA, 384 bp, Gossypium hirsutum
aaagaaaatgacaatatctgcttcatttttgcttgcttttaccttgctgctcactgggtgtgttttgggtcctatatctcttgtttcagccaaacatggtgttccatcttatgctcataagaaaatcgcttctaaaccttttgaagggtatcttgaaaatggcaactttgaagaacagcccaacccgactgccataaagaaaacagtactcataggagcacacgcacttcccaaatggactatcacagggttagtcgagtacatctccggtgggcctcaacctggtgggatgttttaccccgtcgctcatggcgtccatgcggtgaagctgggaaacgaggccaccatttctcaaaccatacctgtaaaaccaggggtactgta

SEQ ID NO: 225027 - DNA, 375 bp, Gossypium hirsutum
gttcggaccattagcttctttttctcatttaattctcaaagggtctccggacaggttgagcatgaaagttatctgctaatctggctcatcttctactcaaacagtttgagcatgacactgttttgataccaaaggaaacctcttggtttggatattaccccaacggggccttcaaacccgtcgttcagcctcaagagacaaagctttacagcgaggattggattggtttaaaaccttagatgatgctggaaaggtacactacgttaatgtgtcaggaggtcaccttggaatctccaaagaagacatgaagaagcatgttgtacctttcttgaaggatgaagcaccaatggcggatagcatcgaaacccatggatc

SEQ ID NO: 225028 - DNA, 378 bp, Gossypium hirsutum
agccgttttattgcttcccgctccgccgttcacagccatatttttgggcgctaagattctcataaagctctgctcgtctttggtttgtactcagcacattacatatctgtgaaaatgaagaagaaaatgatagctattggtttcgaaggatcggccaacaagatcggtatcggtgttgtaacattagatggcaccattttatcgaacccacgtcacacctacattactccacctggccaaggtttccttccacgtgaaactgctcaacaccatctccaacatgtgctcccattggttaaatcggctttaaaaacagctgagattaccccagatgaaatcgactgtatttgttacactaagggtccgggtatgggtgca

SEQ ID NO: 225029 - DNA, 389 bp, Gossypium hirsutum
caagagagctcttgcaacatatgggactcaagcactgaaagaaatgatccagagttgtatggcacaagatttttcatggaagggaccatcaaggttgtggggagaagatgttgttgagcctcggggtggctggcagtgaacctggcattgaaggagaggaggttgctcctcttgccaaggaaaatgttgccacaccctgagcataatcagaaggcaactatggataaagcttagtaacctgttttcttagacaaccaagtccaagtacctgtctactctcgatagccattggcttgaccggcggaaaacaaactgacctgccatacgtgaagtcagtagtgctatttttgagggtgaaaagtcaggagatagtatgatatatatccata

SEQ ID NO: 225030 - DNA, 391 bp, Gossypium hirsutum
cccacgcgtccgcccacgcgttcgtcgcgagaacattagaagagttgaagaacttcaaggcggccggagatccattcaccgaagaattctttcaaaattttcaatctgtttataaacaacaaatggcaatgcttgaaaaattacaacttcgtaagaacaagctcgataagaagctaaggtacatacatgcatggcggaaggtgtccagtatgatattcgtcgctacgttcgccactgttttgatatgttccgtcgtggcggcagccatggctgcaccaccggtcgcagcggctctcgcagctgcagcatcaatcccattaggttcgatggggaaatggattgattctttatggaaaaactacgaaaacgcattgaaaggacaaaaggaagt

SEQ ID NO: 225031 - DNA, 384 bp, Gossypium hirsutum
ggaatgcttcaatgcacatggaagggtgggattccatattttgttttctccttagataatcggaaggaggtatatgtagccaatttgtcaaaggaaggatcagctcggggtaagggtccggactttatgtactccttccattcaagcaagggtagccataaggaacacgggattagtgatgatgagtcacaccttgttgctaagatgaaggtaatgacttctttctcgatctgcccccaaggttctaaaatcatggagacggagttcgttttgtttagtggtaatgaaacttttaacccggaggtgcaaactctgagctataaccataggaagaatagaggtctaccgaaaaaggtagtggaagcattcaagagcagtcactca

SEQ ID NO: 225032 - DNA, 388 bp, Gossypium hirsutum
ctggaatgtccatcctgtttatagcagcaatgttgtcgttcaaggattaacgatcctcgcaccagtaacttctccaaacaccgatgggatcaacccagattcttgcacgaatacccggatcgaggactgctacattgtttctggagacgattgtgtagctgttaagagtggctgggatgagtacggtatcaagtttggtatgccaacgaagcagctagtgatcagacggctcacatgcatttctccattcagtgcagtgattgcactaggcagtgagatgtctggcggaattgaggatgttagggccgaagacataacaggcattaattccgagtcgctgttaggatcaaaaccgctgtaggaagaggaaactatgtcaaggacatat

SEQ ID NO: 225033 - DNA, 392 bp, Gossypium hirsutum
  unsure (1)..(392): unsure at all n locations
agccttccggaaggccagtttgcaacttttttctattccctctcgaaccgtggaaaagggacccctgccttgttaaaaatcactggtttggctgttaatgggggggataaaaggttgaagccggtgggttttaagctgagtctagttgctgaaccggtcggagttcgtttaaaaatttaatgtggtaccgagtcttaaactcagcgatctgagtcgagagtcactcggctgcgaactcgacgagcctttggctgtcaatctcgcgttcaagctntatcgaatgccggacgagagcgtatcagtggaaaatccgagagacgagcttctccgtcgcgtgaaaagattggcgccgtgcgtggtaacgatagtggaacaagagattaacaccaata

SEQ ID NO: 225034 - DNA, 394 bp, Gossypium hirsutum
aaaagaagaagattaaggaggtgtcacatgagtggtctttggtgaacaaacagaagcccatctggatgaggaagcctgaggagattaccaaggaagaatatgctgctttctacaagagccttacaaatgactgggaagagcatttggccgtcaagcacttctcagttgaggggcaacttgagttcaaggctgtcctctttgtccccaagagggctccttttgatctctttgatacaaggaagaagcccaacaacattaagctctatgtgagacgtgtctttatcatggacaactgcgaggagttgattcctgaattcctcagctttgttaagggtattgtcgactcagaggaccttcctttgaacatctcaagagaaatgttgcagcaaaacaa

SEQ ID NO: 225035 - DNA, 393 bp, Gossypium hirsutum
cccacgcgtccgcccacgcgttcgttcacgcgtccgaacggctccgtatataccaggcgatgactcgacctgtagaggatttctaccgcagtcgtgggaagttgttagaatttgatcttctgggaggaatcccagaatcatggccaaagctgctctgtgctttgaatcttgaagatcgcgaggacaaacagtccgcagctgcataatgtcttgcatagttgtatcatctgaagtaattgcagagaatatgtaaattaggtaagttattgtttgggagatgcggggcattgtgttctttaagctaactataatgttttgctttgaaactagtatatgtatatctgcttaatgccagtgccaattgtcattttgctgtatatttgtggtatgtcg

SEQ ID NO: 225036 - DNA, 260 bp, Gossypium hirsutum
gtcataataattggaacgatggattaacaattgctgaaaagcttgtcaaatcagagaaagagggtggtgattggtggtatgcagaagttgttatacctgatggagcccttgtgttggattgggtctttgccaatggaccacctaaggctgccactctctatgataacaataatcgtcaagacttccatgctattgtccagaaaagcattcctgaagagcagttctgggttgaggaggaacaccgaatatttgagaagctt

SEQ ID NO: 225037 - DNA, 396 bp, Gossypium hirsutum
cccacgcgtccggttccacagtatctcactttactcagctacaatatctctctttggcggttcacttgttccttactacctagaagagactgcaaactgggggctggacgtaaacaatcttcgtgaatcagttgcacaggctcgcttcaaaggattacctggggaagcatgggtattattaaccctgggaaccctactggtcagtgtctcagtgaagctaatttaagagaaatattgaatttttgttaccaagaaaacttggtattacttggagatgaggtttaccaacagaatatataccaggacgagcgcccctttatcagttctagaaaggtgttgatggatatggggccaccaattagcaaggaagtccagctcgtttctttccacactgtg

SEQ ID NO: 225038 - DNA, 397 bp, Gossypium hirsutum
cgcattcttctaaactcatgacttcatcggtcggtggcggaggcagatgcatggcctgctctccgtcgccttccgcccctcactctccccatctatccggccttcgctccgcagccgccgctctccttgaccaagagaaatatctctcggagttactggcagagcgttacaagcttagtccatttatgacagtgattcctcatacctgtagactgttgaaccaagaaattttgcgtataactacactgttggggaatgcatcagttttaggtcaaaatgggcttgaacaagctagccccctggtttctggaggaacattttcaaatggaggagccgatatgaacagatggatgtcacagtttcaatcagaaatgcctgggttagtacaaccctcttt

SEQ ID NO: 225039 - DNA, 421 bp, Gossypium hirsutum
  unsure (1)..(421): unsure at all n locations
ccggaacggaagggncggcccacgcgtccgcccacgcgtccgattgtgcatcatttgctttacaacctcttacatcccctgggaggcggatcttgggtgtattacttaatcgcatggcttgccactctagccctcatccttctattcctaccgtttcgtccccaaaaaaaactcaacttgccccctggcccaaaaccacagagcccgaattgggaaccttgaccacaccggttcactttccgacagatcaatacattccctctccgaaaaatatggtgcactcatgcaactcacagaccgatcgttccctgaaggcgtggcctactctgctgaaatggccaaagcctttcttaaaacccacgaagctatatctgctggtcgacccaagatcgcggaacgagagtacactgctcacaattac

SEQ ID NO: 225040 - DNA, 379 bp, Gossypium hirsutum
ggacgcgtgggctggtctggatcagaagcagataaacaactggttcattaatcaaaggaaaaggcactggaaaccatctgaagatatgcagtttgtggtaatggatgctgcccatccacactattatatggacaatgttttgggcaatcccttccctatggatctctctccaacgcttctctaaagaaaaaaatgtatgtgcttctatattgctgctgcatttacatgcaaagctgtcatataatgtatttgatggaagtatatttatagcatcgtattatcgtatgcatgcatacctcgtgtatgcggttctaggctatttattatatgttattaatctgtgactgttaaaatctaatatatatatatgtgtttttga

SEQ ID NO: 225041 - DNA, 349 bp, Gossypium hirsutum
atcataaaaattccaattataggaaaatttcctaagaaaataatttgccacgtcacctcgaatatggccgccaccgccacaagcaacgccacattccgtcttggcaatcccctttcctcttcctcttcctcatccgtttactcctccaataaattgcctgtcaatttcagaaaatttgcgcttcagacgtcgcctgtgaaaagcttttctgtttcttgtactctaactagaaaaccagtcccagctgctccggtttccatggattcggacccgaacggatggcgacgacccgactcgtttggtcggtttggcaaatttggcggcaaatacgttcccgagaccctaatgt

SEQ ID NO: 225042 - DNA, 371 bp, Gossypium hirsutum
cttagaacaaaaagcatcgcaattttcagttttacctgaaatttcagcttacgaacttgttttacctgaaaatttgaatttttagcatcggaaaagctttcaattttcgttatggaaatgcacccaagtacgattgattccgatttaatgatgctggactcaattcggagacacttactcggcgaatcatccgacttgcgattcacttcttcaaatgactgtgccaacgtgggcgcggctccccctatgttttgcaggagctccagctttagccgcttgtacccttgtttgactgacacctggggtgacctcccactcaaagagaacgattctgaagacatgcttgttttcgggtaccttagagatgcttt

SEQ ID NO: 225043 - DNA, 394 bp, Gossypium hirsutum
agccttccgaggatttaaacctcgcagctcgcacgctctcatcattttcctccgggaccgggggggttcccaaacaccttctttccgagaaaaaaaaagctcaagagagaagaccatggccgatcaacttacggacgatcagatctctgagttcaaggaggctttcagcctctttgacaaggatggcgatggttgcattactaccaaggagctggggactgtgatgcggtcacttggtcagaaccctactgaggcagaactccaagatatgatcaatgaagttgatgctgatggaaatgggaccattgattttcctgaattccttaacctaatggcaaggaagatgaaggatactgattccgaggaagaacttaaagaggctttcagggtgttt

SEQ ID NO: 225044 - DNA, 382 bp, Gossypium hirsutum
  unsure (1)..(382): unsure at all n locations
agctagctaaggcggaaaagcttctttctcctaaagaaacgttaaaagtgaagaggagcgagatagagagggcaaagcaaagatgcagagagtgaaggctgtattaaaagctaggcattcatttcaaagacttgggatcctctctcatcaaagatgtctctctgctcagcccaactatgctctatatgatgatttcgaggaccaggttttagtggaaggaagagctaaatcaagagcagcaattctcaacagaccttctgctctcaatgcacttaccgcctcgatggcagctcggctgaagagattgtatgaatcatgggaagaaaaccctgatattggttntgtcttaatgaagggcaatggcagggctttctgttctggg

SEQ ID NO: 225045 - DNA, 391 bp, Gossypium hirsutum
ggccccaaccctttttaacctaatatttcattataaaattaatcaagttttctaagcccaataccacctgcttctttcgagacacacacatccttccacgcacaccaatgaatccccttcttcccctgattttcccccaccagaatttagctattataccttccaactcattacataaagacttaggaagtaagaaacacgccatagaataagttggaatggattgtaatactttcttaatgaaaacctcttttccacattgagaaagatacttaacactccaattgtcaattctttgttttaatctgtccttcggactttgaaaagcttctttcttgcttctacccactaaatttggaagtcctaaatacctttctggattatttgaact

SEQ ID NO: 225046 - DNA, 372 bp, Gossypium hirsutum
  unsure (1)..(372): unsure at all n locations
aagcaacctctggaacccctggtcatttcaaaccccattcaattcatttcccttttgtgtataaggtaaacccagaacaagggaaccccaagaaaatgaatccctcagataacagtgaccaccctcagcttccaacgatcaagatccaccacccatcattccctcaccatcccaccttcaccggtactcccaccgncggtgcccgccgtaaaatcggtgtagccgttgatctctctgatgaatctgcttttgccgtccgttgggccgtccaaaactacattcgagccgatgatgctgtcgtcctcctccacgtgtcttcaaccttcgtactatttggagccgattggggccctcttccccacattctacaaa

SEQ ID NO: 225047 - DNA, 380 bp, Gossypium hirsutum
gactttaatctccacgccttctttctcattacttcattacattcccaagagaagaacccatagccaaaaaaaaatggccaaattattgctgttcattgcactatttgtggttccatgtcttgttagtgctacacgcatggtgaagaacccgttggtggttcaaggtcaagtttactgtgaccattgccgtgctgggtttgaaacaccaaagactagaaacatggctggtgccaaggttaaggtggtatgttccaaccggaagaccggtgatgtcgtgtacgagaaggaaggacacacggactcaaccggacaatacatgatcgctgtctccgaggatcatttggatgagatctgtgacgctgttctcgttaagagctcgc

SEQ ID NO: 225048 - DNA, 338 bp, Gossypium hirsutum
aaaaaaattaaggtaggaagttcccttgtcttctactcggtgtcggacttcaatgcatttcatttcatttcatttcatttatctgcaagaaagaaggaaatagaattttcctctttcttgttttgtgaattcttgagaaatggttgatgtaaccgataaattggcatattttcaagccaccacgggactcgaagatcccgatttgtgtaccgaaatccttcaggcccatggttgggaccttgaactcgccatctcttccttcacctcttccactcaaccctccgcttcttccactgtctctgattccgaccctcccgattcacgggcccggactgatt

SEQ ID NO: 225049 - DNA, 380 bp, Gossypium hirsutum
aacagccaattactcttcagtcttatccgatcttaaaccatgggtcgcgttgggacaaagacggtgaagaaatcgtcccgtcaggtaatcgagcggtactattctcgaatgaccctcgattttcacaccaacaaaaagattatcgaagaagtagctataatcccatccaagaggctccgtaacaagattgccggtttctcgacccatcttatgaaacgtatccagaaaggaccagttcgcgggatttctcttaagcttcaagaagaagagcgcgagcgtcgcatggattttgtccccgatgaatcggccatcaaggtcgaccaaatcgaagttgataaggaaacacttgatatgctttcggttattggaatgggtgatat

SEQ ID NO: 225050 - DNA, 383 bp, Gossypium hirsutum
  unsure (1)..(383): unsure at all n locations
cttgctttcaaaaggcaagtggagcttgaggagatatttgcccatgctcatgtggacatagatccagaggctgctagggagaaaattatggctctgattgattccgggaatgttgagcctgctgagttactagctgacatggataatcagatagcaaaagcgaaagaagaagcccttagcaggaaagaaatattggatagggttgaaaaatggatgtcagcttgtgaagaagaaagttggcttgatgactataatcgggatgataacagatacaatgcaagcaggggggcacatttaaacctcaagcgtgctgagaaagctcgtattctggtaaacaaaattccaggtatggttgacactntggttgccaaaactcgagcttg

SEQ ID NO: 225051 - DNA, 385 bp, Gossypium hirsutum
cccacgcgtccgctctgtaccggttagaaaggcgtcggccgcagcggtaaggggctccactacaaaggctcctctttccatcgtgtgatccctaactttatgtgccaaggaggtgacttcaccgccggaaacggtaccggaggtgaatccatctacggatccaagttcgctgacgagaacttcatcaagaagcacactggtcccggtattctctcaatggctaacgctggtcccggaactaacggatctcagttcttcatttgcacggctaagactgagtggctcgacggaaagcacgttgtgtttggacaagttgttgaaggcatggatgtggtgaaagccattgagaaagttgggtctagcagtggaagaacttccaagcccg

SEQ ID NO: 225052 - DNA, 391 bp, Gossypium hirsutum
tcggccaccccttccgcaatttttaaatttttaacccaaaaccaccatgccatatccgagaatcgtcttccccctccaaattggccttcccatggcaatgttgagctcaaagacctccaggttagataccttccaagcacgcctcttgtgcttaaaggcattactctgagcattaatggtggtgaaaagattggtgttgtgggtcggactgggagtggaaagtcaactttaatccaagttttctttagactggttgagccaacaggagggaaaataataattgatggcatagatatctgcatgctgggacttcatgatcttaggtcacgctttgggatcatccctcaagaacctgtcctttttgaaggaactgtgagaagcaacattgatc

SEQ ID NO: 225053 - DNA, 390 bp, Gossypium hirsutum
tcggggttttcttggtctttttttacatttatcaaaggggggctctgagatcacataccaaaatggtgaaagccgttgccgtccttagcagcaatgaaggtgttagcggaactgttttcttctcccaagaaggagatggtccaactaccgtgactgggaacctttctggtcttaaggccggactccatggcttccatgttcatgcccttggggacataactaacgggtgcatgtcaactggaccccattttaatcctgctggcaaagagcatggtgctcccgaagatgagaaccgccatgctggtgatctaggaaatgtcactgttggtgatgatggctgtgctagcttctccatcaccgacaaacagattccactcacaggcccaaact

SEQ ID NO: 225054 - DNA, 387 bp, Gossypium hirsutum
ggtttggcttaagcttggggccttttttaaggggttggatgtttccttgtttggagcctgtgttgttttgtaatagaatcattgcttttgaggggaatagcacgtacttgctgtgattaagtaatgaatctgcaaggaggcaagtcagatggaccataatctcaaatcaagcgatgtgcatccataattcatttcgtactggattccatttgcttgaggaagctcgctaatatgacttactgtcacatttgttcctttcagccaatggaaatttatgtggacgacgaggccaagttgacccttcatggtcttgtgcagcactacatcaaattgagtgagctggagaaaaaccgcaagttgaatgacctccttgatgcattggacttc

SEQ ID NO: 225055 - DNA, 390 bp, Gossypium hirsutum
atcgatcactaaccaaacccaccttttttttacccctgcccaaccacgtcctccagactgaatccaaggactcgaacctagtgttctcgcccctgtcgatccatgttgtgctcagcttgatcgccgctggtgctaagggtccaaccctcgaccagcttctctctttcctcaagtccaaatccaacgaccagctcagctccttctcctccgaggtggtttccgttgtcttcgcggatggaaatccagccggtggtccccgattgtcatttgcaaacggcgtttggtttgaccggtctctccctctcaagccttctttcaaacaggttctggacaacgtctacaaggctgcttctaagctagtcgattttcaaaacaaggcggttcaagtgg

SEQ ID NO: 225056 - DNA, 363 bp, Gossypium hirsutum
  unsure (1)..(363): unsure at all n locations
cccacgcgtccggaggacaacatcttcttggttttcattgttgacatccgtgggtacaagaagaagattaaagatgctgtgaanaagatgtatgacattcagacaaagaaagtgaatacgttgatcaggcctgatggaaccaagaaggcgtatgttaggttgactccggattatgatgctttggatgtggcaaacaagattggaattatctaagcagatcaaccaatgtcttccttgctttcaacagttttgttagaacgattaactatgttaggactctntattttcgtgtctgcattatatgtgtaaggaactatgtttttcctacttaaagtctgcatgggatttggtttagggatttac

SEQ ID NO: 225057 - DNA, 325 bp, Gossypium hirsutum
  unsure (1)..(325): unsure at all n locations
gcttctcaggggggacggtgccctgagtggctaagtacttagctgagaacaagcaaatttctcgtgtacttgtgtgctncctcaagattactgctgttacctttcgtggacctagtgacactcacctagacagtcttgtgggccaagcatttttttttgatggtgcctcagctgaatataatcggtgcagaccccttgcccgaaatctagaaacccatgtttgaactagtctcagcagccacaaacgatcttgccagatagtgatagtgctattgatgggcaccgttcgtgaagttctcttacattacaccttcttaaggatgtt

SEQ ID NO: 225058 - DNA, 286 bp, Gossypium hirsutum
gggaaaaaaaagccaaaccccagttgaaaagagtccaggaaagaaatttaaagtcggtttggttccggtttttcaagctttgttcgtaaaattttgtgtttaagtaacccattgactagcattatggatgcagaccatgccaagtttagcatgattaatttcgaagagacggagttccgtttaggattacccacaggcattgaaaatgataatgaaaccgcccaaaataatgggaaaagagggtatttcgatatggttgatttgaagcttaacctttcaacaacaa

SEQ ID NO: 225059 - DNA, 387 bp, Gossypium hirsutum
  unsure (1)..(387): unsure at all n locations
ctctctctctctctctctctctcttcccaaatccctcccaccctccaccccgtgcgaaaatcctctaatggaatccccgcctccgccacccgcggcagctcctcctctttccaccaccaccaccactactgcagccgccaccgctccccccgccacctatcccgactccatagactcttcccctcgctcccgcaacacggactcatgggacgaccctgctcttcccactacactccacccaaagctccgcctcatgtgcagctatggtggcaccatcgtccctcgcccccatgacaaatccttatgttacgtcggcggtgacactcgtatggttgttgttgatcgccacacttncctcgcttncctacaccaccgnctctccctttc

SEQ ID NO: 225060 - DNA, 388 bp, Gossypium hirsutum
  unsure (1)..(388): unsure at all n locations
gggaccccttggccaaaacctggttttgatctgatcagatcgtataaaaatatcaaaacatgtttgggagagcaccgaanaaaagcgataattccaaatactatgagattttgggagtatcgaaaaacgcttcccaagatgatctaaagaaagcttatagaaaagccgctattaagaatcatcccgataaaggcggcgatcctgaaaagtttaaagagttggctcaagcttatgaggtgctgagtgacccggagaagcgtgagatttatgatcagtatggtgaggacgcccttaaagaagggatgggcagcggtggcggtggccatgaccctttcgatatcttccagtctttctttggtggcaatccttttggtgctggtggaagcag

SEQ ID NO: 225061 - DNA, 385 bp, Gossypium hirsutum
  unsure (1)..(385): unsure at all n locations
gccacnccttccgttgaaatagggtttttgcccctttgctaccacttcgccgncgcgactctgccatccaactggtacatgaagcaaccttttttccagtgctcaaccattgttagctaaagctgctaaacactttgagatttgaggtgtatttgattacggatattagatatgtttaacattacaacaaccttctgcaaaaggataagcgtgaaggagctagttaccagcgctcctgtgtatggcacaatcacggatggatcttctggcttaagtttgatgcttaggcggtgggctagtaaaaaaactgctggatcaactaagaatggaagagattcaaaacccaagaatcttggggtgaagaagtttggtggcgaggtcagtg

SEQ ID NO: 225062 - DNA, 197 bp, Gossypium hirsutum
  unsure (1)..(197): unsure at all n locations
tttccccccattaacctctccaaaatgaaggtggtgaggctatccattgcacaantattgacggtgatatcccaaaaacagaaggctgctttgagggaagcttataagaacaagaagtttttgcctcttgatctccgtcccaagaagaccagagctattcgccgccgccttaccaagcaccagcaatctttgaaaac

SEQ ID NO: 225063 - DNA, 376 bp, Gossypium hirsutum
gggcccacgccgtcggccaacccttccgccaacccttccttctatcttccggtccaaaagtgttaagcagacgcttccaatccacgtttccttcactcaacttcaaaatctacatattccgggaagacgcggtaatcaacttaatctcgtcttcaatccggcaagccctggaaaacccactcaactacgctcgaaattacctcggagacatcctagatctctgcgttgaccgagtcatttatctcgactcggacttggtcgtggtcgacgacattcacaaactctggaacacagccctcacaaactcacgcgtcatcggcgcacccgaatattgccacgccaacttcaccaagtatttcacggacgggttctggtc

SEQ ID NO: 225064 - DNA, 383 bp, Gossypium hirsutum
gtctgttttcattgattaatcaaatatatatatttgtttctatttccggggtgtaagggaaattctaccattgttgccaactcaattgacttttaatatcgtcaagagtgaaagggtcagagaattataatccttgctttgaattgttcattgttgggaataagctgaaaacctaactgggaattagaattttagtgtttgtttgttaggtggggagatgacgctagagtctttacctgggagttcagggtatctggatttgtttccagagagacgaatgtcatatttcagtaatccttatgttttaggacttactgtaattgctggaattggtggcttgctctttggctatgacacaggtgtaatatcaggggcccttcttt

SEQ ID NO: 225065 - DNA, 385 bp, Gossypium hirsutum
ccggccacttggccccaactgttgtattcgtaaagcgtctcatccatcacgatgatcgaattttggttactattctttccattgagtggcattcttcgggtttcgccgatgcctacaccgaatcgcttgctactttgcaatctgatcgaatccaggtaattcaggtttctcgggtagatcctcccccgttacatctttggaccttggcacccgaagcttttgtctatgcattaattcagagctacatccctcatgttagaaatgctgtcacaaatattttgtctatgaaatccacttcggattcaacccgagttgcaggcttagttcttgatctgttttgttcgcccatggttgatgtcgcaactgaactcggtctttcttctta

SEQ ID NO: 225066 - DNA, 390 bp, Gossypium hirsutum
ggaacatttcaaatttttttaactgtttttaaccgccccatggatttggccactgtgaagaagaggataacttcagggcactattcaaatcctttggactttgctgcagatattcgccttacattttctaatgcaatgacatataacccacctggaaatgatgtcaacttcatggccaagacactaagtaaatattttgaagtaagatggaaagctatagaaaagaagcttcctgtaacgaaaaatgttgatgctgtgccttcaacagcagctgcacctatagaaggtgaaacgaaaagtaatgttttacctttgaaaaagaaaaaaattaacccaaaagatgctatggacaagccagagcccatcagacaaatcatgaccgattgggag

SEQ ID NO: 225067 - DNA, 388 bp, Gossypium hirsutum
gtgtctactttcgagattcaaggtttttattttaacctttggtcccgggaaagcgttagccttgaatttcccttatgtattgcatcacatgccagacgagagcgtaaccatctcgaaccacagagaccgattgttgagattggtgaagagtttgtcccccaaagttgtcacacttgttgagcaagagtctaacaccaacacatccccctttttttctcggtacatcgagacacttgattattacacagctatgttcgaatccatagacgtagcttgtccaagagatgacaagcaaaggatcagtgcggaacagcattgcgtggctcgggatattgtgaatatgattgcttgtgaagggcaagaaagggtggaaagacacgaacttctc

SEQ ID NO: 225068 - DNA, 388 bp, Gossypium hirsutum
taaacggcaaatttcttctcatacattgtcatgatgtcgttagcttcaattcagggatccatttctaggaagcaatatgatgttttcttgagttttagaggtgaagatacccgctggaacttcacggatcatctctatcatgctctaaggagaagtgggattgtcactttcaaagatgatctaaagctggaggcgggtgaagagatcagaccaggaattctcaaagcagttcagcaatcatggtgctcggtaatcgttttctcggaaacttatgccttttcaggttattgcttggaggagcttgctgagattgttaaacaaagaaaaaatggtcataaagtgtttccaattttttacaatgttgatccatccgattttaaaaatcaga

SEQ ID NO: 225069 - DNA, 384 bp, Gossypium hirsutum
aacagccaagataagattagcacctccaagaagaacaagaagaaaaatcaggtgttgctggaggggtacgtggaggcggttgatgaggaggatgaactgaagaggacaaagagcttgaccggtgatgatctagacgaactaaaggggtgtttagatctggggtttggcttcagctacgaggagattcctgagctttgcaacaccttgcctgcacttgagctatgttactctatgtctcagaagtacttggatgaccaccagcaccatgcatctccagacaccaccgctgcccccgaacccgtcgccaattggaagatctctagtcctggtcagtcttttctcttttttaccatctttctttggtttatttttctatttgccatc

SEQ ID NO: 225070 - DNA, 385 bp, Gossypium hirsutum
  unsure (1)..(385): unsure at all n locations
cccacgcgtccggtggtggtgcattttccggaaaagatcctaccaaggttgaggggagtggtgcttacattgttaggcangctgctaagagcattgtagcaaatggccttgcccgaaggtgcctcgtgcaagtctcctatgcaattggtgtgtccgagcccttgtctgtcttcgttgacagctacggaactggaaagattccagacaaggaaattctccaaattgtgaaggagaacttcgactttaggcctggcatgatcacaaacaacctggacctcaagaggggtggcaataaccggttcttgaagacagctgcctatggacattttggaagggacgaccctgacttcacctgggaagttgtgaagcccctcaagtgggacga

SEQ ID NO: 225071 - DNA, 390 bp, Gossypium hirsutum
cggccaaaactatcatggatgaaatgttatactgtataaatggagaaaacatacgtgatggcactcccacaaatccatgtgcaccagatagagtacctggaggatcttccagtggctctgctgttgcagtaggcgcagggctcgtcgacttctccttaggatccgacaccggaggaagtgtgagagttcctgcatcatattgtgggattctcgggtttaggccttcacatgatgccattagtacttctggagttattccaatggctcagagttttgatactgtcggatggtttgctagagatcctgcagttttaaaccgagtcggacgtgttctgctgcatttacctaatgtcaaccctgtcagacctagtcagatttttattccagaag

SEQ ID NO: 225072 - DNA, 388 bp, Gossypium hirsutum
tcgggtttggaattcattattggaagcctttatgaccgttgtgaatgccccttgtggggcggttggagttactgctttgcattctgctgttgctggtggttcggattcttcggttgagattgtcaagttgttgcttgatgcatctgctgatgctaatcgtgttgatgctaatgggagcaagcccatcgatctggttgtgccggctttaaaatccttgagtagttccaaaagaaaggtgatcgagttgttgctgaaaggtgttagtggctgtgttcttaacgagaaggctgaatcagaaaagacggtgttgcctcagttgtttaaagaagggtctgagaagaaagagtatcctattgatgtatcgttgcctgatatcaacaatggtatc

SEQ ID NO: 225073 - DNA, 383 bp, Gossypium hirsutum
agaagctcctgtgattggtgcctttaaccctaagaagggtgacatcgtcctggctcagtttagtatggataattcctggaatcgtgcaatgattgtcaatgcacctcgaggaggagttcaatctcctactgacaactttgaagtgttttatattgattatgggaatcaagaggaggttccatacagtcaattacgacctcttgatccttcattatcagcgtctcctgggcttgctcagctatgtagtcttgcattccttaaagttccgagcctggatgatgaatttggtaccgaagctgctcagtttttgagtgagcagacaatgggaagctcactgcagtttactgctatgatagaggaaagggatgtttctggcggaaaag

SEQ ID NO: 225074 - DNA, 386 bp, Gossypium hirsutum
atttctttttttcttttagggttatttagttttagtgaaggaaaaaataagtgtagatcatgtttttgttcgattggttctatgggattcttgcttccctcggtctatggcataaagaggccaagatcttgtttttagggcttgataatgctggcaaaaccacgctccttcacatgctcaaagatgagagattagttcagcatcagccaacacagcatcccacatcagaggaattgagcattgggaaaatcaagtttaaagcttttgatttgggaggccatcagattgctcgaagagtttggaaagattactacgccaaggtggatgcagttgtttacctggtagatgcttacgacaaggagaggtttgctgagtcaaaaaaggag

SEQ ID NO: 225075 - DNA, 385 bp, Gossypium hirsutum
cccactcgtccgcccacgcgtcctttccccaacgtataatcttctctgttgacgatacacccattagagagttcaaaaacatggaatcatttggtgtcccgtttcctaagaaccagccgatgagaatttactctagcttgtggaatgctgatgattgggccacaaggggtggtttggttaagaccgactggactcaagctcctttcactgcctcttacaggaacttcaatgccgatgcttgtgtgtggtccaatggggcttctttgtgtaaatcgaatgcttcaccatcttctgcatcgacaaacagtgcatggttctctcaagaaatggattcagctaagcaacaaaggttgaaatgggtgcaaaagaactacatgatatacaa

SEQ ID NO: 225076 - DNA, 391 bp, Gossypium hirsutum
tcggccaacccttccgtttttttggtggtccaaatcatgaccactctcgtgaccggtgtgtttctcctcctactatccgtcgccggcgtcgtctccgctgctagatatatcaccggtgatgtcctccggttaccttcggaagcttcaaggttcttccaatggaggagcgatgatgatgaagttggtggcacaagatgggcggtcctgattgctggatctaatggatattggaattacaggcatcaggctgatgtttgtcatgcttatcaactcctaaggaacggtggtttgaaagaggaaaatatcattgtctttatgtacgatgatatcgctttcaatgaagaaaaccctaggcctggtgttatcattaacaatcctcatggcgatgatg

SEQ ID NO: 225077 - DNA, 409 bp, Gossypium hirsutum
  unsure (1)..(409): unsure at all n locations
acccccggggcgacacgcgttccggcttatataanctttggttccggtttccactccaaccaaaactcggggcctggggcctgtcaaagctgcagaccttacatattgggaaagtgctgcccgcatgatcgcggacgtatcgaaatctgacaagattgttgttgagaaatcaacagtccctgtcaaaactgctgaggcaattgaaaagattctcacccacaacagcaagggaatcaaattccaaattctttcgaacccagaatttcttgctgagggaactgcaattcaagatctttttaatcctgatcgtgttcttatcggaggccgggaaaccccagaaggcaataaggctgtccaagcattgaaggaggtttatgctcattgggttcctgaggagagaattcttacc

SEQ ID NO: 225078 - DNA, 387 bp, Gossypium hirsutum
cccacgcgtccgcccacgcgtccgttcacgcgtccgcaaagtctcaccagggtgaaaatgagttttgggcagagattgagatgctctctcagcttcgctacattaaccttgtgtcgcttataggttattgtaacgaaaaacaagagatgattcttgtttatgattatatggtgaatggaacccttcgtgatcacctctataaaaacgataatattcctctccaatggaagcaaaggctgcaaatctgtattggtgctgctcgtggattagagtaccttcattcaggtgcagtccagagaatcattcaccgagatgtgaagactaccaacattttgttggatgagacatgggtggctaaagtctcggatttcgggttatcgaaaatgg

SEQ ID NO: 225079 - DNA, 388 bp, Gossypium hirsutum
tgtcaatatagctgtgaagcaagctttccatattctgcatgaacagggaatcgccatggctcctctctgggattctttcaagggccagtttgttggagttcttagtgcactggactttattcttatcctaagagagttggggaatcatggttcgaatttgacagaggaagaattagagacacacacaatatcagcttggaaagagggaaaggtgcatctcagcagacaaattgatggcaatgcaagttcataccctagatgtcttgttcatgctgggccttatgattcgttgaaggatgttgtgctgaagattttaagaagtaaggtggcaatggttcccatcattcattctgcttcacaggatggttcatttccacaactgctaaat

SEQ ID NO: 225080 - DNA, 376 bp, Gossypium hirsutum
  unsure (1)..(376): unsure at all n locations
accactcgtacgatttttttcatttaatcccacagccatctcataatctgaagcgagtgtcagaagcctgaaaacnaaccctaaacgacgggtcacggaacacctggcggtatgaataggcaaggcttcccaggggaccggaaacccgatggctctgataagaaggataagaaatttgagccagcggcgcccccagccagggtggggcgcaagcaacgaaaacagaaaggacctgaggccgcggctcggcttccgactgtaacgccgctgacgaagtgtaaactgctgttgctaaagctggagcgggtcaaggattatttactgatggaagaagagtttgtggctaaccaggaaaggctcaagcctcacgaagaga

SEQ ID NO: 225081 - DNA, 389 bp, Gossypium hirsutum
  unsure (1)..(389): unsure at all n locations
gccacccctncgttcctattttcacttttttcaatccctaccaaaagccgccccgganactttttattttttttcccctcaactgtttcaactcaaagaaatggcggaggaaaagaaggctcaatctgctggggtttggcctacggttaaaccttttgtcaatggtggtgcctctggtatgcttgctacctgtgtcatccaacccatcgatatgatcaaggtaagaatccaactgggtcaaggatcggcagcaactgttaccaagaacatgcttagggaggagggtgttggtgccttttacaagggtctatcagcaggactgctcaggcaagctacatacactactgctcgattgggatcattcaaaatgttgacaaacaaagcaattg

SEQ ID NO: 225082 - DNA, 390 bp, Gossypium hirsutum
  unsure (1)..(390): unsure at all n locations
cgccctcntgcttaccggttctttttttatcctccagggccggccccgggggggcgaaaaagatatgtttgatcctttgtctccaacaaggagcctgaacatgatggatcaagtcaaggggaatcgatttctctccacatcccgtgacattccagggcttgggagcgaggccaaagaatcaaaccttcgcccgttatctcctcatcttcctatttataagccacaactttctgcgactctttcaattaccaataggatctccggggttttcctaactactgcacttttgttctcttatcttctttctctgaaaatgggttcaatttgcttcacctattcgaatttctaccaattcttcttttattcagcaaagcttgccccagttaccgt

SEQ ID NO: 225083 - DNA, 386 bp, Gossypium hirsutum
tcggccaccccttccgtttgcctccgttttttctcctctctggggtttttcgtttttcctagttctgctctgctctcttgttcctttttttccctctctttttggtattttggtttgattgaatcgattatgtcgaagaacattctggtgaccggaggagccggttatatagggagccacacagtgttgcagttgcttttaggcggatacaaagtggtcgtcgctgataatctggataattcctccgcggttgctatcaaaagagttgaagaactcgccggtcaattcggcagaaacctttcttttcgccaggtggaccttagggatagatcagtaatccaaaaactctttgctgagacaaagtttgatgctgtgattcactttgc

SEQ ID NO: 225084 - DNA, 383 bp, Gossypium hirsutum
tttgggagctcttggtttatatttttcagggctgttctggtagccacattgtgtctagcagctgcacaaaaattgtttctcaatatgcttagaagtgtttttcgagctccgatgtctttttttgattcaactccagctgggcgtatcctgaaccgagtatctattgatcaaagtgttgtggatcttgatataccgtttaggcttggtggttttgcttcaacaacaatacaacttcttgggattgttggggtgatgacggaagttacttggcaagttctgcttcttgttatcccgatggctgctgcttgcttgtggatgcagaaatactacatggcttcttcaagggaactagtccgcattgttagcatccagaaatctccagt

SEQ ID NO: 225085 - DNA, 389 bp, Gossypium hirsutum
aagaaaagagcttacggttttagtgttctgaaaactgagggagagacagcgattatggcttcatcaagactgtttggcaggtgcggcggattgttagaagcggcgaaggctttctctgcttccttcgcttcttcgtcttcttcttcttccagtggaaatggaagggggcttatgcgggtgatacctgtctctccacagctggccaagttccttggagcctcccaagcttctcgcaccgacgccattaaaaagatttgggactacatcaagctccacaatctccagaaccctgcaaacaagaaggagattatttgtgatgagaagttgaagacgatattcgccgggaaggagtctgtcggaatgttagagattagcaaatatctctcccc

SEQ ID NO: 225086 - DNA, 381 bp, Gossypium hirsutum
cccacgcgtccgcgacgcgctcgttgagggccaaggaaggaaggaagaagagggggagagagataaaaaggagaatctgcttcaaagtttcaaactttcccgtctcatatctaatccccaatttctctcttctgctctaggttccttcctgtcctcttaggattcttgtggtctgttcaaagcgtcatggcctcgaagcggattttgaaggaactcaaggatttgcaaaaggatccacccacttcttgcagtgcaggacctgtagctgaagacatgtttcattggcaagcaacaatcatgggcccttccgatagcccttatgcgggaggtgtatttttagttagtattcattttcctccagattatcctttcaagccccct

SEQ ID NO: 225087 - DNA, 391 bp, Gossypium hirsutum
  unsure (1)..(391): unsure at all n locations
taaataccctnttaccaaaggagatcattaaaacatagcccaactcttcgttttggtcaagcggaaaacagaaaactgaggctttcccttctcaaatggcaccgagggagaaaacggcggccgtcaagggtactgggaataataacgaggttcatttcagaggagtaaggaagcgtccatgggggcgttacgctgctgagatcagagatccagggaagaagagccgtgtttggctaggaacctttgatacggccgaggaagcagccagagcctacgacgccgccgctagggaatttcgcggcgccaaggccaagactaattttccggtcccttgtgagaatctcagcaaaggtaataactgtaaaagtaatggtaacaacaaccaccatag

SEQ ID NO: 225088 - DNA, 374 bp, Gossypium hirsutum
atcagggaaggtcgtggtgtatgttctttgaaggatcatatctatctccactgtgatcacttgcctgcagaggtgcttaaggagaggcttccaggtatctctgagactgctgccatttttgctggtgtggatgttacgaaggagcccatcccagtcttgcctactgtacattataacatgggtggaattccaacaaatcatcatggagaggtagttactatcagaggcagtgatccagattctgtggttcctggactgatggctgctggagaggcagcctgtgcatcagttcatggtgctaatcggctgggtgcaaattcccttcttgacattgtcgtctttggtcgggcttgtgcaaaccgagttgcagagat

SEQ ID NO: 225089 - DNA, 384 bp, Gossypium hirsutum
gcgtatttctaaggatttaatctccattctcttcttcccatttcttcattacattgtgcaagaaaaaagaagcaaaaaaacatggccaaagttctgttgttcattgcactatgtgtgcttccagctttggttagtgctacacgcattctgaataatcaattggtggtagaaggctatgtgtactgtgatacttgccgtgctggttttgaaacccctaagactagaagcctagctgatgccatggttaggttggtatgctccgacaggaagagcggccaagttgtcttcaaaaaggagggatacaccgacaaaaccggaaaataccagattcgtgtatccgaggatcacttggatcagatctgtgatgcagttcttgtgaagagc

SEQ ID NO: 225090 - DNA, 369 bp, Gossypium hirsutum
gccacacattcccccaagcctgcgttttcgccttccgcttaaaattcccaaaaatgtggaaaaatggatctttttggtacatcctacaatcctgtcaaaaaaagagacttttgctacccgttcagacattgaaaacctcttcacttcttagcaatgagctgcatatgacattgtatggcttcattgtatttgaagtttcatggtccaatgttcgaggtcttaactacttgaatgaacttcagactgatacctctctagccgtagaggctaaattcatgcgaagatggtaatttgacagcattgatcaagcagcaaagcgtctatcttcatggttctctggatcattggtggagcagcggaatcttaaag

SEQ ID NO: 225091 - DNA, 387 bp, Gossypium hirsutum
gtagatgggaagggtagaacctgtttttcctaatccagctggtttcatggatgggtgtcaattccaaagacaaatgaggacttccgtctcctctacgatacaaaaggtcgattccgccttcatgccatcactggtgatgagtccaagtttaagctctgtaaagttcggtctgtccagtttggccagaagggtattccatacctcaatacttatgatggccgaacaatccgctacccagatccgttgatcaaggctaatgacaccatcaagtttgacttagagagcaacaaaattgtcgatttcatcaagttcgatgtcgggaatgttgtcatggtcactggaggaaggaacaggggacttgttggagtgattaagaacagagagaag

SEQ ID NO: 225092 - DNA, 388 bp, Gossypium hirsutum
  unsure (1)..(388): unsure at all n locations
ttcggcaacccttccgccaacccttccgttttaggaaaacgaaccggaagcgtcgttggttcgtgtaaatattgaactcgtanactggttgaagtaaaagcgaaaatggaagggattggattggaaggagatgggtcaaacggggaagctcttgggaagtgcttgagtgggttggtggacgatggtagcaccgagagtcatcgatactacctgtcccggagaactgtgctggagatgcttagggacagaggctatgccgtacccaacactgaaatcgacctctctctgcatgaatttcgtgccattcacggccaaagccctgattttgatcgtctcaaactctctgttactcataaaactgactcttccaagcggacgctggtagttt

SEQ ID NO: 225093 - DNA, 389 bp, Gossypium hirsutum
gggtaagactctttttaattaattgtagatacgttggaagtttttgtcttcagggattttatgggcaaatccacctttcattaaaaaatgatgaactgtcatcatcaaaaatatttcccattgaaaaaatgagttctcaagaaagtgggagagaaaaggaaataatagagttagatgaagcacggctacaagggcaagcggagatatggcgatacatgttcagctttgcagattccatggcgcttaagtctgccgtggagctccgcatagctgacataatacactctcatggtgtcgccatcactctatcgcaaatagcttcatgcattaatggctgccttacttcgccggacatcaccacccttgctcgcataatgagattgctcgtc

SEQ ID NO: 225094 - DNA, 375 bp, Gossypium hirsutum
cccacgcgtccgcccacgcgtcctttcgccgagacttccttggtcgagaaatcgttcaacaccatcagattctggtctattgatgcggtcgagaaggcgaattcaggtcatcctgggttgcccatgggctgtgctcccatgggtcacattttgtacgatgaagtcatgaggtataaccccaagaacccttactggttcaaccgtgaccgtttcattctgtccgctggtcatggttgtatgttgcagtatgctctgcttcacctcgctggttacgacagtgtcctggaagaagatttgaagagtttccgtcagtggggaagcagaacccctggacatcccgagaactttgaaacaccaggagttgaagtcacaact

SEQ ID NO: 225095 - DNA, 389 bp, Gossypium hirsutum
atatcatactccattcccatggcgttctccaccaccaagctattactcactgagctcgcaactacagttaaactggtgcctaccaattacatcagaccaatctccgaccctccaaacctggttgatgttcatgtatcagatgtttccatccctctgatcgaccttcaggacctccatggccccaaccgctctcatgttcttaaacagattgccctagcttgccaacatgatggtttctttcaggttaagaaccatggggtttcagaagccaccatcaacaacatgctgcgtttagctagagatttcttttatttaccggagagtgagcggttgaagaattactccgacgacccgtccgtcgccaaccggtttcaactagtttcaacgtt

SEQ ID NO: 225096 - DNA, 379 bp, Gossypium hirsutum
cccacgcgtccgggagaagctcctgcaccagatcatggaactaaaattcaggtgcaaatccctgcagcgccaggccaggaactgcgagaaggacgagaaatctgagaaattgaaggtcaagaaggccatcgagaacggtaacatggacggcgctcgtatctacgccgagaacgccattcggaagcgcactgagcagatgaactacctccgcctcgcgtcgcgcctcgatgctgtggttgccaggctcgatacccacgctaagatgaccaccattaataaatccatggctaatatcgacaagtctctcgactcttgcttgaacacaggcaatttgcagacgatgtcagagacaatggatcaatttgagaagcagtttgtg

SEQ ID NO: 225097 - DNA, 361 bp, Gossypium hirsutum
aaaatcaactgcttcacaatgtttttttacacccatggctttttttttcccagtcatgcgccggaagggcagggaagttttccctttccacccttgaaatccggggaactggccgtgtttccatgaggaaaaccaccaagcctgttccttctggtagcccatggtacggtcctgaccgagttttgtacttgggtccactttccggtgagccaccatcttacttgaccggtgagttccctggtgactatggttgggacactgctggactctcagctgatcccgagacctttgctaggaaccgtgagctcgaagtcattcactgcagatggggccatgtgggagctcttgggtgtgttttccc

SEQ ID NO: 225098 - DNA, 382 bp, Gossypium hirsutum
gagaaatgcgacttggacattatcaaatttctggaggggcaagccacagcctgcatgggagcaggtgacaccagctctacctgcgcttgaacgtcttattcattcaaatgatgaagaagttctgactgatgcctgttgggctctctcatatctgtctgatggtacaaatgacaaaattcaagctgtgattcaagcaggagtttgcccacgccttgtcgagctcctgctcaatccatctccttcagtgctcattcctgctcttcgtactgttggaaatattgtgactggagatgatttacagactcagtgtattattgatcatggtgcattagcatgccttatgaacctattgaccaataattataaaaagagtataaagaag

SEQ ID NO: 225099 - DNA, 311 bp, Gossypium hirsutum
  unsure (1)..(311): unsure at all n locations
tgttgataaaaggaggagatgcactggaaagagctcaaaaggtccagtatgttgtttgtgacaaaactggaactttaactcacggcaaagctaaggtcacaactgtaaaagttttctcagagatggaccgtggagaattccttacactggtggcttctgcagaggctagcagtgaacacccattggccaaagcaatagttgaatatgcacgccacttccatttcttttatgagaattcgttaactgaagatgcccaatacangcagcaaggatctncaatttctgcctggcttcttgatgttgcagagttc

SEQ ID NO: 225100 - DNA, 364 bp, Gossypium hirsutum
  unsure (1)..(364): unsure at all n locations
aaaaaatatcttctctgtcttcggtttttctcacgttttctaaaatcatcgatgaaggccgacctagaacaggaataaaacgaggaacaaacaacctctgattgtcgaattaacgagaaaccaaaagcaaacgcataaagaaatcatgggttctgaacagaatgaaggaactagcttccctccatcggagccaaaactttgtgccaacggctgtgggtttttcggcacggcggcgaatatgaacctctgttccaagtgttaccgggacctccgtgccggggaggagcaagctgccaaggcgaaagctgccatggagaaatccctcagcgttaatacgaagcangaagatgtcgttgacgagact

SEQ ID NO: 225101 - DNA, 382 bp, Gossypium hirsutum
cggacgcgtgggcaaagtcatattattttctcccacgcttctccgaaatcgaaagcccctctcggtcactgttcgagaggcttctgtgtcttcttcttcttccctttcttctctcgctttgcccttgctatggcttctgatttggagaccaaagccaaagaagccttcatcgatgatcactttgaactcgcgctcgatctttactctcaagccattcaacttaaccctaaaaatgctgaactctacgctgaccgcgctcaagccaacatcaaactcaataatctcactggcatctcctcttttttccccacttaatcttttaaatatgtatgtttttaaaatgattaattggtaattctttgttatttttgtactttttggt

SEQ ID NO: 225102 - DNA, 370 bp, Gossypium hirsutum
cttcaccaaggattctttcatcctaaagtcgcccaagaagtctccattggtgttgaggacggttgtattgttgtttgtaatggtttgtggagtgtatatctgcacgatttgtttgaagcaaataagcactggcagcaccactgaatttttgaattttagagtggaccaaaagccctgtccagaacctaatattgagccatgggaaattccttacgtacactatccgaaccccaaaacttatagcagggctgaatgtgcgtgcaatccagtccggtattttgccattatgtcaatgcagagatctgggagtggatggttcgagacattattgaacaatcatactaacataagctcaaacggggagatattt

SEQ ID NO: 225103 - DNA, 389 bp, Gossypium hirsutum
  unsure (1)..(389): unsure at all n locations
ctctgtttcctcgtatacttggttatgaagcctcagggatcgtggagagtgtgggtgagggtgtgaatgatttgaaacctgnggatcatgtgcttcctatcttcaccggagaatgcaaagaatgtcgccactgtctgtcagaagaaagcaataacatgtgcgaactgcttaggatcaactgcgaccgaggtgttatgcttgctgatgggaaaaccagattttccatcaacggcaagcctatctaccactttgttggaacctcgacttttagccaatatactgtcgtccatgttggccaggttgccaagatcagtccaaccgccccgcttgataaagtctgtcccaatagcttggggatatgtacaggttttggggccactgtaaatgtt

SEQ ID NO: 225104 - DNA, 301 bp, Gossypium hirsutum
gagatatataaatccgcggatatcctggtattcaacaccggccatgggtggaatcatgagaaaacatccaaaggggaagattattaccaagaaggtgatcatgtttacgaggaattgaacgttgtcgaggcgtttcgaagagcactgacgacgtggtctaaatgggtggatgacaatgtaaatccttccaagactatggtgttcttcaggggttactctgctactcatttcagtggtgggcaatggaattccggaggtgtgtgcgattccgagatggagccaataaggaacgatacgttgc

SEQ ID NO: 225105 - DNA, 394 bp, Gossypium hirsutum
cttcacaaaaaagaaaagaaaaaatacagtgaaaatggcaacccttaaagttccagctgatgtacctgccccttctgaggatgctgagcaacttcgtaaagcttttgaaggatggggtacaaatgagcaattgattatcgacatattggctcacaggaatgcagctcagcgcaatttgattcgtaaaacttatcgtgaagcttatggggaagatctccttaagtctttggatgaggaactttcaagtgactttgagcgagctgtggtgctgtttactttggaccctgcagagcgtgatgcatttctggctcatgaagctacaaagaggttcacatcaagccattgggttctcatggaaattgcttgcactaggtcttcacatgaactgttcaat

SEQ ID NO: 225106 - DNA, 395 bp, Gossypium hirsutum
  unsure (1)..(395): unsure at all n locations
gctacatgcagattgttttcgtgatttcctctgcctctctcctgcttcccattgtagctaatgtatgttcgaatatctctctctctctctctatatatatatccgnagattattctattgagtgattcgtaactatatggattgtaacagttcttggtgcctccttcaaaggagaaaggcggaagcatctcatttgctggctgtcttcagcttcttggcttctgtacttttgaggcatgtgtagggatattctggccatccattatgaaaatgagatcccagtacatcccagaggaagctaggagcaccattatgaactttttccgcattcctctcaacatctttgtctgcatcgtggtgtacaacgtatgttagaaagctttctataatagctt

SEQ ID NO: 225107 - DNA, 382 bp, Gossypium hirsutum
ttccaagtgaagttgtctgatagctcgtatccagattcaaccatttcatgtaaggggggcgtaaaagaggataaaaaacttcggctatccaaggtagaactaagcccagtgcgtgacatgtttatagacatatcatgcctggatatgggtctcgatttgaggctggcactgtcccacaagagaatcttaacttctatgactgaagatgagatgcaaagcattaaaaatctgattgattcagcggtcctagacccagatgtgaaaggtgggttgagatggccctttggaaaagcaacgagtggggatagatacagtgtcgttggcatttggcacacaatgtctactgcttataaaaactcatccataagactcaaggttcgat

SEQ ID NO: 225108 - DNA, 357 bp, Gossypium hirsutum
cccacgcgtccgagaaaaaggaatcaaaagatggcaattgagattcctagagtgaaacttggaactcaaggatttgaggtttcaaagctgggatttgggtgcatgagtcttacaggtcacgatcattcagtgtcagatgaagatggcatagccatcattaagcatgcagtcgaaagaggagtcactcacatcgatacagccgacctctatggacccaaaactaacgaaattctggtcggaaaggcattgaagcatctgccacgagagaaggtacagttggctacaaaattcggtgttgaaagcatgggtccagatggtccggttatcaatggcactcctgaatttgttcgttcttca

SEQ ID NO: 225109 - DNA, 377 bp, Gossypium hirsutum
cagattctcatttgccagacaggttgattctaaatatcgtctcgctgatggtgagtccccttttaatatttatgggcaaatgccacagaaccatccttctggccaagattttacagacaacagggattcctatctaagcaaatttggagtttctaatggtttatattcctgtaactttgaggaatctgacaatttttctagtagtccttcagttttttccaataagctttctgcttcaagagctcaaattccagtccctcctggattctctgttcctagcagggcgccacctccaggcttttcttcaattgagagagtaaaccatgcttttgacgccacatcaggtaatcatttgatggactcttcatccctattaa

SEQ ID NO: 225110 - DNA, 383 bp, Gossypium hirsutum
gaaacttggaagcacaaaaagcatgaacatcgatggattgaaatgtgccataggtcagattttggatgctcaacagaagggggaaatcaatgaggacaacgttctctacattgtcgagaatatcaatgttgccgcaattgagacgacactgtggtcgatcgagtggggcattgcggagctggtgaaccaccctgaaatccaaaagaagctgcggcatgaacttgacactgttctaggacctggtaaccagatcactgaacctgacacccacaaactcccctaccttcaggctgtgatcaaggagactttaaggttacgaatggcaattccactactcgtgccccacatgaacctgcatgatgcgaaaattggtggctatgata

SEQ ID NO: 225111 - DNA, 381 bp, Gossypium hirsutum
cttgtttaaaatataagaaaaaaattcttacgcaatgagcactgctggtcaggggatgcgttgcaaagctgcggtggcatgggaggcggggaagccactatcgatagaagaagtggaagtggcaccaccccaaaagcatgaagtccgtattaagattctcttcactgctttatgtcacactgatgtatactactgggagtgtaagggttacactcctctgtttcctcgtatacttggtcatgaagcctcagggatcgtggagagtgtgggtgagggtgtgaatgatttgaaacctggagatcatgtgctccctatcttcaccggagaatgcaaagaatgtcgccactgtctgtcagaagaaagcaataacatgtgcgaact

SEQ ID NO: 225112 - DNA, 381 bp, Gossypium hirsutum
cccacgcgtccgcggacgcgtgggttcttatgcttggccatcgtataaagatggaggggccgatcatctgatcccaatggagctggcattaaaggttgctagtaaaatccgagcaagagagagatttgcggtatatatcgttattcctttgtggcccgagggtgatacaaaatctctttctgtacaggaaattctatactggcagtctcaaacaatgcaaatgatgtatgatatcgtcgcacgagaactcaagagcatgcagattacggactcgcatcctcaagattacctcaatttctattgtcttggtaagagggaagaggtcaccccggaaatgcttggtggaaaaggaacttcggtctctgactctgcaaagttcgg

SEQ ID NO: 225113 - DNA, 391 bp, Gossypium hirsutum
cccacgcgtccgattttatttttttcaaccagcctagagagcactagcgtgaggactagcactagtagcaaccatggcctccgccgcatgtttcttgcaccaccacgcactcacaaccaatggcagatcatcatcattatcgccgtcgctgcgccaggtttcaaacatgaagcctacccagcaggtggtgtgcaaggctcaaaagcaggaagatgatggaagccttgtgtcccgtaggttggctctcactgtactcattggtgctgccgctgttggctctaaggtttctcctgctgatgctgcctatggtgaagctgcaaatgtatttggaaagccaaaaacagacacagacttcatgccatacagtggggatggattcaagctctcgata

SEQ ID NO: 225114 - DNA, 366 bp, Gossypium hirsutum
cgaaaaagtgaataaaatattttttattattttattaaagtttttgttggggggaaattgagagaagattttgaaaaaaaaaaatccaagatgaagatcacatcgttagtagtgctgaagtgcaacccggaaggatccgatccgataatactagcgaacgctaccgatttgagccattttggttacttccaaaggtcaagcgtcaaggagttcatcgttttcgtttctcgaactgttgctaaacgtactccttctggtcagcgccaatccgttcagcacgaagagtctaaggtacatgcttacaacagaaatggactctgtgccttgggatttatggatgatcattatccagttcgaagtgctttt

SEQ ID NO: 225115 - DNA, 384 bp, Gossypium hirsutum
cccacgcgtccgaacaggtataggttttaacaggatatctaaaatggccgaaagcgttggggggagcggctcaaacgacgatgatggtttcagggagcaagatcggttacttccgattgctaacgtcggccggataatgaagcaaatgctacctccgaatgcaaaaatctcaaaggaagccaaagaaactatgcaagaatgtgtttcggagttcattagcttcgtcacaagtgaagcatccgataagtgcagaaaggaaaggcgaaagactattaatggagaagatatttgttgggccttggttactctcggtttcgacgattatgcagcgccattgagaagatacttgaacaagtacagagaggtagaaggagataacaaagc

SEQ ID NO: 225116 - DNA, 317 bp, Gossypium hirsutum
  unsure (1)..(317): unsure at all n locations
cgcgtccggccaagtttgatggtatacttggtcttgtatttaaagagatttcagttggaaggtgcgtgtgcctgtatggtacaacatggtcaatcaaggtcttgttaatgaaccagttttttcattttggctcaaccgcaatcctgaggatgatgttggcggagaagtggtttttggtgggatggatccaaaacattacaagggggaacacacttatgttcctgtaaaacagaaaggatactggcagtttgatatgggtgatgttctgattggtgaccaaacaactggactntgtgccagtggctgcagtgctattg

SEQ ID NO: 225117 - DNA, 384 bp, Gossypium hirsutum
cgcgtccgcttggtttgggtttttccttttttagcttaaaaaccatggatttgagccattggaagcgtgggcaaatcactcgaataggatctgggttttgtgtgttgctgacactgcatttcacattccagcttctagcacaacatctgtttcactggaaaaacccaaaggaacaaaaagctatagtgattattatacttatggctcctatttatgctgttgtttcctttgtagggttattagatgttcgtggtagcaaagagttcttcacattgttggagtcaatcaaggagtgttacgaggctttggtgattgcaaagttcttgtctttgatgtatagctacttgaacatatcaattagcaaaaatactgtgcctgatgaaa

SEQ ID NO: 225118 - DNA, 384 bp, Gossypium hirsutum
gacgcgtccgttaaatcttcatcagcctcacttctatttctttgaatccaattctcaaattccgttgtttgtacaagtcgaagctttttcttgtccgggttgttcttgaaatcttggtttcatttttggtatggatgaaatcgatgttcctccatttttcatctgccccatttctctcgagtttatgaaggatcctgttacggtttcaacagggattacgtacgacagggaaagcatcgagaagtggttgttttcagggaagaacactacatgccctgttacgaagcaagttattgttgattgtgaacttaccccgaatcatacccttagaagattgattcaatcttggtgcttgttaaatgcttctcatggaatcgaaagaat

SEQ ID NO: 225119 - DNA, 377 bp, Gossypium hirsutum
cttctgccatcctcataataaacatccaaacagaactcttcaagatggggggtgaatctgatgctgatgtaaatataaaaataccggctgtcatgctccctcaggatgctggttcacgtttggaaaaatatataactaacaacaccatggtgtctgttgctctttactctccaaagcgcccagcagttgatattgctgaagtttttttgtggctaatggctgttggtaccatcttgtgtgcctcttattggtctgcatggactgctagagaagttgctattgagcaagagaagctactcaaggatgcttcagaagaatttctacaagtaggagctgcaggttcaagtggttttggtgacataaatacaacatcagca

SEQ ID NO: 225120 - DNA, 325 bp, Gossypium hirsutum
accaggctgtattttgaacctatcttctccgttttgggtttctttcgattccagccagccctctcgtttgtcccaacatgaagcatgtggcaaatagctgtggaaacggaataagtgaccaaacagcttgttgtgatgctatgaatagctatgtctctcacttacaaaagcagaccctaatcaccaacttacaagctttggactgtgctacctcgttagggttgaagctccaaaaatacaatatcaccaaagatgtttatagcctatgtcacataagccttaaggatttctctcttcaagtcggaagtcaagaatctggatgtct

SEQ ID NO: 225121 - DNA, 378 bp, Gossypium hirsutum
tggacagttgactgaagactggggggagactttatttgcagctttaagcagaggaggaggcaaagcatttagtaacatggctgttggttacaacaatgttgatgttaatgctgccaacaagtatggtgttgctgttggtaacactcctggtgtactcacagaaacaacggcagagctagcggcttctctttctttggcagctgctagaagaattgttgaagcagatgagttcatgagggctggcttatatgatggatggctccctcatctgtttgtgggaaacttgcttaaaggacaaacagttggtgtaattggagctggtcgtattggatctgcatacgccagaatgatggttgaagggttcaaaatgaacttaat

SEQ ID NO: 225122 - DNA, 386 bp, Gossypium hirsutum
ctagtacccactactagcaatggcttcctcaatgatctcatcggctaccattggcactgcctctccggcacaggctaacatggtcgctcctttcaccggtctcaagtctgcctctgctttcccagtcaccaggaaggccaacaacgacattacttctctcgcaagcaatggcggtagagtgcaattcatgcaggtgtggcctcctactgggaagaagaagtttgagactctctcatacctccccgatcttacacccgtgcagttggctaaggaagtagattaccttcttcgctcaaaatgggttccttgcttggaattcgaattggaggagggattcgtgcacccgtagtactcgagcttacccacgtactacgatggacgctact

SEQ ID NO: 225123 - DNA, 382 bp, Gossypium hirsutum
cccacgcgtccgaaagcaagtgcattgaagagaagaaagatgagcagcattggagctggttacgatctctgagtcaccactttctctcccgacggccgcgtttttcagatcgagtacgcctccaaggccgtcgataacagtggaactgtaattggaataaaatgcaaagatgggatcgttatgggagtggagaagctgatagcatcaaaaatgatgttacctggctctaatcgtagaatcctttccgttcatcgtcattccggcatggcagtagctggattagcagctgacggcagacaaattgtggcccgtgctaaatctgaagctactagttatcaaagtgtgtatggtgaacccattcctgtcaaagaacttgctgaac

SEQ ID NO: 225124 - DNA, 379 bp, Gossypium hirsutum
gcgtccggtaaaaatgcacattctcttatttgttttgcaatggttggagatataaaaggccgttattctcatttgacaaatttcactggaggggttgaaacaattgagaattgtgtttgtttgcatgaagaggatcatgggatcttatggaagcatcaggactggagaacaggtttagcagaagtccgacggtcgagaaggctaacagtatcttttatatgcacagtagctaactatgagtatgggtttttctggcatttctatcaggatggtaaaattgaagctgtggttaaactcactggaattctcagcttaagagcattgcagcctggtgaaacaccgaaatatggcacgaccattgctcctggattgtatgccc

SEQ ID NO: 225125 - DNA, 376 bp, Gossypium hirsutum
ctaaatacacggtgtttcaaatattcgatgccttgaggaagttcgggtggatcgtccctgcatacacgatgcctgcagatgccgaacacatcgcagtcctgcgcgtggttgttagggaagacttcagttgtagcttggccgagaggcttatctcgcacattcaagaggtgttgaaggaactcgactcgcttccgagtcaaatcgtgaaagattctcacgttgtcaccgttgcgaaagaagtggtaggggagaacaaagatgcggaggcagctaaaatgggtgatagaaagattcaagaaaaggttactaagcaatggaggcattttgtgaaaactaagaagacgggtgtgtgttaaaagactcctacaaaatctat

SEQ ID NO: 225126 - DNA, 375 bp, Gossypium hirsutum
gaatcttttttaaaaaaaaaaaaatcatacgcaatgagcactgctggtcaggggattcgttgcaaagctgcggtggcatgggaggcggggaagccactatcgatagaagaagtggaagtggcaccaccccaaaagcatgaagtccgtattaagattctcttcactgctttatgtcacactgatgtatactactgggagtgtaagggttacactcctctgtttcctcgtatacttggtcatgaagcctcagggatcgtggagagtgtgggtgagggtgtgaatgatttgaaacctggagatcatgtgctccctatcttcaccggagaatgcaaagaatgtcgccactgtctgtcagaagaaagcaataacatgtgc

SEQ ID NO: 225127 - DNA, 377 bp, Gossypium hirsutum
gcggcgtcaagatgcagatcttcgtcaaaaccctaacggggaaaaccataaccgttgaggtcgagtcttctgacaccatcgacaatgtcaaagccaagatccaagacaaggaaggcatccctcccgatcaacaacgccttatcttcgccgggaagcagcttgaagacggccgcaccttagccgactacaatatccagaaggaatccactcttcacctcgtcctccgcctccgaggtggtgccaagaagaggaagaagaagacctacaccaagcccaagaagatcaagcacaagaagaagaaggtcaagctcgccttgctccagttttacaaggtggacgagtcgggtaaggttcagaggctgagaaaagagtgtccc

SEQ ID NO: 225128 - DNA, 381 bp, Gossypium hirsutum
cccacgcgtccgcccacgcgtccgttcattcgtccggaatcccatttgctgaagtaggtgctaggattgatgctgttgatccaagcactattaaacgagttgcagaccgatttatctatgacaaggatattgcaattgctgcaatgggtccggtccagcgtttgcccgactacaactggttcagacgcaggacctactggaaccgttattagatgattttggtttgactttctcaatgggttatcacctgtccttggcaatcacaaactttccggtactcatacaccaatttccggaagcacacctaagggtggcctttctattcgttgtgtagggttcttagtttcatcaattcagtaataagcattgctgtctttagta

SEQ ID NO: 225129 - DNA, 251 bp, Gossypium hirsutum
caccaaacctatgcctggaactcaacggatcaacctcttaatcgagcaagattgccgtgtctaaatatgtactgagaagaaaacaattttgtccgttgaggacatcatatctttgattgacaataaatgctaaagattgatttgacacttgactgaagactgcagggagactttatttgcagctcaagcagaccatgaggcaaagcatttagtaacatggctgttggttacaacaatgttgatgttaatgc

SEQ ID NO: 225130 - DNA, 380 bp, Gossypium hirsutum
ctgcatttcctcttctaaagggtgttgttgctacaactgatgctgttgaggcatgcgctggagtcaatgttgctgtcatggttggtggtttcccaaggaaggaaggaatggagaggaaagatgttatgtcaaagaatgtgtctatttacaagtctcaggcttctgccttggaacagcatgcagctcctaactgcaaggttttggttgttgctaaccctgccaacaccaatgcattgatcctgaaggaatttgcaccttcaatccctgcaaagaacattacctgtttgacaaggttggatcataacagggcactaggtcaaatctcagagaaactaaatgtccaagtttctgatgttaagaatgtgattatttggggtaat

SEQ ID NO: 225131 - DNA, 383 bp, Gossypium hirsutum
ggttatccttgttggtggatcaactcgtattcctgctgttcaggaacttgtgaggaagatgactggcaaggaaccgaatgtgacagtcaacccagatgaagttgttgccttgggggctgcagttcaggctggtgttttatctggagatgtcagtgatattgtgcttttggatgtgagtcctttgtcacttggtctagaaactcttggtggtgttatgaccaaaattatcccaagaaacactacgctgccaacctccaaatcagaagtgttttcaactgctgctgatggtcagacaagtgtcgagattaatgtactccaaggtgaaagagagtttgttagggataataaatctcttggcagcttccgtctcgatggtatcccac

SEQ ID NO: 225132 - DNA, 385 bp, Gossypium hirsutum
  unsure (1)..(385): unsure at all n locations
aacgccatccgaaaacctctgttttattacaaatttcggatccaaaatccgagtctgcaagttcggagcgtggaggatgttttgtcgaacggtaactcttccttgttggagcgttggggaaaagcgacatgtatcgaatcgaaactccttttccacttggcagcgccggctgtcattgtttatatgatcaactatctcatttctatgtccacccaaatcttctccggtcatctcggtaatcttgaactcgccgccgcctccctcggaaacactggcatccaagtctttgcttatggcctcatgttaggaatggggagtgcagtggaaacgctttgcgggcaagcctttggagcacacanatacgacatgctaggcatatatcttc

SEQ ID NO: 225133 - DNA, 379 bp, Gossypium hirsutum
agaacataagccagatgacggaactggatgacctaggatgtagaagatcataagatgagtggttcgacagatttggattcctatatatccactcatgtggtacttcattgtacaatatatataagaattatacgataagaattatacgaatccatctgtatagatatcatcatctacatccagaaagccgtatgctttggaagaagcttgtacagtttgggaaggggttttgattgatcgatcaaaaagaagaatctacttcaaccgatatgcccttaggcacggccatacataacatagaaatcacacttggaaggggtggacaattagctagagcagcgggtgctgttgcgaaactgattgcaaaggaggggaaatc

SEQ ID NO: 225134 - DNA, 377 bp, Gossypium hirsutum
gcaaagtaccattttcccgagaaaatttttgaccttttctttcctggaaaatctttcgatctaaggtttacattcgatggctattgagaggatttattctctgcaaatcctgatattgaacttaatcgcttcaatcttgtaccaatcatgtgagtccttcttaactactccaagctccattatcaatccttctaaagtcaaacaagtttcctggaaacctagggcttttgtctacgaaggcttcttaaccgacctcgaatgcgatcatttgatctctctagcgaaatcggagctaaagagatctgcagttgctgataatgttagtggacagagcaagctaagcgaagtccgtacgagctcagggatgtttattccta

SEQ ID NO: 225135 - DNA, 373 bp, Gossypium hirsutum
cttgttttctcgacagggcaagaaactgtgattcttgatcggttcgagaagaggacaaagttaaattaataaaacaaacatgttttttcacatagtattagagaggaacatgcaattgcatccacgccacttcggtcgtaacctacgggaaaacctcgtatccaagctcgtgaaagatgtcgagggcacttgcagtggtagacatggttttgtggtggcaataacgggtatcgaaaacgttgggaaaggtttgattcgagatgggaccgggtttgtgacattccctgtgaagtatcaatgtgttgttttcagaccatttaaaggggaaatcttggaagctgctgttactatggtgaacaagatggggttcttt

SEQ ID NO: 225136 - DNA, 381 bp, Gossypium hirsutum
cttcaaagtggccgattatgttagagaacactattgacgagcctgtagaactttggggagtgagaattttctgctcaaatccggcagattcgtttactttgtctctcatggagccaccttcagctgattcaaagtcagaacaaagccaaggattcttagaaggattctctcttgaggatcgagtacttcaatcccgggaaactcttaccatttggctgtcttgcaaaccgaaagacatgggtttgcacacaactgtagtacactttgatgtagatgataataggattgaacgagtagtgtttctattggctgaagataatgtctcccaatctctcgcttctactaagccttacaggagagctccaagaagaagaaatcact

SEQ ID NO: 225137 - DNA, 377 bp, Gossypium hirsutum
cccacgcgtccgcccacgcgtccgtgccgctactccctctgttccctcatttagcttcacaattttatggtgattttattatgttaagttatgcttggtttcggtccattcgaaaatttctttatttcattttggctagaaagttgtcagtaaatatgctggtttatggatctttaagtaattacagggaggagtgttgctttaagctgtatttgaattaatatgagaaatgggggaggggaagacagaaaattttgattttggttttggtaatggttgcagtttcatcagtaccaagttgttggaagggctcacccaacagagagcgatgagcatcctaagatctataggatgaagctctgggccaccaatgaggt

SEQ ID NO: 225138 - DNA, 408 bp, Gossypium hirsutum
  unsure (1)..(408): unsure at all n locations
cggaacggactgggccgggcccgaccgatccgttcttggttggcatatgtnctcaaagtgcctaacgttccccactattcttcaatagcttgtggtctccattctcatctcctggtttccagtgagatgaaccctaattccaactggtcttaatagtttcatctctttctttttcttctattgattttttgttttaattccttttattgcctttctgaaaaaaagtaattgccttgttgatttgcaagcaaattttggtaaagttcttaaatatttgagtttagatcttctttgagagtgccgctatgggagtgaagggttttgttgaaggaggcatagcctcaatcgtggccgggtgttcgacccacccgcttgatttgatcaaagtccgaatgcagctccagggtg

SEQ ID NO: 225139 - DNA, 380 bp, Gossypium hirsutum
cccacgcgtccgtgaaattccagctaagggggaggagacacacacacacgcgcacagatcttcaaatgtcatcaatggatcattcaaaggttcaagagatcgtggagaagcaggtattgaccgtggcgaaggccttcgaggaccagatcgacgaagagattgcggctttagatcgactcgaccatgacgatctggaagctattagagagcggaggttgcagcagatgaagaagatggcggagaagcgaagtcgttggatcggtttaggccatggtgaatactctgagattccagctgagaaagacttcttttccattgttaaagctagtgaacgagtcgtttgtcacttctatcgcgaaaattggccttgcaaggtgatg

SEQ ID NO: 225140 - DNA, 388 bp, Gossypium hirsutum
aaaaaggaaacaaaagatggcaattgagattcctagagtgaaacttggaactcaaggatttgaggtttcaaagctgggatttgggtgcatgagtcttacaggtcacgatcattcagtgtcagatgaagatggcatagccatcattaagcatgcagtcgaaagaggagtcactcacatcgatacagccgacctctatggacccaaaactaacgaaattctggtcggaaaggcattgaagcatctgccacgagagaaggtacagttggctacaaaattcggtgttgaaagcatgggtccagatggtccggttatcaatggcactcctgaatttgttcgttcttcacttgaggctagccttcaacgcctcgatgtggattatattgatctt

SEQ ID NO: 225141 - DNA, 381 bp, Gossypium hirsutum
ggtgaatgccttgttattagtggttgaaagttcaaaatccagagcacaggaacttggtaccaagttgcttggaagccaaaatgccgtggatgaattgttaactaaggttaagttacttgaagattctcttcagggtaggactattcagccagaagttgtccaggatcggagcatctttgaagcaccttctgcatccacagggtcagaaatatctgaaattgaagatgtgggatcccacgtaaagaaaacagtatctcctgttccctcagctgctcacgtccgaattatgcaaaaaggatcagctgaccatctagcactcaatattgactcagaaactgatcgcttgatcaacagtgaggaaactgatgaggacaaaggtcg

SEQ ID NO: 225142 - DNA, 382 bp, Gossypium hirsutum
ccaaaaccaagcatcatttcagtttaaactatataaaaaaagctccaattagtatcttccagtataaaatccaagaacctcaattcctctctttgaaagtgtacgatttaaacatatacccagattttaattttgttgatttgggtttgatttgaagagagaataaaaatcttttcaatggggagtttaggagctcttgtgaaacacccagatgatttttatccattgttgaagctgaaaatggcttcaaggcatgccgagagacagatcccatcagagcctcactgggctttttgtttctctatgcttcacaaagtatctcgtagttttgctctcgttattcaacagctcgacatcgagcttaaaaacgctgtctgcatat

SEQ ID NO: 225143 - DNA, 368 bp, Gossypium hirsutum
taaaaacggcacagggtcatcctatgttggtggaactgaaaaatggggagacatataatggacatttggtcaattgcgacacttggatgaacatccatcttcgtgaagttatctgtacttcaaaggatggagacaggttttggagaatgcctgaatgctatatccgtggaaatacaattaagtatcttcgagttcctgatgaggtaattgataaagttcaggaagaaacaaagagtcgtgcagataggaagcctcctggtgtaggccgtgggagaggcaggggtcgagaagatggtcctggtggaaggcaaccaaaaggagctgggcgtgggctagatgatggtgctaggactacaagtggaggccga

SEQ ID NO: 225144 - DNA, 379 bp, Gossypium hirsutum
tgacatttctctagttcaagctcgttgtagattcgtgaatgccgacgaatgcttgctaacaagaatgcaagagatgtcattggattaccatttcacagtggaacaagaagttggatcagcaactcatgctttcttcggttttaatggaactgctggtatatggagaatagcagccattaatgaggcaggtggatggaaagatagaaccaccgtggaggacatggaccttgcggtccgagctagtcttaggggatggaaatttctttaccttggtgaccttcaggtaaaaagtgaacttccaagtactttcaaggcctttcgtttccagcaacatagatggtcatgtggccctgcaaatttgttcagaaaaatggggggg

SEQ ID NO: 225145 - DNA, 385 bp, Gossypium hirsutum
cggacgcgtgggcggacgtttgtgttagattttgaatgtaaatgtgaataatgggggagtaatgtatgtcaaagtgatcaccgatgaacagttggagactctcagaaagcaaattgctgtttatgccgacatttgtgagcatctcgttgagatgcataataaccttactgcccatcaagatctcgcaattggtaggctgggtagcctgtattgcgacctcgttaatgacatgtgctggtcacaaaattactgctagacagtgatggacaccaactccagtgcagctttagattctggcacgagatttttatcagacgactggaactgcaagcgagcctatgatacaagatgtaacctcataactgaatcatcatggccaaattta

SEQ ID NO: 225146 - DNA, 329 bp, Gossypium hirsutum
gaaaaaaaggggcgggccacgcgtccggccactcaaactctcacacaaccgtccattctttcaaaccaaaaaaacaagctgggggggagaaattccgggagactcgacacccacagtaccgcggagttcgccggaggaatacccgggaagtggttttattaagtgagggagcctaataacaactctaggatttggcttggaactttcccgacggcggatatggcggcgcgtgctcaccacatggcagctatagcactgagagggaagtcagcttgtttgaacttggctgactcagattggaatcattcggtcccggcttgtttcgaccc

SEQ ID NO: 225147 - DNA, 380 bp, Gossypium hirsutum
tttttgtttaacttaagctcataatcatggaatcatgactcttgatcttaatctcatcactttgatttgaaaggaatggctctgatcacaacaacgtggtagagtgctgctagtgctgcaccaatgaatggtcccacccagaaaatccaatggtcatcccagcccttgtccttgttgaagatgatggctgcaccaagactacgagccgggttaataccagttccagtgattgggatggtggctaagtgtaccaagaacactgcgaacccaattggcaatggtgccagaatagggacatgagagtctcgggcgctgcgcttggcgtcagtggctgagaagacagtgtaaacaagaacaaaggtgccgacaatttcagcacc

SEQ ID NO: 225148 - DNA, 387 bp, Gossypium hirsutum
atcttctccgtggatgatacacctttttttgagttcaaaaacatggagtcgattggggtcccatttcccaagaaccagcccatgagaatttactccagcttgtggaatgctgatgactgggccacaaggggtggtctggttaagaccgactggacccaagctcctttcactgcctcgtacaggaacttcaatgccgatgcttgtgtgtggtccaatggagcttcttcctgcaaatcaaatgccccatcttcttctacatcaacaaacaatgcatggttctctcaagagatggattcagcaaagcagcaaaggctacaatgggtgcagcagaattacatgatctacaattactgcactgacgccaagagatttcctcaaggtctacct

SEQ ID NO: 225149 - DNA, 380 bp, Gossypium hirsutum
tttagattttttttcaagttgcactatttcagctccttccagcgtcctatcagatagcgatgtttgactccttactcctttgctttagttttaaccccttagttgatcacctatcagcatctgtttttggagagatcttggtcttgatttgcatcctaatgtgctttttagattgattaattacaaggttcctataaataaggctgattttctagctgaagttctaagtaagtggaaagtattgggttttttttttatttagggagaaagaaaaaatatggaaacgaaagagaaaaagttcctgacggtcgctccctttgagtgtgcttggataaaggatctgaaattccgtgaagctggcagaggatgtgtatcattcg

SEQ ID NO: 225150 - DNA, 370 bp, Gossypium hirsutum
ctttcagtgaggctaaaattcgtttagctcggctaccattatttaatcggcagcgccatgtatctaatgctggtgccgttattagccattgcttcagctcatctctcaacgctcacggtccttgatttggttcaactatgggaccaactcaagttcaatcttgtctctgttactttatgttcaggccttttggtttttttagccaccctttacttcatgagccgtccccggaaagtttatttggtggatttcgcttgctataagccggagcctgaacggacttgtgccagagagattttcatggagagatcgaatcttactggaagtttcactgaagagaacttggctcttgaaaagaagatactggaga

SEQ ID NO: 225151 - DNA, 374 bp, Gossypium hirsutum
ctggaatgccattaagtttggaactgtgttggaaaatgttgttttcgatgaacatacgagagaggtggtttatggtgacaaatcagttacagagaatactcgtgcggcctatccgatcgaatacattccaaatgctaagataccatgcgtcggtcctcatcctaagaatgtcattcttttggcatgtgatgcctttggtgtcctaccacctgttagcaagctgagcctggctcaaaccatgtaccatttcattagtggttacaccgctctggtggctggcacggaagatggtattaaggagccaacagcaacgttctcggcttgcttcggcgcggctttcatcatgttgcatcctaccaaatatgcagccatgc

SEQ ID NO: 225152 - DNA, 385 bp, Gossypium hirsutum
cggacgcgtgggttgttttcgatttttgtattaagagtcgccctttggtgttgttctaattcaatcagtgaggtgaagaaaaatgtcttgctgtggtggaaactgcggttgcggctccggttgcaagtgcggcggcggcggcggctgcggctgcggcggttgcaagattaccctgagatgaactttgctgagcaaaccacaactgagacacttgttcttggcgtggcaccccggaaagtgaactttgatggagctgaaatggaaactggggctgaaaatggctgcaaatgtggagataactgcacttgcaacccttgcaattgtaaatgaggggaaaaaaaaaaccgaagcatattatggaagctgatctaaataatatatgatg

SEQ ID NO: 225153 - DNA, 384 bp, Gossypium hirsutum
  unsure (1)..(384): unsure at all n locations
gctttctaagatattgcaaacagttttttttaactaacaagaaggaggctgncgggcggatatgcagtcggcaatatacaaactgcatcaatctttggttttcatttatatcagcaaacgtgaaagattatgatcttcagccattgttatacatgatcattcagattatcaatggtgtagctgtcttgtttcctggaccaagatatttacctctaagaattaaatgcattcagtggttgaataacctttctagtgcaagtggggttttcattcctgttgcatcatttgctatggatattttggaatataaaactgggaaggacaatgggaaacctggaaaagatttcaacttctcttccactataaagttgccaaaacattgga

SEQ ID NO: 225154 - DNA, 381 bp, Gossypium hirsutum
ctaaaaatctctccacaatgcttttgagaccagtttcatctttgtgtgtgcaagccaagcaaggggataatctaatttgttcccttaagggctcccctgtaacatcatcatcatcatctgctttgagttttctgcccagaaaacatggaagggctttgggtgtttatgcatccataggaaccgacaatcatgcacttacaggggtagtgttccagccttttgaagaggtgaaaaaggaggaacttgacatcccaatcgctcctcatctttcgctggctcgccagaaatatgctgatgcctgtgaagccgccatcaatgagcaaatcaatgtggagtacaacgtttcctatgtgtaccactcgttgtatgcttacttcgaca

SEQ ID NO: 225155 - DNA, 342 bp, Gossypium hirsutum
cccacgcgtccgcccacgcttcctttccacttttcttcggtttccagatagctgccctgcttacttggccatgaaattgagtcagtattcgaatttgaatgaagctgattgggttttcgataacacctttgaagacttggaaggaaaggaagcaaaaggcgtgtcagagctctggcaagcgaagttgattgggcctatggtaccatctgcttacctagatgaaaggatcaaaggtgacagaggttacggttcaagtttatggaagccacttagcgaagagtgcatggaatggctagaaacaaagccatctcaatcccgtgtctatatttgatttggaagcat

SEQ ID NO: 225156 - DNA, 373 bp, Gossypium hirsutum
gtcggagctggtgcggggactggtatatctgcaaaatttgaggaggctggtggggttgatttgatagttttgtacaattcacgacgctttcgtatggctggaaggggttctttggcaggactattgccatttgctgatgcaaatgcgatagtgcttgagatggcgaatgaagtactgccagtaagttgtggtaaaggcagtgcctgatctagctggagtatgtggaactgatccttttcggcgaatggattacttcctaaagcaattggaatcaattggattctctggagtacaaaattttccaactgttggattatttgatggtaactttagacaaaatctggaagagactggaatgggatatgggcctgag

SEQ ID NO: 225157 - DNA, 378 bp, Gossypium hirsutum
aacacttttgctctgcatctttctttcatcccaattcataaccaaaggctcctgggttttttgtgtttactttcggtgttggaatcaatcagatggctttagaagctctcaactctccaactacaaccgctacgcctactttccactttgaagataccactaacttacactgcctggaatcgttcaccaagcgtaagcgttccaagcgaccgcgtttcgatcatgttaccaccgaggaagaatacctcgctctctgccttatcatgctagcacgcggcggtgatgccaactccaccgacacttctgttatcccacagcgccatcgctctcctactccaaccgcctcaccaccgcctgcaccagcaccagcacctacct

SEQ ID NO: 225158 - DNA, 402 bp, Gossypium hirsutum
  unsure (1)..(402): unsure at all n locations
cggacgcgtgnggcattagatataatatagctacctccccgtaagcanaaccacaaagggaaaggcttggagagagacctcaaaaacaattgtctaagggaagttatgtgaagaaggacagggtncgtaaggactattgtggaccctccanccggcancctctgattgacatggnctgaactcaagtcatggtctttttacagagccctcatagctgagttcatagccactctcctcttcctctatgtcactgttgctactgtaattggtcacaagaaacaacaagatgcatgtgatggtgttggtctcttgggtattgcatgggctttcggtggcatgatctttatccttgtttactgcactgccggtatctcaggtggacacattaaccctgcggtgact

SEQ ID NO: 225159 - DNA, 366 bp, Gossypium hirsutum
cccacgcgtccgaaaaaaagttatttcatcttgagcaaagttacagtcgtcctcatcgaacaactatggcagccatcaaagtccacggaagccctctgtccactgctacacaaagggttcttgcatgccttcacgagaaaggcactgattttcagtttgttcccataaacatggctgctggtgaacataaatccgaaaactacctttccctcaatccattcggtcaagttccagcttttgaagacggggacttgaagctcttcgagtcaagagcagtcacccattacattgctcatgaatacagcgacaaggggacccaactcttaattcctggctctaacaaggatatggctgtcttacaattat

SEQ ID NO: 225160 - DNA, 381 bp, Gossypium hirsutum
ggcagccatggcaaggatctaggtgcacgagttaaggaacaaatcaaagacaggagtgttgagtcagctaagggattaaaaacccgaactttctctccttcgtgttgccaaggtcactggtggtgcccccaataagctctccaagattaaggtggtgaggctatccattgcacaagtattgacggtgatatcccaaaaacagaaggctgctttgagggaagcttataagaacaagaagtttttgcctcttgatctccgtcccaagaagaccagagctattcgccgccgccttaccaagcaccagcaatctttgaaaaccgagcgggagaaaaagaaggagatgtactttccgatgaggaagtatgccattaaggtataagc

SEQ ID NO: 225161 - DNA, 382 bp, Gossypium hirsutum
gcgcatttcttctgaatttctggtttctcatcttcacttcatttcccaggcaggctcaggtcaatctgaagtatggcagacgaagacattcagcctcttgttgttgataatggtactggaatggttaaggctgggtttgctggagatgatgctcctagggctgtcttccctagtattgttggacggcctagacacacaggtgtcatggtggggatggggcagaaagatgcctatgtgggggatgaggctcagtctaaaagaggtattctcacattgaaataccctattgaacatggtattgttagcaactgggatgacatggaaaagatctggcatcacactttctacaatgaacttcgtgttgctcctgaagaacaccctg

SEQ ID NO: 225162 - DNA, 402 bp, Gossypium hirsutum
  unsure (1)..(402): unsure at all n locations
gaaagggcggggggacccacgcggccgcccacacgtacggttgggatccttcnttttggaagggctagaggcacggggcggctccttagggagctcaatctataaagctttgcgatgcaaagaaccaaagagtgctgatctattatcttacatgcacattctttatgaggtttgcccctacttaaagtttggctacatgtctgcaaatggagccattgcagaggccatgaaagatgaagatagagctcatattatcgatttccaaatagctcaggggagtcagtggatcactctcatccaagcatttgcagctaggcctggtggaccaccccatatccgaataacttggattgatgattccacatctgcatatgcccttggaggaggcctaaacattgtggg

SEQ ID NO: 225163 - DNA, 374 bp, Gossypium hirsutum
cccacgcgtccgctcgttcaagatctactcggaagacagcaacatcgtcgtcgactctttccaccgatacagtcgggattcgactgggcacaaggaacaattcgccaattacgccagtgagggcaacgtcgtcgaccagaacttccactcctatgccgcctccgccactggcggttcgggaaacttcaacaactacaaccgtgaagtcaacaatcccaatctccgtttctcttcatatggggatgactccaacgggcatgggcagacattcacgcagtacacagagaatgccaacgccgggaacgggcagtcattctcgagttatggaaaaaacggtaacggcgttcctaacgaattcagtagttacggaaaag

SEQ ID NO: 225164 - DNA, 387 bp, Gossypium hirsutum
cccacccgtccgatggaataacttttgttgaaggcaaagaagcagacacaactgcgggccaagcaagccaccgggtttttaggggacttcacaacaagggtcattcagttatgagaaagctgaactcggatggtagggtggatacgatgcagaccttacataatttgaatgaagatgaacttcctggttttgaagaatcttggaaaggaaaagcccaaaagcgtctgcctggctggtccgggagttttattggccatgataacatagggactggcagcagtggacagaacgggcaggcaggtcggggaggatgggcacttccctctactgagtcttctcaaccaaaagggaggatgatggtagatgcaagagacaggtcagggcctt

SEQ ID NO: 225165 - DNA, 372 bp, Gossypium hirsutum
attgaatcggtttcggatctccggaagtatctgcaagcacgagggtcggatcttgtggttcggattgggaagccggagtgtgttttggttgagttagctaaagctatcggggccgacgctgtctatgctcatagagaagtttctcatgatgaggttaaggctgaggaaaagattgagtcggccatgaaagaagagggtgttgaagttaagtacttttggggaagtactttgttccatgttgatgatttgccgtttaaattggaagatatgccttccaattatggtggatttagggataaagttaacggtttggagataaggaagacgattgaatcattggaccaaatgaaagggatgccttctagaggtgat

SEQ ID NO: 225166 - DNA, 384 bp, Gossypium hirsutum
cccacgcgtccgtttgctcacgtttctggtgtctagttctctgctatttctttgaaaattttcaggatgcaacaagcaattccatacaaatcctggcctctgccatgcatcgacgcaacttcccatcgtgcccgttcaacaacaacacttggccacaacggacgcgggaaagacgtgcttaatatagtgtcggagaacgcggtgatagtgttggccaggaagggttgttgtatgagccatgtagtgaggcgtttgctgctgacactgggcgtaaaccctgcggttcatgagattgatgaggaggatgaggctggtgttttgaatgaattggggacgatttgcaaaggtaccgaaaacaataaaatggttcagcttccggctgtg

SEQ ID NO: 225167 - DNA, 368 bp, Gossypium hirsutum
gacaattagatattcagattttaatacatgggctaagattccctccgatggccggggaacttggcaggctgctcctggagtctttggcaatgcaccggccactgctattaagcatggataccggcatatagactgtgctcaagtatatgggaacgagaaagagattggcttggttctaaagaagctctctgaagatggtgcggcgaagcgagatgaactttggatcactaacaagctatggaacactaatcatgcaccgccagacgtaccaaaggcatcgaatggtacttagccagatctgcatctggactatatagatctatatctgatgcactgcccgaacatcctgcgaatgctagcaagccact

SEQ ID NO: 225168 - DNA, 373 bp, Gossypium hirsutum
cggacgcgtgggttcgctgatggctaggttcttgcggtgaagaaaatagactgagcggctcttcccagtaacatgtctgacaatttcatggagatggtttcaaatatatcccagttgcatcacacaaatgtaaccgagttggttggctattgttcagagcatggacaacacctgcttgtctacgagttccacaaaaatggctcactctacgatttcctacatatatcagatgagtacagcaagccattgatttggaacacccgagtcaaaattgctctcgggactgcacgtgcattagagtacctccatgaagtttgctcgccatctgttgttcacaaaaatatcaagtcagctaacatcttacttgatgctg

SEQ ID NO: 225169 - DNA, 371 bp, Gossypium hirsutum
cccacacatccgcccacactttttttttaatgcaacataattatggctgcgttcgcgttaatgtcctccgtcatctttctgctatgctgcctcgcctcagcatcaaccttcgaggacacgaaccccattcagatggtatccgatggtctcgactcctctgttcttcgtgtcatccgtcatactcgacgagctatctcctttgctcgctttgcttacaagcatggaaagaggtacgaggatgttgaggagataaagctaccgtttcagattttcaaagataatatggatttaatcagatctactaacaagaagggattgccttattctctatctgtgaatcagtttgctgatttaacatgggatgagtttcg

SEQ ID NO: 225170 - DNA, 385 bp, Gossypium hirsutum
cagtgcaccatcgcccatgctttgttgattacaaaatatccagattcagatatgtatgggaagaagcttgaagacaaataccatttctcttgccaatttacagctgatctttttgcaatgaaccatacagatttcatcatcaccagtactttccaggaaattgcaggaagcaaggacactgttggtcaatacgagagccacactgctttcactcttcctggtctctaccgtgttgtacatggtatcgatgtgtttgatcccaaattcaacattgtttcccctggtgctgatatggagatatacttcccttacaccgaagagaagcggaggttgaagcatttccatcctgagatcgaagaccttctttacagcaaagttgagaatg

SEQ ID NO: 225171 - DNA, 378 bp, Gossypium hirsutum
ttccccttctctctcaaatcctcctcccttccttcttcaccacacaccacaacggctatactcccaaaatgtctcttacaatccccactaacctctccaaatcccttttgaagccaaagctaaactccaaactcacccccaaagtttcacgatcattggtggtatgctccaccgacaagacttcatcgccactatcatcagcttcatcactccaagccttctcagcagctcttgctctttcttccattcttctctcagccccacagcctgccgtagctgatattgcaggcctcacaccatgcaaagagtccaagcaattcgccaaacgtgagaagcagcagatcaagaagctggaatcgtcgttgaagctatacgccc

SEQ ID NO: 225172 - DNA, 375 bp, Gossypium hirsutum
gataataaagcgtttgtctcatatttcagaagatggcccgtaccaagcagaccgcccgtaagtctactggtgggaaggctccaaggaagcaacttgctaccaaggctgcccgtaaatctgccccaaccaccggtggtgtgaagaagcctcatcgataccgtcctggaactgttgctcttcgtgaaattcgtaaataccagaagagtactgagcttcttatcaagaaattgcctttccagaggcttgttcgtgaaattgcccaggacttcaagactgatttgcgtttccagagccatgctgttctagctctccaggaagctgcagaggcataccttgtgggtctgtttgaaaacaccaacctttgcgcgatccatg

SEQ ID NO: 225173 - DNA, 322 bp, Gossypium hirsutum
  unsure (1)..(322): unsure at all n locations
ggggggggggcggaaaaaaaaaaaaaataaaaaaannatgnataaaaaaaaaaaaaaaaaaacaccgccctttttttttatgcagggccccccacccaancngannaactaaaagaaacaagggctgcaggtccactgcctgaagagacgagtctaaccgcgctaacttatggaggttaccttcattagaagataaagtgcatgaagagcctcgctaaatctgagctgcatgaaaggaagatggatctaactgttctgattgatggggacacccaacagaaccacgatgcacttgcacagttgacagctagaagaattcttt

SEQ ID NO: 225174 - DNA, 409 bp, Gossypium hirsutum
  unsure (1)..(409): unsure at all n locations
caaaatacaaaaaaattggaagcaattcttgtgtcctgggaaaaggaagaggacgcccgatgaattttttgagggtatgcagttgatgcacatgacaatctgtttggcctcaagganagcaangggctttgcaggtccaacttggctgannagagacgagtcttaatcggacttaacttttggangcgttaccttcattcgaagataaagtgcatgaagtgtcttggtaaatctgagctgtatgaaaggatgatggatctaactgttgagattgatggggacatcggaagtctggaggaggcacttgcacagtttacagctagagaaatcttggatggagagaacaaatatcattgcattaggtgcaaatcttatgtaaaagcaagcaagaagttgacggtattagagt

SEQ ID NO: 225175 - DNA, 302 bp, Gossypium hirsutum
gaaaactagaggcacagatctaagataggggcgactgagaagtgagaacacaggagattttcaatgagtgggaaaatcaccatggccatggctgcactttttgtagttctagctgcaaatgtgttgcagagtacaaatggtgcaacttatacagtgggtgactctactggctggagagtccctgccaataatgatttctacgatgattgggctgataacaaagccttcgttgttggggatgttctcgtgttcaatttcactaccggacaacatgatgttgcagaggtgacggaaaactgtta

SEQ ID NO: 225176 - DNA, 384 bp, Gossypium hirsutum
  unsure (1)..(384): unsure at all n locations
gttaaaaggagccgaaaactaatttagtgggtcaatggattcctctaaactcggggaaaattcgactatggagcacgaaacgcatcggcaaggaaaccctactgacccaaacgccgatcaaaacgctgctttgatcaattctttcattgaaatcacttcttcttctaaagaagaagcccttttctttttggaatctcatcagtgggacttagacgccgccgtttcgactttccttgacagcaattctaccgccgcactacaacaaccaccgaccgcaccgnctgtttctggcgttggtggtgttaacaactctgcttctcctttgcagtccgattcccctgattactctccctctcaatcgccttctcggtctcgttctccttc

SEQ ID NO: 225177 - DNA, 459 bp, Gossypium hirsutum
  unsure (1)..(459): unsure at all n locations
ggaaatacccgggtgcgacgccaacgcgataccggtagganctttgttacctctttacttcttgctattgtttgtnnttctccacgagacttgataaaatgagtgagcgttttgccttggccaacgctcaaagtcaagtttccaaccactttctctggcttatgttanccgtccaatgatgagggaagccgcactacggcagagaggctcttgttttacttactttnngttgaagcagaaacccatgccctggcttctannaaccactttgtccttttggcttaaacggagggcccttggttgttcatcttgttggagcagggagcttttattgaacatggaccctttaagccaaatggaaagactttaaccaaaaacgtccacagttggaataaagaagctaatatgctgtacctcgagtcaccggcaggagttggcttctcttattcggctaataac

SEQ ID NO: 225178 - DNA, 373 bp, Gossypium hirsutum
actggctttcagtgagaaggcaatttttattccaatattaaagaggtggcatcgtctgtcggccggtgtggctgtagcaactcttcattcctgctatgggaatgagctgaagcaatttgttttcagcattggtgaattgacaccggatatattacaagtgctaagagctgcagaaaaattggagaaagatcttgtgcagatcgcggttgaaaactcagtggacagtgaggatggcggaaagtcaatcataagggagatgcctccttacgaggctgaatctgtagtctccaatctggtgaaatcatggataaagactagattagacagactgaaggaatgggttgacaggaatctacaacaagaagtatgggat

SEQ ID NO: 225179 - DNA, 271 bp, Gossypium hirsutum
cttaaaacgttaaacgcggctttctctctatttcttttctgcagcgagttactgagtgaacaccacgatggccgaacgaatccaccccggcgactcaccaccgtcttccggcgaacactcgaattccaagccagctcctccttcttcagataaaccaattccacaacccggaacttacgtcgtccagatcccgaaggaccaagtctaccgcgttcctccggcggataactcccgccgctacgctcatctgtcgaaaagtaagtcgagtcgc

SEQ ID NO: 225180 - DNA, 299 bp, Gossypium hirsutum
tttgccttctagaaatttccaagttcttcttcaaaaccctcacatcccattcgagcaaaagaactcaaatctttatcatccaccatgggaggaggaaatgcccaaaaatccaagatggctcgtgagaagaacttggaaaagcaaaaagctgccgccaaaggaagccagcttgattctaacaagaaggccatgaccatccagtgcaaggtgtgcatgcaaacattcatctgtactacaacagaagtgaaatgccgggagcatgctgaggcgaagcatcctaaatccgacctatacacatg

SEQ ID NO: 225181 - DNA, 410 bp, Gossypium hirsutum
ggtaaggaatgggcggggcgacgccacgcgtccgcccacgcgttcgataacgcagtttagctacagtggcataggtaggcgggggggggactatcgttagaacatgtgtaagtgtccccaccccaaaagcgtgcagtccgtattaacattctattcactgctatatgtgacactgatgtatactactgcgcgtgtcagggttacactcctttgtcacctcatatactcggtcatgacaccaaaagcatcgactagaacttgggtgtttggtgagattgcatcgcaaccggatacacatgagcttccgatgatggggctggagtgcaagatatgtaatctctgcttgacagatccaaaccactgactttgcttaactactttctgattaacggcgcaccttctttttctgc

SEQ ID NO: 225182 - DNA, 334 bp, Gossypium hirsutum
ccgggacacggaattggccgggtccgaacccactgccgtccagacacctgcgatgacacatagatccgctacattcgaactggtgatttgccggagctgggatcgtaagcaaccctgttcgggaaatacaagcttgggaagttgctgggatgtggggctttcgcaaaggtttaccacgcgcgcgacgtcgactccgggcagagcgtggccatcaaggccgtcagcaagaagaaggttttaaaaggcgggttcatggcacatgttaagagggagatcgctatcatgcgccggttgcgccaccctaacatcgtcaagctcatcgaggttttggcta

SEQ ID NO: 225183 - DNA, 329 bp, Gossypium hirsutum
cccacgcgtccggaaaactagaggcacagatctaagagaggggcgactgagaagtgagaacacagcaaattttcaatgagtgggaaaatcaccatggccatggctgcactttttgtagttctagctgcaaatgtgttgcagagtacaaatggtgcaacttatacagtgggtgactctactggctggagagtccctgccaataatgatttctacgatgattgggctgataacaaagccttcgttgttggggatgttctcgtgttcaatttcactaccggacaacatgatgttgcagaggtgacgtaaactgcttacgatgcgtgcaccac

SEQ ID NO: 225184 - DNA, 391 bp, Gossypium hirsutum
cagcgaactcggaaaaacttttacagaggaataagacaaagaccatggggcaagtgggcagctgagattagagaccctcaaaaaggcgtccgagtttggctcggtacctataacacagccgaagaagcggctcgagcctacgatgaagccgccaagcgtatccgtggtgataaagccaagctcaacttccctcaaacgcccaccaaaaatcaagcagcttcaccagctcttactctgcttcctcctgctaagaaaaggtgcatcgttcccgagttaactcaaccgagtttccagactgactcaccaccttatcctatgggtcttgggtatggaagaagtgaagattataagccgattgaagtggtggagagtgagttggagttgaaagaac

SEQ ID NO: 225185 - DNA, 376 bp, Gossypium hirsutum
  unsure (1)..(376): unsure at all n locations
cccagccaaagtgaaacgtttgttgcttccaactaagctctctggtaatggtggtggaaagaaggtttcgaagactgacgaatcttcaccgagtttgatgaatttgctaatgggggtcaaagttttgcagcaggcaattattgatctactcttggatataatggtggaatgttgccaaccctcaggagtagcacgtggtgattcttcagatgcaaactctaaaccttcttccgatggtggggaagctgctagcccactggactgtgatcaggaaaatggcactgtggcatctgctcaatttcctacgaacgaaaggttggattcttgtgtggatgatggtagcactgcctctgncgtgccaagctctgacatgaat

SEQ ID NO: 225186 - DNA, 342 bp, Gossypium hirsutum
gatcattacaacattgatctccatgcttcttcctttctttaatgacattgggggactccttggggcacttggattttggccattaacagtttatttcccagttgagatgtacatttcacaaaagaagatacctaagtggagcacaagatgggtttgtcttcaaatccttagcattgcttgtctctttatcaccattgccgcagctgccggttcgattgccggggttgttctcgatctcaagtcgttcaagccctttgcgacagtatactagttcggtagaattgacccggtatgattcgcaacattcacggacagtaaaaggcgaagaaaaactgatctttt

SEQ ID NO: 225187 - DNA, 342 bp, Gossypium hirsutum
ggtttttgtttaatagcttaactgactctctgaaatatcgcggatctttggtgggggacacgcattttcgcttttaattatagcctgattttactcggaagatgaggctggaggaagagttctctcattgcgacaactacgacgaagaggaggaacccaaaacgatgtcgcaatgttccatcggagctttacaacaacaacagcagcagcaaaagtttgtcgttgtcggttatgcccttacctctaaaaaaatcaagagctttttacaaccaaagttcgaaggtttagccaggaataaggggatattatttgttgcaattgatcaaaatagacctctctcag

SEQ ID NO: 225188 - DNA, 391 bp, Gossypium hirsutum
atcgaaatcaattagggttagggtttttccccatccaaattctgatttaacccgagatgcctcaacgtcactcgaagaacaacaacgatttagccttcttcacctacgatgagaagaggaagctagggtacggtactcaaaaggagagattaggaaaagactccattaagcctttcgatgcttgctgcctttgcttgaaacctttcatcgatcccatgtcttgccaaaaaggtcatgttttttgcaaagaatgcattctcgaatgccttttagcccagaaaaaggatatccaaaggaaacttgctgcccatgctgctcagcagaaactagagaaggaggaggaagaagagaggttgatattggagaaagcaagagagctggacgcattcga

SEQ ID NO: 225189 - DNA, 378 bp, Gossypium hirsutum
  unsure (1)..(378): unsure at all n locations
cggagaagttcaatgcgatgaagctgctggacgaggggaagacgcctggtctggtaaaatgggcggacaggttctgttcccatgccgctgtgaaggatgttatgcctgatactgacaagcttgcggagtttggtaagtttgttattgccaaaataagggccgctggcgctgctgctgaaatgcattagaacaaaaattagcacatcttggatggaactaatgaatatattatctctgtttcttcactttgtgatgatgaacaaagatatatatatattccagtgttgaagttttttaataaacccttttctttggcttnnanaaactagaaaaagaggaggaagaagagaggttgtttttggagaaagcaagatagct

SEQ ID NO: 225190 - DNA, 384 bp, Gossypium hirsutum
cccacgcgtccgtttcatttggaccagccttggttagctggacatgggataaccactggatctactgggtcggaccccttatcggtggtgggctcgctggtctcatctacgagttcatcttcatcagcaacacccacgagcagctcccaaccaccgattattaagcctaatcagggtttaattgatttgtctgtcactttgaaaccggattttctccgatctcatttgagtttcctatctctttccttgttttttgtgtttaatttgtggcccgtcgatcttgtttacttttttttcattccccatcctctatcatgatcatcatgcatggcagatgttgtttacaattgcatgccctgaaaaaatagtatatgagtgactcac

SEQ ID NO: 225191 - DNA, 324 bp, Gossypium hirsutum
gaaatcttcttcattctcattctctctccactgaactcttgctaaacggggtcggtttagtcagtctttcatcaatggcgaaagaaccagttcgcgtcctcgttactggagctgcaggacaaatcgggtatgctcttgtacccatgattgctaggggagtcatgttgggtgctgaccagcccgtgatccttcacatgcttgatatcccacctgctgcggaggctttgaatggtgtcaaaatggagttggtggatgctgcatttcctcttctaaagggtgttgttgctacaactgatgctgttgaggcatgcactggagtcaatg

SEQ ID NO: 225192 - DNA, 327 bp, Gossypium hirsutum
gttcgaactctgaaaaatcctttctattcaatggtcaagctgagaaatggggggaaagaaagaggatgaaccagtctcatggaatccggcagtgcccatggggtaaatgggctgctgagatccgtgacccaaggaaaggggttagggtctggttaggaactttcaatactgctgaagaagctgcgagagcttatgatgctgatgcgcggagaattcgtggtaagaaagcgaaggtgaacttccctaacgagactccgcgtacctctccaaagagtgcggtcaagacaaattctcagaaaccactttgcaagtcgaatttgagccctg

SEQ ID NO: 225193 - DNA, 380 bp, Gossypium hirsutum
cccacgcgtccgcacagatgattctttgaaggaaaatcagaatggggtcaggcgtgatataaagagcgatgaactggattcacatttctcaatatattcggagaatacacgagatgaatggacagcttctgaacttgattgttccaacagtgtacacgacttttctaatggtaatgaaaaggaggtccgagatattgtgacatttaactctcattcttcaaagaatatggattcatttcaggactcggttttttatttggacaaaagtgtaatggattgtgaattgcctgaattggtagtttgttataaagagagtacatatcatgttgtcaaggacatttgtattgatgagggagttccgacacaagacaatgtcttgt

SEQ ID NO: 225194 - DNA, 384 bp, Gossypium hirsutum
cccacgcgtccggcaacatcctcagaaagaaacttattggggcaacgtcaatccggggggtgtccgaagctgttacgatgagggaaagcgtactgctgaaacgttgaccatggactatcaccgcggagccggcgtcgaggttaggattgccagaattttcaatacttatggaccacgtatgtgcatagacgatggccgtgttgttagcaatttcgtagctcaggccttaaggaaggagccattgactgtgtatggtatggtaagcagacaaggagttttcaatatgtttctgatctggtggagggtctgatgcggttgatggaaggggaacatattggaccttgtaatcttgggaaaccaggagaattaccatgcttgagcttg

SEQ ID NO: 225195 - DNA, 377 bp, Gossypium hirsutum
ttcgttttgttttttttctttgctctgaaactccaagctctcatcaatggcgggtccagcgactatctcaccagccacgctgttgaaagatgagcttgacatcgtgattcccaccattaggaacttggatttcttggagatgtggagaccttttttccaaccttaccatctcatcatagttcaagacggcgatccttcaaaggccatcaaagttcctgaaggctttgattacgagctttacaacagaaacgatatcaataggattttgggtcctaaagcttcttgcatctctttcaaggactctgcttgtcggtgctttggatacatgatttccaagaagaagtacatctataccattgacgacgattgtttcgttg

SEQ ID NO: 225196 - DNA, 405 bp, Gossypium hirsutum
gggggggccgcacgcgtccggtcaatcatctccctctacaaaagatataagcttatttctgaaactacccggggggggcaaagcaaaaacaaccagaattcaatggggaagaaagctgcgttgattggaatcaactatccaggcacaaaggctgaactgaaaggctgcataaacgatgtgaagagaatgtacaaatgccttatagaacgctatggattctctgaagaagacatcacggtattgatagacaccgataattcttatgatcagcccacagggaagaacatcagaagggctttgaatgatcttgtgagatcggctgagcctggggattttctgtttgcgcactacagtggccatgggactaggcttcctgctgagactggggacgatgatgatacttgc

SEQ ID NO: 225197 - DNA, 390 bp, Gossypium hirsutum
atttagctatagcatacactactagtacccactactagcaatggcttcctcagtgagctcatcggctaccattgccactgcctctccggcacaggctaacatggtcgctcctttcaccggtctcaagtctgcctctgctttcccagtcaccaggaaggccaacaacgacattacttctctcgcaagcaatggcggtagagtgcaatgcatgcaggtgtggcctcctactgggaagaagaagtttgagactctctcatacctccccgatcttacacccgtgcagttggctaaggaagtagattaccttcttcgctcaaaatgggttccttgcttggaattcgaattggaggagggattcgtgcaccgtaagtactcgagcttacccacgta

SEQ ID NO: 225198 - DNA, 331 bp, Gossypium hirsutum
  unsure (1)..(331): unsure at all n locations
cccacgcgtccggaaggatcaaggtanttgaggagacaacaatttggagagcagtaattaaaaccccagcttccattgctctaatagtttacactttcatcgcaatgtggtttgttggtggtttgactgcctttcatttgtatctgatcagttcaaatcagacaacatatgagaatttcagatatcgatacgatcgtcgagcaaacccctataacaaaggagtggttgataacttcaaggagatattttgctccagtattccatcattcaataacaacttcagggtaaaggttcccattgaacctgtgctaccaacacgaccaggtgggtt

SEQ ID NO: 225199 - DNA, 357 bp, Gossypium hirsutum
cccacgcgtccgcccacgcgttcgttggtggagggcttgttatttggatgtgagattggtgccattaggcatgctcatccccattgcttatcattgctggttatggcataaggttaggactcagcctctcgctaccatcatcggaatcaattccaccggacgacgcttctgggtctctgccatcatcaaggacaacgagaaaaagaacatcctggcagtccaaacgcttcgaaacaccataatgggatcgaccctaatggccacaacatccatcctgctgtgtgctgggttggcagccgtcatcagcagcacttacaccgtcaaaaagccactcaatgactctatattcggagctca

SEQ ID NO: 225200 - DNA, 352 bp, Gossypium hirsutum
tgcgcccatcccttctacccccttttttttttttcaatggggagtactctgcaactatgtcgtttctgcatccgcaccgggtctgataactttggtggaagatccggcgctattccttcccggcggaagccgatctccgtccgatgctccggcgattcaaatttgtcctttttcggtggcggggatcccgataacttcgatgcaaaagctttccggcgtaacttgacgaggagcaagaattataatcggaaaggttttggacacaaagaggaaacgctcgagctcatgaatagagagtacactagtgatattataaagaaattgaaggaaaatggaaacgagtatacatggg

SEQ ID NO: 225201 - DNA, 379 bp, Gossypium hirsutum
ctccggagcaattcgtgtgcatgacaacatgcttttggctgcctcggaagccgtggctaaacaagtatctgacgaaaactacaacaagggccttatttatccaccattctctaacattaggaaaatttcagctaatatagctgctaacgttgctgccaaagcatatgaactcggtgtggcaactcatctcccccgtcctgccaatcttgtgaagtatgccgagagctgcatgtactcgcctgtctaccgtagttacaggtaaattttcgtgcaccattttcgtatataatagcttcatcttgaagctcatggtatgctgtatatgttgtctaatagaccaaaaaatatgacttgggttgtgaaatgtttactgttatga

SEQ ID NO: 225202 - DNA, 340 bp, Gossypium hirsutum
ggaatggccctcaagtacgcagaactgaaaccggtgccatgcttgacttattcggatgctcaaatgttgagggaaaccgctgccactcctatccttaagcagctttcattaggtaaggaatgatgttacaagatatcgctacggggatgaacagcatttggatgaggcattgaaacggattttccagtttggtctgggcggaggaattcctcggagaaatgcacctattcttcaaatgatccgagaagaagtcacagaagatggtaaatattggttagtcctggtgtttgaggctaaagctttggaagtgtcggatttcgaaaagagacaagcaaaattt

SEQ ID NO: 225203 - DNA, 360 bp, Gossypium hirsutum
gggacccttgggtggcaatgaaaatcttcagcttggcagcacttctcgttgggggggcttcatccgtgttgcaaagcacatatgctgcaacttacactgtgggtgacaccaccggttggacaatccctaataataatcctgaattctatgataactggacagacaataagaacttcgtgggtggggatattcttgcgtttaattttacaaccggacaacatgatgtcgccgaggtgaatgaaactgcttacgacaactgcatcagtaccaatcccatcgctcgatatactacaggaccggcgaatgttacccttaacaggaccggtggataccactttatttgcactttcggcggtcact

SEQ ID NO: 225204 - DNA, 373 bp, Gossypium hirsutum
cttctattcagttttgtaagagctatggctaaggacattgaggttggtggtgagtggcaggccaaggactaccatgatcctccacccgctccattggtcgacgctcaggagttagccaagtggtctttttacagggctgtcatagctgagttcattgccactctcctctttctctacatcactgtcttgactgtgatcggttacaagacccagaccgaccctgctaagggcggtgaagattgtggcggcgttggcattctcggcattgcttgggcttttggtggcatgatctttatccttggttactgcactgccggtatatctgggggacacatcaacccagcaggtacctttggacttttttttgctagga

SEQ ID NO: 225205 - DNA, 388 bp, Gossypium hirsutum
gttccttccttcgccgtctattgctttttgttacctcgatttcaagtgaatcagagatgggtaaggaaaagactcacattaacattgtggttatcggccacgtcgattctgggaaatcaaccaccactggccacctgatttacaagcttggtggtattgacaagcgtgtgattgaaaggttcgagaaagaagctgctgagatgaacaagaggtcattcaagtatgcttgggtgcttgacaagctcaaggctgagcgtgagcgtggtatcaccattgatattgccttgtggaaatttgagaccacgaaatactactgcactgtgattgatgcacctggacaccgtgactttatcaagaatatgattactggtacgtcacaggctgactg

SEQ ID NO: 225206 - DNA, 370 bp, Gossypium hirsutum
gtcttgctgaggccattgatgaaggtcgtattggtccaagagatgatcccaaggttcgttccaagattttggccgaggagtatggttgggacaaagatcttgctaagaagatttggtgtttcggccctgagacaactggtcctaacatggtggttgatatgtgtaaaggagttcaataccttaatgaaatcaaggactctgtagttgcggggttccagtgggcatcaaaggaaggtgcgatagctgaagagaacatgaggggtatctgctttgaagtctgtgatgtggttctccatgctgatgctatccacagaggtggtggtcaaatcattccgactgccaggagggttttctatgcttctcaacttac

SEQ ID NO: 225207 - DNA, 306 bp, Gossypium hirsutum
ctcactactgttcaagaaaagttacttaaagaaaggaaaaccatggctccgggggcaaaacccagcccgattagcccgaatcccgacccgaattctaaggagatccgctaccgcggcgttaggaagcgcccatggggccgttacgcagccgagatccgagacccgaggaaaaagactcgagtctggctcggcaccttcgacaccgccgaggaagcagcgcgtgcttacgatgcgaaggcgcgagagttccgcggcgctaaagcgaaaacaaatttcgccgacaacaacgccaacgacttcacgcgc

SEQ ID NO: 225208 - DNA, 329 bp, Gossypium hirsutum
cattggtcttgtgaagttgatgggtcgctacagtggttttattgcaatgtgggggactcttgcaagccgagatgtggattgttgcttgataccagagtctcccttttatcttgaaggacctggaggactttttgaatacattgagaggcgacttaaagaaaatgggcatatggttcttgtgatagcagagggtgcaggacaggagctgctttctgagagcttgcaatcaatgacgcagaaagatgcttcaagaaacaagcttcttcaggatgttgcgctatggatatcacagaggatcaaggaccacttctcaaaaaaaaggaagatga

SEQ ID NO: 225209 - DNA, 383 bp, Gossypium hirsutum
acaaagtttaatatggcgaagaggaagggtgatgtagctcaaagagcatggagggtactgcgtttagcattattatgggcgagaaaaggtggggtgttcaggagacggctgatgatggagctacgattggtgcctaagttcctcaagggtcttgctcatcatcaacctcatcgtcatcaccaactgatgagccattataaggaacgccagctttcattcgacgagacgcccatttttcacgtcaagatgcaccgtccagcctccatgcgattccttcttccttgcattagcactgaggaagtcgattttgactatgatttcggtcccgatgattacgatggggtttactggtatgatgatggtgggagaaagagtgactcaac

SEQ ID NO: 225210 - DNA, 367 bp, Gossypium hirsutum
cggacgcgtgggttaatctccaaactttcttcccatttcttcattacattggggagagggaaaagaagcaaaaaaacatggccaaagttctgttgttcattgcactatgtgtgcttccagctttggttagtgctacacgcattctgaataatcaattggtggtagaaggctatgtgtactgtgatacttgccgtgctggttttgaaacccctaagactagaagcctagctgatgccatggttaggttggtatgctccgacaggaagagcggccaagttgtcttcaaaaaggagggatacaccgacaaaaccggaaaataccagattcgtgtatccgaggatcacttggatcagatctgtgatgcagt

SEQ ID NO: 225211 - DNA, 390 bp, Gossypium hirsutum
  unsure (1)..(390): unsure at all n locations
gggcggcccacgcgtccgcccacgcgtccgaaactaganacacttttctaagagaggagcgactgagaagtgagagcacagaaaattttcaatgagtgggaaaatcaccatggccatggctgcactttttgtagttctagctgccaatgtgttgcagagtacaaatggtgcaacttatacagtgggtgactctactggctggaaagtccctaccaataatgatttctacgatgattgggctgataacaaaatcttcgttgttggggatgttcttgtgttcaatttcactaccggacaacatgatgttgcagaggtgacagaaactgcttacgatgcgtgcaacactgccaatactatatcaaccgtcagcaccggaccggcaaggattac

SEQ ID NO: 225212 - DNA, 329 bp, Gossypium hirsutum
cccacgcgtccgcccacgcgtccgcccacgcgtccggcctagccactgcttcactgccatctcttaaaatttccaaaggatccaacccatttcaggttgttttcaatggcatcatcggacttgaaagaatcagctgccaataaccctgggcttcatactacccctgatgaagctaccaaagactacatcatgcagcaaactatgtatcgaattaaggatccaaaagtcagtcttgatttttactctcgtgtattgggcatgtcgctgcttaagagagtggatgttccagaattgaagtttaccttgtactttatgggctatgaggatgt

SEQ ID NO: 225213 - DNA, 392 bp, Gossypium hirsutum
tatcctctccctctctctcttgtgctctctttcatttttccatagctttccttgcggtcaaatactaatcccttttttttttctccctctctttaaaatttgatttttacagagcacgaaaagtaaaaagttatggcggaagaagaagaaacagagctgagcgatgatcaaaagaaaggaatcgccaaatggttcctcgtaaacgctcccgctggagaaatccaatatgtttccaaagatttaaaattggttttgaatgatgatgatgtgtataatgaggcggcatcggaggcgtttcccgtttacaacaaatctcacctcatttccctcaaaatgcctggtggattcggtgatgtgttggttacatcatatggggagcttcaggataacga

SEQ ID NO: 225214 - DNA, 339 bp, Gossypium hirsutum
ctttctttgtggtatctgaacttattaaagcggtgaatagtgttcgccgagagggctgccaaaaatcccccgagtatcaagtgtttttgaatgatcttcctgggaatgacttcaacaccattttcaggtccttgtctatcttccagaacaaactgagggagcaacttggacccggcattggaccatgttttttcactggagtacctggttctttctacggaaggcttttcaggaaaaacagccttcattttgtacactcttcctataatctgcaatggctctctcaggttcctcgagggctggaaaataataaagggaacattttacatggctagcaca

SEQ ID NO: 225215 - DNA, 370 bp, Gossypium hirsutum
atttcacttaataaccacattccttaaattcccatttctgagtctcaaagttcgcggtaatggcgtcgaaaagaatactgaaggagctgaaggatttgcagagagatccaccaacgtcatgcagtgcaggtcccgtagctgaggatatgttccattggcaagcaaccatcattggtccaaacgatagtccctatgctggtggtgtttttcttgtaaccattcatttcccacctgattatccatttaaacctcccaagcctgttttcaggttgccttcaggaccaaggtttaccatcccaacataaacagcaatggcaatatctgcttagacattctcaaagagcaatggagtcctgcactcaccatatct

SEQ ID NO: 225216 - DNA, 394 bp, Gossypium hirsutum
gcaatgatcgtgatcgtgtggtcgttgccagggatgagttgcacaggatgttgaggcggaggatgagttgagggatgctgtgctgctggtatttgcaaacaagcaatcttccaaatgctatgaatgctgccgagatcactgacaagcttggccttcattctctccgtcagcgccactggtacatacagagcacatgtgccacttccggtgaaggactgtatgagggactggattggctctcaaacaacattgcgaacaaggcttaaatgaaacaattgaaccgacggtcacactaacaatggccccattttgatgttctggatgtccatctcgttcaagtgttctggctttctttttttatatttcttattccctgcaaacattacccatttgt

SEQ ID NO: 225217 - DNA, 336 bp, Gossypium hirsutum
cccacgcgtccgctcagaagccatttctagctcctccgctcattcacgcagtgctttaagcaagatcgcatgtaatagactccataaagaattagtggaatggcaagttaatccacccactggattcaagcataaagtcactgataatctccaaagatggataatcgaagtcaacggagcccctggaacgctttatgctaatgaaacttatcagcttcaagttgattttcctgagcattatcctatggaggcaccccagatattctgtatgatagctggtccccagccatgactgttagttccatctgcatcagcattctcttcatgttatcaagc

SEQ ID NO: 225218 - DNA, 358 bp, Gossypium hirsutum
ccaacttgggtattttaactttactccatcttcctcctctccgttctttctttttaggatctgggttttttccccccaattttttaaggttataaaaaaagaaaatggggagaggtagggttcagttgaagaggattgagaacaagatcaacaggcaagttactttctccaaaaggagagctgggttgttgaagaaagctcatgagatctccatcttgtgtgatgctgaggtcgctttgattgtcttctcccacaaagggaagctctttgaatactccactgattcctgcatggagaagatccttgaacgctatgaaaggtattcttatgctgagagacaacttgttgctactgagcc

SEQ ID NO: 225219 - DNA, 302 bp, Gossypium hirsutum
gtaatgtgtataatcaatttacattttaattaaagaagctactttataaacgcgtggacatactacatgagaatacttctttggaacaacgttgacctgaagaaaatgcttattgatccaaaaacccaatttttcatacacaaaacacctatttccctctatgccctaaactcgacctaatcacaatactcaggcctcacacttatgctggttgaataatacaactcttccaacatgacaaataaagtgtgctccaactcctcaaggataaccacaggatttatggcccttcattataacac

SEQ ID NO: 225220 - DNA, 368 bp, Gossypium hirsutum
cccacgcgtccgcccacgcgtccgttttttttactgtgttttattttctcttgtgctaaaactgtttggtcggcaagaaaactttagaatcatgggagtgccggaaactgatccattggctcaattgagcttgccgccggggtttcggttttatccaactgatgaagagcttttagtgcaatatttatgcaggaaagttgcagggcatcatatttctctgcaaatcattggcgaaatcgatttatacaaatttaatccatgggatttaccgagtaaagctttgtttggtgaaaaagagtggtatttttttcagtcctagagacagaaaatatccgaacgggtcacgacctaatagagttgcagggtcc

SEQ ID NO: 225221 - DNA, 285 bp, Gossypium hirsutum
cccacgcgtccgagaaacccgccgccggggggatgacttgttttgatcccagggaacactaccatccccaccaagaaagaacaggtcttttcaacatactccgataaccaacccggtgtattaatccaagtttacgaaggtgaacgaacaagaacaagagataacaacttattaggcaaattcgaactctccggcatcccaccagctccacgaggtgtaccgcaaatcaccgtgtgcttcgatattgacgccaacggcatcttaaacgtttcagccgaagacaaa

SEQ ID NO: 225222 - DNA, 351 bp, Gossypium hirsutum
cccacgcgtacgaaaaatcatttttctgaaattttcctccatggttatcggcgccaagtttatcatacttctctatacatttctctctataggactcaatccatcacgagcacaaacctgcattcaagctggttaatggtattcccactcttaattccccatagcccatataaattcagctcttttcacacaccttatttgcgcttttgctaacatcaatgcctcattctatcaactttcctttttttattcccctgaccaacacttatctacttttacaaacacaagcaaacaaaaaaacccatcagtcaccacgcttttatccattctatgaggaaacgcaaaccattc

SEQ ID NO: 225223 - DNA, 364 bp, Gossypium hirsutum
gtgcttcctatcttcacccgaaaatgcaacgaatgtcaccactgtctgtcaggggaaagcaataacatgtgcgaactgattacgatcaactgggactcgaggtgttatgccttgatgatggcaaaaccagattttccatcaacgggatcatctatataccactgggatggaacactgacttttaaccaatctactgaccaacatggtagccacagtgacaagatcagaacaaccgacacatttgataaaggcacaactaatagctgtgggatatgtacaggttgacgggccactgttaatgttgtcacaccgaaagaggctcaaactgttactgcattgggactaggcgccggtggtttagtca

SEQ ID NO: 225224 - DNA, 353 bp, Gossypium hirsutum
ctcgaatgtgctgtttgtttgtcggaatttgaagaaaacgaatcgggtcgggtattacccaaatgtaaacatagttttcatttagagtgtatcgatatgtggtttcattctcactccacgtgtcctctttgtcgaacttccgttgaaggatccgtacccgtttctgataacgcgggagatttggttattacgattaatgaaccgtcaaatggagagtccggatccaatcaagaacccgattcgtgtcagcacgaggatggtcggcccggttcgtcggcggggaggaagttgtcaatcgaggttcctgtaaggaatattgaaggcttcataaatgagtcgagtgagtgtgagtc

SEQ ID NO: 225225 - DNA, 272 bp, Gossypium hirsutum
ctactttctaacaccaaaaatagatcaaacccgaaatttatcgtgcctactcttaggcctttacaggaagaaaggttgagaaatctacagcaaagactgggagtcccgtttgatggatctcgggtggatcatcaagatgctcttaagctgttatggagattggcttatcctaacagggagcttccacctcttaaatcagagctttggagggacatgggttggcaaggccagatccttccacagattttcggggtggggggttcatatcattg

SEQ ID NO: 225226 - DNA, 372 bp, Gossypium hirsutum
gtccgcccacccgtccgaaaatgtcgaaggctggtgcattggatctggcatccggtctgggcggcaagatcgagaaaaccgaagtcctttccgctgttgaacagtatgagcgatatcatgtcttttatggaggcgaagaggaagagagaaaagccaactacactgacatggttaacaaatactatgatcttgttaccagcttttatgagtttggatggggtgaatctttccattttgctcccagatggaaaggggagtctctcaaagaaagcataaagcggcatgaacattttcttgctttacaacttgggttgaagcctggacacaaggtgttggatgttggatgtggaattggtggaccacttagagaaa

SEQ ID NO: 225227 - DNA, 375 bp, Gossypium hirsutum
tcccttcttaacgacgactcgaattctaaaaaagaaaaaaacctacgccatgaggcggcctcttctccgtcccattcttaaccttcctcttcttctatttctactcagtcccaaccctcggttcctacgtatacgacgctagcgccaccaccaccaccgtcatcaactctacagatttcattcgtacaagctgctacgccaccttgtatcccgatatttgctatacttccctttatggctatgccaacgccatccaacaagacccagctcgtctagctcgtgctgccattagtgtcagcctctctaaagctcgtaacatggcagtctacgtctctaacctctcccgcgaagccgattacggcgccgacccaagag

SEQ ID NO: 225228 - DNA, 183 bp, Gossypium hirsutum
cggacgcgtgggcggacgcgtggtctgacgcgtgggctggattaagattggggaccgtgtacggtccatggggaaggcctgatatggcgtatttttcgtttacgagaaatattctgcaggggaagcccatcaccatttatcggggaaagaatcgggttgatttggcacgagattttacctaca

SEQ ID NO: 225229 - DNA, 371 bp, Gossypium hirsutum
cccacgcgtccgcccacgcgtccgctctaatggctcttctattcttgaggcatgctttgtacctaacgagtggagaagaggacgatgatttatctcgttttatctctcttttcctgctccgagctgccggttttcttctcccctgttacattgtggcctgggctatcagcatattgcagcgccgtaggcagcgacaggaagctgcagctatcacagcggctgatgttgcagtaatgatacaggcaacacgacctcggtccatacattacagtatagcagcgggaccttcagtgactcaccaacaagagcaacctcagtccatacactacagcgtagctccgggaccttccacggctcctcaaccagagcaa

SEQ ID NO: 225230 - DNA, 367 bp, Gossypium hirsutum
gaaggtttggttcaaaagcaatgggaaaggagagactacctcggtgtccatccgcaaaagcaagaaggtttcagctacattggcattcacatcccagtcggtcgcgtccaagctgacgacatggacgaactagcccggttagccgacatgtatggctcgggcgaactcagactcactgtggagcaaaacatcataatccccaacgttgagaactcgaaactagaagcattacccaacgagcctctattgaaagatcggttttccccccaaccaagtattctcatgaaagggctagtagcttgtactggtaaccagttttgcggacaagccattattgaaacaaaagctagagccttgaaggtgacgg

SEQ ID NO: 225231 - DNA, 368 bp, Gossypium hirsutum
aaaatggggaaagttcagtttagtgtgaaccaatatattccgaactttattattgcgagcgattaaaataacacgaggtagatgacgatacacacaaagttcgatgagcatgctccaacaccagccatgcatgagggtaaccaagcgcacacttaggaccacatggctcacaaactcgtgcaggaggcttgaaccaatgccacactaggggcttaggactactctgcatctgaatacaaaaacttggagctggtaagctcgaccaagatgtgggtgaaactgaaccaggactgagctataaactcagggacagaaaaggttgatcccaaagcagctaatttgagtgagaaatacagcagttggttaaa

SEQ ID NO: 225232 - DNA, 402 bp, Gossypium hirsutum
  unsure (1)..(402): unsure at all n locations
ggaaanaacggggcggccacgcgtccgtgcttaaacagacccccccccaaattttttcccttgaactttttccgcagtcaaacgccgtatttctcgtggttcgatgcacaagaggcgtgccactggaggtaaaaagaaggcttggaggaagaagagaaagtatgagcttggaaggcaaccagcaaacacaaagctatcaagcaacaagacagttaggaggattagggttcgtggtggaaatgtcaagtggcgtgctctgaggctcgacactggaaactactcgtggggaagtgaggccgtgactcgtaagaccagaattttggatgtggtgtacaatgcatccaacaatgagttggttcgtactcaaactctggttaagagtgctattgttcaagttgatgc

SEQ ID NO: 225233 - DNA, 373 bp, Gossypium hirsutum
ggaagctgtaggtgtggaacttgataacactggagctgtgaaggtggatgagtgctgacgtactagcattcccagtgtatgggctgttggtgatgttacaaatcggatgaacctgactcctgtggccttaatggaaggaacctgctttgcgaaaactgtttttggtaaggaacctagcaaaccagactacagccatgtaccttgtgctgtttttagcatccctccactttctgttgttggtctcagtgaagagcaggcaattgagcaagcaaatggtgatgttctggttttcacatcaaccttcaatccgatgaagaacactgtatctggacggcaagaaaagacggttatgaagttagtcgttgatgcagag

SEQ ID NO: 225234 - DNA, 365 bp, Gossypium hirsutum
cccacgcgtccgcccacgcgtccgtagaaagcccggtatgactcgtgatgatcttttcaacattaatgccggaatcgtcaagggtctatgttctgcaattgctaaatattgccccaatgcacttgtcaatatgatcagcaaccctgtcaattcaactgttcctatcgcagctgaggttttcaagaaggcagggacatatgatgaaagaaagttgtttggtgtaaccacccttgatgtggttcgggctaagactttctatgctgggaaggctaaagtaaatgttgcagatgttaatgtccctgttgttggtggtcatgctggaattaccattctcccactattttctcaagccacaccaaaagcca

SEQ ID NO: 225235 - DNA, 366 bp, Gossypium hirsutum
gttctggctcctctgccaccgttggttccccagtaaattcttggtggggatccgccaatgggaaaccggactgggcagtcgatgcagatggctcaggcaagcttcgcaggtcatcttcatttgagcttggcaatggagacgagcccgatttatcatgggttcaatcccttgtaaaagaatctcccactgaggtcaaagagaaaacaggtgtgcctgtttcaggtgtaacacttaatgcttctacaggtctaggttcaagcatgaactctcgaattgatccggtcgatactgcagtgttgggagcatggattgagcaaatgaagcttgatgagctcgtggctcagcaaaactgaaaaccagtttcac

SEQ ID NO: 225236 - DNA, 361 bp, Gossypium hirsutum
cccacgcgtgcgcttttatttgtgtagcgattctcagttagtcttacatttaagcttacagcttctatacagagttatataatgggtaaggagaacgttcacatcaaccttgatgtcatcggccatgtggactctggcacggcgaccactactgaccatttgatctacatgctcaggggtattgacaagcgtgtgattgagaggttcgagaaggaggctgctgaaatgaacaaaaggtcattcaagcatgctaggctgcttgacaagcttaaggctgagcgtgaacgtggtatcaccattgatattgccctgacgaagtttgacaccaccaaatactattgcaccgctattgatgcacccg

SEQ ID NO: 225237 - DNA, 369 bp, Gossypium hirsutum
gatctctctctctctctctctttttttctctctctctctctctctctctgggtagaaaaaaacctccggctattggggtttttggtttcgtagattcgtttcgcttcatttttgtctcgttttcaaacagtaatttcctttttttttttcattgttatttttcttggaattttttgaagtgtttaatccaaaaaaatggcgttagtttcattcgtcgggagggttcttttcgcttcaatgttcatcctctctgcttggcaagagttcaatgaatttggtgttgatggagggcctgcagctaaggcactcaaaccaaaattcaatgtcttctcaaagactgtgacagctcatacaggggtggaagtgcca

SEQ ID NO: 225238 - DNA, 371 bp, Gossypium hirsutum
cccacgcgtccggaataagaaaaacgctgcttgcaggtatgtcatcatccgatgggccagaattagttgaaagggatgttaaggacaaggtggatgacaaagaagacaacagtggatttatagacaaggtcaagggtttcattcatgacattggtgagaagatcgaggaaacaatcggctttggcaagcctactgcagatgtagctgagattcacctcccttgtatcaatcttgagaaagcagaaattgtcgttgatgtcctcataaagaacccaaaccctgttccaatccccctcgtcgacattgactacctcattgaaagtgatggtagaaaactcctttcaggcttgattccagatgctggaaccatc

SEQ ID NO: 225239 - DNA, 367 bp, Gossypium hirsutum
gttgaaggagaagaagggacagctacttgcaataagatgctttcaacaaaggaatctgctcacaaatatgctgaactcttagtaaagcttgctgtagctttgggctttgatggatggctgctcaacatggaggttgaccttgacattagccaaatccccaatctcaaagaatttgttagctatttaacgcagacaatgcactcctcggctcctggttctttagttatctggtatgatagtgttacaattgatggaacacttagttggcaaaatcagttgaatgaaaagaataaaccttttttcgatattagcgatgggatcttcgttaactattcatgggaagaggactatccgaagctatctgcaa

SEQ ID NO: 225240 - DNA, 374 bp, Gossypium hirsutum
cggacgcgtgggcggacgcgtgggctttcagataaagatgtgaagacaatgtgttggaaatatgcagagttagaaaagagcttaggagaaattgatcgtgctcgagcaatatatgtatttgcatctcagtttgctgatccacgctctgatgcagatttttgggataaatggagggagtttgaggtgcaacatggtaatgaagataccttcagagaaatgttgcgtattaaacggagtgtctctgcaagttatagccagacacacttcattctccctgagtatctgatgcagaaggatcagaacatcgatgaagctaaggacaaaatgaaacaggctggtatctctgacgatgaaatggctgctcttgaaaggca

SEQ ID NO: 225241 - DNA, 358 bp, Gossypium hirsutum
cccacgcgtccgagagtatagatgctcagcttgaaaagatgaagaaatatgccggtggtattagggtcttggcccacacccagattaggaaaatgaagggattgaagcagaagaaggcacacctaatggagatccaagtcaatggtggaacgattgctgacaaggttgattttgcatacaagttctttgagaaacaagtccccattgatgctgttttccagaaggatgaaatgattgatatcatcggtgttacaaagggtaaaggctacgaaggtgttgtcactcgttggggtgtcacacgtctgccccgtaagacccacagaggtctgcgtaaggttgcttgtattggtgcctggca

SEQ ID NO: 225242 - DNA, 376 bp, Gossypium hirsutum
aaaccatacaaacaaatcctgaaagactctctctttacaacgtaaagagcaaaagcggcaacagcaaaacgtgtagcaataaggtaaaaacacggtagggaaggaaggttgtttatatatacatataaaagttataacggagaaaaggtcgaacgattcaaaaaaacccaacgatggctatgatgttacggtcgctcgctaggccgcttgaacgttgccttgggttaagggccggtggggatggtctcatgtggcacactgatcttaaacctcatgcttccggcgattactctatcgccgtcggtcaagccaataaaaacctttgagatcaaagccaaggctttacatcttctttgggtacctatgttggtggtta

SEQ ID NO: 225243 - DNA, 363 bp, Gossypium hirsutum
atttgatgcagtatatgcttagcagcctaaaagcagcggctgaagcggcgggtgggccagaatggggtagcactggcccaactgatgctggtcactacaacaattggccagaagatacgccttttttcaagaaagaaggtggtggttggaatactccatatggtgaattcttccttacctggtactctcagatgctgttagaacacggggcgagaattctatcgtccgcaacatcgatttttgacggtgcaggtgtgaagatctctgtgaaagttgcgggaatccactggcattatggaacccgatcccatgctcctgaactcacagctgggtactataacacaaggtaccgagatggttacc

SEQ ID NO: 225244 - DNA, 367 bp, Gossypium hirsutum
atttggtttcactttctgttttcttcttacagaaagttgtcttgaaattggatgtggatgaaggcaaagagaaacagaaagccatgaaagctgtttccggtctctccggtacttgcttaaaacatctctttttgttctctaatgttaatggtttattatcaggaacttgtcttcttcaattctctctaatttttgtaggtgttgattctatttcgatggatatgaaagacaagaagttgacagtgatcggcgacgttgacccgattaacatagtgaacaagttgagaaaacaatggcataccgagattttaacggttggaccggcgaaagaagagaaaaaagatggaggagccaagaaagatgaagg

SEQ ID NO: 225245 - DNA, 366 bp, Gossypium hirsutum
ttaaaactctgcaaaaccacaacgaaagaaacccattttcaaattttttttctattgcaaaattttctgctttttgttttgtctgaaactgaaaccatgggagggatatcggggtttcttatgaagtttccctcattgatccactttttgttgtctctcctggagaaaatccctgcgagattgcctatgccaattgagaaattggtttctcgtgtttcatatcctcgcaccggcaggcacttgcagcgctataataacagaggcttccgcttagttgttgggtgcattccctacaggtacagggaaagcgaagatggcaagtcaattgaggaagcgattgaagttcttgtaataaatgcacaaaat

SEQ ID NO: 225246 - DNA, 369 bp, Gossypium hirsutum
cccacgcgtccggtgctccacaagttagggtttgtgaccgatgcatggctgaagggactcagaggctgaataatgctaagcaaatagcaagtaaacctactgtattgcagagccacgaggatcttgctaggaagcttcaggaagagatggggagaagtcgcagagcatcatcaggctccatgtctgatggctctggtaggcggatgaaggaagttgcctgtcctacatgcacagttcatttgcaggttcaagttccaagctcaggttctgagaccattgaatgtggggtgtgccagcatccttttctcgttagtgcccattgatcaatgcgcttttgtcaccagtgaattgctctttttctctattaat

SEQ ID NO: 225247 - DNA, 371 bp, Gossypium hirsutum
gccacactcaaagtcccatacgaatctaaagggactggtggattcaagcgagctgcacttagattcgtggctgtttccaacaggacaagaattatgttccttagcacgttctacaccatgagaagtgatgacttttcttctctatgcggtcctgttgttgacgatgtgaagcttttgagtattcgtaacccttgatcatcaccgaccttgttcggggctgttgatgatccattgttggacgtggtctatcaacattttgtcttcctaaggatgatttttttttctttggttctttgtgggcttggaaaatcaaaggttttcgtgtgagctaaagctatatattgtggggaaaaaagaacctaggctatata

SEQ ID NO: 225248 - DNA, 376 bp, Gossypium hirsutum
atgattcgtaaaattgccgaggaggatcctgatgagtcgagtggcaaagatgagaaagaagtggaaacatctggtgatgatgatgagaaaaagggacaatacaccaagttctggaatgaatttggaaaatccattaaactcggcatcattgaggatgcaaccaatagaaatcgcttggcaaaactccttcgatttgagagcaccaagtcggatggtaaattgacatcacttgatcagtacatctcaaggatgaaatccggacagaaagatatattctacattacaggaaccagcaaggaacaattagaaaaatctccattcttggagaggcttaagaagaaaaattatgaggtaattttcttcactgatcctgttg

SEQ ID NO: 225249 - DNA, 365 bp, Gossypium hirsutum
cccacgcgtccgcggcaaacaaaccaagtcaacctaaagccttaggcaccatggcaacctctgctatccaacaatctgctttcgttggccagaccgctttgaagcagtccaatgagctcttacgcaaagtcggagctttcgatggtggtcgtgttaccatgcgcagaactgtgaaaagtgcccctaccagcatctggtacggccctgaccgcccaaagtacttgggtccattctcagaccaaatcccatcatacctgacaggtgaattccctggtgactatgggtgggacactgctgggttatcagctgacccagagacatttgctaagaaccgtgagcttgaagtgatccactgcagatgggca

SEQ ID NO: 225250 - DNA, 318 bp, Gossypium hirsutum
ctctcatccacccatttctctaaatttcctacatttttttctttagaaaattgcggtttctccttctcttcacaaatcaaaatgcgtgagatccttcatattcaaggtggccagtgcggcaaccagatcggagcgaagttctgggaagtggtttgctcagaacacggcatagatcccaccggtcgttaccaaggagacttggatcttcaactcgagagaatcaatgtctactacaatgaagccagttgtggtagattcgttcctcgtgccgtcctcatggatcttgaacccggtaccatggacagcatcagatcttgt

SEQ ID NO: 225251 - DNA, 370 bp, Gossypium hirsutum
gcgaaaagctggtcgaaagaagtttaaagagactcgtcatccggtatttagaggtgtacggcaaaggagagggactaagtgggtgtctgaaattcgtgaaccttacaagaaatcaaggatttggttggggactttcctttgccctgaaatggcagctagggcttacgacgttgccgtcttagcgcttaggggcaaatccgccgctctgaattttccagactcggcttctgttctccctagggctaagtcttcttcgccaaaagacatacaaatcgctgcgtttgccgctgccgaggcttttaaaccagtaacttcaacggatattgatcctcaaccagtgggatgctcatcatcaacctcagtttccact

SEQ ID NO: 225252 - DNA, 368 bp, Gossypium hirsutum
ttgtctacactttagattaagaaaggaagtacgctacgaaatcagatctctgctgagtcattttccagttggcaacaatggcagaatctgagtcggactctgactttttgaaggaattctacattcctgcgtatatatttaatgatgaaacaaaattttctgatcttcgtgatgtacctgagtttccagtgcttgtgtttatcaactccaaaagtggtggtcaattgggtggcgatcttcttaatacatatagaagtgtcctcaatgagcatcagattttcgatgtgggggaagaggcccctgataaggtgcttcgcagagtttacaccagactagaaaagctgaaacaagaaaaagatgaatttgcc

SEQ ID NO: 225253 - DNA, 367 bp, Gossypium hirsutum
ctcatctctgcttttgcccccttttatctttcttcttctttttctccttacgtgtgagccgaatttttccggcgaaacggtgtcagatctttgtgatctatagccggaaatttcatttcgagttcgacgatctcacccttcgatctttctattttcttcagcctaccatgaatcccgaatatgactatcttttcaagctacttcttattggagattcaggtgttggaaaatcttgccttcttttgagatttgctgatgattcatatgtagaaagttacataagcaccattggggttgattttaaaatacgcactgtggagcaagatgggaagaccattaaacttcaaatttgggacactgctggaca

SEQ ID NO: 225254 - DNA, 356 bp, Gossypium hirsutum
cggacgcgtgggcagatctgaaaatgaactctaaagcttaagaaaaccccaatcgtcggcaaaccaaaaggcaaaaaagagtatcttcttttgtatatttttaatccaaaaaggcttaatttctcttcgcgtgtgtgtgtgtgttttgtttctctttctcgatttttcaaaatgcagaagaaaacggcgtattcgttccccgacgagattttggagcacgtgttctcgttcatacattcgggcaaggaccggaacgcagcgtcggtggtgtgcaaatcgtggtacgagatcgaacggtggtgtcggaggaagatattcgtggggaactgttacgccgtcagccctacgatggtgat

SEQ ID NO: 225255 - DNA, 362 bp, Gossypium hirsutum
cccacgcgtccgaaaagttatctcatcttgagcaaagttacagtcgtcctcatggaacaactatggcagccatcaaagtccacggaagccctctgtccactgctacacaaagggttcttgcatgcctttacgagaaaggcactgattttcagtttgttcccataaacatggctgctggtgaacataaatccgaaaactacctttccctcaatccattcggtcaagttccagcttttgaagacggggacttgaagctcttcgagtcaagagcagtcacccattacattgctcatgaatacagcgacaaggggacccaactcttaattcctggctctaacaaggatatggctgtcttacaatta

SEQ ID NO: 225256 - DNA, 370 bp, Gossypium hirsutum
cggacccttgggatctgtttatgaaacagatacctttagccttattgacaaaaaaggtttgaaggttgaaaacgttgtggacttcagttggtcaccaactgatctcattcttgcactttttgttcctgaacttggaggtggaaaccagcctgctagagtgagtcttgttcaaattcccagtaaagtggaattgaggcaaaagaatcttttcagcgtcagcgactgcaaaatgtactggcaaagcaacggtgaatatcttgctgtaaaagctgaccgatacacaaaaacaaaaaaaagcacttataccggttttgagctctttcgcatcaaggaaagagacataccaattgaggttttggagcttgataat

SEQ ID NO: 225257 - DNA, 369 bp, Gossypium hirsutum
tctccgttgaaaacaataccgtttgcagccgaaaaaatggtagttgcagggccaggttatggtggtggcgccatgtcaaactccaagagcttagctgttcagattctaaagggcccatggctcatggttttcggctcactgttgatcatgtctgccgctggtgcaacctacatgtttagtctatactccggcgacattaaagaatcgctcggctatgaccaaaccaccctaaattatctcagtttcttcaaggatttaggcaccaacgttggggtcctttcgggtctcatagccgaggtaacacccccatggttcgtgttatctgttggtgcaggccttaacttctttgggtactttatgatttggttg

SEQ ID NO: 225258 - DNA, 390 bp, Gossypium hirsutum
  unsure (1)..(390): unsure at all n locations
tcgaaaaggcgtattacctcgtgagctctctccnttccttatttcatatttctacttctgctgcggcattattttcatttttctctttcttttattttttaataatgtttaattcatctacaaacgcactctcactgacgttcccctcacacgttgttgtagcattcggagatatgacgtcagatggggcgacgtcgacgcctgcaccagtgccaaggaggaaaccttcttgcagggagagagagaacaacaggaggagggagaggaggagaagagctatcgctgctaagatatatactgggctgagcgctcaaggaaattataatctgcccaagcactgggataacaacgaggtcctcaaagctctttgtgccgtggctgattgggttg

SEQ ID NO: 225259 - DNA, 372 bp, Gossypium hirsutum
gtttttcataccagaccacccatgagctccatcattcaaagctttcaaaagaacgggtccctccccgtctcccaaactgaatcaaaagaccactttccaccaccaggaggcccagggctgctgcgaagaaggctttcatctctgtctctaaaactacaacccacttcttcaccgacgacgtcatggacattccccagatccaagtccttgtcttccatgggagaatacgccggtagctccatcaggaaatggtgggactggggttggtcttgggttctctccaaaaagccctcgttcgctaaagacattgaaatgaacgaagaagaaaccaggatccttgggtgccacaacaaaggcagttggaggcatgtg

SEQ ID NO: 225260 - DNA, 379 bp, Gossypium hirsutum
tctcagcaaacttagcctatgaaaatcaccattacaagtcccaaagaagacccgcgggaattctaaaagaaagaaccagagttttctttctctttagtttacgtttattgtccttttggaatttttgatactaaaaaaaggaagcaacgaagaagggaaatggagggcaaagaagaggatgttagattgggagccaacaagttcacagagaggcaaccaattgggaccgcggctcagagtcaagatgacgggaaagactacactgaaccaccaccggctccatttttcgagcctggcgagttaacctcatggtccttttatagggctgggattgccgagtttgtggcgactttccttttcttgtatatcactattttga

SEQ ID NO: 225261 - DNA, 367 bp, Gossypium hirsutum
ggcagttgctggtgatgccttaaagaccaacattaccacattggggcctctgggtcttccaatgtctgagcagcttcttttctttgctacattggttggcaagaagcttttcaaaatgaaggtcaaaccgtacattccggatttcaagctagcttttgagcatttctgcattcatgccggaggaagagccgttttggatgaactggagaagaatttgcagctgtctgaatggcacatggaaccatcaagaatgactctctaccggttcgggaacacctcaagcagttctctgtggtacgaattagcttactccgaagctaagggtagaattagaaggggtgacagaacatggcaaatagcatttggt

SEQ ID NO: 225262 - DNA, 368 bp, Gossypium hirsutum
tcttagcaaactttgtctatgataatcatcatggcaaggaccatagaataccggcggtcatactaaaacaaagaaccataggaaccttatctttatttcacgtttattgatcttttgaaatttctgatcctaaaataatgatgtaacgctcaacgtgaatgattggcaaacaagacgcatgttaatggagagccatcatgttcacagtgaggcaaccaattgggaccgcggctcagagtcaagatgacggtaaagactacactgaaccaccaccggctccatttttcgagcctggcgagttaaccttatggtccttttatagggctgggattgcctagtttgtggcgactttacttttattgtatatc

SEQ ID NO: 225263 - DNA, 374 bp, Gossypium hirsutum
cacacatgtccccccacccatactttaattcccccaactttcttttctttgcaggcacgaccccttaaactaaaacccattttccttccatggtcggctccaacacattgatgagctgtggcatcaacaccgatttcccttcagtgctttcctgtacaaagtccaagttctccaccgatacgcctttacctagctttggcgccaatgttgctcaccgtgttagccatgtcgctgactggatgcctggtcagcctatgcctccttatcttgatggatcaacacctggtgactttagattttactcacttagacttgctgaggcgccctagaaccttgagagatacacggtatgtgctacgattcactgcagattg

SEQ ID NO: 225264 - DNA, 380 bp, Gossypium hirsutum
ggcccccaaaacattttctcttctttattttccaaatccctaaaaaaacccccggaaagcctaaaacctaaaacaaggctataatcggaagcttgtttcattagatttggaggaataaaagaaaagagtagaaagggggaatggattcagatcaggggaagctgtttattggagggatatcatgggaaacaagtgaggataggctaaaggagtactttggccagtacggcgacatcttgcagactgttgtcatgagagataaggtcacggggagacctcagggctttggatttgttgtcttctcagatcccgacgtcatcgatactgttcttcaagaaaagcacaccattgatggttgaactgcggagagatgctttaag

SEQ ID NO: 225265 - DNA, 347 bp, Gossypium hirsutum
  unsure (1)..(347): unsure at all n locations
caaaacatggggtattaattattttctaaatccctaaaaaaacccccggaccgcctaattttctaaaacaaggctataatcnaaagcttgtttcattagatttggaggaataaaagaaaagagtagaaagggggaatggattcagatcaggggaagctgtttattggagggatatcatgggaaacaagtgaggataggctaaaggagtactttggccagtacggccacatcttgcaaactgttgtcatgagagataaggtcacggggagacctcgtggctgtggatgtgttgtcttctcagatccgtacgtcatcgatactgttcttcaagaaaagcacaccattga

SEQ ID NO: 225266 - DNA, 369 bp, Gossypium hirsutum
cccacgcgtccggaataagaaaaacgctgcttgcaggtatgtcatcatccgataaggcagaattagttgaaagggatgttaaggacaaggtggatgacaaagaagacaacagtggatttatagacaaggtcaagggtttcattcatgacattggtgagaagatcgaggaaacaatcggctttggcaagcctactgcagatgtagctgagattcacctcccttgtatcaatcttgagaaagcagaaattgtcgttgatgtcctcataaagaacccaaaccctgttccaatccccctcgtcgacattgactacctcattgaaagtgatggtagaaaactcctttcaggcttgattccagatgctggaacca

SEQ ID NO: 225267 - DNA, 382 bp, Gossypium hirsutum
cacgcatcacaccgcaacaaaacttcagggagatctccgttacctttgatgtcgtcaagaaacgttctccttgtaatttcctcgtctttggtctcggctacgattccatgatgtggacttcgcttaatcccaatggcaacactatattcctggaagaggatcccaaatgggtccagaccgtgctcaaagacgcgccagtcctccacgcccaccccgtcaagtaccgtacgcagctcaaggaagccgacgctctgctctcccattaccgctccgaacccagctgttttccctccaaagcttacttacgaggcaacgacaagtgcaagcttgccttgaggggctttcccgatgagttctacgatacggagtgggattttatgat

SEQ ID NO: 225268 - DNA, 381 bp, Gossypium hirsutum
ggcccccaaaacattttctcttcgttattctccaaatccctaaaaaaaccccccaaaagcctaaaacctaaaacaaggctataatcggaagcttgtttcattagatttggaggaataaaagaaaagagtagaaagggggaatggattcagatcaggggaagctgtttattggagggatatcatgggaaacaagtgaggataggctaaaggagtactttggccagtacggcgacatcttgcagactgttgtcatgagagataaggtcacggggagacctcgtggctttggatttgttgtcttctcagatccgtccgtcatcgatactgttcttcaagaaaagcacaccattgatggtagaacggcggagagatgcttcaaga

SEQ ID NO: 225269 - DNA, 175 bp, Gossypium hirsutum
  unsure (1)..(175): unsure at all n locations
gggaaagatgtcgtgattgaaatcttaaggcagctatgcgttttcaaagtccgaaatgttagcaataagtcctggttgtnntnnnactatgtgacagattttcaaataagatgccccatgaaggagaaaaaatatatcaaggaatgcgcctatgctgttatcaaatctttcgata

SEQ ID NO: 225270 - DNA, 371 bp, Gossypium hirsutum
  unsure (1)..(371): unsure at all n locations
ctctagactcttcccttgtaactgttaaaatctttgtcactgtgagcattaatggccaccgctgaacctgaagttccagtcactgagcagcagccggcggcagcagaggagccaaagccggcggaaaagcctgtgaaggagaagagacccaaagctccaaaggagaaaaagcctaaacaacccaaatccacagcacgtcctccttattttcagatgatcaaggaggcgcttttggctttgaaagagaagagtggttcaagtccgtacgctatagccaaatacatggaagagaagcacanggcggtgcttccagcgaatttcaggaaaatcttangtcttcagcttaaaaactcagctgccagaggcaagct

SEQ ID NO: 225271 - DNA, 239 bp, Gossypium hirsutum
ggggcggtaactttgatgcatcatactgctatgctttgggctatggtgctggtgctctcggtccgcagtggaaaaaccggattgatatcatcagtaggaaatttgtgtgccccagttgaagaatggactgttggagggactgcccttacatcaatgatggatgtggagaggaggcatggttaattcaagcctgttatcaagaaggcaatggtagaattggatggtgcaccatttaagaa

SEQ ID NO: 225272 - DNA, 367 bp, Gossypium hirsutum
  unsure (1)..(367): unsure at all n locations
gaaaatatggagtccactaaaatctcacctctctttctcatttgcatgcttttgagtgtcctccgccactcccattcttggttgtggttcatgtggcactggcaaagcaccaccaaagccccctaaaggccccattacaatccctcccattgttaatcccccaatcaacctccctcccattctaaatccccctgtgacagtccctccggtgacggtggttcctcccataattactaagccaccaagtgggaaaccttgcccgtcggccacttgccccattgacacattgaaattgggtgcatgtgtggatctgcttggagggttggttcacattggcctnggtgacccacttgtgaatgcatgttgt

SEQ ID NO: 225273 - DNA, 353 bp, Gossypium hirsutum
cccacgcgtgcgtccacccatacggtgattcctaagagagcaccgctcggagtgggcgcatttcaatgttgatgcatatactgctgcatcattgaaggccggaacatatgcatatcctggaatgagacctacgaggtttactggtagtcagagtatcatgccacttggccacacgagtgaacatgaagagatacttgaagttattagactcgaaggccattcccttgtacaagaagatgcctacgtatcaagagatattcacctattgcagatatacagaggaagcgatgagaaagcttttggagcatgttctgagcttggctttgctccgatcgatgagatgttttcagatg

SEQ ID NO: 225274 - DNA, 377 bp, Gossypium hirsutum
cccacgcgtccgcccacgcgttcgtccacgcgtccggttttggtattgggggcggggggcaagcccgttcgtgctgagggtgaagattgcacttcacctcaaatctgtcaactacgagaaccatgaggaaaatttgccggaatccaaaagcgaccttcttctcaaatctaaccctgtttataagaaagtcccagtcctcatccatggtcataatcccatctgtgagtctctaatcatcgttgagtacatcgacgaggtttggaccacctctgcttcttccatgctcccttctgatgcctatgaacgcgcccagtcccgattttgggcggcctatgtcgaagataagttttccactgccttaagaagagtgttgtttg

SEQ ID NO: 225275 - DNA, 339 bp, Gossypium hirsutum
cccacgcgtccgggaagcagtttttactcgttggcctaaggctattgtgcagtttgaagattttcaaatgaagtgggcctttgaaaccttggaccgctatcggaaaaagttttgcatgtttaatgatgacatacagggaactgctggagttgcgcttgctggattgttaggaactgtaagagcacaaggtcgaacattggctgactttccagaccagaaaatagttgtggtgggagctgggagtgcagggcttggtgtccttagcatggctgtgcaagctggtgcgggagtgtcaggtaaaaattgaaactgttgcacaaaaactttttcttacttgat

SEQ ID NO: 225276 - DNA, 288 bp, Gossypium hirsutum
aacaaaatcaactgcttcacaatggcctctacaaccatggctctttcttccccgtcgttcgccggtaaggcagtgaagttctccccttccacccctgaaatccagggaactggccgtgtttccatgaggaaaaccaccaagcctgttccttctggtagcccatggtacggtcctgaccgagttttgtacttgggtccactttccggtgagccaccatcttacttgaccggtgagttccctggtgactatggttgggacactgctggactctcaactgatcccgagacc

SEQ ID NO: 225277 - DNA, 376 bp, Gossypium hirsutum
cccacgcgtccggtttcagcataaagcaagagtgaagcctcactttgggtcagggaagaagctgttgatactgggcatgatttctggcgtcttgttgcggacatattttctcaagaaatgttcagaatatttttctccctcagcaaagttgtccaaaaccccagcagccctgttctccttggttaccctgacttcagggttgatgcagatattgcgcaccaactgaaacccgcagattccgacagcaacacctacggccgcaaacagcggatacacctcaggcctcaaccatcgatttgccatcgagtgcacagcaaggatgcgaaatcaaagcgatagataagccaaagagaatagagagagagagctttgaaat

SEQ ID NO: 225278 - DNA, 313 bp, Gossypium hirsutum
ctttctctccggccgcgatcttaattcaccggagaatcgcaccgaaacggccgcttactcgtcacctgtgtgatctccgctgacacctgagggactcagtttattctaactcttcgccatcatgaatgcttaatatgattatctctataagcttttgcttattggtgatgctggtgttgggaaatcatgtctacttttgaggtatgctggtgattcatatctggatagctacatcagtaccattggtgttgactttgaaatccattctgtggaacaggagggacagaccatcaaacttcaaatttgggacact

SEQ ID NO: 225279 - DNA, 364 bp, Gossypium hirsutum
tctgtttatatgtatatatatatacacacaaaaaaataggctattctttggggctgttccgctggaggattggcttcgatattgcactgtgacaggtttcgagctctccttcccgcttctactaaagtaaagtgcatttcagatgctggcttcttcctccatgcgcaagatgtctcgggagggaagcacatagaagaattctatggcaaagtggctagactacacggatccgttaagaatttgccagcgtcttgcacttcaagaatgggagccagaccagagttggtatgtgtggctattttttgtatgacaaatcatagtcccttcctaattaattactcttgtgcatgtcttcttcattaac

SEQ ID NO: 225280 - DNA, 328 bp, Gossypium hirsutum
ccgggcggaccacacccgtccgaacctactaagggaaaggacccttaattttgcttttaatggcaactataaactgcgcactgatattcctatggatgtctacaaaatatatcaacaaggagctggcgcatgctattgacaagttcatcacacactctgctcctttagccgatataaacaatgcatattactaccttctccaaggcataggtctgatatgcatgattcactacaatgctaaagagagtgatgctgctgaatattagcccaaccaaggatcaaaactctaacttttagtcctactgagagtataattatgtgcctactt

SEQ ID NO: 225281 - DNA, 377 bp, Gossypium hirsutum
gtcgcttttgccgactcggcgtcgtttcaaacttgatccagctaataagctaggtggtccatatgaacctggcaaacaggtgaggagcgcagtcaggataaaaaacacaagcaagtcatatacagctttcaagtttcaaacaactgcaccaaagagctgtttcatgcgccctccgggtgccattctagcccccggcgagagcatcatagcaacggtttgatgagcagaaggatcaagttgcaatagaacaaatactacgggttgttttcctagatcctgagcgtccttgtcctgctctggaaaaattgaagtgtcaattagatgaggctgatgctgcgctggaggcacgcaaaaagccttcagaggattcaggtcca

SEQ ID NO: 225282 - DNA, 372 bp, Gossypium hirsutum
gagaaaagaaaatgggtttgattgttaagttgaagcgaaaggacatcgatgagggtaacgacgacttctccgatttctcgctttcgtcgccggccaccaagattcgtcgtctggatgctgatttgccccccataattgaggaagactccctccctgagaatcacgaaaaggccatcgttctctttaacccaaacccacttcttcttcatgacacacctcccttgtcttcccctccttctaccctctccttctctttcgattctcacctcctctccggatttaagaaccaaattctacgggcagctgacatgaaatcagccgaaactgaagagaacaagatggaaaacgaatgatgtctagcagttgtccatg

SEQ ID NO: 225283 - DNA, 374 bp, Gossypium hirsutum
  unsure (1)..(374): unsure at all n locations
aaaaaaatcacctactctctcactttgctctcttcttgttcctgtcctctgtcgccaaactatcgccgacaacctctccaaaagaatggcatatgaagggattctgttggggatgggtaatcctctccttgacatttcgttagtcgtggacgaagagttcttgaaaaaatatgatatcaagttgaacaatgcaattttagctgaggagaaacaccttcccatgtatcaagaaatggcatccaagcccaatgtagagtatattgctggaggtgctactcaaaattcaatcaaagntgcacagtggatgcttcaaattcctggtgcaactggttacattggctgcattgggaaggacaagtttggggaggaaatga

SEQ ID NO: 225284 - DNA, 432 bp, Gossypium hirsutum
  unsure (1)..(432): unsure at all n locations
aaatccccggccgccccacccgtccgcccacccgtccggaaaaacaaggngtggtcggagaggctatcaacagatcacaatgtttgagttgaggaagtaaggaaagaggntnangctcttcatcctgatgattcgcatgtcgtggtttacactctcggagtttgtaggattaatgtctttatccatgtttcttagatctatccgtgtcgttttttttcatctacctcttttctttatcttttccaattttcttctacttttttataattttctttcttttcttatttttttcttctttttttttctatttcttcttggggggggtgtgggttttcatcttttctttttcctttcctactcttttatctactctttttttttctttattcttcttttctctatctctctttctcattctcttcttttttatct

SEQ ID NO: 225285 - DNA, 378 bp, Gossypium hirsutum
cccacgcgtccggttttatcctgatgtgttaaaccctgattctccccatcccccgaagatctccttgatggctttgagggcggcggcaacgagatcgatgttctctggggcggctccccagggattcaggcgcatgtgttcaacagctacggctaattcctttatgccgcctccaattacggcgatgggcaacggcgagggaacccctggtcgagagcaagcgcctccaagtaccaacctctttgtctctgggcttaacaagcgcactaattcggagaaactgggagaagccttttctcagttcggacgtgtaattgatgccagagtagtgactgatcgtgtatcaggatattctaaagggtttggtttcggaagata

SEQ ID NO: 225286 - DNA, 380 bp, Gossypium hirsutum
cccacgcgtccgggaaaacaaaaatactactatatatcaccatgccttcttgggcttcttttactcttgtgtctagatgcacggtttccccagaccaaaaatctgacatcaaaaccttaaagctttcggtttctgacatccctatgctttcatgtcagtacattcaaaaaggggttttgctcacttctcctccttattcgttcgacgacctcgtgtgcttccttaaacaatccctgtccactactctctcctacttccctcctttggctggtcgtctcaccactgaccccgacggtcacgtccacatcaactgcaacgatgcccgcattgacttcctcgttgtgaaatcccccaatatttccattcacaacgttttggtc

SEQ ID NO: 225287 - DNA, 356 bp, Gossypium hirsutum
gccacgcgtccgaaagcttgaaattgtttaaagtggtgctgaaattggatttggagggcggacaaaggcagacaaaaagccatcaaaacagcctctggtctttcaggggttgaatcagttgccctggacaaggaccaaaaactcacactcacgggagacgttgatccagtcgtggcagtaaggaaactaaggaaggtatgttacactgaaatagtctcggtcggaccggcgaatgagccggagaagaagaaagaagagcccaagaaagatgaacctgaaaaaccggggggtgcgagcaaagatccgcccaaaggcgcggtggttcagtacttttatcaccccttaatgccctaata

SEQ ID NO: 225288 - DNA, 374 bp, Gossypium hirsutum
cggacgcgtgggaaaaaatggctcatcgtatagcgttttctgtgtgtgtcgtggctgttttttattcatcggtttgatatcgtcggaggctttctcggtcgtcggatcagaagttgatccgttgatcaggcaagtaacggacggtcaagatgatggagtggagacacagcctttgaccgctgagcatcacttctcgctgttcaaggctcggttcaagaaatcgtacggctcggaggaggagcatgattaccggttcaaggttttccgggcgaacttgagacgagcggcgcgtcatcagaagcttgacccgtccgcgactcacggtgtgactcagttcttcgatttgactcccggtgagtttcaggaagaggttt

SEQ ID NO: 225289 - DNA, 257 bp, Gossypium hirsutum
gttaatggtatacaaccatttgtgactctcttccattgggatcttcctcaaggcttagaagatgaatatggtggtttcttaagccctcgtatcgtggatgactttcgagattatgctgaggtttgcttcaaggaatttggcgatagagtaaagcattggatcacattgaatgagccatggagctatacttacggtggatacgtagccggatttctagcaccaggtcgttgttccgattggcaaaaacctaaactgca

SEQ ID NO: 225290 - DNA, 402 bp, Gossypium hirsutum
  unsure (1)..(402): unsure at all n locations
gcgacgccaacgcccgtccgcccaccgcccgtctcgcgaagaacaataactctatctggtactaaaagaacaannnaatcaccatgcacgaagagtgtactaagggcctgacttcttccannaagaagaannattgaaannagatggttcaaggaangtcagagagatacctaaatccgnnaagatgaagaacataaaaagaaggtcnngaggcaaagaatgcannttggaaaactatgcataccaatatgaggaacacnagtgaagggacgagaagattggtgcttaaactcccagcagctgataaaaagaagattgaagatgctattgaacaagccattcaatggctagacagcaaccaactcgccgaagccgatgaatttgaagacaagatgaaagagt

SEQ ID NO: 225291 - DNA, 345 bp, Gossypium hirsutum
ggtgtctccgccacgagggggggacaaacgttgtactctactacccgtatgggactttatgaaattataaagaacaaatggactgacaaggaaactgtgaatttgccacttacgagcaagatattggctggacttattgccgggggtgtcggcgccgccgttggcaaccccgctgacgtagcaatggttcgaatgcaagctgatgggcgactccctattgatcagcgacgcaattacaagagtgtaatcgatgcattgagtcaaatgacaaaacaagaaggtgtgggcagcttgtggcgcggctcagctctcacggtgaatcgcgcaatgatcgtcaccgcatcg

SEQ ID NO: 225292 - DNA, 380 bp, Gossypium hirsutum
ctgaaggtgtcttaataaacgccttcgatttaccttcgatttccatttacttctcgattgctacgtttttgaatttttagtgagcgaaaatgagagagtgcatttcagtccacatcggtcaggctggtattcaagtcggaaatgccgcctgggaactttactgccttgaacatggaatccagcctgatggccagatgccaagtgacaagactgtcggaggaggtgatgatgcttttaacacctttttcagtgaaactggtgctggaaagcacgtccctcgtgctggctgtgtggatcttgagcctactgttattgatgaagtgaggactggtacttaccgtcagcttttccaccctgagcaactcatcagcggcaaggaa

SEQ ID NO: 225293 - DNA, 380 bp, Gossypium hirsutum
gaaccttcgtgcattgctttcaactttgcaatacttaaaacccgagctttcttgatttgacggatccttggcccagagagtggttggcagccaattccgttaaccgaagttataacttcagctgccgttaagaaagcatacagaaaagccactctttgcgtccatcccgacaaattacagcaacgaggtgcaagcattcatcagaaatacatttgtgaaaaggtcttcgatcttctaaaggaagcttggaacagattcaattcagaagagcggtaaaatgcaatcttttttttttttaaatacagttgcgaatggcttcattacaataaaactatggtgctgtaaaatttacactgttagcataataaatgctctttttg

SEQ ID NO: 225294 - DNA, 346 bp, Gossypium hirsutum
agaaaagtcaaaaaacaaaaattttatggctcggaaattctttgtcggtggcaggtggaaatgcaatgggacaactgaggaggttaaaaagatcattacaacattgaatgaagctgaagttccttctgaggatgttgtggaggttgttgtgagcccttcatttgttttccttacctttgtgaaaagtctgttgcggtctgatttccatgttgctgctcagaactgttgggttcgcaaaggtggtgcttttaccggagaaattagtgctgagatgcttgtggagggtgagcatttcatgggttaataatcggttcattcttgaaagtaaggtctcttctttgaatga

SEQ ID NO: 225295 - DNA, 368 bp, Gossypium hirsutum
gtgaaaacgcttcatcttccgaggacaaatcactggatttggaattttctgaggatggacggaccggcacatttgtcattggcaatgatcgtttccctgcatctgtccttgatctaccttgtgttgttgagtcatacaaaacttacgatgatagtgcattggttaaaacagctgatgtcggtcaaatgattttggtcagagagtctggagaagcttctccagatgtggtggaatacagacatggtctaactcctccaatgagggatgctcggaagcgaagatttcgaagggagccagatctaaatccagagcttgtacaacgtgtagaaaaagatttggtgaacatcatgtctggaggaacagttgaa

SEQ ID NO: 225296 - DNA, 380 bp, Gossypium hirsutum
acccacgcgtccgagaaactccattgtaggtgtacctttgttaaatccaaacaaataaacatgtcagtggcttgttctaaaaacttcttccaacggttctgcatggatgaatatcgtatggatagctatattcatggcagttgcttctcaagtacaatgatcgcctccttcgcttctatagctaaccatgctaccaagctacgtacatacataatataccctttcaaccctcattatagggcttgggagatatggctggttgttctagtcatttactctgcctggatctgaccattcaagcttgcagtcctaactcccaagaatgatgcacttttcattcttgataacattgctatggcttccttgctgctgacattatt

SEQ ID NO: 225297 - DNA, 397 bp, Gossypium hirsutum
ggccgaccgacgcgtccggttttgcgtttcgtatttcaggttgaagaaatcctccttttgggttcgatctctggcttcaccaccaatgctagagatcggacatgccccaggtaatgcccttttcggcaaatacgagatcggccggctcctcggttgcggtgctttcgccaaggtttatcatgccagaaacctccgcaccggcctcagcgtcgctgttaaggtcatcaacaaaaagaagctacccaacctcaccatgatgtccaacgtcaagcgcgagatctccatcatgagtcgcttgaaccacccttatatcgtcaaactttacgaggttctggccaccaaaaccaagatctatgtcgtcatggaattcgtcaaaggtggagaattgttcgctaag

SEQ ID NO: 225298 - DNA, 375 bp, Gossypium hirsutum
  unsure (1)..(375): unsure at all n locations
ggcttctcggatcatcgctgttgatttcaactccaacagctnnagacccgctagccggtttataaatataggagtacccaaattcaatgtcccattggcccatatgatttttgcgggtgctgattaccttttggttcctagtagattcaaaccatgtggtctcattcagctgcaagctatgctatatggaactataccaatagtggcatctactggtggactagttgacacagtcaaggaaggattcacagggttccaaatgggagccttcaatgttgaatgtgatacagtggatccaagagatgtatataaggtggcaaaaggtgtcattagagctcttgcaacgtatggcactggagccatgagagaaatgat

SEQ ID NO: 225299 - DNA, 338 bp, Gossypium hirsutum
  unsure (1)..(338): unsure at all n locations
gggacttttctggaactggtttaagatctcatctcagtgaacaatggctagtcgttacagaggggcatcaaggaaagacaagcanaagggaagacaccatggattaagccagcagaagaggcaagagattaaggaagcatttgaactgtttgacactgatggctcaggtaccattgatgccaaagagctgaatgttgctatgaggtatgagtatttatgcgtgatatttcttgtttttaaatagattttttagttgatatcttcacattgtcactgaaagttttagcattacagggctcttggtttcgaaatgacagaagagcaaatcaatcaaatga

SEQ ID NO: 225300 - DNA, 313 bp, Gossypium hirsutum
atccgaaagctagtgctgattggatccttgatggtatgaataaaggaactgatagctgtggggtcaccactggtttgggtgctacttctcatcgacaaaccaagcaaggcgctgccctccaaaaagagctcattaggttcttgaatgctgggatatttggcaatggaactgagtcatgtcacacattgcctcactcagcaaccagagcagctatgcttgttaggatcaataccctattacaaggatactttggcattagatttgggatttttgaggccatcaactagcttcttaacaaccacaatacgccgtg

SEQ ID NO: 225301 - DNA, 332 bp, Gossypium hirsutum
ccggattaaggttaggtactgcgatggatcatcgttcaccggggatgctgtgtggtcgagtaagttgcttgaattgtttttactatcgagaaattaaacatatacataaattaacacataatggttctgtgatcaggctaataatctctttttcaaaggaaacagcatatgggaatttatcattgctgatctactagcaaaaggaatgataaatgctaaaaatgtaagacgtagtttggcgtgtttaatattttgtaattccttcggtaacctttttccctacttgctcaataactttgtgaatctggttatatgtatatatatatacacac

SEQ ID NO: 225302 - DNA, 354 bp, Gossypium hirsutum
gcagtatttcttcagccatgagatgaaatcttggaggcaaatccagattgttagtggtaatctgagagaggtcatagatggtgctgacggatttcaaaatacccatcaaatgcaacaatttgaatctgctaaattcagcatagatcaggctgtttttattcttgagaaagtacatataatatgggagtcactgttacggccttcgacttataagagaagtatgtgcatggttttagagtccgtcttctctagaatcactaaagacatacttttgcttgatgatctggctgcagaagaaacgttacagcttcaaagacttattcatatgatgctggacaacctatcttctttatt

SEQ ID NO: 225303 - DNA, 397 bp, Gossypium hirsutum
cggggggccaagccgtccgcccacccgtccgggccaaccaagaaaacccagactcaaaatggcaatgtcgatggcgattgccaccgattgtggaagtagtaggtggagtatggcgtccttgaaatctgctctgccgcggctaacttccacagcttcttccattaagttaccatgtcgccgccgtgctcctccgcctgtcaaatcgcctcagctagttcgctctttcactgctctctaccccgttaaccctctccattccctcggtttctctggcctcaccagctttgagcaaaatttcaccataattgataacggtggccgattctatgcaatgcggcatggcagacgagtgcctaagctcaacagaccacctgaccagcggcgtgcactcctgcga

SEQ ID NO: 225304 - DNA, 378 bp, Gossypium hirsutum
cccacgcgtccgcccacgcgtccgttccaagctgttggctaagcttttcgacggggtggcttttactcacgtgatgcatttggcggctcaagctggagtcaggtacgccatggaaaaccccaactcttatgttcacagcaacatcgccggtctcgtcacgcttctcgaaatttgcaaatccgctaatccccagccagccgttgtctgggcctcctccagttccgtttacggtctcaacgaaaaggttcctttctctgaggccgacaggaccgaccagccggctagtttgtatgccgccaccaagaaggcaggcgaagaaataacccacacttataatcatatctacggtctttcaattactggattaagatttttcac

SEQ ID NO: 225305 - DNA, 378 bp, Gossypium hirsutum
cccacgcgtccgcccatgtgtggtatgaatcttgcattcgaccgtgagttgagcggcccggcaatgtactttggactcatgggcgatggccaacctattggacgatacgatgatatgtgggctggctggtgcaccaaggttatatgcgatcacctcggatggggagtgaagaccggattgccatacatttggcacagcaaagcaagcaacccattcgtgaatcttaggaaagaatacaaagggatctactggcaagaagagttgatcccattcttccaatcggttacccttccgaaggactgcaccagcgttcaaaaatgctacactgaaatcgccaagcaggtgaaggcgaaactcggcagggtcgatgactacttt

SEQ ID NO: 225306 - DNA, 376 bp, Gossypium hirsutum
gaaactctaagattatatggtccatcaattgccatgatgagaagagctgaaagagaagttcagttagggaagctagtcttgcctgctaatctagatcttctagttgtacattctgcatctcaccatgaccctcaactatggggagatgaggtacatctttttaaaccagagagattcgcagaagggattgccaaagctaccaattacaatgcaggtgcattttgtccctttggattgggacctcggaattgtgttggtatgaactttgcaatcatcgaaacgaagattgcactctccatgattctacaacgctacaccatttctctttcccctgcctatgtccactcaccaattccttatatcaccattcaaccac

SEQ ID NO: 225307 - DNA, 315 bp, Gossypium hirsutum
cgtttctatacagattcagaaagaaatataggaagaagaagcaatggccactcggacagtgcccacgacagttccttcggtgtctgaagattgtgaacagctaagaaaagccttttcaggatggggaactaatgagggcttaatcatagatatattgggtcacagaaatgccgagcaacgaaacttgattcgaaaaacctacgctgaaacctatggagaggatctcctcaaggcactagacaaggagctctcgaatgactttgaaaggctggttttgctttgggctcttgatcctgcttaacgtgatgccctttt

SEQ ID NO: 225308 - DNA, 388 bp, Gossypium hirsutum
  unsure (1)..(388): unsure at all n locations
ctaagaatccataacaaatcggttaaaaagaacgctttcgtcgtcgtccagacggcggttttaactctaagacgacgaanatgaacggaaaaggagggagctctccttcgtggaacgataaactagtgatggacatgcccatgcacacacgcttcgtcaccctccaagtcaaatgcaagttctcaggtggtagggataaaaccgtcggacttgtaagaataccggtgacggattttatcggagggtattctcccgagacttgcttacagttcttgagttaccgattaagagatccaaagggacttaagaacggaatccttaacgtttctataagactaaaagaacccttacaagcttgttcttcccaagcttgagcgtgtgggcttgg

SEQ ID NO: 225309 - DNA, 257 bp, Gossypium hirsutum
cccacgcgtccggtcaaaccatcatctctaccagatagctggaagctgggggggattttcactactggaattgctcttggtagttacttggcagtaatgacggctatattcttttgggctgcatacaagaccaactttttcccgcgtgtatttggggtggcaactcttgagaaaacagctcatgatgacatcaaaaagcttgcctcagctgtatataagcaagtgagcattataagtcaggccctaatattttgaac

SEQ ID NO: 225310 - DNA, 313 bp, Gossypium hirsutum
cccacgcgtccggctagaagaaaccatgccgaagaacaagggaaagggaggaaggaacaggaagagaggaaagaatgaagctgacgatgagaagcgtgaacttgtgttcaaggaagacgggcaagagtatgcccaagtgcttcgtatgctaggcaatggccggtgtgaagccatgtgcatagatggtactaagcgcctttgccatattcgaggaaagatgcacaagagggtttggattgcagctggtgatataattcttgtcgggcttcgcgactatcaggatgacaaggctgatgtgatccttaagtacatg

SEQ ID NO: 225311 - DNA, 354 bp, Gossypium hirsutum
gtttggaaacgtgctcgttgattcattatcccttggacctgtggctccgggggatgctgctgtagcaatagcttcggatgaaaaaattgctttgctgggtgcaatacagtctctgttcgaaggttcaatgtacacatttgtgttcctttggacacctgctttgagccccaacgaagaagagatccctcacggtttcattttcgccactttcatgttggcttcgatgatgggaagctcccttgcatctcgtttgatggctcgatcatcacctaaggtagaaagctacatgcaaatcgcttttgagatttcctcagcctctctcacgctttcgaatataaccaatttcttggtagc

SEQ ID NO: 225312 - DNA, 367 bp, Gossypium hirsutum
aatgttacatgcacatattcccaatttttggctcaaaagactcctacatgggggcgtctcgctctcttccttctataataacactatcgtgaattgcccgacatgtgcttgtggctgtcagaataactcaactgaatctgggagttgtgtaagcgaaaggtcttcacatttagcttcagctgttccgggcaaatctaccaatgcaccacctctgcttcagtgtacgagccatatgtgtccagttcgaattcactggcatgttaagctcaactacaaggaatactggcgtgtgaagatcacaatcaccaatttcaattacgcattgaactacagtcagtggaatctagttgtgcaacaccccaacttt

SEQ ID NO: 225313 - DNA, 376 bp, Gossypium hirsutum
cccacgcgtccgaccaagaagttgtcccggcttcatcttcagaagatcaatagggttgggcagcactaacttgtctcgttcagaatttcggtcacttatggagcagctttcccagaaataccatggggacacgtaccatttaattgctaagaattgcaaccatttcaccaatgaagtgtgcatgcagctaactggaaagcctattcctggatgggtaaataggctggctcaattaggttcattttgtaactgtctacttccagaaagcattcaggttactgcagttcgacatcttcctgatcatccagcatattccgatgatgaaagatcaaattctgctgcaacatctttaacaggagagagcgatgaaaaggat

SEQ ID NO: 225314 - DNA, 390 bp, Gossypium hirsutum
cagacatggactttctcaagtgagtgtaaagttccagaagggtcagccttttaggccctttgatcaactaatgagtgtattgccactgccagaagtgctcatgcacttctgaaactgtatgcaaaacttttcaccgatgtcgattcccaaatcattgacttctatcctacagatttcgaaatcgacatggatggaaagcgccacgcatggcagggcatatgcaagcttccctttatcgatgaggaacggcttctatcagagacactaagacttgagaaggaattgatgacatttaagatcaaagattttgagacttttgcctgataatcaaaagttgcatacagaagccgaactgatcaggggtgctgttagaggacatgtatcatcatc

SEQ ID NO: 225315 - DNA, 378 bp, Gossypium hirsutum
gctttggcctttttctttgaaaagatcaagatctaggaaggctgcgcagccgggggcagcagataccggaggctcagatattgggaatgctgctgatgattctcttgctagtgatgatgatgagaattttcttacacccaagccagtgaagaagatgatcagggcaatcaccccaacctctgaacaactagcatcattgaatctaaaagatggaatgaatcagataacctttacattttcgactgctatgttagggaaacagcaggttgatgccagaatctatttgtggcactggaacactcatgtagtaatctcagatgttgatgggacaattacaaaatcagatgtcctaggccagttcatgccgttggttgggat

SEQ ID NO: 225316 - DNA, 378 bp, Gossypium hirsutum
gattctgctctgaaaaacaagaaaccaaaataaaggaattttcatacgaatttgaggggaattgaaaatttaataaatgtctataaatttggttgagatttgtttccccctctcttaaaaagccctctctttttcatctctgtcacttgcctcctcctccttcttcttcttcttcagctgtgattgtggcaatgtcttatgataaagaattggctgctgcaaagaaagcagcctctctcgctgctcgtctctgtcagaaagtacaaaaggctttgctgcaatccgatgttcaatcaaagaatgataaaagtcctgtaactgttgctgattatggctcacaagcactggttagttttgtgctgcagcacgaatttcctg

SEQ ID NO: 225317 - DNA, 368 bp, Gossypium hirsutum
gtgttgctagcggtaacttccttgcagctaagagaaggggagttgttgaaggtgttgattatggagcaactggtgaagtaaagaaagtagatgttgctcgattgcgtgagaggcttgatggtggatgtatagtaatattaagcaacctggggtattcgagctctggtgaagttttgaattgcaacacatatgaagttgccacggcttgtgcattagctcttggagcagataaacttatttgcattatagatggccctattttggatgagaatggacgccttattagtttcttgcctcttcaagaagcagatatgttgatccgtcaacgggtcaaacagagtgagatagctgctaaatatgttaaagct

SEQ ID NO: 225318 - DNA, 379 bp, Gossypium hirsutum
ctcttattagaaattagacactactagacttgtagaaatgcaagggctcgtcgggttgccggtactcctttgcgccacctaccatatcgctctttccgcgaccaacgttacggtggcggacgggctgttagataatggtaactttgagcaagccccgaatgcctcaaacatgaagggcacggttgttgtggggcgttatgcaataccaggatgggtaaacgaagggtttgtggaatacataaagtccgggcaaaagcaaggggacatgttgctggtggtgcctgagggagcctatgcagtcaggttggggaacgaggcttcaatcaagcaggagataaaggtggcgaaagggatgtattactccatcaccttcagtgct

SEQ ID NO: 225319 - DNA, 368 bp, Gossypium hirsutum
cccacgcgtccgcccacgcgtccggtcgcttttgccgactcggcgtcggctcagacgtgatccagctaataagctatattttccatatgaacctggcaaacaggtgaggagcgcagtcaggataaaaaacacaagcaggtcatatacagctttcaagtttcaaacaactgcaccaaagagctgtttcatgcgccctccgggtgccattctagcccccggcgagagcatcatagcaacggtcttcaagttcgtggagcctcctgagaacaatgaaaaacagatggatcaaaagagcagggttaagtttaaaatcatgagtcttaaggtgaaaggtccaatggactacatacctgggctgtttgatgagc

SEQ ID NO: 225320 - DNA, 390 bp, Gossypium hirsutum
ccttccggccgtggaaacgagggtcccttttttttggtccaccagggacaggaaaatcatgagctggttgctgcaattgcaaattacatgagatataatgtatatgatcttcagtttcaaagcgtaagaaacgattctgatctcagacgtgtactcacatccaccacaaaccgctccattctgctcattgaagacatagattgtagcacgaaagtcacaaatgatcgaaccaaggtcaaggaaaattgtgaagaagaagaaaatgatgaactcaaacatccctatggtaccgatcctggggtaacactgtcaggtttactcaacttcattgatggattgtggtcgagctgtgggaacgaaagaatcataatcttcaccacaaatcataaa

SEQ ID NO: 225321 - DNA, 348 bp, Gossypium hirsutum
cccacgcgtccggagaaactaaggatcttcccttatcatgatttcaccgagagtgccgatggctgcaatctctgccccccaaatatgtgcaaagggagggtgattgaaaggattcaagcttctttagaagggaagaagaaaatcatataccttggagatggcagcggagattactgcccaggcttaaagcttggagaggcagactacatgatgccaaggaagaattatccagtttgggatttaatttgcaggaacccaatgttgatcaaggctgagatctatgaatggaccgatggtgaagagctagagaaggttttgctgcaactaatcaacatgatttctcttgaa

SEQ ID NO: 225322 - DNA, 381 bp, Gossypium hirsutum
cccacgcgtccgacgaaaaataccatcatcgctaagctttctcgttgctgaatgtcaccctttgtcacaagttttggtagatctaataagatcaagtcgatccaaacatgtttctcaccaggactgagtatgaccgtggagtgaacacattttctccggaagggagattgttccaggtggaatatgctattgaggcgatcaagctgggttcaactgcaattgggttgaagacaaaaaaaggtgtcgttctggctgttgagaagcgtattacttcaccaactttggaacctagcagcgttgagaagattatggaaattgatgagcatataggatgtgctatgagtgggttgattgctgatgcccggacactttgttgaacat

SEQ ID NO: 225323 - DNA, 374 bp, Gossypium hirsutum
gttgaacatgaagagggtggtcgtttgacaaaatttcttgcactcaataaatgcgttccagggcgcaagttcttgcaggttgttgatattgatctgatctaggaccttatgaggttcagtacgatgaagaatggctggcaataacacggaaattgaactgtctttcctttgaccttccgatgtggagacattgggtaggagaacaaagctcgacatgcaagattgttgtcaatgggttaagagcaggatggaagacagaggagccaaaccttgtgaattttctcaaacagctccacctcacaaaccctttgattcttactttttctggttctccccgtaatcctcagattgtatctttttggaattactagatc

SEQ ID NO: 225324 - DNA, 382 bp, Gossypium hirsutum
atcagtgcattaccactttgatcaatctttaatttcccaatttcttctgaaaccctagtcctaaattgataccccaacttcggtgttccaatggccactgaggaaccaactgtcgccgtggaatctgcgcctgagccggcggaagagaaccccgctgaggctacagccaatcccaaatctggcaaagcaaagaaagctaaagagcccaaagccaagaaggctgcagctcctaggaagccacgagcttctcctgctcatcctccttacgaagagatggtcaaagatgcaatcgttactttgaaggagaagactggatcaagtcagtatgctatcactaaattcattgaagagaaacagaagaatcttcctggaaattttaaga

SEQ ID NO: 225325 - DNA, 309 bp, Gossypium hirsutum
ctcaaaaaccctagctgctcagtgctcacattttctcgcattttatttaattggctggtctgccctcaaagcccaaaaccctaacaatggcagccgccgccgcccgtcctctggtttcggtgcaaaccatagagtccgatatggctaccgacgctacgcctactgttcctctcgctgatgtcatgaaagcctcgatccgaccagacatcgtcaccttcgtccacgataacatttccaagaacagccgccagccttacgctgtctccaagcgtgctggtcaccagacctcagctgaatcgtggggaactg

SEQ ID NO: 225326 - DNA, 369 bp, Gossypium hirsutum
cccacgcgtccgcccacgcgtccggctggacttaccacttttgatatggctgatatgtacgggcctgcagaagatctttatggcatctttatcaatagagtgcgtcgggagcgtccaccagagtacttggaaaaagtcagaggtctcactaaatgggtacctccaccagtaaagatgacaagtggctatgtcagggagaacattgatgtctcacgcaagaggatggatgtgccttcattggatatgcttcagtttcactggtgggattattcgaatcctggctaccttgatgctctaaaaaaccttactgatctgaaagaggaaggtaaaattaaaacttgtgctttgacaaattttgatacggaaagg

SEQ ID NO: 225327 - DNA, 382 bp, Gossypium hirsutum
cccacgcgtccgattaattttaattacaatttccaaaaccacgacaacaaggaatacgagcaccagaaaaccagaccctgattcgcttggctaaattgtcatttgacagaagcaaaccattggcttgtgcttgggattggattccactataaatagtatccagttagccttctacattcttcatcaagcacgaaaagagaaatacacaagaaaaaaaaaaaaaaacaagtgagcagataaattgaagacttttatttctgttaacatccattatgagtactgctggtcaagtcatccgttgcaaagctgcggtagcatgggagtcggggaagccactgtcaatagaggaagtggaagtggcaccaccgcagaaggatgaagt

SEQ ID NO: 225328 - DNA, 379 bp, Gossypium hirsutum
atgggttctgcagacaagagggaggaagttattcaggcatggtacatggatgagagggatgaagatcagatgcttcctcatcaccgtgaacctaaggaatatgtatccttggataaacttgctgagcttggagtactcagctggcgattggatgctgataactatgaaaatgatgaagagttgaagaaaattcgtgaagaacgaggttactcctacatggacttctgcgaggtttgccctgagaagcttccaaattatgaggagaagataaaaaatttcttcgaagaacatattcatactgatgaggagatccgttactgtgtggcaggaaggggttattttgatgttcgggatcataatgattaatggattcgtgtgt

SEQ ID NO: 225329 - DNA, 381 bp, Gossypium hirsutum
ggatcctttcgtcaatgaccaggaggtccgtcgctgctcacccatggcatgatgttgaaattggacctggagctcctacggttttcaactgcgtgattgaaattgggaaagggagcaaggtgaaatatgaacttgacaagaaaactggtttgatcaaggttgatcgtgtgctttattcatcagttgtgtatcctcacaactatggtttcatccctcgtactctttgtgaagacaatgatcccttggatgtcctgattattatgcaggaaccagttcttccagggtgctttcttcgggctaaagctataggtctgatgcctatgattgatcagggtgagaaagatgacaagattattgccgtatgtgctgatgatcctgagt

SEQ ID NO: 225330 - DNA, 209 bp, Gossypium hirsutum
ctaaaacatatatttgcatatatcattgttgtctttgtcattgtttttccaagagagcacaatgaatgtagacgaggaggtggagagactcaaggaagaaatccaaagactaggccagatccaatcagatggttcttacaaggtcacattcggggtgctatttaatgatgatcgctgggcaaacatctttggagcactaggtgggacac

SEQ ID NO: 225331 - DNA, 380 bp, Gossypium hirsutum
gtttttgagatctctgctattgcctctcatggccctggctacatggtcacgcgggatgagccgagggcaacagcgaccttcctctttagacgctgcatccaacacactccaataccatggaggccctctcttgaccaagccgaatggcattaacgtttacctcatatggtatggagggttctctctgaaagacagaaactccataactgatttcttcgcttccttcgcgagccctggtcgtcgccaaggaccctcggtttcgacatggtggagaacgatcagtacatacaaggataaaactgggaaacctgtttccgacactgttagacttgtcaaacaagttggtgatgtatattcttcgggaaaaaccctgaagcgcg

SEQ ID NO: 225332 - DNA, 368 bp, Gossypium hirsutum
gggggacccacgcgtccgcccacgcgtccgcaacaatgggaatagcagtgaaccttgtgacttacttgggtggagccatgcaccttccaagtgctacttctgcaaatgttgtgacagacttcatggggacatcatttctactatgtttactgggcggcttcctagccgattcatacttgggcagataccgaacgatcgctatattctccatggttcagatgcttgggacttgcctgctagcagtatctacgaaactcccacaactacggccaccttcgtgcaagtataccgacgtaacacaatgcgaacaagctaacaacttttaaatgggaattctttatctttcaatatatctaatagcattaggg

SEQ ID NO: 225333 - DNA, 368 bp, Gossypium hirsutum
caaacatattactgctcactattttttaatagtggaattgttgaaagagaaaacaaaaatggaggtagctttccctgttattgacttgtccaaaatcaatggtgaggagagaggagccaccatggacatgatcaaagatgcttgtgagaattggggtttctttgagctgacgaaccatggaatatctcatgaactgatggacactgtggagaaactgacaaaggagcattacaaaaagtgcatggaggataggttcaaagaaatggtgacaagtaaaggtcttgaagttgttcaatctgagatcactgacatggattgggaaagcacttttttcttgcgccacttgcctgaatcaaacctttatgaaa

SEQ ID NO: 225334 - DNA, 375 bp, Gossypium hirsutum
  unsure (1)..(375): unsure at all n locations
aatgaatgcccagtttgtaaaggataagttacggttaaaacgttgacaccgatggatgatcgtgggaaggttatctatgacccanaacaggattcgggttttaaaatccctcctcgtccgactgcagggcgagtggattgttggaggcaaaccattcaacggactcctttaaatcttcctgttgaagagatgattcggcgtattggaagcagatttgatttggtacgtgacttgactccaccacgtgaagccagtggttctcgggaaaccgcataacgtactaattgcgtgcttaataggattttgacatctcgtggattacgtggagagcaaaacacagtcgtgccgctcgatgatgttgactngacacccagt

SEQ ID NO: 225335 - DNA, 376 bp, Gossypium hirsutum
gttaatgacagcaccagcagactcttcaattggtggttcatctggaaattggcgtttcaaaaacaaagaacacgggaagaccagtgccgcagcaagtctgggtatgattctattgtgggatgtcgactctgggcttgctcagatcgacaagtatttccatagcaacgataaccatgtgattgctggagcattattaggagttgggattgtcaattgcggtgttaagaatgattgtgaccctgcactggctctattgagtgattatattagtaaagaggattcttcagttcgtattggtgcaattatgggtttgggaattgcatatgctggtgcccagaatgagcagaaccgtagcagcttgactttgatacttaat

SEQ ID NO: 225336 - DNA, 337 bp, Gossypium hirsutum
cccacgcgtccgcggacgcgtggggtatagaggaaaatggaacagcaccggccgggccaggttcagggatcactgttgctgtcaagagtttgaaactggatggtcttcaaggccacagagaatgggtggttgaggttgccttccttggacaacttcatcatcctaaccttgttaaactcattggttactgcattgaagaggatcaccggttgcttgtctatgaatttatgacccgaggaagtcttgaaaaccatctgtttagaaggacaatacctttttcctggtcaaataggattaagatcacacttggcgcaacaaaaggattggcttttcttta

SEQ ID NO: 225337 - DNA, 364 bp, Gossypium hirsutum
cccacgcgtccgatcttgtttaaaatataagaaaaaagtcatacgcaatgagcagtgccggtcaggttattcgttgcaaagctgcggtggcatgggaggccgggaagccactatctatagaagaagtggaagtggcaccaccccaaaaacatgaagtccgtattaagattctcttcactgctttatgtcacactgatgtatactactgggagtgtaagggttacactcctctgtttcctcgtatacttggtcatgaagcctcagggatcgtggagagtgtgggtgagggtgtgaatgatttgaaacctggggatcatgtgctttctatcttcaccggagaatgcaaagaatgtcgccactgtct

SEQ ID NO: 225338 - DNA, 380 bp, Gossypium hirsutum
cccacgcgtccgcccacgcgtccggtgtagacaactgataattatactctgagaggggtctgcattggtttcaccaagaggcgcccaaaccaggttaagaggacatgttatgcacaatccagccagattagacagatacgccgaaagatgagggagataatgactgctcaggctacatcgtgcgatttgaaggaattggttcaaaagttcatcccggagatgattggaaaagaaatcgagaaggcaacatctagcatctatccattgcagaatgtgttcatcccaaagtcaaaattttgaaggctccaaagtttgatcttgggaagttaatggaggttcatggtgattactcttgaaatgttggtgtgaaaatagagagg

SEQ ID NO: 225339 - DNA, 346 bp, Gossypium hirsutum
  unsure (1)..(346): unsure at all n locations
cgtcaacatcgacaagctctggtctcttatcccggaggacgtgaaagccaaggcgaccaaggatgccgctccgatgatcgacgtgacacagttcgggtactttaaagtcctcggaaaaggtgttttgccggagaaccaaccggtggtcgtcaaggctaagttggtgtcgaagaccgctgagaagaaaattaaggaggctggtggtgctgttgtgctcaccgcataggttagggttcttggttttattggatctgaatgacatttctgttagattattggtatgtttcgntttttttttgagttaaacttgaaatgagaattttaatattcgttaattttggatcaa

SEQ ID NO: 225340 - DNA, 371 bp, Gossypium hirsutum
cccacgcgtccgggatgacagtattacaacacttatgattaaaaacatacccaacaagtacacttcaaagatgcttctggcagccattgatgaacattgtcgaggaacttatgattttatttatttgccaattgacttcaagaacaaatgcaatgtgggctatgcgttcatcaacatgattgatccgcaacagatcattcctttccataaggcatttgatggcaaaaaatgggagaagttcaacagtgaaaaggtggcgactcttgtttatgctaggatccaaggaaaggctgcttttattgcttattttcagaattcaagcttaatgaatgaggtataatgttgccgtcctattctctttcaaaactgtg

SEQ ID NO: 225341 - DNA, 298 bp, Gossypium hirsutum
ctcttcactctcaatattgaaatgaaatctctctgagagaggagttgcttaactgaattggttttggttgtaataagcatggtttcgctggaagattcacattctaattccaaccgctttcctttgggtcgtaacttttacacccccagttcagcttccaccaccaaaatccaccgtcatgtcggccgctccatgcgtacgattcgctccaatctttaccaaaacgacaatagtagctgctccttcaccagttccgtccctgagaggtccgcctttgtcttcgaaaatctcaccgagt

SEQ ID NO: 225342 - DNA, 229 bp, Gossypium hirsutum
tcgtagaaatgtttttgatcgatttgctgttttgatatcagtggtgattgtctggatttatgctcatttactcactgtgggtggagcttattatggtacattaccaaaatcacaaacaagctgttgaactgatcgttctggtctaatagatgctgttccatggataagagtttcttattcttttcaatggggagcgccatcatttgatgtaggtgaagtctatgctatg

SEQ ID NO: 225343 - DNA, 370 bp, Gossypium hirsutum
gaaaaaaagaagaagagagagccatgggtggaaacgacgatagattaagaacccgtgacaacatccctcccgctgacggtagtcgctacgctttgagtggcaaaatcatgctcagtgccatcgtggatttgctcttcgtagtggtacttatgtttggtctccacctttacgcacgttggtacctcctccgtgctcgccgtcgtcattcacgtaaccgacgtcttcatcaccgtcgatcgcagctggttttttacgtaaaccccgacgttaatggtccttccgccgaggcttcacgtggactagactcgcaggttctcaagtttttaccggattttaatttttctttcgagacacacccggatttctgcct

SEQ ID NO: 225344 - DNA, 376 bp, Gossypium hirsutum
cccacgcgtccgcccacgcgtccgcccacgcgtccgtagcttgttagttgattgacttcattcaccagatgcaaagactcaagaaaacgctgtcacggcacttcttaacttatctattaatgataacaacaaaacagctattgctaatgcaaatgctattgagcctctgattcatgtgctcaagacaggaagtcctgaagctaaagaaaactcggctgccactctcttcagtctttcagtcattgaggataacaaagtcaggatcggaaggtctggggcaatcaggcctattgttgatttgttggggaatggtactcctcgaggaaagaaagatgcagcgacagccttgtttaatctatcaatattccatgaaaac

SEQ ID NO: 225345 - DNA, 364 bp, Gossypium hirsutum
gggagtgacttctgttgtaatcaagtgactagctgagcataaagatacgttgggggccccactttgcccttggaggcattatgatgacaaagctgctgaggtagggcagggattctggaattgtccatgcgttcctatgagagaaaggaaagaatgtcactgcatgctctttctcactcctgataatgattttgctggccaagatcagttcatcacactggaagagatcaaggaaacaacaactaacatgttgttatgacatttattacttgtttttcccaattccccaaggaattccaaatgaaatattatttttgtatttcaaaaggggtaaattttttttcccttttttatacctaccttt

SEQ ID NO: 225346 - DNA, 287 bp, Gossypium hirsutum
cttcatcatccctttcctctattattgtttgtaatatggataccagtgctggcccgagcgtgttccctttgcaccgttgcaaaactttttacttggtgaggcatgctcaggggatccacattgtatatggagatatgaactattaatcattcatgtttccataatattttgatgctcacattacccctcttggctgacatcaggtggataatttgcgtaagcatgtccatgaatgtggccttgctaagaggattgattaagtgattacataccttttgctaaggaca

SEQ ID NO: 225347 - DNA, 270 bp, Gossypium hirsutum
caacggagatgcgccgcctgtatgttcctgctggacacgtggcggttttgttgggcacaagtctcaggagagttatcgaacgcgcgacgtacctaaaccacccagtcttcaaaaaactcctcgttcaaaccgaagaagagtatggtttcaaaaacatgggaccattaatcattccatgcgacgagtcgttctttgaagagattttccgtgtcgtatcccgttctgatttcttcattaaactttggttctttttctacttttaatgttctt

SEQ ID NO: 225348 - DNA, 310 bp, Gossypium hirsutum
cagagaggctgttgcaaaatttatggggaaagtgaggggtggtcgagtgaaatgtgacccacaccgcattgttatgagcggtggagccaccggagctcatgagatggttgctttttgcttggctgatcctggtgaagcttttctggttcccactccttattatccaggatttgatcgtgacttaagctggagaacaggggttgaacttgttcctgtcgtttgtgaaagttccaataatttcaagatcactagagctgccttggaagctgcatatgaaaaggcaaaagaagctaacttgagagtcaagggc

SEQ ID NO: 225349 - DNA, 337 bp, Gossypium hirsutum
cccacgcgtccgcttcttcttcaatcaagccaccatttttgctacaaattagcggaaaaaaaacagtctcaaaaatggtgaagctgagctacattctactgctcatcatctccctcattgttacatctccaccattaacagaaagctttcatatcaataactgggcaatatcaaagctcgaaaccaaacaagaaacagtaaccaatctccagttctacttccacgatacgatcagcggtaaagacccaaccgccattagagtagctcaagccgccgacaccgagaaatcaccgaccctattcggagctttgttaatggcggatgacccactgaccga

SEQ ID NO: 225350 - DNA, 342 bp, Gossypium hirsutum
cccacgcgtccggtccgggcaaaagcaaggggacatgttgctggtggtgcctgagggagcctatgcagtcaggttggggaacgaggcttcaatcaagcaggagataaaggtggcgaaagggatgtattactccatcaccttcagtgctgcccgtacttgtgctcaagaggagcgtttgaacgtgacggtagcacccgattccggtgtgatgcccattcagacagtgtatagcagcagcggttgggacaactatgcttgggcattcaaaacacaatctgatgcggtcatgttgattattcacaatcctggagtggaggaggatcctgcttgtggaccacttat

SEQ ID NO: 225351 - DNA, 371 bp, Gossypium hirsutum
acgcatttatcaaagtatttattagaattggaaccagatagttcagggaatcatggggcgatttcaaatgcatatgctactgcaggaatgtgggatgacgtatctgaaataagggatttaatgaaagaaaaagggttgaagaagagtcccggttgcagttggattcaaataggtgaaaaacttcattctttcattgctggtgatggatcacaccccaattctgagaatatacaagctacattggctttgttgggaattgatatgaaatccagtgcttaaaaactctgttcttaagcactaatcagatctttcggtaacaaatgaagtgctccaaggagacttaacaccgtcttggggtttgagcgaaaaga

SEQ ID NO: 225352 - DNA, 373 bp, Gossypium hirsutum
  unsure (1)..(373): unsure at all n locations
cccacgcgtccgcaggcnaacttgttatgatgattgtaaggtctcaagattctagtgagagcagcaagagatcactttcagcattcgttaaggataagaggggctgttacaagagaaagaggtttgctcaaacaaagatagtggtgtctgataaaatagaagatgggcatgcatggagaaaatatggacaaaaaaatatcttacattctaaacatccaaggagttacttcaggtgcagtcacaagcatgatcaaggctgtagtgctatcaaacaagttcaaagaatggaagatgatgcccaaatgtaccacatcacatacattggtacccacacttgcagagaccagtactcattcatggctacaccacgaat

SEQ ID NO: 225353 - DNA, 378 bp, Gossypium hirsutum
cccacgcgtccgcccacgcgtccgtttagaaagagctcttcaacaatggcttcagagagagacactaaaaaaggcacctccgaactcctgtctagcgctaagctggtggcggacgcagcaaaatccacattcaacaaagaaagcgacaaggttgacaagggtaaggttgctggtgcaggtgctgatcttttgggtgccgcccaacactatgggaagctggataaggacaagggtgttggccaatatgtcgaaaaggctgagacttacttgcatcaataccagaccagtcacttagctcccaccaccaaccccgactcccatggagcaggtgccgccgccaaagattctgaaactgctgcagctggtggtggtggtgtt

SEQ ID NO: 225354 - DNA, 366 bp, Gossypium hirsutum
cccacgcgtccggaggatattgttatcaatctctcacctttttcggagaatcccatttgctgaattatttgctaggattgatgctgttgatccaagcactattaaacgagttgcagaccgatttatctatgataaggatattgcaattgctgcaatgggtccggtccagggtttgcccgactacaactggttcagacgcaggacctactggaacctgttttagatgattttggtttgtctttatcaatggattattacttttcccttggcaataacaaacttctcggtttttatacactatttttttgtaaacccacctaattgttgagctttttaattttttcgtgttgggttcttttgttttta

SEQ ID NO: 225355 - DNA, 363 bp, Gossypium hirsutum
gttaagaactacttatttgcttattccttcattccatacacttccatccttggtggcattcttgcttgcaaagtggcatatgatcttacccagttaatcagcaatttttacagcaagacttaccctggtcttactaaaattcaacgagtagagtggaacaatcgtggtatctctactgttcatgccattttcatttctgctttgtcgttgtacttggttttctggtcgaatctcttttctgatgaacttgctggtcttcttgtcttccgaagctcaccactttctacttttggattaggggtttctgttggatacttcattttggatcttgcaatgattttatggctatatcccttcttaggt

SEQ ID NO: 225356 - DNA, 209 bp, Gossypium hirsutum
gttaatttcgcgttcaagctttacaggattccggacgagagcgtctccgtcgagaatgcaagagacgagctcttgcgccgcgtgaaaggattagcaccgctcgtggtgacattagtggaacaagaaatgaacacgaattctgtgccgttcgcgttaagagtgggagaagcatgctgatattacggagctttatttgactttgttgagtt

SEQ ID NO: 225357 - DNA, 382 bp, Gossypium hirsutum
ccttccggccatttttgttgttccaggcaaatttttaggaagggtttttggtcccctgaggaggatgaaaagcttttaaggcttattacaaagtatggccatggttgctggagctccatccctaaacaagctgggttacagaggtgtgggaagagttgcaggttgaggtggattaattatttaaggcctgaattaaagagaggcacattgtcacatgaacgaagaaaatctcataattgaacttcatgcagtcttggagaatcggtggtctcaaattgctgcacgattaccaggaagaaccgacagtgaaatcaagaacctattgaactcttgtttgaaaaagatgcttaaacagagaggcatcgaccctgtcactcacaag

SEQ ID NO: 225358 - DNA, 378 bp, Gossypium hirsutum
cgaaaagaaaaaatggctttgaattttaatcccatcgcctcgaaatctcagaaggtcccttgctttgctcttccacgaaaggccaccctcagatctcccaagttttccatgatctccaccattccttctggctccaaagaggttgggaatctgaaaaagcctttcacgcctccaaaggaggtgcctgttcagatcacccactccatgccgcctcacaagattgagatctttaaatctttggagggctgggctgagaacaacattctgactcacctcaaaccagttgagaaatgttggcaacccgccgactttcttccagatcctaattctgacggatttcatgagcaagtcaaagagcttagggaaagggcaaaggaa

SEQ ID NO: 225359 - DNA, 282 bp, Gossypium hirsutum
  unsure (1)..(282): unsure at all n locations
gggggggccacgcgtccgctttgaaaacgctttactgatatttgcactataagaccttgtcttgantgaggcttatcgctcaatcccaagccaacaccacccttttccttgctaaattctacggtcgtgctggtcttattaatcttatttgtgctggccctcagaatctccgtcctggagtttttaaatcattgctatacgaagcatgcggtcggatagtggacccagttcatggttcggtcgggttgatgtgcttcgggaactggcatctgtgtgaagcaa

SEQ ID NO: 225360 - DNA, 378 bp, Gossypium hirsutum
  unsure (1)..(378): unsure at all n locations
aacggacgggcggggngggcccacgcgaacgattctcaatactaacaaccttatttttcgaacaagcataacaacaaggtcgacgaatatcaaggcgatgataacctcaccnctggttacgcctacgccgacgatgccgttcctcactcctctggaaatcgagagcgcaaaagaggggtgccgtggacggaggaggagcacaagctgtttctggtaggactgcagaaagtagggaaaggagattggagagggatttctagaaacttcgtgaaaactcgtactccgacacaagtagcaagccatgctcagaaatactttctgcgactaagcaatcttaaccgttgttcattcagatcttagcctttttgattatcacca

SEQ ID NO: 225361 - DNA, 340 bp, Gossypium hirsutum
taaagacgacaacacagatctctcttgcgctttcccttaatcaatcagtgtcttaccatgaagattatagattttttcctgatctcgtcacttctcttctcaatctctagggctgaatctattggatcagttttcttcatcgacagtcctactcatcaattccttcgcgctccatcctctaacgatgcctttcagtcagagccaatgttgttacctgaagttggtgcgactgcatcagtcttgcttggttttccaccacccattacactttcagctggtggctcatctaagctgaatgaggttctcatttctaatccatttgattgacctcgtgccgttt

SEQ ID NO: 225362 - DNA, 376 bp, Gossypium hirsutum
cccacgcgtccgcccacgcgtccgtccacgcgtccgagtcactccaatcatcggtgatgtatgggtctatggaaacagcttcaaatcaatgctagttgcagtggttgtgctacatgaagaaaaagctaaaaaatgggctgagttgaatggttacactgtttcactctttgagctctgttctctgagtaagcttcagaattatgtcctctcagagctcaaatccacagctgataaaaacaagatgagaggttttgagtatatcaaaggagtgattttggaagcccgggctttcgacatggagcaagatctaatgactgcaacattgaagaaaaaaagaaacaatctgctcaaatattatcaggctgaaatagatgca

SEQ ID NO: 225363 - DNA, 336 bp, Gossypium hirsutum
aagctcttttaaaatcactcttcattcaactctctcaaacacagcataacttcgtcaacacccttaccaaaaagaccataaccctttagtgttaaaggtactacaccatgtatcatttaaagtttgaaattcacgactggggaagcatcccaccagaccagcagggtatgatctttgtcagcatacagctcgaggacggtcgaaccttggccgcttacaacattcataaggaatacaccctccaccttgttctccatcttcatagcggtatgcatatcttcgtgaaaaccttaaccgtcaagaccatcaccctctaagttgagagcttctacacca

SEQ ID NO: 225364 - DNA, 370 bp, Gossypium hirsutum
cagaaatgaatccttctctaaatctgactccttccgtcctcctgctcggagtgggtcacttacaaatgcaaggcttgatttgaagccactcgagctactcgagggcttatttaaggagtgccatgtccatggtgagaaaatggtgtctgaagggctgataacttctaaggacatcgatgatgccaagtccatcaaaggaagtagagtggtcagcattggcttaccggcttattgctttcttcaggcactcttgcgctctgtggatgcgaatagactgggcatattactgagtgacaatacagaaataacggccacaaaccgaccaaaagatgcattctttgattggtttcttaacccctttttgatactg

SEQ ID NO: 225365 - DNA, 368 bp, Gossypium hirsutum
gaaaatatcacaaatctttttatccttctcagaaatcttagtatcatgagtatggccttaaattctaaggtcttctttgacatgacgatcggtggtcagcccgctgttaggattgtgatggagcttttggcagattgcactcctcgcactgcggagaacttgcgagccctctgtactggctagaaaggcgtgcgccgtagtgatacgccccttcactacaaaagctcttgtttgcatcgtgtgatccctaactttatgtgccaaggaggtgacttcaccgtctgaaacggttccgtaggtgaattcatctacggatcaaagttcgttgacgagaactttatcaagatgcacactggtcccggtatttt

SEQ ID NO: 225366 - DNA, 293 bp, Gossypium hirsutum
gctgggttgggtttagctgtttattttgttcatcaagacgacgttgctgggaagagacctggttgtgctaataattttgttctggtaaaagtccctacatggattaatggtttagaatacaacgaatatgttggtgttggtgctcgttttggacctactttggagtcaaaagaaatacatgcaaaccataccatgcttgcacttgcagatcctcctgattgttgcagcaaacctatgaattagcttacaggggaggttattctggtgcatcgaggtatctgttgttttcacaa

SEQ ID NO: 225367 - DNA, 375 bp, Gossypium hirsutum
gtcctcaaacttttcctcgtcatctctttgtttcaaatctctttggccggtaggaagctcagtgaagtggtgcaagaccagcctcagctcttgacataccacaatggtccccttctttctggcaaaattactattaatttgatttggtatggcaagttcaagccttccgagagggctattgtctctgattttgtcacctccctttcctccacgcctccatcgcaaagcaaccagccgtcggttgcccaatggtggaaaaccaccgagaaatactaccacctcacctccaagaaatcttccctttccctgtctttgggaaagcagattcttgacgacaagtattcgcttggcaaatcactcaaaaacaaacaaatc

SEQ ID NO: 225368 - DNA, 347 bp, Gossypium hirsutum
gttgatttaagtatttacaagggcaaggttttgttgattgtcaatgttgcatgacaatggggcttgaccaattccaactacactgagctgagtaaattgtatgagcaatataaagatcaaggttttgagattcttgcattcccatgtaaccagtttggaggacaggagccagggaacaatgagcaaatcttagagtttgcttgcactcgctttaaagctgaataccccatatttgataaggtcgatgtgaatggtgagaaggctgctcccatatacaaattcctcaagtctagtaaaggtggactttttggggacagcatcaagtggaatttttccaagttcttggt

SEQ ID NO: 225369 - DNA, 321 bp, Gossypium hirsutum
ggggaaggctgccaaggatccaaacaagccaaagaggcctgctagtgccttctgggttttcatggaggagttccgtgagcaatacaagaaggatcaccctaaaaacaaatccgttgccgctgtcggcaaagctggtggagataaatggaagagcttgtctgaagctgaaaaagcaccttatgtagccaaggcagaaaagcgaaaggtcgagtatgaaaagaacatgaaggcctacaataagagacaggctgagggtcctaaagacgaagatgttgagtctgacaaatcagtgtctgaggtgaatgatgaggatgatgatga

SEQ ID NO: 225370 - DNA, 373 bp, Gossypium hirsutum
agaagctttctcttttctacataagaaatctgtgcatcaaaaacaccaaaacagtaaaaaagaagaaggaacaagacaattccaaaggaacaagagagaaaatgagtcgaggaagtggtggcgggtacgatcgccatattaccatcttctcccccgaaggtcgtcttttccaagtcgagtatgcgtttaaggcagtgaaagccgctgggatcacatcaattggtgttcgagggaaagactccgtctgtgttgttactcagaagaaagttcccgacaaacttttggatcagactagcgtcactcatcttttccctattactaagttccttggattggtggctactggcatgacagctgatgcaaggaccttggt

SEQ ID NO: 225371 - DNA, 341 bp, Gossypium hirsutum
cccacgcgtccgcttgtttaaaatataagaaaaaaaatcatacgcaatgagcactgctggtcaggttattcgttgcaaagctgcggtggcatgggaggcggggaagccactatcgatagaagaagtggaagtggcaccaccccaaaagcatgaagtccgtattaagattctcttcactgctttatgtcacactgatgtatactactgggagtgtaagggttacactcctctgtttcctcgtatacttggtcatgaagcctcagggatcgtggagagtgtgggtgagggtgtgaatgaattgaaacctggagatcatgtgctccctatcttcaccggagaat

SEQ ID NO: 225372 - DNA, 372 bp, Gossypium hirsutum
gctggcttctcccttcttttaaggttagatatatcggtagagaggagggggaggggaaaatgaaaatgataagaatgaaagagagggtctaaaagaaagtgtgaagaaatttgatggaggaacatctcagaccattagctgttactcatctccttcaacacacactaagaagcttgtgcattcatgagaactctcaatgggtttatgcagtcttttggaggatcttacctagaaactatccacctcccaaatgggatggtcaaggagcttatgacaggtcaagaggaaacaggagaaactggttattatttttgggaagattggttctgcaactttgctgccttatcagctgaaataaacttccggagactg

SEQ ID NO: 225373 - DNA, 145 bp, Gossypium hirsutum
atggacgcttgggcggacgcttgtttcagaagtcactccatcggttccagacgagcctcttgttcttagacgtgcatttgaaaatgctgtgatcaaaaggttgatgactgatgtgccttttggagttctgttatctggaggactt

SEQ ID NO: 225374 - DNA, 361 bp, Gossypium hirsutum
tctacgctctcatgatttgctttctgctgccttctctcaacccaaacacatattgggcaggaaaaagaaaaagcttgagcgaacaagaaaatggccgatcagcttaccgacgatcagatctctgaattcaaggaggcctttagcctgttcgacaaggatggagatggttgcattactaccaaggagttgggaactgtgatgcgatcacttgggcagaaccccactgaggcagaactgcaagatatgattaatgaagtcgatgctgatggaaatgggaccattgattttcctgaattccttaacctgatggcaagaaaaatgaaggattcagactctgaggaggagcttaaagaggcattca

SEQ ID NO: 225375 - DNA, 350 bp, Gossypium hirsutum
ccgcgctattcgatctccattattttcatttcagcttagaaagtttgggaagggaagagaagctgatcgcgttgggatcaagaaatttcttcttgtgcacaaaaacggcggcatcaaaggacggccagaataaaacggcgtcgtgctcaaatgaagcggaaagtgttacaaaaagctcgaaaccttggttcaaattcatggatttcttgttttagaagcattttttatgggtattgtattttgtaaaaaaaattaataatttttttaaaaaaattagattatggaacatgcaaatttatgaaaaattgcatgtagggtattttagaatggttagggaaggaaagagagag

SEQ ID NO: 225376 - DNA, 369 bp, Gossypium hirsutum
gaagggctgaaaccgttttgtgccatttactcttccttcctacaaagaggattggatcagttagttcatgatgttgatcttcaaaagctccctgtgagatttgcaatagacagggctggcctagtgggtgcagatggaccgacccattgcggtgcgttcgatactacttttatggcatgtttgcctaatatggtggtaatggcaccttcaaacgagactgagctgatgcaaatggtggcaacagcagcagccattgatgatcggcctagctgctttaggtaccccagaggcaatggcattggttctattctcccaccaaacaacaaaggaacaccattagagattgggaagggaagagtactaagagaa

SEQ ID NO: 225377 - DNA, 365 bp, Gossypium hirsutum
cccacgcgtccgacactctctttttttagatacagagaattttcttttggggtgtctcttcatctatagatccgtcgattccttagtgtttcttacgatgccgtctcgccgtagaaccctcttgaaggtcatcatcctcggcgatagcggggtaggcaagacgtctttgatgaatcaatatgtgaataagaagtttagcaatcagtataaggcaacgatcggggccgatttcttgacaaaggaagtgcagtttgaggataagcttttcaccttacagatctgggatactgccggccaggaacgattccaaagcctaggtgttgctttcttaccgggcgctgattgctgtgttcttgtatacgatg

SEQ ID NO: 225378 - DNA, 316 bp, Gossypium hirsutum
cggacgcgtgggttaaaatataagaaaaaagtcatacgcaatgagcactgccggtcaggttattcgttgcaaagctgcggtggcatgggaggccgggaagccactatctatagaagaagtggaagtggcaccaccccaaaaacatgaagtccgtattaagattctcttcactgctttatgtcacactgatgtatactactgggagtgtaagggttacactcctctgtttcctcgtatacttggtcatgaagcctcaaggatcgtggagagtgtgggtgagggtgtgaatgatttgaaacctggggatcatgtgctt

SEQ ID NO: 225379 - DNA, 362 bp, Gossypium hirsutum
gggtgcttgacaagctcaaggctgtgcgtgagcgtggtatcaccattgatattgccttgtggaaatttgagaccaccaaatactactgcactgtgattgatgcacctggacaccgtgactttatcaagaatatgattactggtacgtcacaagctgactgtgctgttttgattattgattccaccactggtggttttgaggctggtatctcaaaggatggtcagactcgtgagcacgcattgcttgcttttacccttggtgtcaagcaaatgatttgctgttgcaacaagatggatgccactacccctaaatactcgaaggctaggtatgatgaaaatgtgaaggaagtctcttcctacttg

SEQ ID NO: 225380 - DNA, 159 bp, Gossypium hirsutum
tcgcggacgcgtgggtttggagtgcctttgttatcctctacatcttactttgtggtgtcccaccttcctgggcagaaactgatcaaggagttgcgcaagcaattattcgttctgatatatgatttaagagggaactctttcttaaagtttttgataatg

SEQ ID NO: 225381 - DNA, 350 bp, Gossypium hirsutum
cttctctaatacacccactgtaaaaaaaaagagagaaatttgatcagacggtgaaaatgggtggccttgaaactgagagaacaacaacaggatgggctgccagagatccttcaggagtattgtctccttacacttacactcttaggagcactggtcctgaggatgttttcgttaaggttatgtgctgtggaatctgccacaccgatcttcatcaagccaaaaatgatcttggcatgtcaaactacccaatggttcctgggcatgaagtggttggtgaggtgttggaagttgggtcagatgtaagcaagttcagagttggtgatattgttggcgttggttgtattgttggg

SEQ ID NO: 225382 - DNA, 314 bp, Gossypium hirsutum
gcaaaacatagcaaaaaagaaaaatggctaaatcagcagaggaagagaaccaacaaaaagcttttggttgggctgctactgataattctggaatcctctcccctttcaatttttccagaagggaaaatggtgatgatgatgtcactttaaaaattctttactgtggagtgtgccattcatacctacatactttgagaaatgactggggtttctccttttaccctgttgttcctgggcatgaaatttcaggtgttgtgaccaaagtggggaagaatgtgacaaaattcaatattggtgaccgggttggggttggg

SEQ ID NO: 225383 - DNA, 363 bp, Gossypium hirsutum
ctgtttctttcttataattaggtttcagtcatggctattgtttctaaagctttgattgcctcacttctcatctctcttctcctttttcaactggttgaagctgatcatcaactggtgacagatgctaggaagggagcctctcccccgaagaaaattgactgtggtggagcatgtgcagctaggtgccggttatcatcaaggccacacctatgcaagagggcatgcgggacatgttgcgcgcgttgcaactgtgttcctccaggaactgccggttaccaagaaatgtgcccctgctatgctagcttgaccacccatggtggcaaacgcaagtgcccttgagttgatatcgacttgaaacgagcc

SEQ ID NO: 225384 - DNA, 332 bp, Gossypium hirsutum
cccacgcgtccgctttgagcctttttaacaaacacaaaaatatgagagcagctatgcctcctattaatacaaagaacatgtctactcctctagaagaggaggaaagtgagctgagaagaggaccatggacccttgaagaggatactcttctaacacattacattgctcgtcatggagaagggcgttggaatatgttggcaaaatgtgcaggtctcaagagaactggtaaaagttgcatgctaaggtggccgaattatttaaaaccagtctttaagcgtggtaactttactccccatgaacagtttttgattcttgaactttatttcaagtgg

SEQ ID NO: 225385 - DNA, 315 bp, Gossypium hirsutum
agataataaagcgtttgtctcatattttagaagatggcccgtaccaagcaaaccgcccgtaagtcgactggtgggaaggctcctaggaagcaacttgctaccaaggccgtccgtaaatctgccccaaccactggtggtgtgaagaagcctcatcgataccgtcctggaactgttgctcttcgtgaaattcgaaagtaccagaagagttctgagctttttatcaggaaattgcctttccagaggctagttcgtgaaattgcccaggatttcaagactgattttcgtttccagagccatgccgttcttgctcttcag

SEQ ID NO: 225386 - DNA, 296 bp, Gossypium hirsutum
gtttcaaaggaagatggccagcattgatcttggtggcgtctccgtaagaacgcacgcttttgatatcgtcaggtcagagattcaatctcgtcttctccctctattatcatcagttgctggtcaagaacaagttttagatttacaagatgtatttagacgattttcattcgataatatctgcaaattctccttcgggttagaccctggttgcctcgatttatcactgctagttttagaccttgctgtagcttcagatttttcatcaaatttttcaggacaaagagcgctaggcatct

SEQ ID NO: 225387 - DNA, 358 bp, Gossypium hirsutum
cccacgcgtccgcccacgcgtccgccctcgcgtccgcccacgcgtccgggatggcaacacgaaaatcaattacatgaacatgttcgacgctcaagtggacgctgttcgtgcagcattggatgccatggggtttaagaacgtcgaaatcgtggttgccgagacaggttggccgtacaaaggagacagcgatgaagtaggagcaagcattgagaacgccaaggcttacaatggaaacttgattgcgcaccttcgggcaatggtggggactccattgatgccggagaattaggccttcacatatttatttgcttctttcgattagtacttgtaatccgtgccatttttcgaaagttttttt

SEQ ID NO: 225388 - DNA, 247 bp, Gossypium hirsutum
tcgcggacgcgtgggttcaaaaagattttatttgtagaagaagcaatggccactcttacagtgcccacgacagttccttcagtgtctgaagattgtgaacaactaagaaaagccttttcaggatggggaactaatgagggcttaatcattgatatattgggttacagatatgcggagcaacgaaacttgatttgaaaaacctacgctgtaacctatggagaggttcttcttatggcacttgacaagg

SEQ ID NO: 225389 - DNA, 253 bp, Gossypium hirsutum
gccaaggctgctgaacaacctgctatttaagaagagaggatttgttgattggatgaacattataaaacctggtgctgaggagaaagatcactgggtgcctgatgaagctgtttcaaaatgcactgcttgtgcaacagattttggggctttttgtgcggtagctcctctgcaggaactgtggtgatatttttctgtgacaaatgttcccatggtagattttctttatctgcttgtgagtgttctttcatatgtt

SEQ ID NO: 225390 - DNA, 359 bp, Gossypium hirsutum
cccacgcgtccgctctgctcaacatcctatctctttctctcgaccaaagactcagatccacgcgtgaatctttgttccagcttgttagaatggagacatttctattcacatctgagtctgtcaacgagggtcaccctgacaagctttgtgaccagatctctgatgctgtgctcgatgcctgccttgcccaggaccctgacagcaaggttgcctgtgaaacatgctccaagaccaacatggtcatggtctttggagaaattaccaccaaagctaatgtagactatgagaagattgtgcgtgacacgtgccgcaacattggatttgtttctgatgatgtgggtcttgatgctgacaactgc

SEQ ID NO: 225391 - DNA, 318 bp, Gossypium hirsutum
cggacgcgtgggttaccaactcattaaccccaagttttcactttcaaaaaactggcccacattcaccatgtctggcacgtgcggcaactgtgactgcgctgaccgcagccaatgcacgaagaagggaaacagcaacaccatgatcgttgagactgagaagagctacatcaacaatgttgagatggatgctccagctgagaacgatggcaagtgcaattgcggtactggctgcagctgcacagactgcacctgtggccactaagccaacatacaatggtcatgcttcagatcatggcatatatagggatctaaataatg

SEQ ID NO: 225392 - DNA, 363 bp, Gossypium hirsutum
cccacgcgtccggcttcgggcttttataatatcgtgtatcgtcacggtgaaagctccgcccttcaagtcttcacagctaaaagatgccggccggagaactccggtatccttcttcgatctcttgtccacagatttctcaagcaacggaaacccccatggaggaagacgaggcgtgggtgtgggcgcagattaaagccgaggcacgccgcgacgccgagttggagccggctctagctagctacctctactccacgatcctatctcactcctctctcgagcgctccctcgccttccacctcggcaacaagctctgctccttcacgctcctctctacgcttctctacgaccttttcctcaacactt

SEQ ID NO: 225393 - DNA, 364 bp, Gossypium hirsutum
cccacgcgtccgcccacgcgtccgtatctagtgattccatatccgtatccatagccccatcaaatatttcacctttgcctcagctcaccaaatctcctgactccctctaccgcgttgggagtggaaccagcgtgattgtggattctgaatctggggtcgaagccgaatcaagaaagctcccttcttccaagtacaaaggtgtcgttcctcaacccaacggtcgatggggtgctcagatatacgagaagcaccaacgtgtttggcttggcactttcaatgaagaagatgaggcggccaaagcctatgacatagcagctcaaaggtttaggggtcgtgatgctgtcactaacttcaaacaccttca

SEQ ID NO: 225394 - DNA, 330 bp, Gossypium hirsutum
gaaaaattctttttctaaaactctttcccagaatagcttttgatcaaaaagctaatatgggtagccttgaaaaagacagaaaaacaactggttgggcttcttgagacccttttggcatctagactccttattcttactctcttatgaacactggtccagaagatgtattcatcaaggttatatgttgtggaatttgtcacactgatattcatcatgcctatatatatcctggcttgtcaaactacccattggtttccttgcatgaaatggctgtttgaagagttgtttgttttttcctttttttttaacttttcacttttatttgtcatt

SEQ ID NO: 225395 - DNA, 302 bp, Gossypium hirsutum
  unsure (1)..(302): unsure at all n locations
gagaaccggagctactgtcgtcgctgccgccatggtgnnnnnnctgaaatccaacaaggccgtgatagtcctccaaggccgatacgctgggcgcaaagcggtgatcgttagatccttcgacgatggaacacgtgatcgcccctatggccactgtttggttgcagggataaagaagtacccgagcaaggacatccgcaaggattccgccaagaaaacagcaaagaaatcgcgcgtcaagtgctttgtcaagctcgtcaacttccagcacctgatgcccacccgctacacccttgacgttgact

SEQ ID NO: 225396 - DNA, 335 bp, Gossypium hirsutum
cccacgcgtccgcccacgcgtccggcaaatgtgatctctacatttggttgatggaagaaactccacactaaaataaagagagggaaacaaagataagaatatgcaattgacagccacagaatagagcaaaaatcaccaaaaataaaaaagaaatattagtaaagggaggaaaatgagcagcggtgcaggaaaaaccgtgtgtgtaaccggagcctctggctacatcgcgtcatggcttgtgaagcagcttctacttcgtggtacactgtcaaagcctttgttcgtgacccaaatgatccaaggaagacacaacacttgcttggacttgagggtgc

SEQ ID NO: 225397 - DNA, 365 bp, Gossypium hirsutum
cggacgcgtgggcttgtaaagggttatttcgcaccggctggagttgggaagcagcttagtactaatacaccgttgtcgaatttggattctattcttgcaaaccctaggatcaggcggtttttttgcagtgaagggcctaagaaaagaaattatgaaaattactttcccaagaacaagaaatatattcctaaggctaatgaacagaaatctggatccaaagaggattcaggtgctggtgagcctgggaattctcagaacattcaaaggttggtgcagaatattgttaccactttaattgtgattgggattacgtactctttgttatccggtccttatgaacagcaggagattagttttcaagagtt

SEQ ID NO: 225398 - DNA, 346 bp, Gossypium hirsutum
ataataaagaacacacaacaatggccgcctacacactaatgagctgtggcataggcaccacatttccttcacttctttcctcatcaaagtccaagttcagtggcgccgccgtatcgttgcctagtgctgttggtaccaatgttggccaccgtgttagcatgtcagctgattggatgcctggtcaacctagaccaccttaccttgatggctcagcaccaggtgactttgggtttgacccactaagacttggtgaggtccctgagaaccttgtgaggtacaaagaatcttagttgattcactgtagatgggctatgcttgctgttccaggttttttggtaccagaggc

SEQ ID NO: 225399 - DNA, 291 bp, Gossypium hirsutum
gtagaagaccacctcatatggcattccttggcaatcctggaaccggtaaaaccatggtagctcgaattctcgggaaattacttcatatggttggaattctacctacagacaaggtaacagaagtgcaacggactgatttagtcggtgaatttgtcggacatactgggccaaaaacgaggagaaaggtccaagaagcagagggaggaatccttttcgttgatgaagcatatcggttaataccgatgcaaaaggctgttgacaaagactacgggttggaggccttggaagaga

SEQ ID NO: 225400 - DNA, 367 bp, Gossypium hirsutum
aagatggtgaggcatctccataagatatcactaaccttgcttcttctagccaaggaattggtgatagcaatggtggtgatagatacatggtcgttttttgtgcattggtacttgcatcagaacaagtttttatacaaacacctttatgttccgtatcaccggctggttgttccctattcatttggaggacagtatatgcattcaattgaggggttcttggacaccatgggcggaacattagctgtactccttttcggcatgtcttctcggattgtcatgtttttctcctcctttaccatcctttaaattagtgattgattcattgggggatgaagtttttctggaaaccccttttttaccttttttt

SEQ ID NO: 225401 - DNA, 368 bp, Gossypium hirsutum
cccacgcgtccggggatctagctgaaaagtatggaataagtgggtttccaacagtgaaattcttccctaaaggtaacaaagctggcgaagactacgacggtggcagggatttagatgactttgtttctttcatcaacgagaaatgtgggaccagtcgtgatgcaaaagggcagttaacttcaatggctggtattttgtcaagtttggatgcattagtgaaggagtttgtggctgcttctgccgacgagaagaaagcagtcttctccaagattgaagaggaagttgagaagctcaagggttctaccgtgaggcatggaaagatatacttgaaagctgctaaaagcttgttagagataggtgcttactac

SEQ ID NO: 225402 - DNA, 238 bp, Gossypium hirsutum
tccacgcgttcggccgtatttgatatccgacactccacagcgcatcaatgggtgaggaagtaaaggctttggttcctgagtcactgttgaagaagaacaagaggaatgaagaatgggagctagccaaaaagcaggagcttgaagcctctaagaataagaaagtcgtgaaccgtatgttgattttcatcaggtctaattattttgcaaagtgattacttggctcatgaaaaagagttga

SEQ ID NO: 225403 - DNA, 328 bp, Gossypium hirsutum
cccacgcgtccgagctcacccttcactttggtccactacacagccatttcaaagtggtacatacatggctctacaagctgctgctttggttccagctactttctctgtaccaaaagagggaaagtctggtgcttctttcaaggactcatctctctttggagtgtcactttctgatcacatcaaagctgacttcacctcttctgctttaagatgcaagagggaattcaaccatagaactggggctgttagagcccaaacaacagctacttgctacaccagctatcaccagatcttcattgtgatggtaagaaatcacttataaagggtt

SEQ ID NO: 225404 - DNA, 376 bp, Gossypium hirsutum
cccacgcgtccggggtgaaatgattaatgacggaaaatccaggttttccattggtgggaagcctatctaccacttcctaggcacctctactttcagtgaatacactgttgtccatgtcggccagcttgccaagatcaatcctgaggctccgcttgataaagtttgtgttctaagctgcggaatgtccacagggtttggtgccactgtgaatgtagctaaacccaaaaagggtcaatccgttgcaatatttggactaggtgctgtcggtcttgctgctgctgaaggagcaagagtttctggggcttccaagatcattggtgtcgatttgaaccctagcagattcgaactagccaagaacttcggtgttacggagttt

SEQ ID NO: 225405 - DNA, 378 bp, Gossypium hirsutum
caaagacggatcatggagtcatgaggtggcaatctcagtgaaaccattgaaggggcaaaactggattcttcccgaaatgcccggacttataaccgacttcctaatctctctcgatgatcgttttctgtatttcgccaactggctgcacggagatgtccgacaatacaacatcgaggaccccaaaaacccggtcttggtcggccaagtatgggttggaggattgatccaaaagggaagccctgtagtggctatgactgaagatggtaaaacatggcaatccgatgttccggaaatccagggacatcgtctaagaggaggaccacagatgatccaattgagcctagacggtaaacgattttacatgacgaactctctttt

SEQ ID NO: 225406 - DNA, 283 bp, Gossypium hirsutum
aaggactccaaagtgcacgtgtacttgtttggcgatagttctggtggcaacatagcgaccatgttgcggtgagagcagcaaatgctgactttgaggtactaggcaacattctccttcacccaatgtttggtgggcagatgagaactgaatccgaaaagagattggacggcaagtacttcgtgacgctccacgaccgctattggtattggcgagcttatctaccggaaggcgaagatcgagaccatccggcttgtaacccgttcggtccaagaagtcgaaccct

SEQ ID NO: 225407 - DNA, 229 bp, Gossypium hirsutum
atttgaatgcttatacatcgaggtagcttaccacttattacgctaaagttatggatagagatgtatttaaagcgttggatatattggctgatattttgcagaattcgaagtttgaggaacacaggattcgtagggaaagagatgtgattctaagggaaatggaagaggtcgagggtcaaacagaggaagttatttttgaccatttgcattcaactgctttccaatacac

SEQ ID NO: 225408 - DNA, 253 bp, Gossypium hirsutum
gagctatcctggggtccgttgatttaatgtttgctatattgttggagcactatgggggcaaatggcctttcctgcttagtccccgtcaagcaattgattgccctgagttcagaaaagtctcatcaattatgcaatgcatgtcctggattggattcatgaagctggttattatgcatatgtttacattgtcagattgaatgattcttcttaatgattctagttgcttcttatttcatcatttccaactattatt

SEQ ID NO: 225409 - DNA, 380 bp, Gossypium hirsutum
gcaagaatttaggttgcaaagtgtgggggagtttgagactggtcagaaatgggctgttgaagagatttttaaggaaggtgatcttgttgatgtctctgggactaccatagggaaaggatttcaaggtggaataaagcgccataattttaaaagaggtcaaatgagccatggttccaagagtcatagagcattggggtctattggtgctggaacaacacctgggcgtgtgtacaagggaaagaaaatgcctggcaggatgggaggaagcaaaagaaagatccgaaagctcaagattgtgaaaattgacaatgagcttctagttgtgatgatcaaaggtgctgtccctggtaagcccggaaatctggtactaataacccccg

SEQ ID NO: 225410 - DNA, 383 bp, Gossypium hirsutum
gctaagccgcctacttatcctaaaccacataggagcctagtggctgttcagggcgttggtttttgcatgtcatgcaaatacgctggatccaacaccctgttggtagtaaaacctattttgggcgccactgtaaagcttacatgcatgaacaccaaatacaagcaagaggccactgtgaaaactgacaagaatggctattttttcctgcaagcaccaaataccgtctctagctttgtagcccacaaatgcacagtgtctctagtattatcgccaatggctaaatgcagctaaccatcttatttccattgtggtttgaagggagttactttttggcccgtaaagccatttacttgtattaatctttctttatttttatacaccgt

SEQ ID NO: 225411 - DNA, 281 bp, Gossypium hirsutum
gttccgggcaaatctaccaatgcaccacctctgcttcagtgtacgagccgtatgtgtccagttcgaattcactggcatgttaagctcaactacaaggaatactggcgtgtgaagatcacaatcaccaatttcaattacgcattgaactacagtcagtggaatctagttgtgcaacaccccaactttgacaatcttacacaacttttcagtttcaattacaaaccattaactccttatgctggcttaaatgatactgtcatgttatggggacttaagtttta

SEQ ID NO: 225412 - DNA, 380 bp, Gossypium hirsutum
gattgtgagcaaacgttttccttcatccaagtcagttttgatcaaatataaggataatgatggagatttggtgactattacttgcacaacagaactcagattggccgagtcttctgtagatgctcttgttccaatagagcctgaagccgataaaactagtggattcagaacattgagattgcacattgttgaggtgagtccagagcaagagcctccactaccggaagaagaggaggagaagcctttggagagccagggagctaagtcagatgaaagtgtgtcgcactcgtctcttggtgattctgtttcagaaggtgttgatgtggagattgaaaagacagagaaagaagcttcaaagaggaaaattggggctaccgaag

SEQ ID NO: 225413 - DNA, 383 bp, Gossypium hirsutum
cctcactcgccgtctcgcctctcgcttattggttcaagatctggttttgatctgatcagatcggataaaaatatcaaaacatgtttgggagagcaccgaagaaaagcgataataccaaatactatgagattttgggagtatcgaaaaacgcttctcaagatgatctaaagaaagcttatagaaaagccgctattaagaatcatcccgataaaggcggcgatcctgaaaagtttaaagagttggctcaagcttatgaggtgctgagtgacccggagaagcgtgagatttatgatcagtatggtgaggacgcccttaaagaagggatgggcagcggtggcggtggccatgaccctttcgatatcttccagtcattctttggtggc

SEQ ID NO: 225414 - DNA, 367 bp, Gossypium hirsutum
cccacgcgtccgcccacgcgtccgtccactcgttcggtgaggcaacacaaactgtggaatcagttctggtttcagggggtttggattttgtccttgggaaggatggggctaaggtcaaggtggccgacttggtggggaagaccattctcttgtacttctcagcccattggtgcccaccatgccgtgctttcacaccgagccttgttgaagtatataagaagatcaaggaaaaggatgatgcatttgaagtgatttttatttctagcgacagggaccaattctcctttgatgactttaattcatgaatgcctttgttggctctttcattcaatgatgctcggaaatcattattgagtctcaatttcaa

SEQ ID NO: 225415 - DNA, 379 bp, Gossypium hirsutum
cccacgcgtccgagaaaaaggaaacaaattatggcaattgagattcctagagtgaaacttggaactcaaggatttgaggtttcaaagctgggatttgggtgcatgagtcttacaggtcacgatcattcattgtcagatgaagatggcatagccatcattaagcatgcagtctaaagaggagtcacttacatcgatacagccgacctctatggacccaaaactaacgaaattctggtcggaaaggcattgaagcatctgccacgagagaagtgtcagtttgctacaaaattcggtgttgaaagcatgggtccagatggttcggttttcaatggcactctctgattttgttcgttctttacttgaggctagcctttaacgc

SEQ ID NO: 225416 - DNA, 382 bp, Gossypium hirsutum
gcgactgagaagtgagaacacagaaaattttcaatgagtgggaaaatcaccatggccatggctgcactttttgtagttctagctgccaatgtgttgcagagtacaaatggtgcaacttatacagtgggtgactctactggctggaaagtccctaccaataatgatttctacgatgattgggctgataacaaaatcttcgttgttggggatgttcttgtgttcaatttcactaccggacaacatgatgttgcagaggtgacggaaactgcttacgatgcgtgcaacactgccaatactatatcaaccgtcagcaccggaccggcaaggattactcttaacaggaccggcgatttttacttcatttgtgcttttcccggtcact

SEQ ID NO: 225417 - DNA, 387 bp, Gossypium hirsutum
gtttgccggcgtctttccagaacacaaatacgaaattgtgaggaaattgcaggagaggaaacatatatgtggaatgactggagatggtgttaatgacgctcctgctttaaagaaagctgatataggtattgctgttgctgatgctacagacgccgcacgaagcgcttcagacattgttcttacagaacctggattgagtgttattatcagtgcagtgttaactagtagagctattttccagaggatgaagaactatactatttatgcagtttccatcacaatccgtatagtgtttggatttatgcttattgctctcatttggaagttcgacttttcaccgttcatggttttgatcattgccattctaaatgatggaactattatgac

SEQ ID NO: 225418 - DNA, 298 bp, Gossypium hirsutum
cccacgcgtccgggcggtttctgtatagcctctagccatgactttcaaacgtaggaatggtggccgcaacaagcatggccgtggccatgtcaaattcatccgctgttctaactgtggcaaatgctgccccatggataagtcaattaagaggtttcttgtgaggaacattgtgtaacaagctgctgttagagatgtccaagaagcctgcgtttattacacttatactttgcctaagcttgttgtgaagatgcaatactgtatttttgtgtgcgatccattctcacgttgtgagagttcg

SEQ ID NO: 225419 - DNA, 142 bp, Gossypium hirsutum
  unsure (1)..(142): unsure at all n locations
gtcctgatgacattaagcttgagttattaatgctcngcatctgattgcgaaggaactttcacttaaaattgtgagcaagattgaagcatgagagaggtataccgtttatgttgatgtccttatgtggccagtaggaatccca

SEQ ID NO: 225420 - DNA, 375 bp, Gossypium hirsutum
ctgaagatagtatgccgcagtttgatccacagcagtactattcaactatgcaacaggttatgcagaacccccagtttatgaccatggctgagcgccttggtaatgcactaatgcaggatccagctatgtctagcatgcttgacagtttcactaatcctcaacacaaagaccagattgagcaaaggatggcacttatcaaagaagatccatcactgaagcatattctagatgaaatagagactggtggtcctgcagcaatgatgaagtattggaatgataaagatgttctgaagaagttgggtgaagcaatgggtcttgcagtttcaggggatgcagccacttctgccgacaactctgcggcagatgaaggtgatg

SEQ ID NO: 225421 - DNA, 355 bp, Gossypium hirsutum
aaagaatggaaacatcgctccaacatcgctaatgagcttcttcatatgcaaggaagaatcgttaatatatctgctagccgtgaaacctacggcatcagaaacattggggaagggatcagtactgcaagggagaggcttcggaaactgagaagatcatctcctcgccgtgaagagaaggatattgttggcctggacgaagacatagataagcttgtgaaacaacttgtcaagaccgatgaccaatggcatgcgatttcaatagtcggaatggggggcatcggaaagacaactctggcaaaaaaggtttacaatcatggtgatatcgaggctcgttttcctttttgagcatgggttt

SEQ ID NO: 225422 - DNA, 349 bp, Gossypium hirsutum
gccattcaggcgaatctgttgccgtgaagaaaatttggaatagtatgggagtgggtcacaagctcgagaaagagttcttagcaaaagttgaaatattgagcaacattcgccattccaacatagtgaaggtattatgttgcatttccagcgaagattcaaagctgctggtatacgagtatatggaaaaccagagtctagatagatggcttcatgggaataaaagaagctcagtgtcagggacgagttccttccaccatgctatattggactggccaagaaggttgcacatcgcggttggagcagctcatgggctatgcttcatgcaccatgagtgccttacaccaatcat

SEQ ID NO: 225423 - DNA, 379 bp, Gossypium hirsutum
cttacacgatcatcttcttcagtgtccttccttaaactgatctacggaaatcccaggaaaaccccacgtgtcaaaagagtaggagatggagatacggagattgcatcttcttcttcttcttcaaggttttatgttgttatctgtgatggggaattgttacgcgagatttgtggtggaaaagaacagcttgaggctgacttcacccgagaagattaagggtacctatgacagtgcaattggcaactttgggatacctcaatatgggggaagcatggctggtgctgtggtttaccctaaggagaatcaaaagggttgtaaaagttttgatgactttgggatttcctttaaatccaagcctggtgctctttctacttttgtt

SEQ ID NO: 225424 - DNA, 385 bp, Gossypium hirsutum
  unsure (1)..(385): unsure at all n locations
cccacgcgtncgaaaaaaattgtttttgtttttaaaatataaacttacgacatgtacaaatggtgacctcagtgctacctagagtagaaagcttggcaagcagtgggattcaatcaatcccgaaagaatatatcaggcctcaagaagagcttacaagcataggtaacgtgtttgaagaagagaaaaaagaggaagggcctcaggttccgaccatcgatttgacagaaatcgagtcggaggacaaagaggtccgggaaagatgtcagcaggagctgaaaaaggctgccatggaatggggtgtgatgcaccttgttaaccatggcatctccgaggagctcatggatcgtgttaggaaagatgggcacaaatactttgaactccctgt

SEQ ID NO: 225425 - DNA, 386 bp, Gossypium hirsutum
gagctttccaagcttgctgccaatgctttcttggctcagaggatctcatccgggaatgccatgtctgctctttgtgaggcaaccggggctgatgttacgcaggtctcttatgctgttggtaaggacacaaggattggacccaaatttttgaatgctagtgtcggttttggtggatcctgcttccagaaggatattctaaatcttgtttacatctgcgagtgcaatggccttcctgaggtggcagagtattggaagcaagtcattaagatcaatgactatcagaaaaaccgatttgttaaccgtgttgtttcctcgatgtttaacaccgtttcaaacaaaaagattgctatcttagggttcgcctttaagaaggataccggtgacac

SEQ ID NO: 225426 - DNA, 342 bp, Gossypium hirsutum
cccacgcgtccgcagaggcttactttttttccacctcgccttgaagaaattggggggggctctgaggaattccatgaagatactaaaataaggcattttagagtgattgagtattggaaacagatgaaatctgttatacagaagaattcgatcagaaatgtcatggatatgaactctaacctaggaaggaatgctactgcacttacacaaggatctttgtgtaatgaatgtggcttttggggaaatgaatgcaagattgaaaattatttatgaccgatgcttgattggaacagttcatgatcggtgcgaatcctgttgtacatacccacggacgtgtgaact

SEQ ID NO: 225427 - DNA, 384 bp, Gossypium hirsutum
gattttctgggttttttccccccgttatttttagtatcagcattgtcttttttgcttctttagttttgccttgttgaaagctcaagttcgaagaaatggctgagcgtgctctcactcgcgtccacagtctccgtgagcgtttggattccacacttaccgcccacaggaacgagattttggctttgctctcaaggattgaaggtaaaggaaaaggaatccttcttcaccatcaaatcattcttgagtttgaagctatccctgaagagaaccgaaagaaattagctgatggtgcattttttgaaatactgaaagccagtcaggaagccatcgtgttgccgccgtgggtggcgctggccgtccgaccaagacctggtgtttgggagt

SEQ ID NO: 225428 - DNA, 383 bp, Gossypium hirsutum
cgccaatgtcaaatttattttcgtgcttgtggttcaatgaagttgatcgatttgcctcacgtgaccaactaagctttgcatatacttatttgaagttgacgagaatgaatccagataaaccattccatctaaatatgtttaaggactgtgagcgcagagcactggcaaaattattcaggcatcggttgttgtcatctcctccacctccgtgaccagtcagattatgctagttttctgggagcataaatgcagtctttgcattgatatccacagcgaaagtgaaacactgggttctctatgaagtaaaaccacgatttttttttcttccgggaatctttttttcatggatttttcaagcttgacaggaattagaagcaaaccag

SEQ ID NO: 225429 - DNA, 385 bp, Gossypium hirsutum
cctctcacccttcatatcagaccgagtcctcgtcaacgggaaagtggttcccctgacgttcaccagagacgggaagctccggtggaaccataacgaccggcggtgcttgaacgttgagaaggaagctctcggattcaccttcgaaggttctagaatccgagtcaatgtcgtcgtcgaaaagagagatagaatcctctgtttcgcgaacatgggaggtatagggaggcagagtttcgtgttcgagcctctctctgaggaatcgctcactctttggtctcagaagcttcgtgattatattgattctctcggtaggccaaagagactattgatatttgtgaacccgttttagggaagaaatgtgcaacttaaaattttggagaagatt

SEQ ID NO: 225430 - DNA, 367 bp, Gossypium hirsutum
acgcggacgcgtggggtatttccgtgagaaatacaatgttgtgcttaaatatccagccttgcctgcactttaaagtggaagtcaagctagacctgtctacctgccaatggagctttgtagtatcgttgagggtcagagatacacaaaaaaactaaatgaacaacaagttagatctctgcttagagcaacttgtcaacgtccgaatgttagggaggggaatgttacgaagatggtccaggtcaataattttgaggtggaggagcctattactaaagaatttggaatgcatgttcgcaaagaacttgcgttgattgatgcacgagttctaaattctccagcgctaaagtatcacgacactggacgtgac

SEQ ID NO: 225431 - DNA, 362 bp, Gossypium hirsutum
cccacgcgtccgcccacgctttcttccacgcgtccgcccacgcgtccgggtgcgtgttcgtgggaaggatttgaaggcgggaaattatatatacggtaatctacatttggtagatttagcaggtagtgaaagagtagatagatccgaggtaactggtgatagacttaaggaagcacaacatattaataaatctttgtcttcccttggagatgtaatttttgctcttgcacaaaagagccctcatgtaccatacagaaatagcaagctcactcaagtactttaaagctttctcggaggacaagcaaagacccttatgtttgtgcaactcaatctcgatgtcactttctattttgaaagtttga

SEQ ID NO: 225432 - DNA, 378 bp, Gossypium hirsutum
gagaattcttaccaccaatctttggtctgcagagctttccaagcttgctgccagtgctttcttggctcagaggatctcatccgtgaatgccatgtctgctctttgtgaggcaaccggggctgatgttacgcaggtctcttatgctgttggtaaggacacaaggattggacccaaatttttgaatgctagtgtcggttttggtggatcctgcttccagaaggatattctaaatcttgtttacatctgcgagtgcaatggccttcctgaggtggcagagtattggaagcaagtcattaagatcaatgactatcagaaaaaccgatttgttaaccgtgttgttttctcgatgtttaacaccgtttcaaacaaaaagattgc

SEQ ID NO: 225433 - DNA, 372 bp, Gossypium hirsutum
cggacgcgtgggttagaaactcaaacaaaccttttacttctcaactctttcaaattcatcatgtctgacaagtgcggcaactgcgactgctctgacaagagccagtgcgtgaagaaaggaaatagcttggtcattgagactgaaaagagctacatcagcactgtagtggtcgaggctgtggcagagaacgatggcaagtgcaagtgtggagatagctgcagctgcacagactgcacatgtggcactcattaagcagacatagaaccatgatgttttagtccatagcaatattaggacctaaaaataatgaaattgagttgaataaattggtgtttttgttgtggagtttgagacattgaatgcgttttcatg

SEQ ID NO: 225434 - DNA, 387 bp, Gossypium hirsutum
cccacgcgtccggttttattttctcttgtactaaaactgtttggtcggcaagaaaactttagaatcatgggagtgccggaaactgatccattggctcaattgagcttgccgccggggtttcggttttatccaactgatgaagagcttttagtgcaatatttatgcaggaaagttgcagggcatcatttttctctgcaaatcattggcgaaatcgatttatacaaatttaatccatgggatttaccgagtaaagctttgtttggtgaaaaagagtggtattttttcagtcctagagacagaaaatatccgaacgggtcacgacctaatagagttgcagggtccgggtactggaaagctaccggaactgataaaattattacaacggag

SEQ ID NO: 225435 - DNA, 387 bp, Gossypium hirsutum
gccttttcttcccaagcaaagcacatattttccaacaggtaaacaaaattaattattcaataaataaaaaccctaagtaattttggtggaaatgtcgggtaaaggagcgaaagggttgattacggctggcaaatccgccaaagacaaagataaggacaagaagaaacccatctctcgctcatctcgtgctggtctccagttcccggtgggtcgtgtccaccgtctgttgaagacaagagttaatgcacatggaagggttggagcaacagctgctgtatatactgctgccatactggagtacctgactgcagaggtgctagaactggcaggtaacgcaagcaaggatctgaaggttaagcgtataacgcctaggcatttgcagcttgc

SEQ ID NO: 225436 - DNA, 353 bp, Gossypium hirsutum
aagttcaagagtgatgatggagactgtcccacattggtttgcacggacggggctgctagagggctggacttggatgttaatcatgttatcatgtttgatttccctttaaactctatcgactaccttcatcgcactggaagaactgcacgaatgggtgccaaagggaaagtaacaagcttggtggctaaaaaggtcttatcgttggcataaaggatagaggaggcaattatgaaagaatgagagtttggaatctcttacagctgataatggtcgaagggatactgctaggactttgatttccgatcattaggggtagaatgttaaactgttcaaggcatctaatcagaaaaaca

SEQ ID NO: 225437 - DNA, 318 bp, Gossypium hirsutum
gccacatttcgattattttcatgtataaggctaatcaagagctgggcggtgaccgtatagccactgtactgatgtatttgtctgatgttgagagtggtggggaaactgtgtttccaaatgcagagggaaaactttctcagccaaaggatgatagctggtcagattgtgcaaaaaatggatatgcagtgaaacccagaaaaggtgatgcattactattcttcagacttcatcttgatgcaacaactgattcctacagtttgcatggaagttgcccagtgataaagggtgagaaatggtctgcaacaaaatggatccatg

SEQ ID NO: 225438 - DNA, 380 bp, Gossypium hirsutum
  unsure (1)..(380): unsure at all n locations
ctattaagaagggttgcgattgtttgggatatatcaagtactttgatgctcatgttacaaatttcactggaggtgttgaaacaattgagaattgtgtttgtttgcatgaagaggatcatgggatcttatggaagcatcaggactggagaacaggtttagcagaagtccgacggtcgagaaggctaacagtatcttttatatgcacagtagctaactatgagtatgggtttttctggcatttctatcaggatggtaaaattaagctgaggttaaactcactggaattctcagcttangagcattgcagcctgttgaaacacggaaatatggcacgaccattgctcctggattgtatgcccctgttcatcaacactttttcg

SEQ ID NO: 225439 - DNA, 358 bp, Gossypium hirsutum
ctccaacaaccagacatgggatatgtggactatatgaaaggaaacttaaggagctaaatccagctacaggaaacatcacttacgatattgctgatctttacaattttattgatggccttgcagatatgagcgcccttgtctatgatcacaggattcaagcttttttgcctaacgacaggcaatggattaaacagaaactatttcaacacctgaagaagttggcacattaaataaatcctgttcactgaaagtaatagaaaaaaaaaatgtgcatcaaagtgcaaaagacctcatatcatatctgataattgtgcttttattatacctcctaacttttgcacacatttttgagtaccca

SEQ ID NO: 225440 - DNA, 355 bp, Gossypium hirsutum
gtctgctttgatatcgatgctaatggtatctgaaacgtatatggcgaagacaaggcgactggacaaaagaacaaaatcaccatcacaaacgacaagggccgactcttcaaagaagaaattgaaaagatggttcaagaagcagagagatacaaattcgaagatgaagaacataaaaagaaggtcgaggcaaagaatgcattggaaaactatgcatacaatatgaggaacacagtgaaggacgagaagattggtgctaaactcccagcagctgataaaaagaagattgaagatgctattgaacaagccattcaatggctagacagcaaccaactcgccgaagccgatgaatttgaag

SEQ ID NO: 225441 - DNA, 287 bp, Gossypium hirsutum
tttggtggttcctaacagttgtttgcttaaaaccgggagggccacaattggcagggcaggcaattgatcttgcggagacacgtttgttgaaagatgcctggccagaatattatgatggaaaactcgggagatttataggcaaacaagcaatgaagtaccagacatggtcaatagctggatatttagtggcgaaaatgatgctagaggatccatcacacttggggatgatcgctttggaagaggacaaacagaggaagccaatgataaagagatcatgttcctggaat

SEQ ID NO: 225442 - DNA, 353 bp, Gossypium hirsutum
tttccatctctccaaacacaattcactaaagcaaaaacagctagaagaagaagggatggccgcctcgggtaaatacaatttccatttttcccagttccgcaagaaacccatccattttttacattcatattttcgatttgatgatttgtctctttgggttgatcttgtttaatatttctggggttttgtgattgtttcagataaagttcaagaactgcatgtatatgagatgaatgaaagagatcgtggtagtccagcttaccttcgtttaaatcagaaacctgttaactcacttggtgatatttgccccttttagcaacaaagaaaggtttttttttttctgaatttaatta

SEQ ID NO: 225443 - DNA, 372 bp, Gossypium hirsutum
taattattaagaaaccgttttagttttaccgccggaaagagaaaggtttcgataattttatagagttacgatttaggaaaatcctgggagaggagaaagatggtatcgtcacctgtcgtgaacacgtatccactgtccagctacaccttcggcaccaaagagccgaagatggagaaggacacgtccgttgccgatcgccttgctcgcatgaaagtcaattatatgaaagagggcatgagaacaagtgttgaagcgattttactggtccaagaacataatcatcctcacattcttcttctgcaaattgggaacacattctgcaaacttcctggtggacgcctgaagcctggagaaaatgagattgagggtctg

SEQ ID NO: 225444 - DNA, 337 bp, Gossypium hirsutum
gatgtttacagagttatgccccttttagcttatcgagctgacaaggctagggtggctgatcagaagcccggtcccgatccctagttcgctgctgcgatcagctcggttgtgcatcccaagaacccctttgctcctacgctgcattttaactacagatatttcgaaacagatgcttccaaagatgcttctggagctccaaggtaattggggtttgggggtggaaactgaattgactccaccttaaattctatgaggaggttgttatgcactttccatacaatacggaggaaatagcatgtcacataatttttatcccataccttttatacttctattt

SEQ ID NO: 225445 - DNA, 315 bp, Gossypium hirsutum
cccacgcgtccgcttaagttggctaaagaagcaaactcaatcctgtttgattaccgtatcccgacagttggcacctgcggtgcagctgtggacagccatttgcagatgaacgggctcccgatcagcgtctacgcaccggagacagttgggtgtgtggtggttgacaaggagggtcggtgcgctgcatgcactttaactggtgggctcatgaacaagatgtcaggaaggatcggtgactcgcccattataggtgcaggaacctactcatgtgagttgtgcggtgtattgtgcacacggggaaggagaagcaatcat

SEQ ID NO: 225446 - DNA, 160 bp, Gossypium hirsutum
cccacgcgtccgcaaaaaacaaaaatttcatggctcggaaattctttgtcggtggcaactggaaatgcaatgggacaactgaggaggttaaaaagatcattacaacattgaatgaagctgaagttccttctgaggatgttgtggaggttgttgtgagccc

SEQ ID NO: 225447 - DNA, 391 bp, Gossypium hirsutum
  unsure (1)..(391): unsure at all n locations
ttgaacaccacaaagaacttaaacgccacactgttcgaagaactgaaagcgggcatgcagaactcaagtgagtatgccagcaacagtttggccatcgctgctaaattcttgggtttgttgaccaatttccgtatcccgattcaccggaggttgcttgggttccaaaaagctgcaccttcagagttcccagcttgggttagtcccactgaaaggagactgttgcaggagtccaagcctaccccaaatgtaattgtggctaaagacggttccggccatttcaagacgattaacgaggcggtgcaattggtgggaaagaagaaccaatcgagattcgtgatctatgtgaaggaaggcangtatgttgagaatgtgaatctcgataaacacaagt

SEQ ID NO: 225448 - DNA, 330 bp, Gossypium hirsutum
ctcactcgtccgatcactcaacattctcatgttcaatctgcaaatacgaaggtgaggatgccgatcagaaacataccagtagagcggactgaagaggcaactcacaccgatgctctgaatgcagctatggctgagttgatctcaaccttgatcttagcgttcgctggaacgggctcaagaatggctatcaacaaggtgaccgacaacggagcaacaactcgggccggcgttgtagctgacggtctagctcatggcttcggtcttttcgtgggtgcctacgttggaggcaacatcttaggcggccacgtcaaccacgtcgtgacctttggt

SEQ ID NO: 225449 - DNA, 350 bp, Gossypium hirsutum
agctgatttgagcagcatcagctaaagtagatcccaaaatgaagtttaatatcgcgggtccgactactggttgccagaagaagctcgagatcgatgacgaccagaagcttcgggcatttttcgacaagcggatcttgcaggaggttgctggagatgctttaggcgaggaattcaagggctatgttttcaagatcatgggaggttgcgacaagcaaggattcccgatgaagcatggtgttctgactcctggtcagggtctggctcttgcttcatagaggaaccccatgctttcgtggatatggaagacgcaatggtgagcgtaaaatgatgtttgttacgtgatgcattga

SEQ ID NO: 225450 - DNA, 318 bp, Gossypium hirsutum
ctttgtcgccacttctcgtttgctgagatcaaggctgccacaaagaacttcgatgaggctttagtccttggggtgggaggctttggtaaagtttacaaaggtgaaattgatggtgggactactaaagttgcgatcaagcggggcaacccgttatctgagcaaggtgtgcatgagttccagactgaaatcgaaatgctttccaagctccgacaccgccaccttgtttcgttgatcggttactgtgaagagaactgtgaaatgatcctagtttacgactatatggcttacggaactctgcgtgaacatctatacaaaaca

SEQ ID NO: 225451 - DNA, 369 bp, Gossypium hirsutum
gaatcatgcaagatctgactcagcatctagtacactttctaattcagattttgctcaaggaccaggtggagatgccaatgagagtttggaggcgtcaactcatctcagggccaatagtgatgttaatggagaggtgaaatctgacccgcagcctgtggctagctcagccatcccacagagagaagctgagttctctcctcgatttatggatccaagatctcgaagccaaagaatctggcgccgacaatcagagagattcgttccaaggatcatttcttctcctggtattgagaacagggctgacctttctggcactgaaacccgggttaagaaattggtagaggactttgagtgcacttcagtcgatac

SEQ ID NO: 225452 - DNA, 356 bp, Gossypium hirsutum
gccgctttgtcattggtggtcctcacggtgatgcaggtctcactggtcgggggatcattattgacacctatggtggctggggagcccatggtggcggtgctttctctggaaaggaccctaccaaggtggacaggagtggtgcttacattgttaggcaggctgccaagagcattgtggctaatgggcttgcccgaaggtgcatcgtgcaggtctcttatgctattggtgtgcctgagcccttgtctgtctttgtagacagctatggaactggaaagattcctgacaaagaaatcctccaaattgtgaaggagaacttcgacttcaggcccggtatgatcaccatcaacctggatctc

SEQ ID NO: 225453 - DNA, 337 bp, Gossypium hirsutum
cggacgcgtgggctgcaatggcctttttgtgtggtttaaacaagctggccgagttgtgggaagtggaaagagttggtgtatgccatcaagctggttcggatagtttgctcacatcatgcacgtttaggaagttgagggataactttttcaaattaggacagaaatatgcaggtgttctgtatggcttagaggtcgagggcggtcagaattctgattaaaagagaaaataattgggataaaggatgtagactactaagtgtgtgtgacttaattttatttgtctacattggccaatgaagaaagattgttgatctagttgggactttttcttttttgt

SEQ ID NO: 225454 - DNA, 337 bp, Gossypium hirsutum
acctgcccttttctttgtaataatcgaactcccctcccgtcctctttcccgatttgtcttcttcattgccccgccatggcttgtgttagcttcgctaaactcaacgcgccgtcatcctcttggatcggtggccagcagtctctccctcaacgctccggatcatccgctcggctcgccactcgcagagtctcactcccgatccgtgctggcgcttacaccgacgaactcatcaaaaccgccaaaactattgcttcacctggtcgtggaatactggcaattgatgaatcgaatgcaacatgtgggaagagattatcttctattgccttagacaatactg

SEQ ID NO: 225455 - DNA, 356 bp, Gossypium hirsutum
cccacgcgtccgcccacgcgtccggtaacgttgtagatgaagccaagctgagggcagtcgggtttatcgtctactccattggcaagccattggatcaatggctcaaggacatgccagctgtggcataagagcatcattttgagaggcgtataatccgattacacagttttcattgcattacattttatttcttctagttttaagatcctgcttccgacttgtattgagttattacatgacacagtagtgtctgaatctgtcatcaacgggtaggatatatttgattttgttattggcttattgtaataaaacctttaccagtggtatttatttccagttatcttattccatgaatc

SEQ ID NO: 225456 - DNA, 363 bp, Gossypium hirsutum
gtccttcacttccaacatttgagaaacaagcaaagaaagatggccaatcttagaagtctcacaaaacatttcatatgtgcttgtcagcttctcttgttattgcaagccaaagtcttttgttctcagtacaaggttggagatttagatgcttggggcattccaacatcagcaaatccccaagtatatgccaaatggtccaaaaaccattccttcaagctcggagactctctcttgttcctatacccaccaagtcaagattcagtgatccaagtgacggaacaatcctacaacagttgtaacctcaaagatccaatcttgtacatgaataatggcaactcactgttcaacatcactaagcctggg

SEQ ID NO: 225457 - DNA, 393 bp, Gossypium hirsutum
cccacgcgtccgatctgatatatctgaagtcattgagaatgttaaacaacgtgttggggatgctaaattacctgatattgaggttgtacgaattctttgggatgtaataatggatgctgttcattggtctggaaagaaccagcagcagaatgccaattcagctttacgacaggtcaaaacatgggcaaagctgttaaattcgttctgcagcagtggaaaacttgaactggagcttatgtttaaggttcagatgcaatgctatgatgatgctaaattgatgaagctattcccggagattgcgaagtttctttatgaccaaaatgtccttgcggaagacacaattctttactggttcccgaaaggatcaaattcaatgtcagtgcaacctttttt

SEQ ID NO: 225458 - DNA, 349 bp, Gossypium hirsutum
gtctaagcatcaaaaacttgcctacccggatcggtgaactgcacaatctaacgaagctctctatgagagggtgctctagttgtaacttaccttcaacaatcacgaagcttcaacatttgaaggacgttatatgtgatgaggagactgcctaccagtgggagttcctcaaatcttatctcactaatttaaaggtaacagttcatgaacaagatatcaatttaaattggcttcagatatttgtataatctcctcttttcatgtatctcgcagtatccttggggttttcttttttttgtaataattgtagttagggagaaaagagatgtggattgaatccacgctttcatgt

SEQ ID NO: 225459 - DNA, 312 bp, Gossypium hirsutum
gcactcaaagaagagcacattgttttccagcttaatggcatgactgttcaacaggctttggatgaaaacaagttgttaatggtggattatcatgacatttacctaccgtttattgatcggattaatgcttttgatggccggaaatcatatgctactcgtaccatattattcttgacttcgagctggactctcaagccagtctccattgaactaagccttccttacacttcacctaattcccgatccaaacgtgttgacacacctcctgttgatgcatccacaaattggatttggcagcttgctaaggctcac

SEQ ID NO: 225460 - DNA, 388 bp, Gossypium hirsutum
gttgttttcgatttttgtattaagagtcgccctttggtgtttttctaattcaggcagtgaggtgaagaaaaatgtcttgctgtggtggaaactgcggttgcggctccggttgcaagtgcggcggcggcggcggctgcggctgcggcggttgcaagatgtaccctgagatgaactttgctgagcaaaccacaactgagacacttgttcttggcgtggcaccccggaaagtgaactttgatggagctgaaatggaaactggggctgaaaatggctgcaaatttggagataactgcacttgcaacccttgcaattgtaaatgaggggaaaaaaaaaaccgaagcatattatggaagctggtctaaataatatatggaggatttggggtttt

SEQ ID NO: 225461 - DNA, 424 bp, Gossypium hirsutum
gcggagaaactcccgggacgacaccacgcctgcgaagaatggctccctcttactgttttacctgcagagaaagtagatcctcctgtgggcattttggatgacctattatggaaaaccaaagcaattcctcatatctactatttgcctttgtctgatgaacaagttgcagcaaagcaagcagcacatggcagaaacatctagcagtagagatgaggctatagttttatccctggctgctcttctaggaattagtatcggttggtctgtaccttaaataatggcaagaaaactgtcacataattgcatgtttgcaggtctgcaggttttgctttataggaaggaattgttgcagccgtgcagagggaacttgtccaagatggggtattggttttctgccggctacttgggggcttgaagttaagtt

SEQ ID NO: 225462 - DNA, 392 bp, Gossypium hirsutum
cttgtgatcccgtatcttgaagtgaatccggtttggcaagattcaagctcattcatggatatatatgatgtggatcactttattaatgtattaaaggatgatgtttcaatcgtcaaagagttgccagatgaattctcttggagcacaagggaatattacgccactgctattcgggccagcagaattaaaagagcaccttttcatgcatctgcaaactggtatctcgaaaatgtcttgcctgtactacagagttatgggattgctgcaatttctccattctctcaccgtttgtcttttgacaacttgccaagtgagatccagcaactacgttgtaaagtcaactttaaagcactttgttttgtcccgcacattagagcacttggagatgccat

SEQ ID NO: 225463 - DNA, 333 bp, Gossypium hirsutum
ctcacgcgtccgcccacgcgtgcgtttagatccgggggtgactatggcgcagctaaggagatgcttaaacctgccgaacctggtactggattgattgcaggtggtgctgtgcgaatagatcttgaaatggcatgcgtggagaacgctatgggcaaacaactcggaagtaaaaatgcccttaacaatgccagagctactgttgatgctgtgcagaaaatgaaacagttccaggtggttgctctactacaaggaatccccatggaagagttgtggacgtgatggcattggaagcgttctttaaattttcttcttgagattctctgggaatgttga

SEQ ID NO: 225464 - DNA, 378 bp, Gossypium hirsutum
ggcaagttcaagccttccgagagggctattgtctctgattttgtcacctccctgggctccacgcctccatcgcaaagcaaccagccgtcggttgcccaatggtggaaaaccaccgagaaatactaccacctcacctccaagaaatcttccctttccctgtctttgggaaagcagattcttgacgacaagtattcgcttggcaaatcactcaaaaacaaacaaatcgttgagctagcctcaatgggtgaccaaaagaatgctatcaacgttgttttaacagcatctgatgttgctgttgaagggttctgcatgagccgctgtgggactcatggctctgccttgggctccaccgatggtctcgtcaaggccaagaagcac

SEQ ID NO: 225465 - DNA, 307 bp, Gossypium hirsutum
cccacgcgtccgtttgagatcgatcctgatgggtcagtcttggcatttgctgacgtgatgaggaagaaaatctccatgccagcccacttgatgtatgatggcagcgatgaaaaccttttctaccactactcgtctgtcgcacaaagaattggggtttacactgcccgggactatgctgatatagttgaatatctggttgaccgatggaagttgaaggaactcattggactttcacccgagggccgggaagctcatgaatttgtgtgtggacttgctccgtgaattagaaatgcttgaggatagagct

SEQ ID NO: 225466 - DNA, 309 bp, Gossypium hirsutum
cttgtttaaaatataagaaaaaaaatcatacgcaatgagcactgctggtcagggtattcgttgcaaagctgcggtggcatgggaggcggggaagccactatcgatagaagaagtggaagtggcaccaccccaaaagcatgaagtccgtattaagattctcttcactgctttatgtcacactgatgtatactactgggagtgtaagggttacactcctctgtttcctcgtatacttggtcatgaagcctcatggatcgtggagagtgtgggtgagggtgtgacatgattgaaacctgcagatcatgtgct

SEQ ID NO: 225467 - DNA, 384 bp, Gossypium hirsutum
cgagattgtgaaagatataggatctgtttattttggtgtggtcaagcttgttagaggtagatggacaaaagaactctttgctgttaagttcattgagagaggccacaagatcgatgaacatgtgcaaagggaaattatgaatcatagatcattaaaacatcccaatattgttagattcaaagaggttcttattacacctacacatctagccatagtcatggagtatgctgcaagtggagagctctttgagcgcatatgcagtgctggtagaattagtgaagacgagtgaaggtttttctttcagcaattgatataatgagtcagttactggcatttcatggaaatatgtcacagagatctttagcttgaaacactttccttgat

SEQ ID NO: 225468 - DNA, 386 bp, Gossypium hirsutum
atcaatggctcaaaccatgttgctcatgtctagccatccagggagcttgaagagagatcaccctttactccatttccaagctcaagggctcaagcctaaacctgtctctcatctgttcttcaatccattgtctaacggtgtccatacttcatccaaagctttcaccactttagctatctttaaatcaaagaccaaagcagctcccaagagggttgagccacagtcaaagccaaaggttgaagatgggatctttggcacctctggagggattggttttaccaagcaaaatgagctcttttggggacgtgttgccatgcttggttttgctgcatcatcgctaggcgaagcaataacaaggaaagcgatcctagcacagctgaatttgg

SEQ ID NO: 225469 - DNA, 361 bp, Gossypium hirsutum
attcagaaagaaataaaggaagatgaagcaatggccactcttacagtgcccgcgacagttccttcggtgtctgaagattgtgaacagctaagaaaagccttttcaggatggggaactaatgagggcttaatcatagatatattgggtcacagaaatgccgagcaacgaaacttgattcgaaaaacctacgctgaaacctatggagaggatctcctcaaggcactagacaaggagctctcgaatgactttgagaggctggttttgctttgggctcttgatcctgctgaacgtgatgcccttttggctaatgaagccaccaaaaggtggactttaagcaatcaggtccttatggaaatagctt

SEQ ID NO: 225470 - DNA, 391 bp, Gossypium hirsutum
  unsure (1)..(391): unsure at all n locations
gtggtgtaacatgctgcttgaggttccttggacagctgaactccgacctccgaaggttagccgtaaatctgatcccattcccacgtcttcacttctttatggttggattcgcaccgctcacatcccgtggttcccagcattacatttccctcaccgtcccagagctgacacaacaaatgtgggatgccaagaacatgatgtgcgctgccgatcctcgtcacggccgttacttgacagcctcagctatgttccgaggcaaaatgagcaccaaagaagttgatgaacaaatgatcaatgtccaaaacaagaattcatcatacttcgnggagtggattcccaacaatgtgaagtccagtgtctgtgatatctcaccaaagggtttggagatgtc

SEQ ID NO: 225471 - DNA, 388 bp, Gossypium hirsutum
caagcatgagtttacagttgtacttgaggatgttacatctaacagaaacaacgggaatgcaagccctgatgtccatgatgactcaaatgggcaagacaggaagagaattaaacggccttatcagtcaaagacctttaaagtggagatcagctttgctgcaaagattcccatgcaagcgattcaaaatgctctgcgtggacaggaatcagaaaactcacaagaggccctaagggtgttggatatcattttacggcagcatgctgcaaaacagtgagttaaaaatatcagcctgggatgtctactcgttcgccaatcattctttcaaaataatcctgataattttacagacattggaggtggggtcctgggctgaagggcttccattcta

SEQ ID NO: 225472 - DNA, 324 bp, Gossypium hirsutum
  unsure (1)..(324): unsure at all n locations
cccacgcgtccgcccacgcgttcgtccaggatccactttatgctttcttcttatgcccctgtcatttcagctgagaaggcttaccatgagcagctatcggtggctgagataaccaacagtgcttttgaaccctcttcaatgatggccaaatgtgacccacgccatgggaagtacatggcttgctgccttatgtaccgaggagatgttgtgcccaaagatgtgaatgcggttgtggccaccatcaagaccaaacgcacaatccaatntgtggattggtgccctactggattcaagtgcggtatcaactaccagccaccaactgtt

SEQ ID NO: 225473 - DNA, 394 bp, Gossypium hirsutum
gttgaattattcacacgaaacaatgaaaacccacttttttcccctggttttcctcctcattttttccttagcccaaggtctgaaccccaaatgtgacatccaagaccatggctcaaacctgcaagtgttccatgtttacagtccatgctcacccttgaaaccctcaaaaccactctcatgggaagaggatgtgctgcaaacgctagccaaggaccaagccagggtgcagtttttgtccagcctcgtggctaagaaatctgtggtgcctatagcttcaggcaggcagattgtgcaaagtccaacttacattgtgaaggccaatattggaaccccacctcaaaccatgcttatggccatggatacaagcagtgatgctgcttgggtgccttgcact

SEQ ID NO: 225474 - DNA, 349 bp, Gossypium hirsutum
aaaacatcgactgaagctgctccaagtttaaagaagcttcaatttataatactctgccccttaaactagcaaagcctgatctgctgcataatcgtctaaagaaaaattgatggggataaataagttgctgtgttggtttgcagttttcttctttttgttgggtttctctgcttgcagttcgatttctgatggtgtttttgactctttcacttctactggaaggcaccttcttcaagctaagaaagcttgccctgttaactttgagtttctgaactacacaattatcacaagccaatgcaaaggaccaaagtatccacctgaaagttgttgttctgcattcaaggaattt

SEQ ID NO: 225475 - DNA, 267 bp, Gossypium hirsutum
cggacgcgtgggccgaagtaaagaatgaagaaataaactcaaagccaaatggatctcctcttcttggagaaggccctcctgggccttttcgtggcggtggtactagccatcaccatctctaaacttcgtggcaagcggtacaagctccctcctggaccattacccgtgccggtgttcggcaactggctccaagtgggtgatgacttgaaccaccgcaacttgacagatttggccaagaaattcggtgacatatttttatttcgaatg

SEQ ID NO: 225476 - DNA, 344 bp, Gossypium hirsutum
cccacgcgtccgcataaatcctctgctctgcaaaaaaaatcgaaagtcaaaaatgagttcttcaggtttcaaatttaccttgcttgttccgcttatggttgcttgtctcatggcatcatcagccagcaatttccacaatgattttgacataacatggggagacggccgtggtaaaatcgtcaacaatggagaggttctcactctctcccttgataaaacttctggttctggtttccaatccaagaacgagtacctattcggcaagattgatccagctcaagctagtccctggaaactccgctggcacagtcactgctttctatctatcttcgaaaggatcaaca

SEQ ID NO: 225477 - DNA, 251 bp, Gossypium hirsutum
ccgatttgctctgctttcgccaaacaaacgcgagatttgtagatctatttcccttgtctatctgcctccgaatcaatggctttgccgaaccagcaaactgttgattatccgagcttcaagctcgttatcgtcggtgatggaggaactggaaaaactacctttgtgaagaggcatctaactggagaggttgaaaagaaatacgagccaaccactggtgtggagggtcatcccttgggcttttttaactaact

SEQ ID NO: 225478 - DNA, 359 bp, Gossypium hirsutum
gaagaatttagacatgattgaggctatggaccttgagattggtcctcaaaggttgggttttcaagaacttaagaaagcaacaaagggtttcaaagacaaagagctacttggttttggtggatttggcaaagtttacaaaggaactctgccaaccacaaacacttaaggtgctgtcaaacgaatcttttatgaatcaaagctagggataagagaattcctgtttgagatttatagtatcggtcgtcttcgtcaaagaaatcttgttcagtttctaggatggtgtcaatgcaaaggttatctcttattagtctattgaattatgccttgcgttagtttggataatgaccctgtttgatgag

SEQ ID NO: 225479 - DNA, 297 bp, Gossypium hirsutum
accctccatcaagaaaacctcttcttcgacaccccagccaataccctttcctctcaactttccgttcttcgcctccgcttcctcaacaaggacgcccgctgcatcgtttccctcaaatccaaacctactctggtagatggtgtcagccgcgtggcggaagatgaggaggaactagatccgtgttctgcacgcgcttgcgtggaggacccggcgaggttggggaagattgagtcgaggattttgaagagggttaaagaggaatttggggttggggaagaagtgggatttgtttgttta

SEQ ID NO: 225480 - DNA, 356 bp, Gossypium hirsutum
tttttaaataccggcaaaaatgtctttggcccatatggggaaaatgttgtcttttttgcaaatgattggcacagggcttttcttccatgctatttaaaaagcatgtaccagtcaaggggtatctacatgaatgcaaaggttgtattttgcatccacaacatatcctatcagggaagatttgcctttgcagatttcaaacgtctcaatttgcctgaacggttcaagagttcattcgatttcattgatgggtataacaagcccgtcaagggaaggaaaattaattggatgaaggctggaatattggaatcacataaagtctggactggtagcccatactatgcccaggagcttgtatc

SEQ ID NO: 225481 - DNA, 344 bp, Gossypium hirsutum
cccacgcgtccggtgagtcttctagtcctaatgtgaggggtccacccgctgtcgtattcaacttttctcagctggacgaaaagctgaaggctgggtacaaggccacaacagatggaaaatttaccgaggctcttcggctttttctcaacattcttcatacaattccattgattgttgtggagtcaaggagggaagttgatgaagtcaaagagttaattatcatcgccaaggagtatgttcttggtctgcagatggagcttaagcgtagagaattgaaagacaatccggtacgccagcatgagctcgctgccttcttcacccattgcaaccttcaatgccttatc

SEQ ID NO: 225482 - DNA, 348 bp, Gossypium hirsutum
cccacgcgtccgcaccaattcttttggtggtttaagatatccttatgcctccggtgtaatggggttgaaggtgaatcagctcagaggtgtaaagccagattggagagatatcaacgaacagctgaacgtgcagctaaagctcttgaagaaaagaacatgcgcgatcttcttgctcaaagagagcaagctgaaagaaatagattagcagaatctcttgatgccgatgtcaagaggtggtcgagtgggaaagaagggaaccttcgtgcattgctttcaactttgcaatacatccttggcccagagagtggttggcagccaattccgttaaccgaaagtataacttcagct

SEQ ID NO: 225483 - DNA, 238 bp, Gossypium hirsutum
gtttctgacttgaacagcgcaaagttggagactgatgttgatgttgttgtgtcacctccctttgtttatctcgatcaagtgacagcttcattaaccggtcgaattgaggtatctggtcagaactcttggattgggaaaggcggggcttttaccggagaaataagtgtggagcaattgaaagatattggctgcaagtgggtcatactcggtcttttttgaacgcatacattattattgt

SEQ ID NO: 225484 - DNA, 227 bp, Gossypium hirsutum
cccacgcgtccggaaaaccctaaattctgatggaattgccgggctttaccgtggttcaacatttcatgtgttggaatcattgattaccgtggtctatattttggaatgtacgactttctgaagccggtgcttttgactggaatcatgcaagatagtttcttcgctatctatgctcttggttggattatcacaaatggtgctggccttgcattttacccaattgacac

SEQ ID NO: 225485 - DNA, 382 bp, Gossypium hirsutum
gagaaaggctccctcttcctccaccacctgcagagaaagtagatcctcctattgtcactctggatgatctattttggaaaaccaaagcaattcctcgtatctactatttgcctttgtctgatgaacaagttgcagcaaagcaagcagcacatggcagaaacatctagcagtagagatgaggctatagttttatccctggctgctcttctggttttcgtatcggttggtctgtaccttagattatggtaagaaaactgtcacataattgcatgtttgcaggtctgcaggttttgctttataggaaggaatttgtgcagcccgtgcagagggaacttgttcagtatgggtattgggttttcttgccgctacttgtgggcttgag

SEQ ID NO: 225486 - DNA, 375 bp, Gossypium hirsutum
cccacgcgtccgcactcttccgagtcgcttcccgagtcaactcaaaactccctgctggttcacccaaaaagattgcatttttattcctcactatttcgcctctgcctttcgctccgctttgggagctttattttaaccaaacccccaaagatctcttcaatgtttatgtccatgccgacccgagttacccttacgacccgccgttctcgggtgtgttcgctcaccgagtcatcccttcaaaacccgctctccgttacaccccgactctcgcttccgctgcccggaggttattggctcacgcgctgcttcatgaatcgtccaattacatgtttgtcctcttgtccgcctcttgcattcccattcacttttttgcct

SEQ ID NO: 225487 - DNA, 270 bp, Gossypium hirsutum
cccacgcgtccgcccacgcgttcgttccctccactacaaaggctcctctttccagggggtgatccctaactttatgtgccaaggaggtgactttacggccggaaacggtacctgaggtgaatccatctacggatccaagttcgctgactagaactttattaagaagcacactggtcccggtattctttcaatggctaacgctggtcccggaactaacggatctcacgtgtttatttgcacggcttagactgagttggctcgactgaaagc

SEQ ID NO: 225488 - DNA, 186 bp, Gossypium hirsutum
  unsure (1)..(186): unsure at all n locations
gaactgtccctgttggtcgtgttgaaactggtgtcctcaaacccggtatncgtttacttttggtcctactggtctgaccactgaagttaagtctgttgagatgcaccatgaatccctcccggaagctttccctggtgacaatgttgggttcaacgttaagaacgttgctgtttaggatcttaaacg

SEQ ID NO: 225489 - DNA, 387 bp, Gossypium hirsutum
gtgctcggcgccgcggctccattggaggtcgccggagagccttcgtgatctggcgaggacctctgctccggttgtggagaggttccaccggaggatcgctactactgcttctgagcatcctttcaagggagtgatgacaagccttcccaagcctgggggtggagaattcggaaaattctatagtttgccggctttgaatgatccacgaattgaccgtcttccatactcgataaggatcctttttgaatctgctatccgtaactgtgacaactttcaagtcacaaaggatgatgttgagaagatcattgattgggagaatacatcaccgaagcaagttgaaatccccttcaagcctgctcgtgttctcttacaggattttactggagt

SEQ ID NO: 225490 - DNA, 335 bp, Gossypium hirsutum
cagataatgtcactcactaaaaaatacgtcagccactagacgataaagatctggcgagggacctaaacagcgggggagactagatgtcaaaagcggaaaaatagaacatcattgtgctcgtgcctaaacatatattgataccatggtatcaaagtttcaggcctgccaacaatatattcacactctggaagcctcacttcaagaagaaatgtcttgacatgcccctttctatggtgctggacctggagctctatccatgaaagagctggaaacactgtctaggattcacgggggagggcttgagcatattcgatcccttcaacacattaaaggca

SEQ ID NO: 225491 - DNA, 316 bp, Gossypium hirsutum
gagaaacgcagcagcttcatgacaagcttgctataactgagcgaactgcaaaatgtgaagcatgctaaaggaacatccaaatcatttgatggaggcacaaggtcattagagagggctaaattgcttttaaatggaacaggctcaaatacttcattcaaccagccttctgacagaaccaatgagagtgaggcacaaaatgatgaaaagcccactgattttcagcctgtggacacagaggataatgttccaggtgtattgtattgattgctgcagaaagaggtcatagctttgagaaaagctggtcacgagaaagatc

SEQ ID NO: 225492 - DNA, 269 bp, Gossypium hirsutum
cccacgcgtccgaaaaaaaatcatacgcaatgagcactgctggtcaggttattcggggcaaagctgcggtggcatgggaggcggtgaagccactatcgatagaagaagtggaagtggcaccaccccaaaagcatgaagtccgtattaagattctcttcactgctttatgtcacactgatgtatactactgggagtgtaagggttacactcctctgtttcctcgtattacttggacatgaagcctcagggatcgtggagagtgtgggtga

SEQ ID NO: 225493 - DNA, 317 bp, Gossypium hirsutum
cttggtgccaaggcttggatggattgtcatcaagatctgccgagtactacaagcgaggtgctcgatttgccaagtggagaacggtagttagcattccttgtggtccttctgctctggctgttaaggaagctgcatggggacttgcacgttatgctgccatttctcaggacaatggtcttgtgccaatagtggaacccgagattcttctggatggtgatcaccctattgggaggactcttgaagtagctgagaaagtttgggcagaagtcttctactacttggctgagaacaatgttatatttgagggcatcttactc

SEQ ID NO: 225494 - DNA, 337 bp, Gossypium hirsutum
cggacgcgtgggcggcgctgcacagcttccccaagaacccatcattctcagatgtttgctcagtgtttaatagtgaaacgatgtccactgttggagaagctgcttgctcttacgctgctcttattctttatgatgatggcatccccatcaccgctgagaagatttctacactaattaaagctgcaaatgtctctgttgaatcctactggccaagcttgtttgctaagctttttgagaagtgcaacattgaggatctcataaccaatgttggagctgctggtggtggtgccccagtagctgcagctgcacctgttgctgctggcggaggagctggtgc

SEQ ID NO: 225495 - DNA, 398 bp, Gossypium hirsutum
cttggaatgaagcattcgatgccttaaaaacaaaggaccatgacttccacgtgataaatggtagctctgttaaggtgccttttatgaccagcaaaaagaaacaaactgttagtgcctacgatggtttcaaagttttagggcttccatataaacaaggcaacgataagcgtcgtttctccatgtatttctttcttccagatgcaaaagatggtctgccagctttggtagagaaagtgagttctgagtctggtttcttagaacgccacctttcatattaaccagtttgaagtggggtgaattgaggatcccgagaattaaaattcttattttggactttaaagctttttgagggttctgataaggaatatggactttgtggttaccctttttttttggtt

SEQ ID NO: 225496 - DNA, 390 bp, Gossypium hirsutum
cccacgcgtccgggctcttccttcacctgtcaccacagagtccaaccatggacattggggttgacccaccatctctttgtaagcagaatttgccaatctaaccttgttgtttgagtcggaaatcactgccggtaaggcatcggactcaaccaattcttcaacctcctctcctttcttcaggacttgcattcgtggggttaggattggattctctttgatgcacccaacatagataatggagcccactggtcgaatcggttgaggtgctataatgttgctcgctggaggaccttggagctgcttcaatagatctttctcttcaggaatttcaacatttgtgttcaaatctattaaactttcttcttcacaaggttccatgcaattcaattc

SEQ ID NO: 225497 - DNA, 394 bp, Gossypium hirsutum
cccacgcgtccgcccacgcgtccgaattatttcatctttagctcgttaaagttgggtgtctttttcttgtcttttaaatttcttcgtgaaaatatgataaaaaacgaacaatacgaacgtgttcttagttacttcgatatagacggcgatgggaaggtttcatcatcggagttgagccatagattgcgcttaatgggcggggaactgaagttaaacgaagcccaagtggcaatcgaagcgttggactcaaacggcgacgggttgttagatttggaggatttcattgggttattggaagaaggaggtgaagcagagaagactaaggattttgaagaagcttttcagatgtacgatactggtggaaacgggttcattacgcctaaagacttgaagg

SEQ ID NO: 225498 - DNA, 380 bp, Gossypium hirsutum
agttgattcctgaattcctcagctttgttaagggtattgtcgactcagaggacgttcctttgaacatctcaagagaaatgttgcagcaaaacaagatcttgaaggttatccgcaagaacttggtaaagaagtgcattgagctcttctttgaaatagcagagaacaaggaagattacaacaagttttatgaggcattctcaaagaacctcaagcttggtatccatgaggactctcagaacaggactaaaattgccgaattgctccgctaccactccaccaagagtggtgatgagatgaccagcttgaaggactatgtgaccagaatgaaggagggtcagaatgatatctactacatcactggtgagaagtaaaaggctgtt

SEQ ID NO: 225499 - DNA, 380 bp, Gossypium hirsutum
gctgctttcatgccggacactgcgcaccacccttcatttgttttggaacagtggtggcaaaggacaccatcggaagcttggttgtacactgaatttgctccatacggaagaccagaagattcttcgatgtcgatgttttttgggaccaagttcttaacatccaaactttatcagctatcccctgttgaggacctggaattggcaaaggctctgatcaggccaggatcaatgtttttaagcgatttgtccaaggcagacaagttctctaaggaaaagttcggaagtgttccccgagtctatgttgtatgcaaagaagacaaagggataccagaggaattccaacgttggatgatccagaattctgaaattaacgaggtgat

SEQ ID NO: 225500 - DNA, 365 bp, Gossypium hirsutum
  unsure (1)..(365): unsure at all n locations
cccacgcgtccgcccacgcgtccgagagttttggagccatgttcgtcgcatagnggcgttaccgaacctagaattgtcgtgcaaacaacaagcgaagttgatctattggatgatggctataggtggcgcaagtatggacagaaagttgtcaaaggcaatccttatccaagaagctactacaaatgtacaaccccgggatgcaatgtccgtaaacacgtcgagagggcttcgactgatcccaaggctgttataacgacatacgagggaaaacataatcatgatgtaccggctgccagaactagcagccacaacaccgtcagtagtaacgcaacacaaggtagaacacagaatatagtaaccgttac

SEQ ID NO: 225501 - DNA, 318 bp, Gossypium hirsutum
  unsure (1)..(318): unsure at all n locations
attgaaattcttccctaaaggtaacaaagctggcgaagactatgacggtggcgtngatttagatgactttggttctttcatcaacgagaaatgtgggaccagtcgtgatgcaaaagggcagttaacttcaacggctggtattttgtcaagtttggatgcattagtgaaggagtttgtggctgcttctgccgacgagaagaaagtagtcttctccaagattgaagaggaagttgagaagctcatgggttctactgcgaggcatggaaagatatacttgtaagctgctataagctgtttagagaaaggtgctgactaccc

SEQ ID NO: 225502 - DNA, 349 bp, Gossypium hirsutum
cccacgcgtccgataaaataaacatataaacaagtaccaccaaacctcctttttggcgccaagttcatgaacttaaatcctttgtttctcctatataaatccctctttccctcaaccagtcttcctcagctactattgatcagctcagacattggaaaacaaaaacactattatatatcaccatgccttcttcaccttcttttactcttgtgtctagatgcacggtttccccagaccaaatatctgacatcaaaaccttaaagctttcggtttctgacatccctatgctttcatgtcagtacattcaaaaaggggttttgctcacttctcctccttatttcgtcgacga

SEQ ID NO: 225503 - DNA, 382 bp, Gossypium hirsutum
cggacgcgtgggtggaaagatagctagtcttgcaaaatctgttcgtgtacttgctgggatggaagagcctattggtcaagtgttaaagagaacagagcttgcagatggactcatcttggaaaaaacgtcttgccctctaggtgtcctgctgattgtatttgagtctcgacctgatgccctagttcagatagcttcactggccattcgaagtgcgaatggccttctgctgaaaggtggcaaagaagctaagcggtcaaatgcaatcttgcacaaggtcattactttggccattccaaaatgcattggaaacacactaattggactttgggctttaagagaggatattcctgaattacttaagcttgatgatgtgatagatctt

SEQ ID NO: 225504 - DNA, 369 bp, Gossypium hirsutum
cggacgcgtgggcggaaaggccatgtggttctactcctttcacccaactccagtgctttcccattgtttgcctctctgttatgtccctgggcgctatcataaccaccaccaaccctctcaacacggctaatgaaatcgggaaacaagtcgccgattctaagccagttctcgccttcactattcctcaactcctccctaaattagcaggctccaccatcccgatcgtgcttctagaagatcacttgagcagtcaggctggggaagcgaagattgtaacaactttacatcagatgatgaagagggaaccgagtgggagtcgagtgagggaccgagtcaaccaggatgacacggcgactctgctttattcct

SEQ ID NO: 225505 - DNA, 385 bp, Gossypium hirsutum
gtccattagtttctaccctcaagtcatcttaaattttcgaagaaaaagcgttgttgggttgaactttgatttcgtgctgctgaatttgacaaaacactcctcttatatgatctacaacgtttgcctttacttcagccctgttattcagaggcaatactttgagaaatatggctctggagagatgatcccagtagctgctaatgatgtcgcgttctcaatacatgctgttttgttgacggctattactttgtttcaaattgtgatttttgatcgtgggacgcaaaaggtttctaagatttctgtgggaattgtcattgctgtgtggttaatcgccgccatttgtttcttcatagcattgcctagccaatcatggctttggttaatc

SEQ ID NO: 225506 - DNA, 369 bp, Gossypium hirsutum
cggcactctctgcaactgcaatcatgacctcaattgtgcaaggcttttccaaggctttggccatgactgtgctatcggagatcggcgacaagacgttcttcgctgccgcgatcttggcaatgcgccatcccaggaaacttgtcttgttaggatgcctggcagctttaattgtgatgactattctttctgctgttgttggctgggctgctccaaatcttatctctaggaaatggacacatcacattacgactctgcttttctttggatttggcctgtggtctttatgggatgcatttatggagaatggggaggcttgagaatgggctgaggttgagcaaaactggatgctgactggaaagcaaacccagg

SEQ ID NO: 225507 - DNA, 348 bp, Gossypium hirsutum
cggacgcgtggggcagtccctaggaacaattaaaaagaaccgaaaaaaaaacacgggttaagacagaagcatgggcagccagctcgtaggaacaaagagagcttgtgtcgcgggtggcagcggattcgttgcctcattgctggtcaagttgttgctcgagaagggttacgccgttaacactacagtcagggaccctgacaaccagaagaagatctctcaccttgtaacactacatgagttgggagacttgaagatcttttaggcggatttaacttatgtagggagctttgatgcccctattgctggttgtgaccttgacttccatgtttcgacacccgttaacttttg

SEQ ID NO: 225508 - DNA, 268 bp, Gossypium hirsutum
tcgaaaatgggaaagggatattatttcccaaagggggttgggagaaagatgaaggggagggaagaagctttcattagagagacggttgtggaagccggtgtagttggcgtcattgaatgtaaattaggtaaatggtgttataagagcaaaaggcaatagttataccatgaaggccacatgtttggtctgtttgtgaagcaagagttagatggatggcctgagaaaaacattcgaaaacgggaatgggtgacagttgttaaagctagag

SEQ ID NO: 225509 - DNA, 188 bp, Gossypium hirsutum
gcttgaaggaaatgaggaaaactaataaggttgatgtggaggatctaacagtggagaatggtttgtttaagtcatttgatgagattgtgaggaggcaattggatcccatttggcttactttggggaagaagacgaaacagctcgtttcggatttgaaaactttgttgaagtttgtggattatcttgtt

SEQ ID NO: 225510 - DNA, 389 bp, Gossypium hirsutum
cccacgcgtccgcccacgcgtccggtggaacacatagaccttcaaattttaacatgtctggtaaggaagatcatataattggagacaactctggggatggtgaactgaaaagggtcaaaagtgatgtagagttgcatgcctcaagtcaagaaggaccaaagctgttcccaagatcccagagccttagatctcttaaggaacagcttatttgtgacaatcttcaacccatatctaagaatacaagcccaattgctcatgatttagaagctcaaagggtaaagctcacatatggagatgagaaaatccggctccgcatgcagagtaaatggcggtttaaagatttattgcatgaaatcgcaagacggttcaatatagatgatataagcaga

SEQ ID NO: 225511 - DNA, 119 bp, Gossypium hirsutum
cccacgcgtccgcttcactgctttatgtcacactgatgtatactactgggagtgtgagggttacactcctctgttttctcgtatacttggacatgaagccttaaggatcgtggagagtg

SEQ ID NO: 225512 - DNA, 347 bp, Gossypium hirsutum
gaaagagaaggccggaatctgaaagacaagacacagagaaaaagagagagagagagagagatgtcgggaggaatagcgcgtggtcgactcgccgaggaacgtaaggcatggaggaagaaccatccccatggttttgttgcgaaaccagagacgttgcctgatggaacggtcaatttgatggtgtggcattgcacgatccctggtaaagcaggaactgattgggagggtggctacttcccgctcacgctccatttcagtgaagattatcccatcaagcctccaaagtgtaaattttcccagggcttttttcacccaaatgtttatccatctggtactgtttgcctttt

SEQ ID NO: 225513 - DNA, 382 bp, Gossypium hirsutum
gtttttgagctctctttcagttttccggaagccatgtcaaggaggaaggttagggagcccaaggaggagaatactaaccttggacctgctgttcgagagggtgagcatgtttttggggtggctcacatttttgcttcattcaatgatacatttattcacgtggctgatttgtctggaagggaaacaatggttcgaatcactggcggtatgaaggtgaaagctgatagggatgagtcttccccttatgcagccatgcttgcagcacaagatgtttctcaacgctgcaaggagttgggtattactgcccttcatataaagcttcgagctactggaggaaacatgacgaagacccctggtcctggtgctcagtctgcacttagag

SEQ ID NO: 225514 - DNA, 318 bp, Gossypium hirsutum
agcccattggatagtgatcagagtttgccttttgtgaagaaatcacctatatggcgaacaattgaatctttggatgtcttccaaattgtgccccaaaaaccacattttcaacctttggctgaaagcagagaggagtttcgtgagggatcggcaattgggatcatggtgacctttgccagtttgtttgataagatatccatgttgcattttgatgaccctcgaaacacatttgacagcatttcagaaggtcttgatgacttggaaaagcacggatttgatgttagtctgcttaggcgccgtgtgaattaactacttttc

SEQ ID NO: 225515 - DNA, 252 bp, Gossypium hirsutum
gcaagtgtcacttgtcaaagcgatggttaaacagggtgaaaaaagttatcacagggcgagccatcaaatctaagaacgccgacattccggcagactagtattcatggaggaagttcggtcaaaaaccgatcaagggttcaccatacccacggggatattacaagcgtagaacggacagatgggtgtccgctaggaaacacggggagcgagcgaccggtgatacgtatatgtttattggttacatacttaggg

SEQ ID NO: 225516 - DNA, 338 bp, Gossypium hirsutum
aaggaacctagatttgcattcattacaaagactgaaattgatcacttagattgtggttatagatggagaaaatgtggccaaaaagcggtcaaaaacagcccttatccaagaagctattatcgttgcactagtagcggatgtggtgtgaagaaacgagtctagagatcgttcgatgatacgacgatcattatcaccacttacgaaggcaaacacacgcattcgtgttcggtacagccttgaggaagcggattcggtaatatctggtttgaccccaacattatatggtcctatcaacagttcctaggaatcagtatccttgtgtgaaagttgtacaaacc

SEQ ID NO: 225517 - DNA, 356 bp, Gossypium hirsutum
ccgtcgagggctaccgtattgcctgtggaccactcggtgaagtgactgaccgggggtacccaggtggcagcttggacccattgggtcttgctgatgacccagaggcattcgctgagctcaaggtgaaagagatcaagaacggttggttggctatgttctcaatgttcgggttcttcgatcaggccatcgtgaccggaaagggaccattggagaacttggctgaccaccttgctgacccagtcaacaacaatgcttgggcctatgccaccaactttgtcccgggaaagtgaacttatatagtgatgaagggattttggcttggtttaatgtattatttggtgggtgggaaattaaaa

SEQ ID NO: 225518 - DNA, 307 bp, Gossypium hirsutum
gcctacaaaaaaccacccagtaccaacagccaacaacacaaagaaggcaaacttgcagcttttttgaagaggatcagctctagaaagttaagtctaaaaaggaagaagagtttaaagagttcagagaatgaaggcagagttagagttgccacctggtttcagattccatcctacagatgacgaactggtgaatcattatttgtgtaggaaatgtgcttctcagcctatttctgcgcccatcattgctgagattgatctttacaagtttgatccatggcagcttccagatatggcgttgtatggtgaa

SEQ ID NO: 225519 - DNA, 367 bp, Gossypium hirsutum
gtgttatgcttgctgatgggaaaaccagattttccatcaacggcaagcctatggaccactttgttggaacctcgacctttagccaatatactgtcgtccatgttggccaggttgccaagatcagtccaaccgcccctcttgataaagtctgtcccattagctgtgggatatgtacaggttttggggccactgtgaatgttgctaaacccaaaaagggtcaaactgttgcagtttttggactgggtgccgttggtcttgccgccgctgaaggtgcaagggtttgtggggcttctcggatcatcgctgttgatgtgaaccccagaagatttgaagaagctaataggtttgggatttcagaattttgtga

SEQ ID NO: 225520 - DNA, 267 bp, Gossypium hirsutum
aaaggtgggaagcttggatcacatattcagcgtggagccaatgaaggttaaaaggcgcttccacggattcagaagttgctctttgcgcttagagtcttggaaggttgctgtctacttcaccctgaaagtactcggttggcccatcaacataaagccatcccggatttgatgaatgttatgtcaactcgaggagttcttgaacaaggagcatgtctggatgcttcaatcttgattctgctggattcgttagccattcaatatgcattt

SEQ ID NO: 225521 - DNA, 269 bp, Gossypium hirsutum
cccacgcgtccgcaaatatcaaatccctcgaaaaatcctacccatccaatcacggccggaaaccatggccactccttccccacgcgaagaaaatgtctacatggccaaactcgccgagcaagccgagcgctacgaggagatggtcaagttcatggagaacgtcgtctccgccgtccccgctcccgacgaactctccgtcgaggaacgcaaccttctttctgtcgcctacaagaacgtcatcggcgcccgccgtgctttctggaggatcg

SEQ ID NO: 225522 - DNA, 369 bp, Gossypium hirsutum
aatcccggtcgacccacccttccgaaaaatcccaattccattctcccttttcctcctaatcatgatgcctctcctgggggctcccaccttcattttctactccccacttaaacaccactaccatgtaacccaacacgtcattgagagcattatgaatgcgtccatacctaggaggaacctcagattcctatcctgtggaaccaacaaccccattgatgactgctggctgtgcgcacctcattgggaaacaaaccatcagaggctagctgattgtgccattgctttcgcaaaacatgccactggcggcaaacatggaaaaatatacttagtgacagaccccagtgaccgtgaccctatcaaccccaaacc

SEQ ID NO: 225523 - DNA, 354 bp, Gossypium hirsutum
tgtttgcaaacttctctattgttggaatgaatgtgagtttgatggggaattctgggggcttctaccagatagcaaagctgagcatgattccagtatcttgctttctggaagttgtttttgacaaggttcgctactcaagggatacaaaacttagcattctactatttctccttggagttgctgtctgcactgttactgatgtgagtgtcaacgtcaagggttttttagctgctgtaattgcagtctggagcacattcctgcaacaatattatgtgcattttcttcaacgcatgcattctttattgatcttttgacttattgggacatactggttctgttcatgttcaagccttg

SEQ ID NO: 225524 - DNA, 375 bp, Gossypium hirsutum
cccacgcgtccggcagcagatgaaaatttattaagaaatatacgtgatagtgctttggagcagacaagttgatgtccagacactagagggtcaaatggaaacagaagttatggtagcgggcagtatagacggctccttcagtttaacacggaggggtatcttctaaggcttcctcttctagaatgttgggtggtctcaaaactgcatatgcttattgatgctgtcactgagagttataacaaatatttctttggggacgttgggagagaaatatatgatttcttttggggtgattttgctgactggtatattgaagccagtaaagctaccatttaccactctggagatgattcagttgctttggtagctcagaca

SEQ ID NO: 225525 - DNA, 289 bp, Gossypium hirsutum
  unsure (1)..(289): unsure at all n locations
tggaagcatcatgagcttaaggtgaatgactcaaagacccttctctttggtgaagagcctgtgacagttttcggtatcagaaaccctcangaaatcccatgggctgaggctggagctgagtatgttgttgagtctactggtgtttttactgacaaggacaaggttgctgttcacttgaagtgtgtcgcgaagaatggtattatttttgcttccagtaaggatgctcccatgtttgttgttggtgtcaatgagaaggaatttatgtctgacctaaacatttgttccaaat

SEQ ID NO: 225526 - DNA, 373 bp, Gossypium hirsutum
gaattatcgaaggaaagatctgaaagagaatggcaacttttgcagggactaccgagaaatgcagggcttgtgaaaaaactgtttacttggttgaccagcttactgctgacaacaaagtttatcataaagcttgcttcaggtgccaccattgcaagggtacccttaagctaagtaattatagctcctttgagggtgtcttgtattgcaagcctcactttgatcaactatttaagatgactggcagcttggataaaagttttgaaggaactcctaaaaccgttagggtagaccgatcagctgaccaggtcaccaacagcaaattttcgggcttgtttgccggaactcaagagaaatgtgttgcttgcaagaaaac

SEQ ID NO: 225527 - DNA, 348 bp, Gossypium hirsutum
gcaactagaagatggccgtaccctggctgattacaacatccaaagggagtccacgctccatttggtgctccgccttcgtggaggaatgcaaatctttgttaagaccttgaccggaaagacaattactttggaggttgagagttcagataccattgacaatgtcaaggctaagatccaggacatggagggtattccgtcagaccagcataggttgatctttgctggtaagcaattagaagatggccgcaccctgtctgactacaacatccaaaaggaattcaccctccatttggtgcttcttcttcgcggtggtatgcaaatatttgtgaagactcttaccggaaagac

SEQ ID NO: 225528 - DNA, 400 bp, Gossypium hirsutum
ccgaaattcccgggtggcccaagccttccggccctttccgatgaattgttttttttgccgtgggttcggaagttgctcgacgtggtcctttgttgtcaagaggaatttcgggtcatgctttttaacaacatagctctagtgaagaagccccccatggaccgtttgatcgccgatttttactagcgtactgtcaaggcgcttgatgtttgcaatgcgattcgcgacgggattgaacagatcaggcaatggcagaagcttctagaaatcgttctttgcgctttgggtgatagtaatgttggttatcagagaagtctaggagaagggcaattccgtcgcgcgaggaaggcgttgatagatttagcaattgggatgcttgatgagaaagattcatgtcaagcct

SEQ ID NO: 225529 - DNA, 362 bp, Gossypium hirsutum
cccacgcgtccggatggaaactcgaaaaagtatatctttccaccgaatcttgagggtgctggtggaatcacacctttacatttggctgcatgtacatctggttcggatgatatggtagatgtgctgacgaatgatcctcaggagattgggttaacctgctggagttcccttctggatgcaaatgggcagtctccatatgcctatgctatgatgagaaacaaccattcttacaacaaattggtggctggtaaatatgctgacagaaggaatggtcaattttctttgactattggtgttgaggatcagcactcatgagtgtctgcagtgcagttaaacaagataagtttgcagttcaaacaaga

SEQ ID NO: 225530 - DNA, 337 bp, Gossypium hirsutum
accccctcagactctatctggtttttagggcttttctaacttttctgattattgggtgatagtccagagttcaatcatctaaaagaagccctaaaatctttgaatcaggtctgagcttgtggtttgttaggcctctttgatcaaactaagtttcatgtctgatcttgacgttcaaattcctactgccttcgatccctttgctgatgcaaatgctgaggactcaggtgcgggtgcaaaggagtatgtgcatattcgtattcagcagaggaatggtcgcaaaagcctgacaactgttcaggggttgaagaaagaattcagctattacaagattcttaaa

SEQ ID NO: 225531 - DNA, 344 bp, Gossypium hirsutum
  unsure (1)..(344): unsure at all n locations
gaaagctgccgggatggacngncataagataacatacagtcttatgaagcatgggctaggagatctcttttatcgtttagtgtcccaaaaatttgaagacccagcggaaggagaagaagccctggtggcaaaattcaaaatgcttaacgaggatcttacagctggtttccgtgcattggaggatgaaactaggtgaacaaaagtttaaagattagactttctccctacctatcctagtccaggtttctctctcttgtgtcttgctagatgcatgtcgtgccggcgttgtacttttttgttggcatgatctctatagtggtatatgcttctaatttggtatttat

SEQ ID NO: 225532 - DNA, 383 bp, Gossypium hirsutum
ttgatattaacgaccggtttccccgtgaccttctgtctgatatattctcaaaaggaagaatgtcccagaacctctatgatatcagtccattctctggtgatggagctggactgagcttaaacatggagaatcatgaacctaagcattggtcatactttcgtaatttggctcaagatgagtttgttagaaaggatgtttccctcatggatcaggatcatctgggtttctcatctccacttacaaatattgaagttggggctccaattgattatagctatccacctttgaaatctgctggtggagttgccttagctcaaattaagccagacatcatttttgatgaggacattaggcaagagtcagtttctgttgctgctactaac

SEQ ID NO: 225533 - DNA, 304 bp, Gossypium hirsutum
acccttccccggacccttggcctccccgcttcgcctttgctttattggttcaagaatctggtgtggtctgatcagatctgataaaaatatcaaaacatgtttgggagagcactctaagaaaagcgataataccaaatactatgagattttgggagtatcgaaaaacgcttctcaagatgatctaaagaaagcttatagaaaagccgctattaagaatcatcccgattaaggcggcgatcctgaaaagtttaaagagttggctcaagcttatgaggtgctgagagaccctttgaagcgtgagatt

SEQ ID NO: 225534 - DNA, 352 bp, Gossypium hirsutum
cttgtttaaaatataagaaaaaaaatcatacgcaatgagcaactgctggtcaggtgattcgttgcaaagctgcggtggcatgggaggcggggaagccactatcgatagaagaagtggaagtggcaccaccccaaaagcatgaagtccgtattaagattctcttcactgctttatgtcacactgatgtatactactgggagtgtaagggttacactcctctgtttcctcgtatacttggtcatgaagcctcagggatcgtggagagtgtgggtgagggtgttaatgatttgaaacctggagatcatgtgctccctatctttcaccggagaatgcaaagaatgtcttcactgtc

SEQ ID NO: 225535 - DNA, 346 bp, Gossypium hirsutum
attcttttcttctttttggttcttctagaaacaaaactattctctgtttcgatgcgtgaagaacgccccaaatcccagaaaatcaaattaacaaatttatcgaatttgcctttaaattatcttggttcaactttgttatcgttgaaattaaagagaactttttttggtaaaaagaggaaaatggctcaagctttcgaagaatggtataatcacattcctattattacccgctcttatttttcagatgtcttatttaccactatcggttgctttctcgaaataatattaccttatcatatgttctttaacccttatcttttgtttagcatttttatatttttgcgcc

SEQ ID NO: 225536 - DNA, 309 bp, Gossypium hirsutum
atcagaggttaaagagacggcgccaatcagctgtccgccttgactgaccgtccggcatcgtcgtggccctcgattttgcccttttgtaaaccttttttttcaccaattcccgaaatggcagtgaaaccctccaaggccgataagaaaatcgcgtacgacgcgaaactgtgccagctcttagatgagtacacgcagatcttgatcgccgcagccgacaatgttggctcgaagcagctccagaacattctgaatggcctccgaggtgactcagatgttttaatgggttaagaacactatgattaaaaggtc

SEQ ID NO: 225537 - DNA, 353 bp, Gossypium hirsutum
  unsure (1)..(353): unsure at all n locations
gggaggccggggcgacccactcttcctcccacacatccttatctaattgatcctatcancttgcctaaaactacgctaacctgtatgttaccccaccctcatctaaatcaaccattgaagcgctgccttcggtgaatataacgaagaataacttgaattctgagttcaaccagngtgcattttgcatggactatttcgaggaaggaactgaatccaattatattccctgtaagcatctttatcataaggattgcttattgccgcgtctggaatttcataattcttgccccgttgtgtcttcactagctgcctacttgtttatccttattattagaggagtgttcgttttgcac

SEQ ID NO: 225538 - DNA, 384 bp, Gossypium hirsutum
  unsure (1)..(384): unsure at all n locations
ccggnccgggaggcccggggcgaccctatcttcctcccactcttccttttttttacaaataccaaatggtcaaacccacaggcgatctttggcttcaaatcaggatccacaacaacaacatctgctgaacaaccccaatttacccacatccctgaaaaaccatgcactcaagcaccatggaagccatttgttccaaccccaagtgccaagacttccccaaaaagtgacaccatccttggcaaaccatattaagacataaggatgcactacacaattggtaaagaactatgaaaaggtcagtttggcgtaacttatctttgcattgataatacaactgttgaaacaatatgcttgcaagactatatcaaagaggtagtttatcac

SEQ ID NO: 225539 - DNA, 364 bp, Gossypium hirsutum
atcacccctctgtcttctctaccttttcaagaactcttctcacgggggcccaagcagatcataatatcaacagcccttgtaatcaaagagccattccccgaaagacccaaatctcggtcaaaatggagttcatgaagatacccatgggccatcctcccttttgaaaggcaaaaagctttctgaaaaagccgtgttgccgtcaagaggctctcctctcgcacgctggctacgatctgttaagtgcaacggatacaaaggtgccagccagaggaaaagcgttgatttccactgatctaagcatagctatccctgatggaacatatgggcgcgttgcgccaaggtctggtttggcttggaagcattt

SEQ ID NO: 225540 - DNA, 221 bp, Gossypium hirsutum
tcttccacgcgtccgctcaatgtccatctcccatataaacctctagtgggggctatggagattttcaaggttgcccagaatgctctagctcaagttgtatggaatcctgttaatgatgggcagaggacttttctctgcctgcaatttaagccccatcacattgttggcggtgtccattttcttgctgccaagtttcttatttagaagcttacttttttatt

SEQ ID NO: 225541 - DNA, 309 bp, Gossypium hirsutum
cgagttctttgttaacgaataaggatcttttaagatacgccggatccgctaaagtacgccgatccccgttcgtcttccgatcatatggggctgcttgaccagttgtgggatgataccgttgcgggtccccgacccgataatggtctcggcaagctccgaaagcactccactttcactttccggcctaactctgccaaggaatcggatggcgggagtgtaagatcgtacggtgatgaagcgccggaggaagcgactagagtgacacgtattattatgatcgttaaaccggctggtttaccatagcggatc

SEQ ID NO: 225542 - DNA, 311 bp, Gossypium hirsutum
gaagaatccttcccttctttctttttttttccccctagaaagagcgattcctttcccttcccttctatttcctcgtttactttatcttcttctttccattctgattataataagatttgggtttcgttttcctgtgaaactctcgtctctggtttgaaaggagattgaaaaaatatggctgaagaacatagatgtcaagcaccacagttatgtgccaacaactggggattcttcggaagcccaacgactcaaaatctctgttctaaatgtttatcgcgatcttcaacttatataacaacattctttcctct

SEQ ID NO: 225543 - DNA, 262 bp, Gossypium hirsutum
ctctacttcacaaaattagggttcatattcacgccaaatcgatcagatatggggggaggcagtgcccaaaagtccaagacggcgcggtaaagaaacctcgagaaggctaaagcctgctctaaaggaagctcagctcgaatctaacaagaaagctatgtcgattcattgcaaggtatgcatgcatgaatttatgtgcacaacatccgaagtgaatttcctggaacatgcagaatcaaagcattcaaaatccgatgtgtcttca

SEQ ID NO: 225544 - DNA, 358 bp, Gossypium hirsutum
tccggggcggccccagccttccgaacctgccaaggaagctgctgcatttttttcaggtttagcttcaaaggctgttggggaagtccttgaaggagaggttcgtcctgatgcttcaaaacaaactcctaagcctgtaagtgctggctcaacagaagcagttgagttggagaaatgtgttctattagagaagagctgtataagaaggctaaagagttcgactctaagattcttggttttgaaacagctatcatgaggccttactttcatgtgcgtccccttaatgtttctgagcttgaaaatggcttaactacctggactttataaaaagagagggtgtcctcaataaggtggtcaaatt

SEQ ID NO: 225545 - DNA, 375 bp, Gossypium hirsutum
gtttggtaatataaagatcttcatctgttcttcctttttctctattctctccgtcttgtattcttttccttcattttccgactcatctttcgcttgaaatcatcgttgtattttttttaaaaccctcaccgatggcgaccgctatggtagaagattctagctttgaagaagaccagctggcttccatgactaccgaggatatcgtccgagcttcccgtcttcttgataacgagattcgtattctcaaggaggagatgcaaaggacaaatctcgagttggattcatacaaggaaaagattaaggagaatcaagagaaaattaagcttaacaagcagttgccttacttagtcggcaacattgttgagatattgtaga

SEQ ID NO: 225546 - DNA, 374 bp, Gossypium hirsutum
ctctatctggtttttagggcttttctaacttttctgattattttttgataatcgggagttcaatcatctaaaagaagccctaaaatctttgaatcaggtctgagcttgtggtttgttaggcctttttgatcaaactaagtttcatgtctgatcttgacgttcaaattcctactgccttcgatccctttgctgatgcaaatgctgaggactcaggtgcgggtgcaaaggagtatgtgcatattcgtattcagcagaggaatggtcgcaaaagcctgacaactgtccaggggttgaagaaagaattcatctttaacaagatacttaaagacctgaagaaagagttttgctgcattgggaccgttgtccaggaccct

SEQ ID NO: 225547 - DNA, 374 bp, Gossypium hirsutum
cccacgcgtccgcccacgcgtccgataaatcctctgctctgcaaaaaaaatcggaggtcaaaaatgagttcttcaggtttcaaatttaccttgcttgttcctcttattgttgcttgtctcatggcatcatcagccagaaatttccacaatgattttgacataacatggggagatggccgtggtaaaatcgtcaacaatggagaggttctcactctctccctctataaagcttctggttctggtttccaatccatgaacgagtacctattcggcatgattgatatgcagctcaagcttgtcccttgaaactccgcttggcacagtcactgcttactatctatctttgaaaggatcaacatgggatgaaattgttt

SEQ ID NO: 225548 - DNA, 300 bp, Gossypium hirsutum
cagaatcagaatcagggtttgaaaaaaatgcagatcttcgtgaaaggccctaacagggaagaccataaccctagaggtctaatccagcgatactatcgacaatgttaaggccaagatccaggacaaggaacgtattccaccggaccagcagagattgatctttgttggaaagcagcttgaagatggccgtactcttgcttgctacaatattttagaaagaatcaaccttgcatctggttctgagacttcttggtggcattatcgagccttcttttgatggcattggctaggaaatacaac

SEQ ID NO: 225549 - DNA, 281 bp, Gossypium hirsutum
  unsure (1)..(281): unsure at all n locations
acttcctatcatatcctaagcactacaagcattatgaagntcctgacatttacggtcttggagcaaaaacaaagggtgtttttattaatccagctttcattgagccatttgggcttactttaatcgaggcagtatcgtacggtttgcctattgttgccacaaaaaatggtggtcctgttgtcattcatagggttcttgacaatggtctactagttgatccccatgatcaacattcaattgctgatgctcttctgaaacttgttttatataagcattttttt

SEQ ID NO: 225550 - DNA, 385 bp, Gossypium hirsutum
agccttccggcattcacccaattacctaactaactactttgttctgctctcttttactaatggaatctaaaacctctgccatctgcctgtctctctgtttaactccacaaccactatcactaccattatggcttcggctactgtttctgtagccaaacccaaccttcagattcaggcaaaaggaaagggtgttggttttgcagatttctcaggcctacacaactcctctactagccttccctttgccaggaaaacctctgatgacttccattcactcgttgcttttcagacatctgctctaggaagcaataatggcgggtacaggaaaagggatggcagaggcaaagctaaaggtggcttttaaatgggtttggtaggattggca

SEQ ID NO: 225551 - DNA, 376 bp, Gossypium hirsutum
aaagatgttttgtgtagccgaccctccatatgataaatcactccaacagcttcagagcttcttatcaggtctagtttctgaagaaaaattagagctccgagatggaatgtactttttgaagaagtaataatcagctgatatagtaatcggccgtcaattataaagcatttaacaggtagcactggtgaacatgaaaatttccataggatctttgtttcatatttgccacgaatggttgacaccttttcgcttaattagctagtatgattctgttaaagctggtccttctctagaatcaccatacttccgagttctgacaagatttatgcaagtaaagctggatgtaacttgggattctgcgcaagattggacatgt

SEQ ID NO: 225552 - DNA, 374 bp, Gossypium hirsutum
cccacgcgtccgtctctttttcatctcatggctgctactattgtctccgtcaaagctaggcagatcttcgacagccgtggaaatcctacggttgaggttgatgtggaaacatcgaacggtataaaggctagggccgcagttcctagcggtgcatccactggaatttacgaggctcttgagttgagagatggaggttccgattacctcggtaaaggtgtatcgaaggctgttgctaatgttaacacaatcatcggccctgcattgattggaaaggacccaaccgagcagactgcaattgacaatttcatggttcaacaactggatggaacccaaaatgagtggggttggtgcaaacaaaagctcggtgcaaatgc

SEQ ID NO: 225553 - DNA, 297 bp, Gossypium hirsutum
gtcttcctcattgggacaaaatatcatttatcaaagggtttacaggaacctactgaagggggggtaaagatcaaagaaaatggcatcttcaagctattcaaacccaccatgtgcagcctgcaaatgtttgagaaggaaatgcatgccagattgtatatttgcaccctatttcccaccagaagagcctcaaaaattcatcaacgttcacaagatattcggtgcaagcaatgttagcaaattgctaaatgatgtgccgccccatcaaagggaagatgcagtcaactccctcgcctatga

SEQ ID NO: 225554 - DNA, 298 bp, Gossypium hirsutum
aattttctttgttagacacaaaaagcgatctagcttgaaaatttctatttttttaataaaatgttgtttgttttagggtttaggtgatggcttccaagcggatcttgaaggagctcaaggatctccagaaagatcctcctacctcttgcagcgcatgccctgttgctgaagacatgtcccattggcccgcatctattatggctcctcctgacagtccatatgctgttcgagagttgctcggctccatccattttccttcggactatccatttaaaccaccaaaggccgcattcaagac

SEQ ID NO: 225555 - DNA, 374 bp, Gossypium hirsutum
cggtgacgttttctgttgggattcggactatcggtggaggagatgggtccgggcccgggttcggattctcggaggcaccggattatcgtaacggagtggaatgtccggtttctgtcaataaagaagtagtttcgtcgtgcgacccggatttagtccacgtggcgatgacgttagactcggaatacttgcgtggctcgatcgccgccgtccactccgtcctccggcacgcttcgtgtccggaaaacgtcttcttccacttcattgcggccgagttcgacccggcgagtccaagagtgttgagcaaactcgtacgatccacgttttctttactcaacttcaaaatttacatatttccggaagactcggcaatcaac

SEQ ID NO: 225556 - DNA, 378 bp, Gossypium hirsutum
cggacgcgtgggctgtctcgtggtctgaaacgttaaaacagactcgttaccctgtgagttttcccctgttgttttctttcaattacttcaagctggcgatcgataatcaagaacccactgtccgtgaaatccagcccaagaacagaagaatcatgggtgctggtgggcctgatgaagaagacaacaggtggcctccatggctgaaacctttgttaagagagcatttctttgttcaatgcaagcttcatgctgattctcacaagagcgaatgcaatatgtactgcttagattgcatgaacggcgctctctgttctttctgcttagcttatcacaaggatcatcgttacatacagattaggaggtcttcataccatgatt

SEQ ID NO: 225557 - DNA, 373 bp, Gossypium hirsutum
ttctttcaatgcattgatcaatgggttatgcaagtcggggaaaccaaatgaagctaagaggctgttagaagacatgaccggtaattgtattacaccaaaccatataacctatacaatcctaattgattataactgcaaggcaggaaggatggaagaagccgaaattctctttttggagatgcaaaggaggaatctggttccaaatattgtaacttactgctcgcttttacatggttactacagattagggaggaaagcagagatgtttgatcttttcaaatccatggctgcaaaaggggttgaacctgatgaaattatttatcgtcttattgctaatgcttacttggaagaaaatagtttgattggaatgttg

SEQ ID NO: 225558 - DNA, 384 bp, Gossypium hirsutum
ctcttttactcattcattctttagtttcaatatcaaagcaaaaatggcttcttgttgtaatgttgtttcaatggctttactggcttgtttggtgttgaactccttggtttttgttgcccatggtggtgacttttaccaggatttcgacctaacatggggtgacaaaagaggcaagattttcaatggtggcaagctcttgtctttgtctttagacagggtttcagggtctggttttaaatccaagaaagagtatttgtttggaaggattgatatgcaactcaagcttgttgctggcaactcagctggcactgtcactgcttattatctgtcatctcaagggccaacccatgatgagatagactctgaattcttatggaatctgag

SEQ ID NO: 225559 - DNA, 350 bp, Gossypium hirsutum
gcgcttcatcgaggcaactccatgactttcacatttgcagcaaggtcatggtcaaatacatacagggtgctcccctccttctcttttacttttttctgcttcccaagcaacaagctactattatcctttcgatccgtacataaacaaacgattaataaggcaggggtaggcattggttacgaggttgcactctcccgcattttgtccttcaccggcgacaaaatcggcgaaacttatctcgacctcaaatcatgccctcccgaaaccgttagagccgacactcaccgagcaattaatactgacttacaaaacaagcgtggtggcacatcttgtacactcactcctggcga

SEQ ID NO: 225560 - DNA, 339 bp, Gossypium hirsutum
ggaaaacaagaaaagcagagccgtttcactttttgctagctaagctactgtgggagttattgttcttcataacagcttctgcagttgctaataataacgttatatattatataaatcgtatacatcctttttaccctacgactccatatataagcatgtaaaaataaatatggctcgctctgtttcttcctttaagttcctcggtgcttctgttttagatgctctttatgtctccatatcaaggagaggttactcaagtgcaccgtctgcggcagcgaccgctagctctggtaggcctggagccatggggaaagtggaacgaatatatgcgatgcaaga

SEQ ID NO: 225561 - DNA, 268 bp, Gossypium hirsutum
  unsure (1)..(268): unsure at all n locations
acttttnaaaaannggggcggaccaacgcgtccggggtgactggtgtatccgacccactttttaagagctggagaatttcggtactcgggagttctctatatacaatgctgggcagttcccgtgtaatcgttatacacactacatgacatcctctactagcatagaccttaatcttgctaggagggaaatggtcattctcggcactcaatacgccggggaaatgaagaagggtcttcacagtgttatgcatcatctcatgcctatgcg

SEQ ID NO: 225562 - DNA, 281 bp, Gossypium hirsutum
cccacgcgtccgaaaaaaaaaacctcctaatcagtcattagactcggacaggaggagcgctcattgtttaggtgatggcttcgaaccggatcttgaaggagctcaaggatctccagaaagatcctactacctattgcagcgcatgccctgttgctgaagacatgtctcattggcaagcaactattatgggtccttctgacagtccatatgctggtggtgagtttatagtcaccattcatttcctttcgttctattcattttaaccaccaaaggttgcattc

SEQ ID NO: 225563 - DNA, 372 bp, Gossypium hirsutum
cggacgcgtgggttgcacctttttttctctgagcttcttatgtttgaaacgcgggagacggaaagaaaaatatcttcgttgccttttggccttacttgatctgattttttgattcctttgcaaatcaaatttctaagcttttgatctctgcttcaaacagttcttagcaaaaagtagggtatataggatcacatggtgtacaagctttgaaaagatacaaatatagcggtgtggatcactcttaccttcctaaatatgtattacaacccttttggtgccgttttgttaactttcttccttttttgatgccaccaatcatgattacacttacaggatttatgcttatggttaccttatcttagttttgctatt

SEQ ID NO: 225564 - DNA, 306 bp, Gossypium hirsutum
cttgggtgtttggactttggagtcttgatgtagcatgcaatagcttatgtgaagggagacatgtactatggagctaatgcaaccattaacgtttgggaacccaaaatacaacagcctaatgaattcagcttgtcccaaatctggatcttgggtggttcttttggtgaagatctcaatagcattgaagcaggctggcaggttagcccagatttatatggagacaaccacactagactcttcactttttggacttgtgatgcatatcaagccactggtttgcttaatctactttgcttaaggcttatt

SEQ ID NO: 225565 - DNA, 405 bp, Gossypium hirsutum
ccggggcggaccaacccttccgtgcttatccactttttaaaggctggttggtgatagcttgtattggggaaacactggagcaacgtgaagcaggatctactgtggcggttgttgctgaacaaactaaagcaattgcagcaaaaatatcagactggactaatgtcgttttggcatatgagcctgtgtgggctattggaaccgggaaggttgctactccagctcaagctcaggaagtacatttttagttgaggaaatggcttcaggctaatgttagtcccgaagttgctgaatcaacccggattatttatggagggtccgtcactgctgcaaactgcaaggaactagcagctcagcctgatgttgatgggttcttggttggtggagcttcacttaagccggagttca

SEQ ID NO: 225566 - DNA, 364 bp, Gossypium hirsutum
gggagatgatactcgtctatgagttcttggctcgggggacccttcgtgatcatcgttacaaaacgaagaaccctcctttatcgtggaaaaggagactggaaatatgtattggagctgcccgtggattacagtaccttcacgcaggtgtgaagcaggcaatcatccaccgggatatcaaatcaaccaacatactattggacgagaactgggtggccaaggtttctgactttggattgtctagactgggtccaacagatatatttcaaagccatgtgagcactgtagtaaagggaagcgttgggtatgtggatcctgaatactaccgaaagcaacagttgactgagaaatccgacgtttactcgtt

SEQ ID NO: 225567 - DNA, 377 bp, Gossypium hirsutum
aaaatcccattttttttgttccaaagatggaaaggtctgaatggtgtgtcacctctaacatacaaaggctcaattcctgaagccattcgtgaagctcaaaaccagaagaaacttttcgtggtctatatttcaggtgaaaatgatgagtcgaaaaacttggatcattcaacgtggactgatcttaaagtaaaagagtcgttgtcaaagtattgcattctattgcatatcagaggagggaccaccgatgctgcaaatttttctgccatatatccacagaaatctatcccctgcataacagcaattggatttaatggtctacaagcttggcaaaatggtattaaattttcttcttatgtaaaaccatttttctcttttct

SEQ ID NO: 225568 - DNA, 336 bp, Gossypium hirsutum
cccactcgtccggaaaagccttgtactcgtatttttactgatgatattatgaggcgttacccaacactaaagggcgggaaattttggaaagaggaacatgatttgctgttactgcgcgcggttttaaagcatgggtatggaagatggcaagccattgttgatgataaagacttgaggattcaggaggtgatctgtcaagagttgaatcttcccatcataaatcttcctattcctgggcaagctggttctcaagtgcaaaatggtgcttatacaacatatattgtaccaacaggaacccatactcatggaaatggctctggtaatgatgtgggaggt

SEQ ID NO: 225569 - DNA, 378 bp, Gossypium hirsutum
cttgaaggagcttcccaatgatggtctgtatccctaaaaccaagatcgtttgtagggggggtccggcttcacggtccgtacctatgatagagaagctgttgagggccgggatgaacgttgctcgcttcaatttctctcatggcagtcatgagtatcatcaagagaccttggataatcttaggtctgctatgcacaacaccggcatcctttgcgctgtcatgcttgacaccaagggccctgagattcgaactggattcctgaaggatggaaaagctgttcagctgaaggaaggccaggaaattactgttacaacccattacgaaattaagggggatgagaagatgatctgcatgagcctcaaaaagctggctgttgatc

SEQ ID NO: 225570 - DNA, 388 bp, Gossypium hirsutum
ggagctcttctcttggacggtaacttcttgaactacttcgggaagaacatccgcgatcaaccttgtggtggctgtcgttgccgaagtcgtccttgttggtggtgctgaatattacagaatcatcaatggcttggatctggaggacaagcttcaccctgggggaccatttgacccactggggttagccaaggatccagaccaggctgctttgctgaaggtgaaagagataaaaaacggtagactcgcgatgttcgccatgctcggtttcttcttacaagcttatgtgaccggagaaggtccggtggagaacctttcgaagcacctgagcgatccttttggcaacaacttgctcacggtcattgctggaactgctgaaagagctcccacc

SEQ ID NO: 225571 - DNA, 240 bp, Gossypium hirsutum
ggatctcttctctttaacggaaacctcttgaactacaaccggaagaacatccagaagaacttagaaaatactgacacccccaacatcaaccttgctaacaaagctgaatactacagaatcatcaaatacatggatctcaagcacaaactatacccttttgaaccattccacccacagctcttagccaatgataccaaacacatcttcttttccaaaagctaaaaacaaaaaaaacattat

SEQ ID NO: 225572 - DNA, 387 bp, Gossypium hirsutum
cggactcgtgggcggacgcgtgtttttgagaggaaaatggggaaacagccggtggagatgatggcggtggtatacgctttgtcgccgtttcaacagaagattatgggtgggctgtggaaggatctgccgggcaagatctctcacaaggtttccgagaattggatcagcgctactcttctccttgctcctctcgttggaacgtacacatatgtccagaacttcaaagaaaaggagaaattggaacacaggtattaaaaacctcaggaagcgtccctttttatcagagtaactctgaacctttacgttttagatgcaaatttattgtggtccggtccaatgatgaaccatgttttttgtttgggatctgattagtatctgactgtttga

SEQ ID NO: 225573 - DNA, 368 bp, Gossypium hirsutum
accaacccttccggcctagaccaagaagtagcggagcatgttgataattccagttcgctgcttcacctgcggaaaggtcattggtaacaaatgggacacttatcttgatcttctccaggccgattataccgaaggagatgctcttgatgctttgggattggttcggtactgctgtaagagaatgcttatgactcatgttgacctcattgagaagcttctgaactacaacacattggagaagtcagagaccagtcgagggaacatgtagaatctaagggtttgttgcagtttgtgtgagtgcctgtcaatgatggccgtgatctgaatccagaaaaagggaagtaaggacttaaaagtactagtctagt

SEQ ID NO: 225574 - DNA, 393 bp, Gossypium hirsutum
ttccgcccacgcttccgaaaaaaaaaaccacttttacagacaatagactaggacaggaggatgtctcagggtttaggtgatggcttcgaagcggatcttgaaggagctcaaggatctccagaaagatcctcctacctcttgcagcgcaggccctgttgctgaagacatgtttcattggcaagcaactattatgggtcctcctgacagtccatatgctggtggagtgtttctagtcaccattcatttccctccggactatccatttaaaccaccaaaggttgcattcaggacaaaggtctttcacccaaatattaacagcaacggtagcatttgccttgatattttgaaggagcagtggagccctgccctcaccatatccaaggtattgctatc

SEQ ID NO: 225575 - DNA, 397 bp, Gossypium hirsutum
cttccgaaaaaggttacccaaaaattttaatgtttttaaaaatgccttcttctccgtggatgggggtctcaaaaaccatgattttcccagaccaaaaatcaaaccttgaagacctcaagctttcagtttcagatcttcctatgctatcttgccattacattcaaaaaggttgcctctttactcgcccttcaatccccattaattcactgatttcccttctcaaacaatccttgtccaagacgctgtcgtttttccctcctctcgccggccgtttttacacagacactaatggttacatttacatttcttgtaacgacgccggcgttgaattccaccatgccaaatgtgacaccaagttcatccgtgacgtcatcggtccagttcatgtaccggagct

SEQ ID NO: 225576 - DNA, 386 bp, Gossypium hirsutum
acgcttcggttcctttgacccaaactcctccggtttttccatgcacatcggagaccatgtccaggtggcttattctcaccataaagagtctcctttacagcccagatcatttgctgtgaaagacgaaatcttctgcttgtttgagggagcccttgataacttggggagtttaaagcagcaatatggtctggcaaagtcagcaaatgaagtgatattggtcattgaagcttacaaggcccttcgtgaccgagcaccttatcctccaaaccatgtggttggccatctaattgggagctctgctttcattgtctttgataaatccacctccactttgtttgtggcttctgatcaatttggtaaggttcctctctattggggaatcaccg

SEQ ID NO: 225577 - DNA, 385 bp, Gossypium hirsutum
cccactcgtccgggcctccgccttttttttatcttccaacttggttgagtcagtgaagaccatctgcaacgtgactcggtaccctgactcatgtttcaccgctctatcttctcttaacgcctctataaaacctgacctagaggccttccttgacctctgtctccaagtagccatcacccatctctccgacctctcttactcattcaagtccctcaacgacctccactctcagcctgctttaaaagactgcttgaccctttttgatgacgccctgagtcgactcaacgactcagtgtctgccatgaaggtgggtaccgggaaggagcttgtgttgactaaggagaagatcagtgatatccagacttggatcagtgctgcaatgact

SEQ ID NO: 225578 - DNA, 270 bp, Gossypium hirsutum
  unsure (1)..(270): unsure at all n locations
cccactcgtccgtgctgcaacatgtttaggccctctcaacaattgggctactcacttgagtgacccccttcatactaccattattgacactttcacctcttaaaaaaagccatattcctttgcttttatgtagattttgctcaatgtactattatgttaacattgttaagaaaaacttgcgtatgttaataggtatctgatcggtttagatgtggttggtatgataatttatttttattntttacacaaaattacaaaaaatgtagaaac

SEQ ID NO: 225579 - DNA, 381 bp, Gossypium hirsutum
atcaataccctctaattttaaagtctattagatttaagttaacgaagcatttggggggttcgaagtaatggaaactaccggaaaagtaaagaagggagccggaggaaggaaaggtggtggcccgaagaagaagcccgtttcaaggtctgtcaaagccggtctccagttcccagttggtaggatcggccgttacttgaagaaaggaaggtattcacagcgggtcgggaccggagccccggtttacttggctgcagttcttgagtacttggccgctgaggttctggaattggctgggaacgctgcacgtgacaacaagaaaaacaggatcatcccaaggcacgtgctacttgccgtgaggtacgacgaacaattagggaagct

SEQ ID NO: 225580 - DNA, 389 bp, Gossypium hirsutum
gccctttcttctccccacacattcaaattcctctctttcacctttttatcagagacatgggtttacagcgatcagctatggcgatgctcttgctgatgatgttcactttatcatcagctctcgacatgtcgatcatatcctacgatgaaggccatcccgacaagtccaagtccagttggagaacagacgacgaggttatggtcatgtacgaggagtggcttgtgaagcatggaaaagcgtacaacggcttgggcgagaaagagaggaggttcaagatttttaaggacaatcttaggttcatcgatgaacataacgccaatgagagccacagttttaaagttgggttgaaccggttcgctgatctgaccaacgatgagtaccgagccatg

SEQ ID NO: 225581 - DNA, 388 bp, Gossypium hirsutum
cccacgcgtccggatccccttatgtttttctccttcatcatcgtctatttctctgcttctttttctttgtgtgttcttcttctttttggggggtaaaacagccattgaattgaagctcagtggactctttttatccatacccttcttataaacttaggaatttgttggattttcggctctttctttagagatcaatagtgttgcagtcagagcagatccatggcctttgagcaatattatgctcacgaatggaagacgatccccagtgattcaacatccgagaacttcaatggtagcttcgactgcaatatctgtttggactttgcgcatgaaccgatcgtcactctctgcgggcacctctactgctggccctgcatctataagtggc

SEQ ID NO: 225582 - DNA, 386 bp, Gossypium hirsutum
gttctccaatactttcttcttatgtgtactttatcaaacaaacaattttttttggggttcaacaatcaatatcatgttcctatcaagatctgttcttgggtttattttcctttcttcactgcttcttttccctgcaaattcaatcaggttgtttaaagctgaggatgaatcagatttgttcatggaggcaccagtgtatcaaaatggacctcactgtccggttttgggtaaagatactttgatatgtgactcttccattgttcatattgcaatgaccattgatcctgaatacttgagaggcaccattgcagccatccattcagttgtgaaacatggctcatgtccacaaaacgtgttcttccacttcattgcctccgattccagct

SEQ ID NO: 225583 - DNA, 383 bp, Gossypium hirsutum
gttgatcttcgagtgatggaaaatttcttgaaggttaccaatggagtggatcatgttttcaaccttgccgctgatatgggtggcatgggcttcatccagtccaaccactctgtcattatgtacaacaacacaatgatcagtttcaacatgctcgaggctgctcgaatcagtggagttaagaggtttttttacgcctccagtgcttgtatctatcctgaatttaagcaattggaaactaatgtgagcttgaaagaatccgatgcctggcctgctgagccacaagatgcttacggcttggagaagcttgcaacagaggagttgtgcaagcattacaccaaagactttggaattgaatgtcgcattggaaggttccacaacattta

SEQ ID NO: 225584 - DNA, 397 bp, Gossypium hirsutum
cccttccgttttgttctcctaactgggttttaaggtttccaccctccaatcaagctatttccggatggcttccaatttgcagaaggaatccacttcttccgatgagaaatcgactttgacaacggagagcaaaagttctaacccagaaacatccaccgccgagaacaaaacttcttccactgggccgtctcaaccagcacaggctggagcttcccctaccactatgcctgggtttgtgccacccaatccttttgatttctcagccatgagtggccttcttaatgatccaagcatcaaggaactagctgagcagatagctaaagatccttcattcacccaaatggcagaacggctcactaagacatttcaaggggcagcaactgaagatagtatgccg

SEQ ID NO: 225585 - DNA, 319 bp, Gossypium hirsutum
tccgggaaatttggctttgttactagacttgtcgtctgcgaggaccgttacgacgggcggaaaatctcgtcccttggcgatcgacgtcgttttgaacctgcagaagagggatcctcatttctcccacgtttctcttcccaacaagagccaactcgactactgggacggggagaatcgggcaccccgggccgtggctcgtggcaaagcgaattcgaaagtaaaggcggtggattttgacgcggcgtccagtgacgacgatgaaaacggcaacggttttgaggaggaagaggaggggtccgattgggcgaacgaattgagg

SEQ ID NO: 225586 - DNA, 363 bp, Gossypium hirsutum
ccttccgtttggaggtgtttttaaggttgcttctttaacatctagcagccaaccaaaaatgggggtccaaaacgatatcgatttgttgaatcctccagcagagcttgagaagaagaagcacaaactcaaacgtcttgtccagtctccaaattctttcttcatggatgtcaaatgccaaggctgtttcaacataacaacagtgtttagccactctcaaacagtggtggtatgtgggaattgtcagactgttctttgtcaaccaacaggaggaagagctagactcactgaaggatgctctttcaggaagaagggtgattgatctcatatgttgctattttatgattcacaaaaacatatgaaagt

SEQ ID NO: 225587 - DNA, 340 bp, Gossypium hirsutum
cccactcgtcctcccacgcgtccgctactgcttcacaacggcctatacaaccaggtgtctttcttccccatcattcgccggtaaggcagtgaagttctccccttccacccctgaaatccagggaactggccttgtttccatgaggaaaaccaccaagcctgttccttctggtagcccatggtacggacctgaccgagttttctacttgaatccactttccagtgagccaccatcttactcgaccggtgcgtccccaggtgactctggttgcgacaccagcagtactgtaacctgatcctcgatcctttgctaagaaccatgagctctaaatcgtatacac

SEQ ID NO: 225588 - DNA, 386 bp, Gossypium hirsutum
tattggtctctttgaggctgctcttttgctctcttccttcccaacacaacataggttattctggtttttggtggaggcggcggcggcggcggcggcgctgtctgaaattcaacaagtctcgtaatccgacatggcgaccaaagggttcgttttgtatctgctgtccggtttttcgatagcagttctctctgttttgttcatccaaaaaagcaacaacgacaacatgaaccaaagctcaaatctcttagagtccccatataatttatccaccactgaaaaagtttggcctgcattggagttgaactggaggcttgtaatggcgacggtgatagggtttctaggatcagcatgtggtacggtgggcggcgtttgcggcggcggcattt

SEQ ID NO: 225589 - DNA, 383 bp, Gossypium hirsutum
catgagtgctccaagtgacattcattttaaagcagtcaaacgtgttttaagataggtagctggcaccatggatcatggactgttctttacagcaggtcaattagaactagtgggttattctgacgctgattgggcctcatcagttgaagatcattgatctacatctggatatgtggtatatcttggttcatatccggtggcttggtgctcaaagaaacaatcagtagtctcaaggtcgtctacagaagcagagtatcgcagcttagccaactgcgtgtttgaactattgtggattcaacaactgctgaatgaagttaaatgccacagtctaagttgccaatcatctggtgcgacaactcctcgacagtatcagtagttgaaaa

SEQ ID NO: 225590 - DNA, 352 bp, Gossypium hirsutum
tgcttcccaagctggccccggaatattgttcctctttagatgaggagggaatttgcaagactgcttttgaattgatctttgcttttgatgaagtcatttgtcttgggcacaaggaaaacgttacagttgcacaagttaagcaatactgtgagatggagagtcatgaagagaaattgcacaatctggtattgcagagcaagattaatgaaactaaggatgtcatgaagcgtaaagctagtgagattgataagagcaagattgataagaataaaggtgataaaggagggttcatgtcaatgggctctggaagaattgaaagtagctttagtgatatgagcatttctagcagtgg

SEQ ID NO: 225591 - DNA, 387 bp, Gossypium hirsutum
atctgccatcaatttgctttgaagatcatgttggctatttttcacaaggcatttgctaatccaccagaggagctgaatagtccagcttctcataaatctactaagaagcctaaacagcctgaagaaaccctaaatgatttcctatctcatcaccctcacaacactttctccatgagctttggcaacgctgctgttttggcttatgtccgccatgaacgtgctgcttcagttcatcagaggttgttttgtgggtttgatgacatatactgccttttcttagggagcttgaacaatctatttatgctgaatagacagtatggtctttccaaagggagcaatgaggcgatgtttgtgattgaagcatataggacactaagggataggggt

SEQ ID NO: 225592 - DNA, 391 bp, Gossypium hirsutum
ttacatccatgctattgctgtttttcttcccttttagggttagaagtggggaatgtggcgccagaagtgaactctgaagcgatgttccggtgcgtgagagtgagtggcattgaagatggtgacgatcagtatgcttatcagacggctgtgaacatcggagggcatgttttcaagggaattctttacaatcaaggccccgaaaacggctacaacatggctgcagcagttggtgagagttcttccggcgatggaatccaacaacttgatcttattactgctggtcccaccgccgccgtttccaacgcgggtaccgtctcatgcaacgccagttgcagcagcgttacagccgttgcgtcttcatcaaccgtcgcatttttagatccttcctctc

SEQ ID NO: 225593 - DNA, 377 bp, Gossypium hirsutum
aaatacatactttttattttggcctatgttttgggagccggagctgcaataagaaacttctctcctgcttttgggaagctaatgtcaaaagaacagcagttggaaggagaatacagacaacttcattcaaggctaaggacccatgcagagagtatagcattttatggtggagaaagtagagaagaatctcatattcaacagaagtttaagactcttgttaagcacatgagggttgtacttcatgaccattggtggtttggcatgattcaggacttcttattgaagtaccttgttgctactgtggctgttgttttgattattgagcctttctttgctggccatcttaggccagatgcttcaacattgggacgtgcaga

SEQ ID NO: 225594 - DNA, 259 bp, Gossypium hirsutum
atcctgttcaaatgccgaggatgattttagaccaaggtcttgttatgaacttctggaaggattcttttcttctttgctttgctttccttttcagctgtctcggcatttgcacaggatgaggaagaccaaagtcttgttatgaaacttcacaaggattcttgtcctcaagctgaagacattatcaaggagcaagttaagctactgtacaagcgacacaaaaacactgcttttttttggctgagaaacattttccatgact

SEQ ID NO: 225595 - DNA, 385 bp, Gossypium hirsutum
aggagtttactgaaaaggtccaaattagaggcggtgttttaattaagaaatgggggagatcttcagccgcatctactgctgtgtcaatcgttgatgccatcagatctctaataactccgacacccgagggtgattggttttcttctggagtttataccaatggcaatccatatggtatagcggaggatatcgtcttcagcatgccatgccgatcaaaaggagatggcgattatgtacttgtcaaggacgtgatcttcgatgactatctgctcaagcgaattaaaaagtcggaagcggaattgctggcggagaagagatgtgtggctcaccttacaggggagggtattggtttctgtgatctacctgaggatacaatgcttcctgg

SEQ ID NO: 225596 - DNA, 395 bp, Gossypium hirsutum
acgcttcctagggtcacaaatcagttacagagatttttcgtgcggcctatccgatcgaatacagggcaaatgctaagataccatgcgtcggtcctcatcctaagaatgtcattcttttggcatgtgatgcctttggtgtccttccacctgtgagcaagctgagcctggctcaaaccatgtaccatttcattagcggttacactgctctggtggctggcacggaagatggtattaaggagccaacagcaacgttctcggcttgcttcggtgcggcgttcatcatgttgcatcctaccaaatatgcagccatgcttgctgagaaaatgcagaagcatggtgcaacagggtggcttgtcaacaccgggtggtctggtggaagctacgggtctggaaac

SEQ ID NO: 225597 - DNA, 396 bp, Gossypium hirsutum
atgggacgcagggaatggctacatcttcaagagcactgaggaccccaagagatagggcaagaacaatcacatcgttgcccgtatctccttgttcaagccccttaagatacggtccagtacacaggagttgttttctttctcctcctcatccagcttatcagtttgtaggacagagtggtcataacttaggcgacttctctgggaacacatcaagaccaaacccgagatacactcatgatccttggtttgaagcgccacaactaaaagtacaaacaacaggcacctcgccaagaacaagacctatttgagattattgtaaatagaagtaggatagagtatcatcaatgttccactccctattttggtaaatctggcaaattacattttaacttaaat

SEQ ID NO: 225598 - DNA, 392 bp, Gossypium hirsutum
ttccggttcgtccaaaatactttgagatgcctctcactgactgtctctgaagcagttgagcagctggaaaatgttgatcatgacttctatggtttccgcaatgaagaaactggtgatattaatattttatacaaaaggaaagctggagggtacggactcattatacctaaaggaaatggtaaagctgagaatttaaacccgctggtggtcgaatctggaaaagaacactcttacgtggaatagtttgtctgagattgtgagaaagaaagttgcaagctgttctgttcatctgtagatttttcatggcaacactatagatgaaggtcaaggcatgtagagagacatagtacaaggtttaagattaagcgaagatgatcatgtgggggttaaaa

SEQ ID NO: 225599 - DNA, 390 bp, Gossypium hirsutum
gtccgaacctttagaatcatgggagtgccgttttactgatccattggctcaattgagcttgccgccggggtttcggttttatccaactgatgaagagcttttagtgcaatatttatgcaggaaagttgcagggcatcatttttctctgcaaatcattggcgaaatcgatttatacaaatttaatccatgggatttaccgagtaaagctttgtttggtgaaaaagagtggtattttttcagtcctagagacagaaaatatccgaacgggtcacgacctaatagagttgcagggtccgggtactggaaagctaccggaactgataaaattattacaacggaaggccgtaaagtgggtataaaaaaagctctggttttttacgttggaaaagc

SEQ ID NO: 225600 - DNA, 385 bp, Gossypium hirsutum
cccactcgtccgtgagatgcaattgtagtatgttcttcctggttaggaagaggcgggtgcctttggacgggtgcttctagatgtcattagtagaagacataggctaaaagttcctcatgataaagcgtatagttagaggaatttgaattattcattaagatcaaactttgtgggcagaatcaatcattctaaaaaaaattattttataggttattatctagttgatgctggatacacaaattgtgagggatttctcgcaccatttagaggacagcgatttcatctgaacgagtggcgtcagggttaccagccaagttctccgcaagagttttttaatatgaaacatgcctcagcacgtaatattattgaaagatgctttggcttt

SEQ ID NO: 225601 - DNA, 353 bp, Gossypium hirsutum
gggatacctttattttggagttaatgaaagggagaaggggggtggggatcaaccttgagcatccaatttttagagaattaaacgctgcattcaagagtaacccagatgatgaagatgccttgagagcaatagatcttttgtatgatgcagcacttgtttctagtggttacactcctgacaatccagcacagctgagtggtaagatatatgagatgatgggaatggctatttcgggtaaatggtcaacgtttgacagtcagcagtcagcatcacagtctccccaaacagagacattggaagctgatgtcgatgcaccagtttgagcttggcgtctgcaatgaaaagtgcatggt

SEQ ID NO: 225602 - DNA, 380 bp, Gossypium hirsutum
  unsure (1)..(380): unsure at all n locations
gagatattgtatctcctattgttatagatttggtggatgtcattccagaatctgagtttgaggatgctgcagctgatgacccanacaaggatgagaccttcagtgatgctgtgatagctgaaatggaagccaacagctatggcttgcagattataaaagatgctgatctcgaagaactaagggagctaggatctggaacatatggaactgtttatcatggaaaatggaggggaacagatgttgctataaagagaataaagaaaagttgcttttctgggagatcatcagaacaagatcgactgatgaaagacttctggagagaagcacagatcctctcaaatctgcatcatccaaatgtagttgcattttacggagtagta

SEQ ID NO: 225603 - DNA, 386 bp, Gossypium hirsutum
cccacgcgtccggtcgcctttatcataagtaaaaacactaagctttagcttctacatcggagaaaatggtgaagggacgccaaggagagcgagtgagactctatgtaagaggaaccatcttgggttacaagaggtcaaagtcgaaccagtatccaaacacttcattgatccagattgagggagttaacaccaaggaggaagtagcttggtatgctggcaagcgtatggcttatatctacaaggccaaagtgaagaagaatggctcacactatcgctgcatttggggaaaagttactagacctcatggtaacagtggggttgttcgtgctaagttcaagtctaaccttcccccgaagtctatgggagatagagtcagagtcttcatg

SEQ ID NO: 225604 - DNA, 385 bp, Gossypium hirsutum
cccacgcgtccgaattttgaaaagacgctttcttccttctccccactaaattaggcagacctaagtaccgttcaggatcagttgagcaatgtactccaagcactctagttactaaacttatatcccttttttgagtattagcgctgaagaaaatagtagatttggaataattaaccttctaccccgaacagccttcatattcgtgcaaaatctgctttaatgaaatcgcccctctttctgtagcttcgccgaacagaatgcaatcatccataaataataaatgtgaaacctgtggaccgcttctgctcgccttaactccatgaagaattttatttttcattgctgatctcataagactagataggccctccccacaaaatagaaa

SEQ ID NO: 225605 - DNA, 376 bp, Gossypium hirsutum
ctttttccttccctttttctttctttcctctccctgtttttgcctttttgaaagaaaaatgcagagactcatagcagtggtgctgtttttattttgcgccacttctcaattagcctcttctctcaatgatggtttgttgccaaatggaaattttgagtatgggcctaagccatcagaattgaaaggaactaaagtgatgagccccaaagcaataccgaattgggaaatttcaggctatgttgagtacatcaaatcaggtcaaaaacaaggtgacatgttgctaatagtacctgaaggaggctttgcagttaggttaggcaatgaggcattgattaagcagaagattaaggtgattaaaggcatgttttactctcta

SEQ ID NO: 225606 - DNA, 383 bp, Gossypium hirsutum
cggacgcgtgggtgaagatcaaagttttgtcgccgccatgccgcaaggtgatggcgatagagctacacaggaagaggcatggttaccgccatgacttcttcgagaagaagcgcaagaaggaagctcgtcaagtacacgagcgttcagctaaggctcaaaaggcgctgggtattaagggtaagatgattgcgaagaaaaattatgctgaaaaggccctcatgaaaaaaacattggctatgcatgaggaatcatcaactaggcgtaaggttgatgacgaagtccaagatggagctattcctgcctatcttatggatcgtgaaaataccacacgtgctaaggttcttagcaataccataaagcaaaagaggaaagagaaagccgga

SEQ ID NO: 225607 - DNA, 386 bp, Gossypium hirsutum
gtctgcctccaagagaagacagagtggttttctcacaaccaccgtaatgggtcgtgtgattcgagctcaacgtaagggtgccggttcggtcttcaaggcccatacccaccaccggaagggtcccgcccgtttccgcagcctcgacttcggtgaacggaacggttaccttaaaggtgtcgtcaccgacgtcattcacgaccctggacgtggggctccgttagcccgcgtcgttttccgccaccctttccgttacaagaaacagaaggaattgttcgtcgccgccgagggtatgtacaccggacagttcgtgtattgttgtaagaaagctacccttgtggttggaaatgtgttgccccttagatctatccctgaaggagctgtcgttt

SEQ ID NO: 225608 - DNA, 385 bp, Gossypium hirsutum
gattgctaagataaaggatgatgaaagaaaagctttattgcttgtgaaagaagttactgaatattttcatgggaatgcaacaaaggaagaagctcatcccttaagaatcttcatgattgtgagggatttcctgtcaatattggatcatgtctgcaaagaagtggggctattgcaggatagaacaatggtgggtgctgctagatcctttcggatatctgcaacggcttcactgccagttcttagcaggtacaatgtgagacaagatggaagttcagatgatgaaagcttggctccttgaagttgtgtgaatacaggtcctaagaaaactcaaacctcggtttttttccaaccaaaccaacatctaagatacttctcttttccatta

SEQ ID NO: 225609 - DNA, 387 bp, Gossypium hirsutum
ttttgttttctctccctccaattaagatgcagatcttcgttaagaccctgaccggcgggaccatcaccctcgaagtcgagagttccgacacgatcgacaacgttaaggcgaaaatccaagacaaggaagggatcccaccagaccaacaacgtctcatcttcgccggaaaacagctcgaagatggccggaccttggccgattacaacatccagaaggagtccaccctccatctcgtcctccgtctacgtggtggcatgcagatcttcgtcaaaaccctgaccggcaagaccataactttggaagtcgaaagctctgacaccattgacaacgtcaaggcaaagatccaagacaaggaaggcatcccaccagaccagcaaaggctcatat

SEQ ID NO: 225610 - DNA, 373 bp, Gossypium hirsutum
  unsure (1)..(373): unsure at all n locations
gtttgaagcttcaagtgccaaaatttagggatttgcgggtggagaagacgagagcccatctctctgcttcaaagctcctgtccaggtagaattctcttcttcccttgcgttgtgttctttcctgttcaatcgccatggcttcaaagcggattttgaaagaactcaaggatttgcagaaagatccacccacttcttgcagtgctggtccagtagctgaagacatgtttcattggcaagcaacaatcatgggaccctcagatagcccttatgctggaggtgtgtttttagttactatccatttccctccagattatcctttcaagcctcctaaggttgcatttaggaccaaggtcttncatcccaacatcaacag

SEQ ID NO: 225611 - DNA, 375 bp, Gossypium hirsutum
cccacgcgtccgtgaacagatcctttccgacggcatgctgcacaccttgtgtgggaccccagcttacgtcgcaccggagatcttgtcaaagaagggatacgatggagctaaggtggacgtgtggtcatgcggcgtcatcctcttcgtgatgaacgccggttacttgccttttaatgatcccaatctcatggctatgtacaggaagatatacaacggtgagtttcgttgtcctaaatggatgtccagcgatatgaaacggttcatttctcgactcctggatacgaatcccgttacaaggatctcccttgatgagatccttaaggatccatggttcaggaagggttacaaagagcccaagttccacgaggagcaacc

SEQ ID NO: 225612 - DNA, 383 bp, Gossypium hirsutum
gggaggcaatatgcagacacaaagctttggagcaacagcagggacagttatgaaccaaagtcaggcaagcggatcgacaacgggaggtgcaccggctcaacccaaacaaagagttagggctagaaggggtcaagctactgatccccacagcatcgctgaaagattacgcagagagagaattgcagagagaatgaaagctcttcaagaactggttcccaatgccaataagacagataaagcttcaatgcttgatgagataatcgactatgtcaaattcctccagctccaagtcaaggttctgagtatgagtagattgggcggtgccgctgctgttgctccccttgttgctgatatgccatctgagggaggtgattgtgttcaaa

SEQ ID NO: 225613 - DNA, 374 bp, Gossypium hirsutum
gggcggcccaagccttccgccaacccttccgcttaaacccatccttttaagcagcgtgtgatcacttgtcggaggtggcccttaaccgcctaattttcctcgattaaagtcccgtattttacgagaccctatacgtgggtgatgtagccaattcaaggctacgacccgcgatccggatcctaaagcaaaacctagcactccttaccgctatactcacggaccacgctcaagcattggcaatgaaagaagtgatgaaagcatcgttcgaagctttcctcatggtgttgctcgcggggggaccgtctcggacatttcaacggtctgaccatgagatgatagaagacgatttctatagcttgaaaagggttttttgc

SEQ ID NO: 225614 - DNA, 382 bp, Gossypium hirsutum
cggacgcgtgggcggacgcgtgggcgtgtagcaagctgctgtcagggatgtccagggagcctgcgtctatgacacgtacactctgcccaagctgtatgtgaagatgcaatactgtgtttcatgtgcgatccattcccatgttgttagggtccggtcccgcactgacaggaggaaacgtgacccacctcagcgcttcattagacgcagggatgatatgccaaagcctggtcagcctggtcaggctcctcgtcctggtgttgccgctcctgctcgtgcataaggctcttgaagtttaagatgaatttgtatttcgtgttttgctttgagatatcgttgcttgaattttgataacttggatcatgtagggagttttttttttatt

SEQ ID NO: 225615 - DNA, 332 bp, Gossypium hirsutum
  unsure (1)..(332): unsure at all n locations
aaaccagaaagtaaaaagaacagtgcttggatatcctaagctaatgtcggggggggagcaccatttcgagtccaaggccgacgccggcgcctccaaaacctatcctcagcaggccggtactatccgtaaaaacggctacatcgtcatcaaaggccgtccttgcaaggttgtcgaagtttccacttccaagactgggaagcacggacatgctaagtgtcactttgttgggatcgacatcttcactgctaagaagctggaagatatcgntccttcttcccacaagggtgaggtgccgtacgtcaaccgtacttgattaccaattgatcgacatt

SEQ ID NO: 225616 - DNA, 396 bp, Gossypium hirsutum
gggggcccaacgcgtccgcacacgcttccggaaaaatctgatttttatgattatgatgttgatgatgtttgggctgatgtaaagcccttttcttttaacgctagaacgaaacctgcttctgctgtatctcatggttcgaactctgaaaagtccatgcagttcgatggtcaagctgagaaatgtgcgaaaagaaagaggaagaaccagtatcgtggaatccggcagcgcccatggggtaaatgggctgctgagatccgtgacccaaggaaaggggttagggtctggttaggaactttcaatactgctgaacaagcttcgagagcttatgatgctgaggcacggagaattcgtggtaagaaagctaaggtgaacttccctaacgagactccgcgtacc

SEQ ID NO: 225617 - DNA, 376 bp, Gossypium hirsutum
gatcgtgaggaagccgggaaggttttgtctgctaacttgaaaggaaggccggcggtggaagccgatgaccagtcagctttgatttacttgttgctttctcaaaaggaaatgtggatggataaagtgtttctcgagaatcagtattatttgcatggttattgggcaggtttggttgataggtacgaggagatgatggagaaatatcatccaggtttgggagatgagaggtggccgattgtgactcatttcgttggttgcaaaccctgtgggagttactgagattaccctgtcgagaggtgtttgcgcagtatgcaaagggcattcaactttgccgataaccaggtgcttaagctgtacggttttagacatagaggat

SEQ ID NO: 225618 - DNA, 374 bp, Gossypium hirsutum
acccttccgattttttaaagaaagaacaacttttagtggaaacagccgctttcctccaacatggctagagggttgaagaaacacttgaagaggctcaatgcccccaggcattggatgctcgacaagcttggtggtgcattcgcgcccaagccatcgtctggaccccacaagtcgagggaatgtttgccacttattcttattctgcgaaacagactgaagtatgctttgacatacagagaagtgattgctattcttatgcaaaggcatgttatggtagatgggaaggttaggactgataagacctaccctgcaagttttatggatgttgtgtcaattcccaagacaaatgaagacttccgtcttctttatgacac

SEQ ID NO: 225619 - DNA, 385 bp, Gossypium hirsutum
ggaaaacttctgaatctactcaagctgcataattacctggatcaagtgacagtgagggaggatgtgatgaacagagtcgagaagaaagagatgatgatgaaccaaatttgaaaagaaggaatactgcgccggaagctgcagtagtgttgtcgcacaagacggtcacagaaccaaaaattatcgtgcaaacaagaagtgaagttgaccttttggatgatggctatagatggcgcaaatatggacagaaagtggtgaaagggaaccctcatccaaggactattacaaatgcacgagtgctggatgcaatgttaggaagcatgtggaaagatcatcaactgacccaaaagcagttataacaacatacgagggaaagcataaccacgac

SEQ ID NO: 225620 - DNA, 380 bp, Gossypium hirsutum
cccacccttccgcccacgcgtccgttcttgcgtccgcccacgcgtccgcaaaaggggctctgtttgtgcttacttcggctattgcaactgttgccatctcatcccccagttcccagaagactggatcagtagtggggacaacaaaggcttctttccttacagggaagaaacttagatctgtgagaaagtacacaaaaccagctgccggaccaacatttccagtgtgcgccgccgccgaccccgacagacccctttggttcccaggcagcactcctgctccatggctggatggcagtctccctggtgactttggattccatcctctcggtcttgggtctgaccctgagacattgagatggcacgtacaagcagagctggtt

SEQ ID NO: 225621 - DNA, 380 bp, Gossypium hirsutum
attacctaaaaaaacttcatcgactgccgctcaaactccgcccaaacaaccgtggtggccaccgtcatggaaaacacagacgaactcaagagggtgttcgatcaattcgacgccaacaaagacgggcaaatctctattacggagctccgcgacgtattgaaggcaatgggatccaactactcagaggaagagttcaagcgtgtcatggaagacatcgacagcgatcaagacggttacatcaacttctccgaattctccactttctggtccacttcttccgacgccgttaaagccgcttcggagttgcgcgaggccttcgatttgtacgatcagaacaagaacggcctgatctcggcaaccgagttgcaccaggtcttgaa

SEQ ID NO: 225622 - DNA, 355 bp, Gossypium hirsutum
caagcctatggttgtggagactttttctgagtacctaacacgctgactgcggggtgttaattacatgcttgacaactgggctgttggaagctggtatctcaaaggatggtcagacacgtgagcatgctttgcttgcgtatacccttggtgtcaagcagatgattggctgctgcaacaagatggatgcaacaactccaaaatactccaaggcaaggtatgatgaaattgtgaaggaagtctcctcatatcttaagaaagttggttacaaccctgacaagatcccagtgtgtccaatctctggatttgagggtgataacatgattgagaggtctaccaaccttgactggtacaaggg

SEQ ID NO: 225623 - DNA, 351 bp, Gossypium hirsutum
tttgtgaaccccctacatggacccacgcgggttctaaatccaaacaacaaagttgtttgaattaagttgtctgggaaaaaaaaaaacccattcttttttgatctctgctccaaaagttgtcaccctttaatctctcttcggctcctcttcttagattgaagaatcaaggttagattttaaggcacaatgcggttgtttccatcaaattcgagtgtgaaaaagaggcagagtaatgggggaagcaatggtgctttgttgtatctcaatgtctatgatctcacacctatgaataactatcttttctggttcgggcttgggattttccactccggtatcgaagtttatggtttg

SEQ ID NO: 225624 - DNA, 384 bp, Gossypium hirsutum
gagcaaaggaaattaaatttttttttttttttctctttgtcgacctaaggcgcgtttatttgcttctttcaccatgaccaagcagcaggctaactggtctccttacgacaacaatggaggatcttgcgttgcgatcgctggagctgattactgtgttatcgccgccgatactcgaatgtcaaccggttacaatatactgacccgagagtactccaaaatctgtaaacttgcagataaatgtgtcatggcatcctcaggatttcaagctgacgtgagggctttacaaaagcaactggcagctaggcacttgatttatcagcatcagcacaacaagcaaatgagctgccctgcaatggcttaattgctttccaacacactttatta

SEQ ID NO: 225625 - DNA, 381 bp, Gossypium hirsutum
cccacgcgtccgcgaaaacttccaaattttcatctctttcactcacaaacaggcacctccaaatccaatggccgctgcagctccaccgccaccaccatccgccgcccctgaaccttccatggcagcacctgaaacaaccccgataggccaccccgtcttcaccaggatccgcctagccaccccttcagacgtccctttcatccacaaactaatccaccaaatggccgtctttgagcggctgtcccacctctgttccgccaccgaatcctccctatcttccaaccttttcctctcccctcctttccattccttcacaatttttctactcgaactttcctcttcccccattcctccccttctttccccttccccttctttcac

SEQ ID NO: 225626 - DNA, 373 bp, Gossypium hirsutum
cccacgcgtccgcccacgcgtccgtccacgcgtccgaatggattgagacatatgggggcagttcactcttggaaactgtgtataaggctctagatgaggtgagcataacttcaaaagactacatgcaagtttcagctagtgacggttttaaaatgcctaagatatgcaggttgtgaatctctcggagtgtgaaatttacagttataatccggactctgatgcagatccctttctggagaaaggggcaatatggtccttcagtttcttcttttacaatagaaagttgaagcgtgttgtgagtttcagcttttgctgcttaagtaatttggtgggtgatggattccttgttgacaacttatgttctgaggaagat

SEQ ID NO: 225627 - DNA, 380 bp, Gossypium hirsutum
gccaatatcaaaagacttcccttttagctcacagctcctctcttgagtactatgatgggtaaggagaaggttcacatcaacattgtggtcattggccatgtcgactccgggaagtctacaaccactggtcatttgatctacaagcttggtggtattgacaagcgtgtgattgagaggtttgagaaggaggctgctgagatgaacaaaaggtcatttaagtatgcatgggtgcttgacaagcttaaggccgaacgtgaacgtggtattactatcgatattgccctctggaagtttgagactaccaaatactactgcactgtcattgatgcccctggacaccgtgacttcatcaagaacatgattactggtacctcacaagc

SEQ ID NO: 225628 - DNA, 382 bp, Gossypium hirsutum
aaaaaataaccgtaaggaaccggataagagccggagggtaaggttatctgaaagggcgtcgtcgtttcacgggagaatccagacgatggaaccggtggagctgaggcggccgaagacgcttcccgacctgcttccagagaggtctacttcactctcatccgatgcgaggccgccgaagttgacgaagctgctattgaacgtgacgattcaagggagcctcggagccgtgcaagtggtgatgtcaccggaaaaaactgtcggtgacttaataacggtctccgtcaggcagtactcgaaggaaggtcggcgaccgatgctgccgccaacggacgccgcgctattcgatctccattattctcaattcagcttagaaagtttggga

SEQ ID NO: 225629 - DNA, 388 bp, Gossypium hirsutum
ggagatggcaaaagggtggccggttaaactgaaagatgaacggcatgaggagcatgagctggtgctcactcgtcgcagtaattatgtctgtgatgcatgcaaggaaaacggacaagtctggtcattttactgtgaagaatgtgaactttgatctacatcccaaatgtgccctggagaaagaaaccaaagctgatgcaaaagaaggttgggtctgtgatggggaggtctgcactagagcttcatgaattatgtccatgtatacaccaacacactagttggctgtcctgttgatgcagcgtggatcatatgtgtgctatgtaataagatcttgagatgcagtgttgaaagactttgttatctatattggcccaatcctgtttcctggttt

SEQ ID NO: 225630 - DNA, 373 bp, Gossypium hirsutum
ggcaaccaaacctagctctgtagctttactcacagtgaactggtcaaaaactcggatcataccattaggggggtgttacaggaatttaactaactaaactgcattgattgaacttaagagcggatctgacaaccacggcacacatcacaagagaaagatggtggcatgaatacacatttgaggatggagaaactaacgctcaagggaaaaaacacagatactctagaccatctgagagtgcagcgtaacaacagttcgttgttatattcttactgacatgatcgaatctggtaactgtgcttgcggaggagacacctagagttaaacctaagaagacagctgcaggacagccattgggatgtagtatgcgtac

SEQ ID NO: 225631 - DNA, 385 bp, Gossypium hirsutum
  unsure (1)..(385): unsure at all n locations
tccgcttctctagaggtctggtctactcaacactctctcctccctcttagcaaccaaagactcagatccgctcggatttctttgtcccagaactagaatggagacctttctattcacatcagagtccgtaaacgagggacaccctgacaagctttgcgaccaggtctctgatgctgttctcgatgcctgccttgcccaggaccctgacagcaaggttgcctgtgaaacatgcacgaagactaacatggtcatggtctttggagagattaccaccaaagccaacgtagactatgagaagattgttcgtgatacatgccgctccattggatttgtttctgatgatngtggtcttgatgctgacaattgcaaggtcttggttaacatt

SEQ ID NO: 225632 - DNA, 386 bp, Gossypium hirsutum
atcaccatggcaacctctgctatctaactatctgctttcgctggccaaacagctttggagcagtccaatgagctcgtctgcaagatcggtgccgtcggtggtggtcgcgtttccatgcgtagaaccgtcaaaagtgctccaaccagcatctggtatggccctgaccgcccaaagtacttgggtccattctctgaccaaatcccatcatacctgaccggtgaattccctggggactacgggtgggatactgctggattatcagctgacccagagacatttgccaagaaccgtgagcttgaggtgatccactgtaagtgggctatgcttggtgcccttggctgtgtttttccttgaattctttcaaagaatggtgtcaagttcggaga

SEQ ID NO: 225633 - DNA, 378 bp, Gossypium hirsutum
cccacgcgtccgcccacgcgtcctttctattgaggttctagttgagcttgcttgtcttcagacatcattcttgacacttgacgaggcaatcaagactacaaatcgcagggttaatgctttggagaatgttgtgaagccaaggttggagaataccataagttacatcaagggagagttggatgagcttgaaagggaggatttcttcaggttaaagaagatacaaggttataagaagagggagatagagagacagcttgcagaggccaagctgtttgctgaggaacaggttgcagagaaggtttccttgagaaaaggggtctctataaattcagctcacaatatgctatctgcagccagggagaaggatgaagatattat

SEQ ID NO: 225634 - DNA, 362 bp, Gossypium hirsutum
cccacgcgtccggttgaaagcaatttgtagtaatgaaggagccattatcggggtgggcctaccatgttatagtttcttgcagaccctcctggtttctatcagatccgggtctaatggtttgttaatgcttgataatgtcgaaataaacagtctgaatcgaccaaaagacaagctgctggattggttctttaacccaataatggtgctgaaagaacaaatcagggttataaaactgggagatggtgaagttaagctgttggagaagttggttctttttgggaccaacttagaacgtatggatgcttgggacaatggcagtatagttcctcaagattctcttagagctgcccaaatggaaggca

SEQ ID NO: 225635 - DNA, 319 bp, Gossypium hirsutum
gttctttattaacaaaatggctcaggcaatccggggcggggagctgaacaccggagctaagatcccctctgtaggactcggaacctggcaggcttctcctggcgtagttcgctgctgttgctgctgctatcaagatcgggtatcggcatattgattgtgctcaagctgacaatgaaaaagagattggttctgttctgaaaaaattgtttgaagatggtgttgtgcgacgtgaagatctttggataacctgcaaactctggtgcactaatcatgcaccggaagatgtaccggttggcgttaataacaccttacaagactt

SEQ ID NO: 225636 - DNA, 403 bp, Gossypium hirsutum
ccgggcggaccaacccgtccggaacgaacatgtagttcaataaaatttgtaagactttgtagtgaaccagatcaaagagctggtggtcctacagcaaattctggtgttgcacctgatgcagctgaaatacagcttaaaagtccaaattggctatttggccaaagaaagtttgaagaagttggctcaggccccaaagtctctgtgcgcgaaattaaaaatggaggggccaatggtgaaatgaaacttgacgatttctgtgacttaaattggctttcttcctatgttgatgatgaacaggatattttccagaggtacctctcaatgacgtctgttgatgaagccaatggttggtatggtggaacacttcttggtgatcaagatgaaagcagtgagatatataggc

SEQ ID NO: 225637 - DNA, 362 bp, Gossypium hirsutum
tccactcatccgcaaaacgtcttgttttatactgaattctcccctttctcacctggctcttgtttgattgctttctttgtttcaattaaattatctcccaatttttcttttttagttttctttatttttcctctccttgatcgttgttagctgcaaaaaggttacgtcagaaatggattttttcttcagaggcctaaatgaggaattttcatcttcccaaatggacattcttagatgtccattttcgagaaacatttacgagccaactaacttttccttctcgtctgccttgccttttcccatgccggtgcgaggagccaaaggaccaatatttgaagatggacccaatttccacatggcat

SEQ ID NO: 225638 - DNA, 368 bp, Gossypium hirsutum
tccacgcgtccgtccacgcgttcgttgttttccttgttctcttctacattcagcgaaggggtgctctgagatcacataccaaaatggtgaaggccgctgccgtccttggcagcaatgaaagtgttagcggaactgttttcttctcccaagaaggagatggtccaactaccgtgactgggaacctttctggtcttaagccgggactccatggctttcatgttcatgcccttggggacacaactaacgggtgcatgtcaactggaccccattttaatcctgctggcaaagagcatggtgctccagaagatgagaaccgccatgctggtgatctagggaatgtcactgttggtgatgatggctgtgcaagc

SEQ ID NO: 225639 - DNA, 375 bp, Gossypium hirsutum
cttcgtaagactctaaccggcatgtacgatcactctcgaggtcgagagcgccgacacgatcgacaacgtgaagaccaaaatccaagataaggaaggcattcctccagaccagcagcgtctgatcttcgccggaaaacagcttgaggacggccggaccttggccgattacaacatccaaaaggagtcaactctccacctggtccttcgtttgcgcggcgggatgcaaatcttcgtgaaaaccttgaccggcaagacaatcactctcgaggtcgagagctccgacacgatcgacaacgttaaggcgaagatccaagacaaggaaggcatccccccagaccagcaacgtctcatcttcgccggaaaacaacttgaaga

SEQ ID NO: 225640 - DNA, 388 bp, Gossypium hirsutum
cccacgcgtccgcggacgcgtgggtttgaggttgaagctctggtgtacttgtggaacctgccaggcttatcttacttccagttggaccaaagatttcgataatctttgtgatggtatactaacttcctaaaaattctgccaccggaaccatccatatccatgttcttggcaatatcatcactgcaaattctgccaacgtcgagcacatgcttaaaaccaggttaaaactacccaaaagggaaacctttctccactctcctgggtgatcttcttggtagaggtattttcaatgttgatggtgattcatggaagtttcaaaggaagatggccagccttgagcttggtggcgtctccgtaagaacgcacgcttttgatatcgtcgggtcag

SEQ ID NO: 225641 - DNA, 405 bp, Gossypium hirsutum
ccgggcggccccacccgtccgaaaaaagctttcctacagcagcgctcaattttttatcaatccagagtttgaatgtggagtgaacaaatcaatattaagataagagaaatggctcgctctctctccaacgctaagcttttctctacttttgttgtcgatggaatctctaacgttatctccagacgaggatatgcggcggcatcacaaggaattgtgtcgagtggaataagaggaggagcgggaaggagcgctgctacggtggccaagaaaacaggggaagagatgtctcgcggagctaaagagaaggtttcgtgggttcccgaccctgttaccggatgctacagacccgagaactgtcccaatgagatcgacgtggccgagctcagatccatgctcttgaagaag

SEQ ID NO: 225642 - DNA, 419 bp, Gossypium hirsutum
  unsure (1)..(419): unsure at all n locations
cgggtngggaaggaacggggcggaccaacccgtccggggacgcgtgcggacgcgtggggtttatccaaagaattggtatcccattcctcttatgttctgccggccttggggtaagctgccagaaaatgtaccttgccatccaaaacttgccgactttgctaactgcatgaagaagaaaggccgtggaatgtccatatttatcaatatactagatggggactatcatgaacgtgctgaagatgcgaaggctgcctgcaaacagcttgatacctacattaactacaagaattgtgaaggtgttgcagaaatagttgtggcacccaatatgagtgaaggcttccgtggagttgtgcagacaatgggtctcggcaaccttaagcccaatattgtagtgatgcgatacccagaaatatggcgtc

SEQ ID NO: 225643 - DNA, 366 bp, Gossypium hirsutum
gtcggtggtacacgtgtccccaagatcttaccttccttgttcaaaatggatcaagacggtaacggaggggtcattatcgactcaggcacgtccgtaactcgcttgactcaacccgcttacacggcaacgagggatgcattccgtctcggagctacaaatctgaagcgggcgcctgatttctctttatttgacacgtgctttgacttgtcagggcagacttccgttaaggtcacccgcttgtgttgcattttagaggagctgtcttgtcactgtcggcgaccaactatttgatcccggtagatagcagcgggaccttttgctttgctttcgcgggtacaatgaacgggttgtccatcattggaaata

SEQ ID NO: 225644 - DNA, 332 bp, Gossypium hirsutum
cccgtttacccgcccgagaatcagtcccagttcgccatggcttactacgtcatggactgttccaagctccgtatttggaagttcgtggagtacagtaagatgatatacctggacggggatattcaggtgtacgagaatattgatcacctattcgacttgcctgacgggcaattctatgcagtaatggactgtttctgtgagaaaacgtggagtcataccccacaattcaagatcggttactgccaacagtgccctgacaaggtcaagtggcccgccgagatgggtcagccacctgcactttacttcaatgctggcatgtttgtgtttgagcc

SEQ ID NO: 225645 - DNA, 232 bp, Gossypium hirsutum
cccacgcctccatccacgcctgtgtctcacacatacgactaagacttcatgggtgacagtgcccaaaaaacgtacgacataatcgatgacacccctgcagagcgagcccgaggcatcacatattaacaccgccaccgttgaatgccaaacccacaatcgtcattacaaacacatgaactgcccagcgcacgctgattatcggaaaaacatgattaccggagctgcccaaatg

SEQ ID NO: 225646 - DNA, 372 bp, Gossypium hirsutum
attattttggacctctcaaaaaataatttttctggcccaataccatcttgcttggatgcacaatctattgaacatctccatttgagcaagaatagattaagtggaaccttgacaaatgcattctttaacagctcttccttggtgactttagatcttagtgaaaaccagttgactggggaaattccatacgggattggaactctttcggctttaagtgtcctccttctaaaagccaattattttatcggagaaattcccactgagatgtgccaattgtattcgttaagcatcattgatctttctcaaaataagctttttggttcgataccttcttgtttgagtcatctaactcttcagccaaattatgaaaaa

SEQ ID NO: 225647 - DNA, 346 bp, Gossypium hirsutum
cccacgcgtccgcccacgcgtccggaaatccccaaatcaaaatcttccaccgttgctgtgttgccatactgatccctaatcctcagcatctctctcactgcatttcttgcttctctaaatctccatctctaaatctccttctctaaatctccatccttttgattttcgccgaaatctaaaaatataaattgaagagtaaaactcttgagctttccctcgcatcagtgattcacatgagagctatggcgagtgagcaaggcatgagtagttggaccgatcttctccactcatccaccaagcttcttgagcaagctgcttcttctgctcagtttcctcctcttcagag

SEQ ID NO: 225648 - DNA, 378 bp, Gossypium hirsutum
acccaggccagattggaaatggctatgcaccggtcctcgattgccacacctgcgacattgctgtcaagtttgcagagctcttgaccaagattgacaggcgatctggtaaggagcttgagaaggagcctaagttcttgaagaatggtgatgctggtatgattaagatggttccgaccaagcccatggttgtggaaaccttctccgcgtaccctccacttggacgttttgccgttagggacatgagacagactgttgctgttggtgtaatcaagagtgtggagaagaaggacccaactggagccaaggtgaccaagtctgctgccaagaagggcaagtgaacctcaggggattttgttgattcaacaaaagtttatcatg

SEQ ID NO: 225649 - DNA, 381 bp, Gossypium hirsutum
ggagaaatgtgggtatttgtctcattaactcctccaaaaagattttttcgggctcgagactagacattcccagtgcttggcaaatgcctcagggtgggattgatgacaatgaagatccaaaagttgcagccctcagagaattaaaggaagaaacaggtgttagctcagctgaagttctcgcagaggtaccttattggctgacatacgacttccctccagaagtcagggaaaaactgaaacatcagtggggatcagactggaagggtcaagctcaaaagtggtttctccttaaattcacggggaaagaagaagaaatcaatcttctgggtgatgggagtgagaaacctgagtttggtgaatggtcttggatgacaccagagc

SEQ ID NO: 225650 - DNA, 395 bp, Gossypium hirsutum
  unsure (1)..(395): unsure at all n locations
cgacttttctaanaaccattttcaattcaactgctttatttctttcatttcatntcatcaagggggggggaaaagcagagttgaaagatggggacttataggatgtgcgggtgctttactaggaagttcaaaatcattgaggcggcaccaccaccggatgttatagctgcattcgagaagtacgccgaaggtgggcctcaaatgacggcggagcagttgcataggttcttggtggatgtgcaggggcaaggcggtgccaaggtctccgacgcggaggagattctgctgcaggttctgcagaaacgacaccatatggcgaagttcagaaaacacgcattgaccctcgatgatttccatcattacttgttttctgcagatctaaatccgccaatcga

SEQ ID NO: 225651 - DNA, 345 bp, Gossypium hirsutum
ggaatttatgattatcggtgaaaactaggctgatgatagcttaattttgagcttaaggtccatccaatatgaacttgcctgggaaagatgcaggcaacttcaagctgaggatgttgtcgtgaagggcaaggttgttggtgcaaacaagggtggagtagtggcattggtggagggtcttcgagggtttgttcctttctcacagatatcatcgaaatccactgcagaagagcttttagataaggagctccctttgaagtttgtagaggttgacgaggaacagtccaggcttgtcttcagtaaccgcaaggccatggctgatagccaagcacagctcggaattggatc

SEQ ID NO: 225652 - DNA, 274 bp, Gossypium hirsutum
aagagagggagctgctgaacatgcttgtgtcggggatccaggccgatatagccgggtcgaaagatggaagcggcaccgttaaaacgattgctgaggcgattaaaaaggcgccggagcatagtactcgtcggatcatcatctacgtgaaggcaggaaggtacgaagaggataatttgaaggtggggaggaagaaaataaacttgatgtttataggtgacggaaaaaggtaaacagtgattacaggaggaaaaagtgtagctgagcacatgactac

SEQ ID NO: 225653 - DNA, 391 bp, Gossypium hirsutum
ctcaaaagcaattgtttgttagaagttcttcctaaaactgaatatgaaagacgtgtagagatgcaaaatcttgtgagagacatggcgttacatatcacaagtgcgaaacctcgattcttggtaaaagctggaatgggattaagggagccaccgaaggtgcaagaatggagcgaggatttggagaaggtttcattgatgtggaatcgggagttagaagttctgtatcccttggaaatgtcaccaccaaagtgtccgatgctcacatcattgttgctgcctggttgtggtataaagagcattccagaaggtttcttcaagcatatggatggactcaagattcttaatctttctcggaatcctatgaagagtctcccaaattccatatcaaatt

SEQ ID NO: 225654 - DNA, 383 bp, Gossypium hirsutum
agaagctgcacgcctcttcatttcataaactgaaatgtttgaccgagggatgtatgctggaccagttggttggtttggaggaggagaaagtgagtttgcagttggtataaggtcagcattagtggaaaaggattctggagcattgatatatgccggagctgggatagtagaacgcagcaatccctcgtcagaatgggatgaactagaactcaagacatctcagtgcaccaagttgcttcaactggaggttccccggcattcaaacgttgagaatttggaaatcatttattaacaaggttagtgatttagggtagaaatatatgattcagcacgtctggagatttggtttctttttgtttatcaattaacaagtttttaaaatt

SEQ ID NO: 225655 - DNA, 388 bp, Gossypium hirsutum
atttgttctctctctctcttattagaaattagacactactagacttgtagaaatgcaagggctcgtcttgttgccggtactcctttgcgccacctaccatatcgctctttccgcgaccaacgttacggtggcggacgggctgttagataatggtaactttgagcaagccccgaatgcctcaaacatgaagggcacggttgttgtggggcgttatgcaataccaggatgggtaaacgaagggtttgtggaatacataaagtccgggcaaaagcaaggggacatgttgctggtggtgcctgagggagcctatgcagtcaggttggggaacgaggcttcaatcaagcatgagataaaggtggcgaaagggatgtattactccatcaccttc

SEQ ID NO: 225656 - DNA, 310 bp, Gossypium hirsutum
cccacgcgtccggcccaaactcgccgtttttcttggcctcggcgatcagatgccggacgtgattgaagaattgatcagcaagggacagcagcttgatgcagttcattttacttatgaagttggccttgtggacaagttcccccctgtgcccctgctgaaatctttcttgagggatgcaaagaaggctgcatcttctattttagatgatcccaataatactggccgggctgcgcaacttgctgcacgcaaagagcaatcagcacttcgggctgtcatcaagtgcattgaagagtacaaactcgaggctgag

SEQ ID NO: 225657 - DNA, 386 bp, Gossypium hirsutum
cccacgcgtccgcggacgcgtgggaaaaaaaaaagataagtgaaagatgtcaactgctgcttcattgtgttcatcaactcagattaatggctttggagggggacttggggttctaagaacccatgtttctcaacccaagacactttctttcacaagaaggagaatttctacggtagtgaaggcaacatctcgagttgataaattctcaaaaagcgatatcattgtttctccatctattctctctgctaatttcgcaaagttgggggagcaggtgaaagcagtagaagttgcaggctgtgattggatccatgttgatgtaatggatggccgatttgttccaaacattacaattgggcctcttgtggttgatgctttacgacctgtga

SEQ ID NO: 225658 - DNA, 366 bp, Gossypium hirsutum
cccacgcgtccgcggacgcgtttgtccagatagcccgtatgccggtggggtgtggctagtcaccattcatttccctccggattatccatttaaaccacccaaggttgcattcaggacaaaggtatttcaccctaatattaacagcaacggtagcatttgccttgatattttaaaggaacagtggagccctgccctcaccatatccaaggtgttgctgtcaatctgctcactcctgacggatccaaatcctgatgaccctttggtgccggagattgcccacatgtacaagacggataggaacaagtatgagacaaccgctcggagcttgacccaaaaatatgctatgggttaaagtgctactacgta

SEQ ID NO: 225659 - DNA, 380 bp, Gossypium hirsutum
cccacgcgtccgcccacgcgttcgtttagtcgtatcagacgcttttctccgcttgtctgaaattcccttgctatcgttttctggaagaaaattttttgagatggcccgtacgaagcaaactgctcgtaagtctaccggcggcaaggctccaaggaagcagcttgccactaaggctgctcgcaagtcggcaccgacaaccggaggcgtgaagaagcctcaccgatatcgccctggaactgtagctctgcgtgaaatccggaagtaccagaaaagcactgaactcctcatcaggaaactgcctttccaaaggctcgttcgtgaaattgcccaagactttaagaccgatctacgtttccagagccatgctgtattggcgttgc

SEQ ID NO: 225660 - DNA, 380 bp, Gossypium hirsutum
caaggatatggtggatgtgcttttgtaacttgctgatgatcccaatcttggtgtgaagcttgaaaggcatggagtcaaggcatttagtcaggacttgatagctggagggaccgagagttcagcagtgactgtggaatgggcaatttcagagatgttgaagaagccagaaatatttgccaaggctacagaagaactagacagggtaattggcagggaaagatgggtagaagaaagggacattgtgaacctaccttacatcgactcaattgccaaagagactatgcgtttgcaccctgtggcacccatgctagtgcctcgcatgacccgtgaagattgtcaagtagatggttacgacattctcaagggcactagagctcttg

SEQ ID NO: 225661 - DNA, 373 bp, Gossypium hirsutum
tattgttcatctaagtccaaggagctttagctgcaaggttatggggaagaagctggactcgttgcttggaagagggttcaagccctacaagttgaaatcacttattagtgttgccctttctcgtctttccgttttcaagaatcggcgtcagattcgcagcaaccaagctcgctctgatgttgtggagctccttcagctcggccaccatgatcgtgctcttcttagagcggagcatgtggtgaaggagcaaaacatgttggacgtgtttgttatcctggaagggtattgtaatctcctcattgaaagactccatctcatagaggaagacagagaatgccctgatgagctgaacgaggcaatatgtggcttgctc

SEQ ID NO: 225662 - DNA, 382 bp, Gossypium hirsutum
cttgggttctattgagattttgctgtgttggcattgccccatatggtatggttacaaaggaagattgaggcttctggagagactggcatacattaacaccattgtttaccccctcacctctattcctttgcttgcttattgtatgcttcctgccttttgccttctgacaggaaaatttatcattcctgagataagcaactttgctagcatgtggttcattctccttttcgtctccatttttgctactggaattcttgagcttagatggagtggtgtcagtatcgaagactggtggagaaacgaacagttctgggtcattggtgggacatcagctcatctctttgctgtttttcagggtcttctgaaagtgcttgctggaata

SEQ ID NO: 225663 - DNA, 384 bp, Gossypium hirsutum
cccacgcgtccgggaaagctcttattattatacatgctggattttaactctcactggcgtctctcaatggactgggattggttgtttgagttcctaaaaggcatggtgaagccagtggctgcccttaccgtcgtcctcttagccgtgctcttgtctttcatgcaaaacctgggcttggaaaaagagatgatttattccattttcagagcttttcttcagctttctattattgggtttgttcttcagttcatatttaaccaggacaacagtggctggatcgttcttgcctaccttttcatggtttcagttgctggatatacagcagggcaacgtgccaaacatgttccccgagggaagtatgttgctggagtatctatcctggct

SEQ ID NO: 225664 - DNA, 378 bp, Gossypium hirsutum
gtttaacatacatggggaagaacgaaatgccgatcgtgtttccttttgcatgggggcttaaaaagttggacctcctctatgcattactcgacacggaagatcactgcttgttgattcaacgatgccccaacttagaagttctcgaggtaaaactgcaaacctataattttttaatattttgctgcatcgctttcgtgtaattgcaactcttgagacactgcaaaatgctgaaattccgagaaatattctaggacattatttgtcattgtagttttcaatcatgtcttatcgaatatattttctggatgaacagacgaggaatgttattggagatagaggactagaagttcttgctcaaagttgtaagaaactaacgag

SEQ ID NO: 225665 - DNA, 360 bp, Gossypium hirsutum
gaagacttgataaaagccgaggccaaagccgtgcctgctcaaaaggaaaaagctgttgagtttaaggtgactgctactataactatcaggaacaagaacaaggaagattttaaagagactttagttaagcatttcgatgcttttaccgacatgatcggaaggaatgtcgttttggaactcattagtactgaagaagatcctaaaaccatggctccaaagagaagcaaagaagcagtgttgaaggattggtccaagaaagcaaacgttaaagccgagaaagtttattacacggcggaattcacggtggactcgaatttcggagtgccgggtgctatcacggtgaccaacaagcaccaaaag

SEQ ID NO: 225666 - DNA, 382 bp, Gossypium hirsutum
cggacgcgtgggctgacgcgtgttttgacgcgtgggcggacgcgtgggagcctgccaagcatttaaacaagccttggttacagcgcctgtgttggtacttccaaattttcagcttgaattcactgtggatacagatgtgagcggcgggggcattggtgcagttttgcaacagcagggtaggccgatagcattctttagcaaagctcttggggtgcgacatcgagctttatctatttatgaaaaagaaatgctggtagttttactagcagttcgaaaatggcatgcttatttggtggggcgccattttaaaattcgcatagatcatcaaagcttgcgttttttgtaggatcagatggctattactcccttctacagcgttggg

SEQ ID NO: 225667 - DNA, 383 bp, Gossypium hirsutum
cccacgcgtccggtcaacaagtatgtcgagctatggattgtcaaaacttggtacaactttactgtttggatgatgatgaagcttggactctgtttgaaaagaaagcaggtctagatgacttttctgatgattctattaaaatcctagcaaatcaaattgccaaaaaatgcgggggtttgcctatagctatagttccactgggaagtgccttgaaaggtaaaacccatcatgagtggcaagctgcatacgggagactcaaagatcgtagattgactgaaattgaggatgttaatgaagaaaatgcctatgtatgtcttgaggcgaccatcgactacttgaagaatatggagaccaagacatgtttcttattttgctctttattt

SEQ ID NO: 225668 - DNA, 402 bp, Gossypium hirsutum
  unsure (1)..(402): unsure at all n locations
cggggcggaccaaggcgtccgggttagtccaccactaataaagtcttctttactggagtctgaaccctggcgaaggaggtcgggttatggtgtccaaccagcttgcattgagccttcctgcatccagccatcttgtctcgcccctacgacatgtttttcaccccgtttcttttcatcaaaatccaaaaaagatcgcaaacccaagaatgatatggggaaccaagtcagtccattgcccgagcttattgccgagccaacanatgctcgctccatgtcattcgtgggaacccacgagtccttggcgcctgaaattatcaaaggtgagggacatggaagtgctgttgattggtggacattcgggatcttcttatacgagctattgtttggtaaaactcctttcaa

SEQ ID NO: 225669 - DNA, 389 bp, Gossypium hirsutum
  unsure (1)..(389): unsure at all n locations
cgtttcattccaagaccaggctncttcctttttttctttctttgtttcaggtacgaggtgggtggtaagctttgaagacgtccatggaggaaacagatcattctttagaagttttgatgaagaagagaatggagatgaagatcttgatgagtattttcatcaacctgagaagaaaaggcgactcactgttgaccaagtccagtttctagagaaaagtttcgaggttgaaaacaaacttgaacctgaaaggaaaactcaactagctaaagaacttgggttacaaccccgtcaagttgccatttggtttcaaaaccgccgtgctcgatggaagactaagcagcttgaaaaagactatgacactttacaagctagctttaataccctcaaag

SEQ ID NO: 225670 - DNA, 381 bp, Gossypium hirsutum
ggagaatccccccagctgtccctgtgtaatcatgttcttgtctggcggacaatgcgaggttgaagcaaccctcaacttgaacgcaatgaaccaatctccaaacccatggcacgtctcgttctcgtatgccagagctctccagaacacttgcttgaagacatggggaggcagacctgagaacgttaaggctgctcaggattcacttcttgtccgtgctaaggccaactcacttgctcagctcggcaaatacaccggcgagggagaatcagaggaggccaagaaaggaatgttcgtaaagggatatgtctactaagctgctgcaaacaaagcttagctgagatgatggagatttcatgatatggtttctctttcattctcatt

SEQ ID NO: 225671 - DNA, 382 bp, Gossypium hirsutum
cttatgcaatatggttgttgaagctggtggaaagaatggtgttgttcccggtgacagtactacatttaagtaccttgaggataaaacaacggtgccgtatgaaccagtttacagtgatgcgcaagcaagttttctttctgagtacagattcgatatctcgaaattggagcccttggtagctaagccacactctcctgataaccgagctttggctagggaatgcaaagatgttaaaatcgacagagtgtatatcggatcttgtactggtggaaaaacggaagattttcttgctgctgctaaagtctttctagcttcaggcaagaaggtcaaagttccgacattccttgtccctgcaacacaaaaggtttggatggacatatat

SEQ ID NO: 225672 - DNA, 382 bp, Gossypium hirsutum
cggacgcgtgggttcgatttttgttttaagagtcgccctttggtgttttggtaggtcaatcagtgaggtgaagaaaaatgtcttgctgtggtggaaactgcggttgcggctccggttgcaagtgcggcggcggcggcggctgcggctgcggcggttgcaagatgtaccctgagatgaactttgctgagcaaaccacaactgagacacttgttcttggcgtggcaccccggaaagtgaactttgatggagctgaaatggaaactggggctgaaaatggctgcaaatgtggagataactgcacttgcaacccttgcaattgtaaatgaggggaaaaaaaaaaccgaagcatattatggaagctgatctaaataatatatgatgt

SEQ ID NO: 225673 - DNA, 385 bp, Gossypium hirsutum
aagaactcaaaacataaactaacttacaacaacaaaattccccaacttaggtatatttaaaaaaaaatcatgggaagaggtagggttcaattaaaaaggattgaaaacaagatcaacagacaagttactttttccaaaagaagagctggtttattgaaaaaagctcatgagatctctgttctttgtgatgctgaagttgctttaattgtcttttcccataaaggcaaactctttgagtactccactgattcctgtatggaaaagatacttgaacgctatgaaaggtattcctatgctgaaagacagcttgttgctactgaatctcaacctcagggcaactggtccatggagtataatagacttaaggcaaaggttgacctcttgc

SEQ ID NO: 225674 - DNA, 385 bp, Gossypium hirsutum
caaaggtgggattcaaaagactcgtttcttcgatcgtttaattcttcattcttggaagatgtcgtacactaagaggtcaaggtattcaagttctccttccccaaacaagcgatacacccggtctgtgtcaagatccttgtcgagctcaaggagtcggtcccggagtaagagtaggagtgctgaaagtgatgttgaaaatcccgggaacagtttgtatgttactggcttgtcacctcggatcaccaagagggagttggaaaagcattttgcaagcgagggaaatgtgatcgatgttcaccttgtggttgatccaaggacaagggactctcggggatttgggtttgttacgatggctaccaacaaagaagctgatcgttgcattaag

SEQ ID NO: 225675 - DNA, 385 bp, Gossypium hirsutum
cttgtttaaaatataagaaaaaagtcatacgcaatgagcactgccggtcaggtgattcgttgcaaagctgcggtggcatgggaggccgggaagccactatctatagaagaagtggaagtggcaccaccccaaaaacatgaagtccgtattaagattctcttcactgctttatgtcacactgatgtatactactgggagtgtaagggttacactcctctgattcctcgtatacttggtcatgaagcctcagggatcgtggagagtgtgggtgagggtgtgaatgatatgcaacctgaggatcatgtgcttgctatcttcaccggagaatgcaaagaatgtcgccactgtctgtcagaagacagcaataacatgtgcgaactgctta

SEQ ID NO: 225676 - DNA, 378 bp, Gossypium hirsutum
cccacccttccgcatagggatgattttttcaaacacagatacttttggagaagggtgggtcgctgatgcgcatctcttaccttcagcagctgttggacagaagaccggggatgcaatcaagaaatatatatcttctactcgtaatccaacagccaaaattggtcctggaaccacaaagttgggcgttcaaccatcaccagtggttgcagcattcagttctagaggtccaaacccagtcactccagcaatacttaaaccagacattattgcaccaggggtcaatatcctagctgggtggactgctgctgttggtccgaccggattacagagtgacccaaggcatgtaaacttcaacatcatttcaggcacatcaatgtc

SEQ ID NO: 225677 - DNA, 381 bp, Gossypium hirsutum
cggacccgtgggcaagattgggtgttgtttgatgtggatattgtggagattcaggtggagtctccagggagtggtctacggccctcggcccctcctgctgttcctcacgctgattccttgaacttcgaacctacttcaccttctgcagtttctgccaaatctggacacttttcaagacaagagtcaagtgatccatatgtgggttcatcacctccaaaatccgaaggtaggacaatatactaccatgtagcggatgaaaatggtgaggttgatgatgaggcagtagaggggtactcttctagttttaagggcaatggagtggatgaactaactcataaattgaaggaaaagacgggccttgaagatgttgtggtgtgcact

SEQ ID NO: 225678 - DNA, 383 bp, Gossypium hirsutum
gaaaaactacttgtttataaacatatgttcaatgggactctttattctttgttgcatggtaggggtggtgacatggattggccaactaggttcaagattggtttggttgcagcaaggggtctagcttggttacaccatggatgtcatcctccatttctgcagcagaacatctgctccaatgtgattctcgtcgacgaggacttggatgctcggttaatggactttggattagcagggctcatgacttcatcagatgttaatgagactagttttatgaaatcggatctaggcgaattcggttacatagcaccagagtattcaagcacgatggttgcttcacttaaaggcgatgtctacggattcggtgtcgttcttctcgaatt

SEQ ID NO: 225679 - DNA, 356 bp, Gossypium hirsutum
cccacgcgtccgggagtatctggctccccctcttcagttcctctcaaattgcgtgcgttgttctcttccttatccaaagcttggataggttaatcctctgtttgggttgcttttggatccgtttaaaaaagatcaagccaatccccaaacaagacgctgttgcagatcttgaatctggggaaaatggtttcttcccaatggtcctcgttcagatccctatgtgtaacgaaaaagaggtttaccaacagtctattggtgctgtttgtaatttggactggccaaaatccaaaatcttgattcaaattttggatgattctgatgatccaaccactcagctgcttattaaagaggaggtg

SEQ ID NO: 225680 - DNA, 383 bp, Gossypium hirsutum
cggacgcgtgggcggacgcgtgggttgatggtctgttccggacaagcgtacctggaatatttgcagtgggagatgttgcagcattcccccttaagatgtatgaccgtgtagcacgagttgaacatgtttatcatgctcgtcgatctgcacagcattgtgttaagtcattacttagtgcacaaactcacacgtatgattatctgccctacttttactcgagggtttttgagtatgaagggagccccaggaaagtttggtggcagtttttcggggacaatgttggagagacggttgagattggaaattttgatccaaaaattgctactttctggatagattctggtaaactgaaaggagttcttcttgaaagaggaaatgctgag

SEQ ID NO: 225681 - DNA, 386 bp, Gossypium hirsutum
caaaatcaactgcttcacaatggcctctacaaccatggctctttcttccccatgagtcgccggtaaggcagtgaagttctccccttccacccctgaaatccagggaactggccgtgtttccatgaggaaaaccaccaagcctgttccttctggtagcccatggtacggtcctgaccgagttttgtacttgggtccactttccggtgagccaccatcttacttgaccggtgagttccctggtgactatggttgggacactgctggactctcagctgatcccgagacctttgctaggaaccgtgagctcgaagtcattcactgcagatgggccatgttgggagctcttgggtgtgttttccctgagctgttggctaggaacggtgtca

SEQ ID NO: 225682 - DNA, 365 bp, Gossypium hirsutum
ggttcttgatattaggaccccagctaattaaggaattttccgcatccagtgccgaggtggaactatatttaggcaattcttgctgtctgagggttttgttgaaatccacacccctaagctgatagctggctctagtgaaggtcttgatgttgaaatggagatcaagaagcattactctgaggtgatggacattgtggaccgattatttgttaccatgtttgatagtttgaatgagaagtgtcggaaggaacttgaagctgtagggaagcagtatccctttgaacctctgaagtacaagccgaagaccctgcgacttacatttgaagaaggagttcagatgcttaaggatgctggtgtggaagttg

SEQ ID NO: 225683 - DNA, 379 bp, Gossypium hirsutum
  unsure (1)..(379): unsure at all n locations
tgaacagctggagatccaataccctgactacgttagagcagtagccaaattcagtgtgccattggcccatatgattattgctggtgctgactacattttggtccctagtagattcgaaccgtgcggtctcattcagctgcatgctatgcgatatggaactgttccgatagttgcctctactggtggacttgttgacacggtcaaggaaggattcacagggttccaaatgggagctttcaatgttgaatgtgatgaagtggatccaagtgatgtgattaaggtggtaaaaactgtcaagagagctcttgcaacatatgggactcaagcactgaaagaaatgatccagaattgtatggcacaagatntttcatggaaggga

SEQ ID NO: 225684 - DNA, 385 bp, Gossypium hirsutum
atggccaccaattcggtctttcctaaagtatacgttggctgctcaccctccgaagagggatgacggtgatggtaatgcagaggccaagttaggatcaggatgcctgtatgtcaaagttagtatggatggtgctccatacctgaggaaagttgatctcaaaatctatggcagctacaaagatctctcctcggcactcgaaaagatgttcagttgcttcacaatcggtcagtgtggttctcatggagtttctagcggtgatggattgactgagagccggttaatcgatctcctgcacggttctgagtatgtactcacctatgaagataaggacggtgactggatgctggtgggcgatgttccttgggagatgtttaccgactggtgt

SEQ ID NO: 225685 - DNA, 376 bp, Gossypium hirsutum
gacgtttctcaagtacaacagagatggcgatcttttgttttcgtgtgccaaggatcatactcccaccgtttggttcgccgacaacggcgagcgtctcggcacttaccgttgccataacggcgctgtttggacttgcgatgtctcaagggattcgacgaggcttataactggaagtgctgatcaaacggtgaagttatggaatgttcagaagggaactcaattatatacgtttaattttggttcaccggcgaggtcggtggagtttgccattggggataaacttgctgtcattaccacggatcccttcatggaattgacatccgctattcatgttaaacgcattgccggagatccaaccgaacaaactgaggaatct

SEQ ID NO: 225686 - DNA, 382 bp, Gossypium hirsutum
  unsure (1)..(382): unsure at all n locations
cccacgcgtccgcccacgcgtccgtttacgcgtccggaactcgaaaaaatttgcagtacaaatttcgcaaagggcttacttgatgttgcggacaatttaggaagggcttctacacatgttaaaggtagtttctctaagatcgatgaatccaatgacactgctggggctgtaccgctccttaaaacactcttagaaggagttgaaatgactgagaagcagcttggagaggtatttagaaagtttggagtggaaaaattcgatcctagaaatgaaccatttgatccacacaggcacaatgcggtattccaaataccggataattccaagcctnctggcacggttgctcatgttttgaaggcaggttacatgctctatgatcgag

SEQ ID NO: 225687 - DNA, 387 bp, Gossypium hirsutum
gagcctcttcgcatctcggagtatagtttcagaaaagtgagagagctgaaacgctggcgtcaaacaaatggctgtctcctcgtgttcctttcctcctagggttttcaatgcttattcttcattcgagtgccgttccgatcccgacttctccggtacgccgaccggggagaagcctcgcatcgggtctaaccgacgagtaacggcatcgttgttttgtacaggcggtgggggtttgtcgtctttgatctttcgtttccccccgaacttcgtccgccagctcagcgtcaaggctcgccgcaactgtagcaacatcggtgtcgcgcaagttgtcgcggcttcgtggtcgaacggtcccacttccggttacccctcatcggcggcggctgc

SEQ ID NO: 225688 - DNA, 383 bp, Gossypium hirsutum
ctcacccatggcatgatcttgagattggacctggagctccaatggttttcaactgtgtgattgaaatcccaaaaggtagcaaggtgaaatatgaacttgacaagaaaactggtctgatcaaggttgatcgtgtgctttactcatcagttgtgtatcctcacaactacggattcatccctcgcactctttgtgaagacaatgatcccatggatgtcttgatcattatgcaggaaccagttattccaggatgctttcttcgcgctaaagctataggtctgatgcctatgattgatcagggtgagaaagatgacaagattattgctgtctgtgccgatgatcctgagtatcgtcactacaatgatatcaaggaactcccacctcac

SEQ ID NO: 225689 - DNA, 412 bp, Gossypium hirsutum
  unsure (1)..(412): unsure at all n locations
gtcggaaaaccggggcggacccaggcgtccgcccacccttccgcccacgcgtccgttcattcgtccgtaaaaatcaaaaagccgaggcggctgttttcgctaccgctactgctattgcttctgctttggcgcagttcaccagggtttcttttgaaccccccccccccaaaaaaaaaaaacacacacgatgtctcgcgtgtacgtgggtaacctagacccacgagtttcggagcgggatcttgaagatgagtttcgtgtctttggagttattcggagtgtatgggttgctcggaggcctcctggttatgctntcattgactttgatgatcacagagatgctgaggatgccattcgtgaattagatggcaagaatggctggagagttgagctttctcataactctagaggcaga

SEQ ID NO: 225690 - DNA, 392 bp, Gossypium hirsutum
attcccttaaaaagcttcatccacgtgttttccaaactccgcccaaacagcctatgtgggcaccgtcatggaaagcacggactaactcaagagggtgttcgatcaattcgacgccaacaaagacggacaaatctctgttacgcagctccgcgacgtattgaaggcaatgggatccaactactcagaggaagagctcaagcgtgtcatggaagacatcgatagcgatcaagacggttacatcaacttctccgaattctccactttctggtccgcttcttccgacgccgttaacgccgcttcggagttgcgcgaggccttcgatttgtacgatcagaacaagaacggcttgatctcggcaaccgagttgcaccaggtcttgaatcggctgggga

SEQ ID NO: 225691 - DNA, 388 bp, Gossypium hirsutum
ccggcattgacttcctcgttgggaattctcccaatatttccattcacaacgttggggtccccggcgatgtccccgattgtgtcaaacagtttttcactttcgacaagacacttagttactcaggccacttcaagcccttagctgcagttcaagttaccgagttggccgacggggtttttattgggtgtatagtgaatcacgctgtgaccgatgggacttcattctggcactttttcaacactttcgctgagatcaccaaaggggctttaaaaatatcgaaatctcccgattttggtcggaacaccgtgtttaattcccaagccgtgcttaaattccctcccggaggacccaccgttactttcgccggcgacgagccgttgagggaaag

SEQ ID NO: 225692 - DNA, 392 bp, Gossypium hirsutum
gaaaaaattttgaagagggtttcctttgttgccttgtgtgtggtggcactcgcggtggtgctgttttcgggtgaaagtcgcacggcggaggcagtgacatgtaatcccgtggagcttgccccctgctcgccggcgcttacgtcgtcctcgcctccatcaagcgcttgttgcagcaagctgaaggcgcagcagccatgcctctgtggatacattaagaacccatctcttaaacagtatgtcaacagtcctaacgctaaaaaggttgcttcgacttgtggagtcccatatcctaagtgttaaatgttgcttaatggtgtatctactatctactggcagcaaataagtgattctttttgctgtcaagtactgttctgaataaaagaataatgata

SEQ ID NO: 225693 - DNA, 355 bp, Gossypium hirsutum
cataaatacccttttaccaaaggagtatacattaaaacatagcccaactcttcggggtcttcaagcggaaaacagaaaactgaggctttcccttctcaaatggcaccgagggagaaaacggcggccgtcaagggtactgggaataataacgaggttcatttcagaggagtaaggaagcgtccatgggggcgttacgctgctgagatcagagatccagggaagaagagccgcgtttggctaggaacctttgatacggccgaggaagcagccagagcctacgacgccgccgctagggaatatcgcggcgccaaggccaagactaattttccggtcccttgtgagaatctcagcaaag

SEQ ID NO: 225694 - DNA, 391 bp, Gossypium hirsutum
cccacgcgtccgcctttttcattttttgccactctaaacaagcgactaagggggggggttattattattactcagggtgcccagatcactacgaggctcattatctggatgcctgctccgtttgcggcaaatcgcttcataattccgatattttcatgtacagagggaatacaccgttttgcagcaaagagtgtagacaagaacagatggagatcgatgaagccagagaaaagaaattgaaatctggccgatctcttagaaaatcggattcaaagagctctacacccaacaaaactgttcggacgggcattgttacggtgtcgtaattacatcttctttttttctttaaatgataattgtatcatcatcaattttgaaaaaaaaaaacgaa

SEQ ID NO: 225695 - DNA, 393 bp, Gossypium hirsutum
agatcctttcaagatggggatcgttctttgccctcagattgataatgagcaagtcaagaagatccttaagtacataaggtctggcaaaagtggagctactcttgaatctggaggtgaacaatttggctccaaaggctactatattcaacccactgttttctccaatgttcaggatgacatgttgatagctaaagatgagatatttggtccagtacaatccatctcaaagttcaaggatcttgaagaggtggtacaaagggcaaatgcatcttcatatggattggctgccggagttttcactcagaatatcgaaaccgccaacaccttgactcgggcattgcgagtcgggacagtatggattaactgctacgacatatttgatgctgcagtccc

SEQ ID NO: 225696 - DNA, 290 bp, Gossypium hirsutum
ttcgataataggatggataaccatttaaatcaagaataaaagaggaagaatgagagggaatttataggggaaccacataacatcaccgtagctgcggactgcttgtgagagagcaaagaggacattttcatagactgatcaaactaccatcgtgatccattaatggaacaacgttatagactcttacaccacgataacatgcgcatggacagacgagctaaacatggagcttactaggaacagtatggagacagtgtaaatgagttcatcggatgctaccatggactata

SEQ ID NO: 225697 - DNA, 377 bp, Gossypium hirsutum
atggatttcagtgttctcaatgtatattttggcctctaaatccttcaataagatggctgatatatgcgataatctcatgcttcaggtagcagccgagggcgttccttttcgagacgaatggcctttcgcaattcatcttctgggtcacatctacatcgatgatattaatagtgcaaggtttctttggaaatcaatacctcctgcaatcaaatagagccaaccggaggtggttgcggcctggaaaataggtcaaaagctgtggacaagggactatgccggtgtctacgaggctattcgtggttttgattggactcaacaaacacaagttcttgttgccgctttctcagagctttacactaagaggatgtttgaactgc

SEQ ID NO: 225698 - DNA, 384 bp, Gossypium hirsutum
cgcgtcgcggtttagtccgaccggtccgtcttcttcaaaaccgtcgtccctgcttttcggcgacacggcgattcctcgaaccgccgtgtttactccattgttaacgaacccaaagctcgacactttttactacgtccaactgttgggtatcagtgttggtgggacacgtgtccccaaaatcagaccgtcgttgttcaaaatggaccgggacggtgacggtggtgtcatcatcgattcgggaacttccgtcacccgtctgacccgacccgcttacatcgcattaaggaatgctttccgtctcgggtcatcgaacctgaaacgggcacccgctttctcactattcgacacatgttacgacttttccggtaagacttcagttaatac

SEQ ID NO: 225699 - DNA, 349 bp, Gossypium hirsutum
aaggtggataccttttattacgtttttctgaccgggcttagcgtaggcggccagggcggtacaactcccgccgggctttttcgagttggaacaatcgggaaacggaggagtgatcgtcgactgcgggacggccataacacggttgcaagcggaggcttacaacgcactccgtgacgcgttcgtgaaattaacgcctgacttgcctacgaccggtgggtttgcgttgttcgacacgtgctacgacttggtttcaagaaccagtgtttggtttccgacggttgcgtatcatattagctgtggactgtcactggaattgccggcaaaaatatattatgatccggtggacttc

SEQ ID NO: 225700 - DNA, 343 bp, Gossypium hirsutum
gccatatcttcagtgtctcactctttctttgcttcactcccgcttctcctttccgtgggcaaagaaaatgcgtgagatccttcatattcaaggtggccaatgcggcaaccaaatcggagccatgttctgggaagttgtttgtgctgagcatggcatagatgcaactgggcgttaccaaggagacttggatcttcaacttgagcgaatcaatgttttctacattgaagccagctgtggtagattcgtttccttgttctgttcttatggattttgtacctggatccatggtcagcattatttctgttcccgtctgttagatttttagaccagatttacttttttt

SEQ ID NO: 225701 - DNA, 294 bp, Gossypium hirsutum
cccacgcgtccgcccacgcttctctttctttccttctctccaaacacaatggactaaagcatagacagctagaagaagaaggaatggccgcctcggataaagttcaagaactgcatgtatatgagatgaatgaaagagatcgtggtagtccagcttaccttcgtttaagtcagaaacctgttaactcacttggtgatattgtcccttttagcaacaaaatatataggggagatttggagaaacggataggattaacatcagggatgtgtatattgatagagcattaacccgatc

SEQ ID NO: 225702 - DNA, 374 bp, Gossypium hirsutum
gaaaaaatggctttgaatcttaattccatcgcctcgaaatctcagaagctcccttgctttgctcttccaccaaaggccacccttagatctcccaagttttccatgatctccaccattccttctggctccaaagaggttgggaatctgaaaaagcctttcacgcctccaaaggaggtgcctgttcagatcacccactccatgccgcctcacaagattgagatctttaaatctttggagggctgggctgagaacaacattctgactcacctcaaaccagttgagaaatgttggcaacccgccgactttcttccagatcctaattctgatggatttcatgagcaagtcaaagagcttagggaaagggcaaaggagat

SEQ ID NO: 225703 - DNA, 367 bp, Gossypium hirsutum
cccactcgtccgcacccctaatgtttcaaacaaatataaaccccaaaagagagagagagagagagagagagagagagagagagagaaaaggaaaagaaaagagaaggttttcttcttttttactgtcgagtaagtgattaaagatggaagcaatgaatggatgctcatcttctacatcatcatctgatgcatcttcttcggattcgtatttatctgcaaggggttcaaacaaagctgagaagatcaaaggtccttggagtgctgaggaagataggattttgactcgactagttgagagatatgggcctagaaactggtctttgataagccgatatataaagggtcgatcagggaaatcttgcaggct

SEQ ID NO: 225704 - DNA, 373 bp, Gossypium hirsutum
ttcacccaagctcggaaaagttggccttcccgccgatttacccacacctcaactggatgtgaaatctgtggaaaaaatcacagatccgagtattgaaactactacggtggtgcaatttgttccggacattcgttcaggtagttttgctgatattggacctaggagatacatggaagatgaacatattagaattgatgatctatcttcgcatttgggtccccttttcaagttccctaagcctagtgctttttatggggtgcttgatggtcatggaggtcctgaagcagctgcttatgtaaggaaacatgctcttagattctttttcgaagatgtcgattttcctcggacttgtgaatttgatgatgttttcatg

SEQ ID NO: 225705 - DNA, 373 bp, Gossypium hirsutum
ggggacacacctttctgcagtgaatactgcagacaagaacaaatcgagatagatgaagctaaagaaaaggacatgaacctttcttcctcagtgaaagctatgagaaagaagagccaaagggagtctacatctccgaatgaagctcaaggttactctattcgaactagcacagttgcagctgcttaaatcacaccacaaaggaaataaacaaaaacatatctaccatatatatatatgaatatttcaaaaaaaaaaaaaagaagagaagggaaaggtggtggagatcatcaatgaagaaaagggccaaggagagaggagaggatgaagaaatctatatcttgagtggtttggtatcccctttataaaacatact

SEQ ID NO: 225706 - DNA, 360 bp, Gossypium hirsutum
ctctcctcatcggtcatggttattttctctatttgaccaagacatggtagcagagaacaacatggatgtacgtagcagtgcctgttattctttacgcctgcgaaaggttgactcgagcatttagatcaagtatcaaggcagttaaaattctcaaggttgctgtatatcctggaaatgtattgtcactgcatatgtcgaagccccaaggattcaagtacaaaagtgggcaatacatgtttgtcaactgctctgcagtctcccaatttgaatggcatccattctccataacttcagcacctggagacgactacgttagtgttcacattcgaactttgggtgattggacaaggcagctcaaaa

SEQ ID NO: 225707 - DNA, 292 bp, Gossypium hirsutum
tttttgtcaacatggagactctactactttgtattctgatcatgggtgtgtggggtatggcttccggaacaatagcagctccccctaagaagcctgctcatgtaccattgtccagaaactatatgcctacttggacttctgatcacattaagcatttcaatggtggctctgaaattcagctccaccttgacaaatacactcggtctggtttccagtccaaaggatcatacttgttcggacacttcagtatgcaaattaagctagtccctggagattctgctgggacttgtac

SEQ ID NO: 225708 - DNA, 366 bp, Gossypium hirsutum
cccactcgtccgcggactcgtggtgttttgacatggacaggactctatctgtggtaccaccagatggtgaatttcctgtcatgaactaccgaatgacgcaggaatttaagcctcctttccgtattaattgtttaattgaagaagctggacagcttaaagctgaagtgattattaaagtacgcgcggagttcccttcaaacattactgccaacacaattgctgtacaaatgccacttcctaaatatactactagagctagttttgagttggaacctggagctgttggacaaagaactgatttcaaagaagctaacaagaaacttgaatggggattgaagaagatcgtgggtggatctgaacatacac

SEQ ID NO: 225709 - DNA, 370 bp, Gossypium hirsutum
caaaagcatgaagtccgtattaagattctcttcactgctttatgtcacactgatgtatactactgggagtgtaagggttacactcctctgtttcctcgtatacttggtcatgaaccctcagggatcgtggagagtgtgggtgagggtgtgaatgatttgaaacctggagatcatgtgctccctatcttcaccggagaatgcaaagaatgtcgccactgtctgtcagaagaaagcaataacatgtgcgaactgcttaggatcaactgcgaccgatgtgttatgcttgctgatgggaaaaccagattttccatcaacggcaagcctatctaccactttgttggaacctctacctttagccaatatactgtcg

SEQ ID NO: 225710 - DNA, 377 bp, Gossypium hirsutum
gagtgtggaaggcaggacattattttaatgctgatgcgcaaatacagtggctagctcagcagtttgaggaaagaattcttgaagaaaaggaaaaagggtaagctaccaaaagaagcaagggtcacgctgcttgattggtggaacaatcattatagatggccttatccaacggaggaggataaattgaaattatcagagataacaggactagatcagaagcaaatcaacaattggtttatcaaccagaggaagcggcactggaaaccttccgaggatatgaaattcgctctcatggaaggctttgctggagatcctatgcactttggtcatggagttggtcccgggagtgataatatttgttaaaagacaaactgcat

SEQ ID NO: 225711 - DNA, 142 bp, Gossypium hirsutum
gctgttctcaaggcaatttgttcttttttacaagagaccacagagccaggaaggtgcttaactgaagatatacaaacttacgagtgcttacaaaacaacggtggttgctggcaggacaagagtgccaacataactgcatgca

SEQ ID NO: 225712 - DNA, 357 bp, Gossypium hirsutum
gttttgtgtacgttaccgaaaatataatttaaaaagaactaggaatattttagagaagaagaatcagtttttgaaaattttaaaaattgccttagaaaggactaagcatatttatattaaaatatttagtaaataaataatgtcagcaccagaaggagataaacctacagaaggaggtgaaggcggtgatgcaccatcagaaagtcaacctcccccaccaaatccacaacatcaagctgcatctagaagattacaacaaacacaagcccaagttaatgaggttgtggatattatgcgtacaaatgttgaaaaagttctggaaagagatcaaaaattatcagaactcgatgaaagagc

SEQ ID NO: 225713 - DNA, 353 bp, Gossypium hirsutum
caaaccatatccgaaagcaaatacctatgcctactcaaagcaaagaaaaacacagcaatggagagaagcaaagcaatgatgatggcagtggcagctgtcggattggctttagtgttaatggtgccacaggccgatgctacaaggtacattgttggagggggaggcatcggttggactactaatgtcaattacactgtctgggctcgaggaaagcacttctacaatggcgactggcttttttttgtatatgatcggaaccagatgaatgtgctggaggtgaacaagacagactacgagtcatgcaatgctgatcatcctcttcacaactggacaaccggagctggaagggatgt

SEQ ID NO: 225714 - DNA, 371 bp, Gossypium hirsutum
cggatgatgaagctggacaatctgttagaaggaacaggcatttgcagtatgtgagtggttataatggttcgtatcaaaatcagcagcagcagcagcaacagcctcaaactagtagttttgtgtttcagagctccactgtcacttatgttggtgccgatggagcttactatacttcatcaaaaacaaggaggactggaagtgatggaattacttttgaagaaagcaaagaagcggacaccactacaggccaagcaagccaccatgtttctaggggacttcacaacaagggtcattcagttatgagaaagctgaactcggatggtagggtggatacgatgcaaaccttacataatttgaatgaagatgaactt

SEQ ID NO: 225715 - DNA, 368 bp, Gossypium hirsutum
cccacgcgtccgcaaatttttacactcttgccaatagaaaactgctacttgttgttatattcagtgaattcatagtgtagcttttctaataaaaccgcaaaaggaaacatgtgttttttggatggaagggaccatctgggttttctgcttcttctaccgcagaagaagttagtcaagggattgatggatctgctctcgctgccatcgttacaggagcatcaagtggtattggtgtagagactactcgcgtcctcgcattgcgcggtgtccacgtagttatggcggtaaggaatgcagatgccggtcggaatgtcaaagaatcaatactaaaagaaatccctagtgctaagattgatgttatggaattg

SEQ ID NO: 225716 - DNA, 374 bp, Gossypium hirsutum
aagaagttcgacaaattcttggagcttgttttggatgaacataacgctaggcgaagagatgttaaagattatgttgccaaggatatggtggatgtgcttttgcaacttgctgatgatcccaatcttgatgtcaagcttgaaaggcatggagtcaaggcatttagtcaggacttgatagctggagggaccgagagttcagcagtgactgtggaatgggcaatttcagagatgttgaagaagccagaaatatttgccaaggctacagaagaactagacagggtaattggcagggaaagatgggtagaagaaagggacattgtgaacctaccttacatcgactcaattgccaaagagactatgcgtttgcaccctgt

SEQ ID NO: 225717 - DNA, 323 bp, Gossypium hirsutum
gaaggatcttggtgtctctggttttttgaccttaaatgaaccatacgagacgggggtcccaacatcgctatatcatgcacacaatattcatcatttggtgattccaacaagggattatctttttgctccgtcatttgctgatatttgccaagctgtagatttcatacatgataatgcttctgttggaaagactacgtatgttcactgcaaggcaggtcgaggtcgcagcacaaccattgttctctgctacttggtagaacatatgcatatgactcctgatgcagcttatgagtatgtgagatctatcaaacctagggttcttt

SEQ ID NO: 225718 - DNA, 354 bp, Gossypium hirsutum
cccacgcgtccgcccacgcgtccggtattttgcattttcgtttttttggaattgatcatcttcgttgcgagtatacaatggcaggtcggggtaaaactcttggatccggggcctcgaagaaggcgacatcgaggagtagcaaggccgggcttcagtttccggtgggtcgtatcgctcggttccttaaggctggaaaatatgctgaacgtgtcggagctggagctcctgtttacctcgctgccgttcttgaatatcttgcggctgaggttctcgagcttgctggaaatgccgccagagacaacaagaaaacccgaattgtgccacgtcatatccagcttgctgtgaggaacgacg

SEQ ID NO: 225719 - DNA, 379 bp, Gossypium hirsutum
cccactcgtccgtccacgcgtcctttatttaaaaacatggcaaacacccttttaggaggtttcaacgtacgagttgtcggctccagcgacagaatccttgtcttggctcacggtttcggtacggaccaatcggtttggcaacggattctcccatttttcacacctaattatcgtataatcctatacgacctcgtttgtgccggcagcgtcaaccccgattacttcgattccactaggtacgacactctcgatgctttcgtcgacgatttgcttaatattcttaaagctcttggcgtttcaccgttgcgcttacgtcggccactccgttttcgccatgatcggtatcttggctttcattcgctgccctcaactctttttc

SEQ ID NO: 225720 - DNA, 370 bp, Gossypium hirsutum
atctcttcaacaatccaagattttttttcctcccctacttgtttttgcttgcatgttcagtgcttgctgtcttgcaacttcaactttaggagctacacttgcaaaagacgaagtggaagctttggaaagcatatgtgaaacattggggaagacaaactggaaatttagcgtggatccgtgcagcagcggagacgagagttgggcaaaatttgcagaaaaaggtgcatactatgttaataatgtcacttgtgattgcagttccagcccctgtcatattgtccgcatagtgctgaagggacaaaatctatcaggcactctcccaccacatgtgaccagactttcttacctgcaagaaattgatctcagtcgt

SEQ ID NO: 225721 - DNA, 366 bp, Gossypium hirsutum
cccacgcgtccggtaattcgcagggttgttacagcagcagctgggagaaaagacgatgcaaaacccttcctaaaacgagcaaaaatagtaagagttatattaatggatccgtgtccttttgtacggatcctggtaggtaatttggccctgaggtttccactttctacaaagccctcgctttcaaggatccatccttctacttctccatgttactgcaagatcaaactcaagaacttccctcaccaagtgggttcaatccctttgatccatgcaaacacccaaaacccagaaagctgcaacttctctttgcagaaatcgctcgctgcgtgtttcagtttaagcaagtcccaggtggataggatcatc

SEQ ID NO: 225722 - DNA, 375 bp, Gossypium hirsutum
agaaaaccaaacaatccttatccttttttaaccggtgctgctaccacagtacaggatggagctaaggatggaaaatctgaaacaccgatatcttcttcacgttgcaagcaagtgttggacttggagaaagaaccacttccagagagacctaatggagatgaaaaggctacaaatctgaaagaaaatcaagacgagagttgctctggggtttttacccttctccacgaagcaaattgctcctctgcttcttccatgaataagaattttataccagcgtcagcagcactcaaaagctcttgcacatttagggagtttgtaccttctccaaaagagaaaattcatgataatggtacaagtacggcctcaaacctggag

SEQ ID NO: 225723 - DNA, 386 bp, Gossypium hirsutum
cttccgggaacccttggccttttgcaccttgtttattcaaccaaaattcaagaagatcctgggggaattgaaccagccagtctctttaccacctgttccttcaaagaagcctgctgcccagccaaatgaaactaaaccaaaggctgaaccaaagaaagaggccaaaaaggaggttgagaaactggcagcaaaggcagaggcagctgatgaggaggcaccaaagcccaaaccaaagaatcctcttgatttgctgcctccaagtaagatggtactggatgactggaagaggctttactctaacacatagaccaatttccgagaggttgcaattaaaggattctgggacatgtatgatccccggggatactcactgtggttttgtgact

SEQ ID NO: 225724 - DNA, 380 bp, Gossypium hirsutum
  unsure (1)..(380): unsure at all n locations
gtaagcacaagccattccattttctttcttttttttntttttttagtttacaacgagcggtggctggacacacagtttacaccctctcagaagtgtctcgacacaaatccaagaacgactgttggcttgtcatcgatggccgagttctgaacgtgacaaagttcatggaagaacatccaggaggagaagaggtgttgttggaatcagcagggaaggatgcgacgaaagaattcaacgatatcggacatagcaatgtagctcagaatttgctcctcaagtatcagattggtgttctccagggtcacacttcaaagaataatgaacaggttggttcaaccgaggtgcccaaaaagaaagagatgagtgcattcttgatcaat

SEQ ID NO: 225725 - DNA, 382 bp, Gossypium hirsutum
cttccgttttcctgaatatatatatcctcttttaaacattttttggttctctcaatatcgggggttatggctttaccgacgagaaaattttcgtcaccttttgttatttttctcatattatcaattttcttagttgcgccatcgttttccggcaccgatactttcgttttcggaggctgttcgcagctgaaattcacttcgggctcacagtacgagtacaacgtcaactcgatactcacttccctagtcaactcagccatgttcacttcttacaacaacttcaccatgtcagcttccggtggtttcagtgccgtttacgggctgttccaatgccggggtgacctaaacaacctgactgtaaccgttgtgtagctaaagcgtt

SEQ ID NO: 225726 - DNA, 368 bp, Gossypium hirsutum
ggaaattatatccctttcccatctttgaattcgttattattttgtttcattttgggggttgattagaatgggagagataaaggacaacgacgcctacgaggaagagcttatcgactacgaagaagaagatgaaaaagcccctgactctgcctgcactaaggctgctgattctgctaagaaggggtatgttggaattcatagttcgggattcagagactttctgctgaaaccagagctgcttcgatctattgtggattctggttttgaacatacttccgaagtttttgcacttgcaaagcttatgaatgtcagtgaagatgagagtcaactttctgctatagctaggcaaggtttatgcagtgcttgtc

SEQ ID NO: 225727 - DNA, 369 bp, Gossypium hirsutum
cccacgcgtccgatttctctcttttatgaatctccaaatcgaaatttaaggccaaaaagacacaagggttactaattaaattaatcttcagcgaatatgttggtttatcaggatcttctcacaggtgatgagttcctctcggactctttcccatacaaagaaatcgagaatggaatgctatgggaagtcgagggaaagtgggttgttcaaggagctgtcaatgtagatattggggcgaacccttctgcagaaggtgctgatgatgatgaaggtgttgacgatcaagccgtcaaggttgtggacatcgtcgacactttcagacttcaggagcaacctgcttttgacaagaagcagtttgtgaccttcatg

SEQ ID NO: 225728 - DNA, 373 bp, Gossypium hirsutum
ccaaaattcaatgtcttctcaaagtctgtgacagctcatacaggggtggaagtgccagaatttgatattaaggttctagttgctgctgctgtagccttcaagggtgttgggggtatcctttttatctttggcagcactatcggtgcttatcttctggctctgcaacaggtaattgttactaccatattgtacgacttctacaactatgacacggaaaagaaagaatttgggctactcttttcaaagttctcacagaacttggcattgctgggggcattactcttcttcatcggcatgaagaactcaatccccagcagacaactcaagaaaaaggctcctaaaaccaaaacagtttgaaggaggaacatctggt

SEQ ID NO: 225729 - DNA, 373 bp, Gossypium hirsutum
ggcgacatccatagcagctcgcatctccaggaaggccgcggcctctgctttctgcgctcaccgtcacgtaatctcatcccgttgtttcgccacggagtcggcgaaaacgatctcgccgtcgtcggatcgagtcaagtgggactacaggggccaaaggaagataatccctctcggacagtgggtccctaaggtcgccgtcgacgcttatgtggcacctaatgtcgtcttggccggtcaagtaaccgtctacgacggagcgtcggtgtggaacggctgcgtcctacgtggagatctcaacaagatcaccgttggattctgctctaatgtccaggaacgctgcgtcattcacgccgcttggtcctcacctaccgga

SEQ ID NO: 225730 - DNA, 378 bp, Gossypium hirsutum
ataaatcacagtaatttagattttttattgaaaatgttaggaggcaacaacagtaatgctgtgcttcccattttcctggatgagaatcatcttcaatatcagaatcagactaatggatcaaaccaactgcaattatttggaagcttgccagctgggtgcaatgttgatcctgtgaattattttggaaatgaacatcttgctcccatgattcgacccaataaaagaggcagagaaacagaagacattcaaaggcagcaaaagctacaaatttccttgaattacaacatctgtaaagaggaagctgactgttcagctggcattccaaatcctaatgctgtgtcaactggcttacggctatcgtatgatgatgatgagcgg

SEQ ID NO: 225731 - DNA, 378 bp, Gossypium hirsutum
cccactcgtccgaacaaatcagttcatttgatatctttctttcgagcttgtcttcggtgatgttactaactaacaatggagttgcagatatccttattccaggtcctcatcaccttcttcctggttttgtttatggcagcaatcactagtataaggaaatctaaagctaggaatttaactcaagggttgattccagggccacggaaattacctttgatcggaaatctgcaccagctcgccggtcctggtctaccacatcacaccctacgtgacttggctacgaaatatggcgccatcatgcacctgcaactcggtcaaatttccactgtcgtcgtttcttctgcagaaatggctaaagagattatgaaaacccatgat

SEQ ID NO: 225732 - DNA, 372 bp, Gossypium hirsutum
caacaaaatcagttgcttcacattttcctctacaaccatggctctttcttgggggagcattctccggtaaggcagtgaagttctccccttccacccctgaaatccggggaactggccgtgtttccatgaggaaaaccaccaagcctgttccttctggtagcccatggtacggtcctgaccgagttttgtacttgggtccactttccggtgagccaccatcttacttgaccggtgagttccctggtgactatggttgggacactgctggactctcagctgatcccgagacctttgctaggaaccgtgagctcgaagtcattcactgcagatgggccatgttgggagctcttgggtgtgttttccctggagctg

SEQ ID NO: 225733 - DNA, 374 bp, Gossypium hirsutum
cccacgcgtccgattctcgttccccttccgctgtattccctgcgtccaagcgcagcaaagaaccttccttctccaaattgaccatacccacggacaaagtatttaacttctagaaccacatacacagatcagcaatggcgaattcggagaacgaaaagatactgagaaaaatggccgatgccttcaaggaacttgccgctacggtaaactcgcaaacggcggatatggaggtggcccctttttcacgcgcatgttctttcgtttctcctctctttggttgtttaggcatcgccttcaagttcgcggaaatggattacgttgcaaaggttggtgatcttgcagaggcgtcaaagtctattgcaacgctaaaagta

SEQ ID NO: 225734 - DNA, 372 bp, Gossypium hirsutum
aacacttcaaaccctccacgtttgttccaaacataatatttttttatttccattgcttggatttgattcgcgattatgggaatcgaaataagcggcggcacgatcattccaggaggttggggggccgccgccatggctgtcgcggctaagacatgcgacgcatgtaaatcatcggcggcagctatcttttgtcgtactgattgggtctttttatgcttgaattgtgattccaatttccattccggtcacgaaagggtgtctatgtgtgaagtttgcgaacaagctccggcggctgtcacttgtaaagccgacgcggcggctctttgtgtcacttgcgacgccgatatccattcagcgaacccactggctcgc

SEQ ID NO: 225735 - DNA, 368 bp, Gossypium hirsutum
cttctacatcatcatctgatgcattttcttcggattcgtatttatctgcaaggggttcaaacaaagctgagaagatcaaaggtccttggagtgctgaggaagataggattttgactcgactagttgagagatatgggcctagaaactggtctttgataagccgatatataaagggtcgatcagggaaatcttgcacgcttagatggtgtaaccagcttatccccaatgttgagcaccgttcgttttcccaagctgaggatgataccatcttggccgctcatgctcggtatggtaacaggtgggccaccattgctagattgcttccgggaaggactgataatgctgtgaaaaaccattggaactcgacg

SEQ ID NO: 225736 - DNA, 373 bp, Gossypium hirsutum
cccacgcgtccgctggaatggtcaaggctggatttgctggagatgatgctccaagagctgtattccctagcattgttggtcgcccacgtcacactggtgtgatggtcggtatgggccaaaaggatgcttatgtgggagatgaagctcaatcgaaaagaggtattttgactttaaagtacccaattgagcatggtattgttagcaattgggatgacatggagaaaatctggcatcataccttctacaatgagcttcgagttgcccctgaggaacatccggttcttctcacagaagctcctcttaacccaaaggccaatcgtgaaaaaatgactcaaattatgtttgagacattcaatgcccctgctatgtatgt

SEQ ID NO: 225737 - DNA, 349 bp, Gossypium hirsutum
gtcttttttgcaatctttatcccttttttctcgccgcctaactctaaggatttgagtggtcagtgtaatccaaagacaagccaagatcagtgacgcttacagctgcagagcttcgtgctatcatggaccggaagcacaacatctcgaatatgtgtgttattgcccatgttgatcatgggaaatctactgttactgattcgcttgtggctgctgctgctctcattgcacaagaagttgctggggattgttcgttgacagaagcgccttgcctatcaggctgagcgtggtttcacaatttaaaactctggcatctgtctgtgttctggaatgtgtcgtgattcttttgaga

SEQ ID NO: 225738 - DNA, 392 bp, Gossypium hirsutum
acccacgcgtccgctccatgccaacgagacctgaattttattacctcataacacagggttcctctggatggcgtaagctctgttccaacacagcttacaccaatgccttccccgacaaacatttcgatctcgagaccgtcctaaaagccgatgtcaggcccgttaccgtctcccatgaaaaatcattcacagggtttttcagtcccgatgaattcgagttcttgaaaggagcaatgtctttcgatgagatatggaacgaaataaaaagctgcgaaacaaacaattgtcagccgagggtgtatatcatcagctggaacgatcatttcttcgtgttgaaggtcgaatcgaaggcatattacatcatcgatacgttgggtgagcggcttttcgag

SEQ ID NO: 225739 - DNA, 374 bp, Gossypium hirsutum
gtctattggaaatcttgagattcttgaagagctggacattagcaataatgagaggcgggtcctcccagactcttttaggatgctaacacgacttcaagttctacgtgtggatcaaaatcctctggaagtgcctcctaggcacattgcggaacagggtgcacaggtaatataatcccttttgtatgctttttctttgataaaagaaaagaaaatgttatcccatggcctaaagttactttattcatttacttaggctgttgtccggtatatggctgatctggttgagaaaagttatgttaaattacaaccggaaaagcagaagaagagttgggctcaaatatgcttcttcttcaagtctaacaaaaggaagcgct

SEQ ID NO: 225740 - DNA, 374 bp, Gossypium hirsutum
agagaatcttgtttaaaatataagttaaaaaatcatacgcaatgagcactgctggtcaggttattcgttgcaaagctgcggtggcatgggaggcggggaagccactatcgatagaagaagtggaagtggcaccaccccaaaagcatgaagtccgtattaagattctcttcactgctttatgtcacactgatgtatactactgggagtgtaagggttacactcctctgtttcctcgtatacttggtcatgaagcctcagggatcgtggagagtgtgggtgagggtgtgaatgatttgaaacctggagatcatgtgctccctatcttcaccggagaatgcaaagaatgtcgccactgtctgtcagaaaaaagcaat

SEQ ID NO: 225741 - DNA, 371 bp, Gossypium hirsutum
cttacatcccgtggttcccagctatacatttcgctcactgttccggagggggcgcagcagatgtgggatgccaagaacatgatgtgtgctgctgaccctcgccatggtcgctacctaacagcctcagctatgttccgaggcaagatgagcaccaaagaggttgatgaacagatgatcaacgttcagaacaagaattcatcttacttcgtggagtggattcccaataatgtgaagtccagtgtttgtgatattccaccaaagaacctaaggatggcatcgacttttgtggggaactcaacatcaatccaggagatgtttaggagggtaagtgaacaattcacagcaatgttccgtcgcaaggcgtttttgca

SEQ ID NO: 225742 - DNA, 366 bp, Gossypium hirsutum
  unsure (1)..(366): unsure at all n locations
aaccctttttactacgacttttactttttagccaactctggtgtatttcatccacgatgaatcccttcaaaaccttgccaaccctttctttcctcttcttaacccttttcagcttagcccatgcagccacatttgatataagaaacaactgcccttacaccgtttgggctgccgcatctccgggtggtggcaagagacttgaccaaggtcaagcatggcaaatcactgcagcctctggaaccacacaagcccgaatttgggctcgaaccaaatgcaatttcgatgcctncgggaaaggctcatgcgagacaggcgactgcggtggagtcctcgaatgcaagggatacggtaaagctcccaacacac

SEQ ID NO: 225743 - DNA, 330 bp, Gossypium hirsutum
accaacgcgtccggcaagttttcaactccagcaggatttttttttgctaagaggtagcattcccttcgaggtgggagactctccgattcacatactcggagactcttggaaaatggccgatcggagatttggcttttgacattaattatctcatgcggagacagggaaatttcgaagtggcaagtgtatatgcaggtgataattgtgtggaacttaagggtgaagagattaaaaaggagttgcataatctggctaggctgtttactctttgtaggcttttcttgaataagccattttcggcggttttagactctgcaggtttttcagagg

SEQ ID NO: 225744 - DNA, 386 bp, Gossypium hirsutum
cgcgtccgcccacccgtccgcccacgcgtccgttctctcgtccgaccctttcttcccactcgggtgcgactcacttcttcacctactctgcgagttaactcactgactccccgtcttccatcaccatcgactcgtcctcgtcgagttatcaaagttgcagcagcactcgacagcgattattcatccaagaggagtagcagcaatgagcaaagggaaacgataatgttacctggttgtgattataaccattggcttatcgttatggagttccctaaagaccctgctccgacaagagaacaaatgattgagacttatcttaacactcttgccactgtgcttggcagcatggaagaagcaaagaagaacatgtacgcttttagcaccac

SEQ ID NO: 225745 - DNA, 281 bp, Gossypium hirsutum
atgaaactaacctcgatgattaattcaaatcctggcttgcttttgctgcgcagggagttgttgaagttaatgccctcgctaaggcattgactgatcacaaagatgaggccatctccttttctaatgctgctgctcaagcctcaaggaagtcctgcccatgagtcaccaatgcggatgctcaaaaagctgctgacgctttgaagggctctgaccaccgtcctgcaacagacattagtgctagacttgatgcgcagcagagaaagcttaacctaccaatccta

SEQ ID NO: 225746 - DNA, 371 bp, Gossypium hirsutum
cccacgcgtccggctcaagctccctctacgtggctcgaagcaattgctacgataggcggagactctccgattcacatactcggagactcttggaaaatggccgatcggagatttggcttttgacattaattatctcatgcggagacagggaaatttcgaagtggcaagtgtatatgcaggtgataattgtgtggaacttaagggtgaagagattaaaaaggagttgaataatctgctaaggctgttaactctttgtaggcttttctcgaagaagccatttccggtgtttttagactctgcaggttattcagaggaagatgctcttcttcataagcctaaaagcaggcttatgaaaccagcattcaccatca

SEQ ID NO: 225747 - DNA, 385 bp, Gossypium hirsutum
aatttctgccatattacacacaaacaatgtctgaatctgatccttcttcaaccaatgtgcccccgaaagaccagccaccaccaccaactgttccaatccctgacgctcctccgcaagagcagtcgccgaaaccatcatccactccattggtctcatcgaaagaaggcgtaagtgggaatcccacatcgagaaagttgtcggcggtttatcggggagtaagaagcaggagtgggaaatgggtgtcggaaatacgtgagccgcgtaaaacgacgcgtatatggctagggacataccctacacctgaaatggcagccaccgcgtatgacgtggctgctcttgccctaaaaggtcccgacgcggaactgaactttccggatatggttca

SEQ ID NO: 225748 - DNA, 404 bp, Gossypium hirsutum
gcggaccaacccttccggtcaatttcaaatcaaaaactccttttccaactgcaaaactgggctcatcaaggaggcttcgccctggggattgggggatagctatgggtactccgcttagccttcagaatactgtcactgcgggtattgagagctgtgctgatcgtaaaagcagtgatttgggtctaggagggatgcgcagagagtatttacaaactgattgtgcaatcaatgctggaaattctggtggcccccttgctaatatagatggagagattgttggagtcaatattatgaaagtagcagctgcggatggattgagtttttctataccaattgactcggtttctaaaattatagagcatcccaagaagagtgggtataattatatctccttatggaactaa

SEQ ID NO: 225749 - DNA, 384 bp, Gossypium hirsutum
cccacgcgtccgccattttcgtgctattcatgttacaaggacaaagtacagcagcgagccctccgagatcaaagctggggattgagaggagaagaaggtcgcgatcagccgagaatgtggatttggagtttcaggaagctaggagatcttcttctgcatcacacagttccaaactaaaagtaggtagaattgtagatggatatctccaagagattgccaaagacgtaaatctgcctctcttaaaattcattgcaatagctgagaccatcccaaatttctcacggcctgaccatgacgatctctaccgagccatcgacatttatctcaaggcacacccggagctaaacaagagtgaaaggtaaaggttatgccgtattctggact

SEQ ID NO: 225750 - DNA, 354 bp, Gossypium hirsutum
gcgtggggtaaaaggactgggaagaacaatcatctatctgggtcgatccctgatattgaagggccttcacttgtccaattcaatgtttcttttaatcagttaaatggttcaatcccaaaagggttatcaaataagcctcaaagtgcttttctagggaattctttatgtgggaagcctttggttccttgtaatgggactgaaagtagtggcaataaattgtctggtggagcaattgctggtattgtcattggttgtgttcttggtgttttattgattctgattctactgatctgcttatgtagaagaaagagtggtaaaaaaatggaggaaagggatgttgcccctccaaaacag

SEQ ID NO: 225751 - DNA, 389 bp, Gossypium hirsutum
aaaaattgtgagtcgatgcatgttttctttggctgaaatttctgttaaagcaggtctttctgttgctgatctagagaggaaagatgtcaatttagatctgattaaggttgagggaaaagttggaggaaaattggaatacactgagctaatatatggaattactgttgataaagacatgagtcatcctcagatgccaaagcaaattgaagatgcaaaaattgccatattaacttgtccatttgagccacctaagccaaagactaaacataaagtagacattgatacggtggaaaagtttcagactctacgtcagcaagaacaaaagtattttgatgacatggttcagaaatgcaaggaggttggtgccacattggttatctgtcaatggg

SEQ ID NO: 225752 - DNA, 386 bp, Gossypium hirsutum
cccacgcgtccgatttcttgttatttattttgctggaatagatgaatgttaatgctgcccataaggctgaaaataagagaggttgtattctggccagtttttatcattgcaacacttgcaacgatggttgggagtcaagcaattatttccggtactttctcagtaatcagccagtgtagggctttgaagtgcttcccacgggtcaaggtggtacacacatcaaaccacatacacgggcagatctacataccagaggtgaactgtatcttgatggttctatgccttgctgttctggttgggtatagggatacggacacgataggcaatgcatatggtcttgctgttatcactgtaatgttggttaccacctgcttgatgtttctggt

SEQ ID NO: 225753 - DNA, 324 bp, Gossypium hirsutum
gggaaagctactcagtgttgttaatttctgaccaaaacccgtacaagaactatggggtttcaattggtgtcagagggagagatcccaaaaccaaccaagccttaacccttttgagctattctgccacccctgcatcaaagctccctacaactcaacccccttgtacaccttgattggaccatttcaatcacaacaagggcctcaccaaaaacatatattcacttattggatcaccctaaccacccaaaacttatgaccgtcggatcattcttcttaacacttaaaaccgactcaatgggttcgtcaagtgggccatcaacaatg

SEQ ID NO: 225754 - DNA, 388 bp, Gossypium hirsutum
cagattcgaactagccaagaacttttgtgttacggagtttgtgaatccgaaagatcggaacaaacctgttcaagaggtcattgctgagatgacgggtggaggagtcgaccgcagtgttgaatgtaccgggagcatccaggccatgatttctgcatttgaatgtgtccacgatggttggggagttgcagtgcttgtgggggttcccaacaaagacgatgcattcaaaactcatccagtgaatctactgaatgaaaggactctcaagggtactttctttggcaactacaaacctcgaactgatattcctgctgtcgttgagagatacatgaacaaggaacttgaacttgacaagttcatcactcactcagttcccttctctgagattaac

SEQ ID NO: 225755 - DNA, 391 bp, Gossypium hirsutum
cttcttcttcttcttcttctcatataccatgggagcttgtctctccgccaccaaaggcagtggtggttcaagcggaaacaccaccgcccaccaccgtaaaacagccacaaatgctgaaaaagagtctcaaaagccaaataatcaacaggtgaggtgttctcagccactgaaaaacaaacagaaaccgaagaaacaaagtgggatcatcccatgggggaaacgtacggattttgggtacgataaggattttgatcagcgttatacgattgggaaattgttgggacatggtcaatttggttacacttatgttgctatagacaaggtgaatggggatcgtgttgctgttaagaaaattgataaaaataagatgattcttccaattgctgtcgag

SEQ ID NO: 225756 - DNA, 380 bp, Gossypium hirsutum
taaacattatggcactcccacaaatccttgtgcaccagatagggtgcctggaggatcttccagtggctctgctgttgcagtagctgcaaagctggtagatttctcccttggaactgacactggtgctagtgtaagagtccctgcatcatattgcggaattcttggatttcggccttcactcggtgccgtctctactgtaggagttcttcctatgtcacagagttatgatactgtgggatggtttgctcgtgatcctaagattttaaaccgcattggacgtgttcttctgcatttacctgacgttgatcctatcaaaccaagtcagatcattattgcagaagattgttttcggctatctactattccaagtgaccgaacag

SEQ ID NO: 225757 - DNA, 382 bp, Gossypium hirsutum
cccacgcgtccggatttctctgacccaatgaagaacttgaaagagaaggacatgaagcgacagacgttacttgagcttgtggattatgttagttctgcgaatggaaagttttctgaatccgttatgcaagaagctgtgaagatggtgtctgccaacctgtttcgacctcttactccacagcctcgtgaaaacaaggtgctagaagccttcgatttggaagaggaagagccattggtggaccatgcatggcctcacttgcaaattgtatatgaattctttctgagatttgtggcatctcccgaaactgatgcgaagttggccaagagatatattgaccattcttttgttcttaaattataggatctctttgattctgaagatc

SEQ ID NO: 225758 - DNA, 390 bp, Gossypium hirsutum
ggtgattgcaagagaaagaacaacccatctcactatcgcgagcccagattttaggctgaggtctttaaagaatgccaagcaactgatgattctggaaattcatttgaactttctcttgttgtctgcaagtgcattggagcttatgttaagaacaaaaagaatcagaatcagatttgctggatcttccaaaaagttgtttcagataatgataagggattccagcgcttcttggattctgttcagtacaaatctaatagcattctccgttatgagcgtgtctttggaccaggatatgtgagcacaggaggaattgaaacaacaaaagaatttgtggggaagttagatcttaagcctggccaaaaggtcctagatgttggctgtggcattggt

SEQ ID NO: 225759 - DNA, 397 bp, Gossypium hirsutum
gcgtccggcggcggcggcggtgtttctaactttttatctccgaaaaagagtccaagattcgaccttccaccggaaatcaccatggccaagacaaactcaacacgcagcgctgctagtttggccggcgctgacaatgatgacagttacgttgaaatcaccctcgacatccgagacgattccgtggcggttcacagcgttcaaggcgccggtggtggaaacgaagacccagagttggcgttgctagctaagaaaactttggagaacaagtcggcttcgttccgttcctatttgttgaggaacacgtcgaatcgaattaaacaggtttctcaggagctgaaacaagttctttcgggaagaccatctaacgccggccggaggttcgacaggactaaatcgg

SEQ ID NO: 225760 - DNA, 385 bp, Gossypium hirsutum
cccacgcgtccgataactttggatggtacacatcatggacctataacaatcaaaccaactatgttccttgagattggcagcactgatgagtactggaagaggcaagatgctgccaaagtcattgctctattagtttgggaaggacttgggctcggaggtggtgctgcagtcggaaagtggggcaagtactgacctaataactgacataaaagtcattaagcttttcttgctgttcctttactgtatatgtttttattaaactcaattatctttggagatttctatcctggtattcttattggtaatcaagcacttaattttgatttattttctgttattccttcttttgtttggtttttggaaacaaagagtttctcattcatga

SEQ ID NO: 225761 - DNA, 385 bp, Gossypium hirsutum
atttatgaataaccaataaaaatctagttattaaaccctaattcaattcaggggagcctagccattctcattcaacattccaaatcagtcgctgttttgattatcttaaattgaagtaaataaaaatgttgagaaggaacattcgattgaggagagagtatttgtacaggaagagcttggaaggcaaagagcgtttgctttatgagaagaaacggaagatcaaagaagcccttgaagagggaaaacccattccaactgaactccggaatgaggaggccgcgcttcgccaagaaattgaccttgaagataattacacttccattcccaaaactcatattgatgatgaatatgcaaatgcaactgtacgagatcctaagattttgct

SEQ ID NO: 225762 - DNA, 385 bp, Gossypium hirsutum
aaaaaaacctggcaaatggtagctttttgaacatttggaaccttgaccataacaaagggacgggtccgattcctccagaactcactttgctcagcaggatgaaaacgtttactgtagcttataatttcttgacagggccaattccggtttttcggaccatgtattcggttgacagttttactaataattctgcactgtgtgggaagcctttggatcaatgtcgggagactaccaaggggacgaagactggagtgattgctggggctgctgttggtggggtgacatttgctgcaattggtacggccattgttctcttcttctattaccgcaaagtatctgtcatgaggaagaaggatgatgatccagatggaaacaaatggaccaa

SEQ ID NO: 225763 - DNA, 390 bp, Gossypium hirsutum
caaagattaataataggttcaagttagaagatgctataattaatgggtgggaaggtgagcaagtacaaaaggctatttcttggatgaagaaagttgagaggaagctagaggagaaaagagcaaaagccctagaaaagatgcaaaacgacgtcgcaaaagcacacagaaaagcagaagaaagaagggcatcagctgagtccaagagagggaccaaagttgcaaaaatccttgaaattgccaatttaatgagagctgttgggagaccacctgctaaacggtccttcttttaaaaaaaaaaaaacaaccctttaatcttcccttcatataattcccatatatatgcatacatatatacacatacacatacatatatatatgaatgcatgtgag

SEQ ID NO: 225764 - DNA, 384 bp, Gossypium hirsutum
attgacgattagatgtctttcctctaaaatcgtatttttgctaaagaagatcgatttggaaaaattcacacattacccgaacattttttatactcgctaagaatttccttgaatgcaagggcttctttcctcaacgcttctccaaataaaatgcaatcatctgcaaatagtaaatgtgttacctgtggaccacttttgcttgcttttactccttttagtagaccttctctagtgtttattctcattaggctagatagtccttctccacatattaagaagagaaatgggctcaaaggatcaccttgttgaagcccccttgttggacagaaagttcctcctacactgccattgagcactacttgataagaaactgtagacatgcag

SEQ ID NO: 225765 - DNA, 376 bp, Gossypium hirsutum
ctcactcctccaccagctctatcttctttacacaaccatcacagacatcaatgagacggctcctatcccctatgtatcaaaccttactatccaatctccgttatctaaacctttccaacaatgttttcaatggttcctttcctacccagctttcccagctgaaaaatctacaggtactcgatttatacaacaataacatgaccgcggtgttgccggtttccatcacagaacttcccaatttgcgtcacttgcatttgggagggaactatttcagcggtcagatcccgtcaagttacagccgttgggagcatcttgaatatttagccgtttcgggttacgaactcagcggtaaaattccacccgaaatcggcaactt

SEQ ID NO: 225766 - DNA, 306 bp, Gossypium hirsutum
accaaaaatgcgcaaggtgtcatattcagtagcaggttttccataccatttctggcaaaggagtcttgccatttatagcagatgatggcaaatgattgatgagatgttgagcgtacgtcacagcctcagtccaaaactttctatctaatccagcattagataacatacatcgaactttctccacaagcgttcgattcatacgctctgccaccccattctgttgcggtgttccacctacggtgaagtgccttactatgccacaatcttggcatatcttcaagaaaagatcgcttttatattctccac

SEQ ID NO: 225767 - DNA, 390 bp, Gossypium hirsutum
cacgaagctatgggcaatgaatggctgttaaatgggaactgtccgattgcaaagtcgtatagggcggtcagcggtgttttgccactagttgcgaaggttttgcagccgccaccggggatgaaatacaggtgcccacctgcagttgttgcagcccgggcagcactagcacaaaccgcatttgccaagaatctccgcccacaatccttacccacaaaagtactggtgatcggggtgttaggcatggcggcaaatgttccgttagggatatggcgggaacacactgaaaaattctcaccatcttggtttgtggctatccatgcagctgttccattcatagccatgctccggaaatcagtgttgatgccaaagacagctatggcatttaccatt

SEQ ID NO: 225768 - DNA, 379 bp, Gossypium hirsutum
gagctttccaagcttgctgccaattctttcttggctcagaggatctcatccgagaatgccatgtctgctctttgtgaggcaaccggggctgatgttacgcaggtctcttatgctgttggtaaggacacaaggattggacccaaatttttgaatgctagtgtcggttttggtggatcctgcttccagaaggatattctaaatcttgtttacatctgcgagtgcaatggccttcctgaggtggcagagtattggaagcaagtcattaagatcaatgactatcagaaaaaccgatttgttaaccgtgttgtttcctcgatgtttaacaccgtttcaaacaaaaagattgctatcttagggttcgcctttaagaaggataccg

SEQ ID NO: 225769 - DNA, 398 bp, Gossypium hirsutum
agccttccgttggggttcctgttgttagaaccaccccaactttgttagaagctctgaaagacaagcaagtcaaaagtattgcttggggcaccaacttcactgcagcaatctgtctccataaatgggtttccggcattgatcagtccatgtgttctggttgtcgcctcccctttaacttcaaacgaaaacgtcacaattgttataattgtggactggccttttgtcatgcatgtagctgtaagaaatgtctcaaggcttcaatggctcctaatcccaacaaaccctatcgagtatgtgacaattgttttaataagctgaggaaagccattgaaactgaggcgtcatcgcaatcttctgtaagtagaagaggaagcataaatctggggactagtgaattt

SEQ ID NO: 225770 - DNA, 390 bp, Gossypium hirsutum
cggaaactttcattaaagacagtgttgttgcttgctgatcagttaattaatagaggagaatatatgcattcaagaggttttcttcaccgtgacataaagcctgacaacttcttgatgggcctaggacgcaaggcaaatcaggtatatatcattgactatggtcttgcgaagaagtatagggatcttcaaactcataagcacatcccatacagagaaaacaaaaacctcacaggcaccgctcgttatgcaagtgttaacactcaccttggaattgagcaaagccgcagagatgatttggaatcccttggttatgtgcttatgtatttcctgagaggaagccttccctggcaggggctaaaagctggcacaaaaaagcaaaaatatgataag

SEQ ID NO: 225771 - DNA, 384 bp, Gossypium hirsutum
caaatattacactgactacaagttttagcctgtacgcacattagcgctttagggctctacaggacatgggactaacattattgctggagtcagcttgggcctggaatcgacagcacttcctgttcttgttataagtgtatctattatttctgctttttggctgggtcacacctcaaggcttgtggacgaaacaggaagtccaactggtgggctgtttggcacagcagtagctacaatgggaatgctcagcactgctgcttatattctaaccatggatatgtttggtccgatagctgataatgctggtggaattgtagagatgagtcagcagccagacagtgtgcgagagattactgatgttcttgatgctgtcgggaacaccac

SEQ ID NO: 225772 - DNA, 385 bp, Gossypium hirsutum
atttttattccgctattttctctctccccaaacacccttttaagccaaaaagaagacaatggccgatcagctcaccgatgatcagatctctgagttcaaggaggcctttagcctattcgacaaggacggcgatggctgcattactaccaaggagctcgggactgtgatgcgatcacttgggcagaaccctactgaggcagaacttcaagatatgattaatgaagttgatgctgatggaaatgggaccatcgattttcctgaattccttaacctgatggcgaggaagatgaaggatactgattctgaggaggaacttaaagaggctttcagggtttttgacaaggatcagaatggtttcatatcagctgctgagctgcgccatgtc

SEQ ID NO: 225773 - DNA, 385 bp, Gossypium hirsutum
cccacgcgtccgattgaccgttgttttcaggatgcctatattaatgctatacggcgagcaaagaattttatctatattgaaaatcagtatttcctcggaagctcatttggctggagtcctgatgacatcaagcctgaggatattaatgctttgcatctgattcccaaagaactttcacttaaaattgttagcaagatcgaggcaggagaacggtttacagtttatgttgttgtccctatgtggccagaaggaatcccagagagtgcctcagttcaggcaatattagattggcagagaaggacgatggacatgatgtataaagatgtcattcaggctctcagagccaagggtagcgacgagaatcccagaaactatttaacatttt

SEQ ID NO: 225774 - DNA, 383 bp, Gossypium hirsutum
cccacccttccgtttttcttaaattaggatcaactggagtttcttgaggagcggggtttaaaggacttgattaagaagcactctgagttcattagctatcctatttctctttggattgagaagacaaccgagaaggagatttctgatgatgaggacgaggaggataagaaggatgaggaagggaaagttgaggatgtagatgaggaaaaggagaaggaagagaagaaaaagaagaagattaaggaggtctcgcatgattggtcattggtgaataagcaaaagccgatttggatgaggaaaccagaggagataaccaaggaagaatatgctgcattctacaagagccttacaaatgattgggaagagcatttggctgtcaagca

SEQ ID NO: 225775 - DNA, 402 bp, Gossypium hirsutum
ccaagccgtccgaggggtagttgttgcagaagagttatttagtaaagagccacagctgaggcccgggggaagttgcctggcctaaacctttcaaccaacgtcattctcgacggggtttacacctccgccatcctttccgaagccacctcttccgtcgctaaactcatcggcaaacctgaggcctatgtgatgattgtgttgaagggttcagtacccatgtcatttggtggtaccgagcagccagctgcctatggagaactggtatcaattgggggccttaatccagatgtgaacaagaaactgagtgctgcaattgctgcatttcttgaaaccaagctacaagtgcctaagtcacggttcttcctcaaattctacgacaccaagggttccaactttggatgg

SEQ ID NO: 225776 - DNA, 389 bp, Gossypium hirsutum
ggcgtttgaagagttatcgcagtgtggtaccaaggatgaagggcttctgttggatgaattctgtgatgcttgttctttggtttctgttctttttaactcccttggtctcgccttcaaattcgcggagatggagtacgtcgccaagctgtggatttcttcaatcaggtgaatctgctctatggtaccctcactaagttttgtactcctgagaattgccctacaatgactgcaggacttaagtaagagatataaactagattccttttgcccttttcaataaatcgaaactccctcaacttgaatttaggctctttatctcttcgagctagatgatactgtattaatttatttttgttaaagttatatatatttgccttattttttttttg

SEQ ID NO: 225777 - DNA, 383 bp, Gossypium hirsutum
  unsure (1)..(383): unsure at all n locations
cggacgcgtgggtcctaacagagctttcagcttttaaaacagaggtattatttggagcgacttcaattatcgatagtcaataaagtgatttctggttccggtttgattgatacaaactatgagtagtctcaagttgggggtggaggtggtgggggcgcatgacctgttagccaaagatgggcagggatcattctgtgcctttgaggagctcgagttcgatggccagagatgccggaccactactaaagagaaagatctcaatccggtatggaacgagagtttctatttcaatgtatcggatccaaacaagttgtcaagcctcccacttgaagcntttgtttacaaccataacaaagcaaacaacgcgaagacttgtcttggga

SEQ ID NO: 225778 - DNA, 380 bp, Gossypium hirsutum
cggttggaaagaaaggaaactttatcagtaatgtgatgtggaggaatatattaggacaatccttttatcagtttatggttatatggtaccttcaggtgaaaggaaaaggaatgttcagtctcgagggtcccgattccgacctgacattgaacacaattattttcaactcattcgtcttctgtcaggttttcaacgagatcagctcacgtaacatggaggaaatcaacgttttcaaaggcatattaaataactacgtctttgtcgccgtccttggttgcactgccgtgttccaagtcatcatcatcgaattcttgggcacttttgctagtacaactcctctcacttgcttgcaatggttcgtaagcgtgttcataggattc

SEQ ID NO: 225779 - DNA, 387 bp, Gossypium hirsutum
taatgaatgaacaggttcaagatctactagggcaaagccacttcattggacatgatgtttaaagatagcagaagatgttgcagagggccttgcctacatccaccaagcatcaaggcttttccatggcaacttgaaatcgtccaacgtcctccttggttctgatttcgaagcttgcctcgccgactacagccttgtgctccttgcagactcttcttgttttactgaagatcctgattctttagcctataaagcgcctgagattcgaaaatccagccgccgactaactcccaagtcggatgtttatgccttcggtgtgtttctattggagcttttgacaggcaaacttccatcacgacatccggtgcttgtgcctcgggacatgctgga

SEQ ID NO: 225780 - DNA, 388 bp, Gossypium hirsutum
cccacgcgtccgggttctcaaccttaaaatttatgtgccactggctcttcaagggcttgtcacatgtgggaaaacaccccctcctggttacacttgctctctctaaaaccaaggttgctaggttgatggactctatatgatggaatggacatgagaggatgtcgagcttttctctttgtttcttagttggattggaaatctgatgcagtttttattgtaaaaccaattattttttttcttttaaaagattgttgcaacttgcaagtgtgtttctgtatcttccacaaaaaaaaaaaaaaaaaaagcaatcaagaatgatatttgtctttggtcatgattttctgggattttcattttgttgctttcgctaactatatatatatatatg

SEQ ID NO: 225781 - DNA, 380 bp, Gossypium hirsutum
cccacgcgtccgcaggcacaatcgttgacattggtaactgcagattatgcagaggctagttgggatgatagcgatccatctgtgttcatactgacaatcgtaaacaccttacaaggtgaatttcaaatcactaatggttatggccctgataaagcccctcaagtcatgcaggatcattggaattcttacatcactgaggaagatttcaatttcatgtctgcaaatggactgagtgccgtgaggatacctgtagggtggtggatagcgcaggatccaactccccctaagccttttgttggaggctcttcaatagccctcgacaatgctttcacatgggcagagaaatatgggatgaaggtaattattgatttgcacgcagc

SEQ ID NO: 225782 - DNA, 391 bp, Gossypium hirsutum
ggacaatatggaaacttgggcttaggtgacagaaatgatcgcttagttcctgagaaggtttctactctcaatggagagaagatgaatatggttgcttgtggatggcggcataccatatcagtctctgatactggtagattatacacttacgggtggagcaagtatggtcaactaggacatggggactttgaggatcaccttgttccgcataaggtggaatctttagctgacagttttattaagcagatagcaggtggatggagacatacaatggcactcacatctgatggaaaactctatggctggggatggaacaagtttggacaggtgggggttgatgacaacgctgatcattgctctccagtgctagttaaatttcctcatgagcaga

SEQ ID NO: 225783 - DNA, 388 bp, Gossypium hirsutum
ggaggagagtattgctttttattgtacacaatactacctagtcctctgtttggattagagatcaactcttcgttttgccactttctttctgaatgtgcagagaaaacactgcctattggaaaatcaaggacattaatgcaacggaaccattcaccaaccatgcatctcaaatggctgcactcgattacattgtatctgtggaaagtgatgtcttcattccatcacactctggaaacatggcaagagcagttgaagggcaccgtcgatttctgggacataggaaaaccatctctcctgacaggaaagcactagtccgcctatttgacaaaatcgaaaaggggttattgatggaaggcagaaaggtttccaatcgaatcagtgaaataca

SEQ ID NO: 225784 - DNA, 392 bp, Gossypium hirsutum
cccacgcttcctcatttaaggcacatgaattctcgtgaagctctttggtcagtggcatggaaaaggaaaactaatactagttcagttaatggctaatagcagcctagattcctatctttttaaaggtaagaccttattgacctgagaagtgagatttacaattgtgcaagacctggcatcagcactattctatcttcatgaagaaggtgaccattgcgtactacacagagatatcaaagcgagcaacattatgttagattctagtttcaatgctaaacttggggatttcgggcttgctaggctagtggatcatgaaaaagcgtcacaaaccacccatttagctgggactatgggctatttggcacctgaatgtgtgtcatcaggaaaagcta

SEQ ID NO: 225785 - DNA, 385 bp, Gossypium hirsutum
gtgtagagatgaggaaaatcatgggtgccaaagttcttttcttctttgctttgctttccttttcagctgtctcggcatttgcacaggatgaggaagaccaaggtcttgttatgaacttctacaaggattcttgtcctcaggctgaagacattatcaaggagcaagttaagctactgtacaagcgacacaaaaacactgctttttcttggctgagaaacattttccatgactgtgctgtccagtcatgtgatgcttcactgctgctggactccacaagaaggagcttgtctgagaaggagacagacaggagctttggcctaaggaatttcaggtacattgagaccatcaaagaagctgtagaaagggaatgtcctggagttgtttc

SEQ ID NO: 225786 - DNA, 386 bp, Gossypium hirsutum
gtttattttctctcaaaaaagtgatgcaaagaatacttgcatcaaacagatggcgaccatggagaaggggttagagtttgagaacaagaatttaggcctcaagcacctaaacttcgtcagggtggctacaatccacgccttggtttgcgtctcgaacctttacgattactctaaacagaactcggggccgttgagatccaccgttgacgccgtcgagcatgccgttaccactgccgtcggtcccgcctacgggaaatttaaggatgttcctgatcattttcttggatttcttgataacaaggtagatgaggtttcacacaaatttgacgagcatgctccagcaccagccaagcaagtggttaacctggcccacgatttggtccaaa

SEQ ID NO: 225787 - DNA, 389 bp, Gossypium hirsutum
ggaacatctagcagccaaccaaaaatggttctccaaaacgatatcgatttgtggaatcctccagcagagcttgagaagaagaagcacaaactcaaacgtcttgtccagtctccaaattctttcttcatggatgtcaaatgccaaggctgtttcaacataacaacagtgtttagccactctcaaacagtggtggtatgtgggaattgtcagactgttctttgtcaaccaacaggaggaagagctagactcactgaaggatgctctttcaggaagaagggtgattgatctcatattttgctattttatgattcacaaaaacaaaagaaagtaatctttggatcaaatatgggaatcatatgagtaatctttttcatgtgtttcagttatga

SEQ ID NO: 225788 - DNA, 387 bp, Gossypium hirsutum
cccacgcgtccggttgatgaatatggtttgattagacaaccgaagtatggtcatctaaagcagcttcacaaggctgttaagatgtgcgaacgagctttagtttcagctgatcccgttgtcacttcacttggaaacttccaacaggctcatacgtacacgtcagaatcaggagattgcgcggctttcctatcaaactacaataccgaatctgccgcgagagtgttatttaacaacatgcactataacttacctccttggtctatcagcatccttcccgattgtaggaatgtagtgttcaatacggccaaggttggagttcagacatcacaaatgcagatgttgcctacgaatactaagatgttctcatgggaaacttatgatgaagat

SEQ ID NO: 225789 - DNA, 374 bp, Gossypium hirsutum
gggaattcaacccaagaaatggagctgtgagagccgaaacaacagctactgcagctccagcaatcagcagatctgcggtggatggcaagaaaactctaagaaagggtagtgttatcatcaccggtgcctcctccggattgggtttagccactgctaaagccctggctgaaactgggaaatggcatattatcatggcttgcagggactttctcaaggctgaaagagctgcaaagtctgctggcatgtctaaacaaaactacaccatcatgcacttagatctcgcctcattggacagcgtccgccaattcgtcgaccgttacaagcgatcggggaggcctcttgatgtgcttagttgcaatgctgctgtttaccag

SEQ ID NO: 225790 - DNA, 381 bp, Gossypium hirsutum
cttccatcctcactccacatttcactctctttttcaactttcccttcttctctgtggtttaaagaggggcttgagttttagccaaagaaaactccatggctaaacttgttgctactttcttcttggctctcattgccatctccatggttcaaactttggttatggcatcacatggacatggtggtcaccattatgataacaaacgttatggacctggaagtctcaagccttaccaatgtccatctcagtgcacaaggaggtgtagccagacacagtaccataaaccatgcatgttcttctgtcagaaatgttgcaggacatgcctttgtgttcctccagggtattatgggaacaaacaagtttgcccttgctacaacaact

SEQ ID NO: 225791 - DNA, 394 bp, Gossypium hirsutum
gcgtgcggtacctgggaagaaagttccttcctttgctaaaggggaaatggcgaatcattggaagaccgtggtggcacagcaggttccacccgagcttcgcgatgccttcatagctgcagtcgacaaaggtaatatccgaaccatgccaaatagaagcatgccggctgatcctcatccgactccaggtgcacttcttatgggagatgctttcaacatgcgccatcctttaaccggcggtggtatgaccgtagcattgtccgatattgttgtacttcgagatcttcttaggcctttgcataaccttcatgatgcagcctccttaaccagctatctcgaatcattctacacgttacgcaagcctgtggcatctacaataaatactctggccggtgct

SEQ ID NO: 225792 - DNA, 387 bp, Gossypium hirsutum
cttaaaatcacaaataattaattttctaaaaatttccattttttgttcgtttgatgaaaatggttgatttagattggaaagcaaagatggtttcttcagatattagcaacaaatcctcgaaattgtccattccgacgccgcttcggttgttgaatatgtcgtctccgctttcgacttcggcttcggcttcatcggcttatgagtactatcttcgtttaccggagctgaggatgttatgggaggcaaaggagtttccagcttggcagaacgaggtcgttttgaaaccggctttgcatgctttggagattaccttccggttcatttcgatcgttttatcggatcctagaccgtattcgaatcgccgggagtggacgcgtcgacttgagt

SEQ ID NO: 225793 - DNA, 386 bp, Gossypium hirsutum
gcagtctctcccgctccttctcgctgcgatttcgtcttcaagatctcagttctgaaatcgtagcgctcttttctatcaagccatggctctgatcttgcatgcaggaaaaacaaacaaaaatgcctttaaggcactcattgctgcagaatatagtggtgtgcaggtcaaaatggttgagaattttgagatgggtgtgtcaaataagactcctgagttcatcaagatgaaccctttggggaaggttcctgtgttggaaacacctgagggtccggtatttgagagcaatgccattgctcgttatgttgctcgctcaaaggttaacaaccctatatgtggttctacattgattgattatggtcatatcgagcaatggattgattttgcag

SEQ ID NO: 225794 - DNA, 345 bp, Gossypium hirsutum
cacaattatcagtgaccaacattttggccttgagattgcaatttttgacatactgatcaagagaggagcataggaattgtgtaaggcacgtgtttgcaaattggtcatggaggaagttagggaaatcttatgagtgatttttggcagattgtgaagtgcgcgactgaggagtgagaggatctatgttcagcattgaagaagaaatataaggatgcttacgataatttaatgaaaaagtctccaaagatgtggactagggcatttttggggactacttgtaaatcagatatagttgacaacaatttgtgtgaagcattcaattcaagcattgtcgaagcttggttc

SEQ ID NO: 225795 - DNA, 387 bp, Gossypium hirsutum
cttaaaatcacaaataattaattttctaaaaatttccattttttgttcggtgggggaaaatggttgatttagattggaaagcaaagatggtttcttcagatattagcaacaaatcctcgaaattgtccattccgacgccgcttcggttgttgaatatgtcgtctccgctttcgacttcggcttcggcttcatcggcttatgagtactatcttcgtttaccggagctgaggatgttatgggaggcaaaggagtttccagcttggcagaacgaggtcgttttgaaaccggctttgcatgctttggagattaccttccggttcatttcgatcgttttatcggatcctagaccgtattcgaatcgccgggagtggacgcgtcgacttgagt

SEQ ID NO: 225796 - DNA, 385 bp, Gossypium hirsutum
aaaaacatttttgtgtcaaacaatttccccctttttatataaaaccataagggggggcttaattagcaaatacgccgttgagttggctaaaaacgctgcttacattggcacccctggaaagggtatccttgctgctgatgaatccaccggcaccatcggcaagcgtctttcaagcattaatgtagtaaatattgaagaaaacaggcgtgctctccgtgagctcctcttcactgctccaggagctcttcagtacctcagtggtgttattctcttcgaggaaaccctttatcaaaaaaccgcttcgggcaagcccttcgttgatgttttgaaggaaggtggtgtcctccctggcatcaaggtcgacaagggtaccgttgagcttaac

SEQ ID NO: 225797 - DNA, 381 bp, Gossypium hirsutum
gttttatttgcaggaaattggagattgaactgccaggagggagaacacacttgggggaatcatgtggtttgcctttaagcacttattttagtgcagtgaagctgctatggttgatggagaacaaggaagaggttagagctgctattaaaaaaggggatgccttgtttggaactatagacacatggttaatctggaacttaactggcggtgtaaatggtgggatacatgtcactgatgtctctaatgcatcacggacgatgctcatgaatctccaaactctcgattgggataaagcgacgttgaaaactcttggaataccagctgaaattctgccaaaaattgtaagtaatgctgaggtcattggtaaaatcgccaaagggt

SEQ ID NO: 225798 - DNA, 378 bp, Gossypium hirsutum
tgcgttctcctgatttggcgactgtgtaattccgataaagtttgcagcccttgggtgaatcacaatggcagtatctgcaattggatttgagggttatgaaaaaaggcttgaaatttccttttttgagcctggcatctttgctgatcctgaaggaaagggtcttcgggcacttaccaaagcccagttggatgagattctaggtccagctgaatgcaccattgtttcttcattatctaacaagcaagtggactcctatgtcctttctgagtctagcctctttgtctatccatacaagattataatcaaaacctgtgggacaactaagttgcttcttgctatcccacccatcttgaaattggctggcagtctatcccttgc

SEQ ID NO: 225799 - DNA, 354 bp, Gossypium hirsutum
gcgcttactcatacagaaatcgaatatgtttatttttgaaggcattttccatcgcattgtttggtgaatggggcgacaagagccagcttgctaccattggcttggctgcagatgagaatccatttggtgtggttcttggtggaattttaggacaagcactgtgcaccactgctgctgtacttggagggaagagcctggcgtgtcagatatctgagaaaattgttgcactctcgggtggagttcttttcattgtttttggaatccaatccctcctctcaacagttgagtcttgacgacttactaatggttagttctgatttttccatcaagaaaattggtcactagagttggcgt

SEQ ID NO: 225800 - DNA, 332 bp, Gossypium hirsutum
  unsure (1)..(332): unsure at all n locations
gctggccgtatcggcaagctcttactccatcgattgaagccattcaactgtaaggtcgtatatcatgatcgagtcaagatagatccagaattggagaaacagaccggagctaaattcgaggaggatcttgatgcaatgcttccaaaatgtgacattattgtcataaatatgcctctaactgagaagacangagggatgtttgacaaagatcggatcgcgaagatgaagaagggagtccttattgttaacaatgctcgaggagcgattatggatactcaagcagttgctgatgcttgttcaagtggacacattgcaggttacagtggagatgt

SEQ ID NO: 225801 - DNA, 381 bp, Gossypium hirsutum
cccacgcgtccgcccacgcgtccgcccacgcgtccggattaatgagattccatatttgactgattgcaggacaaaatctaaagatatggttactgtcttcctctttgagtctgcaccgagggcacagagcattctctattactttcttggatcttagatttattagggaagggatgtagttccaggaaattcgctaaactagtatctttattttacccggtagctgtaaatcccacaattttctatagaagtttcttattttgggttgtaatggataaatattaggattcgagctagaatgatgtaatagtttataggcgcttcttactgagaactcccttgaaggttcctctttccacacctgaaagtcaacatgttctg

SEQ ID NO: 225802 - DNA, 372 bp, Gossypium hirsutum
aaagactgcaataaagaagtggcttttagtgtattactctcattctcagcgctgggataatggcgagttcgccggctcttgtttcatggctggttctagttttaacccttgcaatggcagtttcaacgactcaagtcgaagctgccagggcattcttcgtattcggtgactcgttggtcgacaatggcaacaataattatctagccaccactgctcgagccgattcacctccttatggcattgacactccgagtcgtcgccccactggtcgcttctcgaatggcaaaaacatacccgatttcattagtgaagcactcggttcggagccgctactgccgtatttgagtccggcactcaatggagataggctac

SEQ ID NO: 225803 - DNA, 385 bp, Gossypium hirsutum
  unsure (1)..(385): unsure at all n locations
ctnnaagcaggcaaaatttttgtatgggaatgggttttctacagaggaactgcaggatctcaagttgatgatccagagtaatatgtacagataccttagcatattactggatgggcgggagcgatttgaggaggaagcaatgtctcgtataagagaactaggtcccgatgaccagaatagtgaagcaggtggggaggtcgactctagtgaaactaaccagtgcatctattctataaacccaaggctaaagcatttttctgattggcttctggacattatagccaccggagatttggatgcttttttccctgcagcaacacgtgagtatgctccattggttgaggagttgtggaaagatcctgctatacagcaaacgtataaaaga

SEQ ID NO: 225804 - DNA, 412 bp, Gossypium hirsutum
  unsure (1)..(412): unsure at all n locations
cggtccggaanacccggggcggccccacccgtccgattccttccatttcctctctttaacttccttgcttttctccaattgcaaccatgggttggaaaggtttcgttgagggaggcattgcatctatcgtcgccggcgcttcaactcatcctctcgaccttatcaaggtccgtatgcaacttcaaggtgaatcccatctccctaatccttcccttcaactttatcgtccggcacttgccgtcaactctgctgccgttgggaatgtttcgatctcgcaacctcgtgttggtcccatttctatcggtgtccgtatcatccaattggaaggtgtagcggctcttttctccggtgtctccgccacgatgcttcgacaaacgttgtattctactacccgtatgggactttatgaaat

SEQ ID NO: 225805 - DNA, 367 bp, Gossypium hirsutum
  unsure (1)..(367): unsure at all n locations
gccnnaagccgccgttctagctaatggcttcggccttttcgacgctggggccgtgggcgccaacatctcaggtggccacgtcaaccctgccgtcaccttcggtgcttttgttggcgggaacatcactctcttgcgcggcattctttactggatcgcccaactcctaggctcaaccgtcgcttgcctgttgcttaagttcgctaccggcgacctggctgtacccgcttttgggttgtcatcaggtgtgggcgtgtctaacgcattggttttcgaaatcgtgatgaccttcggattggtgtacacagtgtacgccacagccgttgatcccaaaaagggaagcttgggaacaatcgcaccattggcaatt

SEQ ID NO: 225806 - DNA, 383 bp, Gossypium hirsutum
cccacgcgtccgcccacgcgttcgtctatctctaaattctaatgccttctgtgggaatattccaccatccattggtaatttatcaactcttaattggttagatatggctgacaaccaacttgaaggagaaattccagtctcgaacggatccactacaccagggcttgactggttgattcataccaagcacttccatttcgggttgaacaaactctctggtccaattccaagtaaacttttcagttcagatatgactctgatacatgtgctgtttgaaaacaacatgctctctgggcctcttcctttgacccttgggcttgtgaaaactctggaggtggtgcgctttgacaacaattcactagagggggatcttccattgaatc

SEQ ID NO: 225807 - DNA, 284 bp, Gossypium hirsutum
gccagagtggttgcggccatccaacacaaagatggtaccatgttccgagatcgtgtctaaaaccgaaacagaatttgttggtggtgtttgaagaactcggcggagatgcatcgaagatttcgcttgtgaggagatcggttttaaatagacaccatcataataagtgataaaaaggtatgaaagtagaaaatgttgcagtttcattgtctaaatgcgccatttgtttttagaagagatgtttttagagtgcatgttttgaagaaatgaatcattcttgctttatc

SEQ ID NO: 225808 - DNA, 345 bp, Gossypium hirsutum
gtgtttcctggtgaatattgttttattgcccagctgaacgagggccggcacgttaagaagaggccaactgagttccgtgtagataaggttctccagcccttcgatgggaacaaattcaacttcaccaaagtcggacaagaagaggtgctcttccagtttgaagcaagtgaagatggcgaagttcagttcttcccaaatgctcccattgatgttgagaatcacccaagtgttgttgccataaacgttagtcctattgaatacggacatgtgctgttgatccctcgaattcttgaatgcttgccttagaggatcgaccgtgagagctttttgcttgcgctctatatg

SEQ ID NO: 225809 - DNA, 376 bp, Gossypium hirsutum
taaatgcccccctcctcaaactacatcacgtttgttggataaacttgttgggcggtttctagaagagacgtgtgtgaatcctactttcatcatcaaccatcctgaaataatgagtcctttggcaaaatggcataggtcaaaaccagggctgactgaacgtttcgagctgtttatcaacaaacatgaactttgcaatgcatacactgagttgaatgatcctgttgtacaacgtcaacgatttgctgaacaactgaaggatcgacaatctggtgatgatgaagctatggctctagatgaaacattctgtactgcacttgagtatggattgccgccaactggtggttggggattgggtatcgatcggctagctatgcta

SEQ ID NO: 225810 - DNA, 358 bp, Gossypium hirsutum
taaattccaactttactaaatttatcattttctgctgcataaactttaggatgatggtttttaacacacaagtgtcaaacctactaaaaacatcaaccattctgaaataatgagtactttaacaaaatggcataccacaaaaccaggcctgactctacgtctccagctaaatatcaacaaacataaacttttcaatacatacactgagtttaataatcctgatgtacaacgtcaactattttctaaacaactgaacgatctacaatctcctgattatgaagctatggctctagactaaacatccatgactgcactttaatatggattgcccacaactggtttttgaagactgatatca

SEQ ID NO: 225811 - DNA, 383 bp, Gossypium hirsutum
cccacgcgtccgggaatttcctgtgatatatgcataaacaatgtattggctgtagtaaatacaaagcttctaagggattatgcacagatagatgcaagattacggcagttggcatttattgtgaaacactgggctaaatccagaggagtgaatgaaacttatcgcggaactttatctagctatgcgtatgttttgatgtgcattcatttcttacagcaaaggagaccggctatccttccatgcttgcaggggatggagaaaacctacaatgtcaccgtggataatatcgagtgtgcttactttgatcaaatcgaaaaacttctcaacttcggatcttctaacaaggaaactgttgctcaactggtttggggtttcttcaacta

SEQ ID NO: 225812 - DNA, 424 bp, Gossypium hirsutum
  unsure (1)..(424): unsure at all n locations
ggaaaggaacggggngcgacccaccgcgtccgattcgacatgcacaattgtgatgtgctttgattggatgcacatgatgccacactcacaggagccaggttttaaggggatgtttattttggtttatgacacttatggacactggatttgcatcangattatcaaatcttctcagccactttctaatgatcattgcaaatattttatttttcagttactacgagggctgaagtaccttcactcggcaaatatccttcaccgagacttgaagcctgggaacctccttgtcaacgctaactgtgacctaaagatatgtgattttgggcttgcccgaaccagcagaggtaatgaacaattcatgacagagtatgttgtcacccgttggtaccgtgcacctgagctcctactatgctgtgacaattat

SEQ ID NO: 225813 - DNA, 378 bp, Gossypium hirsutum
gcgagccattccttttcattactgttataatttagttcagctcctgtaaatgtacctgaggtatatctacaaagcatttcctgattatcattttttaatgatttagcttttaaaacaccagaccaatattcttggctagcatctgtttcaagtatcattaaatcctcatcctgtggttggtataacgttggaaaatctttcaatttgttttttattttccttatgtaggcggtatcctcttgggtccattgccatacataatcttttttgagtttcttttggagtggcttcctgatttcagccaacttagctatatagcactctgcgtacgtcaagcaacccaaaaatctttgtaattgttttttatcacatattttc

SEQ ID NO: 225814 - DNA, 380 bp, Gossypium hirsutum
gtccgcctatcctgtttcctaaaactgttcggcgggggatagcgctgcctatcaccggacggctgcttttggggatgatgttgtgattgttgcggcatgtcgcactgcaatttgcaaagcaaagcgtggaggcttcaaagattcacttgcagatgatttgcttgcccctgttttaaaggctgtgattgatagaacaaagctgaacccaagtgaagtgggggatatagttgttggtacagtgttggcacctggttcacaaagagcaatggagtgtaggatggcagcattctatgctggtttccctgatacggtgcctattagaactgtcaacaggcaatgttcatcgggcctgcaagcagatgccgatgttgctgcttgca

SEQ ID NO: 225815 - DNA, 269 bp, Gossypium hirsutum
aagctccttatattttaaacaagattctctcctgagtgtgggccctaactttatgtgccaaggaggtgacttcaccgccggaaacggtaccggaggtgaatccatctacggatcaaagttcgctgacgagaacttcatcaagaagcacactggtcccggtattctctcaatggctaacgctggaccgggaactaacggatctcagttcttcatttgcacggctaagactgagtggctcgacggaaagcacgttgtgtttggacaagttg

SEQ ID NO: 225816 - DNA, 375 bp, Gossypium hirsutum
gtcagctgctgccgtttactgggccttcggtgactaactcctcaaccattccagtgccttctctctcctccctaaaaatggcttccgtgacgccgccgttatcttaatgcttattcaccagttcataacatttgggtttgcttgcacaccgttgtacttcgtatgggagaaagtaatagggatgcatgacactaaaagcatttgtttgagggcattggcacggctgccggtggtgattccgatatggttcttggccatcatcttcccattcttcggccctatcaactcggcggtcggcgctcttttggttagcttcaccgtctatatcatcccagctttagcccatatgctcacctatagaaaagcctctgctcg

SEQ ID NO: 225817 - DNA, 373 bp, Gossypium hirsutum
agagtttcgactttagatggcgatattgtacgcgctggtcgcgcgtggatcggtgatgctggcggagttcacggcggcgtcgactaacgccagcgcgatcgccaggcaaattctagacaagattccgggtgacaacgacattaacgtttcgtattcacaagatcgatacatcttccacgttaaacgcaccgatggactcaccgttctttgtatggctgatgaaagtgccggaaggcgaattccttttgcgtttcttgaagacattcatcagagattcgttaggacttatggccgagcaatattttcagcccttccttatggcatgaatgatgaattttcgagggttttgaaccagcaaatggaatattactcg

SEQ ID NO: 225818 - DNA, 224 bp, Gossypium hirsutum
ttcacggtcccttcaactaacgccagctctatcgccattcaaattctagacaagattctcagtgacaactacattaactttacgtattcacaagatcgatacatcttccacgttaaactcaccgatggactcacctttctttgtatgtctgatgaaagtgccagaaggcaaattcctttagtccttcttgaatacattcatcaaatatatctttatgacttatg

SEQ ID NO: 225819 - DNA, 380 bp, Gossypium hirsutum
gttctttcttcttaactattcaaagcttttcctcttcttctcttcatttccatgatcattttgatctagagatagcatccaataacatactatcagtagttttcttttctgtgaggttgcaaccatatcgatggcttgtctaaataatatttgcaaagaggtgagtgatgaaaaaatgatgacaaaggaagaagaggattacaccttagatggaactgtggaccgacatggtcaacctgctattcgatccaaaactggaacttgggtttctgggattttactacttgtgaatcaagggctggcaacgttggcattctttggggtaggtgtcaacttagtgttattcttgaccagagtgctcggacaagacaacgccgagg

SEQ ID NO: 225820 - DNA, 377 bp, Gossypium hirsutum
cccacgcgtccgaaatataagaaaataattcatacgcaatgagcactgctggtcaggttattcgttgcaaagctgcggtggcatgggaggcggggaagccactatcgatagaagaagtggaagtggcaccaccccaaaagcatgaagtccgtattaagattctcttcactgctttatgtcacactgatgtatactactgggagtgtaagggttacactcctctttttcctcgtatacttggtcatgaagcctcagggatcgtggagagtgtgggtgagggtgtgaatgatttgaaacctggagatcatgtgctccctatcttcaccggagaatgcaaagaatgtcgccactgtctgtcagaagaaagcaataacatg

SEQ ID NO: 225821 - DNA, 377 bp, Gossypium hirsutum
ccaaaactgaaaaaactctccattttttatcaaatgttctagacaacgatgggatctgaatctcaagttgtttgtgttactggtgcctctgggttcattggttcatggctggtcatgaggctactcgaacacggttacactgtccgcgccaccgtccgtgatcccgataatcaaaagaaggtaaagcacttgcttgatctaccaaaagccaacacccatttgacattgtggaaagctgatttatctgaagaaggaagctttgatgcagccattaatggctgttgtggtgtcttccatgttgccactccaatggattttgagtccaaggaccctgagaatgaagtgataaagccaacaataaatggagtattggatat

SEQ ID NO: 225822 - DNA, 378 bp, Gossypium hirsutum
aaagactgcctagatgcaataagcatgtgcctgatcaaatgcaccttgctgaaagggtttgaggcacttttgtgtttgacactaaagtgcaatgcctgggcacatgcctagacaacactaatgcctatacagttttgtcttctcattttggtggtttaacaggccattagaacggatgaagcactgaagttatatatgttttccaggttctggattgggtactggggcataatgaagcactatttaggcgcgctcaactaaaagcccttgtctccatccatagccaggaggctggaaaaggaggtgagctcacacatgatgaaacaacaattattagtggagcactagatttgactgaaaagactgctgaggaggcta

SEQ ID NO: 225823 - DNA, 340 bp, Gossypium hirsutum
aaggccaaaggctcctgtcgtttttatagcttgataaagcccaacctgaccttgatagtgctaatcaaaggatagaatcgataaatgatatgtacaagctactacaagaatacaactctagtttacagatatataacagtaaactccagactgatgtcactgctgctcatgaaaccattaaacgcggtgagaaagagagattggctgctgtggaaaatcttcataacttaaggggtgaacataaatcgttgcaagatcaactcacttcatctatagcttcacaagatggggttatgaagcaaaaagatgctttgctgaacgaagttgcatgtcttagaat

SEQ ID NO: 225824 - DNA, 258 bp, Gossypium hirsutum
cccacgcgtccgcccactttttcgttcacgcgtccgctttgtgaaatggcttgagaggtgtaggataagtgggagctctcgggcgaaattgaaataccactacttttaacgttattttacttattacgtgaatcggaagcggggcacggacgatctttttggacccaaggccggcttcggccggccgatccgggcggaagacattgtcaggtggggagtttggctggggcggcacatctgttaaaagataacgcacgt

SEQ ID NO: 225825 - DNA, 204 bp, Gossypium hirsutum
acttaaggcaaaaagaacccaccgctttattgttttcaaaatcgaggagaagcagaagcaagttattgtgcataagcttggttagccaaccaagagctatgaggatactactaaatgtctttccactgatgcaatccaaaaagtctacctaccatttttgattatctaacggccgataacgtcccaaagagcataatctttttc

SEQ ID NO: 225826 - DNA, 375 bp, Gossypium hirsutum
gatagaactgataagacccagacttttcaactgcctgtctaaacggagctgcgggagcacagggaaggccaatgtttgactttcctaagcaaaagattgttgttgctggtgctggaagtgcaggaataggggttgtcaatgctgcaaggaaaacaatggcaaggttgttaggaaatactgagcatgcttttgatagtgcaaagagtcaattctgggttgttgatgctaatggtctcataactgacgaacgtgaaaatattgatccagacgccctgccatttgcaaggaacactaatgaagctggtcgtcaaggattaagggagggttcaagtcttgtggaagtggtgcggcaagtgcggcctgatgtgcttcttg

SEQ ID NO: 225827 - DNA, 375 bp, Gossypium hirsutum
cccacgcgtccgatcaatggcggataatattttcaagtacgtgatccttggcgggggggtagctgctggatatgcagcgagagagtttgccaagcagggagtgcagcctggtgagctagcaattatttccaaggaggcggtggctccatatgaacgacctgccctgagcaaagcatatctcttccctgagggagctgctagacttcctggtttccatgtctgtgttggaagtggcggagagagattgcttcctgagtggtacaaggaaaaaggaattgaattgatccttagcacagaaatagtgaaagcagatcttcctgccaatactctagtaagtgccgctggagaaacattcaagtatcaaatcttgatcat

SEQ ID NO: 225828 - DNA, 388 bp, Gossypium hirsutum
ccacgcgcccgttatattatattttctgtgaaaagttgtaaaatggcgaaatcggtggagttgccggggcgtttaccaattcttccattcagaaacaaagttttattgcctggcgcctttattcgaattcgctgcacttcacacagcaatgtaaaattggtggcgcacgatttatggcagccagaggagaaaggattaataggaattcttccggttcaagatcctgctgagacgacctccatggattccatgttatctcaaggtgttggaagtgaatcacgtgagcgaagctcgaacgttcaggttagcacatctgatgctcacaaggttgatgggaaaaacccttcagaagtcattcactggcataacaggggagtggcagcacgag

SEQ ID NO: 225829 - DNA, 377 bp, Gossypium hirsutum
gttagaactgataagacttatccagctggtttcatggatgttgtgtcaattccagggacaaatgaggacttccgtctcctttatgatacaaaaggacgattccgccttcatgccatcaccggtgatgagtccaagtttaagctctgtaaagttcggtctgtccagtttggccagaagggtattccatacctcaatacttatgatggccgaacaatccgctacccagatccattgatcaaggctaatgataccatcaagcttgacttagagagcaacaaaattgtcgatttcatcaagtttgatgtcgggaatgttgtcatggtcactggaggaaggaacaggggacgtgttggagtgattaagaacagagagaagca

SEQ ID NO: 225830 - DNA, 379 bp, Gossypium hirsutum
  unsure (1)..(379): unsure at all n locations
gacccattttgcgaggcccaaatttatgaacgttctgtctaaactaagttccagagcattgcaacgcaaggataggggtcttttattgcggggcaccggttttggctaaagagctcagcaaactctgctacgagttaaaccaaaaaggttccactaaatttgaattccacaaagagcatttctaattctgaggagtatacaaggggaggaaatagcattcttaccatccagggccctaactcctttctttacctagagaaataagaattttgcaataataggcccagaagacaggagccaccgtacagccttagaatagaaaaagcagatatgaaaggaaaaaaggcatttaggtctctatccctatcngtgaataccc

SEQ ID NO: 225831 - DNA, 382 bp, Gossypium hirsutum
ctcttctttgtagccaaaaagaaaatatgagccgaattaaagaaactttatccagcatttctaattctgccaaacacatttccttcaccaagaaacacaagaaaattttcttggcactatttgcatctttagtcattgttgctgctataatcggcattgttgctggagtgagctcacggaataactccgatgagtccgatacttcccatcatgccgttgtgaaatcagcttgtagtggtacgttctaccctgatttatgtttctcggctgttactaccgtccctgctggtactgccaaaaaggtgaggagccaaaaggatgttatcgaattgtctcttaacatcaccaccactgctgtcgaacacaattacttcaagattaa

SEQ ID NO: 225832 - DNA, 379 bp, Gossypium hirsutum
cccacgcgtccgcccacgcgttcgttcacgcgtccgagaaaaaagtacgtcggggtagtcctgctactcagtggatttctgcttacaatgcacgtcgtcctatgaagcagagatatcactataatgtagcggattcgaggttgcggcagcatgtggataagggcaatgaagatggattgtttattagttgtgtggcttcatcagctaatctctgggccctgatcatggatgctggaaccagtttctcttcccaggtttatgaattgtcgaccatctttctacacaaggattggattatggagcagtgggaaaagaactactatattagttcgatagctggagcaaataacggaagttccttggttgttatgtcaaaagg

SEQ ID NO: 225833 - DNA, 378 bp, Gossypium hirsutum
  unsure (1)..(378): unsure at all n locations
caaaggtgcaaattacactcaaggtctaacctatgcttgagagcttgcatgacatgctgtgacagatgcaaatgtgtcccaccagggacatatggcaacagggaaatgtgtggcaaatgttatactgatatgagaacccaccgcaacaagcacaaatgtccttgaaaagcccaaccaaagcccccaaaaaacgacacttcttgagtatgtgtttttcatatttgtaatagcaaaaaagcttgcagtaataagttctgtaagaagagaggaaatggatggatttcttgtagtgtcttcgtttgtaatcctagaagctatgaactngtcaaaatagtttaattaacatataattggaggttaaataagtagtatatagta

SEQ ID NO: 225834 - DNA, 359 bp, Gossypium hirsutum
atttatttccccttttttttattagtttagagaaagggcttttgccaaaggaaggatttttgcaaacatgggggactcaacttgtctcatgcaaccattttcttacactgcaggccttcccaatgaagccgaagagggaaacccaattcatggtcttggacagtcaatttcgtttggcagattcatgtctgaatctttagcttgggaaaaatggtcaaccttttctcataacaaatatgttgaagaagctgagagatatgctaggcctggttcagtagctcaaaaaaaatctttctttgaagctcattataagacccttgctgctaggaaagcagctgccttgcttgaacaagctaatg

SEQ ID NO: 225835 - DNA, 380 bp, Gossypium hirsutum
cccacgcgtccgctcaaatctttcctctttccttcttgtactaccaccaccccctgtgtttctgtcggaggtgaaaccgaaaagaacccatctccggcagttgcattggcatcggtctcccctcgctgtcctctaaaaagaatggacgctgctgagttgaagagggtgttccaactgttcgacaagaacggagatgggaccatctccaagaaagagttgaacgattcgttggagaatatgggtatctgcatccctgatcctgaattaacccaaatgatcgaaaagattgatgtcaacggcgataagtgcatcgatatcgacgagttcagtgagctgtaccgatccattatggataataaggatgaagaagaagatatgaa

SEQ ID NO: 225836 - DNA, 381 bp, Gossypium hirsutum
gtacgttctctcagagtcgagccttttcatttacccaaacaagattatcctgagaacatgcggaaccacaaagcttctcttatcaattcctccgattctccaactcagtaactcaatctcactcactgtgtcacgagttaactactcacgtggctccttcatttttcctgatcaccagccctcccctcaccgtaacttttctgaggaagttgcaatgttaaacggctatttcactgatttcattaccgaagcttatataatcggcaatccaaagcttcaaaaccgtagcaggcacatttactcggccgtaccaaaaagttcaccaccgttcgtggaagatcagagggcagagatcactctggaaatgtgcatgacaggttt

SEQ ID NO: 225837 - DNA, 351 bp, Gossypium hirsutum
cccatcaccatttatcggggaaagattttttttgatttggcccgagattttaccgtacgttgacgatatcgtgaaaggctgtttgggatcgttggatacatccgggaaaagcaccggttctggtgggaagaaaaaggggaacgctccatataggatttttaatttggggaatacgtcgccggtcaatgtgccggagctggtgaacatcctggaaagacatttgaaggtgaaagccaaaaggaatatcgtagatatgcctggaaacggtgacgttccattcactcatgcgaatatcagtttggcccaaagagaattcgggtacaagccctcaaccgatttgcaaaccgggtt

SEQ ID NO: 225838 - DNA, 327 bp, Gossypium hirsutum
aaaacgcttcttcttgctgatcttgttattgctgatgatagaactgcgaataggtcggcgggctctacagctcttgttgctatgctatgcgcaaggcatctaatggcggctaatgctggtgattgccgagcattcgctatgcgcgaaaaggggaagcatgacgacatgtctgaagatcacagacctatatatccatcataacgggggagagtagaagatcttgatcagggaatcgatgaccagtatctcaatggcggtctatcaattgccagagatttgtctgcacgaggcatgaattatcgcacgggttctaaagaacttctaatt

SEQ ID NO: 225839 - DNA, 378 bp, Gossypium hirsutum
atcaaggtccgtatgcaacttcaatgtgaatcccatctccctaatccttcccttgaactttatcgtccggcacttgccgtcaactctgctgccgttgggaatgtttcgatctcgcaacctcgtgttggtcccatttctatcggtgtccgtatcatccaattggaaggtgtagcggctcttttctccggtgtctccgccacgatgcttcgacaaacgttgtattctactacccgtatgggactttatgaaattataaagaacaaatggactgacaaggaaactgggaatttgccacttacgagcaagatattggctggacttattgccgggggtgtcggcgccgccgttggcaaccccgctgacgtagcaatggtgcga

SEQ ID NO: 225840 - DNA, 386 bp, Gossypium hirsutum
aaaacagaggcaggcagccatggcatggatcaaggtgcacgagttaaggagcaaagcaaagacagagctgttgactcagctcaaggatttaaaagccgaactttctctccttcgtgttgccaaggtcactggtggtgcccccaataagctctccaagattaaggtggtgaggctatccattgctcaagtattgacggtgatatcccaaaaacagaaggctgctttgagggaagcttatacgaagaagaagtttttgcctcttgatctccgtcccaagaagaccagagctattcgccgccgccttaccaagcaccagcaatctttgaaaaccgagcgggagaaaaagaaggagatgtactttccgatgaggaagtatgccattaagg

SEQ ID NO: 225841 - DNA, 371 bp, Gossypium hirsutum
  unsure (1)..(371): unsure at all n locations
cccacgcgtccgctttgtgatgctgaggttgctcttatcatcttctctagtcgtggcaagctctacgagtttggcagttcaggtatgagcaagacccttgagcgataccagcgttgctgctttactcctcaagacaacagccttgaacgcgaaacacagaattggtaccaagaggtaaccaagttaaaggcaaaatatgaaacactgcaacgcactcaaaggcatttgcttggagaagatctcggaccattgaatgttaaggagctgcaaaaccttgagaaacagcttgaaagagctcttgcactggctagacaaaggaagacacagatcattatagaacaaatggaagacctncgcaaaaaggagcgtga

SEQ ID NO: 225842 - DNA, 288 bp, Gossypium hirsutum
caaaaggcacaagtatttcactttgtgtctttctcaagtcggtatcggtgcggtgaagagcaatgctggattgttcatatggatggatcttcgtaagctcctaaaagagaagacgttcgatgctgaaatggacttgtggcgagtgattatcaatgaagttaagctcaatgtttcccctggttcttctttccattgtgacgagccgggttggttcagggtttgctttgctaacatggatgacaataccattggaagttgctttgttgagaataacgaccttttatgcat

SEQ ID NO: 225843 - DNA, 328 bp, Gossypium hirsutum
  unsure (1)..(328): unsure at all n locations
cgacccacgcggncnggnacncntttgaagaaaagttaatggttctgctagagaaactttgggaggatgtagtgttcggtccttaaccggaacttgacctaggccggctgaggaagatcaccaccaccccacccttgtccaccaaagatgaggcttcatcaatggcgatgccgacgagtccgacgacacctgggacaccatcgacgccggtgtcggctcgtatggacaacgtgtggaggagcgtgttcaatccaggtagcaaccttgcaaccaaaggtataggctctgaagttttcgacaagcctaaacctaactctcctactgttta

SEQ ID NO: 225844 - DNA, 381 bp, Gossypium hirsutum
tttttagggtcaggtttgaaaattgttattgctcgtgatgctgttcgtagcattgggcaaagtagtaaccatggtgaggatttggataataaacaacaagggtctattgtttcttcaacggatgtaccgttttccataagcacaaaacgggtttttgaagctgctgtggagtattcaaggactatgggttataattttattgcccctgaacatattgctgttggtttatttaccgttatgatggaagtgctagtcgtgtcctaaaaagattgggagcaaatataaatcacttggcagctgaagcagtcaccagattacaaggggagcttgcaaaagatggtagggaaccttcattatcatcaaaaaagatgagtgaaaaat

SEQ ID NO: 225845 - DNA, 379 bp, Gossypium hirsutum
cccacgcgtccgattacagaatcataatcatgggaaacagttgcgggaaacggaagatggtgactgtgctgagcatttatggtggcggcattagaggcataattccaagcgttcttcttgcatcccttgaatccaagcttcaagtatggacccttttttgttttaccatcatcattatttatctgttaatttatattttttgagttgattattgtggtaggaactggatggaccaaatgcaaggattgcagattattttgacattgttgcaggaacaagcacaggtggattgatagccaccatgcttacagctcccaacaaggacaatggacgacaacctttgtacgaggcaaaggacatcgccaagttctatttagag

SEQ ID NO: 225846 - DNA, 357 bp, Gossypium hirsutum
cccacgcgtccgcccacgcgtccgttcactcgtccgcccacgcgtccggcaaacggtggtgtcatggatctctctcccgtcagcaacaagaggaagaaagatttgtttctaaatggagacgatgaagactgttgtttgctcattaatcagcataatgatagggtcaatgacacagagatgcacccaatcgaaccgccttggttaaatgagtttagtggagtaatgagaaatgtgtatgggccggttacggctgcaaagactatttatgaggatgaagaaggatacctaattatcatcagcttgccttttgcagaccttaaaagggtgaaagttagttggtggaataatctaacgcat

SEQ ID NO: 225847 - DNA, 373 bp, Gossypium hirsutum
  unsure (1)..(373): unsure at all n locations
ggtccgaccgcacgcgtccgcccacgcgtnccgcttgtttaanaatataagtaaaaaagtcatacgcaatgagcactgcgcgggcaggttattcgttgcaaagctgcggtggcatgggaggccgggaagccactatctatagaagaagtggaagtggcaccaccccaaaaacatgaagtccgtattaagattctcttcactgctttatgtcacactgatgtatactactgggagtgtaagggttacactcctctgtttcctcgtatacttggtcatgaagcctcagggatcgtggagagtgtgggttgaggggtgaatgatttgaaacctgnggatcatgtgcttcctatcttcaccggagaatgcaaagaat

SEQ ID NO: 225848 - DNA, 354 bp, Gossypium hirsutum
atggttattgtcatattcttctttttaaaccatgactaccactatgatacgacgggcgatgaatatggcataacaagtgtcatcaccaaccgaggctcctgcgtcgcggatcgtggggggatgcacgctcgctcgcacaacagaagctcaaaaggagcaaccaaatgcgactggctaccctaacatgaacacctcccaaatctacctatggaatccaaataatccaaccaaaccccagctacacgactacagaatctacttacaagaatgctgacctatggtacatgacgccctcataaagatcaagaacgagatcgaccagtcgatcatgtaccggctctcctggactgtagg

SEQ ID NO: 225849 - DNA, 380 bp, Gossypium hirsutum
ctcaaatatcaaatccctcgaaaaattctccccatccaatcaccacccgaaaccagggccactccttccccacgcgaagaaaatgtctacatggccaaactcgccgagcaagccgagcgctacgaggagatggtcaagttcatggagaacgtcgtctccgccgtccccgctcccgacgaactctccgtcgaggaacgtaacctcctctctgtcgcctacaagaacgtcatcggcgcccgccgtgcttcctggaggatcgtctcctccatcgagcagaaggaggaaggccgtggcaacgccgaccacgtcgccgtcatccgtgactacagggccaagatcgaggccgagttgtccgagatttgcgctggaattttgaagct

SEQ ID NO: 225850 - DNA, 385 bp, Gossypium hirsutum
accacacatacgggaagagaccgattttatcaatctcttaaccggcgaaaaaccagaggaaatacttttccgcctcaaccccaaccaaataatgccaagacgagtttctgggtgccaagattctctggatcaacggatataacaatttggagttgaagattcggacagccgtttaacgaagagtattgcatccttaccttcaacatatgcactcaatttacgatgatttggatgagaagaaacgagacttgaagctttacgtgaacgtcgctggccatggcgatgatcacaagggactgtggagatgcgttcccttcacgcatacttcaacgtttgaaacaatagctatggaatctgaccttaaaaacaaagtcaaatccgatct

SEQ ID NO: 225851 - DNA, 379 bp, Gossypium hirsutum
cccacgcgtccggcgagtcaaggcattgttcttatctacgacaatcggcttgtcgtagcgggaaatgtctttaccaggtgtcttacggtgatggatcttacacagtaggtgattttgtgactgaaacggtgtcatttgggaactccggtgatatcaaaggcgttgctttgggttgtggccataccaacgaaggcttatttgttgcagctgccggtttagttggactcggtggtggtcccttgtctttaacatctcagattaaagcgacgtcgttttcttattgtttagtggatcgtgactcagcgggttcatcgacgttggatttcaacttcgggttaccggctgactcagtggttgctccgttaataaggagccgtaa

SEQ ID NO: 225852 - DNA, 381 bp, Gossypium hirsutum
atggaagtttaaatcttagaattcatcgatgaggtgattcaactagagaaactggtgcatgtggatctccttcctcgtcatcacaaaatggagtggcttatcagcccgaggcggtaattgatatgaagcggagatatgctgggcactgcaatgttggaactgacatcaagcaggcgagtttccttggtcagagaggtgaatttgttgctagcggcagtgatgatggaaggtggtttatttgggagaagcagactggtaaattgataaaaatgcttcttggagatggcgttgttgtaaactgtgttcagagccatccatttgattgctttgtggcaactagtggtattgacaacacaataaagttatggactccaagtgctg

SEQ ID NO: 225853 - DNA, 377 bp, Gossypium hirsutum
cccacgcgtccgcttgcgtgccagatgactttcttaatttctattgtcttggcagtcgtgagcttgatggatatcaacctcctattgacgaaagtcctaaggctgccaatactcctgaggctcttagtcgaaaaagtcgaagatttatgatctatgtccattcaaaaggtatgatagttgatgatgagtttataatagtgggatctgcaaacatcaatcaacgctccatggagggtaccagagacacggagattgcaatgggagcttaccaacctcaacatacttgggcagcaaaacgttctagtccccttggacagatctatgggtataggatgtcattatgggcagaacatattggagtagtcgaggactgcttc

SEQ ID NO: 225854 - DNA, 379 bp, Gossypium hirsutum
cggacgcgtgggaaaaaatccaatttatcgattcattttcatagtgaatcagagtgaaaaaccttaaaatcattattactttaaaaaacccagaaaaacaaaagcttagcaaacaacaatggtgaaacaccttagcgagaaatctgcgattgaaaggagggattcaaggttcacaggtgtacgtaagcgaaaatgggggaaatgggtatctgaaatcaggctaccaaacagtagagaaaggatttggttaggttcttacgacaccgccgagaaagcggcgcgtgcattcgacgccgctcttttttgcttacgcggccgttctgctaaattcaatttccctgataacccacccgagatagccggcggtacgtctttatct

SEQ ID NO: 225855 - DNA, 212 bp, Gossypium hirsutum
agaagagtgagcggacacgaaatagctgaactggcaactaacccgttggtgaacgcttggtatgccggccaagacccagtggcaccggtggaaatagcggatttatgtgagggtatttatggaactggaggtggtggatcttacacgggacaactatttaacgataaagatggtgccacgtttaacatgaacgggatcagacggaggtactt

SEQ ID NO: 225856 - DNA, 383 bp, Gossypium hirsutum
cccacgcgtccgggaaagggttgattactcgagagatcgcggatacctttatagcgtatccctaaggacttttgttgtccgatatctttggacttaatgagagatccggtgataatttcgacaggtcagacgtatgatcggagttcgattgttaggtggttggaggaaggccattgtacttgtccaaagacggggcaaatgctcatccatactcgccttgttcctaatcgggctttgaggaatttgatcatgcagtggtgcactgctcatagtgtcccatatgatcccccggaggctgcagatgcacctgcagagtcatttgctgaagctttgccaatcaaagctgcaactgaagctaataaagcaacaacaacccttcttgt

SEQ ID NO: 225857 - DNA, 393 bp, Gossypium hirsutum
cccacgcgtccggtgggttacacgctcccatacgcatgggtggtgaactcggcgaatctgtgcccgggggtatgcgcttatcccttcgctgtgccgaaatacatgacggggttcaagccgttaaagtcacccaacggtgacgtaggagtggacgggatgataagcgtgatcggacacgaaattgctgaactggcaactaacccgttggtgaacgcttggtatgccggccaagacccagtggcaccggtggaaatagcggatttatgtgagggtatttatggaactggaggtggtggatcttacacgggacaactatttaacgataaagatggtgccacgtttaacatgaacgggatcagacggaggtacttggttcagtgggtttggaatcat

SEQ ID NO: 225858 - DNA, 392 bp, Gossypium hirsutum
aaaaaatatcacatttatcaagacatttgcctccggaattattgtgcccaagtctgacatatggcctgtagataaggatctttacttgctaccttctacttctcttgtcttggatgctcacaaagaagggctagaagtttttgcctcagatttctataatgatgttccatttagcttcaactactcctatgatccagtggccgagtatcttcagtttattgacaatggtgaattctctgttgatgggatgatatccgacttcccaataactccatcagctgctatagattgctttgctcaccttggcagaaatgcctccaaacaagtggaccttctggtcatctcaagtaatggagcaagtggagactatcctggttgtacagatatggcat

SEQ ID NO: 225859 - DNA, 387 bp, Gossypium hirsutum
cccacgcgtccggctatttttaccattcctcctgagctggcatatggtgaatctggctcaccgccaaccattcctcctaatgcgaccctccaattcgatgttgaattgctctcttggacaagtgtcaaggacatttgtaaagacggtgggctatttaagaagatactgactggaggagagaagtgggagaatcccaaggaccctgatgaagtgttagttaactatgaagctaagcttgaggatggaacagtggttgcaaaagctgatggcaaggagttcactgttatggagggtcatttctgtcctgctttggctaaggctgttaagacaatgaagaaaggggagaaagtacttcttacagtgaagccgcaatatggctttggtgag

SEQ ID NO: 225860 - DNA, 386 bp, Gossypium hirsutum
aaacgaccagatggccagcaaaatttttttttttggcttaaaccaacactatccggtagagggattttcaaaacctttatggatccacggattgagggccagttttcatctaaggcagcaacacaaacagccgagctcactctgaaatgtctagagcatgatcctaaaaatcgtccatcgatgaaacaagttgtggaagcattagaacggatcgaatcactaaacaaggaaagaccaaaggagtcctctaaatccggttccattcattcctcaactacgcctagccatagacaacaatctagtagtcagcgtccacagtttcattcaaggcaacatggcacttgagcagcagttcctccaacagtactaaaacttgggctcaggat

SEQ ID NO: 225861 - DNA, 346 bp, Gossypium hirsutum
cccacgcgtccggtgggttacacgctttcatacgcatgggtggtgaactcggcgagtctttgcccgggggtatgcgcttatcccttcgctgtgccgaaatacatgacggggttcaagccgttaaagtcacccaacggtgacgtaggagtggacgggatgataagcgtgatcggacacgaaattgctgaactggcaactaacccgttggtgaacgcttggtatgccggccaagacccagtggcaccggtggaaatagcggattatgtgagggtatttatggaactggaggtggtggatcttacactggacaactatttaacgattaaaatggtgccacgtttaacat

SEQ ID NO: 225862 - DNA, 399 bp, Gossypium hirsutum
ggcgacccacgcgtccggccactcttccactctaccttttcttcattcattgttcaatgccaacgaggtaagatccttttagaaagatgcctacctttccgaaaactctcactggtatgaccatcaccctcgagatggaaagctccgacacaactgataacctcatgaccatgatccaaatcaaggaatgtatcccctctgacccacacatgctaatcttccatgttacacaacttaaggatggccgtacccttgctgactacaacatccaaacagactacaccctccatcttgtcctccgtatcatgggtggcatgcaaatctttatgaaaacccttactgtcatgacaatcacccatgatgttgaaagctcccacacaattgataatgtcaaggcta

SEQ ID NO: 225863 - DNA, 391 bp, Gossypium hirsutum
ggagaaagcaactgaggaaatagaggtcttatatggggctgatctggaaactggggtttttggcagtgggtttcctaagaagtccagtcaagttggacttgcttccaacgagaagtacataaattctggttggaacttaaataacttccccaggctacctggatccgttctcaattatgaaagcagtgatatttctggggttctggttccctggttgtatgtaggaatgtgcttttcctccttctgttgggtcactcagctgtccccttcgatactaaaatctgaaggggtacctgtctatcgatgtgttcagaatgctggagaatttgttctgacattccctagagcatatcatgcagggttcaactgtggtttcaattgtgcggaggca

SEQ ID NO: 225864 - DNA, 390 bp, Gossypium hirsutum
acaaaacatccagtttttctttttcttttttcttcagttttctggttttccgacgtggggtttgaagatccagacagggtttcaagacatataaagataagggaagtttggtctgataatttagattcggagttcgagttgatcagtcaagcaatcgatgagtaccctttcatctccatggacactgaatttccgggtcttgttttcagacccaaagtggatccaacccggccttacggcgcccagttccggccgtccgatcattacaagatcctcaaatccaacgttgatgctttgaacttgatccaagtgggcctcaccctcaccgattcttcaggtaatttgcccaccctaggaaccgacgacgagcagttcatctgggaattcaat

SEQ ID NO: 225865 - DNA, 377 bp, Gossypium hirsutum
  unsure (1)..(377): unsure at all n locations
gcctttgactgtgtatggtgatggtaaacagacaaggagtttccaatatgtttctgagctggtggaggggctaatgcgattgatggaaggagaacatgttggaccttttaaccttggaaatccgggtgaattcaccatgcttgagcttgctgaggtggtacaagaaacaattgatccaaatgcaaagatagaattcagacccaacacagaagatgacccacacaagaggaagcctgatatctcgagagccaaggagctactcggttgggaacctaaagtctctctccgaaagggtctccctctgatggtttcggatttccggcaacgtatatttggtgatcantaggagggcagcagcaataacagcaacaatgaat

SEQ ID NO: 225866 - DNA, 388 bp, Gossypium hirsutum
cggacgcgtgggcgggagacttttttttaggtatacccagatcttgtttagttggaagctttaggttgtcatcgttttctcgaggttttaaactatgggctcttgaatttgtgaaacaaagggagatatattggttaaaaactagtagcagtgtattgaatcaagttttacaaaaaaagaagttaaaaagaaagatgaaaatccagtgtgatgtttgtgagagagctccagcaacagtgatatgttgtgcagatgaggctgcactttgtgctaaatgtgatattgaagttcatgcagctaacaagcttgctagcaaacaccaaaggcttctccttcaatgcctttctaacaagcttcctccttgtgatatatgccaggaaaaagcagc

SEQ ID NO: 225867 - DNA, 384 bp, Gossypium hirsutum
agaatgtaaatacacaatccaagaatgtgtctctcataccgactgggttagctgcgttcgtttcagcccaaatactcttcaacccaccattgtttcagcttcatgggacaagactgttaaagtttggaacctgaccaactgtaagattcgtaacaccttggccggacactccggttatgtgaatacggtggcggtttcacctgatgggtctttgtgtgccagtggaggaaaagatggagtgattctgttgtgggatttggctgaaggaaagaagctttatagtcttgatgcaggttccgtcattcactcgctttgctttagtcctaataggtactggctttgcgcagccaccgagcagggtatcaagatctgggatctggagag

SEQ ID NO: 225868 - DNA, 383 bp, Gossypium hirsutum
ggtggagggagtgtgccagctcaataagctactcctgaaacttggaattccgatgatatacgggattgatgcagttcatggtcacaacaatgtgtacaaagccaccatttttcctcataatattggtcttggagtgaccagggatcctaaccttgtcaagaggattggtgaagcaactgcactcgaagttagagctacaggaatcccatatgtttttgctccatgcatcgcggtttgcagggatccaaggtggggtcgatgctatgaaagctacagtgaggatcataagattgttcaaatgatgactgagattataactggtttacaaggaggcctccctgtccattctaaaaagggtgttccctttgttgctggaaagaaca

SEQ ID NO: 225869 - DNA, 396 bp, Gossypium hirsutum
  unsure (1)..(396): unsure at all n locations
ctactatccagcgtaaccacaaccatgataacgggcttgtcagaatcagcggataaagatttccctgttgagctggactctaatccnactttgtaaaatgactttagaagtgtaggataagttggaactctctggcgaaattgaaattccactacttttaacgttattttacttattccgtgaatcggatgctgggcacggcccctcttttttgacccaaagccatcttttgccgtactatcctggctgaaaacaatttcaagttgggaatttttcttgtgccgcacatttttttaaaagataaaccccaagttgtccttaaaatttatctcaaaccataaccataaaattttttttttttaaaaaaaaaggtttaaaaacttccttttaaatttt

SEQ ID NO: 225870 - DNA, 136 bp, Gossypium hirsutum
aaaagactcttcgggcattagggtctctccaaaatcagacaatcttgctcgcttgactggcatcatccctggtccccttggcactccttatgaagggggctcccttgaaatcgatatcacattgcctgatgggtat

SEQ ID NO: 225871 - DNA, 381 bp, Gossypium hirsutum
  unsure (1)..(381): unsure at all n locations
gcatcttcccccgccgccttctctttttttacctcctttgccttccactctaatgtacggtccaaaaagcatggtcggacctaaaatcactatcaagttcctttgtagttacggcggaaaaatcgtccctcgttaccctgacggcaaactccgttattacggcggtgaaacccgtgtcctcgccgtcgatcgctccattcccttctctgagctgttggtgaagatgggagagatgtatgggtcagcggtgaccctacgttgccaattgcctacagaggatttagacgcgcctggttcgatcacttncgatgaggatctcgcgaatctcatcgaggaatacgatcgggtagcgtcgccaccctcttctataaagatcagagc

SEQ ID NO: 225872 - DNA, 386 bp, Gossypium hirsutum
gcaaataataataaattcagatacaccggttaacaaggcattggagaaatccggggataaaacagctgctgcagcggcatataaagcaagcgttctccagcagatagccgaagggaggcagttgcttacatcgtcaaatgaaaattctgaggcattggctttgattgttgatggaaaatcattaacttatgctctggaagatgatgtcaaagatgccttcttagaacttaccattgggtgtgcatctgtaatttgttgtcgttcatctcctaaacaaaaggctctagttacaagactggttaaaactaaaaccggaagtacaactctagcaatcggtgatggagcaaatgatgtcggtatgcttcaagaagccgatatcggagttg

SEQ ID NO: 225873 - DNA, 395 bp, Gossypium hirsutum
aggcttccgccaacccttccgaatttttgtaagctattttggttaaggacgttgaggtggggggggggttccaagccaaggcctacaatgatcctccacaagttcaattggtggacggggaggagttgacaaagtggtcattttatagggctgtaatagccgagtttattgccacgctcttatttttatacatcactgtgttgacagtgatcggatacaagagtcaggttgaccctgataagggcagtgacgaatgtggtggtgttggcattcttggcattgcttgggcttttggtgggatgatctttatccttgtttactgcactgctggtatctctggaggacacatcaacccagcagtgacctttgggcttttcttggctaggaaggtgtcc

SEQ ID NO: 225874 - DNA, 382 bp, Gossypium hirsutum
gctgtgcgaaaaatcaaaagacaaaatgggttattcaagttcttccaagtggcggttgcttatgcctcttatggttgcctgtctgattatggcagcatctggtagcaacttccacaatgattttgacatcacatggggagatgggcgtggtaagattgccaacaatggcgaggttctcactctctccctcgataaacaatctggttctggtttccaatccaagaatgagtatctttttggcaagattgatatgcagctcaagcttgtcccgggaaactctgctggcactgtcactgcatactatgtaagttatttgcttagttttccactcatttttaccgagacacaatagatgacattggcaatggcttataatatgatg

SEQ ID NO: 225875 - DNA, 383 bp, Gossypium hirsutum
tgtatctggtgaagacaaaggtgtttaactcgataacataatccgtaaaactgggatcaccggcattgggaatggcatggatgttcaagaatggaatcctgcctctgacaaatacatcagtgccaaatatgatgcaacaactgtaatgaaggcaaagccactgttaaaggaagctcttcaagctgcggtgggatcgccttgcgacagagatgttcctttgatcggattcattggtaggctagaagagcagaacggttcagatatcttggcagaagctattacgaaattagttgctggaaattgccagactgtagtccttggcacaggcaaaaaggccatggacacgcagattgagcagctggagatccaataccctgacaacg

SEQ ID NO: 225876 - DNA, 379 bp, Gossypium hirsutum
  unsure (1)..(379): unsure at all n locations
tttgcagttctaatcttctggctaatcttccgcccaaacgaggtcaagttccaggtgggtgacttttcgctcaacgagttcaacctggacggcaacaacaccttgcattacgaccttgctgtcaatatcacagtgcgcaaccccaacaggagaatcggcgtacactatgatcggatcgaggctagggcttactacgaggaccaacgtttcgatacccaaactttgccctcgttttatcaaggacacaagaacactagtttcttgaaccctgtattcaagggcaagcatctggttttccttggtgcggatgaaactgcggagttcaatgaagagagggctagtactatntacagcattgatgtgaagctgtatttgagga

SEQ ID NO: 225877 - DNA, 191 bp, Gossypium hirsutum
  unsure (1)..(191): unsure at all n locations
tctaaagtttgtcccnttagcaaacttctctattgttgaaatgaatgtaagtttaatgtgtaattctgtggccttttaccaaatagcaaatctgaccatgattccaagttcttgctctctggaagttgtttttgacaaggttcgcttctcaagggatacaaaacttagcattctactagttcttccttgta

SEQ ID NO: 225878 - DNA, 387 bp, Gossypium hirsutum
cccacgcgtccgagagagttcaaaaacatgtaatcacttggtgtcccatttcctaagagccagccgatgagaatttactctagcttgtggaatgccgatgattgggccacaaggggtggtttggttaagaccgattggacccaagctcctttcactgcttcttacaggaacttcaatgccgatgcttgtgtgtggtccaatggagcttcttcatgcaaatcgaatacttcaccgtcttctgcatcgacaaacagaacatggttctctcaagaaatggattcagcgatgcaacaaagattgcagtgggtacaaaagaactacatgatatacaattactgcaatgatgctaagagatttcctcaaggtctacctccagagtgcaatatg

SEQ ID NO: 225879 - DNA, 290 bp, Gossypium hirsutum
ttttcttggtgagatcgagcatagatctccacaacttgctattttcaggtcgaaaaatgttttgaatagtttatttaatttaatttggatccatttggtaaaaactaaactctgataatcttgactgcttcaaatcggtctggatacgataccgcggaaaagaagtcggtgaatcgatgttctggttgcagaaaacgcgttgggttgacggggttccggtgtcgatgcggggagcttttctgtttggaccatcggtacttggatcgacactattgtagctacgactacaa

SEQ ID NO: 225880 - DNA, 371 bp, Gossypium hirsutum
cccacccgtccgaagaaatcgagattggtggtcccaaacttggaggccacgttggaaacattggtggatgcatttgtgctgttggataagaacaaggttggctatgttagcaagactgagatggttcaagctatcaatgaatctggggagcgttcctctggaccaatagccaccaaaagatttggtcagctcgctctctatatatatacaaattctttggtacattatcgacacaaattttacacatacggtaaaaatatagtaatatacaaaaaaagaaaagggttcccaatatcacatgtaaacatgtgcataatatggtgtttacttcacttaaagtagacaaattgtgcagaaaaaatgcataatat

SEQ ID NO: 225881 - DNA, 385 bp, Gossypium hirsutum
aaattatgttgctccagaggtgatcaacattaaaggctatcatggagctaaggcagatctttggtcatgtggtgtgatactctttgtcttaatggctggctacttgccttttgagcaccccaatttaatgggtttatataaaaagatatttaaggctgacttcgattgtcctccatggttctcctcaagtgcaaagaaattaatcaagagaatcctagatcctaatccattaacaaggataacagttgcggagattattgagaatgagtggtttaagaaaggatttatcctacctaggtttgagcgagctgatgttagtcttgatgatgtggatgccattttcaacgaatcaagtgattctcggaaccttgttgaactgtgtgaa

SEQ ID NO: 225882 - DNA, 389 bp, Gossypium hirsutum
cggacgcgtgggttcatctgccactgaaacaaaaggaactgtattgattcactcagctgagcagctagagaattattctaaaactgaagaagctaaggttgaggaactcatcaaagcagttgctgattctggtgccaaagttattgtcagtggaggagctgttggtgaaatggcgttacatttctgtgaacgttacaagttaatggtcttgaaaatcagctcaaaatttgaactgaggcgtttttgccgcactacaggaacttctgctcttttaaaactcagccaaccaaagccggatgatttgggatttattgattcaatttcagtcgaggaaattggtggttctcgggtcactgttgtgagaagcgaagaaggtggtaacaagattg

SEQ ID NO: 225883 - DNA, 385 bp, Gossypium hirsutum
cccacctgcccttttctttgtaatattcgaactcccctctcgtcctctttgccgatttgtcttcttcattgccccaccatggcatgtgttagctttgctaaactcaacgcaccgtcatcctcttggatcggtggccagcagtctctccctcaacgctccggatcatccgctcggctcgccactcgcagagtctcactcccgatccgtgctggcgcttacaccgacgaactcatcaaaaccgccaaaactattgcttcacctggtcgtggaatactggcaattgatgaatcgaatgcaacatgtgggaagagattatcttctattggcttagacaatactgaacccaaccgccaggcttacagacagcttctgctcacaactcctg

SEQ ID NO: 225884 - DNA, 386 bp, Gossypium hirsutum
cccacgcgtccgcccacgcgtccgtttggaaaactgccgacaagatggttgccgccaagaagcacgttcctatcgtcaagaagcgcacgaagcgcttcatgcgtcaccagagtgaccgcttcatgcgcgtcgacccttcgtggcgcaagcccaagggtatcgacaaccgtgttcgcaggcgcttccgcggcactcttgccatgccctcgatcggctacggctcgaacaagaagaccaagtacatgatgccctccggccacaaggccttcctcgtcaacaacgtcaacgacgtcgagcttctgctcatgcacaaccgcaccttcgccgctgagatcgcccacggcgtctcgtccaggaagcgcgtcgacatcatcgcccgcgccaag

SEQ ID NO: 225885 - DNA, 385 bp, Gossypium hirsutum
caaacaagtggatcttactttctatcggtgacagtggcccggctcatcggagcgaccactccatgacagctgatgaccgacatgtttatgtctttggagggtgcggtgtttctggccggcttaacgatctatgggcttacgatgtttcttgccaaaaatggatcaaatatccaacccccggagatagttgcaagggaagaggtggcccaggattggctgtcgtccaagggaaaatatgggtggtttatggcttctctggagtggaaatggatgatgtgcattgctttgatccagtacaaggacaatggtcccaagtcgagacaagtggggagaaaccaacggcccgaagtgtattttctatagttgggattggcaaatgcataat

SEQ ID NO: 225886 - DNA, 385 bp, Gossypium hirsutum
gcggcggcgacaaccagccgtgtggctcggcgtatgggtgccgacgatgataagttggttttcgagacgacggaaggaatcgagcccatactgagtttcgatcagatggggttgaaggacgatctcctccgtggaatctataattacggcttcgaaaagccatctgccatacaacagagagcggtcatgcccataattaacggccgtgatgtcattgcgcaagcccagtctggtaccggcaaaacttccatgattgccctcaccgtttgccaagtggtcgacaccgctagcagagaggttcaagcattgatcttgtcacccacaagggaactggcatcacaaacagagaaagtgatacggacaattggtgatttcatgaacatac

SEQ ID NO: 225887 - DNA, 387 bp, Gossypium hirsutum
gtcttttttttttttttttgtttacaacaacaatggctggacacacagtttacgccctctcagaagtgtctcgacacaaatccaagaacgactgttggcttgtcatcgatggccgagttctgaacgtgacaaagttcatggaagaacatccaggaggagaagaggtgttgttggaatcagcagggaaggatgcgacgaaagaattcaacgatatcggacatagcaagtcagctcagaatttgctcctcaagtatcagattggtgttctccagggtcacacttcaaagaataatgaacaggttggttcaaccgaggagcccaaaaagaaagagatgagtgcattcgtgatcaaggatgacctgacgcctaaatatgcggcagtcgtcg

SEQ ID NO: 225888 - DNA, 387 bp, Gossypium hirsutum
  unsure (1)..(387): unsure at all n locations
ttcagtatggaaaagatacttgaacgctttgaaaggttttcctatgctgaaagacaggtggttgctactgaatctcaacctcagggcaactggtccatggagtataataaacttaaggcaaaggttgacctcttgcagaaaaatcacaggcactatatgggagaagatttggactcactgagtctcaaagagctacangaatttggaacaacagctngatactgctattaaacacattcgatctaaaaaaaaccatctcatctncgagtcaatctctgagcttcagagaaaggagaagggcatacangagcanaacgccatgctagcaaagcagatcaaggatagggagaaaacgtggcgcangcacagcagtcgcagtgggggcag

SEQ ID NO: 225889 - DNA, 385 bp, Gossypium hirsutum
tttaaacgccttgatgtggataatattgttcttaactatataatcagagttgaccgggccactcctattgaagataccatggaagaactgaagaagttggtggaagagggaaaaataaagtacattggtatctctgaagctagccccgaaactataaggagggcacacgctgtacatcctcttactgccgtacaacttgagtggtcgctctggactcgtgatgttgaggaagaactaattcccctttgcagggaactcggaattgggattgttgcatatagtccccttggtcatggtttctttgccggtaaagcaaaggaggatacctctaatagttctctgggagtgttcccaaggtttcaaggagaaaacttggagcgaaata

SEQ ID NO: 225890 - DNA, 400 bp, Gossypium hirsutum
cccacgcgtccgaagaccttggctaagatggttatggtgattgcaaccggggggctggtaatggggctcgtcaagctcaaggctacgtttggaaccacattttcaatttcataaattccatgtctctcaaatgtgcaattgatttaggtttcccagattttattcaaaatcatggcaagcccatgaccattactgagttggttgctgcactgtcaatgctcaaccctaccaaggcatgcaacatctaccggctcatgcgtattttggttcattcgggattctttgcacaacgaaatttatgcaatgatgctcaagaagatggttatgttcttacgaatgcttctcgtctgctacttaaggataatcccttaagcgtaacaccttttttgaaagctatgtt

SEQ ID NO: 225891 - DNA, 382 bp, Gossypium hirsutum
cccacgcgtccgcccacgcgtccgtccacgcgtccgcccacgcgtccgcccacgcgtccgctcttctattgcaattttttctaagccagattctgtcagcaagaaggtacattttagtccccagttacagacagatcctaggcaaaattatctccatgctaaatcttgtcttcagccttcaggtatagtgtttcttagcaagtaggaactcttctatgttagttgttttcggcattgttgtgatataatttcttaaaggaagaaggtaaacatcatggtactgattaaatgtttttcaagtatagatactcctgcatcaaatactctttcttggcacttatcctcagaaaccaagtctactttgaaagggacttcacaaact

SEQ ID NO: 225892 - DNA, 386 bp, Gossypium hirsutum
aaaacgttaaacgcggctttctctctatttcttttttgcagcgagttactgagggaacaccacgatggccgaacgaatctaccccggtgactcaccaccgtcttccggcgaacactcgaatcccaaaccagctcctccttcttcagataaacctattccacaacccggaacttacgtcgtccagatcccgaaggaccaagtctaccgtgttcctccgccggagaacgcccgccgctacgctcatctgtcgaaacgtaagtcgagtcgcagcacctgttgccgctgctgctgctgctttttaacaactatcctctctctcctccttgccgccgccattgccgccgctgtgatctacttcgttctcaagcccgaagctccaaactact

SEQ ID NO: 225893 - DNA, 387 bp, Gossypium hirsutum
attctatcttcattgctacccggtacttagagatctgaccaaagcaagatgctagccaccttgccaactctccaacataagcccctttctagcaatcatttagctgaccagatgctcttccaggtaagtgaaggtgagttccctaaacgagcttttaaaaaacttgactgcgcataatatttagctttcaaaatgtgggctaacaaagaattgagataattaacaagacgccaaccctgtttagctagtaatgcgatattaaaattatcaagttttctgaagccgagacctccatcttcttttaacgaacacaaatccttccatgcacaccagtgtataccctttctatctttatttttcctccaccaaaatttcgtaattatgccc

SEQ ID NO: 225894 - DNA, 388 bp, Gossypium hirsutum
cttttgatcttctagacacttctcttcctcgttgtgagtctcttggtttgcccgggtaatggcgtctgctttagaaaccaaagccaaagaagcatacttcgatgaccactttgaactcgccctcgatctgtactcgcaagccatcggaatcaaccctaaaaaggccgagctctacgctgaccgtgctcaagccaacatcaaactgaacaatctccctgatgctgtggcagatgctaacaaagcaattgagttggatccgtccatgtctaaagcctacttgcgtaaagctactgcgtgtatgaagcttgaggagtatcaaactgctaaggctgcgttggagactggggctgctttggcaccagaagagtcgagattttccaagttgatt

SEQ ID NO: 225895 - DNA, 388 bp, Gossypium hirsutum
cttccgggaccatcttcgagggccatgggaaccttggctttggtacctaacttggtccttgagggaatcaatttaatggtccaattcccttggctattggggaggtatcggctttggaggtggttggtggttccaaaaatccatttaaccggccaatttccctggcttttagggcagttgccttttttggggaagttggttgtttcaaaaattcaattaaagggccaaattccatggcctttaggggagttttcacctttgaagtggttggatgtttcaaaaaatcagttaaacggccaaattccctggtctatagggcagttatcatctttgaagttggttgatgtttcagaaaatcaattaaatggtacttttcctctatctttgg

SEQ ID NO: 225896 - DNA, 392 bp, Gossypium hirsutum
aaaaaatatttaaaagagaaagaaataaggtggaaaaaattctctcttttttcatgagatggggaaaagcttctaaaagctttttcgatcagaacccaatcgaggaatatggggaagaaaaggaagtccatagcgacgagccttgatgaggtggatcggactatgtatgcttcgttttgcagcgccgctaactctttgtctcaactttatactcaggctatgaaccagcagaaactctcctttcaagccggaaaaggccatagccttgaaaaactttatcagtggatttggagacaacaagagggaggatcaagagtaacaacaatggatatcctcaattaccttaagaatgagatagactactttggtgaggagccatcaatgtcacctag

SEQ ID NO: 225897 - DNA, 393 bp, Gossypium hirsutum
caagttgtttgagttgtatggtcaataaacacatttacagctgtctaccaaagagttacgctcctctcctagatgctggcccgcaaaaatgcctagctttcagtgttgatggttctagatttgctgctggtggggtggatggacggcttagaatcttggaatggccaactctacgcatcattgtagatgaagtaagagcgcataaatcctttcaagatatggattttagcctagattctgagttcttagcttcaacatcaactgatggttcttcaagaatatggaagacagaagatggtgttcctttgatgactttagctcgcaactcggatgaaaagattgaattatgtcggttctccaaggatgggacaaaaccatttttgttttgcactg

SEQ ID NO: 225898 - DNA, 385 bp, Gossypium hirsutum
caggatgctggtatacgagtatgttatataatggaaatttagagcagtggcttcagggggatgtaggaccttgcagccctcttacttgggacattcggatgaatatcatcctgggaacagcgaaagggttagcttaccttcatgagggacttgagcctaaagttgttcaccgtgatattaaatcaagcaacatcctactcgacaagggttggaaccccaaggtttcagactttggcctagccaagctcttgggctctgagagcagctacattacaactcgagtcatggggacatttggctatgtagctcctgaatatgctagcaccggcatgctgaacgaaagaagtgatgtgtatagctttgggattcttattatggaaataat

SEQ ID NO: 225899 - DNA, 382 bp, Gossypium hirsutum
caaacagatggaggtgatggttatgtttctgttgaggtttctcccagacttgctgatgatactaatgggaccattgaggcagccaaatatcttcataaagtggttgatcgtcccaatgtgtacattaagatccctgcaacagcaccatgcattccttcaatcaaggaagttattgcgaatggcataagtgtgaatgtcactctcatattttcgcttgctagatacgaggctgttattgatgcttacttggacggccttgaggcttctgggttgagtgatctctccagggttactagtgtagcttccttctttgtcagtagggtagataccctcattgacaaaatgcttgaaatgattggaacaccagaagcccttgatctcc

SEQ ID NO: 225900 - DNA, 389 bp, Gossypium hirsutum
gttcatggaagcttactgtgagatgctgattaaatatgaacaagagctgtctaaaccattcaaggaagccatggttttcctccaaaggatcgagtgtcaattcaaagccctcacagtttcatcttcaaattctgcttatggtactgaaacttttgaaaggaatggatcatctgaagaagaaactgatgtaaacaacaaaagtttcatcgatcccctcgcggaagatcgagaacttaaagataaacttttacagagatacagcggatatttattcagcttaaagcaagagtttatgaagaaaaggaagaaaggtaagctacctaaggaagccaggcaacaattattggattggtggagtagacattacaaatggccatacccttcggagt

SEQ ID NO: 225901 - DNA, 312 bp, Gossypium hirsutum
cccacgcgtccggccaaggacactgttggagcccccaataagctctccaagatgagaggtggtgaggctatccattgcacaagtattgacggagatatcccaaaaacagaaggctgctttgagggaagcttataagaacaagaagttttagcctctagatctccgtcccaagatgaccagagctattcgccgccgccttaccaagcaccagcaatcttcgaaaaccgagcgggagaaaaagaaggagatgtactttccgatgaggaagtatgccactaaggtttcagctttgaatttgacttagggtggata

SEQ ID NO: 225902 - DNA, 314 bp, Gossypium hirsutum
atcccgtcgcacaaagaacctctgtttctgcccttctctaacaacaaacatggcaaagcgattgattccttcatttaatcgcattttggttgagaaaataatccctccttctaaaaccaactctgggatcttgtttcctgagaagcccccaagttggactctggaaaagtggtagcagttggaccaggagctcgagacagagatgggaagcatatcccagttaatctgaaggaaggagatacagttcttttgcctgaatatggtggcactgaagtcaagctttgtgaaaaaagagtatcaccctatacaagaga

SEQ ID NO: 225903 - DNA, 386 bp, Gossypium hirsutum
  unsure (1)..(386): unsure at all n locations
atcggcactggaattccaaccctacaactcgtaaaccctggggtaatattaatgccccgagggctcaaaaacccataagggtggtacaatgcgccttggatcaaggaggacatatttncaagtattggactgcaaatctgtgaaattatatggaaatagaagattcatagacgagagacataggcacagatacgagggtaatcctgatatggtagcacgccttgaaaatgccggcttatctttcactggcaaggaccaaactggtcaacgcatggagattattgaactacccgatcatncatactacattngtgttcaatttcattcccgatttaaatcaagaccaggaaaaccttncgncttgttcttaggtttaataggggcag

SEQ ID NO: 225904 - DNA, 385 bp, Gossypium hirsutum
gcctttccactgggactacgcggattttgaaaaccgggactaccaaatccacgggcgagctctctcattcactgtcggcccctttgccatcgaccttatttacgctctcaacccctattacactcgagggctgggcaggtctcatcgacacgacctatccccgacctctcacttacccccacagcctcctactcagcctagagggctcgaccccaataccatcaatgcgttgccgataactatggtgaccagggggagggcggcgcttgggagcgagtgctgtatatgccttggactgtttgaagatggtgagaaagttaaggttttgccttcgtgtcaccattcctatcattccgagtgtgttgataggtggctcagtgctgag

SEQ ID NO: 225905 - DNA, 393 bp, Gossypium hirsutum
tttctctccgcctccccaaaaaaaacgaatttcagggaattaaattccctataaaatcggttctcgtaaaattccttttcgtttttaatcaaacccgatttcctgatttctttttcttcatcgatcgtcgccggcgtaaaaacaagaaaaatcaaaagcaaaaagcttgccgaattagaaaaagaaattatgggttctgaacagaatgaaggaacaagctttccaccatcggagccaaagctttgtgccaacggttgtgggtttttcgggacggcggcgaatatgaatttatgttcaaagtgttaccgggacctccgtgttggggaggagcaagcggcgaaggcgaaagctgttatggagaaatctctcagtatcaaaacgaagcatgaacct

SEQ ID NO: 225906 - DNA, 383 bp, Gossypium hirsutum
tgtgcttcttcagctgagggatctttaagatgtcatcattcccccatctggagtgacatttcctgatgaccatgaaacttggaatgtacagttatttagatcaattgatggtggggcagcttttggtttccctgagacacctgaagatgctgccagggctgggcttgtgagtggaaaggacaatatcattgaccgaagtattcaggatgcctatattaatgctatacgacgagcaaagaattttatctatattgaaaatcagtatttcctcggaagctcatttgactggagtcctgatgacattaagcctgaggatattaatgctttgcatctgattcccaaagaactttcacttaaaattgttagcaagattgaagcaggag

SEQ ID NO: 225907 - DNA, 383 bp, Gossypium hirsutum
ggcaatctgtcataagctaaaatagtagaatggtatctcttatacacctgatcaaattgtggtcagtaatggtgctaaacagagtatccttcaagcagttcttgcagtttgttctcctggggatgaggttataattcctgctccatattgggtgagttacccggaaatggcgaggctggccgatgcaacacctgttattcttccaacactcatttctgacaattttctattggacccagagctccttgagtctaatatcactgaaaaatcaagattgttgattctatgctccccatcaaatccaactggatctgtttaccctaagaaactgcttgaaaaaattgcagaaattgtagcaaagcatcccaggcttctggtgctat

SEQ ID NO: 225908 - DNA, 373 bp, Gossypium hirsutum
gaaaatgaagggtctgcaggcacttatattggcaatggtaatggttatggcgatcgctacaactgatgctcaaagcatttgcaacatgccagcttcaggtttgatggcatgcaaaccagcagtgaccccccccaacccttcgccgcccacagtaacttgctgctccgccctctcccacgctgacatgcgttgcctttgctcatataagaactccaagctcttgccttcccttggtattgacccaaaccttgccatgaaattgcctagcttgtgcaagcttcctcatcctgcaaattggtaggtcctggttctccatatttgatctcaaatgtgagggaaaatcatgcttattataagcctctacttcacataa

SEQ ID NO: 225909 - DNA, 373 bp, Gossypium hirsutum
atctcttaaaagatgtttctaccactctggccagtatgattccgaggaaaattgtgctcagctagacaagaagcttaagaagcatgagggtgggagggtttctaatcgcctcttttatctgtctatccctccaaatatttttatcgaggctgtcaaatgtgccagctcatcagcttcatctggtaatggctggaccagggtcattgttgagaaaccttttggtcgagattcagaatcttcggctgtgctgacaaaatctccgaagcagtacctaactgaggatcaaatattcaggatagatcactattctatgaaaggaacttgtggaaaatctttctgttcttcggtttgccaatcttatttttgaaccctt

SEQ ID NO: 225910 - DNA, 340 bp, Gossypium hirsutum
  unsure (1)..(340): unsure at all n locations
ttcgaacgcacccctncaccttttctctttttctctctcatggctgataatgagctgtgttattattttcagaactattatatatctcagaaagcagaaaaaaagctaccctttattgcctgatttgaagagattagctaaatgtcgttagcagatatgaatctatccattaatggccagtctcaggttcctcctggttttagatttcatcccacttgaagaagaactttttcactattacctaagaaagaaagttgcttcttaaaagattgatcttattgttataccagaagttgatcttaacaaacttgagcctaggggaatacaagagaatgtgtat

SEQ ID NO: 225911 - DNA, 362 bp, Gossypium hirsutum
cggacgcgtgggcggacgcgtgggtctgcatccaacacaggaggtgcttgggataatgccaagaagtatattgaggctggtgcttctgagcatgcaaaaactcttggtcccaaaggttcagatccacataaggctgccgttattggtgacaccattggtgaccctttaaaggatacatctgggccatcactgaacatcctcatcaagctaatggctgtttaatctcttgtctttgctcccttctttgctacacatggtgggctgctttttaagatattttaagtgaagacaaacatcggctactagtctaccatttccgattcctggctggtattctcttataattttcatttttaagtata

SEQ ID NO: 225912 - DNA, 377 bp, Gossypium hirsutum
aaaaaattgagtgtcagtttgaaagtgttcttcagatatggctatgaaacaaggtgctagttctgctatcaaagcaattgccaattctgggtcatcctctcttcttaccagacaactccatgcttctccagggagcaaaaagattgttggggtgttttacaaggccaacgagtactttacgaagaatcccaactttgttggttgtgtggagggagccttggggttgcgcccatggctggaatcacaggggcatcagtatattgttaccgacgacaaagaaggaccggactgcgaacttgaaaagcatatccctgatctccatgtgctcatatcgaccccattccacccggcttacgttacggctgagaggatcaaga

SEQ ID NO: 225913 - DNA, 370 bp, Gossypium hirsutum
ggatcagccaaaactaagcgaccaactcgccagcgtggtaaagagtctgccccacccccagctgaaactgaagatacgaatagcggtcttgatttgtctttcttagacaatgaaacgggaagagcggaattcgacaactacctcagttctttggatgaaatccttgctcagcctttctctgaagaaccattttcccatccagcagagatgcaaaactcggttgcaggagacagcgaaatggctgaagctcgaaggaaactatcttcccttctcgatatggatttcccttcattgatttgcttcaaagaccttgaagaacttgcgagtctagcatccaaactccgaaaagaccccactcttactgccgagc

SEQ ID NO: 225914 - DNA, 362 bp, Gossypium hirsutum
gggaggaaaaagaacatggttcctttttcacaaccggtcaacccaaatcccaacgaggactatgaacgagatccgttaccgcggagtcagaaagcgtccatggggccgttacgcagctgagatccggaacccgagaaaaaaggcccgagtctggctcggtaccttcgacactgccgaggaagcagcgcgtgcttacgacgcggcggcacgagaatttcgtggcgccaaggctaaaacaaatttcacctacactaacattaatgactttacgctaagccccaaccagagcagtaccgtggagttcttttcttcgtcggcgttggaccttacactcgctggcgggtttattttgctccccatga

SEQ ID NO: 225915 - DNA, 372 bp, Gossypium hirsutum
ggaagatcgttcatcccttatggcatatattcagaatataaagccaacccatgtgtttaatgctgctggtgtgactggtaggcccaatgttgattggtgtgaatctcacaaaacagaaacaattttgtaccaatgtggctggaaccttgaccttagcagatgtttgcagagaacatgggctttttgatgattaattttgctacagggtgtatattctagttcgatgcatgacatcctgtgggcttctgcattggttttaaagtggaagacaaacccaatttcactggttccttctattctataaccaatgctattgtttgagagcttgtgaaagaatatgaaaacgtctgtccttttagagttcgaatgccg

SEQ ID NO: 225916 - DNA, 373 bp, Gossypium hirsutum
cttgtttttagggcttgataatgctggcaaaaccacgctgcttcacatgctcaaagatgagagattagttcagcatcagccaacacagcatcccacatcagaggaattgagcattgggaaaatcaagtttaaagcttttgatttgggaggccatcagattgctcgaagagtttggaaagattactacgccaaggtggatgcagttgtttacctggtagatgcttacgacaaggagaggtttgctgggtcgaaaaaggagttggatgctctcctctctgatgaatctttggctaatgttccattcttgatattgggtaacaagatcgatataccatatgctgcctcggaagatgagttgcgttatcaccttggc

SEQ ID NO: 225917 - DNA, 369 bp, Gossypium hirsutum
cccacgcgtccgaaaatcctattccttttctcctttttctttttctcagacaagatgggttctcagggatcggttatggctatgcttttgctgatgatgttcactttatcatcagcttccgacatgtccattatatcctacgatgaagcccatcccgacaagtcaacgtctagttggagaacagacgacgaagttatggccatgtacgaggagtggcttgtaaagcatggaaaaacatacaacggtttgggtgagaaagagaggaggctccagatttttaaggataaccttaggttcattgatgaacataacgccgattgagagtcacagttttaaggttggtttgaaccgctttgctgatcttaccaa

SEQ ID NO: 225918 - DNA, 309 bp, Gossypium hirsutum
ttttgcctcgaccccaagatgggaaattgaggtatgttggtggagaaacacgaattgtgagtgtgccgagagatattagttatgtggagttgatgagtaagatgagggagctttatgatggagcagcagtgttgaaatatcagcagccagatgaggatcttgatgctttagtgtcagttgtcaatgatgatgatatggttaacatgatggaagagtatgagaagttggcttcgagtgacgggttcactaggcttaggattttcttgttttcgcatcctgaccaagatgtttcataatataatgttgatg

SEQ ID NO: 225919 - DNA, 371 bp, Gossypium hirsutum
cccacgcgtccgcccacgcgtccgttcaaccttaagaggaggtggtcgccacccagtttgagaaagtcaagatagaagaagaaccaccaaaagaaggagaagaaaacccagaagaagtgaagaaaaagaagacgactaaaactgagaagtattgggactgggaattagcaaatgaaacaaagccaatatggatgcgaaatcctaaggaggtcgaaaaagacgagtacaatgaattctacaagaagactttcaacgaattcttggatccgcttggatatactcacttcacaacagagtttccacgatacttgagctttgtgaagggtgttgtggactctgatgatctttcacttaatgtttctcgagagatc

SEQ ID NO: 225920 - DNA, 375 bp, Gossypium hirsutum
gcggttcttaacctgatagcatcacgtttgtagcaatactatcggcttgtgctcatttaggtttggtcaatgacggagagcggctgttttggttaatgagaaagaagtatgggattgattcgagaatggagcactacgcttgcatggtaaatctttacgagagtgcagggctgatagatgaggctttcaacatgatagtggagagaatggagtttaaggcagggctaactgtgtggggagcaattctatatgcctgttcggttcatggaaacatacaaataggagatattgcaggtcaaaaacttttcgagcttgagccagataaccaacataattttgagttattgatgaagatatatagcgatgcagagaggg

SEQ ID NO: 225921 - DNA, 299 bp, Gossypium hirsutum
atcatggccaccgtcacgacgcatgcctatgccgctgttttccggccatgtgcagcgaatacacggtttcttactggttcttccggtaagttaaaccgagacgtttcatttaaaccagtggctgttacatcgactagctcattcaaagttgtagcataataaaggggtgtggttaccaggtctttctttacctgcttacctgaatggcattttttcatgtgataatggctttgatcctcttggattggctgatgtcctcttgaacttaagtaggattgtacaagctgagctcgtgaatg

SEQ ID NO: 225922 - DNA, 375 bp, Gossypium hirsutum
cccacgcgtccgaaattaagctactctttttctctcgttactctttttctctcgatcctgcgtttcttttcactgtttagatatatccgcctctctcatcttccgttgtttatacgtttggttgttgttgaagaagtgctactaccatggctacaaagaagagcgttagggacttgaaggaagctgatttgaagggaaagaaagtgtttgttagagtcgatctaaacgttccattggatgataacttcaacataactgatgacacaaggatccgtgctgctgttcccaccatcaagtatttgatgggtcatggctctaaagtcatcctctctagtcatttggtaatttgttatgggatacttttggttttgatgg

SEQ ID NO: 225923 - DNA, 376 bp, Gossypium hirsutum
ccgaaccgttttctttcgactttgagcagcaaccattgggagaagaacagatgaaggacatgatttaccaagaggccttggctctgaatccaacttatgcttaacgaaatatagttctatcttctaaatccgtcatttcaagtaatgatttctacaataccttgtggtggctgatacaggccggtggattgcggattgaaagatactttttgcctctgcaataatcttcgaagcggcgtcgctgagtctgcacccgtgactgccattgatgttaggctttcacgaggtcagtccacttgattaatttatgtttttctcctgatgtgcgtttatatgttatttgtttgatatcttgtgcatgtatgacatgcatttt

SEQ ID NO: 225924 - DNA, 370 bp, Gossypium hirsutum
agaaaaaaaaagttgaaatcttttttgagcaatggaaggatcagtttttactccatcattggaaggaatgaagcatatcaaatctccagaaggggaaatgcttaccaagccttttttggatgtctgcaagttgattttgccagtcctcgataagttcggatctgctatgagccttgtgaagagtgatgttggtggtaacatatcgaggttggaaaagaaatatgaaactgatcccgctaaatacaatcacttgtacagtatggtgaaagaagaggttgattgtaaaacagcaacagattcatctagttgtaccaatggtcttctctggttgacacgagcaatcgatttcctcgtagaattgttccgcaac

SEQ ID NO: 225925 - DNA, 369 bp, Gossypium hirsutum
ggcgatataatttaaagacgggaactgtgtgattcatgaagccaaggggaaggctttaatcatggcgagacttagctctttcttcatcttcagcttcttccttcaagtagcactctttgcaacatgttgcagaggggaatcaaaggagcagcagcatcagcttccaaagaaacacgtgcctttcttcatcttcggtgattcaatcctcgatgccggaaacaacaactatatcaacacttcaactcttgaccaagctaatttctggccttatggactaacttttttcaactaccccaccggaaggttctctgatggccgtttaatacctgactttattgctaaatatgcaaagttgccattgattccacc

SEQ ID NO: 225926 - DNA, 370 bp, Gossypium hirsutum
cccacgcgtccgcttcatccttctttctttctcttactctctgagtctggactgaccttctgttcgttaaacccgattaagatttggattccaactgaagaaggaaaatgaatacgcaacttttggagattgaaccaaaggaacttgacatcgtctttattctgaagaagccatgctcctgctccgttagactcacaaataagactgaccagcatgttgctttcaaggttaaaactacatctcctaagaaatactgcgtgcggcctaatgttggcattattatgcccaaagcaagatgtgattttacagttatcatgcaagctcagcgcgaagcccctcctgatttgatatgcagagataagttcttaat

SEQ ID NO: 225927 - DNA, 357 bp, Gossypium hirsutum
cacgtagtcgcttcaaatacgttccagaatcaaaacaacgtcgttggaagtgcagatggaatcaacggcgaagccagcgggtggtagaaagggaggagtgaagaagaaggcagtatctaagtcggtaaaagcggggctccaatttcccgtgggtcgtatagctcggttcctcaagaaaggtcgttatgcgcagcgttacggcggtggcgctcccgtttatcttgccgccgtccttgagtatcttgccgctgaggttttggaactggcggggaatgcggcacgtgacaacaaaaagaacaggatcaacccgaggcacgtgctactagcagtgaggaacgacgaagagttgggtaagct

SEQ ID NO: 225928 - DNA, 305 bp, Gossypium hirsutum
tcggcctctgtctgtcaaaaaatagcatttatttttgcgaactgcttaggatcaactgcgaccgttgtgttatgcttgctgatgggaaaaccatatttttcatcaacggcaagcctatctaccactttgttgtaacctcgacctttatccaatattctgacgtccatgttggtcaggatgtcaagatcagtccaaccgccccttttgataaaggttgacccattatctgcgggattagtacaggttttggggccacttgtaatgttgctaaatctcaaaagggtctaactgttgtatttttgttc

SEQ ID NO: 225929 - DNA, 372 bp, Gossypium hirsutum
gtgagtactctctatagagaaaaaaactaaaagagagagtaagagactgctattagagaaacaatgggagaccaaatgccatgtgcagctttgtctaatgtatggaacaaagtgaaaccattcttggcaatcatctccctgcaatttggatatgcagggatgtatatcatctccttggtttctttaaagcatggaatgagtaatttcatcctttgtacctatcgtcatgttgttgccaccattatcattgctccctttgcctttgttctcgaaaggaaaatccggccaaagatgacccttcctatcttcctcaggattgtggatcttggtttgctcgaaccagtacttgaccagaacttatactatctggga

SEQ ID NO: 225930 - DNA, 370 bp, Gossypium hirsutum
ctctttctatattccatctcttcagcttcttccctaaaccacccaaagcttttgatcgcagctttagtttaaaacagacttctttttatatataaaaatgagacgaaactgcaacttggaacttcgtcttcttccttctagttatcccagcgacagtcacgacatgatggaagcaagaattgaaagcccagaaacccagcagcaacagctaacaattttctacaatggaagagtttgcgtatctgatgttacagagcttcaggcaaaagccattctaatattagcaaaccgggaaagagatgaaagaatgaaaagtccgacgggatgtgaaccggtgtcgccgacgttaaaatcccaggtgaatagccca

SEQ ID NO: 225931 - DNA, 332 bp, Gossypium hirsutum
cctgaagatgcagtgtatgacttttttgacaagatcaactttgctgtgggccgtttcctttagggtggggcttacaatcaccagattggtgccctgtctgatgtcttgaaacagtccatgacacctgggttcaaggcttattgctatacaagtgatggccaatgcagttgcccttgtattgtaccttgtgggcaatggattccagcttgttactggttgaactgataaccactttgtttttttgggatctccgaccttttggattgtctggcatcatgtgttataagctttgtgactctttcttctttacttgttaactagatttgcttttt

SEQ ID NO: 225932 - DNA, 339 bp, Gossypium hirsutum
tcgcttgccgaaggtggggaaagccaaaaaaccagtaacccatcaaaacactagtagcatgattgtggaaactgagaaacgggttaaactgaagacacctgatgaactactggaagtactgaaaaattaatgctttatcagacaagagggttggtggtcttatgaattttgctatcaaaagcagttaaggcaactacatttggaagaggataaggtggttcaggaatttgtgttgggtgtatatgatgaggaggccactgctgccttcaaccagaatctttctgacatcttcacattgaaagatccttgctcaaaagatgcttcacaaaggtatcatgc

SEQ ID NO: 225933 - DNA, 377 bp, Gossypium hirsutum
cccacgcgtccgttcagcttcgcccctttacagccaaattcctttctcgagcgtgtcttttttaactctccagttctcaacgaatccatagaatttcaccaagaagaagaagaagatgtcgtggcaaacatatgtagatgagcacttgatgtgcgaaatcgatggcaaccatctctcctccgccgccatcgtcggccacgatggcagcatttgggcccagagctccaatttccctcagttcaaacaagaagagattaatgccatcatgaatgactttgctgaacctgggtcacttgctccaactggattgtaccttggtggcacaaaatatatggtgatccaaggcgaacccggatatgttattcgagggaaaaagg

SEQ ID NO: 225934 - DNA, 356 bp, Gossypium hirsutum
attatttcctttcttcgagttttctttgtttgcttccgtcacaactccaaaaccgtacacaaaatgggcaaggatctaagcgactagcaagtctcatcaatgaaggaggctttcactctcttcgacaccgacggtgacggcaagatcgctccatcggagctagggatcctaatgaggtctctcggcggtaaccccacccaagcccaactcaaagctattatcgctgaagagaagctcacggcgccctttgacttccctcgctttttagatctcatgtccaagcatatgaaacctgagcccttcgataggcagctacgcgatgctttcaaggttctggataaggacaatactggctt

SEQ ID NO: 225935 - DNA, 371 bp, Gossypium hirsutum
ttcaagttagattacaaaggattcccggaaatatttttacggaacaaacaagatatcgaataccgaagtggtccgtggaacggtcttcgatttagcggcgtaccggaaatgaaaccgctcgattacatgaacttcagcttcgtcactaaccaagacgaggtatattactcgttttatattacgaacaataatttgttttccaggttaatagtgacaccaaccggtacacttgaaagactaacatggatacccgacaccaagcaatggaatccgttttggtacgcgccgaaagatcagtgcgacgaatacagcgagtgcggtccgtatggtatatgtgatactaacgcttcccctgtttgtaaatgtccaaa

SEQ ID NO: 225936 - DNA, 358 bp, Gossypium hirsutum
cccacgcgtccgcccacgcgtccttctacgcgtccgttctgatctgggggagggtctcatgcgtttaatggaaggagaacatgttggaccttttaatcttggaaacccgggcgaattcaccatgcttgagcttgctgaggtggtacaagaaacaatagacccgaatgcgaatatagagttcatgccaaacacagaagatgacccgcacaagaggaagcctgatatctcaagagccaaagagttacttggttggcaacccaaggtcttcctccgaaagggttttcctctaatggttttagacttccgacaacgtatctttggtgatcacaaggtcggcaggagcaccaccaccaccaac

SEQ ID NO: 225937 - DNA, 301 bp, Gossypium hirsutum
gcagacttgcattacggggctattattggtggtatcgtaagtaatacactacgaccacaggttccagaaggctgtgacccataatggagatcattgatggagagatgctggtcattcgagctaccatagagaccgagtttcaccgagatagcaaatgagttacggtcaatggcagcaaaaattcaaccaaaggggcatattctacaaatataaacatagcagaaatctcaaccctcaatttttcaaaatgattttggtcaatctggttattgtatggcatactcttaattgctttgcattt

SEQ ID NO: 225938 - DNA, 368 bp, Gossypium hirsutum
aaacagcgtaacgaccttgtaaacactcaaaacgctattgccagcagacaccggggaatcccacgcgccacctttttccaccgatctcactcgctacccatggcgtcccccgcgaccattccgatgacgacgtctcaatctacggtcggtggtggtacccaatcacagcccccgatagccacgcctgcgtttagggcgttcctctcgcgcttcacgtcctcgatccgtcaaggactctcccaacgccgtccatgttatgaactcattgatcggtccgccatggcccgtcccgataatctaactgatgcctattcccggatccgcaaaaacctctcttacttcaaagtcaattatataactctactagt

SEQ ID NO: 225939 - DNA, 361 bp, Gossypium hirsutum
ttcagaaagaaggagactgaggtattgcagaggctctcttcaaagaaacagcttgttgtttctactggcggaggtgcagttgtatgggatgtgaactgggattatatgcaaaagaagggggttgttgtctggttagatgtacctttggaagccttggcacagaggattgctgcagtaggtactcattcttgtccccttttgcattatgaacatggcgattcctatacaaaggctttaaaacggctgtcttaccttttggaactgaggggtaaaaattatgctaaagcaaatgcccgggtttcattgaaagaaattgcaggcttactatgttattgagatgtatcatatcttacttcaacag

SEQ ID NO: 225940 - DNA, 370 bp, Gossypium hirsutum
ttcattcctagcactggtgtgtcgttttttcggtatatgtcgactacagataatgatggggcagataagattgagtttatgactgatggggcagataggattgggcttatgaccgatatttcggaagctcttaaggatagttctttcgaagcagtggcttcgcaggctcctgctgtgaatgaggttgctgttgctgctgctgattctgcgttacccgttgctgccatacagtacgttatcgatgcagttcattcttctactggcttgaactggtggagttccatagttgtgacaacacttttggttcgaggtttaactcttccgtttttgataagtcaacttaaagctactgcaaaaatgacgttactta

SEQ ID NO: 225941 - DNA, 370 bp, Gossypium hirsutum
aagaaaaaagtcatacgcaatgagcactgccggtcaggttattcgttgcaaagctgcggtggcatgggaggccgggaagccactatctatagaagaagtggaagtggcaccaccccaaaaacatgaagtccgtattaagattctcttcactgctttatgtcacactgatgtatactactgggagtgtaagggttacactcctctgtttcctcgtatacttggtcatgaagcctcagggatcgtggagagtgtgggtgagggtgtgaatgatttgaaacctggggatcatgtgcttcctatcttcaccggagaatgcaaagaatgtcgccactgtctgtcagaagaaagcaataacatgtgcgaactgctt

SEQ ID NO: 225942 - DNA, 364 bp, Gossypium hirsutum
tccacgcgtccggccaagttagatagttttatttcattacaatggacatggtgtgccaatgccaactgcaaatggtgaaatctggctgtttaataagatgttcacttgtttaactgttaggaatcaattcttgttgcttttcttttgctctatttgccaatttttctccttgataagcctgaacatttcctgtgcagagttatacacagtatattcccttgcctatcagcaatcttgattcttggctaaaaacaccttctatatatgtttttgattgctctgctgcaagaatggttgtttgttttccttccctagccttatctgttgcaggaatggttggtaatgcctttattgagctttttga

SEQ ID NO: 225943 - DNA, 367 bp, Gossypium hirsutum
cagaattggagaaacagaccggagctaaattcgaggaggatcttgatgcaatgcttccaaaatgtgacattattgtcataaatatgcctctaactgagaagacaagagggatgtttgacaaagatcggatcgcgaagatgaagaagggagtcctgattgttaacaatgctcgaggagcgatcatggatactcaagctgttgctgatgcttgttcaagtggacacattgcaggttacagtggagatgtttggtacccgcaacctgctccgaaggaccatccatggcgttacatgccaaatcaagctatgactcctcatatttctggtaccaccattgatgcccagttgcgatacgctgccggagtcaa

SEQ ID NO: 225944 - DNA, 374 bp, Gossypium hirsutum
  unsure (1)..(374): unsure at all n locations
gtttaaaatataagaaaaaaaatcatacgcaatgagcactgctggtcaggttattcgttggaaagctgcggtggcatgggaggcggngaagccactatcgatagaagaagtggaagtggcaccaccccaaaagcatgaagtccgtattaagattctcttcactgctttatgtcacactgatgtatactactgggagtgtaagggttacactcctctgtttcctcgtatacttggtcatgaagcctcagggatcgtggagagtgtgggtgagggtgtgaatgatttgaaacctggagatcatgtgctccctatcttcaccggagaatgcaaagaatgtcgccactgtctgtcagaagaaagcaataacatgtgcg

SEQ ID NO: 225945 - DNA, 375 bp, Gossypium hirsutum
acgctggactcggagaccaaggcttcactcgactcactcaagaagcgggaactcagtatcgaggacagtgtcaagatcgcactcagccgagtcgagttcaacaccaaagctgccatgaggacccttggagacgacgttgaagacaatccggacggtgaggtcgacgacggagacggacttttgcaacacttgaaatcaacgtgcttgaaaatggaagctaaagagttctggagcttcgtgatcggaaaaaagaaagaaatcgatttgttaagagagaaaatccctgcagctttatcggaatgcatcgatccggcgaggtttgttatggaggccatatcggaggtatttccggtggacaaaagagggaatgaggga

SEQ ID NO: 225946 - DNA, 375 bp, Gossypium hirsutum
taaaaattagcccaggacaggaggatctctcagctactttttctctcaaatttcgccagtgagctctggtttaggcgatggcttcaaagcggatcttgaaggagctcaaggatctacagaaagatcctcctacctcttgcagtgcaggccctgttgctgaagacatgtttcattggcaagcgactattatgggtccacctgacagtccatatgccggtggagtgtttctagtcaccattcatttccctccggactatccatttaagccacccaaggttgcattcaggacaaaggtctttcaccctaatattaacagcaatggcagcatttgcctcgatattttgaaggagcagtggagccctgccctcaccatat

SEQ ID NO: 225947 - DNA, 376 bp, Gossypium hirsutum
gccgacaactccttttgacggcgttcagggtgcctttgccaccatttctgaaggggagggccagaggcagcagctccagtccatcagtgcgtcgttggcgtcactcactcgaggaacagggccgaaagtggtgagaggggacccggcagggaaggttcaatcggtgtcgcatgtggcgcaccaccaccatatcgaggcgccaaccattagcgtcagtgacagttccttgaaattcactcacgtcctatacaacctctctcctgcagagttgtatgagcagtcgataaagtatgagaagggttctttcattacttcaaccggtgcactcgccaccctatccggagccaaaaccggtcggtcaccgagagataagaga

SEQ ID NO: 225948 - DNA, 373 bp, Gossypium hirsutum
cccacgcgtccgcccacgcgtccgcggacgcgtgggctttaatgaatcggcaggtcgaaatttaaggccaaaaagacacaagggttactaattaaattaatcttcagcgaatatgttggtttatcaggatcttctcacaggtgatgagctcctctcggactctttcccatacaaagaaatcgagaatggaatgctatgggaagtcgagggaaagtgggttgttcaaggagctgtcaatgtagatattggggcgaacccttctgcagaaggtgctgatgatgatgaaggtgttgacgatcaagccgtcaaggttgtggacatcgtcgacactttcagacttcaggagcaacctgcttttgacaagaagcagttt

SEQ ID NO: 225949 - DNA, 372 bp, Gossypium hirsutum
cggacgcgtgggtttttcttcttcagcagtgatcgtggcaatgtcttatcatagagagctggctgctgcaaagaaagcagcttctcttgctgctcgtctctgtcagaatgtacaaaaggctttgctgcaatcagatgttcaatccaaaactgataaaactcctgtaacagtagctgattatggctcacaggcactggttagttttgtgctgcagcaggaacttcatgctgaattctcattagttgccgaggaggattctaaagatcttcgcaaagatggtgcccaggaaatagtagagcgcattacaaaacttgtgaacgattctttaactagtgatggatcatacaatgttactttatccacagaagacgt

SEQ ID NO: 225950 - DNA, 387 bp, Gossypium hirsutum
ataaaatctgtgcctgccctttgctctgtacacctcgggatatcagtttcaactgcggtcatcccacgggttgagtaccgagtccatatattggtaagttcaaggaaggaacttgggcatcatgggtcttaaggcattagactatgagacaatgaatgaaaacgtgaagaaagttcaatatgcagttagaggtgagttgtatcttcgagcttctgagcttcagaaggaagggaagaagattattttcacaaatgttggcaatcctcatgctcttggacagaagccactgactttccctcgtcaggtggttgctttgtgccaagctccatttctgctagatgatcctaatgtaggacttatatttcccgccgatgccattgcaagagc

SEQ ID NO: 225951 - DNA, 382 bp, Gossypium hirsutum
caaagagatgtttacaacactggtttctaagaaaggaaaaataatcacaagaatgaaaagaaatcaatctctaaataattaccagaaggcttcacatctaaacccggaaccatgttattcgttggagcttttgccatgttggttcccgcaaaaaaatccgtcatggacggctttggcacctctggcggattagcacatcgaatgagtgcccaattcacactctgaaagaacggatgctgtttaacttcagtagccccacgcctatatgcaagccgatgctgtggttcctttacgagtaagcctcggatcaagtccttcgctgcaaagctcacatttggatactctggaaatctcaatggctggccgatcacgttaaacagag

SEQ ID NO: 225952 - DNA, 373 bp, Gossypium hirsutum
cccacgcgtccggaccacttcttcccttccattttactttgttttaggggccataacgtcaccttccaatacaacccacaatgaggcaacaatatgtcttcactactctcacgttgctcatcctgttttccctcagttgttcaacaacattagcccaagctccggcactggctccagcaccttctggtccgacaaacgtcaccaagatcctcgaaaaagccggtcaattcaccctcttcattcgtcttctaaagtccactcaagtggccaaccagctgctcggtcagctcaacaattccaacaatggtatgaccgtttttgcaccaacggacaatgctttcttcagccttaaatcgggcacattgtattcact

SEQ ID NO: 225953 - DNA, 386 bp, Gossypium hirsutum
agattatctcgggcaacggccatacatatagtgtgaagtacggttggttgccgggcactggcgaggcggcagcggtggaaagagtccctaggaaagcgattaggccttgccctcctcctatgaacgggaacaataattgggtttctggtgatatcgtagaggtgttcgatgacttgtcctggaaaccggcggtgattgttaaggttctcggtggaaacaacttttccgttaggattcttgggtcgagtagcgaactcaaagcgcatcaatctcgattgcgtattcggcagtcttgggaagatggctattggttcctcgttggaaagggttcatcaaattccactgggccgcagaaaaggaaaagatcttcgcttggcttctcatat

SEQ ID NO: 225954 - DNA, 304 bp, Gossypium hirsutum
accactccttcgttacttccaccaacgaaaaagtcgtccatcggatcacgtaggagagggatattgtaaagatgtctccaactgaatcatcactagaggcaaacgtttacatggccaagctggctaagcatgcttaacgctctgaggaaatggtgcaaatcatggaggcagatgcaataactgctgatgttatagagctgactgttgagaacaaaagcttatgaaatgaggatcatatggcacaactatatgagtattgggctatgattgcaacttcgcttatcaagatctgtgctgggatctt

SEQ ID NO: 225955 - DNA, 391 bp, Gossypium hirsutum
cctcctccaactccgccccgcccgcctcctccaactccaacgccttgcctcaggaagtgaacttctccgagctcgaccgcgtcaaccggatagggagcggtaccggaggcaccgtttacaaagtcgtccaccgcccttcctctcgcccttatgccctcaaggttatctacgggaaccatgaagagtctgtccgccgtcagatccgcaaggagatcgagatcctccgtgacgtggaccaccccaacgtcgtaaaatgtcacgaaatgtacgatcacaacggagaaatccaggttcttttggaattcatggatggcggatctttggaagggatcctcatatctcacgaagctaacttatctgatctggcccgtcaagtcctcagcggtctaaa

SEQ ID NO: 225956 - DNA, 387 bp, Gossypium hirsutum
gtcttttaagcatgggtgactggtctggattcatggacaaaattcatgaagttgggcccatggatcaacaacctgagcttctccaaaagctttcagaagggaactttaccttaaggattatgtatgagcaatttcaaaacatactcaaaatgggtccaattgggcaggttttctcaatgcttccaggatttagtgctgaactaatgccgaaaggtcgagaaaaagaaagccaggcaaagatcaagcgctacatgaccatgatggactcaatgacgaatgaagagttggatagctcaaatcccaagctcatgaatgaatcaaggatgatgcgaatagcgagggggtcgggacgtcatattcgagaggtaatggaaatgatggaggagt

SEQ ID NO: 225957 - DNA, 377 bp, Gossypium hirsutum
gagaaacaaaatccgaagggaatcccaatttcttcgcttttcatcttctctcggttgcatttctccgtttttccccctccggcaatggctatcgattctgattctttcaaacaatcacttctccctagcttcctttactcttctgctcccaactcattctctctggatcgactcctcaacgccaacagccctgctttctctgcttcacgctccactatacccggtgcccccgcggcctcttcctcgccgtcgatcaaggcgagaactttcatgatcccctcccccaatgagcccgggaagaagattgagatgtattcgcctcagttctacgctgcttgtacctttggcggtatccttagctgtggtctcactcacat

SEQ ID NO: 225958 - DNA, 380 bp, Gossypium hirsutum
catgtcgatgctacaaacgagtcttaaagcagccatgaacgcaagagtaagagggtcggggagtgagaccatgattcttgcacatgggttcggaggagaccaatctctctgggacaaaatccttccttacttgacaaaacattatcatgttctcctttttgactggctttgttctggaactgtcaaagatcccaacctctatgatcctttgaaatacacctcctttgatgcctttgctgatgacttaatagcccttatggatgaactccacttgacttcctcagtctttgttggccattctatgtctggtatgatcggatgtattgcttccattaaaagacctcaactttttagcaaactcatacttgtcggatcttctc

SEQ ID NO: 225959 - DNA, 379 bp, Gossypium hirsutum
  unsure (1)..(379): unsure at all n locations
cccacgcgtccgagtatttacccagcagaagtaagtaactttcagcttctgtgttctttatccaatctaaagagatttagattagagaaggtttcagttccatccttcagtacgagctcgtttcagctaaagaatctgcgaaaaatatccttggtcatgtgtaatatcagtcaggcttttgaaaagggcacaaacaaaatgtcagataattttccaaatcttttggaaatcgacatcgactattgtgatgatctgacggaactgggtgaagggttgtgtgatgttgttcaactgatgaagcttagtatcaccaattgccacatgctccgtgcactgcctgaaggcattggaaagcttgtaaacttggaagtnttgagac

SEQ ID NO: 225960 - DNA, 385 bp, Gossypium hirsutum
cggacgcgtgggcggacgcgtggggcagctcgcacgctctcatcattttgctgggggaccgtcagtctccccaaacaccttctttccgagaaaaagaaaagctcaagagagaagaccatggccgatcaacttacggacgatcagatctctgagttcaaggaggctttcagcctttttgacaaggatggcgatggttgcattactaccaaggagctggggactgtgatgcgatcacttggtcagaaccctactgaggcagaactccaagatatgatcaatgaagttgatgctgatggaaatgggaccattgattttcctgaattccttaacctaatggcaaggaagatgaaggatactgattccgaggaagaacttaaagaggctt

SEQ ID NO: 225961 - DNA, 382 bp, Gossypium hirsutum
gttttcgaaggacgtgccaaggacactattgttctttcttctggtgaaaatattgaacctttagagattgaagaagctgccttaaggagtcctcttattcaacagatcgttgtaatcggccaggatcaacgacgccttggcgctatcattgtcccaaacaaagatgaagcactcctggcagcaaaagaggcatctattgtagatgcagatgccgtcgatcttagcaaggacaaaattacaagcatgctatatgaagaattgaggaagtggacctccgagtgttcatttcaaattggaccaattcttgttgtggatgaaccttttacgatcgagagtggcttattgaccccaaccatgaaaatccgaagagaccgagttgtgg

SEQ ID NO: 225962 - DNA, 383 bp, Gossypium hirsutum
aacagataacaacaattctacctctggtttgacccaactgtagatttccatacgtatgcaatcctttggaatccccaacgtataatcttctctgttgacggtacacccattagagagttcaaaaacatggaatcatttggtgtcccgtttcctaagaaccaagccgatgagaatttactctagcttgtggaatgctgatgattgggccacaaggggtggtttggttaagaccgactggactcaagctcctttcactgcctcttacaggaacttcaatgccgatgcttgtgtgtggtccaatggggcttcttcgtgtaaatcgaatgcttcaccatcttctgcatcgacaaacagtgcatggttctctcaagaaatggattcag

SEQ ID NO: 225963 - DNA, 219 bp, Gossypium hirsutum
agttgctatattttatggatctctagcagctgtgttcaggaggaatcgcagtcgcaaagcacaaaaatggaaacagacatgctgtcaggatcattgactttatccaatttttacccccatttcgtgagtacattccaccactcacatataccagaaatgaatgatgttaaagcatatcacagtataaaggtacgttctattgctcctctcccaacatac

SEQ ID NO: 225964 - DNA, 379 bp, Gossypium hirsutum
agaaaatatctcaaatctcctcctcctcctcggaaatcttagtatcatcaccagggcctcaaatcccaaggtcttctttgacatgactatcggtggtcagcccgctggtcggattgtgatggagcttttcgcagattgcactcctcgcactgctgagaacttccgtgccctctgtaccggcgagaaaggcgtcggccgcagcggtaagcccctccactacaaaagctcctctttccatcgtgtgatccctaactttatgtgccaaggaggtgacttcaccgccggaaacggtaccggaggtgaatccatctacggatccaagttcgctgacgagaacttcatcaagaagcacactggtcccggttttctctcaatggct

SEQ ID NO: 225965 - DNA, 383 bp, Gossypium hirsutum
agaggagggaaaaaaaatgaaaagaatgaaagagagggtctaaaagaaagggtgaagaaatttgatggaggaacatctcagtccattagctgttactcatctccttcaacacacactaagaagcttgtgcattcatgagaactctcaatgggtttatgcagtcttttggaggatcttacctagaaactatccacctcccaaatgggatggccaaggagcttatgacaggtcaagaggaaacaggagaaactggatattagtttgggaagatggtttctgcaactttgctgcctcagcagctgaaataaactccggagactgtcatggttcctcagtccatggcagcagtgagtttcaacattatcaaggactgcaaccagagc

SEQ ID NO: 225966 - DNA, 382 bp, Gossypium hirsutum
atgattgcgaagtttaggggcactgtgattcatcacgagaaatgcttgaaaaagactatcttggtgtgattgcgccacatactgcaccggattagcgcacttactttccaccgcatcatacgccttacaatgcccatatgacccctgagttctgtatctagatcctacactgtcttgttccactcttgatcctgcgcttggctatcgccgttcgccactataccaataaagagttgcttattactatcctggacttcacctgttaccagggaaaaatcattgtagttcatccgttacctgaagtaacacaatcatatctttcgcttaattgacttttaacatttgggtggtccacttaatgcctgatgacgatatgctacat

SEQ ID NO: 225967 - DNA, 372 bp, Gossypium hirsutum
gtgaaacaaaaaaaaaatggagggctaattggaggatgttaaactaggagccaagaaggtctctgagagacaacctattgggacatcagctcaaacagacatggactacaaggagccaccaccagcaccattgtttgagcctggtgagctcaagtcatgggctttctacagagccggcattgctgagtttgttgctaccttcttgttcctttacatcactgtcttgactgtcatgggtgtagtctcaatctaagaccaaatgttctactggtgggattcaaggcatcgcttgggcctttggtggcatgatctttactcttgtttattgtactgctggcatttcatgttggcatatttacccagctgttgcct

SEQ ID NO: 225968 - DNA, 388 bp, Gossypium hirsutum
cccacgcgtccgcccacgcgtacgaccacgcgttcggctccttatgatatcctgacctggaatgactgtgagtctgctccttgttgccacggcattttacgttgagggatacatcttagaagattccgtcatacatagcgtaatgggaataatgtcattggtgggccttgtggcttttgcaatttccttctgtttgggtgttggagcaaccccatgggttataatgtccgagatacttccagttaatattaagggtctagccggcagtgcggcgacgttgctcaactgaatgacggcttgggcagttaccatgactgcaacactagctcctgtcttggagtggtggagggacgttcacaatttatgctggtttggctgctttcaccat

SEQ ID NO: 225969 - DNA, 344 bp, Gossypium hirsutum
atggttcacttggctaccatccccatcaccggtactggtattaaccctgcaaggagtttcggtgctgctgtaatctacaataacgacaaagcctgggatgaacactggattttctgggttggtccatttgttggagcacttgcagcagctatatatcatcagtacatccttagagcagcagctatcaaagctttgggatccttccgcagcaaccccaccaactaaaaaaaatcaacccaaatagctttgtctccacttcactctttttctattttctccatttgttcgtttgtgtgtatgagaagattattatgaatgatgaatgatgatgaccctttcctttt

SEQ ID NO: 225970 - DNA, 378 bp, Gossypium hirsutum
caagtctctccaatggtgggtgaatcaaagttgatagaaaatagggtgggaaggcccgtctccacagatggtttatttcgttttattaaatcagtcatttccgatgaacaacaagaagaaacaggcccattttacgtgctggatttgggtgctacgaggtccctagtcgagacatggttccataatcttcccatggttcaacctttctatgcagtcaaatccaaccctaaccccgctttcctcaaagaaatggcagctctcggcaccggcttttactgtgcaagccttcctgagattgaaaccattttatcgcttggggtttcgcctgatcgaatcgttttcgcaaacacatgcaaacccgagtctcacattaagtat

SEQ ID NO: 225971 - DNA, 385 bp, Gossypium hirsutum
gggagtaccagctaccccatgtgtcaggttgataattgtaaggaagatctttctaatgcaaaggactatcaccgtcggcataaagtgtgtgagattcatagtaaagcgactaaagctcttgttgagaagcagatgcagaggttctgccagcagtgtagcaggtttcacccgctttctgagtttgatgaggggaagagaagttgtaggcgtaggcttgctgggcataatcgccgtagaaggaagacacaacctgaagatgtgacctcacggcttttactccctgtaaacagggataatgccgggaatggaagtttagatattgtcaacttgctgactcttttggctaggacacaaggtaaaactgaggagaaaagcattaatccct

SEQ ID NO: 225972 - DNA, 256 bp, Gossypium hirsutum
ttttacgcgtgttgactttttttattcaatagcctgattggagcatgcaagagggtgttatcacaagcgttttcttccctactgataatcaatggatgattcttgtttgtaagccgaatcgacctgacatgcttattgatccatttggtataggaaagattgcacaggatggtcttgttttctcgacagaacttctcgattaggtcttatgaaataggttctagttcagactgtttttattgatacagttatgatt

SEQ ID NO: 225973 - DNA, 384 bp, Gossypium hirsutum
aggctcttcaagcagctcgaatcgatgctcctaatgcagcacatcaccctgccttgaaaagcaatggaagggtccttagctttggcctagatgcacccatttgtgattccatggcctctgtcttaaaccttggggagaaaaaggttttgaatggtgcccgagatggatttcatggtcttgaagaacaaagagtttcggttccaaacagaagggaaaacggtgatgattgctcgagtggatcttctatcacggtttcaaactcaatggaggaaggtggtagaagttgcattcaggaaaataggatgggcaacattaatggcttcccttcaccaattccttgtttacctggtgttccttggccttatccatggaattccgcggtgc

SEQ ID NO: 225974 - DNA, 387 bp, Gossypium hirsutum
cctctctaagctgccacctcagcttccgacgccaaaagaaaaaaaaaactgaaggattacaactcgtccttgttgactcggttccccgcctttttttgttgtctcgaatcggtctcgagtttttggaactcagttcgtgcttggatctggtaagacttttaagaaactgtatcagaatgaaggcacttattcttgttggaggatttggaactcgattgaggccattgactctcactgttccgaagccacttgtcgaatttgctaataaacccatgatcctgcatcagattgaggctctcaaggctgttggtgtaagtgaagttgtattggctattaactaccaacctgaggtgatgttgaacttcttgtaggaattcggaactaaac

SEQ ID NO: 225975 - DNA, 386 bp, Gossypium hirsutum
gggtttcttccatggccgcccctgaaattatatagaatagagagagaatgaagggtgttgctgcttatttgttggctgttttgggaggcaacacttccccttcagctgatgatcttaaggccattcttggctctgttggtgctgaagctgaagatgaaaggattcaacttcttttatctgaggtcaagggcaaagatataacagagcttattgcatccgggagggaaaagcttgcctccgttccatctggtggtggtggtgttgctgttgcagctgctgctcctggtgtcggtgccgctgcagctccagctgcatccgaggctaaaaaagaagagaaagttgaagagaaagaagaatccgatgatgatatgggattcagtctcttt

SEQ ID NO: 225976 - DNA, 375 bp, Gossypium hirsutum
cccacgcgtccgtttctgtataaaggcacactcagggtgctgctgggtaggaggggatgatcttccctgagtgcctgtgtgattgtcattttaccttctgtgatgtgattcctccgagctgcatacagatgcgaaatattatccttagtgcttttccacgcaatatgaggttaccagatccatctactcccaacttaaagattgatttgcttccggaaatcagagaaccccctcgcatcctttctgaggttgatgctgctctgaaggcaaaacatatgaaggctgatgtagatgagtatctcaagatgaggcctcatggaggatctacatttttaactgaactgaaacaaagactactcctttcaccaagcgagg

SEQ ID NO: 225977 - DNA, 246 bp, Gossypium hirsutum
gaaaacttcatcaaacaagtgtaaatatctgaagtaaaacaattgtgagaggaggtcgtggcaagcgtatggcggggatcactttatgtgtgatattctaggtcaaccatctttctgccgtcgttttcattggccaagacggcatcgttcgggcccagagcttcaattttcctcagtttaagccagaataaatcactggtcttatgaatgacttttctgaacctggatcgctttcttcgactggat

SEQ ID NO: 225978 - DNA, 385 bp, Gossypium hirsutum
aacaactctacttggaggcttaatttctgtgtcggtggagaggtatcgacaaggtgggatttgtatcgtgcaatgtacttgttgagatatctcgctagccaaagtcgggtatatctgatagacaaagagttcaatgctattggatacacattacttctcagcctgattgagtacaatactcttgtgatgcgtggagacttggaaatggccaatgaaattttaccttctattcccaaagagcaccataatagtgtggctcatttcctggaatcacgaggcatggttgaggatgcactattagtatctacagaccctgattacagatttgagcttgccatacagcttggtaaactagagattgctaaggtaattgccgcagaatttc

SEQ ID NO: 225979 - DNA, 374 bp, Gossypium hirsutum
gctcattgcattggtcggacaccttactttcgagaacctgaagaccataagaccaaacatgccattgttagggcaactcttccttaacaaaaacattacttggttggaattccgtcaagcagtggaggaaggtcatcataacagacatggtcaactccggttaaagaaaccgtaacaatccatatatacatatcctgctccggattgtatgtgccaagcttaaatccctaaacctcattttatagttggtatcgtgtatcgtttcaaggcgactgctgtatcaagaatggtgtcgcttagcattaaatatttgcggattgtattgagtttggaccgcagatcgggtattgatacgtattaatcatcttagtttt

SEQ ID NO: 225980 - DNA, 385 bp, Gossypium hirsutum
tccacgcgtccgccgcttcaagaagaaccgcaagaagcgcggccacgtcagcgctggtcacggacgtattggtaagcataggaagcatcctggaggtcgcggaaacgccggaggcatgcaccaccacaggatcctctttgacaaatatcaccctgggtatttcggtaaagtcggtatgaggtacttccacaagctccgcaacaagttttactgccccattgtcaacatcgacaagctctggtctctcgtcccacaagacgtgaaggcaaaagccaacaaggacgctgcgccgatgatcgacgtgacccagttcgggtactttaaggtccttggaaagggtgttttgcccgaggaccaaccgatcgtggttaaggctaagttggtg

SEQ ID NO: 225981 - DNA, 358 bp, Gossypium hirsutum
cccacgcgtccgattttcccttgcacttctgtagaatttgctttcactggggggcaaagtgcctcagatacaatggtgggatatgttcctcgtatgcattgggtagatcaaaagaaaggagagaataaatacaaatatggcggatggtggtcggtttggtggactggtacatacagcatggtactctcaaaggctgccttcttccacaagaagtatctcaaactttacactgatgagatgcctgcatcacttaaagaatacataaccaagaacaggaattgtgaagatgttgcgatgtcatttcttgttgcaaatgccacagatgctcctcccatttgggtgaaagggaaaatatttg

SEQ ID NO: 225982 - DNA, 390 bp, Gossypium hirsutum
cggacgcgtgggcgagtcgaagacgaaaccctaaatccaagccccctcccccttcaccaccggcagcagaaatgaagtacaacccacgtgtctcctcctctcgccgtaagagccgcaaggcccatttcacggcaccttcgtccgtccgccgtgttttgatgagcgctccactctcgaccgatctgaggtccaaatacaacgtcccgtccatgcctgttcgcaaggacgacgaggtccaagtcgttcgcggtacctacaaaggccgcgaagggaaagtcgtgcaagtgtaccgacgcaaatgggtgatccacattgagcgtatcacgcgggagaaagtgaacgggtcgaccgtcaacgtcggtatcaacccatcgaaggtcgtcatcacca

SEQ ID NO: 225983 - DNA, 388 bp, Gossypium hirsutum
ctctgattttgtcacctccctctcttcttacccttcttcaccctccctaaaaagccaacccacggtggctcattggtggcgcacctcctataaatactaccatctcgcctctaagaaatcgtctctttccttgtcttggggaagcagatccttgctgaacactattcacttggcatgtctctcaagaagaaacaaattgtcagagttggcctcaaagggtgaccaaaagtatgctattaatgttgttttaacagcatctgatgttgctgttaactggttttgtactgagcctatttaagactcatgggtctgccttgagctccaccattggtatatggtcttccaaacttgcttacatttgatttgggaatgctcacactcattgccc

SEQ ID NO: 225984 - DNA, 358 bp, Gossypium hirsutum
cccactcgtccggcctggttttaatttactcacaatgcgcaccacataaagtgcaatttcctggattatgacccttacctccagcatatccccttttttgcagtctcttcacgttttttcaattcattaacgtcttgcttttacggaaggaagttgaattttgaccctcttgcaaggtttctcatcagttaccagcatttgacgttttatcctgttatgtgtgtggcaagggtgaacttgtatttacagacattactgctattgttctcaaaccggaaagtcccagatagagcatttaacataatggggatccttgtgttctggacttggtttcctctcctgctttcctatctaccca

SEQ ID NO: 225985 - DNA, 369 bp, Gossypium hirsutum
cccacgcgttcggccccatttcacctggcaagaatttcacttacatttaagaggggatagatcaaatcggtagctttttctatttcccttctcttgctttccacaaagcggctggcggctttggaggcatcagggtcctcagtaggcccagaatcccagtccctttccctgaccctgctggcgatttcacccttcttattggctactggttcaaaaatgaccacatgctattgaaagcaatgctagatggtggtcatatgcttcccttccctgatggtattctaataaatggtcatggtcttaatggttcttctttcacatttgaacaatggctaatctttcatgtttcggatatctaatgttgggctt

SEQ ID NO: 225986 - DNA, 385 bp, Gossypium hirsutum
cccacgcgtccgctttctcttcttctctttgttttaaagaggggctggagttttagccagagaaaactccatggctaaacttgttgctactttcttcttggctctcattgccatctccatggttcaaactttggttatggcatcacatggacatggtggtcaccattatgataacaaacgttatggacctggaagtctcaagccttaccaatgtccatctcaatgcacaaggaggtgtagccagacacagtaccataaaccatgcatgttcttctgtcagaaatgttgcaggacatgcctttgtgctcctccagggtattatcggaacaaacaagtttgcccttgctacaacaactggaaaaccaaggaaggaggccccaaatgc

SEQ ID NO: 225987 - DNA, 389 bp, Gossypium hirsutum
agctgtttggctgatagtaaagtctgtactgatttccacgataagtatctgaatacttctgcctcggagttttcccagacgcatttgtcttccgttcagtctggttgctgtaagccatcaaacgactgccaattcatgtatgttggaccgacaaactggactagagggagtgcggaatccaacaatcccgactgcaatttatggaataacaacttgaatactctatgcttcgactgccagtcatgcaaggctggattcatagacaacctcaggagttcttggaagaaggtggcgattgtcaacattgtgttccttatcttcctcattattggctactctgttggctgctgcgctttcaggaacaataggagagacaattattatcagca

SEQ ID NO: 225988 - DNA, 395 bp, Gossypium hirsutum
gaacggaagggccggggccacgcgatccgtccacgcgtcccgaaatttctcgagcaaactccttcactaaatggtgggaagattggtgggtattacaaggaccatgaaattcttcctccaatgcctgttggcttccaccgctacattcttcaaaatttcaatggtgaaactctggatggcttgaatttacaagaagtccaagaatttgatcctccttccgaggttcgcgccttgattgagggccaatttctgtcgatgcgtgctcatgcagaaaggttcggaatgccttctcctccaaaacgaatcattgctactggtggggcgtcagcaaataaaagcattctcagctcaattgcatcaatcttttgctgtgatatatatacgggtcaaagacc

SEQ ID NO: 225989 - DNA, 383 bp, Gossypium hirsutum
cccacccgtccgcaaagatacaggcaataccgtcaacaaatgcaaattgttgttgcgtctctagagaaggcagcggggtttggtgcaccaaaatcgtacaccggaattgcttcgaggacgatttcgaagcaattccgttgtctaaaagattcaatatctgaacaaatcaaagctacaagcaagagtttaggagaagatgattgtttaggtgtgaaattggagggttcaagactacgatacgttgattatcagctacggcaacagcgggcactgcagcaattgggaatgatccaacacaataataatgtttggagaccccagcgaggattacctgaacgagctgtttctgttctacgtgcttggcttttcgagcatttccttca

SEQ ID NO: 225990 - DNA, 423 bp, Gossypium hirsutum
  unsure (1)..(423): unsure at all n locations
cgtacgagctcggtctgttcaaagcccaaatcaggcattcattgtgcaatgattagcaacccaaagcgatgtgctgccagattgcttgctggtctaatacatncgtcaccacggttatgagattaggggcctgtatttagcatctggcttctcctaccgaagccatatccttttcttgagccgtaaatgggcgtcaactatgcaatagatatnccgcacccggccatcattgacctgtcgataattagacctctgcatgctcggtcagcaatgcatgtctatactatcatcacctaaccccgatctggctgatgagatagagagcatctgtagccgaccatcttggaaaggaatcctgtgtcacctatggcccaaggccaaatacatcgaggctgtagttactggctccatggcacagtatat

SEQ ID NO: 225991 - DNA, 386 bp, Gossypium hirsutum
aaaacagccatggtgtattctgcatctccagctcttataacagatctagaaaagagaattggattgatgctggaagatgccaatgcaaacgatctactgattcctaattataaggatgaagatcaaggactaatgctaaattcacctgagcagcgaacgatgcacaacatagatgtggtgcaaaggattttggactatttcctgatgcatgaacaacaacaacagcaacaaaagatagggaaaacaactgttagtaagctattggacaattacttggctgaaatagcaagggatccaaacctttccatcacaaaatttcaagctcttgctgaatccttgccagaaaatgctcgatcatgtgatgacggtctctatagagccattga

SEQ ID NO: 225992 - DNA, 242 bp, Gossypium hirsutum
tccacgcgtcctcaggaattgttttgaccatagaagagcttatttactggcgtggtacaattgctcggggcggttcttccaaatttcttaaggctcttaaagaaaataaggatctatgtgcagacaatggtttgattgggcaatttgatgttggattctattttgctttttttggttttgagaatgttgttttttccacttagagtcctaattcatacaagcaatttgttttggaagctgta

SEQ ID NO: 225993 - DNA, 380 bp, Gossypium hirsutum
gcacaaccagccaaacctatttttgccggagatcttccagcaggtttgcggagaatttcaaatattgtagcggtttcaagttgcaagggaggtgtaggaaaatcaacggttgctgtaaatcttgcgtatactttggctggaatgggagccagagtaggtgtttttgatgctgatgtttatggaccaagtttaccaacaatggtctcccctgaaaatcgattgctagagatgaacccagaaaagagaacaatcatcccaacagattatttaggagtcaagttggtatcctttggatttgctggacaaggtcgtgcaataatgcgaggtccaatggtttcaggggtcatcgatcaacttctgacaacttcagagtggggaga

SEQ ID NO: 225994 - DNA, 386 bp, Gossypium hirsutum
cccacgcgtacgcccacgcgtccgctagcttttcatcagttgggatgtgtaaggcttctgaggaaagagtatgatgtagcaaaaggtctttttgagaaagctgtgagtttgggtcatgtttactccattgccggtttggctagactgggttacattaagggtcataaactcttttcttatgagaagctcagctctgtgatttcttctgttaacccactggggtggatgtatcaggaaaggtcattatactgtgaaggtgataaaaggtcagaagaccttgataaagcaaccgaacttgacccaactctcacatacccctacatgtatcgggctgcttccctaatgatgaaacagaatgttcaagctgctcttgctgagatcaatcg

SEQ ID NO: 225995 - DNA, 335 bp, Gossypium hirsutum
accactcaaacgcccacctatacattatctctttattgaccgggaagaaaaagggttgtggccaaggagcctggtgcagctccactattgcaatcggaaaacatgcgaattagcaatcagttgactcaattccggatttggatagaccggaatacataatggtgcaacaagtattggatgattataaggagccatcaacacagctgcttattaaccaacaggggcgtaaatggcaacaagacggatcccggattgtatattatcaccgggtgaacagagatggttataaagctggacattttaacacctggctgagttttaggtatgttaaagaa

SEQ ID NO: 225996 - DNA, 378 bp, Gossypium hirsutum
gctgcctcgaattgctacttatttcctagaacgggctgttgagatctcaaggatggacggtgagccatccgacatggatattatggatgctgagggaattacatcattgaatggactctcttgcacagaattctctttttcctccatagaacgagaagtttctatcgatggttatcagcatgatccatcatcaagctaccagcttattagattgcatcccagtagccttggggagaactgtaagtgggtggaaatgtttgaagatgtcgacattgtcctgttttgtgtgtcattgaccgactaccatgagttttcactagacagtaatggggttctcacaaacaaaatgatggcaagcaagcaactttttgaaaccgt

SEQ ID NO: 225997 - DNA, 286 bp, Gossypium hirsutum
agaagatcaagaccgacaagtcttatggaatcaatggtggtatgaactggggggatggaattgatgcctttggaaggaagggttatgtaaagggtgtttaccaatatgttgacaaatattgtgctgacgtctatggttgcatgcctatcatacaacaccaataactggtcttcttatgatgaggttaatgttggcagtactaccggataggcaatgtggtgggtgactctagacaggattttatactgtggaggtcttatagggtacaatacaccttgctttggcg

SEQ ID NO: 225998 - DNA, 384 bp, Gossypium hirsutum
ctgggttctgttggggtgctaaagttgtggctggactggctaaggatccccttatccaagcagctgtaatgttacatccttcatttgtgactgtggacgatatcaaaagtgtgaaggtgcccattgcgatattgggagctgagcatgaccatatatctcccccagagcttttaaaacagtttgatgagatcttaaaagcgagtgaggttgatagctatgtgaagatatttcctaaagttgcccatggatggtcggtgagatatgatgtcaatgatctggcagctgtgtcgagagctaacgaagctcaacaagatatgctggagtggtttgcaaagtacgttaagtgagaaacttatccgatggtgatgggagtttatgcgtgtt

SEQ ID NO: 225999 - DNA, 297 bp, Gossypium hirsutum
gcattttcttcatagaaatccacgctccacctattaaaacttcaacttttggcggttccaggtttgattcttatagataagtttcaatgcccaacaacaagtctaaacccggaccaagccgaatgtctgtttacctttacattcccaatattatttgggtatataagaattctgttgaattgctatgcttttgctttatgcttttccagctaaagtctttttgctgctctgtattttctaagctttgtttgtgatgctttggatggttggagttcttcgcaaatttaactcaagctt

SEQ ID NO: 226000 - DNA, 387 bp, Gossypium hirsutum
agaaaatcaaaaagaagaagaaaagagatccccatgatgtctcttacaatcccggctaatctctcaaaatcaattttgaagccaaagctggagacccaagtgatccccaaggcttcatccagatcattgattgtatgctcctccagcaatccttcctcctccgacaaatcggcttcatcactccaggccttctcagcggctctcgctctttcttccatccttctttcggctccactccctgctgttgcggacattgcggggctcactccttgcaaagagtccaagcaattcgccaagcgcgagaagcagcagatcaagaagctggaatcctcgttgaagctttacgcccccgatagcgcaccggctctcgccatcaaagccaccatc

SEQ ID NO: 226001 - DNA, 382 bp, Gossypium hirsutum
caaaatcccacacctcctaaacagccatcatttcaacaacactgccctcctgattttccaagaaaggtataagcaacaaaacaggctgtacgcaacatgttttaaataaaacattgttttgtgatgaacaaaaacattatctgcaacatgtaggtgtttgcagagacgatagcaacctacttgctggtttttgtgacatgtggatcagctgccattagttcggttgatgaacataaaatctcaaggttaggagcttcagttgcaggtggacttattgtgactgtaatgatctatgcagttggtcatgtttctggtgcacatatgaaccctgctgttaccctcgcttttgcagctgtcagacattttccatggaaacaggttt

SEQ ID NO: 226002 - DNA, 387 bp, Gossypium hirsutum
cccacgcgtacgatcggtgactacgtctacgtcaaggtaaacggtgccgttcacaggggtatgccccacaagttctaccatggtcgtactggtcgagtttggaatgtcacacaaacggtgccatcaggtgttcgaagccaacaagcaggtgggaaacaggattatcaggaagaggattcatgtacgtgttgagcatgtacagccttcgaggtgcgctgaggaattcaagctcaggaaggtgaagaatgatcaactcaaggcagaggctaaagcaaagggtgaggtcattagcacaaagaggcatccagaagggcctagacctggtttcatggtggacggtgctacacttgaaactgttacgcccatcccatacgatgtcgttaatga

SEQ ID NO: 226003 - DNA, 321 bp, Gossypium hirsutum
ctcttctgccaccccaaccacatacgcccggccttctccgccgtccacctgggggactccctccagtctctctaagcctgctgagtacgtgatctccaaggtcgatgacctcttgaactgggcccgtcgtgggtccatctggcccatgactttcggcctcgcttgctgtgccgtacaaatgatgcacaccggggcttttggctactacttcaatcgttttggtgttatacttagggctagccctcgccaatccgattgcatgattggtgctgacactcttaccaacaaaatggcccctgctcttcgcatggtttacgacca

SEQ ID NO: 226004 - DNA, 383 bp, Gossypium hirsutum
atttggttgtcgagaaaagaaaaaaagaatatggaaaccgtaactttgacaggattacttcacaaggctgcggccgagttccctaccaggcgagctttatcagtttccggcaagttcgatttgacgcatgctcaattacaacacatcatcgatcatgctgcttctctcctcatcgcctccggcatccatcccggcgatgtcgtcgctcttactttcccaaacaccgtggagcttgttattatgttcttggctgtaattcgttgccgtgcaaccgccgcgccgttaaactcagcttatactgccgaggagtttgagttttacctttctgattcagaatccaagctgttattaatcccagccgaaggcatcaagccggctgaagc

SEQ ID NO: 226005 - DNA, 373 bp, Gossypium hirsutum
aattcccccaccatttttttcctctctcaacaaaatttcatcactcttaaaacggagcttcctaaatggcgccgagggagaaaacggcggacgtcaagggaaacgggaatgggtgtactaaagaggttcattttagaggagtaaggaagcgtccatggggtcgttacgccgctgagatcagagatccagggaagaaaagccgtgtttggcttggaacttttgatacagctgaggaagcggccaaggcctacgacgccgccgccagagaattccgcggcgccaaggcgaagactaatttccccctccctggtgaaatcctcaacaatggtagtaactgtaacaacaatggttataccaactgcagcaacaacaa

SEQ ID NO: 226006 - DNA, 377 bp, Gossypium hirsutum
accgtatatatcatcccagctttagcccatatgctcacctatagaaaagcctctgctcggcagaatgctgcagaaaagccaccattcttcatgccaagttggactggaatgtatgcattaaacgcctttattgtggtgtgggttctagtgatcgggttcgggttcgggggatgggctagcatgaccaatttcattaggcaaattgactcttttggcttgtttgccaagtgttatcaatgcaagcctccaacaccaacatcaccagctgctgctatgcaccattaagctcactctcaaccaacatcaactactccccgtttttctccagtcaaattccgattttggtccctctattatgctcaaatttgaaatttagt

SEQ ID NO: 226007 - DNA, 374 bp, Gossypium hirsutum
cggacgcgtggggaaattgcaagattttatgacgcaggaatgggtacaatcatgtttgcaccagtagcagtgttgtcatggttcccattcatctcaaccttccagtctcgccttctctttaaccaagcctttagccgtgggctggagatttctctcatccttgccggaaacaaagctaatgtcgagacatgatttctactttctggctgcggttaggtttgcttgaactagttattgtttttattttttggcctcgatttattaatttatgaatttaactacaatccttttatagtatatattatttttgatggagtacaatctttctataattgaatttatgtgcattcacagatggttctgttagtagtatg

SEQ ID NO: 226008 - DNA, 383 bp, Gossypium hirsutum
cccacgcgtccgcccacgcgtccgcccacgcgtccggagaaaggaaaccaaaccaaggtagtgagccgctgcttctcttcttctgtatcccaaaatggttgcttttaggtttcatcaataccaagtggtgggcagaggccttcctacagaagcagatgagcatcccaagatttaccgtatgaagctttgggccactaacgaagtccgtgccaaatccaagttttggtattttttgaggaagctgaagaaggtgaagaaaagcaatggacaagttttggctatcaatgagatctttgagaaaagccctaccaagatcaagaactatggcatttggctgcgatatcaaagtcgaactggttatcacaatatgtacaaggaatacc

SEQ ID NO: 226009 - DNA, 373 bp, Gossypium hirsutum
cccacgcgtccgcggacgcgtgggtgacaatggagtgggttgatggagtgaaagtgaatgaacaggccgcaattgaaaggcaaggtttgaagcttttggatttagtgaccactggtatccagtgcagcctcaggcaactactggagtatggatactttcatgcggatcctcatcctggtaatcttttggcaacacctgaaggaaaacttgcttttctagattttgggatgatgagtgagaccccggaggaagcaagattcgccataatcggtcatgttgttcacatggtcaatcgagattatgaagctatggcccgtgattactatgctctggatttcttgtcaactgatgtagatgtttccccaattgtgcc

SEQ ID NO: 226010 - DNA, 382 bp, Gossypium hirsutum
gaaaaatactcttccttttttttaattccttcctttttcctttcatccaatcgaccaaattcagagcttacaaaagaaaaatggccggaatcggacctttaactcaagactgggagcccgtcgttattcggaaaaagcccccaaacgctgccaccaagaaggatgagaaagtcgttaacgccgcccgtcgagccggtgccgagatcgaatccgtcaagaaatcgaatgctgggacgaacaaggcagcatcgagtagcactactttgaatacaaggaaacttgatgaggaaactgaaaatcttgctcatgaacgagtgccaactgaactgaagaaagccatcatgcatgctcgaatggagaagaaactcacccagtctcaact

SEQ ID NO: 226011 - DNA, 376 bp, Gossypium hirsutum
ctttcaaccgcgcctaataaccgctcggatttttctcagacgtgaaaaaaatggggctgtctttcaccaagctattcatccggctatttgccaaaaaggagatgcgtatactgatggttgggcttgatgctgactggtaaaaccaccattctttacaagctgaaggtgagagagattgtcactaccattcccaccatcggtttcaatgttgagaccgttgaatacaagaacatcagcttcactgtttgggatgttggtggcgcaggacaagatccgaccattgcggagacactatttccaaaacatgcaacgacttattttcgtggtgtgatagcaatgatcgtgaccgagtggttgaagctagagatgagttgca

SEQ ID NO: 226012 - DNA, 378 bp, Gossypium hirsutum
gtagcaccatcattttcatactattcctccaaccgcgccacctatcatctggcgggaagtctgattccatggctgcccggagctttgttctttggcttcacgggcttggtgactctggtccagccaatgaacccatcaagacactctttaggtcttccgagttccgaaacaccaaatggtctttcccttctgcccctgaaaaccctgtcacctgcaattatggaatgcgaatgccttcttggttcgacattcaggagattcctgtcacagccgattctccaaaagctaaaagtgatgtccttaaagcagttcagaatgtgcatgcgatgatagacaaagaagtagctgctgggacggatcctaataacgtatttgtgt

SEQ ID NO: 226013 - DNA, 382 bp, Gossypium hirsutum
gagaaaatagtaataaggtttgggttgttttttgttagattcttgtgtacactgggggtgtcttgtttcaacaggtaaactctaacaaatatcaggcggggatggatttgttcctcaacgccaaagcggtgcgcctacgcggtcaccatgacaagtatctcgtcgccgaggaagacgaagaatcctgttctcaagaccgaaacggatcctccaaaagcgcttgatggaccgtcgaattcgtacccgggtcagaaaacatcatccgcttaaaaagcgtttacaacaagtatgtgaccggctccaaccaggcctttttacttgggatgaccgggcgaaaggtgattcagtcgctgcctaagaggctcgactcgtcggtcgagtg

SEQ ID NO: 226014 - DNA, 315 bp, Gossypium hirsutum
cccacgcgtccggaggtctcttccatcctcgagggcaggatctccggtgcctggaccggtggtgagctcgaggagactggtcgtgtcttgaccatcggagacggtatcgcccgtgtctacggtttgaggaacgttcaggccgaggagatggttgaattcgcctcgggtgttcaaggtatggccttgaacttggaggccgacaacgtcggtgtcaccatcttttgttgcgacagggccatcaaggagggtgacttggtcaagcgaaccggtaccattgttgacgttcccgtttgtattgatcttttgggttttgtc

SEQ ID NO: 226015 - DNA, 317 bp, Gossypium hirsutum
gtgggattgtcactttcagagatgatccaaagctggacgccggtgaagagatcgcacctgaactctttaaagcaattcagcaatcatggtgctcggtaatcgttttctccgaaacgtatgccttttcaaggtattgcatgaaggaacttgctgagattgttgaacaaaaaaacaagggtcataaagtggttccaattttttacaatattgatccatccgatttaagaaaacagaaagggaaagttaatgaagccttcgcccaacatgaagagcgattctaggaagattgagacaagatccaaaagtggcgaaaagct

SEQ ID NO: 226016 - DNA, 370 bp, Gossypium hirsutum
tgccccttatccgtgttccagccgagtatcataagtttttcggaaggcctctttacgtagcagagtatggagcattcaaacttgttaaccttttccatcaattgctagtgtgtcacccatctttttgaaaagattaacaagtttgtctaccttcgaaattggaaagcctgcccaagtgcacctcctttggttttaacaaggaaagataagaagggtaaggggaaccaggaggaaagtgtggacattgctgcaggtgttggctcttctgatgagttctccgatgaagaaagagtagtagttgaagaacattacgagaagaggaatgaaggaagaaccaactttggggaagcagaatgtgaagtcgatgacc

SEQ ID NO: 226017 - DNA, 376 bp, Gossypium hirsutum
aaggcattccctttcaaagcctatctctctctttctctcactcacacacagtactcacgcttcctccctttgttttctctggtttccatgaggaggattctgctttctctcctacttttagctcaccttggggagctcggcgctgaagataggcttctgaatccatcaaaactggagatgttcgttgatgagcttccagatatgcctaaaatccaaggttttcgtatgctcaatacttcccccaaacccaagtcactcatgattggcatgttcaagaaaaaatggaaattccacagggacttgcctccaacgccagtgttcgcctatggtgcttcaagccgcagggcaacagtccccggtccgaccatcgaggcac

SEQ ID NO: 226018 - DNA, 381 bp, Gossypium hirsutum
aaattgttcgttggaaacaaaatcaatgctgggatttatctgctgaacccttctgttcttgatagaatcgaactgagaccaacctcgattgaaaaagaggtcttcccgaagattgcagccgagaagaagctgtatgcaatggtcctaccagggttttggatggacatcggtcaaccaagggactatattaccggactaagactctatctagactcccttcgaaagaaagcttcacctaagttggccagtggtccaaacattgtaggaaacgttttggttcatgagactgccaaaatcggagaaggatgtttgatcggaccagacgtggcaattggtccaggctgcgttgtcgagtccggagtcagactttctcgttgcacg

SEQ ID NO: 226019 - DNA, 371 bp, Gossypium hirsutum
cccacgcgtccgattatggaacccgttcccatgctcctgaactcacagctgggtactataacacaaggtaccgagatggttacctcccgatcgctcaaatgctagcacgtcatggtgccgttttcaacttcacttgcatagagatgcgggatcatgagcagccccaagatgccttgtgtgcaccggagaagctagtgaagcaagttgctttagcaacaggagcagcacaagttccacttgccggggagaatgcacttccccgttatgatgaatacgcccacgagcagatcttacgagcttcatcgttgaatgtcgatggctcagcagttgatagagagatgtgtgcatttacgtacttgaggatgaaccca

SEQ ID NO: 226020 - DNA, 359 bp, Gossypium hirsutum
cccacgcgtccgcccacgcgtccgtaacttaatagaagttgcaggtagaagcgtggggatttactttgtaaagctgatgtatttcaatcttttaggtcaatgcttttagagaacgaagggcacttgccttgacactgaatgataccaaaacagctgtaaacaagcttcatcggatggtaaacgttttggttggcatcatcatattggttatatggctcctcatacttgaaatcgcctccagcaaagaccttgtttttattagctctcaactgcttataagtgcattcatattgtggaaacacttgcaagacgatattcgaagctattatattcttgttcggtattccaccctttgatgt

SEQ ID NO: 226021 - DNA, 381 bp, Gossypium hirsutum
cccacgcgtccgcccacgcgtccgctaaattttgatggcgttttgaccctgtcgagtgatcccaagaactccacgggcagcagtcgaaactggagtgtggttaagaccattccagataatatttgcacaactaattttgcggaattgggtagtggaacttgtggcttcaatagtatctgcacacttaaacccgacaaaaggccagaatgtaaatgcccaccaggttattctttatccgatgcaaatgaagagtacggcaactgccaagcagatttcatgcagggttgtgaagcagatgcacaaaattcctcacaagatttatacaaattagtggaactgcaaaatacagattggccgacttccgattatgagcggattaat

SEQ ID NO: 226022 - DNA, 381 bp, Gossypium hirsutum
gtgcttgctactgctgctcatgctgttacaacgcagaccctctttgttgtgtgcgtacaagccaaggacgagccaattcataataggtgttaataagtatttggaggccattaaaaatggattctcggttggtatgcgttttaagatgagatttgagggagaagacactcctgatagaaggttcacgggtaccatagttggggtaggagatttttccccacattggtcggaatctaaatggcgaaccttgaagattcaatgggatgaacctgcaacaatacaaaggccagagagagtttcaccatgggaaatagagccatttgcgccttctgcttccataaatcttgtacaaccagctgtaaagaacaaaaggccacggct

SEQ ID NO: 226023 - DNA, 355 bp, Gossypium hirsutum
gaaagattgtaagtgtaaggatcagaaggaattttgcatttgtacaatatgattgccaagatgatgccaccagggctttggaggctacaaatatgagcaagctgatggatagagttatttcagttgaatatgcagtacgagatgatgatgatcgtcgaaatggatatagccctgagagaggtcgtgataggtcacctgagagaggtcgtgacaggagacgatctccaagtcccttccgaagagagaggggtagccccgattatggtcgtggctctagtcgtagcccttataggaaggagagggggagccctgattatggtcgtggccacggtccaagtctttataagagagatag

SEQ ID NO: 226024 - DNA, 354 bp, Gossypium hirsutum
gttgacggcttaatccgacttatggaaggagagaacaccggaccaatcaatatggggaatccaggtgaattcaccatgctcgagcttgcagaatccgtgaaggagcttatcaatcctgaggtgaagatatcgatggtggaaaacactcctgatgatccccgacaaaggaagccggacataaccaaagcaaaagaggtgctcggatgggaaccaaaggtgaagttgcgtgacggactttcacttatggaggaggattttcgactgaggctcggggttccaaagaagaactgattgaaagcttttttgcagcaacagaagttacaaatataaagggctattgcttctttttctttt

SEQ ID NO: 226025 - DNA, 381 bp, Gossypium hirsutum
gctagccacagattcttccggccagtcaaaaggttacgggtttgtacaatttgacaacgaagaatctgcccaaaaagcaattgagaagttgaatggtatgctattgaatgataagcaagtctatgtgggcccttttgttcgcaagcaagaaagagatacttctactagcaagacaaaatttaacaatgtctacgtaaagaatctctcggaatcaactaccgatgaagacttgaatcaaacttttggtgaatttggtcagatcactagtgctgtggtaatgagggatgctgatgggaaatccaagggctttgggtttatcaacttcgagaacgcagatgacgctgctagagccgttgagtccctcaatggaaagaaatttga

SEQ ID NO: 226026 - DNA, 376 bp, Gossypium hirsutum
gtgaaaaaggaggaacttgacatcccaatcgctcctcatctttcgctggctcgccagaaatatgctgatgcctgtgaagccgccatcaatgagcaaatcaatgtggagtacaacgtttcctatgtgtaccactcgttgtatgcttacttcgacagagacaacgttgcgctcaaaggctttgccaagtaagattataacaacaagaagctctccaaagttatttttttaatatatatatctgtatcactgtatgacatgataaaatttttatattgttgtcatcagattcttcaaggaatcaagtgaagaagaaagagagcatgcagagaagctgatggaatatcaggttttctttcatgtctattttctttttggg

SEQ ID NO: 226027 - DNA, 380 bp, Gossypium hirsutum
cgtgtacaggcaacatcgatgcccctattgacgaaactttgtttgatatcgagaaagagattgatgatctattgcctgttgaagtaaaagaacagcgtctcagcaacttgcttcaagccaccatggtaggaggatgtgttgcagcaatgcctatccttaaaatgatcccgacttcagtcctctggggctacttcgcattcatggctatcgaaagcttaccgggtaaccaattttgggaaaggatcttattgctcttcactgcaccaagcagaagatacaaggtccttgagcagcaacatgcaacctttgtggaaactgttccattcaagactattgcaatgttcaccatttttcaaacggcgtatctgctcgtatgtttc

SEQ ID NO: 226028 - DNA, 384 bp, Gossypium hirsutum
aacaagataaaaagtattttgctttgcctaatttgtaagctttgaggttaagtgagaaaaactatggctgaagagggacaagtaattgcctgccacactgttgagtcatggcagcagcagctccagatgggaaacgagtccaacaaactggtggtggtggatttcacagcatcatggtgcgggccatgccgttttatatcaccaatcctggtggatcttgctaagaagctgcccaacgtcatattcttgaaggtggacgtggatgaactgaaatctgtcgctcagtcgtgggctattgaggcgatgccaacttttgtgtttctgaaaggaggcaccataattgacaagcttgtgggtgcaaggaaagatgaattgcagcagaaa

SEQ ID NO: 226029 - DNA, 379 bp, Gossypium hirsutum
acagaccgaaaaggaccgatggaaagggttggcttacgatatttcggacgaccggcaggacattactcgagggaaagggatggtggattccttgttccaagctcccatgaatgatggaactcactatgctgtcatgagttcctatgaatacctcagccaaggtcttaaaacgtacaatttggacaacaacatggatggtttctacattgctcctgcattcatggacaagcttgttgttcacatcaccaagaacttcatgtccctccctaacattaaggttcctctaatcttgggtatttggggaggcaaaggtcaaggaaaatctttccaatgtgagcttgtgtttgccaagaagggtatcaaccccatcatgatgagt

SEQ ID NO: 226030 - DNA, 369 bp, Gossypium hirsutum
ggggattggaggctcgagttccattcttagacaaagaattcatcaatgtcgccagggctatagaccctgaatcaaagatgattaataaggatgaaggacgcattgagaaatgggttcttagaagagcctttgatgatgaaaaccatccctatttgccgaagcatatcttatacaggcagaaagaacaattcagtgatggcgttggctatagttggatcgatggtctcaaagctcatgctgttgcacatgtgaccgataagatgatgcttaatgcttcaaacatctttcctcacaacactccgaccacgaaagaagcatactattataggatgatcttcgaaaggttcttcctcagactcagcacgattg

SEQ ID NO: 226031 - DNA, 382 bp, Gossypium hirsutum
cccacgcgtccggaggatggaagcagtacttcttatgcaattgctagttctcaggagagggggcagatgtttattggtcctgggattgaagtttataaaggtcaaatagtcggcatccatcagcgccctggggacttatcccttaatgtttgcaagaaaaaggctgcaaccaatgtacgctccaataaagaacaaacagtggttcttgatacaccattggactatagtctggacgactgcattgagtatatccaagaagatgagttggtggaggttactccctcaagcatcagaatgtgcaaaaatccaaagtttgcagctgcgaagaaaagtcggtaaatccagccttttccgagattgttggtccatgagcaaagctttc

SEQ ID NO: 226032 - DNA, 378 bp, Gossypium hirsutum
tagaaagctctttctttggcagtgaaaattgaaaatcgacggcgaaaatgttgaggctggcgtcgaaacggttgcttgggctaacgtcaagggagatcccgtcacggtccgttcagattctgccacgtctttaccacgaaaacgtcatcgaacactacaacaatccccgtaacgtcggttccttcgataagaacgatccgaacgtcggcaccggtttggtcggagctcctgcttgtggcgatgttatgaagcttcaaatcaaaatcgacgaggaatcggggaagattgttgatgcttgctttaaaacattcggttgtggatcggcgattgcgtcttcttctgttgctactgaatgggtgaaggggaaaagcatggacg

SEQ ID NO: 226033 - DNA, 409 bp, Gossypium hirsutum
cgggaaggaccgggcggacccacgcgtccggaaaatctttccagtttcaattttctcacaacaaaactgaaaatgtcttgctgggcaggaaaatgtggctgcggcgctgattgcaagtgtggcagtggctgtaacggatgcagtatgttccctgacataatagagaagactacaactgagactattgttcttggtgtggcaactcagaaaatgcactttgagggatctgagatgggagttggggttgagggtggatgcccgtgtggagacaactgcaaatgcaacccttgcacttgcggtaagtgaacaacaaagagaagcagagtggcctttgtcattttaactaaataaattctattactttagtatgtatcagcaaatcttcatgaggatttggttcttaattatg

SEQ ID NO: 226034 - DNA, 372 bp, Gossypium hirsutum
gtacactatgatggaatggtcatatctatggactcagacataagacagacagggatgaaaacgcattcaatgtctcaaactacaacaacaaaacaccaatttattcaactctttcaaattcatcatgtctgacaagtgcggcaactgcgactgctctgacaagagccagtgcgtgaagaaaggaaatagcttggtcattgagactgaaaagagctacatcagcactgtagtggtcgaggctgtggcagagaacgatggcaagtgcaagtgtggagatagcttcagctgcacagactgcacatgtggcactcattaagcagacatagaaccatgatgttttagtccatagcaatatttaggacctaaaaataa

SEQ ID NO: 226035 - DNA, 387 bp, Gossypium hirsutum
agggggtgccccagtgtatagataaacttgcacaagctggtctgaagatctgggttttgacgggggacaagatggaaactgctataaatataggatttgcttgcagtctgctaagacaaggcatgaagcagatatgcattacaacaattagttcagataccaaaactctaatcaaggaaaacatattgatgcaaattaccaatgcttcacaaatgatcaaactagaaaaagatccacatgctgcatttgcattgatcattgatggaaagactcttgcctatgccttggaggatgatatgaaacagcaattcttaggcttagcagttttatgtgcatctgttatttgctgtcgtgtatctcccaagcagaaggcgctagtgacaagat

SEQ ID NO: 226036 - DNA, 388 bp, Gossypium hirsutum
aactcggcggtcggcgctcttttggttagctttaccgtatatatcatcccagctgtagcccatatgctcacctatagaaaagcctctgctcggcagaatgctgcagaaaagccaccattcttcatgccaagttggactggaatgtatgcattaaacgcctttattgtggtgtgggttctagtgatcgggttcgggttcgggggatgggctagcatgaccaatttcattaggcaaattgactcttttggcttgtttgccaagtgttatcaatgcaagcctccaacaccaacatcaccagctgctgctatgcaccattaagctcactctcaaccaacatcaactactccccgtttttctccagtcaaattccgattttggtccctctatt

SEQ ID NO: 226037 - DNA, 385 bp, Gossypium hirsutum
  unsure (1)..(385): unsure at all n locations
gggcgcgcgccgngtatacatgtcgtactcattattgactacctctttgactcacgttcttccttagactcatcacactcttcatagccaatacctcttccttcttgcaacaccttctcctacaccaacagtccatcgatacatacacagcgagccccagactcgttcccgatatcgcctccctcccacacattcaccttcaccaccacaatgtcctccaccaacggcaccaatggcacttccgccgccccctcgcagtcctccttcgctgtcaaggccggtctcgcccagatgttgaagggtggcgtgatcatggacgttgtcgacgctgagcaggcaaagatcgcagaggaggccggtgcatgcgccgtcatggccctcgagc

SEQ ID NO: 226038 - DNA, 388 bp, Gossypium hirsutum
tgcatattgactgtgtctggaacggatgggaggagattgggaattccgagcaggtgggtcttagtttttggcacaaccaagtggaggaaccatccagtttatttagcttaatgggaagtgagtatgatcatgaaatgagaaggaagaaatgcaaatactcctctgacgtgagtgatgggtacattctggaaaacaacggattttggtgcaagaaatgggataggttgcaatacctttcactttggattggtgttggtgaactccttacaccattgccagcggcgggtcttctgaactgccctaatttggaggagattcgaataaaggttgaaggggactgcaggggacgttccaaaccatctgaacgtgcatttggattgagctctct

SEQ ID NO: 226039 - DNA, 355 bp, Gossypium hirsutum
acccgggccgcaaacataggcaggcagccatggcatggatcaaggtgcacgagttaaggagcagattaaagacagagctggtgactcagctcaaggatttaaaagccgaactttctcttcttcgagttgccaaggtcactggtggtgcccccaataagctttccaagattaaggtggtgaggctatccattgctcaagtattgactgtgatatcccaaaaacaaaaggctgctttgagggaagcttatacgaagaagaagtttttgcctcttgatctccgtcccaagaagaccagagctatttgcctccttcttaccaaacaccagcaatcttttgaaaaccgagcgggagaaaa

SEQ ID NO: 226040 - DNA, 180 bp, Gossypium hirsutum
cggacgcgtgggcggacgcgtgggctcgaagcttttgagggcaaaaaaagagtccatgttatcgatttctcaatgaaccaaggcatgcaatggcctgctttgatgcaagctttagcgttaagagttggtggtccgccagcttttaaggtaactgggttcggaccttctaaccacgacaac

SEQ ID NO: 226041 - DNA, 367 bp, Gossypium hirsutum
ccaagatgttgtcctctcctcagattcccagtttgctctctccggttcctgggatggtgaacttcgtctatgggacttaagcgcaggaacctccgctcgtcgtttcgttggccacaccaaagatgtgctttccgttgccttttcaatcgacaaccgtcagatcgtctcagcttctcgtgatcgaactatcaagctttggaatacccttggagaatgcaaatacactatccaagagggcgatgctcatacagattgggtaagctgtgttcgtttcagcccaaatactcttcaacccaccatcgtttcggcttcctgggataagaccgtgaaagtttggaacttgaccaactgcaagattcgtacacat

SEQ ID NO: 226042 - DNA, 388 bp, Gossypium hirsutum
cagatcattggggaagttctcaggcctcttgataatgaacgcttaattgttaaagcaagcagtggccctcgttatgttgttggttgccgcagtaaagttgataaggagaaactgacttcaggaactagagtggttcttgacatgacaacacttactatcatgcgggccctacctcgtgaagttgatccagtcgtttacaacatgttgcacgaggatcctggtaatgttagctactctgctgttggtggtttatctgatcaaattcgagagctgagggaatctattgagctccctctcatgaatcctgagcttttccttagagtagggattaaacctcccaagggtgtccttctttatgggccttctggtactggcaagacattgttag

SEQ ID NO: 226043 - DNA, 369 bp, Gossypium hirsutum
ggcaacatgaagcttgatgcagcattctgtgaggccaaggagaagcctgatggctgtcctgtatttctattgttctcgggtaataccagtggtcaatttgttggggtagcagagatggacgaccaagtttattttaacaagactctagagttctggcaacaggacaagtggactggttgctttcctgtgaagtggcacattattaaggacgtgccaaacactttgctgtggcacataacacttgagaacattgagaacatgcctgttactaatagtagggacacccaagaggtttattttgagcaggggatccaaattcttaaaatttttaaagatcattcctagtagacgtgcattcttgattgattt

SEQ ID NO: 226044 - DNA, 373 bp, Gossypium hirsutum
cccacgcgtccgatgacatatgccggagatccctcgatatcgagagaccaacttacaccaatttgaaccggttgatttctcaaatcatatcgtccttgacaacttctttaaggtttgatggagccattaatgtggacattacagagttccaaaccaatcttgtgccttatcctcgaatccatttcatgctctcttcttatgcgcctgttatctcatctgagaaagcataccatgaacagttatcagttcctgagatcacaaacgctgtgttcgagcccttaagcatgatggcgaattgcgatcctaggcatgggaagttcatggcatgctgcctgatgtattgaggagatgttgtgcccaaggatgttaatgc

SEQ ID NO: 226045 - DNA, 386 bp, Gossypium hirsutum
gccccccggggatttgggatgtggttttcaatgcatccaacaatgagctggttggcactcaaactctggtgaagagtgctattgttcaagttgatgctgctccattcaagcagtggtatctccagcactatggcattgacattggtcgcaagaagaaatcagctgcagccaagaaagaaggagaggaaggtgaaactgctacagaggaggtgaagaaaagcaaccatgtattgaggaagctggagaagcgtcaacaaaatcgcacgcttgacccacatattgaggaacaatttggcagtggtcgactgttggcttgtatctcttcacggcctggtcaatgtggccgtgcagatggatacatcttggagggcaaagagctggagttc

SEQ ID NO: 226046 - DNA, 354 bp, Gossypium hirsutum
cggacgcgtgggaaaagaatgaaccttaatttgcaaagaagcttgcttcgttagctgatctctttgtcaatgatgcatttgggactgcacatcgagcacatgcatcaacagagggtgttacaaaattcttgaagccatcagttgctggtttccttttacagaaggaactagactaccttgttggtgctgtttcaagccccaaaaggccttttgctgccattgtgggtggatcaaaggtctctttcaagattggcgtcattgaatcacttcttgtgaaatgtgactttcttctcttttggtggtggtatgattttcacattttacaaggtacattgcctattatttgtttcattc

SEQ ID NO: 226047 - DNA, 363 bp, Gossypium hirsutum
agttaacctggctgtttcaaaaattgcaccggctttaattgctggaaactcccttgtactcaagccaccgacacagggtgctgattctgctcttcatatggaacactgctttcatttggctggttttcccaaagggctcattagctgtgtgacggggaaaggctccgagatcggggacttcttcaccatgcatcctggagttaactgtataagcttcactggtggagacaccggcattgcgatctcaaagaaggcaggaatgatccctctgcatatggaatttggaggaaaagatgcatgtattgaactcgaggatgcctactaggatttagttgctgcaaacattattaaaggagggttttt

SEQ ID NO: 226048 - DNA, 388 bp, Gossypium hirsutum
cccacacgttcggctttttttccccttggatttgatcttccatggcttccaatggcgcttctactggagttagggatgtgacggagaacagtttggaaaagatcaaacggcagctggcctctggctctggtaggaacttgctacaaggtccacttctcaagcgatctgaaaccttgaggaaatggaatgaacgttgggtgatattagaccccacaacatggaaaatggtatataagactaggaggaatgagccaactgttaagggaatcatgactgttcaatgaatacagcaccattgccatatcttctggtaactttcatggcctttcaaagttcgaatgctgctgtatctatattgggactctccagataaattgactactttttt

SEQ ID NO: 226049 - DNA, 279 bp, Gossypium hirsutum
gtccgctttttgagagcaatgccattcatcgccttgttgctcgctcaacggataacatgcctgtatgtgcatctacatctattgatgataggcatataactcaaaaaattgacttagcactcaacaaaatcgactctgatattgccaactggatgattcccagactcgaatactgtgaaggcctatctgcacttgaggatgctgggattgctccatcgaagagagcccgaggccctatgaacactcatcttgcttgcaacacacttcttgtggtacacg

SEQ ID NO: 226050 - DNA, 383 bp, Gossypium hirsutum
cccacgcgtccgcggcggtgacatgcatcccaacgcagctgagctcctgcgtgagcgccataacatcttcatctccaccatctcaactgtgctgtagcaagatcaaggagcagaagccatgcctttgccaatatcttaagaaccctaaccttaagaaatttattaacactggcaatgccaggaaggttgctttcacctgtggaactccttttccaaagtgcttagctagaccctttgcttaaggctttctttctctctattttcactgcataatggatagagaggaagtactataattattaatattatgtagttgtggtgtggggaatatatatatatatatccgttttgctgcttctagtattttttaaagcactaagatt

SEQ ID NO: 226051 - DNA, 383 bp, Gossypium hirsutum
aaatcatccatttcataaatattaatccaccaaaagaattatccattcagttcaaagacaccatgacatctacacctactcaagaaaacactcaagtagaaggatcccacgaacccacagtagaagcacccccatcggaagaagatattaagaaatggggcacgcacgtcatgggatccccagcagctcctagtgcccatccagacaaccagaaggcggctttatggaatgctagtgatcaccaacaaatctatgagctgccctatgtcgtttattcccctgcagaaagaccaagccataatccttttgaacctgtgattaacatgttcaatacctggagtaggaagaccgagtctatagcacgcaacatctggcacaaccgt

SEQ ID NO: 226052 - DNA, 382 bp, Gossypium hirsutum
  unsure (1)..(382): unsure at all n locations
tatgatatctttgttagtgatncctatgttttgttgcttcagtgtgggattgattgtaggattaacaatgaaaaaggtattgatgtgaaacggttcggtgagcttttgatgtcgaccgggattgtgttgaatgatgatgtgctttgggtcacttttcatagcggatatgatttctgttatttgcttaaactattgacctgcatgagtttgcccgatactcaaactggctttttcaaactgatcaaaatgttttttccgatggtatacgatatctaacatatgattaagttctgcaatggcctacatgttggtttaaacaagctggtcgattgtttgaagctgaaagagttgttgtattgccataaagtttgtttttatatgt

SEQ ID NO: 226053 - DNA, 390 bp, Gossypium hirsutum
cccacgcgtccgcccacgcgtccgatcaagtagcataattcaacttgcttcagcttctgaagctacagtgagcagcacgtatgaggtatctgtatggcgttcactttggaatgaccttttttcccaggtttttcgtgctgttagaagtatattaaatggatttgttgccttcttcacggcctgcaacagacatcgcctaagcatttataatcacgtacaggatgtcattcaaagacgctttggtggagtcccaagatcacagacctcagatcctagacgaagtaaatcaacctgtggaaatcaatatcaatcagaagtaaggagaagagtccatagtaaaaattgtagtcctgcaacattgtcattttgagtccaaaatattcaagaaag

SEQ ID NO: 226054 - DNA, 387 bp, Gossypium hirsutum
catctttctctcttttttctttttttcttttgaatttaattttcttttcagaaacaagctaaaaaattgtgggtttttttttgttctttggggttttgttagatctaacatccaatcgatccaagatgtttctcaccaggactgagtatgaccgtggagtgaacacattttctccggagggaagattgttccaggtagaatatgctattgaggccatcaagctgggttcaactgcaattgggttaaagaccaaagaaggtgttgtgttggctgtcgagaagcgtattacttcgccattgttggagcccagcagtgttgagaagattatggaaattgatgaacatataggatgtgctatgagtggcttgattgctgatgcccgaacac

SEQ ID NO: 226055 - DNA, 337 bp, Gossypium hirsutum
gctgacttctgatgaatctgccgaggattttcaaaatcaggcaacttcctacgaggagtccccttgttgcaatggcaggtcttaagattccactaacagcaggaagaaacttccttctaaggaaaagagaggatgttacaagagaaggagagatgaacatgcaccgacagttgtttcttcaaccgaggaagatggtcatgcatggaggaaataaggacaaaagcagatccttaattctaagcacccaaggagttactttaggtgcactcttaagtacgatcaaggttgtaaggccactaaacaagttcaaaagactggtagatgcttgctcccaaat

SEQ ID NO: 226056 - DNA, 358 bp, Gossypium hirsutum
cccacgcgtccgggagaacagtgtttttcttgttccagatctggtacagttcgggcatagaggattttccggatgggtattcaaacgccaagattttcgttattaaatcatttagtgaggatgatgtccacaaaagtgtcaaatacaatgtgtgggccagcacatctaatggcaacaagaagcttgatgcttcatttggtgaggcctaggagaagcctgatggctgtccctgttttttatttgtctcggattatacccgtggtcaaatttgttgggtgttcataaatgggttgccaatttcttttttaacaagactcttaatttctggctaactggacaagtggactggtagctttcc

SEQ ID NO: 226057 - DNA, 384 bp, Gossypium hirsutum
cccacgcgtccgggcggactttatgaatatattgagaaacgactcaaagaaaatggacatatggttattgtgattgctgaaggagcaggacaggatcttgtttcagagagcttgcagtccatggaccagcaagatgcttcaggaaacaagcttcttcaagatgttggactgtggatctctcacgggataaaggatcattttgcgaaaaagaagatgcccattaatcttaaatatatagatcctacatacatgatccgggccattcctagcattgcttccgataacgtctactgcaccctacttgctcatagtgcagttcatggagcaatggctgggtatacaggcttcactgttggtcccgtcaatggcagacatgcttacatt

SEQ ID NO: 226058 - DNA, 388 bp, Gossypium hirsutum
cccacgcgtccgcccacgcgtccgcacctagtctttgtccatcaaagatgaaggagaaaggaaaaagtaccagaggtcgttgtcgctgccgaatagtccagtgtcaggtccgacacccgtgacaccgacgactccgacggcgcgtaaggagaacgtgtggaggagtgtgttccatccgggtagcaacctcgccaccaaaagtatatgttctgaagtttttgacaagccacaacctaactctcctaccgtctatgactggctttactgtggggagaccagtagcaagcatcgttgagagggtggcgactgacaggcggttagcaggctgttctagtgagccagggtagcatgttaattagtgtgttctcttcttttttcttttttttaa

SEQ ID NO: 226059 - DNA, 394 bp, Gossypium hirsutum
ttttcttctttgtttgccacagagtattgagaaaaatcgctttgtttcactcccgtatttgctaatatgtcgcttcttacagatcttgttaaccttaatctctccgactgcactgacaaaatcattgctgaatacatatggatcggtggatctgggatggacctcagaagcaaagcaaggacactttctggtcctgtaagtgacccttcaaagctacccaaatggaattatgacggttccagcacaggtcaagcccctggtgaagatagtgaagtcatcctatatcctcaagctatcttcaaagacccattcaggaggggaaacaatattcttggtatgtgcgatgcttacacaccagctggtgagcccatccccacaaacaagagatgcaacg

SEQ ID NO: 226060 - DNA, 387 bp, Gossypium hirsutum
gtttctccgaactacgagaaaaacgactttggtttgttcccgattcagacgatgtatagtagcaatggatgggattcgtatgcgtgggcattccaggcttctgagtctgtaattgagatctcgatacataatcctggtgtggaggaagatgctgcttgtggccctcttattgattccgtcgcattgaagaccttgtaccctccaaaacgcacccgagtgaatctattaaagaacggaaatttcgaagaaggtccttacatcttcgcaggaccaatgtccgaaggtgtcataattccaccccacattgaagatgatcacagtccattacctggttggattatcgactccctcaaagccgttaagtacattgacagcgaccactttacc

SEQ ID NO: 226061 - DNA, 385 bp, Gossypium hirsutum
cccacgcgtccgcaggccttactcactcagttgcagaagctgaacgatttgattaagaagccgaaagaggaagagcagtgttgcggacaagttaacggtatgaggtgcagtgagggagcctcagataagggagagacgactgtgaagtctgattcagaagggcagcttagtttatcaatgggaagatcggaacatgctctaggagctttatcggatgatgatagtgccataaggacggattacttcggactggaagaagagcccaaccttatgagcatggtggatccagctgacggttctttatcctctccagaagattggcgtagtttagactctgatggtctttttgatcagtccccttgtggttaccaatggtgggattttt

SEQ ID NO: 226062 - DNA, 389 bp, Gossypium hirsutum
cccacgcgtccgattgggggccaattaaagcgatttgcaaaagcccgcaaagatttgttagttgctgtaaatgaaatggtaagacacatgttcgatgaaatcgattacatcttggaggcaagaaatgccgaacgctttgcctctctttatagtgactgccctattcatggccaaacttgtaatcaaaactctaaagatgggattaccaacaaaaccaaaaatgcaagcggaataaaagtgccaaaaatatactgggatctcactcgaaaagctgtgcttacaatggaatggttagatggaattaagcttacagatgaaactgccctgaagaaggcatgtctgaaccaaagggaactgattgaccagggagtatactgctctttgagaca

SEQ ID NO: 226063 - DNA, 272 bp, Gossypium hirsutum
ctcactcttctctacggttttctattttttttccaatccagctcgcctatctatggcggcggctctaagaatcaacagcgggctgcaccactgccatggagaggacctgcacagtgggttgcctcccaagagattcctactgatgttattgatgaagtcggcgattccaatttcaatccttcacaagttcatgcttgtggctaagagcacttacatatcgaagatgttaatggaaacaaatgaatcggatttgacctgagtcaacctttctg

SEQ ID NO: 226064 - DNA, 387 bp, Gossypium hirsutum
cgtccgacattttttgcacagttaacaatgtttctgtgagattctgctgggctgacaagccagaggattttgctaaagttttcgtcttcaggccatggagcaacaggcccaactgaaagatgcactaaatgaagcattagctgctgaagtccagcgactgaagctcactgccgcagagttcagtggagaggttcatctttcgaactgtatggctcagcaacttttaattgatcatcaaatgctccaatgacagcctcagcaacagcagcatgttaaacatttatcagatgcagcagcaacaccaacctcagcagggtcacgataaccaggcacagacccagcaacaatatggtgatgcttttgctgcatatgaatccaagtgatgac

SEQ ID NO: 226065 - DNA, 280 bp, Gossypium hirsutum
cggacgcgtggggtagacctatggcatatcgtggatgatacatatgagaattgtgatcctcattctatgcatgatgaaatactataggttgtaagcatatctggaacttggcaccttgtaacactgcatgtggggcctatttgtgccctaatactttcacatggacagtgctttcaaagacatcttcttgcttgtatttgcctgttcaaattgatggagaaccttggtctcttcatccatgtacattggccatatcacatcacattcaggtcttcattgt

SEQ ID NO: 226066 - DNA, 395 bp, Gossypium hirsutum
ccttaacacaagttacaaactcaaaaaccccaagttctcactttcaaaaaacttggcacattcaccatgtctgacaggtgcggcaactgtgactgcgctgaccgcagccaatgcacgaagggaaacagcaacaccatgatcattgagactgagaagagctacatcaacactgctgtgatggatgctccagctgagaacgatggcaagtgcaagtgctgtactggctgcagctgcacagactgcacctgtggccactaagccaacatacaatggtcatgcttcaggtcatggcatatatagggatctaaataatgaatttaaggttgaataatttgtctgttgaagtttgtgtggtgacttatatctgtcagttaacctttggttcctttactatg

SEQ ID NO: 226067 - DNA, 383 bp, Gossypium hirsutum
agaaaatcaggagtaactgaagaagatgcagatattcgtcaaaaccctaacagggaagactattactctcgaggttgaaagcagcgataccatcgacaatgtcaaggccaagattcaggataaagaaggcatccctcctgatcagcagaggttgatttttgctggtaagcaactggaagatggccgaaccctagctgattataacatccaaaaggagtccactcttgacctagttttaaggcttaggggtggaaccatgatcaaggtgaagactctcaccgggaaagaaattgaaattgacattgaaccaactgataccattgatcgtatcaaggaacgggttgaagagaaagaaggaattcctccagttcataaaatgctta

SEQ ID NO: 226068 - DNA, 380 bp, Gossypium hirsutum
gtgatggttctaatgtgaggagttatttatactgtgaggatgtggccgaggcatttgaagtcattcttcacaagggtgaagttggccatgtttataatattggaacaaagaaggagaggagagtgattgatgtggccaaagatatctgtaagcttttctcgatggatccagagaccagcatcaagtttgttgaaaacagaccattcaatgaccagaggtattttcttgatgatgagaagctgaagaacttgggatggtccgagcaaactgtatgggaagaggggctgaagaagaccattgaatggtacactcagaatcccgaatggtggggcgatgtgtctggtgcattgcttcctcaccctagaatgctgatgatgcct

SEQ ID NO: 226069 - DNA, 332 bp, Gossypium hirsutum
cgcgtccgaaaatggtaagaacctttgagacgcattttttttcactggcacagttcgggatgaaacggcgtgcttcccttgcaaacatctgcaatgctggaattgagacagaaaagatgggtgaggtatctgcacaagcttgtgtcaacattcctttaggacattgggtgtctgttgagaaagggttcagcgcataaaatgtagcagaattgtcaactgttgaagaccttaactttgatgatgttgtatttcataaagtgctttcctaagagataagtctttatttataaagtttctgcattttttatgattattcatgtgaatgctcttgc

SEQ ID NO: 226070 - DNA, 312 bp, Gossypium hirsutum
cccatctctcctcttatacttcactttaacgttccctttgaggttttaggaaggcagcatcgaaattaaggaacggagaccttcctatttacctaggagtctgtgaaccagggacattcagacacgctgtgtgttcagatctttgatgcagtccttgatgcctgtttggcacaggatcctgagagcaaggtggcttgctagacctgcatcaagacaaacatggtgatggtgtttggagagatcactaccaaagccgtccttaactactagaagattgtgcgtgacatctgtcgtggaattgtgtttaacatt

SEQ ID NO: 226071 - DNA, 236 bp, Gossypium hirsutum
tcgggcacctaccgagaaacattcgggaagtttgttagaaggttttacacaaagtgaaataagtacgctagcagtcaaggataattttatggttgcaggaggcttccaaggagagcttgcttttaagcacttggacagaaaatgcataaccttttgtactcggacaacatatgatgataatgcaattacgaatgctattgggatatatgacagcttgtggggtggtattaatttta

SEQ ID NO: 226072 - DNA, 344 bp, Gossypium hirsutum
tgactttctatttggttgtggccaaaataaccaaggtcttttcggaggggcagccggattgataggacttggccgagataaattatctttaccttcacaaaccgcctctaaatacaagaaatacttctcctactgcttgccatcatccgccagctcaaccggtttcctcagttttggctacggtgtcgtatcgaaattcgtaaaattcacaacgttgaccactctctcccaaggtgcatccttttacggaattgacattgttggaataagcgttggtggcaaaaaaactaccgatatcagcctctgttttcactgctggtggcgccatcattgactctggaact

SEQ ID NO: 226073 - DNA, 351 bp, Gossypium hirsutum
cccacgcgttcgtccacgcgtacggccacgcgtccggcgactacttttattcagggaaaatcaaagcctcgactctttccctctctgtcttggtagccattgaaatgttcaactcccttaatgccctatctgaagatggaagcttgttaacgatgcctccttgggtgaacccatggctccttttagccatgtcagtctcattcggactgcacttcttgattctgtatgtgccatttcttgctcgagtgtttgggattgttcccctcagcaccaatgaatggctgctcgtaattgccgacgctttcccggtaattctaattgaagagcttttcaaattcatcgggagacgta

SEQ ID NO: 226074 - DNA, 341 bp, Gossypium hirsutum
gtggagcaagagtgccaaaggtgggcaagcaaaggcataaacataacgtaccaaataagagaaaaccgaacaggttacaaagctggtgctttaaaagaagggttaaagaggagctatgtgaaacattgtgaatatgtagccattatcgatgccgatttcagaccggatcccgatttccttagaaaaagtatcccctttttggatcataaccctgacattgctctagttcaagctcgttggagattcgtgaatgccgacgaatgcttgctaacaagaatgcaagagatgtcattggattaccatttcacagaggaacaagaagttggatcaacaactcatgc

SEQ ID NO: 226075 - DNA, 238 bp, Gossypium hirsutum
tcggcacctaccgagaaacattcggttaagttttgtagaaggttttacacaaactgaaattagtacgcttgcagtcaaggttaattttatggttgtaggaggctctcaaggagagcttgcttttaagcacttggtcagataatgcataactcttttgtactcgttcaacatatgattataatgcaattacgaatgcttatgttatatattacattttgagtggtggtattatatttat

SEQ ID NO: 226076 - DNA, 362 bp, Gossypium hirsutum
accactccgtaaaccattgcgttgtggctttgcatattggactgcgctgatatagggatccgctataaatagtgtcagttagcgttctacattcttcatcaagcacgaaaagagaaatacacaagaaaaaaaaacaagtgatctgataaattgaagactttatttctgttaacatccattatgagtactgctggtcaagtcatccgttgcaaagctgcggtagcatgggagtcggggaagccactgtcaatagaggaagtggaagtggcaccaccgcagaaggatgaagtccgtattaagatactcttcacttctttatgttacaccgatgtctacttctgggatgctaagggacaaaaccc

SEQ ID NO: 226077 - DNA, 366 bp, Gossypium hirsutum
cggacgcgtggggtcgatggacaacaggtgaatattcctgtactaccccttgttggtcccgagggacggaggaggctaggttagccgaaagatggttatcggttcaaggacgcaaggtgcccctgctttttcagggtaagaaggggtagagaaaatgccccgagccaatgttcgagtaccaggcgctacggcgctgaagtaacccatgctatactcccaggaaaagctcgaacgaccttaagttcacgctccctgggaaggagagacaggattctgtttacagtgggcttcaggcagttgatttgaactctgagcttgtttgcattcatgattctgcaagacccttggtgagatctggagatgtaa

SEQ ID NO: 226078 - DNA, 375 bp, Gossypium hirsutum
cccacgcgtccgcaagaaaaggtgtgttgagatggaaacgggtcaatgtgtacatcaacaagaaatctcaggtaataattaagctcaaaagcaaacacgttgggggagcattctccaacaacaataaatgtattgtttatgaagtgtaaaagcaaaattgacaagcaaaaatgggtggatgggattcaaaatctactacgacaagtctgccatggtcaaccacctgagctttctcttgaatctttgagtattaacgatggtatatagtttttgtagtatatagttcatctttttttgtgtatacacagtgaatttggggttgttgaaattatgaacttttatacacaatatgtgaaaatatgtgaagaatgaaat

SEQ ID NO: 226079 - DNA, 361 bp, Gossypium hirsutum
ctcttgcaagaaaaatggctgaagatcacaagttacctctctctagtatcaaaggaacaggtcctgatgggcgcattgtgaaggctgatattgaagattacttagcttcacgtgggaaggatgtttcagcaccaacacctaagacaaaggatggaaaacttgaagctctagattatgtagatatccctcattctcagatacgaaaggtcactgcattacgcttattaatctcaaagcagactattccacattactatttaacagtggatacatgtgttgacaaacttctggatttacgaagccaactcaactcattactggaagcttcaagcgggaagcgtatttctgtcaatgatcttgt

SEQ ID NO: 226080 - DNA, 353 bp, Gossypium hirsutum
ctttcgcactcgagttctttattacttttaatcttctcttcgccgggaccgacgtagccaccgacacccgtgccgtgggagagctggctggaatagctgctggggcgactgtaatgctcaacattcttgttgctgggccaagtagtgggggttcaatgaatccggtgaggacactggggccggctgtagcagcagggaattatagggcattgtggatttacttgatagcgcccacactgggtgctgagatcggttctgccacctacactttggtgaagcttcgcgaagatgaggtctactcaccacggcaggtcaagagttttcgacgctaggtaatatggagcccacgaaat

SEQ ID NO: 226081 - DNA, 374 bp, Gossypium hirsutum
cacaaacctcaaacaatggaagtggtgaagaacttggacatccaaagatacatgggaaagtggtacgagatagcttccttcccatctttctttcaacctaagaagggggagaacaccagcgctttttacactctgaaggaagatgggacggtgcatgtccttaatgagacttttgttaatggcaagaaagattccatagaaggcaccgcctacaaggctgatcccaagagtgacgaagccaagctcaaagtcaaattctacgttcctcctttcttgcctatcattcctgttactggggattactgggttttatacattgatgaggattatcaatatgttcttggtggtggtcctaccaagaagtaccttttgat

SEQ ID NO: 226082 - DNA, 375 bp, Gossypium hirsutum
ctcagcttaacaacaacaacaaaatggcttcttttatcactccaactatcttgaaaatattcctcatcatctctttgtttcaaatctgtttgggtgtacgaaagctgagtgaagtggttgaggagcagcctcagctcttgaaataccacaacggtcctctcctttcaggcccaatcaccgtcaatctcatttggtacggcaagttcaggccttccgagagggctattatctctgattttgtcacctccctctcttctaacccttcttcaccctccctaaaaacccaacccacggtggctcagtggtggcggaccaccgagaaatactaccatctcgcctctaagaaatcgtctctttccttgtctttggggaagc

SEQ ID NO: 226083 - DNA, 323 bp, Gossypium hirsutum
cccacgcgtccgggcatagccactcttccttgtttttcctttgtggcgatagcagcgagtcatgtccggttattattattacgatggtcaggcggatcagtacgaggcgcactatctcgacgcctgctctctttgtcgcaaatcgcttcgcgattccgatattttcatgtacagagggaatacgccgctttgcatcaaagagtgtagacatgaacagatggagatggatgacgcacgagaaaagaaccggaaatcgagtaaatctcttagaaaattagatggccagaacttcactcctaacaaagctgtacggaccggcacgg

SEQ ID NO: 226084 - DNA, 323 bp, Gossypium hirsutum
gccagttcttgaacatgcttcttaagttgatcaatgccaagaacgggatggagattggtgtttacacttgctataatcttttatccactgccctagctatccctgatgatggaaagatcctatccatggatgttaacagagaaaactacgagctgggtctgcctgtaatccaaaaggctggtgttgcacacaaaattgatttcaaagagggccctgctttgccagttcttgatcaattagtggaagatgaaaagaaccacggatccttttgacttcatctttgtggatgcttgataaagacaattacctaaactaccacaaaa

SEQ ID NO: 226085 - DNA, 368 bp, Gossypium hirsutum
aacccctccattcattatttacgttaagttcaaagaaatggctgatcgtgtgatcactcgcgtccacagtctccgtgagcgtttggatgagacccttcttgctcacaggaacgagattttggccttgctctcaaggatcgagggcaaaggaaaaggaattctgcaacaccatcaaattattctagagtttgaagctatccctgaagagaacagaaagaagctcgctaatggtgcattttttgaagtattgaaggctagtcaggaagcgatcgtgttgccttcatgggttgcacttgctgttcgtcaaggcctggtgtttgggagtacattagagtgaatgtcacgcccttgttgttgaggaacttact

SEQ ID NO: 226086 - DNA, 380 bp, Gossypium hirsutum
aaagcgaagtctcattattcgatcactgtacttcaccatggaacaccacttcacccaactcgacgacggcgcctccgccgacggcaaaccggcgtctaatttcggagcggcggttgcgacggtgctcctagctttgcttttacaaatattttgccgttgctgtcgctcaatttaccgtaatcatgtcaagaaatacaagttttcttcttcttccgccgccgctaacatggaccggtcgataatcgccgccgtggagaagatccttaaatacaagtttaaagacaaaagactcctggaagaagccttgacgcactcttcgtgccgcgaagacatgtcgtacgaaatactggagttcattggggacgcggtgctcggcttgg

SEQ ID NO: 226087 - DNA, 201 bp, Gossypium hirsutum
cacaaacctcaaacaatttaaagcttgaaaaacttggacaaacgaagcgacgtgggatatagaataatccatgacattggaggccaagtgtacatggatggggctaacatgaatgcccagctttttttaccctgtacggggattattggagcaaatttttttcattgtgaattccacaaaaccttcttgatttcacatgga

SEQ ID NO: 226088 - DNA, 366 bp, Gossypium hirsutum
cccacgcgtccgccttaggggagttggcactgatagtgattccacttctatacccttcttttctaattatatgagtactgcagggaatgatttttcggttaatccagcaatgacaccttccagttgcattgataaatctggatttttgcagtctcaggaaaatgtgggccaatcaaacccacaaactagaacctttgttaatgtttataaatcagggtccttcgggagatcattggatatttctgcattcagcaactacaatgaacttcgcagtgaactggcacatatgtttggccttgaaggccagttggaggaccccttgagatcaggctggcagcttgttttttttgaccgggagaatgatgt

SEQ ID NO: 226089 - DNA, 371 bp, Gossypium hirsutum
gagagatcttacatacagagatggatagattgtggcaatgtaacgtgtccaaaaactcagcagatgctggagaatttaactctaaccccaaactatgttcttagaagtgtaataaatcaatggtgtgctaaacataacattgagcagcctagcggattagcaaatggtaggctcaaaaagagcaatgggtctttctgtgatattagtggcgacatggcagacattcaggaactggtctctaagctgtcaagccggtgcttagaggaacgtaaggcagctgtggctgaaatccgatcactatcaaaacgaagcacagataacaggatacttatagcagacacaggagcgatacctgttctggtcaacctttt

SEQ ID NO: 226090 - DNA, 376 bp, Gossypium hirsutum
cccacgcgtccgcccacgcgtccggaaacgtttactggttcttatgtctttgggtgtgctcatggtaatcgtgacaagagatgcggtgtatgtggaccgatcctgattgaaaagctgaatgaggagattgcattgcgaggattgaaggatcaggtgtttgtaaatgcttgctctcacattggagggcacaagtatgctgggaacttgattatcttcagtccagattccaagggaaaaattacaggccactggtatggctatgttactcctgaagatgtacctgaattgctggataagcacattgcgaatggcaaaataatagaacgtctttggaggggtcaaatgggggtttctactgaaagtggtgatggaacag

SEQ ID NO: 226091 - DNA, 368 bp, Gossypium hirsutum
cccacgcgtccggagcttctttctagctatatccttatcagctttcaaagatggcaggaatcgcctttggtcgctttgatgattccttcagtttggggactgtcaaggcctaccttgctgagtttatctcaactttggtgtttgttttcgccggcgttggctctgccattgcttacaacaagttgacaactgatgcagccctagatcccgatgggctagtcgccattgctgtttgccatggatttgctctctttgttgcagtggctatcggtgccaacatctcaggtggccatgtcaaccctgcagtcacttttgggttagctcttggtggccaaatcaccatactaactggcatcttttactggatt

SEQ ID NO: 226092 - DNA, 380 bp, Gossypium hirsutum
cccacgcgtccgcggacgcgtgggcgcataaacagtccagcattgcaatggagacattgcaggtctttgctcctttggcaaaattgttgggaatgtatcaaatcaagtctgaacttgaaaacttatccttcatgtacacaaatcctgaagattatgccaaagtgaagagaagggttgctgacctctataacgaacatgagaaagagcttgtggaggcagacaaaattttgatgaaaaggatagagaatgatcaattcctggaccttatgactcttaaaactgaaattcgtgctgtgtgcaaggaaccttatagtatttacaaatctgtgcttaaatccaacagttcaatcagtgaggttaaccaaattgcccagcttcgt

SEQ ID NO: 226093 - DNA, 379 bp, Gossypium hirsutum
aaatggggctgtcattcgctaagcttttcattcggctttttgccaagaaggagatgcgaattttgatggtgggccttgatgcagccggtaagactaccattttgtacaagctcaagcttggagagattgtcaccactattcccaccatcggatttaatgtggaaactgttgaatataagaacatcagtttcactgtctgggatgttggtggtcaggacaagattcgtcctttgtggaggcattacttccaaaatacacagggtctcatcttcgtggttgacagcaatgacagagaccgtgttgttgaggccagggatgaattgcatagaatgttgaatgaggatgaactgcgagatgctgtgttgcttgtatttgcaaa

SEQ ID NO: 226094 - DNA, 361 bp, Gossypium hirsutum
aaatggacctggatatataatgtcatctgacatagcacacttcatcgtctctgaatgtgagaaacacaatttaagtttgttcaagatggaagatgtgagtatggggatgtgggtggagaaattcaacagctcaaaggcggtggattatatacacagtttgaagttttgccaattcggttgcatataaggttattatacagttcattaccagtcaccaagacaaatgatgtgcatgtgggtcatgttgcaaaagcagacaaggccttaatgtgtaacatgagatagttttatatgtatatatatatattatttaaataaatatttggtttttcatttcttggtatttctctcggattatatt

SEQ ID NO: 226095 - DNA, 377 bp, Gossypium hirsutum
gacggcggctatatttttgactgcaacaactataccatggaggagaatctcagaagacagctctctggtttgccgccacgtcaccgtgatacattccgggcaataactgcgggcctgcctatgttcctctacaactactgcacccaccaactttcatggtgtttttgaggctgcaagctttggtggaacaaacattgacccaactgcctgggaggacaagaaatgccctggcgaatctcgattccctgctcaggttcgcgttattacaaggaaaatctgcgagccatttgaagtagattcatttaggccaatatttccattcacttcgatggtccaaaaatttcctgcttgaacttaacatttcaaaaggcgttttt

SEQ ID NO: 226096 - DNA, 335 bp, Gossypium hirsutum
cccacgcgttcgaggacgcgtgggctcgaggatccattgaagaaaggatgatgcatatgactaataagaaaatggttttggagcatcttgttgttgggaggctaaaagctcaaaatattaattaggaagagttagatgatattatcagatatggctcaaaggaactatttgctgatgttaatgtttaatcatgaaagttccgtcaaattcattatgatgctgctgctattgatagaaacttgatcgtgaacacgttcgggatgaataggctctagcggatgttgattaggaggtaggatttttgttggtttttaatgtagtttattttgaattta

SEQ ID NO: 226097 - DNA, 286 bp, Gossypium hirsutum
tcggtggctattctatctttatttcattgcactctccgacgaaagaaacgagagaaaaatgaccaagggttacccaaccgttagcgaggagtaccaaaactccgttcataaggttaagaggaagttattagtgttaattgttgataagaactgtgctccattcatgctccgtatagctaggtacttatctggaacttttgatgtcaagatcaatactggaggaccattttgtactcataagtatcctgttgtgctctgattatgctgtttacaacggtctttattt

SEQ ID NO: 226098 - DNA, 348 bp, Gossypium hirsutum
gaaaccctaaaccgccgtcgccgtccgtcaaacgccgactaaaatggctttcgagggagtagttctccgcggcaccatgcgagcccacactgacatggtaacagccatcgtcactcccatcgacaacttcgatatgatcgtcacttcctcttgcgacatgtccatcatcctttggcacttgaccaaagacgaaatgacctacggtgtcgctcgccgtcgtcttaccggccactcacactttgatcaagacgatgttctctcttatgacttccagattgctcttattcggttcctgggacagtgagcttctgctttggtatttgaacgccggaaccttcgatcgttgtt

SEQ ID NO: 226099 - DNA, 370 bp, Gossypium hirsutum
cggacgcgtgggtttaattccttttattgcctttctgaaaaaaagtaattgccttgttgatttgcaagcaaattttggtaaagttcttaaatatttgagtttagatcttctttgagagtgccgctatgggagtgaagggttttgttgaaggaggcatagcctcaatcgtggccgggttgttcgacccacccgcttgatttgatcaaagtccgaatgcagcttcagggtgaaagccatgttcccaatccggctgatcaagcactccgtcctgctttagcctttcagacaaccactactaccaccttctttgttatccacatgccttcttcgccggcgcgtgtttgacctgtttccacctgtatctagatct

SEQ ID NO: 226100 - DNA, 365 bp, Gossypium hirsutum
cggacgcgtgggcgattttctatttagttttctcttcctccaattaagatgcggatctttgttaagaccctgaccggcatgaccatcaccctcgaagtcgagagtttcgacacgatcgacaacgttaaggttaaaaaccaagacaaggaagggatcccaccagaccaacaacgtttcatcttcgccggaaaacatctcgaagatggtcggaccttggccgattacaacatccagaaggagttcacccttcatttcgtcctccgtctactgtggtggcatgcagatctttctcaaaaccctgaccggcaagaccataactttggaagatgaaagctcttacaccatttgacatctgtaaggtcaat

SEQ ID NO: 226101 - DNA, 367 bp, Gossypium hirsutum
cgttcaaaccctggagcatggtcaattcttcgtccggaatgtggaacctggaaaccctggggtcgcctcgaagcctggcgtgagcctggtttcactgacgcccttggataccgatttgacctcttccatgatgatattgtggccacaggaacaaccaccaccttcgccagttccaccctcagcaccaaacttgggggaaaattcaccatggatatgacaacaaacatatcaactccatcaataagcccgcaaagcagctgcgacctggggtcaggctcacgtcccgggtcaagaccaggatcgggatcagggtcagatttcggatttgggttgcccctttccccgcagagcatgtaccggggtggat

SEQ ID NO: 226102 - DNA, 208 bp, Gossypium hirsutum
gtacaggaggaagcagctattcaaggaccatttgggcctaaagaggaagtaagttgtaagcgcaaatagcgtgaacaacgatggattgaaatgtgccataaatcatattatgcatgctcaacagagggtggaaatcaatgaggacagcgtattatacattgagcagaatatgaatgtggcctcatttgacacgacactgagttggggc

SEQ ID NO: 226103 - DNA, 323 bp, Gossypium hirsutum
cagagttaaagcagcatgaggcacgcattgttgacataattgctgcggaagatgcgagctttggcaagactttggtgaagggaatcgagaaatttaagaaggcagcccaggatgttcaagggaggatattaagtgggaaggatgcatttatcttgtgggacacatattgtttttcattagatctaactcaactgatggcagaggaaagaggtttgatagtagatgttgattgctttcaataatgcttatcgatgaggccttgagaaaagtcatggagtgccatatataagcatgctggcggtgctatccacatggatgctgat

SEQ ID NO: 226104 - DNA, 381 bp, Gossypium hirsutum
agagttttgtttctctttagtttacgttttttttgtccttttggattttttgatactaaaaaagggaagcaaagaagaagggaaatggagggcaaagaagaggatgttagattgggagccaacaagttcacagagaggcaaccaattgggaccgcggctcagactcaagatgacgggaaagactattctgaaccaccaccggctccatttttcgagcctggcgagttaacctcatggtccttttatagggctgggattgccgagtttgtggcgactttccttttcttgtatatcactattttgactgttatgggagttgttaaggaaaaaactaagtgcccaactgttgggattcaaggaattgcttgggcttttggtggt

SEQ ID NO: 226105 - DNA, 376 bp, Gossypium hirsutum
tctttatttatgttataataataaaaaggaaaataaaatcttctcctttggatctattggcttataattaattaagaaggaagaaattagaaaaagaaaaatggttctcttataaaaatttccgtttgtttcctgagcaaatctcgggaaggaataccctttttttccccctgttgttaactcgttgtgattgtgaagctttctttaaaagaatcctagttaactcgacgcgtttacccagaaagaggtgaagatgtcaactcctgcaaggaagagattgatgagggattttaagaggttgcagcaagatcctcctgcaggaattagtggtgcacctcaagataacaacattatgctttggaatgctgttatattt

SEQ ID NO: 226106 - DNA, 324 bp, Gossypium hirsutum
tcgcccacgcgtccgagaagagctttgtggcatagaacaagctggagccggagaggaagagccagttggccaaaaagttaggactgcaaccaaggcaggtggcggtatggttccagaaccgccgtgcaaggtggaagacatagcatcttgaaagggactatgacctcctcaaatcttcctttgattccctttagtccaatttatgacactattcttaaagaaaatgagaagcttaatattgaggttgctttcttgactgaaaaactacaagccaaagatgtggcaacagaagcaatagcaggtgaaaaggatgaagggttagca

SEQ ID NO: 226107 - DNA, 379 bp, Gossypium hirsutum
gaaactcggcattaaagttgaaatcaacccctcagaatccaagctgtgtcagcttgatgtacgccagtggcccaagtggggttgtcctcctagtaaattcccatggacatatagttcaaaagagacatgttatctattggaagggaaagtcaaggtataccctgaaggtagcaatgactttgttgaaattggtgctggtgatatagttgagtttactaatgggatgagtcgcacttgggtagtttcagtggctgttgacaaacactttaagtttgagtgagtgcttttataacctcatgctcttcttttaccttctgtttttcattgttattatgaaataaaatataaatgcttggggtgatgtaagatacctttatat

SEQ ID NO: 226108 - DNA, 266 bp, Gossypium hirsutum
cagagggggagcagattgatgctaaaaaggtgcaggagaaaatgagggttgttcagatggaaagagaagataagcttgcacaattattgaaagatcgacccaatcaatatgtgcaaggaaacaaagcggactttgttaatcatgcagaaactggagtatcaatactctctagtgcatcatatggtgttgatatgttgaattcaattggttacatttatgcaagacaagctgtaaatgaacttgtaaagaatgcctttaactttgtt

SEQ ID NO: 226109 - DNA, 312 bp, Gossypium hirsutum
cgaatgataacatttattattgaacttatattacacgttacagaacatagaacaaattacacacgatatctgtctttaagtatatgacttactagtgaacaaagatttaaagaaaattcataaatttaaccaataaaatctctgctataacaaatttagaatccctgttaatgaacactgcattctttgggaagtccctgagggaatcgcttggtgtcagtgcagtaattggaaatcaatgaatttttctgaacccattttagcctttgttggctcgttatatccagttcttgcgatagccaagaaagtgga

SEQ ID NO: 226110 - DNA, 392 bp, Gossypium hirsutum
aaacgttaaacccaatggcgatcccaactcagttagtcctctcctttctcctgctttctttttcctccgtcgttttttcagacggtgaagattgcgtttactcggtctacataaggacgggatccatcatcaaaggcggaaccgactccatcatcggcctacggctctacgatgccaatgcctactcagtggagatcagcaacatcgaagcgtggggtgggttaatggggccaggatacaactatttcgagaggggtaatttggacattttctcaagtaggggacgttgcttggatgcccctctttgtgccatgaacttgacctccgatggttcgggtgagcaccatggatggtacttgaactatgtggaagttaccatgactggcgttcat

SEQ ID NO: 226111 - DNA, 189 bp, Gossypium hirsutum
ttgactaaggtttaaatcgaccacatatggtgtctcaagatgagcggagacccgggtatttccaacatttcttctgtgattcgcgtcatccctgactacccaaaacctgggataatctttaaagacataacaacattgcttcttgataccaaagcatttccgagatactatggacctgtttgttgtgag

SEQ ID NO: 226112 - DNA, 390 bp, Gossypium hirsutum
agagcatgctgcagtgaccattcttgatcgctggaaagtagctatgctaaatcaacaggggaagcagcttcaatctccaaaatttatgaacaactatcttgggattggttgtgatgcaaaggttgctttggatattcacaacttaagagaggagaatcctgagaagttctataatcagtttatgaataaagtgctatatgcaagagaaggtgcgaggagtattatggataggacatttgcagattttccttggcaagttagagtagaggtggatggcgtcgaaatagaggttcctgaggatgccgaaggtgtacttgttgcaaacattggaagctatatgggaggtgtagatctttggcagaatgaggatgagacatatgataattttga

SEQ ID NO: 226113 - DNA, 382 bp, Gossypium hirsutum
ctctgctctgccaaaaaaaaaaatttaagtcaaaagtcaaaaatgagttcttcaggtttgaaatttacctttcttatgcctcttatggttgcctgtctcatggcagcatcagcaagtatcttccacaatgattttgacatcacatggggagatggccgtggtaaaatcgtcaacaatagagaggttctcactctctccctcgataaagcttctggttctggtttccaatccaagaatgagtatcttttcggcaagattgatatgcaactcaagcttgtccctggaaactctgctggcacagtcactgcctattatgatcaacatgggatgaaattgatttcgagttcctcgggaatttaagtggcgacccttacattcttca

SEQ ID NO: 226114 - DNA, 387 bp, Gossypium hirsutum
ttcagcaaagcttatcgaatctatcttttcactctttgtttggtgttgtaattgtcaattctgcaactgggagaaagcctttctaagcttcagttcaacagtaaccaaattcgttggcaacaatggcagaatctgagtcggactctgactttttgaaggaattctacattcctgcgtatatatttaatgatgaaacaaaattttctgatcttcgtgatgtacctgagtttccagtgcttgtgtttatcaactccaaaagtggtggtcaattgggtggcgatcttcttaatacatatagaagtgtcctcaatgagcatcagattttcgatgtgggggaagaggcccctgataaggtgcttcgcagagtttacaccagactagaaaagc

SEQ ID NO: 226115 - DNA, 377 bp, Gossypium hirsutum
ttgaaagtggattctcttcaacagagaagaagtaaatctatggcttatggttggattcattcaagaagctatccattatctacgtggtccaaaaacaaggttcaaggaaacgaagtagctttttctttaggttatgggttttcaatttgcagaactcccaatgttaaatgttcacaaaagctgggtgaacaatcactgagcatttccagagctgttgagaagaaaccagtgaagaagtctggaaagaacgagcatcacttgtggaagaaaagagattcagctggctcaggacaaaaggcactcaatcttgttagcattgtttctcaacttcccagtgaaaaagagactgtttatggagcattggacacatgggtagc

SEQ ID NO: 226116 - DNA, 360 bp, Gossypium hirsutum
tagctatagcatacactactatttcccactactagcaatggcttcctcaatgatctcatcggctaccattgccactgcctctccggcacaggctaacatggtcgctcctttcaccggtctcaagtctgcctctgctttcccagtcaccaggaaggccaacaacgacattacttctctcgcaagcaatggcggtagagtgcaatgcatgcaggtgtggcctcctactgggaagaagaagtttgagactctctcatacctccccgatcttacacccgtgcagttggctaaggaagtagattaccttcttcgctcaaaatgggttccttgcttggaattcgaattggaggagggattcgtgca

SEQ ID NO: 226117 - DNA, 369 bp, Gossypium hirsutum
gttctcttaactatactcccgatatgtggatactcgactttgcattgtttctaatgagtttacatgcaaaacaggtacgggtaagaccactttgtctaccgatcacaacaggtatctgatcggtgatgacgagcattgttggagtgacaatggtgtgtcgaacatcgaaggtggttgctatgccaagtgtattgatctttcaagggagaaggagcctgatatctggaatgccattaagtttggaactgtgttggaaaatgttgttttcgatgaacatacgagagaggtggattatggtgacaaatcagttacagagaatactcgtgcggcctatccgatcgaatacattccaaatgctaagataccatg

SEQ ID NO: 226118 - DNA, 369 bp, Gossypium hirsutum
cgaaaataccgggatggaatcgacaatctcttggttcttttgattggtggtattccaattgctatgcctactgttttgtctgtgaccatggcaattggatctcacaggctgtctcagcaaggtgctattaccaagcgtatgactgccattgaagaaatggctggcatggatgtcctttgtagtgataagacaggaacattgacacttaacaagctgagtgttgatagaaacttgattgaggtgtttgtaaaggatgttgataaggaacatgttgtactgcttgccgcaagggcctctagaactgaaaatcaagatgctattgatgctgccattgttggaatgctcgctgatcctaaggaggcaagagct

SEQ ID NO: 226119 - DNA, 362 bp, Gossypium hirsutum
aacaactgctgtcagttcctctgttgctgtgtgctaactcttgggttgtttttggtttttccttttgttgaagctttaaaaaaaatggtgacagtggaggaagttcgtaaggcacaacgcgccgaagggccggccaccgtgttggcgatcggtacgtcgactccaccgaattgtgtggatcagagcacgtaccctgattactatttccgtatcacaaatagtgagcacaagactgagctgaaagagaaattcaagcgcatgtgcgaaaaatcaatgatcaaaaagcgttacatgtatctaacagaagagattttgaaagagaaccccaatgtatgtgaatacatggcaccatcactagatgc

SEQ ID NO: 226120 - DNA, 332 bp, Gossypium hirsutum
cccacgcgtccggatagatcttttttcaaccacgcctaataaccgctcgagtgtttttcataaaaaaaaaaaatacccctttctttcaccaatctattcaaccttctatttgccaaaaagtttatgcacatacttatggttgttcttgttgctactggtaaaaccaccattctttacaagctgaagttggtagagattgtcactactattcccaccatctctttcaatgttgagaccgtttaatacaagaacattatcttcactgttttgtattttcacagccaggacaagatcctaccattatggatacatctattttcaaaacacgcatt

SEQ ID NO: 226121 - DNA, 366 bp, Gossypium hirsutum
cgaacgggttgatatgaaatctggatttgcctttgtttattacgaggatgaacgtgatgctgaagatgctattcgtgaacttgataatattccttttggttatgaccgacggcgactgtctgtggagtgggctaagggtgaacgtggtcgacgtggtgatggttctagatcagtgacaaatcagagacccaccaaaaccttgtttgttatcaactttgatccaatccgtactagggaacgagatattctaaggcactttgagccatatgggaaggttcttcatgttcgcattaggcgaaactttgcgtttgttcagtttgcaacacaagacgatgctaccaaagctctcgaggctacacaaaggag

SEQ ID NO: 226122 - DNA, 364 bp, Gossypium hirsutum
gggatgggccggtgtcatatggctttacagtgttggtttctacatcccacttgggctaatgaagttcgccattcgttacatcttaagtggaaaagcttggctcaacttgctagaaaacaagactgcattcaccaccaagaaagactacggaaaagaagagagggaagctcaatgggcacttgctcagaggacattacatggacttcaaccaccagaagcttctaacctcttcaatgacaagagtagctacagagagttgtctgagattgccgagcaggccaagaggcgagctgaggtggcaaggcttcgagagcttcacactctgaaagggcatgtggagtcagtggtgaatcttgagggactg

SEQ ID NO: 226123 - DNA, 363 bp, Gossypium hirsutum
ggcaaattgatggagggaaggccatccaacttgttctagaccaaaattcaggctgtggatttgcttccaaaaggaagtatttgttcggacgtgtcagcatgaagatcaagcttatacctggtgactccgccggaacagtcaccgctttttatatgaactctgatacagatacggtaagagatgagctagacttcgagttcttgggaaatcgtagcggcccttatactgtccaaaccaatatctatgctcatggaaaaggagatagggaacaaagggttaacctttggtttgatccttctgcagatttccatacttacactattatgtggaatcatcatcatattgtcttctatgttgatgatg

SEQ ID NO: 226124 - DNA, 362 bp, Gossypium hirsutum
caaagaaaaaaatctcttttttttttgttgtaatttcttggattttccaatatgggttttgaagattcagatagggtatcgaaaccagtaatgataagggaagtttggtcagatagtttggaatcggagttcgagttgatcagccaagtgatcgacgaatacccatttatttcaatggatactgagtttccgggtataatttccggccaaaagtggaccccacaaggccgtacaacggtcagttccgaccggccgatcattacaaggtactcaaatctaacgttgatgctttgaatttgatccaagtgggtctaaccctcaccgattcttcgggtaatctgcccggatccgaaaacggaacc

SEQ ID NO: 226125 - DNA, 368 bp, Gossypium hirsutum
gttcttttaatttttctctgcagattttatgtggcagaagtgctccttgctttggagtatcttcacatgcttgggatcatttacatagaccttaagcccgaaaacgttttggtgagagaagacggtcacataatgctctccgattttgacctctcccttagatgtgccgtctctccgacgcttgtaaaatcttcgaactcaaccctggaatcaaaaaattcggcatactgtgcccagcctgcgtgcattgaaccaacttgtgtaatgcagcctgattgtatccaacctgcatgttttggaccccgatttttttcaagcaagcagaagaaagacaagaagagcaaagttaagaatgaaacaaatcatca

SEQ ID NO: 226126 - DNA, 380 bp, Gossypium hirsutum
cggccgcgtggggtctgattgccggaagcagatttcagaagcattggctgctgataaatttgagcagagggggatgaagaaggagtatgagtattcaatgaatgttctatctttccagatacaaacatcggatattattccagcatttccttatgtagcaccattttcatctactgtgcctgattgttgtcggattgtgagatcttttattgaagattctgttagttttatgtcttatggtgagcagttggatttctacaatgttaagaagtatttagaccggcttctgagcgaggttttagatggggctcttttgaagcttattagttcatctgtccatggggtttctcaagcaatgcaggttgcagcaaatatggctg

SEQ ID NO: 226127 - DNA, 328 bp, Gossypium hirsutum
caaccttgtgcagaagggagaatattgttgggaagtgaaagaattagtgggcgggaatggatgagcatggctgaaagctcaagtgttctttgcttcctttgaccaacgaagcgaaagagccgctggggagagtgcctgcaccgctctggtcgccgtcatcgctcaccggctccattcaaaccatgccttcatgccaacgagacctgaatttgataacctcataacacaaggttcctctgaatggctgtaagctctgctccaacacagcttacaccaatgcctttcccgataaacattttcgtcttgataccgttctaaaagccttttt

SEQ ID NO: 226128 - DNA, 370 bp, Gossypium hirsutum
aaacagggaaagaaaagcagcgtaatgggtgaagaagtgaaggtttttggatacgtgggcaagcccttacagctacagggcagagcttgctttgaagttgaaaggtgtttcttatgagtacataaatgaggatatctttggcaacaagagcgatttgcttttgaaatacaatccggttcataagaaagtcccggttcttcttcacaatgggaaaccaattttagagtctcttgttatacttgaatacattgaggaaacttggaagcataatccctatttgccacaagatccttatgacaaagctaccgctcgattctggatcaagttcatcgacgaaaagtgctttcctaccctttggctagctgcatgg

SEQ ID NO: 226129 - DNA, 352 bp, Gossypium hirsutum
cccacgcgtccgcccacgcgtccgtccacgcgtccgcccacgcgtccgcccacgcgtccggttatggtacacggatatgctgcttctcaaggtttctttttcaagaattttgattatcttgccaatcgtttcaaggttattgctattgatcagcttggttggggtggatcaagtaggcctgactttacatgcaaaagcactgaagaaactgaggcatggtttattgattctttggaggagtggcgcatagcaaaaaaccttagtaacttcatattacttgggcattcttttggaggatatgttgcagcttaatatgctctcaagcattctgaacatgttcaacacttaattt

SEQ ID NO: 226130 - DNA, 364 bp, Gossypium hirsutum
gaactgtttcggaaaagcccttcaacgacaagaggaaaaatggtggcttcccgtacctcgagtacctccaggaggcctcgatgatagttcacgaaagaaattgcaacataaacgggattgcacgaaccagatactaaaagctgcaatggctatcaacaatgttagtcttgctgatattgaagtccccgaatcgtatttggaagcacttccaaagaatggtcgagccagtttaggtgatgtcatttatcgacatatttcatcagatatgtttacacccgaatgtcttctcgattgccttaatttgtcctccgaacatcaagcgatagagattgccaaccgagtggaggcctcgatgtatttatgg

SEQ ID NO: 226131 - DNA, 298 bp, Gossypium hirsutum
aaacatggaaagaaaatcaccgttttggttgaagaagtgaaggcttttggatactgggggagcccttacagatacagggcagagcttgctccgaagctgaaaggggtgttttatgagtacatgaatgaggatatctgtgggaccatgagcgattttattttgaaatacgagccggttcataagaaagtcccgtttcttcttgacaatgggaaaccatttgtagagacttttgctgtactagcattcactgaggaagcttagtaagtattatccctattttgcccaagattcttattta

SEQ ID NO: 226132 - DNA, 362 bp, Gossypium hirsutum
aattacaagctcctacatatggagatttaatcaccatacttagcattgatggtggtggaataagagggatcatccctggaaccatacttggtttcttagaatctcaacttcaggaactggacggtgaagatgcaagactagcagattacttcgatgtgatagcagggaccagcaccggcggcttggtgacagccatgctaacttgtccgaacgaaaagaatcgaccattatttgctgccgaagacattaaagacttctacctaactaattgtcctaacatatttcctcaaccaggatgtccattgttttctcgaacaacaaaagttatcaaagctctatcgggaccaaaatatgatggcaag

SEQ ID NO: 226133 - DNA, 361 bp, Gossypium hirsutum
tccacgcgtccgtttccttgaaaatcagctgaccatatttacgaccctagctcgtcgctctatggatttttagtcaaatttgatagtcattttcttctatgatatgaaccataccaagggtttgatttgaattaagacgaccatctttcacgatttcgagctcgacccatttcgattctcggtatacccagacccgaaccgtattaaaacgatgtttcttttggattggttctacggtgttcttgcttcccttggtctatggcagaaagaggctaagatcttgtttctcggtctcgataacgccggcaaaaccactttgcttcatatgttgaaagacgagagattggttcaacatcaacca

SEQ ID NO: 226134 - DNA, 276 bp, Gossypium hirsutum
ctcaaaacaagatttatcagttcaatggtgcaaatgccaaaattcaagaaggggcaaaggctttagaagttatgcattttctaaaggaaaagtgccacgagggaacgtgctatgttgcaatatgtggtgatgggaaattggtcacgtagtctgactcatgttagttctgggtcctttttggtgattctgtttcaataagcatatttgttaccagtgaatttgatgcaattcctgttacatctcctggtaatatttttatagctttatctttttgtg

SEQ ID NO: 226135 - DNA, 361 bp, Gossypium hirsutum
gcaatttgaagaaaaaagacaacattgcattaaattcgcagaccaattctatcccccaataagagcaggaagtacggtgattgtcactactcgactcgagaaagctgctcttatgatggctacaactcctttctatcgcttgggatgtttgtctgatgatgattcttggtctttattcaagcaaagagcctttgggatgggaatgaatggaagcaacgcgaacctggaaaccactgggaggcaattagtgcagagatgtggagtggtaccgttggcagttaaggccataggaagcatattgcggtttaagaagtcaagaaagtgaatggttacatgtcaaagatagtgagatatgggattt

SEQ ID NO: 226136 - DNA, 343 bp, Gossypium hirsutum
ctggagagtctcttcctgtcaccaagaatccttcggatgaagtgttttcgggatcaacctgtaaacagggtgaaatagaagcagttgttattgcaactggtgttcacactttctttggaaaagctgcccacctggtcgacagcaccaatcaagtgggacacttccagcaagtgcttactgccattggtaacttttgtatttgttcaattgccgttggaatagtcattgagttaatagtcatgtacccgatacagcgccgcaagtatagggatggaattgacaatctactggtactcttgatcggtggaatcccgatcgctatgccaaccgttttgtctgtcac

SEQ ID NO: 226137 - DNA, 363 bp, Gossypium hirsutum
cactattaaaccttctgcttagcttaaaaaatcttgaatctgcactctccggcttccctcgttatcgtcaatggcttcggacaagaagattaagatcgggattaacggatttggaagaatcggacgtttggttgccagagttgctcttcagaggaacgatgttgaactcgtcgccgctaacgatcccttcattttcaccgattacatgacatacatgttcaaatacgacatgcgtcacggtcaatggaagcaccatgatcttaaggtcaaagactttaataccctcctttttggcgaaaaacccgtctctgttttcggaatcaggatccctgaggagatttccatgggctgaagcctgggctg

SEQ ID NO: 226138 - DNA, 365 bp, Gossypium hirsutum
ggaaatcaacgggtgcggatcgtcccatcacttgtggagatagtctgattggtaccaagaagactttggttttctataaaggccgtacccctaatgggctcagaaccgattgggtcatgcatgagttccgcgccactgccgactccctgccccctaatgcgcttctagttcccaagataatgcagttggggctacgtctatggagtccaacagtacgcattttgatattgctttgcggatgtatatggaagaggaaggaatgtttgattctgatctcttaccatccggtggcttgcactgtttcccatcatccagtgccattttcaataatgaccagagcaggattgaagaacgtttctccttgg

SEQ ID NO: 226139 - DNA, 359 bp, Gossypium hirsutum
gccataaactcggtgcatcactgtaatggacgcaaactcaaggctaacaagtggatcatgtctgacggcggccaacccatcaccaacaggaggatatgcgatatgggaagtgccaagaacttcacgatccacagcactcttaaatggctaaactctcaactcccgaaacatcctcatataaaagccttatatcggagcatctgccctaggcacttactaaatggggactggaacagcggagggagctgtaacaacactattccaatgtccatcggtcaagaagtattacaagaagagtctactgatcaaagtgctgccaatgctgtgaggggtacaaggattgcacttttcgacataac

SEQ ID NO: 226140 - DNA, 364 bp, Gossypium hirsutum
aaaagattgaaatccggaaatgtctttcgaggaacaccattttgtatccaagggcttctccgttgcctccaaaacctacccacaacaggccggaaccattcgtaagaatggttacatcgtcatcaaaaaccgtccctgcatggttgttgaagtttcgacctccaagactgggaagcatgttcatgctaagtgtcactttgttggaattgacatcttcactgtcaagaagctggaagatattggtccctcttcccacaactgtgatgttccacatgttaattgtactgactaccagttgatcgacatttttgaggatggatttgtgtgagtgctgactgtcttgggatacactaatgattgatct

SEQ ID NO: 226141 - DNA, 366 bp, Gossypium hirsutum
gtccggaaggaccgaaggtcaccattctcgcctaaaacaatggatttcagagtcatgggtttgggttcaccactgttccataccctccaccacatgatggacctcaacgaagacggcgataacaagaacaaccccaacgccgcgtcaaggacctacgtacgagacgccaaagccatggcggtgacaccggcggacatcaaagaggactcgaagtcgtacatgttcgttgtcgacatgccagggctaaaaccgggggacataaaggtgcaagtggaggaagagaatgtgctgttgataagcggagaacggaagcgagaggaagagaaagaaggggcgaagtatattcgtatggaaaggagggtgggg

SEQ ID NO: 226142 - DNA, 361 bp, Gossypium hirsutum
gagggcttaaagcgaggcgctaggcgagagcgagagtgagaggcggaaaagggaggaatgggagcctgggctatcgctgttcatggtggcgctggtgtcgaccctaatctccctaaggaaagacaagacgaggctaagagactcctcactcgttgccttgatattggcatctctgctctccgctctaatgtccccgccattgacgtcgttgaacttgttgtgagagaactggaaacagacccgctgttcaactccgggcgtgggtctgctcttacggagaaaggaacagtagaaatggaagccagcattatggacgggcctaaaaggagatgcggtgccgtttctggcttaaccacggtta

SEQ ID NO: 226143 - DNA, 360 bp, Gossypium hirsutum
gttctaaactcggggcatcactggaatcgagggaaacttaaggctaacaagtggatcatgtatgtcgggggcgaacccaacaccaacaggaggatatccgatatgggaagtgccaagaacttcacgatccacagcactcttaaatggctaaactctcaactcccgaaacatcctcatctaaaagccttttatcggagcatctcccctaggcacttcgtaaatggggactggaacagcggagggagctgtaacaacactattccaatgtccatcggtaaagaagtattacaagaagagtctactgatcaaagtgctgccaatgctgtgaggggtacaaggattgcacttctcgacataaca

SEQ ID NO: 226144 - DNA, 319 bp, Gossypium hirsutum
caggaatgaaagtctccatccggcacctcggtccttccatgatccaacaaatgcagcatccttgcaatgagtgcaagggtactggtgaaaccatcaacgataaggatcgttgcccacaatgcaaaggtgataaggttgtgcaagagaagaaagtcttggaggttattgttgagaagggtatgcataatggacaaaggattacttttccaggagaagctgttgaagcgcccgatacggttactgtggacattgtattttgttctgcaacagaaaaaacattctaaatttaaactaaaagggggttgcttattttttgagc

SEQ ID NO: 226145 - DNA, 365 bp, Gossypium hirsutum
ggaaaccgctgctgtgatggctccaccaattgagactacagtcaagtcctctgactctcactgcgctccacatcctcctttgaatgaaaggatcctttcgtcaatgaccaggaggtccgtcgctgctcacccatggcatgatcttgaaattggacctggagctcctacggttttcaactgcgtgattgaaattgggaaagggagcaaggtgaaatatgaacttgacaagaaaactggtttgatcaaggttgatcgtgtgctttattcatcagttgtgtatcctcacaactatggtttcatccctcgtactctttgtgaagacaatgatcccttggatgtcctgattattatgcaggaaccagttc

SEQ ID NO: 226146 - DNA, 362 bp, Gossypium hirsutum
cccacccgtccgggcagttaggaaccataaaccaaggcaatggcttctcttgcaaccttagctggtgttcaaccaacgaccatcaagggccttggtggcagctctctcaatggaaccaagctcttggtgaagtcaactcgccagagtttcaaacccaaaaactacagggctggtgctgtggtagcaaagtatggtgataagagtatatactttgatttggaggatattggcaacacaactgggcaatgggacttgtatggatccgatgcaccttcaccgtacaacccactccagagcaagttctttgagacatttgcagtttcatttaccaagagaggattgttgctcaagttcctgatctt

SEQ ID NO: 226147 - DNA, 370 bp, Gossypium hirsutum
taattgtgccaataaattgtatcctttgcttcaagacaggttcagtcctgctcgagagggatcgttcaagcattccgcttcagatttgaggaagacggcagagaaactatcgcaagggctggataatctttcaaaggtagtagatgactttttcaaaatagttttgtctgggcgtgatgctttgctttgtaatctaagagcaggttgtgcttccccaaattcagttctgggaagaaacaccgacaagcaaagtgtgaggtgaatcatgaatgaagtagagctaaactcttctgtatacagatggtttaggtatgagaccttctgttttctaactaatagggatatgcaaccttgtttgggtaatgaaagt

SEQ ID NO: 226148 - DNA, 362 bp, Gossypium hirsutum
taattgtgccaataaattgtatcctttgcttcaagacgggttcagtcctgctgaagaggaatcgttcaagcattccttttcaaatttgaggaagacggcagaaaaactatcgcaagggctggataatctttcaaaggtagtagatgactttttcaaaatagttttgtctggtcgtgatgctttgctttgtattctaagagcatgttttgctttctcaaattcagtttttttgaagaaacaccttctttgcaaagtgtttttgtttaacaagaatgtattccagccaaacttttgtgtatacatatgttttttgtatgagaccttttgtctttaactatttgtttatacacttttttttgttt

SEQ ID NO: 226149 - DNA, 286 bp, Gossypium hirsutum
cggacgcgtgggttctgatactgtcatttttatgggttttaaaggcattcgtggaggtgggttgcacccttggaagtgctttttttgtaaccatcttacttatacgggggatatggactggggtaacattcatgcatgaaagccttgtccaccgtaggattaatgttccctttgatgacccactcttatggaatggtgtacaacctgtcattttgaaacagggttatttacacatttacagacttaaactgcattttcaaagaattttcttcagccttgaatatga

SEQ ID NO: 226150 - DNA, 397 bp, Gossypium hirsutum
gaggatgcaaacatgaagggaggtaaatccaattctgttgccatgagcgccaagctctccatgcataagaaatcaaccacgaaagctggcaagaaatctgtgaaggcagctaaagatccaaacaagctaaagagggctgctcgcgactggattaatttgatggaggatgtccctgagcactacacgaaggagctccctacaaacaagtccgctggtgctgatgacaaagccaggggagataaatggagcatcctctttgaagctgaaaagcgaccttattttgatatggccgataaacgaaaggtcttgtatgaaaagaacatgaacgcctacaataagagacaggcctaggtgcctcaagaagatggggaggaacttgtcaagtttgtgtatgcag

SEQ ID NO: 226151 - DNA, 389 bp, Gossypium hirsutum
tgccaagatcagtccaaccgcccctcttgataaagtctgtcccattagctgtgggatatgtacaggttttggggccactgtgaatgttgctaaacccaaaaagggtcaaactgttgcagtttttggactgggtgccgttggtcttgccgccgctgaaggtgcaagggtttgtggggcttctcggatcatcgctgttgatgtgaaccccagaagatttgaagaagctaagaggtttgggattacagaatttgtgaatccaaaagactacgacaagccagttcaagaggtgattgtggagatgaccggcggaggagtggatcgcagtgtggagtgtacagggagcgtccaagccatgatttccgcttttgaatgcgtccatgatggttggg

SEQ ID NO: 226152 - DNA, 346 bp, Gossypium hirsutum
gggaaatgccagacaaaactggatcttagaaggagacattgcggcttgatcttgttggaaaatcatcagatcaatataaatcggcagatatccttatcttcaatacaggtcattggtggactcatgagaaaacttccaaagggaaagattattaccaggaaggtagccatgtttataatgaattgaatgctctctgaggcctttcggaaagctctgacaacctgtgctagatgggttgaagctagtgtaaatcctatgaagactatggtgttctttaggggttatttctgcttcgaatttcactggcggacagtggtatactggtggtgcttgtgatagcgaaact

SEQ ID NO: 226153 - DNA, 313 bp, Gossypium hirsutum
taaggagctaacttattgtcaactgttaaacttgtgagccttatcgagcaacagcttgaggaatgtgatcactagtgttatccagaataagcaggttcatgtgattctggatgcaaaggggggttaaagaatattgcttttgagaataccctcaaagctggtggacttatgcgtgtggaagactacccttacaccttcactgttcgatggacctgttaatttgttaacacttttggcgttgttatggttgccaattttagtgttgctttttttaaattattatctatatcgcttgttaattttttttaaagaa

SEQ ID NO: 226154 - DNA, 391 bp, Gossypium hirsutum
cgccgctgaaggtgcaagggtttgtggggcttctcggatcatcgctgttgatgggaaccctagaagatttgaagaagctaagaggtttgggattacagaatttgtgaatccaaaagactacgacaagccagttcaagaggtgattgtggagatgaccggcggaggagtggatcgcagtgtggagtgtacagggagcgtccaagccatgatttccgcttttgaatgcgtccatgatggttggggtgtttgtgtgctggtgggtgtgccaaagaaagacgatgcattcaaaactcatccaatgaatctactaagtgagaggacccttaagggtgctttttatggcaactataaaccacgcactgatattcccatggttgtcgacaaatatttg

SEQ ID NO: 226155 - DNA, 388 bp, Gossypium hirsutum
atcagatctttgatacatcctcggattttttttgggtcttttttctctatcaaagcagagaagatcgaaagggagaaacatggctccacctacaaggatagggcttgctggtttggctgttatgggccaaaatcttgcacttaacattgctgagaaaggctttcccatttctgtttataacagaactacctctaaagtcgatgagactgttgaaagagctaaaaaggagggagatcttcctgtatatggtttccatgatcctgaatcttttgttcagtcaatccaaaacctagagtggtaatcatgcttgttaaggcaggggcccctgttgaccaaaccattaagactctctctgcatacttggagaaaggtgattgtatcatcgatg

SEQ ID NO: 226156 - DNA, 269 bp, Gossypium hirsutum
cggacgcgtgggttttggactgggtgccgttgttcttgccgccgctgaaggtgcaaggtggtgtggttcttcttggatcatccctgttgatgtgaaccccagaagatttgaagaagctaagaggtttgggattacagaatttgtgaatccaaaagactacgacaagccagttcaagaggtgattgtggagatgaccggcggtggagtggatctcagtgtggagtgtacagggagcgtccaagccatgatttccgttttttgaatgcttc

SEQ ID NO: 226157 - DNA, 302 bp, Gossypium hirsutum
cccacccttccggctgaaatggctggcatgagccatagaatacgagagagaactgttgcggttgattctgcagggaacaccactgttgctattgaaaagggttttgccattggttcagcagccctggtgttccttgccctttttggtgctttttgtgagccgtgctgcattttcaacagttgttgtattgacccctaaagtttttattggttcgcttgttggtgcaatgcttccttactgatctctgttatgaccattaatagtgtggtaatatgcacttttttatatttgtttgaggaaag

SEQ ID NO: 226158 - DNA, 388 bp, Gossypium hirsutum
cccacgcgtccgcccacgcgtccggctatattttagccttcgttcacgacgagaggacttgtaaatcggaactgcaaattgtgaacgccatggacttaaagctagaagccacggttcaacttccgtctcgagttccatacggttttcatggaacattcataagctcaaaggacttggaaaaacaggcctaatttcatcagccattttgtaaaaaagggagaggttttaccagagggatgctttgcatggattgtccccggaatctcttcctctgttttaaaccctgttttttttttagtccctacacttttaaaaatctccttttttggtcactattgtaaagtgaaaaaggttttggggataccagcttgtagcttttgctttagct

SEQ ID NO: 226159 - DNA, 390 bp, Gossypium hirsutum
cccacgcgtccggtcacacaagatggccgccataagattttaggagaaatctcggcctcaaaactatggaaatgtgactatttagctgcagcttgggcattagccaacctctcagccggacaatttgttatgggggctgaggataatgtgagttcaagattgcttcctgatatttcggttaattcaacagttgaagataataaggtagcgaatggtggtgggtcagcaagggcaagaaaattcagtagtagaagcatcgggttcaatcccgtgagcccgagttttggtatggggaggaccatgtataggggcagaagtgcacccttgacatgcaaaacttcaagttctttagccgcagttatggctcaaatgctatcccatagggcaaac

SEQ ID NO: 226160 - DNA, 385 bp, Gossypium hirsutum
  unsure (1)..(385): unsure at all n locations
ggggaaaccgtacaagttactaatgccagaaggtctggatgttcagaaaggaagtgttttgtccaaggttgccttggtgcatctgcattgcagggagcttgtacttccaaatattgcaaagttccttccactgttgagtaataatgcagaaaccctttctcctggactaagtggcaagcctgatctcctgcgctttgtagcatcaatgcctaaacacatgaaaattagttggaacttgatgtcatcctatttagtgtaaatatccaagatttcaactttgatggtctcatctttacattcattgattttatcttctgctgcgacttcaattttgttaagatcattacaaatttggatctaggttgnttttgttcttttttcagtg

SEQ ID NO: 226161 - DNA, 387 bp, Gossypium hirsutum
cccacgcgtccggaaaaagagagatagaatggcgtcgggtgccggagactggtcggcggaacagatcgatgattacgagaccttaatttcgacgaccgatgtggagctcttgaagagagcatggcgtaatgagaaagcgtctcctgagatccttcctttcgaggaagctctggttaaaagagctaaagagcagatccagttgatggaggaaacagtagacgactttgcagaaagtggtcatgatcctctcattgcatcactgtatcagatggacctggatagggctcaatttttgctgagatcttatcttcgggttcggctgcagaagattgagaaattcatgtttcatatctggaaaatggatacttataggaaccggctttcaat

SEQ ID NO: 226162 - DNA, 348 bp, Gossypium hirsutum
  unsure (1)..(348): unsure at all n locations
aaccacgcgtccgcccacgcttccgaaagaatttcgccactgtctgtcaaaaaaaagcatgaacatttgcaaactggggaggatcaactgcnaccgaggtgttatgcttgctgatgggaaaaccagatttttcatcaacggcaagcctatctaccactttgttggaacctcgacctttagccaatatactgtcgtccatgttggccaggttgccaagatcagtccaaccgcccctcttgataaagtctgtcccattagctgtgggatatgtacaggttttggggccactgtgaatgttgctaaacccaaaaagggtcaaactgttgcagtttttggactgtgtgccgt

SEQ ID NO: 226163 - DNA, 382 bp, Gossypium hirsutum
gcaaagttgaaaatgaagagcactgttgtgtgctaaacgaccacaacaagccaattctagttacaatggcaaggctggatcgtgttaagaatttaagtggacttgttgaatggtacgggaagaatgctaagttgcgtgaattggttaaccttgtagttgtcggtggagatcggagaaaagagtccaaggatttggaagagaaggctgagatgaagaagatgttcgagctcattgagaagtacaagctgaacggtcagttcagatggatatcatcccaaatgaacagagttaggaacggtgaactttaccgttacatttgtgacacaaagggtgccttcgtacaacccgcattatatgaagcctttgggttgactgtcgttga

SEQ ID NO: 226164 - DNA, 393 bp, Gossypium hirsutum
cggacgcgtgggctgttacaaacgtggagttgatcgtatttttgttgatcacccggtgttcctcgagaaggtatggggcaaaactggatccaaaatctatggccctagagcaggtctggactacaaggacaatcaattgcgatttagcttgttatgtctggctgctttggaggcaccaagagttctgaatttaaatagcagcaaatatttctcaggaccatacggagaaaacgttgtcttcgttgccaatgattggcacactgctcttcttccatgctatttgaaaagcgtgtatcaatcaaggggaatctatatgagtgccaaggttgctttttgcatccacaatatagcctatcaaggaagatttgcctttgaagattactcacttctcaa

SEQ ID NO: 226165 - DNA, 267 bp, Gossypium hirsutum
cccacgcgtccgaatacctttagttttttttaagctttaaaatctataattgttgaccggtttgcttcacttgagggttaaatctccatggctgccaaggtttttgcatattttgtcgctttggttgctgtcttcagcgttgccaaatttgaccctgatcttcttcaagatatctgcgtagcctatacatcttcaggggtgaaggtgaatggatttgcatgcaagaaggatgcctatgtaactgaaattgatttcttctttagtggc

SEQ ID NO: 226166 - DNA, 381 bp, Gossypium hirsutum
gtcgccgtggtggttttaacaatgtttattctggagaaggggaacgccctcgcgggcagtatgatcgccacagtgggactggacgtgggaatgaattcaagcgtgatggttctggacgtggaaattggggtagttctactgatgagattgcaccggagactgaagaaaatgtcactgagaatgagaagaagagcactgagaagcattttggagatgaagatgctgctgatgccaacatggagaatgctgtatatgaagccttggagaaggagtctgaaaataaggagatgacattggaagaatatgagaagattctcgaggagaagaggaaagctttggatgcccttaagactgaaggaaggaaagttgatgtcaaagagt

SEQ ID NO: 226167 - DNA, 377 bp, Gossypium hirsutum
ctttgttttccaatagttcgtaacaatgtcggtctcacttcaagctgcagctaggctgattcaaccaatcgagggtgctgcaccatcaaggaccaatgtgctgctcaggtcctcccagagcgtttctaaggccttcggtttggagcctgttggtgctaggctcacctgctctttgcaaactgacctcaaggacttggctcagacgtgtgttgatgctaccaagctcgctggtttcgctcttgctacatctgctcttgttgtctcgggagcaagcgctgaaggagttccaaagcggctaacctacgatgaaatccaaagcaagacatacatggaagtcaaaggaacaggaactgctaaccagtgcccaaccatcgatg

SEQ ID NO: 226168 - DNA, 386 bp, Gossypium hirsutum
gccatgatttccgcttttgaatgcgtccatgatggttggggtgtttgtgtgctggggggtttgccaaagaaagacgatgcattcaaaactcatccaatgaatctactaagtgagaggacccttaagggtgctttttatggcaactataaaccacgcactgatattcccatggttgtcgacaaatatttgaacaaggagctggggctggatatggacaagttcatcacacactctgtgccttttgccgatattaacaaggcattcgactacatgctccagggtataggtctgagatgcatgattcatttggatgcttaaggaaatgttgctgctgtatatttgcccatccaagtatcaaaactctaatgttttgtcctactatgtgt

SEQ ID NO: 226169 - DNA, 378 bp, Gossypium hirsutum
gaagggtcccgatcgctgtctcaactcatccaaaagtttaaagactctagcaccctggggccttttggagtatgactcgcttctgccatgggctcttgatgtggcaaagcagcaagggatttatggagcttctttctttaccaactctgccgctgtgtgtagcatcttttctcgcatccatcatggccggcttgctctgccgctgacccctgaaagcaaacccttaatgttaccaggacttcctccattaaatttccgtgacctgcccacttttcttcggtttccagatagctaccctgcttactaggccatgaaattgagtcagtattcgaatttgaatgaagctgatcgggttttggataactcctttgaagactt

SEQ ID NO: 226170 - DNA, 295 bp, Gossypium hirsutum
cccacgcgtacgactcactcttcattcccatttccaatctccatctcccgctgggtttttccgatcagagagacatagcaattggccggcccgaagaggcgactcaccccgatgctctcaaggcagctttggctgagttcatctcaaccttgatcttcgtttactctgagatcgggctcatgaatggtttttaacaagtagaccgacaacggatcatcaaccccggccggtctcgtagccgtcgctctagctcatggcttcggtcttttcgtctctgtcttcgttggcgccaaca

SEQ ID NO: 226171 - DNA, 360 bp, Gossypium hirsutum
cggacgcgtgggcggacccttgggaactgaaacaggtggctttatgattactcggctaccgggtgcctggccacagaaacctggttctgccacctttcctttttttggagttcagcctgtcatagtggatgagaaaggaactgagattgatggtgagtgtagcggttatttgtgtgtgaaaggctcatggcctggtgcatttcgaactctttacggtgaccatgagagatatgagacaacatactttagaccattccctggatattattttactggtgatggctgcagtagggacaaggatgggtaccactggcttactggaagagttgatgatgttatcaatgttagtggacattgtat

SEQ ID NO: 226172 - DNA, 383 bp, Gossypium hirsutum
gcgtccgcccacgcgtccgtccacgcgtccttttactcttccgccattttccaccacaagcgtggggagaatgtttcagagaggggtagagagaacaaacaacaatggctgctacatctggggctgtactaaatggattaggctcttcatttctttgcgggggaaagaggatccaagcccttttgggtgctagcattggggccaaaaggctcgccctcccctgctgctggaactagaaagttgatcgttgtggcagccgccgcacctaaaaagttttggatccctgctgttaaaggtggtggcaactttattgacccaaagtggcttgatggatcgctccctggagactacggatttgacccactaggttttggaaaagaccc

SEQ ID NO: 226173 - DNA, 388 bp, Gossypium hirsutum
ccaccaccgattccgtcgggtcctttccacgctccgagcaccatgctcctcatgatgcccgtgtacggttcatgtgcagtttcggcggcaagatccttccacgtccgcatgataatcagctccgttatgtcggtggcgatacccgcatcgttgccgtccttcgttccacctccttcgcagctctcctcaccaagctctctaaactctcaggaattgccaacgtgagtgttaagtatcagcttccaaacgaggatcttgacgcgttgatttcagtgacgaccgatgaggatctcgagaacatgatggaagaatatgatcggctagcacagaatcataactctcggttagctcggttgcggatttttcttttctccaaaggcgatgactc

SEQ ID NO: 226174 - DNA, 270 bp, Gossypium hirsutum
tttgaaatctcgctccccatcgacttctctgcttatcgcatcatcagcgagggggtggataaaggtgtagggagccaaaggaagagactacaacccttgggcctgctgtacgagacggatagcatgttttctgtgttgcccacatttttgcatcttttaatgacactttcattcatgtgactgattttgttggaagagagactatgtgttcgattacaggtggtatgaaggtgaaagcctacaggtatgaatatttaccttatgctttta

SEQ ID NO: 226175 - DNA, 386 bp, Gossypium hirsutum
gctgctgttattatacaaaagcagattaaaggcatgaaagctaagaaaacattcgggaacattagagatgcatcaattgtgatacaatcagcaattcgtggctggtcagtcagaagatgctctgtagatattggattcaagtctggggtccctaaggtggatgaaccagacgaggtgctggtcaagtcatcatttcttgctgaactacagcgccgagttcttaaagccgaggctgctctgcgggagaaagaagaggagaatgatatcctccaccagcggctcctacaatatgaaaaccgttggtccgaatacgagctaaaaatgaagtccatggaagaagtttggcagaaacaaatgaggtcactacaatccagcctctccattgc

SEQ ID NO: 226176 - DNA, 290 bp, Gossypium hirsutum
gcgtccggaaaacaaggcatctcccatttattatctatctaggtattatctcttttggtaggtttttacattggacgtactgtccactacttccttttgcagcagaattcaaacttaacattgtgtgtaaccattccacactctctagtcacaacttccattattatctttagactgcaacaactaatgtaatgttattaaatatttattcaaacactggtgatcctcaagatgttttggacacagatcacttcttgacttatatttagtaatcaaccatctttattata

SEQ ID NO: 226177 - DNA, 387 bp, Gossypium hirsutum
gaaggatgctggtggcatagggatgattttgacaaacacagatacttttggagaagagttagtcgctgatgcgcatctcttaccttcagcagctgttggacagaagaccggggatgcaatcaagaaatatatatcttctactcgtaatccaacagccaaaattggtcctggaaccacaaagttgggcgttcaaccatcaccagtggttgcagcattcagttctagaggtccaaacccagtcactccagcaatacttaaaccagacattattgcaccaggggtcaatatcctagctgggtggactgctgctgttggtccgaccggattacagagtgacccaaggcatgtaaacttcaacatcatttcaggcacatcaatgtcttgccc

SEQ ID NO: 226178 - DNA, 259 bp, Gossypium hirsutum
caagattaaacctgcattagagcactatgggtgtttggttgatctactagcccgggcagggtttattgtaggagcggttgaccttgtatcaacgatgcctatgagacctgatgcagtcatctggagaagtcttcttgatgcttcttctaagaagaattcaagtgttgagctaagtgaagagttggccatggcaagtcgttgaatcggaaggagacattgacatgttggttttaatgtgctgatatcaagagtttatgca

SEQ ID NO: 226179 - DNA, 397 bp, Gossypium hirsutum
cccacgcgtccgttggaatggttcggattaagtgtgcagtttgtccagattttggtctttgtgtcgaatgcttttctgttggagctgaaattactcctcacaagtgcaatcatccatacagggttatggacaatttgtctttcccacttatttgtccagactggaatgcggatgaggagatattgcttcttgaggcgattgaaatgtatggatttgggaattgggctgaagttgcagaacatgttggaaccaagagcaaatcacaatgtattgatcactgtaatgctatatacatgaactctccttgttttcctctcccagacttgtctcatgttatgggaaagagcagggaagagctccttgctatggccaaagggaatggtctagtcaaaaaaga

SEQ ID NO: 226180 - DNA, 400 bp, Gossypium hirsutum
aacacatccccctttttttctcggtacatcgagacacttgattattacacagctgtgttcgaatccatagacgtagcttgtccaagagatgacaagcaaaggatcagtgcggaacagcattgcgtggctcgggatattgtgaatatgattgcttgtgaagggcaagaaagggtggaaagacacgaacttctcggaaaatggaggtcgagatttatgatggccggcttttctccatatccgttgagttctttggtcacactagcggtacgagatatgttaaaagaatataacaacaactatagacttgtagagagagaagggtctctctatctagggtggataaacagagccatggcaacctcttctgcatggaggtgaaaaaagcatggaggaatctgta

SEQ ID NO: 226181 - DNA, 399 bp, Gossypium hirsutum
cccacccgtccgtttagatttaaattagtattctaactcaaggttttatatcaggggatgtagaattgcttaggtgctcttgatagaacccacatcaagattagggttccaacagttgataaacctagatgtcgaacgcgaaaaggtgacatagcaacaaatatgctaggtgtttgtacacctgagatgcaatttgtttatgttcttcctggttgggaaggttcagttgccgatggacgggtgcttcgagatgccattagtagaagacatggactaaaagttcctcatggtaaagtgtatagttagaggactttgaattattcattaagatcaaactttgtgtgctgaattaatcatttttttaaaaaaaattattttataggttgttattatctagtt

SEQ ID NO: 226182 - DNA, 355 bp, Gossypium hirsutum
cccacgcgtccgattgtgtttgtgctccaatgaaattggacaggcagatgggcaggaccatgacctattcaagtacaaaaacttttccatatatgacaatgaagattcaaacatcagcagtatctttgaagaagtttgtgattttattgatcacgtcgaacatacaggtggaagagtcttagttcattgctttgaagggaaaagtctgagtgccacagtagtgatcgcatacctgatgctacggaagaacttaactttattagaagcatggaactccctcaagcgagctcaccgtcgagcccaaccaaacgatgggtttgcaaggatactattggatcttgatcggaaactgcat

SEQ ID NO: 226183 - DNA, 249 bp, Gossypium hirsutum
cccacgcgtccgaaaatataagaaaaaaaatcatacgcaatgagcactgggggtgaggttattcgttgcaaagctgcggtggcatgggaggcggggaagccactatcgatagaagaagtggaagtggcaccaccccaaaagcctgaagtccgtattaagaatcttttcactggtttatgtcacaccgatgtatacctactgggaggggaagggttacactcctttgtttcctcgtatacctggtcatga

SEQ ID NO: 226184 - DNA, 359 bp, Gossypium hirsutum
ttggtccccagcgcactcctccgttctctaccgcatcgacggatggggagccccgtactgttccgtcaataacgccggcaatatcaccgttcgtccgtacggaacggacactctggcccaccaagaaatcgatttgctgaaaatcgttaagaaagtctcggatccgaaatctgtgggcgggctgggtttacagcttcccctcattgttcgggtgcccgatgtgctgaaaaaccggctcgagtctcttcaatcggcttttgaatcagccatccaagcccaaggctacgagtctcattaccaaggcgtttatcccgtgaaatgtaaccaagataggttcgttgttcaagacatagttaaat

SEQ ID NO: 226185 - DNA, 355 bp, Gossypium hirsutum
acgcatacgggccgtgtgtaagatccacacagataatcattccatcccaacatcccccaaaaggaccatggccgctacttcaccacgtgaggaaaatgtctacaaggcgaaactcgccgagcaagccgagcgctacgaggagatggttaagttcatggaaaccgtcgtttcctccgtcgttgctcccgacgaactcaccgtcgaggaacgtaatctcctctccgttgcctacaagaacgtgatcggcgcccgccgtgcttcctggaggattggttcttccatcgagcagaaagaggaaggacgtggcatcgccgatcacgtctccatcattcgtgagtacagggccaagatcgag

SEQ ID NO: 226186 - DNA, 384 bp, Gossypium hirsutum
cccacgcgtccgcaaactccgaggtatccttaatgttgcagccattaaagctccgagtttgggcgaaagaagaaaagctgtccttcaagatattgccattcttactggtgccgagttccaagcaaatgatctgggtttgttaatcgagaacacctctgttgagcagcttggtatagccaggaaagttatcatcaccaaggattcaacccaaataattgctgatgccgcttctaaggatgaaatacaagctagggtgcaacaattaaagaaagaactagccgtgacagattctgtttactacacagaaaaactggcagaaaggattgccaaactatctggtggtgttgcagtcattaaggttggggcttcaacttagactgaact

SEQ ID NO: 226187 - DNA, 377 bp, Gossypium hirsutum
aagaaatcgagaaggcaacatctagcatctatcctttgcagaatgtgtttgtgcgtgaggtcaaaatctgggaggctcccaagtttgatctcgggaagttgatggaggttcatggtgactactcagaggatgttggtgtgaaactagagaggcctgctgatgagacaatggctgaggctcctgcagagtgtgatggagcttgaacgaagaactatagtccatgaatttgtcttgtttttttatgctcctaggagtttttgctgatcatttttaatttgtcgtataactgttttattaaatttttctatggttttgatgttaaaaggatatgtttttttctactaattatttagtaaacaatttgttaccttttggtt

SEQ ID NO: 226188 - DNA, 256 bp, Gossypium hirsutum
cgtccgtccaggcgtctgaaacagtgtccttttatcttcactccctttgggagcacactgaggggggtggtttttttgacaatgaggctatttatgacatttgcaggcgctctcttgacattgagcgacccacttacaccaatcttaaccgccttgtatcccaggggatctcctgtttgactggttcacttaggttagatggggccctgaacgtggatgtaacagaattgcagaccaactggggccctaacccaag

SEQ ID NO: 226189 - DNA, 376 bp, Gossypium hirsutum
cccacgcgtccggaaaatcaccattacaagtcccaaagaagacccccgctagttgtaaattaaagaaccagagttttctttctctttagtttacgtttattgtccttttggaatttttgatactaaaaaaaggaagcaacgaagaagggaaatggagggcaaagaagaggatgttagattgggagccaacaagttcacagagaggcaaccaattgggaccgcggctcagagtcaagatgacgggaaagactacactgaaccaccaccggctccatttttcgagcctggcgagttaacctcatggtccttttatagggctgggattgccgagtttgtggcgactttccttttcttgtatatcactattttgactgtt

SEQ ID NO: 226190 - DNA, 366 bp, Gossypium hirsutum
cggacgcgtgggtgcatattgggcacgtagctttttgcaggatcttgagagggcgtggccgggatcatttaaggaagcggtgctggggaattggttttggtttagggttccgagtagtagctatggatccaaatttcaggaagctttctgttgagcacattgttgcagcttacaagagaaccaagaaccgagcaattcttttggattacgatagcaccttgctgctgactagttcattaagtactatccccaatgtagaggcttgtggaatcttgaacaatctgtgtagagatcccaagaatgttttttttcctggtcagtgcaaaagattgaaagactctaactgaatgggtttcctgttttgag

SEQ ID NO: 226191 - DNA, 372 bp, Gossypium hirsutum
gaaaccttttaactggttttggattttataacccgttttggctccttgatattgccaatgctgccattgttattcaccttgttggtgcatatcaagtttactgtcaacctcttttcgccttcattgagaaaagcgcgaccgagcggtttccggacagtgaattcattaccaaagatatcaagatcccgatcccgggttttcgcccttacaatctcaacttgttccgattggtttggaggacaatttttgtgatcattacaacattgatctccatgcttcttcctttctttaatgacattgttggactccttggggcacttggattttggccattaacagtttatttcccagttgagatgtacatttcacaaa

SEQ ID NO: 226192 - DNA, 313 bp, Gossypium hirsutum
  unsure (1)..(313): unsure at all n locations
atcagatctctgatgcagtcctcgatgcctgtttggcacaggatcctgagagcagggtggcttgcgagacctgtaccaagacaaacatggtgatggtgtttggtgagatcactaccanagccgacgtatactactagaagattgtgcgtgacacctgccgtggcatcggtttcacatctgacgatgtgggtctggatgccgacaactgcaaagtgctggttaacatagagcaacaaagccctgatattgcccaaggtgtccatggccattttagttagcgtcccgaggaaattggtgctggtgaccagggcca

SEQ ID NO: 226193 - DNA, 351 bp, Gossypium hirsutum
ttcacgttttaaattaatttaacatttcaaggaatataacaatattaaatctgggagcgattatcaataaggattatataatacatacatgattgcgctttaaatagctttgatccgattaccagtatacgtgcacaaaaagaaaaaaaagcttcatccaccactctaaacaatggaaaagattcagcacaaccatgtacaagcttaaggacttaagcttcatgttgcccagattggaactggtccccaagtggtggcattcttgcattggtttcccgaaatttgggatttatgggggcaccacatgggtgcggtgggttatgctggctatcgagctattttcattgattt

SEQ ID NO: 226194 - DNA, 376 bp, Gossypium hirsutum
gattttaaagctgcacccgaaaccaaaagaggaaaggaaaaaggaagattgttgggtttgctatggcggacaaggcggtgactatcaggacaaggaagttcatgaccaacaggctcctttccaggaaacaatttgtcattgatgttttgcatccagggaggcccaatgttgccaaggcggagctgaaggagaagctttctaggatgtatgaggtgaaggacccaaattcgatctttgtgttcaagttcaggactcattttggcggtggcaaatctactggatttggtttgatttatgattctgtcgagagtgcaaagaagtacgagcccaaatacaggcttatcaggaacggactcgattagaaggtggagaaatc

SEQ ID NO: 226195 - DNA, 378 bp, Gossypium hirsutum
caaaaaatcaaatttaagaaagctccattaaatgaatcttcttgccgggagaagaagaatcacgaagcagtttcccatattgataaaggcagtgaaggactggaagaagcaacagaggaaggggaaaggaaatagagaatgaatcataatcggcaatccaacgatgggaagcatgatgatgactctgctctctccgatttccttgcttctctcatggattacactcccactatacctgacgaactggtggaacattacttagccaagagtggttttcaatgtcccgatgttcgattaataaggcttgtagctgttgctactcaaaagttcgttgcagaggttgcaaacgatgcacttcagcattgcaaggcaagacag

SEQ ID NO: 226196 - DNA, 373 bp, Gossypium hirsutum
cccacgcgtccgaaattaacagatcttatcgattttacttctccttcgcctctgcttttttgcttacagtatgccagaagacacagagtaccgctgttttattggtaacctttcatggtcaacatctgataggggcctaaaagatgcatttgaaaagtttggaaatcttcttgaggctaaggtagctactgacaagttttctggccgttctcgtggattcggatttgtcacttttgatgagaaagcagcaatggaagaagctattgaagcaatgaatggaatggatttggacgggcggaatataactgttgatagagctaaacctcaacaagggtcagggagagattatgatggtgaccgtagccgtgatcgt

SEQ ID NO: 226197 - DNA, 373 bp, Gossypium hirsutum
ttccttaaccgaatcaaggtgcgatggatgtttcagcaaaagcaatcttaagagagctcatcttgtcatgttgtttggtattgtgtgagctcatgtcagaaactggaatggaagttgcatcggctcgagtgtcagttactcgctaagcttgacaaagaaaggagaaaatctgttacgcctaccatccgaatgatggtgaaactttaccttaggagaaagttgcaaaatgagaatgtcatccctgttacagctatggacaattacaatttggtggaggctttggtttctcacatgtcggatattgatgagaagcagctattgttatatgcgcagatggctaaccttgttaacttgattcttcagctccccaaca

SEQ ID NO: 226198 - DNA, 376 bp, Gossypium hirsutum
gattcatgtttccaattctcagtgaaatcttcttttctgggtttatgataaattgcggattcatacgcaggacccatcttgttcaatctttctctgttgttttcctctactggttatattacgtttcataaagaaataatcatcttttttaacttatttatctttactactaagttttttttttttaattttatttgggtcctgctattatatatcataaataataactcctacaatggctacatcctcgggttcatcagcaacacaaatcaactcgggctcagaagaagcattaatggacgaaaggaaaaggaaacgaatgatatcgaacagggaatcagcaaggagatcaaggatgaggaaacaaaagcatttg

SEQ ID NO: 226199 - DNA, 368 bp, Gossypium hirsutum
cccacgcgtacgtgttgatcctaccttaaagtacaatggagatggatcatcgagtatccaactggagcggatcgatgcttattacaacgaggcttccggtggaaggtacgtccctcgtgcggttctcatggatcttgaacccggtaccatggatagtatcaaatcctggcccattggccagatctttatacctgataatttcgtgtttggacaatccggtgccggaaacaactgatccaaaggtcattacactgaatgtgcttagttgattgatgctgttcttgatggtgttcgtaaagaggccaagatttgtgattgccttcattgctttcaggtatgctatccactcttattaggcacatgtcttt

SEQ ID NO: 226200 - DNA, 348 bp, Gossypium hirsutum
  unsure (1)..(348): unsure at all n locations
aaacacccccaaagtatatcacttttctttctttacaatcttcatttgttcagggttttgaagttctcataccatgggtgacagtcagtattcattttctctcacaactttcagtccttcgggaaagctagttcagatcgagcacgccttgacggctgtcggttcgggtcaaacatctcttggaatcaaagctgctaatggggttgtaattgctaccgagaagaagttgccttcaatcttggttgatgaaacatctgttcagaaaatacagtgtctgactccaaatattggagttgtttacagtggcatgggtcctgattttcgagttntggttccgaaaagttggaa

SEQ ID NO: 226201 - DNA, 370 bp, Gossypium hirsutum
cagaatttgtgcttggagttggctactatgggtgatctgaaacttgtggagcgtgctcaaaattataccctagctcctgaatctagcaagcaaataaaggccaacatcaaggtgtcttcaactgagactggagtcatatttggcaacattgtatatgaaacttcaaatgtgcttgagagaacagtagttgttctgaatgacattcacattgatatcatggactatatttctcctgctgtttgtacggatactgcattcagaaccatgtgggcagaatttgagtgggaaaataaggttgctgtaaacactgtaattaaaaatgaaaaggaattcctcgaccatattatcaagtcaactaacatgaagtgcc

SEQ ID NO: 226202 - DNA, 364 bp, Gossypium hirsutum
ccgctggcctggtttgccaccagctccatttcttcgacgcccactcaattaatgactcagaagcttattcccttcggaggggctccgatggtaccggagatgatggcttctcatctcaatcgatacctgaaacacctccgatctacagtagcggtggtggaaactctgctttctcatcggagcagaacggaaaaggattgaacggagagttcggaggatcggatgggccaatcttgccaccgcctgctgagatggggccagaagaaggctctggtttgagagagtggcgcaggcagaacgtgattccactggaggagaaggaaaagaaagagaaagagactctggagcaaataataaaggaagc

SEQ ID NO: 226203 - DNA, 376 bp, Gossypium hirsutum
ttcttgttagcatctatccttgtagagaggtgagggtagctaaggcacaataaggaagatgggggaggaagttcttccaaaaggtgggaccaagtgctatgatgacgatggccgcctcaagcgatctggaaccgtgtggaccgctagtgcacatattattacagcagtcattggttccggggtcctgtcactggcttgggccacggctcagttgggatgggtcgctggtccattggtgatgattttgttttcttttgtaacttacttcacctccactcttcttgctgcttgttaccgctctggtgaccctgttaacggcaagctaaactatacttacatggatgctgtccgatcaaatcttggtgggtttaaagtt

SEQ ID NO: 226204 - DNA, 375 bp, Gossypium hirsutum
atcattgcgggatgaagcttccttgaaaccccttttacctcttttttaacaacagttcgtcataccatgatgtccaccatcagctttatggtaccaaatacaacttctctgtctactttgacatatgggacagaattctaggaacctatatgccttattcacttgagaagagacctgatggcggccttgaagtacgacgtgctgatcaagaacacaagaaggattgattgattaattacttgattaatcagccaattatgataactagtgagcatggattgatgaatgttccattaggttttatatatgtatctaatgtgtatgtattatgtgtactactatgcttcactaggagtaaaggcaaatctggtgtga

SEQ ID NO: 226205 - DNA, 365 bp, Gossypium hirsutum
  unsure (1)..(365): unsure at all n locations
attnnngggggggccgacgcgtccggggcaaatgacattgattacttggtcagtgatgagtttacgtcacctttgcgctgagcacatatttaatctgagaaactgctccatctccctcattgcacactgtgaatgattataagcagaaaaatcgtgatgagatgcatccacattgtcagcacaagcgatctgactatggtcttcctgaagataaatttatttttgcatgtttcaaccaattgtataaaatggatccagcgatctgtgctgctttttacgttggaccctgcagagcgagatgctcatctggctaatgaagctacaaagaaattcacatcaagccattggattctcattgagatagc

SEQ ID NO: 226206 - DNA, 372 bp, Gossypium hirsutum
tcgcccacgcgtccgcccacgcgtccgttcagctgtcgttaagcagtgtctcggccgtgtctttcgtttgtttgacgaggttcgtgaaaaaacatggtctgaggaggttcttgttccttgataagctttgtgatgaaagtgagactgttaggaaacaatacactgttcagctcaataggtcactgaagattgtgtcattttttgtcctgccgtgtttcatagctgagactgcatacaaagtatggtggtatgcctctggtgcttcccaaattcctttcttaggcattgtgtggttgagtgacacagtagcctgtgtcatggagttatgttcctggctctaccgaaccacggtcttcttcctcgtgtgtgtcc

SEQ ID NO: 226207 - DNA, 364 bp, Gossypium hirsutum
gaaagtttcaatggcaaccctcaaagttccagttcacgttccttctccttctgggatgctgagcaacttcggaaagcttttgaaggctggggtacgaacgagcaattgattatcgacatattggctcacaggaatgcagcacagcgcaattcaattcggaaagtttatggtgaagcttatggggaagatcttctcaagtgtttggagaaggaacttacaagtgatttcgagcgggctgtgctgctttttacgttggaccctgcagagcgagatgctcatctggctaatgaagctacaaagaagttcacatcaagcaattggattctcatggagatagcttgcagtaggtcttcgcatgaactac

SEQ ID NO: 226208 - DNA, 370 bp, Gossypium hirsutum
aatttcttttcaaaagatcccacagccatctcataatctgagccgagtgtcggaggcctgaaaacgaaccctaaacgatgggtcagggaacaccgggcggtatgaataggcaaggtttcccaggggaccggaaacccgatggctctgataagaaggataagaaatttgagccagcggcgcccccagccagggtggggcgcaagcaacgaaaacagatgatctgaggccgcggctcggcttccgactgtaacgccgttgacgaagtgtaagctgcggttgctaaagctggagcggatcaaggattatttactgatggaagaagagtttgtggctaaccaggaaaggctcaagcctcaggaagagaaagccg

SEQ ID NO: 226209 - DNA, 379 bp, Gossypium hirsutum
atcggttcatctcactactgtttttgaaaagttacttaaagaaaggaaaacgcgagggctcctagatcaaaacccagcccgattagcccgaatcccgacccgaattctaaggagatccgctaccgcggcgttaggaagcgcccatggggccgttacgcagccgagatccgagacccgaggaaaaagactcgagtctggctcggcaccttcgacaccgccgaggaagcagcgcgtgcttacgatgcgaaggcgcgagagttccgcggcgctaaggcgaaaacaaatttcgccgacaacaacgccaacgacttcacgcgcagccctagccagagcagcaccgcagcgtccggtttacttcttcgatgccttcgctactggc

SEQ ID NO: 226210 - DNA, 294 bp, Gossypium hirsutum
aacgcggctttctctctatttcttttttgcagcgagttactgagtcaacaccacgatggccgaacgaatctaccccggtgactcaccaccgtcttccggcgaacactcgaatcccaaaccagctcctccttcttcagataaacctattccacaacccggaacttacgtcgtccagatcccgaaggaccaagtctaccgtgttcctccgccggagaacgcccgccgctacgctcatctgtcgaaacgtaagtcgagtcgcagcacctgttgccgctgctgctgctgctttttaac

SEQ ID NO: 226211 - DNA, 391 bp, Gossypium hirsutum
tccggggggcccacgcgtccgccagattctcgactctgtctcccctatcgctctttttcatcgatcagatctctgaggcccatcaattcaaacaaccctccactcattccatccatgacgcttggctcaggaggatccagtgttgtggtgcctcggaacttcagattgctggaggagcttgagcgtggagaaaaaggtattggagatggtactgtcagctatggaatggatgacggagatgacatttacatgcgctcttggactggcaccattattggtcctcataatactgtacatgaagttcgaatctatcagcttaagctgttctgtgataaagattatccagagaagccaccaagcgtccgttttcattcaagaatcaacatgactt

SEQ ID NO: 226212 - DNA, 350 bp, Gossypium hirsutum
gggtttttcaccttcttcgcccctcttctcaagtttcatcgtaaagaaatatgcctagcttttatgaccgacttggtggcactcgtttgtatgttggtcatttgtcttcaaggacaagatcacgtgatctagaggacatgtttagcagatatgggagagtacgtgatgtggatatgaagcgtgactacgcatttgttgaattcagtgatcctagagatgccggtgatgcaagatatgcattgaatggtcgagacttggatggaagccggatgattgttgaattatccaaaggagtgccccgtggttcaggtggatctcgagattaccctggaagaggtcccactcctggg

SEQ ID NO: 226213 - DNA, 377 bp, Gossypium hirsutum
ctgccttaatcattgcacagctggttgctactgtgattgctgtatatgctaactggggatttgcaaggattcaaggaataggatggggatgggccggtgtcatatggctttacagtgttgttttctacatcccacttgatctaatgaagttcgccattcgttacatcttaagtggaaaagcttggctcaacttgctagaaaacaagactgcattcaccaccaagaaagactacggaaaagaagagagggaagctcaatgggcacttgctcagaggacattacatggacttcaaccaccagaagcttctaacctcttcaatgacaagagtagctacagagagttgtctgagattgccgagcaggccaagaggcgagct

SEQ ID NO: 226214 - DNA, 392 bp, Gossypium hirsutum
gaattccgggtcggggacgcgtccgcgacagttccaccaacctctccctcttgtctaggttcattgtctcttcccaaagagatatgaaggcgtcattgaaaggcacatacaccaatgacaagagcaccgccgtcgtttccctttccgccaacgctggcgatatcaagctacgcgcttccctgactgatgcgacattcatcaagggtcccagcctgaacggtttgactcttgctgttgaaaaacccggcttcttcatcatcgactacgatgtccccaaaaaggatttttggtttcagttcatgaactcaggtaggggtgcggagaaaccgttgaagcttacttacattcacggcagaggggacaaccggaccgtgttggacgggacactcacc

SEQ ID NO: 226215 - DNA, 362 bp, Gossypium hirsutum
aaaaggttaagagcaaaagacagggcagagtaagctaagctttgatcatcaatggcggagaagagtttcaagtacgtgatccttggcggtggtgtagctgctggatatgcagcgagagagtttgccaagcagggagtgcagcctggtgagctagcaattatttccaaggaggcggtggctccatatgaacgacctgccctgagcaaagcatatctcttccctgagggagctgctagacttcctggtttccatgtctgtgttggaagtggcggagagagattgcttcctgagtggtacaaggaaaaaggaattgaattgatccttagcacagaaatagtgaaagcagatcttcctgccaatac

SEQ ID NO: 226216 - DNA, 370 bp, Gossypium hirsutum
aagatgtgttgttaggagggaattgtagttacggattggggttggggaaagaagaagaaattttctgctttgaacatattcctggcaaccaaacatcagataccaataatctagttgatggagatcatcgggttagttcttcttcacaaacttcaatggctccaccattaccccattccagtggtccgtcggctatgggtcgccggaagagacgtctatccaccaaggctccaaaaaacaaggaagagatggagaaccagagaatgactcacatcacagttgagcgcaatagaagaaagcaaatgaatcaatatctttcccttcttcgatctttaatgcctccatcttatgctcaaaggggggatcaagt

SEQ ID NO: 226217 - DNA, 369 bp, Gossypium hirsutum
gtgaaaagaaattttgaagaaaaatataaatccatcaccgatctaagttccccaaattctgttcaaatcgccggcgaaattttgatctgaaaatctaaaaatgtcgtccacattcagcggcgatgaaactgctcctttttttggcttcctcggtgccgctgctgccctcgttttctcctgtatgggagctgcgtatgggacggctaagagcggtgttggtgtggcgtcgatgggagtgatgaggccggagctggtgatgaaatcgatcgttcccgttgttatggctggcgttttgggtatttatggtttgattattgcggttattatcagtactgggattaacccaaaggctaaatcttttatcctttt

SEQ ID NO: 226218 - DNA, 382 bp, Gossypium hirsutum
cccacgcgtccgcttatatgctaaaagtacattgttagtaatgagtctaccagatatgaaagcgctctgtgaatcatcaatacattcatgcaaagccttttgaagtcgattagcaatggtttttgcaattatcttataaataactgtgcataaactgataaggcgaaatttttttaaattaataggattagccattttggggattattaccaattgggttttgttaatatcctccaaaggtttaccattattaagaatatctaaaaaaacaccactaacatccttaccaaaaatatgccagtacttttggtaaaaagatagccgaaaaaccatcaacacccgaggcttttgtaggcccgattcctgtcagttcctcaataat

SEQ ID NO: 226219 - DNA, 321 bp, Gossypium hirsutum
tccttgtccaattacattttctctcctattatgctccagcctgcatatgtggagccgattaatttaaagctgctattcattatcaaaaatatgcaaggcaaataaggttgtccatgcacacaacctttggtttgacatccttaaattacatattgaaactttcacccctttacatgctatttaaggttacctgctataaaaaaagtcacccgcaaaatcttgccaccattaaatctttaaaatttcttacttaaatactctaagacacacctccactgcaaacaacttttttcaatcttgcttctattgcacttcctattt

SEQ ID NO: 226220 - DNA, 384 bp, Gossypium hirsutum
ctttttacttgctttctttccgtttcgaagatggatattaagaaacgattactgcgtccatttgtatgctattttctttcagtttcccagtttttccacgtctgccatggtgatgttgggactgctgcccagtacagccctccatatttacctacggcgtgctttggggaagatcaaacccagttcccatcaagcaatctgttcgcagcagcaggagatgggatatgggacaatggagcatcatgcggaaggcaatacctggtgagatgcataagtgcttcccagccagggacttgtgtccccgaccaaactatccaggtcaagatcgttgattatgctcctaccgctttctccccaccttccgctcaatccaccaccattgtc

SEQ ID NO: 226221 - DNA, 384 bp, Gossypium hirsutum
gggatggctttttttcccagcaaatttcatgctccaatctcctcatgaagaaggcatcaaccctcaacttctatcaatcaaatgcttccttcttgcccgccccaagacttccatggtgtggcatcatttcttgggaagagatcaatgtcattttcagggatagatgtgtgcgaagaagcaaatggggaggatgatttatcagatgatggttcacaggcaggagaaaagaagagaagacttaacatggagcaggtaaagactcttgagaagaactttgagttgggtaataagcttgaacctgagagaaaaatgcagctggctagggctcttggtttgcaaccaaggcagattgctatttggtttcaaaacagaagagctagatgg

SEQ ID NO: 226222 - DNA, 367 bp, Gossypium hirsutum
gaaaatatcacaaatcttcttctccttctcagaaatcttagtatcatcactatgggctcaaatcccaatgtcttctttgacatgacgatcggtggtcagcccgctggtcggattgtgatggagcttttcgcagattgcactcctcgcactgcggagaacttccgtgccctctgtactggcgagaaaggcgtcggccgcagcggtaagcccctccactacaaaagctcttctttccatcgtgtgatccctaactttatgtgccaaggaggtgacttcaccgccggaaacggtaccggaggtgaatccatctacggatcaaagttcgctgacgagaacttcatcaagaagcacactggtcccggtattc

SEQ ID NO: 226223 - DNA, 365 bp, Gossypium hirsutum
tgcatcttcgcccaaatcaagaggactatcgatcatttctacatgtctcctccactttttccagtttcattgtatctactttgttacagaatccagctgcccatgctgcagcaagctttgcagcaagattttggccttatgcgaatattgaaagctctggcgattcttcttgcagccgcttaagaaggttcccattttaaccaattaactctgctccaagaatggctgcaatcgctgctgccactgtagcagctgccactgcatggtgggccgcccatggactgttttctgtatgtgctactctgcatacaggctttacctgttttcctgcatccactgctgcagttccaccaatggagaatggt

SEQ ID NO: 226224 - DNA, 281 bp, Gossypium hirsutum
cccacgcgtccgggaaaaattagtaatcttcgtagagtgacatacttggttcgagatgaagctgacagaatgtttgatatgggttttgaacctcaaattactcgaattgttcaaaatattcgacctgatcgccaaactgtactattttctgctactttccctcgccaggttgagattttggcacggaaagtgttgaataaacctgttgaaatacaggttggtgggagaagtgttgtgaacaaggacataacccaattggttgagatgaggccagaaagtga

SEQ ID NO: 226225 - DNA, 382 bp, Gossypium hirsutum
catttgcatccaggttctcttcaaaggatgttcctgttcatgttcttgtcgacgatgctggactgatggagcacaaacgaattacgacatctaaaggatttgagttgaactttgctgtcaatgtattgggcacttatgccacaacagaattaatgttgcctttgctggagatagcttctcctgatgctcgagtcgtaacagtttcatctggtggaatgtatactactcccttgaccagtgatctacagtttagtgatggaaaatttagtggggcagagcaatatgctaggaacaagcgagttcaggtagcactaactgaaaagtgggctgagatgtacaagaacaaaagaattgggttttactcgatgcacccgggctgggc

SEQ ID NO: 226226 - DNA, 382 bp, Gossypium hirsutum
cttcactccacatttcacactctttttcaactttctcttcttctctttgttttgaagaggggctggagttttagccaaagaaaactccatggctaaacttgttgctactttcttcttggctctcattgccatctccatggttcaaactttggttatggcatcacatggacatggtggtcaccattatgataacaaacgttatggacctggaagtctcaagccttaccaatgtccatctcagtgcacaaggaggtgtagccagacacagtaccataaaccatgcatgttcttctgtcagaaatgttgcaggacatgcctttgtgttcctccagggtattatgggaacaaacaagtttgcccttgctacaacaactggaaaacc

SEQ ID NO: 226227 - DNA, 367 bp, Gossypium hirsutum
cggacgcgtgggctttttggacaccgtgagaattggagaccgagaatccgtctttgggagggtttggttcggattttaattttgtagcaatggcggaggaatcggagagtaagcagtcggcggtggagtcggtgatggagaagatcagcgagaagattcacggccatgattcatcgtcatcttcggattcggattcggatcatgagaaaccggcttctccttcttccgttaaggctaagatttatcggttgtttggaagagagagaccagttcatcatgtgcttggtggtggaaaacctgctgatgtgtttctgtggaggtacaagaagattttagctggtgcccttggtggagcctcccgcttttt

SEQ ID NO: 226228 - DNA, 373 bp, Gossypium hirsutum
cccacgcgtccgcccactcgtccgcccacgcgtccgcccacgcgtccgcccacgcgtgcggccaaacgcttccttactttgattctatcgtcgattcaaagcagctttcttatccatggcgtctacatttttggcactacccaaaaccttcacttcaaacaagcctaccttctcttctctttcaacccacaaacttcccgggactcgaagaaattcacttagaatcaatgctgtggccactaaatgggagcccaccaaggttgttcctcaagctgacagagttcttatccgtctccaagaattacccgagaaatcagctggtggagttttgttgcccaaatcagctgtcaagtttgagaggtacctcatgggg

SEQ ID NO: 226229 - DNA, 383 bp, Gossypium hirsutum
gtgacagagcgtgttcttgctgcttgctacaaggctttgaatgatcaccatgtgatgctagaaggtactcttttgaagcctaacatggtgacccctggttccgactccccgaaggttcccccagaggttattgctgagtacactgtccgtgccttgcagcgtaccgccctgttttaatcccctctattgggttcttgtctggggggcaaaaggagggggaggcttccccttaaccttaatcccttaacaagctccagaccaagaaaccatggtcactctcattctcatttggacgtgcccttcagcagagcactctcaaggcctgggctggaaaggaggaaaacgtgaagaaagcacaagatgctttccttgttaggtgcaag

SEQ ID NO: 226230 - DNA, 346 bp, Gossypium hirsutum
agggttaatttgttttggtgaaggaaaaaataaatctagaggatgtttttgttcgattggttctatgggattcttacctccctcggtctatggcataaagaggccaagatcttgtttttagggcttgataatgctggcaaaaccacgctgcttcacatgctcaaagatgagagattagttcagcatcagccaacacagcatcccacatcagaggaattgagcattgggaaaatcaagtttaaagcttttgatttgggaggccatcagattgctcgaagagtttggaaagaatactacgccaaggtggatgcagttgtttacctggttgatgcttacgacaaggaga

SEQ ID NO: 226231 - DNA, 340 bp, Gossypium hirsutum
ctcagctgcaaatcgaccaaatatggcgtctcaagatgaacaagaccctcgggtgtccaacatttcttctgcgattcgtgtcatccctgacttcccaaaacctgggataatctttcaagacataccacctttgctttttgttcccaaaccttttcggatactattgatttgtttgttgagaggtacagagggaaagatatattctgccgttccaggtttaaaaccagggggttcattttttgcccaaccattaccttggccttttggggcaaagtttgttcctatgaggaaacccaataaattgccgggggaggttttatcggaggagtattctttggag

SEQ ID NO: 226232 - DNA, 369 bp, Gossypium hirsutum
ggtcagcggagatgctcttggagaggaattcaagggctatgttttcaaaatcaagggaggatgtgataagcagggattcccaatgaaacagggagtgttaattcctggttgtatctgtctcttgctccacagaggttacttgtgttgaagaagaagctgtgctgtcccaggaagcctacattttgctcaatgctaaacaaggtataccttggttttcaacaacaatagaagtgcaaaagccttgtgcagaccctggaatttctgattcttcaccaaagtcctagatgacatagactttgcctccaataatgaggtggaaaagagtgccaattgcagcgccaatgaaactaaagatgttgctgatagagc

SEQ ID NO: 226233 - DNA, 383 bp, Gossypium hirsutum
cgctaccaccaccgccgccgtcaacgtcgataacccatcaacaaccagcaccggggccaccatcaccagcagcggtaggcttcacgagtgttccatctgccacaagagtttccctacgggccaagccttgggtggtcataaacgctgccactacgaaggtggcaacaacaacaacaaaaataacaacaacagcggtagcgttagcgttagcgttagcggggttacgtcttcggatgggggggcgttgagccacaaccaccgtgcagtcgactttgactttgacctcaacttgccagccttgccggagttcagtcaaatgtacccagatgaagaagaggttcaaagcccattgccgaccaagaaaccacgtctcttgatcgcca

SEQ ID NO: 226234 - DNA, 383 bp, Gossypium hirsutum
cccacgcgtccgcggacgcgtgggttaataagtatctctacttgtgtgggagaggggacatgaggcaagttgagaagaccatccagtatttgatcggttcaggaatggatccgggtacggagaatagtccttatctgggattcatctacacaacattccaagaaagggcaacttttatctcacatgggaatacagctaggctagccaaggtgcatggtgacatgaatttggctcagttatgtggttcaattgcggcagatgaaaagcgccacgagacagcatacactaaaatccttgaaaagctctttgagatcgatcctgatgggtcagtcttggcatttgctgacatgatgaggaagaaaatctccatgccagcccacttg

SEQ ID NO: 226235 - DNA, 357 bp, Gossypium hirsutum
aaacactcgagacgtcgaaactgttcacaaaatccttgcccctgaccttgaatggtggttccacggtcccccgactcaccagttcttgatgcgcctgctcaccggtgcttcatcctacgattctttccgtttcgaggttgatcccctttcggttaccacctttgggcccaccgtcatcgtcgaaggctgcgatcacagccgttcaatctcttgggttcacgcttggaccgtaaccgatgggataattacccaagtgagggaatacttgaacacttctttcaccgttactcgccttggaaactctacccaatcttcactgtccgactacaatccttcatcatcatcatcatcatcgac

SEQ ID NO: 226236 - DNA, 361 bp, Gossypium hirsutum
gtttcgggtgtatttaagaaaaaggataagtttcaaaaggcacagagcatgaaaggggaggttgggaccacaaatggtaatggctcgttcgggattccccagctatactgtcgcattaatactcttcagcatattcaacggagttggatgtcttggcaaaacggacaattgtgcatcttagaagttctgaatctcataacaacaatattgccaatgggacggggaaagcattcgaactttcagctgctgcttgtttggaagggatacaacaactgtgtgaggcaactgcatataaggtcatcttccaggatctaagtcatgtcctctgggatgggctgtatgttggggaagcttcatcatc

SEQ ID NO: 226237 - DNA, 385 bp, Gossypium hirsutum
ctccagctaggtcttctagccatagtccatggcccagcccatacccgcacggggggtgtgccagtccgcttcctcctggtgtatcgccttctccggcgagagcttcaaggggttcgacgccaaggagattcttccggcggccgtttccacccccttctccggcgaaacacataaaggcctcactagtgaagcgtcttggcggtaagccaaaggaaggaccgatcccctaggatcgtggaactgagccggagcaagctttggataaaaactttggttatggcaagaattttggagctaagtatgagcttggaaaggaagttgggaggggacatcttggtcatacttgctctgccaaaggtgaacagggtgagctcaaggatcaacc

SEQ ID NO: 226238 - DNA, 386 bp, Gossypium hirsutum
cccacgcgtccggtcatctaggagggttaaatccgaacttcttgttcaggtaggtggggtaaataatactggcacaaacgaagatggtagccgtaagattgtgatggttttggctgcaactaacttcccatgggacatagatgaggctctcaggaggcgactggaaaagcgtatttacattcctctgcctaattttgagagtcgtaaggagcttattcggatcaatttaaaaacagtcgaggtggctgctgatgtggatattgatgaagtggctcgtcgaacagagggatacagtggggatgatctcacaaatgtttgtcgcgacgcttccttgaacggcatgagacgaaaaatagcaggaaagacacgagatgagatcaagaaca

SEQ ID NO: 226239 - DNA, 334 bp, Gossypium hirsutum
cccactcgttcggccaggcagaacaaataaagggcggtgactgcgggcgcggaggagcctttggtggggatggtgggagagcaagggactggcatgtcagagaaggcgatggttgttcttagtagcttggcgggaattaaagaaggaaaggaagctattgtggaagaaggtgggattgcagcactggtggaggcgattgaagatggttccgtgaaggggaaggatttcgcggtgttgtcactgttgcattttgtgccctgataacattataaaaccttattttttgtttgtttagtagaatgatcttacaccttccctctttgtgggttctttt

SEQ ID NO: 226240 - DNA, 367 bp, Gossypium hirsutum
attgctgcagaatatagtggtgtgcttgtcaaaatggttgagaattttgagatgagtgtgtcaaataagactcctgagttcatcaagatgaaccctttggggaaggttcctgtgttggaaacacctgagggtcctgtatttgagagcaatgccattgctcgttatgttgctcgctcaaaggttaacaaccctatatgtggttctacattgattgattatggtcatatcgagcaatggattgattttgcagccatggaaattgatgctaatattgcaaaatggttgtatccaagacttgtttactgtgtttacctttctccagctgaggaagcttctattgctgcattgaagagagccctttgcgctt

SEQ ID NO: 226241 - DNA, 373 bp, Gossypium hirsutum
gcagatcttcgttaagaccctgaccggcaagaccatcaccctcgaagtcgagagttccgactcgatcgacaacgttaaggcgaaaatccaagacaaggaagggatcccaccagaccaacaacgtctcatcttcgccggaaaacagctcgaagatggccggaccttggccgattacaacatccagaaggagtccaccctccatctcgtcctccgtctacgtggtggcatgcagatcttcgtcaaaaccctgaccggcaagaccataactttggaagtcgaaagctctgacaccattgacaacgtcaaggcaaagatccaagacaaggaaggcatcccaccagaccagcaaaggctcatatttgccgggaaacaa

SEQ ID NO: 226242 - DNA, 326 bp, Gossypium hirsutum
ctttgctttctttgtatttgcagcttctgtaggggaaaaaaaagatgaagggggtttcctttgttgccttgtgtgtggagtcactgtcggtggtgctgttttcgggtgaaagtcgcatggcggaggcagtgacatgtaatcccacggagctttccccctgcttgtcggcattcacgtcgtcctcgcctacatcagccgcttgttgcatcaagctgaaggcgcataagccatgcctctgtggatacattaagaacccatctcttaaacagtatgtcaacagtcctaacgctaaaaacgttgcttctacttgaggagtcacatatcct

SEQ ID NO: 226243 - DNA, 367 bp, Gossypium hirsutum
aaagaatcctagttaactcgacgcgtttacccagaaagaggtgaagatgtcaactcctgcatggaagagattgatgagggattttaagaggttgcagcaagatcctcctgcaggaattagtggtgcacctcaagataacaacattatgctttggaatgctgttatatttggacctgatgacaccccatgggatggaggtacgtttaagctgactcttcagtttacggaggattatccaaacaaaccaccaactgttcgttttgtatcccgaatgttccatccaaatatttatgctgatggtagcatctgtttggacattctacaaaatcagtggagtccaatttatgatgtagctgcaatactgaca

SEQ ID NO: 226244 - DNA, 375 bp, Gossypium hirsutum
cccacgcgtccgcccacgcgtccgaaaaaaacttcatcgacggccgctcaaactcggcccaaacaacctctctggccaccgtcatggaaaacacagacgaactcaagagggtgttcgatcaattcgacgccaacaaagacgggcaaatctctattacggagctccgcgacgtattgaaggcaatgggatccaactactcagaggaagagttcaagcgtgtcatggaagacatcgacagcgatcaagacggttacatcaacttctccgaattctccactttctggtccacttcttccgacgccgttaaagccgcttcggagttgcgcgaggccttcgatttgtacgatcagaacaagaacggcctgatctcggcaa

SEQ ID NO: 226245 - DNA, 387 bp, Gossypium hirsutum
cccacgcgtccgcccacgcgtccgccaaaccaggatgttttgcattgtcattaagagtacctcaagaatttcatcctctaggaatcgctcattatttaattctcagaacgaacaaaggatttaaaattaagggttttacgaaggaattcacaacgttaaccgcattaataacacatcattcagtaatgccagaactactgccttgtcccttatctctgagccgatacaatccaacatttgtaaaatctgattctaatcaggactttgccgatattgatgcagatccagattataatacacttgcagactttagaaaaatgatggctgatttaaatgtataaacttttaacattttaatgaaacaaagcagtattataataatttaaa

SEQ ID NO: 226246 - DNA, 386 bp, Gossypium hirsutum
cttagcataaaaaaataagtacaccaatgggagcaacgaagaacatctggaccgccgtggaagctaaccatgctaaacaaagccacaacggcaattcaaccttcgatgatcattcaatccttcactctaatctctcagttgataccgcccttccttttccccttatggtccctcgcgtcatcgccttgtgcaaggatctgtttcggaaatgggctaagttgaacgattcttgcttctccgtcgacactgtatcaggcggcatcacgaatcttctgctgaaggtttctgtcaaggaagaaaatggagaatatgtgtctgtaacagttagattgtatggacccaacactgaatatgtcatcaatcgggaacgtgagttacaggcgatc

SEQ ID NO: 226247 - DNA, 324 bp, Gossypium hirsutum
cggacgcgtggggtaattcgcatggttgcaacagcagcagctgggagaaaagaggatccaaaacccttcctaaaacgagcaaaaatagtaagagttatattaatggatccgtgttcttttgtacggatcctggtaggtaatttggccctgaggtttacactttctacaaagccctcgctttcaaggatccatccttctacttttccatgttactgcaagatcaaactcaagaactttccttaccaagtgggttcaatccctttgatccatgcaaacacccaaaacccattaagctgcaacttttttttgcagaaaatgctcgct

SEQ ID NO: 226248 - DNA, 377 bp, Gossypium hirsutum
cccacgcgtccgtgaaaatccaagtgcggaggattatttttcttttaagcggggggacgctacaaatggggactcttcaaacttggagaaaagcgtatggcgcccttaaagattccaccaaagtcggtctcgctcatgtcaatagcgattacgcggatttggatgtcgctatagttaaagctaccaaccatgtcgagtgtcctccgaaagaaaggcatcttagaaaaatcttgttagccacatcagcgattcggcctcgagcagatgttgcttattgcattcatgcgctttcccgccgtttggccaatactcataattggatggttgcattgaaaacactcatagttatccatagggcgctgagagagggtgacccg

SEQ ID NO: 226249 - DNA, 390 bp, Gossypium hirsutum
cccacgcgtccgcttttttgttgaaggattttagtggaattggtttttagagggtctagtttcttaacattttctacagggtagacaaatacaatgtcgatcgccagtgtagcctttagctcagcaattgaagagtttgcttgtttccctgaaaattttgcccatagatatggtcagactttgagcaactcaatcttaatttttctctctgttggggggtctatcattcccatgcgtgtaatggagtatgattcaattgcctctgtgaagctaaggattcagacttcaaaagggttttttctgaggaagcagaagttagttttcaaaggtagagaactggctcagaatgattctcgtgtccaggactatggtgttgctgatgggaatgta

SEQ ID NO: 226250 - DNA, 318 bp, Gossypium hirsutum
ccggaacggaagggccgggccgcgcgaccgtccacgcgtccgcaagaacttccctcaccaagtgggttcaatccctttgatccatgcggacacccaaaacccagaaagctgcaacttctctttgcagaaatcgctcgctgcgtgtttcagtttaagcaagtcccaggtggataggatcatctcgaaagggggttcatcatataaactttccatcgaggtttacgctgaccctgatgacagtacctgcggattggcatctgggaagttattggggaaggttacggtgcccttggatttacgtggagcggaattaaagcc

SEQ ID NO: 226251 - DNA, 382 bp, Gossypium hirsutum
cgtttttccagtccacggtggacctgatagagatggttctagggaaggcggaggttgcaatagccaagcattacgatgaagtgctagtgtccgagagcaggcgggaacttggagcggaacttaggagggaactgatgatgacagaaaagcatgtattggtagtgagtggacatgagaaattgtcagagaacaacaagagcttgagaaggctgatagagagcagactctcatatctgaatccaatgaatatgttgcaggtggaggttctgaggaggcttagacgtgatgatgaaaacaacaaactcagagatgctttgctaattactataaatggaatcgctgcggggatgaaggacaccggttaatgttagattagaggatc

SEQ ID NO: 226252 - DNA, 290 bp, Gossypium hirsutum
ctatgctttactattcttccgctatttgcagcgactaacaaacaatagcggggcgggaggatctctcagggtttaggtgatggcttcaaagcggatattgaaggagctcaaggatctccagaaagatcctcctacctcttgcagcgctggccctgttgctgaagacatgtttcattggcaagcaactattatgggtcctccagatagcccgcatgccggtggggtgtttctagtcacccattcatttccctccgggatatccatttaaaccaccccagggttgcattcag

SEQ ID NO: 226253 - DNA, 374 bp, Gossypium hirsutum
cccacgcgtccgcttgaccagatcaatgagcccaagaggccttcagacaagccggtccggctcccacttcaggatgtctacaagattggcggcattggaactgtgcctgttggtcgtgttgagactggtgttcttaagcctggtatggtagtgacctttggcccctctggcctgaccactgaagttaagtctgttgagatgcaccatgaagccctctctgaggctctccctggtgacaatgttggattcaatgtcaagaacgttgctgttaaggatctcaagcgtgggtttcgttgttcaaactttaatgatgatcctgcataggaggctgtcagcttcacctttcaagtcattatcatgaaccaccctgggca

SEQ ID NO: 226254 - DNA, 373 bp, Gossypium hirsutum
ttagaatatacatcttgattggaagctaacagttagtagttgaacttctttttggctagctcttctggtggccctttcttgttttttacatttgttattactataaaagtgctttctgtgcttcatatgtttctccgtggcgcttatcctgtggcaacagggtcaagcttcagaatgggctctgctgaggcgacattcatccgaggatttgtttgcagtccagatatgtggggcatatcctgacactgtagcacgtactgttgaacttatagaaaaggagtgtacggtggacttcattgacattaatatggggtgtccaattgatattgttgttgataagggtgctggatcttttcttctcacaaaaccatta

SEQ ID NO: 226255 - DNA, 345 bp, Gossypium hirsutum
ggaagccaatgtaatagtagaaggggggtcgtcaaacagttggttggcggggggtgtctctatagtgaaaataagaagcaaggtggctgaatttccagggaaaatgaagaaagttgcaaaagatgatcctagaagaattgttcattcgtttaaagtatgattagccatcaccctcgtctcactcttttactattttgatcatttatatgttggctttggcagctcattcaatgtgggctgttttaactgtcattgtcttcattgagttctctgtatgagcaactcttggtaaatgctaaaacattgtattgtcaacattttttagctggaacacttgacttttta

SEQ ID NO: 226256 - DNA, 383 bp, Gossypium hirsutum
  unsure (1)..(383): unsure at all n locations
ctaaaacatacatttgcatatattattgttgtctttgtcattgtttttccgaggaagcacaatgaatgtagacgaggaggtnnaaagactcaaggaagaaattcaaagactaggccagatccaatcagatggttcttacaaggtcacatttggggtgctatttaatgatgatcgctgtgcaaacatctttgaagcactagttgggacactaagagcagcaaagaaacgaaaagttgttgcatatgatggtgaactactactgcaaggagttcatgacaatgtggaaatcattctcaaagctacaacaccagcagcagcagctcagagtagcaactaatgcangtctaaataaataattgcaaatatagttttgcagcaaaagt

SEQ ID NO: 226257 - DNA, 367 bp, Gossypium hirsutum
cggacgcgtgggcagcagtccaaatatacttaggtctgttttttggggggaagggtgagaaatgcttgtgttgttcgagactcccgcgggctttgcccttttcaaagtattggatgaagggaagctaaacaaagttgaggacttgtcgaaagaattcttggctgcagattcagcaagaaaggttgtctcgttgcaagccttttccaagttcgaaaacacagcagaagcattggaagccgcatcaaaactacttgaaagcacgcccagcaaaggtttgcgcaagttcttgcgtgctcattgtgatggtgaaacactaggagtggctgattcaaaacttggaaatgcaattaaggaaaaactgaaaatt

SEQ ID NO: 226258 - DNA, 386 bp, Gossypium hirsutum
gcactttgttcgcttacaagtctgttcaggatattgctattattgaacttgctgctactcacccaattagactcggcttgctcttaacttctctgttttctactacgaaatcctcaactcacctgatcgtgcctgcaatcttgcaaaacaggcttttgatgatgcaatttcagagttggatactttgggtgaggaatcttacaaggatagtacattgatcatgcagcttctccgggacaatctgaccctttggacatctgacatcacggatgaagctggagatgagatcaaggaagcacctccaaagcctgagtcagaggagggacagcagtgacgagtcaagctcattggatatgtactctgtacttcacctagtagtttcttat

SEQ ID NO: 226259 - DNA, 340 bp, Gossypium hirsutum
cgacagttctcaactaaacttataacgttcgatcgtttaacgcaaacccatttttaagtgagggaaaggtttcagttcagagtcataagcaacatcaatggctccttcaactctgacggctcttgcggaagagaaaaccttgcaggcaagcttcgttcgtgatgaagatgagcgtcctaaggttgcttacaaccaattcagtaatgatatccctgtcatctctcttgctggtatcgatgatgttgatggcaagaggggtgagatatgcaagaagattgttgaggcttgtgaggattggggtgtcttccaaggttgtggatcatgggtgttgatactaaac

SEQ ID NO: 226260 - DNA, 320 bp, Gossypium hirsutum
aacaaatataaaccccaagagttatagagagagagagagagagagagagagagagagaagggaaaagaaaagagaaggttttcttcttttttactgtcgagtaagtgattaaagatggaagcagtgaatggatgctcatcttctacatcatcatctgatgcatcttcttcggattcgtatttatctgcaaggggttcaaacaaagctgagaagatcaaaggtccttggagtgctgaggaagataggattttgactcgacttgttgagagatatgggcctagaaactggtctttgaatagccgatatataaagggtcgatc

SEQ ID NO: 226261 - DNA, 390 bp, Gossypium hirsutum
agttgctattggagtctatatctggaagtacagatacatacaaaagaaaagacgagggtcaaatgattcagaaaaatttgtgaaactccttcatgatagcaacttaaacttcaagtactctacactcgatcgtgctacgggatctttcaatgatgccaacaagcttgggcaaggaggattcgggacggtttataagggagttctacctgatggaagagagattgctgtcaaaaggttgttctctaacaatcgacatagggcagccgatttctacaatgaagtcaaacttataagcagtgtggagcataaaaacctggtcagattgttgggatgtagttgttcgggacctgaaagtcttctcggctatgagttccttccaaacaagagctt

SEQ ID NO: 226262 - DNA, 384 bp, Gossypium hirsutum
ggacagctggctggcttctgggggttgtttgtgatcttaaattgccacatccacctgcaattgctacagttcctctgggtaccggaaacaatctgcctttttcatttggctggggaaagaagaatcctgggactgatcggaattctgtgctgtcattcttggaacaagtaatgaaagcaaaggaaatgaaaatagacaattggcatattctcatgaggatgagagctccaaaggaaggtccatgtgatcctattccacctctggaactaccacattctttacatgcatttggtcgagtctcttcaacagatgaactgaacatggaaggttaccatacatttcgtgggggattcttgaattacttcagcatgggaatggatgctc

SEQ ID NO: 226263 - DNA, 366 bp, Gossypium hirsutum
ctgcctccttcgactctcttccgatacccattcgctcttccatggcaaaacctggaacgaagcttctctcacgacccaaaggcggggattttactctttctcctcccctaataaacttgcaagttgcaaagggtctcatccactgcgttctttttcgacctcctcatcgtcgtcaaaggttgggtttttgggatggtatttagcgaagctcgaatccaatcctattattacaaaatctgtcacaacttcccttatctttgccgctgctgattttacttcacagatgatcacatcagcttctagttatgactcgattcggacattacggatggcttgatatggattgcttctcttggggccatcaca

SEQ ID NO: 226264 - DNA, 351 bp, Gossypium hirsutum
tccttatttcctatcaaccgccatctcttaatacgagggttttcatgactctatcgcggctcacctcttattcttcaacttcacactccgatcatcttctgaaacccccctgctctgccatatacctccgacgcccgatctccaccgataccactcccataactgcggagaccttcgttcctttcacctctcaccagaacgacaccccctcacgctccgtccagaccaatgccaaggagctcctcaccttctaacggcacatggcgctgatgcgtcagatggagatcgctgccgattcactctacaaggccaagctcatacacggatactgccacttgtacgactgtcaag

SEQ ID NO: 226265 - DNA, 389 bp, Gossypium hirsutum
cggccgcgtggggaaaagatctggaggtttttatcggaaatcgaagatctccactggttaatggaccctgacgatttccttcgtctcaaaagccaattaatgataaaatcggtgaacgaaacggaagcgctttgtttcagatcgaaagggttagttgaaattaccaaaatgtccaaggaattaaaacataaggttccgtttattttgggggtggaagtagaccctaaaggtggacccaggattcaagaagctgcaatgaaactgtacgcagagaagcaggagggtaataaggtgtttttggtacaagccttgcaagccatcgaaggagccttgaaacggttcttttatgggtacaagcaagtgctggtggtggttatggggagcttgga

SEQ ID NO: 226266 - DNA, 387 bp, Gossypium hirsutum
cccacgcgtccgctcacaggttccattgtttttcagtagtaaagagcaggggcagaatggaaatcaatggaagggaaagaagaagatgttagattgggagctaacaagttctcagagaggcagcctattgggacagcagctcagtcccaagatgataaagattacactgagccaccaccagcacccttgtttgagcctagtgagttgacctcatggtctttttaccgagctggaatcgctgagttcgttgctactttccttttcttgtatatctcggcgttgaccgtgatgggagtttgtaaggacaaaaccaagtgtacaactgttgggattcaaggggattgcttgtgcttttgggggattgaactttgctcttgtttactggac

SEQ ID NO: 226267 - DNA, 383 bp, Gossypium hirsutum
cccacgcgtccgagacatttgggttgctttggcacaagcaatggcatcgatgactgggttacgtggctcttcacaagctgtgttggaaggtagtctccaactcagcggccaaacccggttgaacgttgctagcaccaacagggtggctgtggctagacctggttttaccgttagagctcaacaggtccctgccgagcctgaaactggacgcagagctgtgctgggtcttgttgctgctggtttggctactggctcctttgttcaagctgtgcttgctgatgcacgaagcatcaaggttggcccgcctccaccaccctccggtggattgcccggaactttgaattccgatgagccaagagaccttgatctggcgtacaaagatc

SEQ ID NO: 226268 - DNA, 380 bp, Gossypium hirsutum
cccacccttccgcccacccgtcctaaaggttgttggccaaggtgcttttgcaaagggttatcaagtaagaaggaatggtacctcagacatatatgcaatgaaagtcatgcgcaaggataagattatggagcaaaatcatgctgaatacatgaaatctgagagggctatattaggaaaagtggaccacccgttcattgtgcagctcagatactcattccaaaccaaatataggctgtatcttgttcttgactttgttaatgggggacatcttttcttccaactttatcgccaaggcttgttcagggaagatttggctcgcatatatactgcggagatagtatcagctgtttctcatcttcatgcaaatggcataatgcaca

SEQ ID NO: 226269 - DNA, 273 bp, Gossypium hirsutum
tggattaagatttttcaccgtgtacggtccatggggaaggcctgatatggcgtgtgttttcgtttacgagaaatattctgcaggggaagcccatcaccatttatcggggaaagaatcgggttgatttggcacgagattttacctacattgacgatatcgtgaaaggctgtttgggatcgttggatacatctgggaaaagcaccggttctggtgggaagaaaaaggggaacgctccatatatgatttttaatttgcggaatactttcgtcggtt

SEQ ID NO: 226270 - DNA, 386 bp, Gossypium hirsutum
ctccttttagctcagaacgctctttacgctgtgtagaaatgccgttcaaaaggtgcgttgagatcgggagagtcgctctcgttaactacagcaaagactacggcaagctcgtcgtcatcgtcgatgttgttgaccagaacagagctctagttgatgccccagatatggtgaggggccaaatgaactttaagaggcttcaattgactgatttcaaaattgacattcctcgtgttccaaagaagaagacactgattgaagcaatggaaaaagctgatgttaaaaacaagtgggagaatagctcatggggtaaaaagctgattgttcaaaagaagagagcatctctcaatgacttcgacagattcaagatcatgttggccaagatcaag

SEQ ID NO: 226271 - DNA, 383 bp, Gossypium hirsutum
cccacgcgtccgcccacgcgtccgcccacgcgtccgcccacgcgtccgtttgttgaagagtataagaaaaaaaatcatacgcaatgagcactgctggtcaggttattcgttgcaaagctgcggtggcatgggaggcggggaagccactatcgatagaagaagtggaagtggcaccaccccaaaagcatgaagtccgtattaagattctcttcactgctttatgtcacactgatgtatactactgggagtgtaaggtattactgttcgatataatgaatattacaacatttattttctacaagtattgtcactgttttcctttaatttggcagggttacactcctcttgttcctccgatacttggtcatgaagcctcagggtat

SEQ ID NO: 226272 - DNA, 332 bp, Gossypium hirsutum
cccacacgtacgcaaaaaggccgactaaggcctagggcgacaaggttaagtacggcggctagaaacagggcacaggacctgtgcaacattgatcagttcaacttgtcctacggcgccaggattctgctgcaccacgccaacatgcccctgaagcgccgccaccgttacggtctgtgtgggcgtaacggatcgggcaagtagaccctcatgaacgccatcatcaacaatcaggtcgacggattacctcctcccaccgaggtccgcacgttctacgtccatcacgacattgacgggtgctaggccgagatttccatcattgactgactgctctc

SEQ ID NO: 226273 - DNA, 389 bp, Gossypium hirsutum
cccacgcgtccgcccacgcgtccgcgctttctctgtctcaaattcttcaaccgtatcgtccatttgttctcttcctactgctacttcgacatcactgaaatcgacggcgttaacaccaacgaactctataacgctgtccaactctatctcagctcctttgtttccatcaatggcagccgtttgagcctcactcgcgctctcaattcgagcgccattaccttcggcctctccaacaatgactgcatcgtcgatacgttcagtggtgtcaccgtgctttgggaacacgttgtgatccaaaggcaatcccagaccttttcttggcgaccattgccggaagagaaaagaggtttcactctccgaatcaagaagaaaaacaagtccttgattct

SEQ ID NO: 226274 - DNA, 270 bp, Gossypium hirsutum
cgcacgcgtgggagagcctttaatttatgtcgaaccacaacgcttaagaagggggaggctgaaccagaagattgacgccctgactgcggcggttcttaacgtgtcgacaatggataaagcattggtccagtgggatgctgtctcatatattaacgagctcagggcgaagatacacagggcccatttggagagagaggtgatgcagagcccaatcaaggcatggcagaaagatttgtcaagtgaagcttcaccaccacctgatcaagacct

SEQ ID NO: 226275 - DNA, 327 bp, Gossypium hirsutum
ggagttggtgggacgtgtgttattcgtggttgtgttcccaaaaagattttggtggatggatcggcatttggaagtgaacttgaggatgctcggaattatggttgggagttgaatgagaaacttgattttaattggaagaagcttctacataaaaagactgatgaaataatcagattaaatggaatttacaagcggttattatcaaatgctgcctttaaattgtttgaaggctagtgaaagattgttggttcaaatgaatttgatgtcacataacttttattgttccaaattgttcctttttatcaaaacatttttactttatttctt

SEQ ID NO: 226276 - DNA, 375 bp, Gossypium hirsutum
agcggtttcgaacaattacaaccgcttactaccgtggagccatgggtattctggtcgtgtatgatgtgactgatgagtcatctttcaataacattagaaattggattcgtaatattgaacagcatgcttcggacaatgtcaacaagattctggttggtaataaggctgacatggatgaaagcaaaagggccgtccctacctcaaagggccaagctcttgctgattaatatggcatcaagttctttgagactagtgcaaaaacaaacttaaacgttgaggaggttttcttttcaatagcgcgggatattaagcaaagacttgctgatactgactcgaacgctgagccacagacaattaaaatcaaccaagcagacc

SEQ ID NO: 226277 - DNA, 248 bp, Gossypium hirsutum
cggacgcgtgggggagctggtattgttcgatttactggtgacttagctaagagggctggtcatgttatagcattagacttcattgagaatgctataaagaagaatgaaaccatcaatgggcattataagaacgtcaaattcctctgtgcggatgtcactatcccggatttggcttttacagaaggatcattggacttgattttactaaactggctgttgatgtatctctcagataaagaggttgagaa

SEQ ID NO: 226278 - DNA, 373 bp, Gossypium hirsutum
aataaccggggcttccatttcaaatgcatatcccatttttgcgcagcaggggtatgaaaatccacgagaagcaacttggcgtattgtatgtgccaattgccatttagcgaataaacccgtggatattgaggttccacaagcggtacttcctgatactgtatttgaagcggttgttagaattccttatgatatgcaactgaaacaagttcttgctaatggtaagaaaggggctttgaatgtgggtgctgttcttattttaccagaggggtttgagttagccccgcctgatcgtatttcgcccgagatgaaagaaaagataggcaatctgtcttttcagaactaccgccccactaagaaaaatattcttgtgata

SEQ ID NO: 226279 - DNA, 192 bp, Gossypium hirsutum
cccacgcgtccgctgtctttcatgttggccaggtagccaagatcagcccgggcgtccctattgatgaagggtgtcctattagctgtgggatatgtacaggcttaggggccactgtgaatgtggttaaacccaaaaagggtcaaactgttgcagtacttggtctgattgccgttggtcttgccgcccctgaat

SEQ ID NO: 226280 - DNA, 345 bp, Gossypium hirsutum
ggatggccgtacccttgctgactacaacatccagaaggaatccacactccattgggtcctccgattgaggggtggtatgcaaatttttgtcaagaccctcaccgggaagaccatcacccttgaggtggaaagttctgataccatctacaatgtaaaggccatgatccaagacaaagaatggatcccaccagaccatctgaggcttattttttgtggtaaacagtttgtggatggccgtacccttgcttgctatcacattcagaaggattccactctccatttggttcttccgattgaggggaggtcattcaaaatttttggtaatgtaccctttacttgtaaatg

SEQ ID NO: 226281 - DNA, 387 bp, Gossypium hirsutum
gaaaaatggcttctgcttccgctactctcctcaagtcttcacctattatcgacaagtgcgagtggattaagggccaaaacctccgccacccttcggtttgttttgtacggtcacaccctacatcggccgcctttaccgtccgtgctagttcatatgccgatgagcttgttaagaccgcgaaaactgttgcatctccaggtcgtggtattttggccatggatgaatcaaatgctacatgtgggaagcggcttgcctcgattggtctcgagaatacctaggcaaaccggcaagcttaccgtacccttctcgtgtctgcccctggccttggtaactacatctcgggagctatccttttcgaggagactctctaccaatctaccatcgatg

SEQ ID NO: 226282 - DNA, 387 bp, Gossypium hirsutum
cccagtctttcccgttccttttggttgcgatttcgtcttcaagatctcagttcggaaatcgtagcgctcttttctatcaagccatggctctgatcttgcatgcaggaaaaacaaacaaaaatgcctttaaggcactcattgctgcagaatatagtggtgtgcaggtcaaaatggttgagaattttgagatgggtgtgtcaaataagactcctgagttcatcaagatgaaccctttggggaaggttcctgtgttggaaacacctgagggtccggtatttgagagcaatgccattgctcgttatgttgctcgctcaaaggttaacaaccctatatgtggttctacattgattgattatgggcatatcgagcaatgtattgattttgcag

SEQ ID NO: 226283 - DNA, 323 bp, Gossypium hirsutum
agaaaaaggaaacaaaagatggcatttgagattcctagagtgaaacttggaactgagggatttgaggtttcaaagctgggatttgggtgcatgagtcttacaggtcacgatcattcagtgtcagatgaagatggcatagccatcattaagcatgcagtcgaaagaggagtcactcacatcgatacagccgacctctatggacccaaaactaacgaattcttgtcggaaaggcattgaacatttgccacggagaggtacagtggctacaaattcgtgtgaagcatggtcatatgtcgtataatgcctctgattgtcgtcttact

SEQ ID NO: 226284 - DNA, 271 bp, Gossypium hirsutum
gaaaaaagtcatacgcaatgagcactgccggtcaggttattcgttgcaaagctgcggtggcatgggaggccgggaagccactatctatagaagaagtggaagtggcaccaccccaaaaacatgaagtccgtattaagattctcttcactgctttatgtcacactgatgtatactactgggagtgtaagggttacactcctctgattcctcgtatacttggtcatgaagcctcatggatcgtggagagtgtgggtgagggtgtaaatgattt

SEQ ID NO: 226285 - DNA, 330 bp, Gossypium hirsutum
cccacgcgtccgattggttcttccttacttgaatgagttcctaataaaactcaaggcacttttttctggtgatcctgcaacaacaatgaagctggcagtactactgttagttttggccaggtgtggcagctctataaccatctggaaaatgactaaattgggtttttttggcgttttcattgtcccaaaagtctgctctgcttattcacaccagttaactgcgtacggaaaattttggattcgacggtttcgagatgcgtgggaatcgtgcacccataaaaatgccgtggcaatggccatcttcacactggtttggaaccaatgttcctt

SEQ ID NO: 226286 - DNA, 394 bp, Gossypium hirsutum
cggacgcgtgggcggacgcgtgggtggggttcgaagagaggaccccttgggggatcgctgccatgttcggtagtatcgatgttttgaactacatcgttggtaccagaaaaattgatgtgaatagagcttgtggtgctgatggcgttactgctgttcattgtgccgttgccggtggtgcgagttcttcggttcaggtcattaagctcttgcttgatgcatctgcagatgcttattgtgttgatgctaatgggaacaaactcgtatgatctgattcttctttgttttaaggtgtttgatttattttcatatttatggtttttgatttttttgttttatttattttatttatgatttgttttatattttttatttgtatttttattttatattttta

SEQ ID NO: 226287 - DNA, 355 bp, Gossypium hirsutum
gattttgactgggcatcaagataatgctgaatttgctcttgcaatgtgtccaactgagccttatgtgctctctggagggaaggacaaatcagtggttttgtggagcatccaggaccacataacaacaatggctacagaccctactaaatctcctggatctggcggatcaatcatcaaacaaaacaagcctggggaaggtaatgacaaagctgctgatgggccttctttaggtcctcgtggtgtcttctgtgggcatgaggatacagttgaagatgttacattctgtccatcaagtgcacaagagttttgtagtgtaggtgatgattcctgccttatactatgggatgcaccgagt

SEQ ID NO: 226288 - DNA, 388 bp, Gossypium hirsutum
agataaattattggccttacggtatcgatttccctaaaggacccactggaaggtttactaatggtcgaaccatgcaggatatcattgttcaactactgggtttccaagaatttattcctccttttgccacttcaagaggccaagagattctcaaaggtgttaattatgcatctggttctgctggaattctcaatgatagtggccaacatctgggtgttcgaataagcatgaacatgcagttaagcaaccaccaaagtgttatcttaacaatagttgagatgttgggaaattgtgcagcatcaaaagctttaggcaaatgcatgtatgctgttcaaataggcagcaatgactacattaacaacctatttaagccagagatgtacaacag

SEQ ID NO: 226289 - DNA, 376 bp, Gossypium hirsutum
atcgctgtcgagggtcatcagctatgggctgttggctggcaaaaagcagtctcacagattggacccaattttgtctggtgggtggtagctcagagtgtcttctatcacttatataatcaagtttcatacatgtctctggatcaaatttctcccctgacatttagcattgggaacacaatgaagaggatttcagttatagtgtcgtccatcatcatcttccacacacctgttcagcccattaatgctcttggagctgccattgccatccttggaaccttcctttattcacaggccaaagcattgagaaaggtcaaagaattttaagattttttgtttgactgaccaacaataaaaaagggggctttatgaaatattt

SEQ ID NO: 226290 - DNA, 302 bp, Gossypium hirsutum
gcgggaaaaaaaatgaaaagaatgaaagagagggtctaaaagaaagtgtgaagaaatttgatggaggaacatctcagtccattagctgttactcatctccttcaacacacactaagaagcttgtgcattcatgagaactctcaatgggtttatgcagtcttttggaggatcttacctagaaactatccacctcccaaatgggatggccaaggagcttatgacaggtcaagaggaaacaggagaaactggatattagtttgggaagatggtctctgcaacattgctgcctcagcagcttaaat

SEQ ID NO: 226291 - DNA, 293 bp, Gossypium hirsutum
cccacgcgtccgagtagtagctgctgttgtctataccccgccgactccattccgggggcgtcctcatactacgacgacaatggtggcctctaagaagaccaagaagacccatgagagcattaacaacagattggctctcgttatgaagagtggtaaatacactttgggttacaaaactgttcttaaatctgtcagaaactccaaaggtaagttgattataattgccaacaactgccctcctcttaggaagtcagagattgaatattatgccatgttgtgcaaggttggagttc

SEQ ID NO: 226292 - DNA, 392 bp, Gossypium hirsutum
gcaaaaccgacttggtttgcttgataatgggaagtaccggagagtatgagagccagcgccgggtaccggttcctccttcgaaaccatttctcaagtctttacaagcaagactcaaggagactttctttcctgatgacccttttaggcagttcaagaatcagcctatttccaacaagttcttgctcggattacaatattttgtaccaattattgaatgggctcctctttacactttcgacttctttaaggctgatttgattgccggtatcaccgttgccagccttgccgttcctcaagggataagctatgcaagtttggctagcattccaccaattcttggactttactcaagctttgttccgccgctgctatatgccatgttgggggagctc

SEQ ID NO: 226293 - DNA, 273 bp, Gossypium hirsutum
ctcaaatatcaaatccctcgaaaaatcctccccatccaatcaccacccgaaaccagggccactccttccccacgcgaagaaaatgtctacatggccaaactcgccgagcaagccgagcgctacgaggagatggtcaagttcatggagaacgtcgtctccgccgtccccgctcccgacgaactctccgtcgaggaacgtaacctcctctctgtcgcctacaagaacgtcatcggcgcccgccgtgcttcctggaggatcgtcttctccatcgag

SEQ ID NO: 226294 - DNA, 305 bp, Gossypium hirsutum
ggaggataagaaggatgaggatatttaagttgaggatgtaaatgacgaaaaggagaggttttagaagaaaaagacgaccattaatgagctctcgcatgagtggtcattggtgaataatcaaaagccgattttgatgatcaaaccacatgagataaccaatgaagaatattctgcattctacaagagccttacaaattatttgtattatctattttctgtcaaacacttttcagtttacggtcagcttgagttcaaatgctattcctcttccttacctaaaaaggccaccccttttatcttttttt

SEQ ID NO: 226295 - DNA, 370 bp, Gossypium hirsutum
  unsure (1)..(370): unsure at all n locations
cccacgcgtccgctaacatcaatttcaagggagatcagttcccaaactggttggtgggagaacaacaagaaattagagttactatatctagtcaatagctctctatcgggacattttcagctaccatcgacttctcgtaggggtttatcagggttggatgtttccagtaattccctcgatggcaacatcccaaatgaaatcggagcaaaactaccgtcattgtgggttctcaacatgtcgaataatttttttggcggtggtattccgatttcgattggtgatatgatttcccttcaaatattggacttctccaacaataaattgagtggtggaataccgaggcacttgcccatggngttgtatatattcg

SEQ ID NO: 226296 - DNA, 352 bp, Gossypium hirsutum
tttagttttttttaagctttaaaatctataattgtttacctttttgcttcacttggtgggtaaatctccatggctgccaaggtttttgcatattttgtcgctttggttgctgtcttcagcgtcgccaaatctgaccctgatctcctccaagatatctgcgtagccgatacatcttcaggggtgaaggtgaatggatttgcatgcaagaaggatgccgatgtaacggaaaatgatttcttctttagtggcttagccaagccggcggtggtcaacaactcggtgggatcggtggtgaccggagccaatgttgagaaaatcccagggttgaacaccctttgggtgtcgctttctc

SEQ ID NO: 226297 - DNA, 293 bp, Gossypium hirsutum
  unsure (1)..(293): unsure at all n locations
cgcgtgtcaaaaccgatcatctgcacttcgaaactttggagttttcaggacgagcttagtatggtagccgggcaatggaatcagtttggagaatggatttcgagatgatcatgtctgtcatatccaacactcttgcaattgtcttcgtagtacttcaaatctttcatgtgaggaggctccctgctgtttgtccttcggtttcatttctaatgcttgtcatcctagccctgggacacttgatgcctntggttctaaatctcgaagcaatgttcaatcaagatagtgaaacgact

SEQ ID NO: 226298 - DNA, 349 bp, Gossypium hirsutum
cggatactgtggtacggagaaggtattcatcaattatcttatgtccgtggggaagctaagttctcagatcacagaccggtttatggtatattttgggctgaggttgagtcaagccgtggtcaacttaagaagagcatgagttattctagttcgaggaggattgaggtagaggagcttttgccgtatgcgcatggatacaccgagctaaattttttctaaaggaggttacgacctgcattcaatgtatcctctctttctgtacacacacacacacacacacacacacgtgaatgcctatttatatttgcaaatatttgttatttttaaccattacttaagtgatttctat

SEQ ID NO: 226299 - DNA, 311 bp, Gossypium hirsutum
cgccggtaaggcagtgaagttctccccttccacccctgaaatccggggaactgggcgtgtttccatgaggaaaaccaccaagcctgttccttctggtagcccatggtacggtcctgaccgagttttgtacttgggtccactttccggtgagccaccatcttacttgaccggtgagttccctggtgactatggttgggacactgctggactctcagctgatcccgagacctttgctaggaaccgtgagctcgaagtcattcactgcagatgggccatgtttggagctcttggtgtgttttcctgagctgtgc

SEQ ID NO: 226300 - DNA, 303 bp, Gossypium hirsutum
atttattggagtgtgaatcccctctcttgttaatcaaattacggtttcggcagcacaaatttaccagacatgggaggaggcaatgcccaaaaatccaagatggctcgtgaaaagaatctcgagaaggctaaaaacgcagctaaaggcagccagctggaaacaaacaagaaagctatgacgattcattgcaaggtatgtatgcaaatttttatatgcacaacatcagaggtaaaatgcattgaacacgcacaaaccaaagcattccaaaattccatgtgtacgcctggtttccttcattttaaa

SEQ ID NO: 226301 - DNA, 314 bp, Gossypium hirsutum
  unsure (1)..(314): unsure at all n locations
gcctatagttactactctgctgtttttgactccctggacgccaccctttctagggagagccatgatcggatgaacgtcgaaagacagtgcctggcacgggacatagttaacatcattgcatgcgaaggagaggaaaggatagaacgatacgaagtcgcanggaagtggagggcaaggatgataatggctggcttcaagtcatgtccgatgagttcgaatgtaattgatacaatccagaagcttatcaaggaatactgtgacaggtacaagcttaaggaagatgtgggtgcactttcattttggttggaagacaa

SEQ ID NO: 226302 - DNA, 379 bp, Gossypium hirsutum
ctcatttgatcgccccttttctgttgccggaactgagagtcccagatccgattggaaaaaatgaaggtgatagataagatccagtctttctcacaggaccaagggaaagtggttttttcctttgagttcttccctccaaagactgaggatggagtggacaacctgtttgagagaatggatcgaatggtggctcataatccatctttttgtgacatcacatggggtgctggtggttccactgcggatctcactttggacattgctaacaagatgcaaaacatgatatgtgtggaaacaatgatgcatctcacttgcaccaacatgcctgttgagaaaattgaccatgctcttgagaccattaagtctaatggcattcaaa

SEQ ID NO: 226303 - DNA, 248 bp, Gossypium hirsutum
gaccgatggaagggtcttgcttattatatctccgatgaccaacaagacattaccggagggaaaggtatggtcgactcattgttccaagctcccatgaacgatggtactcactatgctgtcatgagctcctatgagtacattagccaaggccttcgcacatacgacttggacaacaacatggatggattctacattgccccagctttcatggacaagcttgttgttcacatcaccaagaactacatgac

SEQ ID NO: 226304 - DNA, 234 bp, Gossypium hirsutum
  unsure (1)..(234): unsure at all n locations
cgaagttggatgaaccgatcgnatattagccattgatcctggagtaacatgggggggactattgaattggattgagggactgtggtcgagctgtgggaatgaaaggatcattatcttcacgacgaatcacaaagagaagttggaccctgctctgttgcggccagggcgcatggatgtgcatattcatatgggatattgtactccaacaggattcaaaaaacttgcaactacata

SEQ ID NO: 226305 - DNA, 341 bp, Gossypium hirsutum
gtgctccctatcttcaccggagaatgcatagaatgtcgccactgtctgtcagaagaaagcaataacatgtgcgaactgcttaggatcaactgcgaccgaggtgttatgcttgctgatgggaaaaccagattttccatcaacggcaagcctatctaccactttgttggaacctcgacctttagccaatatactgtcgtccatgttggccaggttgccaagatcagtccaaccgcccctcttgataaagtctgtcccattagctgtgggatatgtacaggttttggggccactgtgaatgttgctaaacccaaaaagggtcaaactgttgcagtttttggact

SEQ ID NO: 226306 - DNA, 327 bp, Gossypium hirsutum
cccacgcgtccgcttttgttttcttggacttgattgaattttaaggaaattagaggataaatatggctcttgaagctctgaaatctccaacaatggcgactgccccttacagcaacaagtacgaagacatcgacaacaattacgtcgatacatggaagaaaggcaagcgttcaaagcgacaacgcgacgacgagtcttcttcttcttcgccgccgccgccgccgccgccaccgacgaatgaagaagagtaccttgctctttgtctcatcatgctagctcgtggtggttccaccactgaaaacgccgtgacagacggtggaaacgatg

SEQ ID NO: 226307 - DNA, 311 bp, Gossypium hirsutum
cccacgcgtccgaaagcttcctttttcaaacaacaagttcacttacaactgtgagggccataccttcaattatcttgttgacaatggatacacttattgcgttgttgcagatgaatcagctggaaggcaagtgccgattgcttttttggagcgtatcaaggatgatttcgtgtcgaaatatgataacgggaaggctgctacagctcctgccaacagcctgaacaaggaatttggaccaaaactgaaagaacatatgcaatactgtatggagcatcctgaagaaataagcaagctggctaaagtcaaagctc

SEQ ID NO: 226308 - DNA, 240 bp, Gossypium hirsutum
cccacgcgtccgccaaggtaaatatgccgatcagaaacatagcggttggccggcgcgaagaggctactcaccccgatgctctcaaggctgctttggctgagttcatctcaaccttgatcttcgttttcgctggatcgggctcaggaatggcctttaacaagttgactgacaacggagcaaccaccccggctggtctcgtagccgccgctctagctcatggcttcggtcttttcgtcgctg

SEQ ID NO: 226309 - DNA, 355 bp, Gossypium hirsutum
cggacgcgtggggtgcgaaaaaacataagacaaaatgagttattcaagttcttccgaggttcccttgcttatgcctcttatggttgcctgtcttattatggcagcatcaggtagcaacttccacaacgattttgacatcacatggggagatgggcgtggtaagattgttaacaatggcgaggttctcactctctccctcgataaacaatctggttctggtttccaatccaagaatgagtatctttttggcaagattgatatgcagctcaagcttgtccctggaaactctgccggcactgtcactgcatactatttatcatcaaaaggaacaacgtgggatgaaaattgatttcga

SEQ ID NO: 226310 - DNA, 385 bp, Gossypium hirsutum
aaagcagtggctgtccttagcagcagtgaaggtgttagtggaactgttttcttcgcgtcgggagggagatggcccaactacagtgacgggcaacatttctggtcttaagcctggcctccatgggttccatgttcatgccctaggggacacaacaaatggttgcatgtcaacaggacctcacttcaatcctgctggaaaagagcatggtgctcctgaagatgtgaatcgccatgctggtgatctaggaaatgtcactgttggtgctgatggctctgcgagtttctctattgtcgacaaacagatttctctttcccggccacactccattattggaagagcggtcggtgtccatgctgatccggatgaactttgcaagggggggcac

SEQ ID NO: 226311 - DNA, 300 bp, Gossypium hirsutum
cgcaagggttgatcggtgggtgtattaaaggttctagacggattgtttcacggtggctagtatctattgaatcctgaggcaaccatgttgggagccaatcagttcaaattgcaagctggtttggtagctccgatttccggcattgaatacgataattcttgtggttgttggtgcatgatcgcttgcttacgaactctgagcgacaacgacgacaaatgactgattatggctcttgctttatctgtgggcagcatgaggaaactgtagtccatgttattcgagattgcccagtccgcggtc

SEQ ID NO: 226312 - DNA, 323 bp, Gossypium hirsutum
  unsure (1)..(323): unsure at all n locations
gagatctgagatcagaggtttcagaaagaaacacgacacagaagaatagagggtgggagatcagtgatgggatctggggctggaagtttccttaaggttctatttaagaactttgatgttcttgctgggccagctattagtctgctgtaccctctatatgcctcggttagggcaattgaatcggagtctcgtgccgatgacaggcaatggcttacatattgggttctctattccatgatgacattgctggaacttacttttgccaaagncattgaatggatttctattctggttctattgcaaagcttgattttcaactttgc

SEQ ID NO: 226313 - DNA, 293 bp, Gossypium hirsutum
gtaccattttgcaagaagcataacgtcgagccaagggcaccggagttttatgggggcgagaagatagattacttgaaagacaaggttcatcctagctttgtcaaagaacgtagagccatgaaaagggaatatgaagagtttaaagtaaggatcaatgcactagtggcaaaagctcagaagaaaccagaagaaggatgggtgatgcaagatggcaccccgtggcctggaaataacactcgtgatcatcccgtgatgattcaggtctatctaggtagtgctggggcacttgatgt

SEQ ID NO: 226314 - DNA, 297 bp, Gossypium hirsutum
  unsure (1)..(297): unsure at all n locations
ggcaaaacttacatgtgcaggatctcaaatgttggattatccacttccctcaattttaggatccatggtcataagatgaagctagtcnaggttgaaggatctcacgtaattcagaacttatatgactctcttgatgtacatgttggtcaatccataaccatcttagtaaccttggaccagccaccaaagaactactacattgttgcatccacacgatttactaagactgttctcaccgcaactgcagtgttgcattacgccaactctaacgctccagtttctggaccggttccagct

SEQ ID NO: 226315 - DNA, 263 bp, Gossypium hirsutum
ggattatgttaacagtttgtattatttttggatccatcgattagtgtctagggggggattctacgtgagggctatgaatcatttgccatgtattgctttggaagataccttgttgcttgcttgggtggggaagagcggactattgaatttatggagagactaggatatgcaagttctaaaactccattattgggactcgattgtgaaaagggaactgttaagcaccccttttcttatgaattatatcctaagaccatgtaaac

SEQ ID NO: 226316 - DNA, 322 bp, Gossypium hirsutum
cttggagatgaggtttaccaacagaatatataccaggacgagcgcccctttatcagttctagaaaggtgttgatggatatggggccaccaattagcaaggaagtccagctcgtttctttccacactgtgtctaaaggatattggggtgaatgtgggcagcgagggggatactttgagatgaccaacattcctccaaagacagttgacgagatatacaagattgcatcaatatccctcagtcctaatgttcccgctcagatatttatgggattgatggtcaacccactcaaaccctggagatgttttatatgatcaatttggt

SEQ ID NO: 226317 - DNA, 296 bp, Gossypium hirsutum
cttggagatgaggtttaccaacagaatatataccaggacgagcgccccttggatggttctagaaaggtgttgatggatatggggccaccaattagcaaggaagtccagctcgtttctttccacactgtgtctaaaggatattggggtgaatgtgggcagcgagggggatactttgagatgaccaacattccttcaaagacagttgacgagatatacaagattgcattaatattccctaagtcctaatggttcccgctcaaatattttatggggattgatgggtcaaacccactcaa

SEQ ID NO: 226318 - DNA, 283 bp, Gossypium hirsutum
cccacgcgtccgcccacgcgtccgcttgaatccaaaatataatgagcagtacaccggggaagtttatgatacagccacggttctcacggtgggggtctttgataactctcagattggaggttccgataatagcagagataacaaaatcggaaaggtacggattcgtatatctacactggaaactggtcgtgtttacacacactgttacccgctgctggttcttcacccttctggtgtcaagaaattgggtgaactccatttagcaatacgattttcgtcaaca

SEQ ID NO: 226319 - DNA, 282 bp, Gossypium hirsutum
ctttttcaaacccttctttttctcacacacccccatggctttagctaccaaaatggcggcgctgtttcttcttcttctcgctgtatggtgtttcttcataacaccatcagattcagccaccgattccttcgttttcggtggctgttcgcagcttaaatacacgtctggctcaccttatgagtccaacgtcaactccatactcacttccctggtcaactcagccatgtacacctcttacagtaactttacccttccaggagccagcaatcaggacactgtcta

SEQ ID NO: 226320 - DNA, 275 bp, Gossypium hirsutum
gcataataacatccccaccgtaatcatcctcactctgagagttgtttagagaggggattattggttagagaaatggcaaaattcccagtgatcaacttggagaaactgaatggtgagagagcagcaaccatggatctaatcaaagatgcctgtgagaattggggcttctttgaggtgttgaaccatgggattccctatgaatttatggacagagtggaaagcttgactagggagcattacaagaaatgcatggagcaaatgtttaaggaacttgt

SEQ ID NO: 226321 - DNA, 238 bp, Gossypium hirsutum
  unsure (1)..(238): unsure at all n locations
gggttacactcctctgtttcctcttatacttggtcatgaagcctcanggagcgtggatagtgtgggtgagggtgtgaatgatttgaaacctgcagatcatgtgctccctatcttcaccggacaatgcaaataatgtctcccctgtctttcagaataaagcaattacatttgctaactgcttaccatcaacttctacccatgttttatgctttttgtttgtaaaaccatattttccatt

SEQ ID NO: 226322 - DNA, 294 bp, Gossypium hirsutum
ctgtgtcactgtttagtgcttatttagggtttaaaggcttttaaagcttagatctctggttttctccgcttcccaaattccttctgagtcaaaccacaacgaaggaagaaaacaaagatgacaaccgtcaggagcctcacttccccatctattgttaaagctccaaccccaaaccgatttacaagtcccatcgtcagggccccaacatctcttggatctgttaaaaccatctctagatctttcggcttgaaatgttcctcaaatcaacgaacatcaatggcaatgtacaagatt

SEQ ID NO: 226323 - DNA, 360 bp, Gossypium hirsutum
aaaagtaatctttccaacggaacacctcttggctgtaaattttaccatggaaatggcaaacgccacggagaacggttcggcccatactcagcctcccaccaccaccgcccaaaacccttcagaagcagctccccttaatcctgcaatagagaagtggcccggatggccaggccactgcgtgtttcggctgattgtgccagttttgaaagtggggagcataattggccgcaaaggggagctcatttagaagatgtgcgaggaaacccgcgctcgcattcccgttcttgatggcgctcttggcacttgctgtcccattgtgctaggattctggaaggaagaaccagaggcactttttttccc

SEQ ID NO: 226324 - DNA, 337 bp, Gossypium hirsutum
cccacgcgtccgttccaaactaaaaccaaacaaccagctcaaagcttgcaaccgagggcctttcgccttagcaacaatcttgttggaatcctcaacttcataaccttcctcctctcgatccccatcctcggagccggcatctggcttagtcgagaaggcgtgacggaatgcgaacggtttttggacaagcccgttatccgaatcggagtctttctcatgctcgtctcacttgcgggactaatcggcgcgtgctgtcgcgtcacttggctactctggctttacctagtcggcatgttccttctcatcgtgctcggcattcgcttcaccatctttgctt

SEQ ID NO: 226325 - DNA, 277 bp, Gossypium hirsutum
ggaatcccgggcgagccacctccgcagcttctgtaggggaaaaaaaagatgaagagggtttcctttgttgccttgtgtgtggtggcactgacggtggtgctgttttcaggtgaaagtctcatggcggaggcagtgacatgtaatcccacggagctttccccctgcttgtcggcattcacgtcgttctcgcctccatcagccgcttgttgcagcaagctgaaggcgcaaaagccatgcctttgtggatacattaagaacccaattcttaaacaagatg

SEQ ID NO: 226326 - DNA, 375 bp, Gossypium hirsutum
caatctctggttttgagggtgacaacatgttcgagagaactacaaaccttcattgggtggggggtcctactctcgttgaggctcttgaccagatcaccgagcccaagaggccctcggataagccactccgtcttccacttcaggatgtctacaagattggtggtattggaactgtccctgttggtcgtgttggaaactggtgtcctcaaacccggtttgggtgttacttttggttctactggtctgaccactgaagttaaatcttgttgagatgcaccatgaaatccctccccggaagccttttcctgggtgacaaattttgggtttcaacggtttaaataaccgttttccttgtttaaaggattctttaaaacc

SEQ ID NO: 226327 - DNA, 305 bp, Gossypium hirsutum
  unsure (1)..(305): unsure at all n locations
gngaagatcggatgcaaagagggctctttctctatgatgttactgcctgtgaaaccagggtgattcctggtgaatatggcttcgttgcccagctgaatgagggtcgccaccttaagaagaggccaactgagttccgtgttgataaggttctccagcccttcgatgggaacaagttcaacttcaccaaggttgggcaagaggaggttctcttccagtttgaagcaagtgaagatggtgaagttcagttctacccaagtgctcccattgatgctgagaattctccaagtgttgttgccataaatgtc

SEQ ID NO: 226328 - DNA, 276 bp, Gossypium hirsutum
gaaaaagggaactgaattctttgacggagagaagggttaggcgttatggacgggggtactactgaggctgagcggtggttgacgattgcggagaagctgttggcggcgcgtgatttgcacgggaccagaaccttcgcgatccgagctcgtgaatcggcccctatcctcgccgaccaaatcctagccgtgacggacactctcataacggctcaatctaactctcaagactggtacgggatcctccaactcgtgccgttaactcagtccatggaagtt

SEQ ID NO: 226329 - DNA, 274 bp, Gossypium hirsutum
atcaactttactgtttttgctccaaaaaagtcttaaagctgctggttcaagtggcgcatctccaagtcggaagccaactgctgcaacctctctgtttggaaggatgacaatgggtttccgctcatctccttcttccaacaatcttgctgctgctgctgcacttgcagtagttcgccaagtagaggccaaatatcctgctttacttttcaagcagcaacttgcagcatatgtggaaaaaatctatggaatcattagggacaacttgaagaaagag

SEQ ID NO: 226330 - DNA, 309 bp, Gossypium hirsutum
gcagacactgttatttgttgaagggattaatacacttttacaaacactatgtggagctcgattacctactgttattggagggtcttatgccttcatggttcccattatatcaataatccatgatactactttgctaagcattgaggataaccatatgagatttctatatactatgagagctgtccaaggtgcactaatagtagcatcaagcatacaaattatcttggggtatagtcagatgtgggccatttgcaccaggttctttagcccccttggaatgattccggttattgcactagtcggcttttg

SEQ ID NO: 226331 - DNA, 312 bp, Gossypium hirsutum
  unsure (1)..(312): unsure at all n locations
atcactctgaacaaagtaatcatggcttgcaaagaaccagatcacaccctcaggggcgacactatatttttgttctccttaacctcattttangacacctgctttatcttttaacagatgtgcctccccagccaaacttcccacctgacaatttcttccgcccgtatctgccggcctaagccttccttgttttcaaaaagaggtgccgtgccccgctcttctattcacggaataagtaaaataacgtttaaagttgtggtattataatttctccccaaagctcccacttatcctacaccttttaagtcattt

SEQ ID NO: 226332 - DNA, 415 bp, Gossypium hirsutum
gggggggcccacgcgtccccccacgtttgcgcccacgcttccgaaacattttcagaaaaaaacccaatcccaaaggggctcttcgagagagtaagagagaaatggcccatgctactagaggtatagagaaggaaataggaactttacagttagaggaaaagaaacttgttgctgaaattaaaaaaactgctaaaaccggaaatgaggcagcgactaaaactctagcgcggcagctggtacggcttagacaacagatagctaagttacaaagtagtcgagctcaaatgagaggcattgcaactcatacgcaggcaatgcatgctcaatcttcagttgctgttggcatgaaaggtgccaccaaggccatgtcagccatgaataatcaaatggccccagaaaaacaagcaaaggttat

SEQ ID NO: 226333 - DNA, 387 bp, Gossypium hirsutum
ggcccagacctacgcgttgagagaatctaaccttcggccagtttgtcaagatcaatcctgaggctccgcttgatggagtttgtgttctaagctgcggaatgtccacagggtttggtgccactgtgaatgtagctaaacccaaaaagggtcaatccgttgcaatatttggactaggtgctgacggtcttgctgctgctgaaggagcaagagtttctggggcttccaggatcattggtgtcgatttgaaccctagcagattctaactagccaagaacttcggtgttacggagtttgtgaatctcaaagatcacaacaaacctgttcaagaggttattgctgagatgactggtggaggagtcgaccgtatttttgaatgtaccggtagca

SEQ ID NO: 226334 - DNA, 391 bp, Gossypium hirsutum
atcactctgaacaaagtaatcatggcaagcaaagaaccagatcacgagcacagagaagacgaggatgccgcccccgccgaggaagaagacaccggagctcaaattgcccctatcatcaagctcgaggaagtcgccgtcagcaccggcgaggaaaacgaagatccgatgctcgatctgaagtcgaagctctaccgatttgataaagaaggcaatcaatggaaagagagaggcgctggtactgtgaagctgttgaagcacaaagagactggaaaagttcgccttgttatgaggcaatctaagactctcaagatctgcgccaatcatttagtgttgccgactatgacggtgcaggagcacgcagggaacgacaaatcgtgcctgtggcacgctt

SEQ ID NO: 226335 - DNA, 389 bp, Gossypium hirsutum
gctaaggcttcagcacatatgaagggtggtgccaaaaaagttgtaatttcagctcgttcggcagatgcacctatgtttgtggtgggagtaaatgagaatacctacaatccgagcatggacatagtttctaatgctagttgcactaccaattgtctagctccactggccaaggtggtccatgaggaattcggtatcgtagagggtttaatgacaactgtccacgcaactacagcaactcagaagactgttgatggcccttcaatgaaggactggagaggaggtagaggagctggccaaaatattatccctagttcaactggtgctgcaaaggctgttggaaaagttcttcctgaacttaattgaaagcttactggaatggcattccgtgt

SEQ ID NO: 226336 - DNA, 355 bp, Gossypium hirsutum
attttcccaccctctttcccgaaaaaatttaatctcaaaattttctcgggaaagcgagggtttattacaaacacagctatatagtggagcagtaatcatgagctttcgagatctggaagccggacggccattggtgtcgaggcaaaacctaatcaacggcaagcaagacgccacgcaagcagttgcctttggcattttccagatcaacactgcagtctccacctttcagcggctcgtcaacgccctcggtactcctaaggatacgcctgatcttcgagaaaagctgcataaaacaaggctacatattgggcaattagtgaaggacacttcggctaaacttaaacaggctagtgaa

SEQ ID NO: 226337 - DNA, 383 bp, Gossypium hirsutum
  unsure (1)..(383): unsure at all n locations
gtctctatcagtggggaaccggtccagcgtcttggtgcttacatggtgggagggtgggtggcaaggaaggaagcatcanggtctagcatatatcgtgcccttcattgcagagagcctgaaggcaaggacttgctgtcctacatgcaagtcctgtatgaaatctgcccatacttaaagtttgggcacatggcagccaatggagccattgctgaagcatgccgaaccgaagatcgcattcacattattgatttccagattgctcagggaacacaatggatgactctcttgcaggcacttgcagctagaccaggtggagctcctcatgtccggattacaggaattgatgatcctatttctaaatatgctcggggtggtggattgga

SEQ ID NO: 226338 - DNA, 392 bp, Gossypium hirsutum
gttaaaccctagaaggctcctcgcgaaaacgtcagatggcaactttagctgattcattccttgcggaccttgatgaattatcagacaacgaagccgatgttctggaggaagaaaataatgatctcgcaaacatggaagaagatattgatggtgacctcgcggatatcgaaacgcttaactacgatgatctggacagtgtttccaaattgcaaaaaagtcagagatacattgatattatgcagaaagtggaagatgcgctcgagaagggttctcatatatcaaatcagggcatggtactggaagatgatcctgagtatcagctgattgtggactgtaatggactatcagttgatatcgagaatgagattgttattatccataattttatacgt

SEQ ID NO: 226339 - DNA, 263 bp, Gossypium hirsutum
cgtctacccacacgtccgccgatttttaatgcgtccatgatgattggcgtgtttgtgtgctggggtgtatgtccaaaaaataccctccatacaaaactcaaacaattaatctactaaaacaccagacccttattggtgcctatcatgtcaactataaaccactcactgctaatcctatggttgtctacacatatttaaacactttccatttagctttataatttacaatattcatcacacactcctgttccttttcatctatc

SEQ ID NO: 226340 - DNA, 394 bp, Gossypium hirsutum
catttcgatcactgtttcattgctaaggattattctctttgtggcgaggcccagaacgatggttttaggcaatattccaaactctgggatctatagaagtatggaccaataccaaatcgcgaacagtgttccagggattctcatactgcaaatagacgcccctgttttctttgccaatgcaatctatctaagagaaaggatctcgagatggatttatgaagaggaagacgggttaaaatctgcaggggaagcaagcttacactatgtcatattagatttgagtgcggtaggtagcattgatactagtggaattagcatgctcgaagaactcatgaagaatgtccatagaaaaggtctacagcttgtcttggctaacccgcaaagcgaggtgatg

SEQ ID NO: 226341 - DNA, 348 bp, Gossypium hirsutum
aagcgggagacacagctgtaactgttcgtttcttccactgctacaaacgtggagttgggcgtgtctatggcgatcaccccaatttccttgagaaggtttggtgcgaaacagcattcaaaatctatggccccagagcaggtttggactaccaagacaatcaactgcggatcaccttggtatgccaggctgctttggaggcacctatagttctaaatttaaatggcaggtaaaatttctcacgaccatatggggcagatgttggctctattgcacatgattggctcactgctcttattgcatgctatttaaaaagcaatgtccattgaaggggcttctacatgaatgtca

SEQ ID NO: 226342 - DNA, 371 bp, Gossypium hirsutum
gctattacgtggagagccttttttgtgtagcgattctcagttagtcttttctttagagcttacagcttctctccagagttttataatgggtaaggagaaggttcacatcaaccttgttgtcattggccatgtcgactctggcaagtcgaccactaccggtcatttgatctacaagcttggtggtattgacaagcgtgtgattgagaggttcgagaaggaggctgctgaaatgaacaaaaggtcattcaagtatgcttgggtgcttgacaagcttaaggctgagcgtgaacgtggtatcaccattgatattgcccctggaagtttgagaccaccaaattctattgcaccgttattgatgccccttgacaccg

SEQ ID NO: 226343 - DNA, 391 bp, Gossypium hirsutum
cggacgcgtggggaaccagattttctcagaaaccacaacagaaaaatcgccggcatgcatcggttccttgagcaaagacctagggcattgttgaaaaatgtggcagctattctcttcttcacgatcgcatctgggacattgagtattcaccacgacccgttttattttgaggttgataaaggatggaataaaattccatgaaatcctccatattgtcattttgatctttgacaggatctgcaatttccatagtttgctgtagaaatctttagtttcgatatgtaaaattaaattgttaggatccaaggtagactcatgtaatagtttataggcgctcctaaaggaaaaatcccctgtcagctcccctctccaaacttgaaaatctttatgt

SEQ ID NO: 226344 - DNA, 337 bp, Gossypium hirsutum
gatttggccgaggctgcagtcgctcatgttcttttaattattgcttccaagttcattgagagatttcaacaagacatacccggaaagggagtaaaaagacagttggagatcctatttaatgtatatgctttaagtctgttacacaaacatcttggtgactttgtcgcctccggctgcattaccccaaagcaaggttgcactagcaaatgaacagctttgattattgtactcccaggtccgtccaaatgctattgcacttgtcgatgcattcaactacacttaccactaccttggctctgttcttggtcgctatgatggaaatgtgtattcaaaactt

SEQ ID NO: 226345 - DNA, 373 bp, Gossypium hirsutum
cttttgctctgctctgctcttactttcattcttttcactaagacaaaaaaggaagtagatgtgatgaacaaagttgattcaaagaacttgaaatcatgttggtgggatagtcatctcaatcctgaaaattctgaatggctagctgaaaattcaaaagaaatggacttgaatgttaaacaaataatgaaattggtggaagacaacagtgaagatgtgactaaatccgaggtgattgtccaagttcaagaactctaccgtatttatcgaaatttggccgaacggtttgatcgtttgaccggggaactgtctaaaactcaaggccctgatagtggtttggatcaaatctctccaatggttacacctgataagcctg

SEQ ID NO: 226346 - DNA, 372 bp, Gossypium hirsutum
tcagttaaaccctagattgacatttataaatacgtcggatccttacctttcctacgagtccatctcgccgtagaacccttttgaaggtcatcatcctcggcgatagcgggttagtatgtttctagggtttccagaacggatcttttgattcaaatcataacttgttgtttgtttcgcctgcgattttctttagtttttctttttggttttcaaactaatgtttatgactgcgattgatctgcgatttgcagggtagggaagacgtctctgactaatcaacattttaataagaagtttagcaatcagtataaggcagcaattggggctgattttttgacaaaggaagtgcatgtttgaggattggcttttcac

SEQ ID NO: 226347 - DNA, 392 bp, Gossypium hirsutum
cactgatgtatactactgggagtgtaagggttacactcctctgtttcctcgtatggttggtcatgaagcctcagggatcgtggagagtgtgggtgagggtgtgaatgatttgaaacctggagatcatgtgctccctatcttcaccggagaatgcaaagaatgtcgccactgtctgtcagaagaaagcaataacatgtgcgaactgcttaggatcaactgcgaccgaggtgttatgcttgctgatgggaaaaccagattttccatcaacggcaagcctatctaccactttgttggaacctcgacctttagccaatatactgtcgtccatgttggccaggttgccaagatcagtccaaccgcccctcttgataaagtctgtcccattagctgtg

SEQ ID NO: 226348 - DNA, 388 bp, Gossypium hirsutum
cccacgcgtccgtctcctcctccctcaccaaatcaaaatgtctctggtggcgaacgaagactttcagcacattttgcgtgtgctgaacaccaacgttgatggaaagcagaagatcatgtttgctttgacctccatcaagggtattggaaggcgtttcgctaacattgtttgcaagaaggctgatgtcgacatgaacaagagggctggtgaattgactgcacaggagctggacaatctcatgaccattgttgcaaaccccaggcagtttaagatccctgactggtttttgaataggcagaaggattacaaggatgggaagtattcccaagttgtgtctaatgctctcgacatgaagttgagagatgacttggagcgattgaagaagatc

SEQ ID NO: 226349 - DNA, 209 bp, Gossypium hirsutum
atcgcacgcaatggatttggtaggatcggacgttagtttgctagagtggggctggaaagctatcatattgagctccttgctcttaactctcccttcatcaccactgaatacatgacctacatttttaagtacgacagggttctcggtcaacggatgcatcacgagcttaaggtgaaggactcagagaccctgctctttggggataagcc

SEQ ID NO: 226350 - DNA, 389 bp, Gossypium hirsutum
gcctcttcatccatatagactttttgttactgaaacatttaaagacttgccttctgctgctgtaagtctcatggacaccttgctttcaatcgatcctgttcatcgaagaactgcagcttttgctctgaagagtgagttctttacaacacaaccttttgcatgtgatccttcaagtttacccaaatatcctcctagtaaggagattgacgctaaattgcgggacaaagaagctagaaggcaaagagcagttgggagcaggggttcaagggttgacatggaaaggagggggcagaaggaaccaatttctaatgctgaacagaccgcatcatcgcagagaagacaacctcatcctaattttgaagagcaggagttagatgttgaactctcgt

SEQ ID NO: 226351 - DNA, 392 bp, Gossypium hirsutum
attaaaacatctttgggatatgatcaaacaaccctcaatcttttaagcttttccagggacttgggtggcaacgttgggatcctatcggggctcatcaatgaggttacgccgccgtgggtgattctcttgatcggggccgtcatgaatttcttcggatatttcatgatatggctcgccgtcaccggccgcaccgctaagccccatgtgtggcaaatgtgcgtttatttctgcttaggtgccaattcccaggcctttgccaatactggggctctggtcacttgtgtcaagaacttccctgaaagcaggggaagtgttttaggccttttgaaatcttatgtaggtctaagtggtgcaatattgacgcagttataccatgctttctacggggacaa

SEQ ID NO: 226352 - DNA, 320 bp, Gossypium hirsutum
  unsure (1)..(320): unsure at all n locations
cccacgcgtncgattctttgctcttagctatgatgttattcaaaaaccgcatctcaagtagtttaaaatttcacccgatggtaagaaatcacccgatgttgaaatcccagttgatggtccaaccatgatgcatgatttcgccatcactgaaaattttgtggtgataccagaccaacaagttgttttcaaattgggtgaaatgattcatggtggttcacccgttgtgtatgataagaacaaggtatcaaggttcggtgtattgaacaagaatgccattgatgcttttgggattaaatggattgaaccacctgtttgctttt

SEQ ID NO: 226353 - DNA, 392 bp, Gossypium hirsutum
aacgatctttgcttttgaatcagtttcagccgtccgattgcaagctattaactcggtagtgcgactcagcgagtcagtcctgtcgttgttgacggatttcgagtctacaatccataaggactcctccaaatcgatgactccaggcagtggtctgcatcgtttaacgatgtactcgatggattacctcactctccttgccgattattgtaacatcctcactgacattatctcggactggccaccaccagcgaagtcatcgttaccggaatctttcttcaacagtccggtttccgacgattctccgaggcctgcgatctccgtccgcatagcgtggctaatcctcgtcctactctgcaaactcgactgcaaatcaaagcattacaaagacgtct

SEQ ID NO: 226354 - DNA, 387 bp, Gossypium hirsutum
cacgtttcttaagcaatcagcaaatgagattcctaaaacaattggtgtaggtgtaccaatgagagcaactttctttattacttatatcatggttgatggatgggctggaatagcagcagagattttgatgctgaaaccgcttataatttaccacttgaagaatactttcttggtgaaaacagaaaaggacagggaagaggcaatgaatccaggaagtttgagcttcaacgttggagaacctcgtatacaactctattttctacttggcatggtttatgctaccgtgacacctgttctacttccattcattgtagttttcttcgggctagcttatgttgtcttccgtcatcagatcatcaatgtttacaatcaagagtatgaaagtgc

SEQ ID NO: 226355 - DNA, 388 bp, Gossypium hirsutum
cggacgcgtgggcaaatatttattacagtaaaaaaaatggcaacaaacgctgggggtctgatttgtttattgatcatagctttggatattactgctgggatacttggcattgaggctgaaaaagctgaaaacaaggctatgcatttgggggcggggcatgttgagtgtagaaacaccagttctcaagcttacaggctaggttttgcagcattggtactacttagccttgctcatgttattgggaccttacttggtgggtgtgtctgtatttggagaaagggaaattcaaacaaagcatctgtcatcaaatatttagcggtggctttccttattatctcatggatcatattagtggtgggattaataatgctgattatagggacattgt

SEQ ID NO: 226356 - DNA, 393 bp, Gossypium hirsutum
ctcttctacattcagcgaaggggtgctctgagatcacataccaaaatggtgaaggccgttgccgtccttggcagcaatgaaggtgttagcggaactgttttcttctcccaagaaggagatggtccaactaccgtgactgggaacctttctggtcttaagccgggactccatggcttccatgttcatgcccttggggacacaactaacgggtgcatgtcaactggaccccattttaatcctgctggcaaagagcatggtgctccagaagatgagaaccgccatgctggtgatctagggaatgtcactgttggtgatgatggctgtgcaagcttctccatcaccgacaaacagattcctctcacaggcccaaactccattatcggaagagctgta

SEQ ID NO: 226357 - DNA, 357 bp, Gossypium hirsutum
cccacgcgtccggtgccttgagggctcgggtttacgatgacgaagtgaggaaatggatcagtgaggtcggagtcgcaagcgtagggaagaagttagtgaactcaagggaaggacctccaacatttgagcagccaaaaatgaccattgaaaagctattggaatatggaaacatgcttgttgctgagcaagagaatgttaagagagtccaattggctgacaaatacttgagtgaagctgccctcggtgaagctaatgaagattccatcaatagaggaactttctatggcaaagcagcacaacaaggttgggttccagttccccgaaggtgcactgatccaaatgctgataactttgatc

SEQ ID NO: 226358 - DNA, 397 bp, Gossypium hirsutum
agcgcttatgggagctaggaacttgactaaggatcaatatgcggccaatcatcctgctggtcggattgggaaaagccttatttttaaggtaaaagatgtaatgaagaagcaagatgagcttccagtttgcaaggaaggagatttgataatggagcagctggtggagcttactaggaaaggatgtgggtgtttgctggttatagatgaggaatatcacttgcttggcacatttacagatggtgatttgcggcgtacgcttaaggctagcggagaagccatattcaagctcacagtcggtgaaatgtgcaacaggaaaccaagaaccattcgtccggatgcgatggcagtggaagccatgcaaaagatggaatcaccaccatctgctgtacaatttctg

SEQ ID NO: 226359 - DNA, 396 bp, Gossypium hirsutum
cttccgttattcttcccaaggtttttatcaatttaaggcaggggttaagggctaaaatggggctgagtgaccagcacattgttgctctttctggtggccacactctgggaaggtgccacaaggagaggtccgggtttgagggaccatggactaccaaccctctcatctttgacaactcttacttcaaggagcttttgtcgggagagaaggaaggccttcttcaactaccaactgacaaagttctcctgtcagatcctgttttccgtccattggttgaaaaatatgctgccgatgaggatgccttctttgctgactacaccgaagctcacctgaagctctctgagctaggatttgctgatgcataagctgatggttgcggaatagaatgaagccaac

SEQ ID NO: 226360 - DNA, 205 bp, Gossypium hirsutum
aaatcaccaaaaaaccctttgaaccctcatctatgatggccaattgttatcctcgccatttcaagaatatatcttgctgttagacatacctttctgatattatgcccaatgatgtcaattcttctgttttcaccatcaattcccacacaactatttaattccttaacttgttccctactcgcttcaagtttatttataactacca

SEQ ID NO: 226361 - DNA, 376 bp, Gossypium hirsutum
attacggattgtcgaaaactggccccacattgtttaatactcatgtaagcactgttgggaagggtagctttggctattgggatcctgagtatttcagaaggcaacagttaactgataagtccgatgtttactcatttggggtcgtcctttttgaaatcctttgtgcccgtccagcattgaatcctacgctgccaaaggagcaagtgagccttgcagagtgggctgcacattgtcacaagaaaggcatccttgatcagataatggatccgtatctgaaagggaagatagcgccggaatgcttcaaaaagtttgctgagactgcaatgaattgtgtagcctgatcacggaatcgacagaccgttcatgggtgatgtgc

SEQ ID NO: 226362 - DNA, 371 bp, Gossypium hirsutum
gttttgtttctctttagtttactttttttttgtccttttggattttttgaggctgaaaaagggaagcaaagaagaagggaaatggagggcaaagaagaggatgttagattgggagccaacaagttcacagagaggcaaccaattgggaccgcggctcatactcaagatgacgggaaagactattctgaaccaccaccggctccatttttcgagcctggcgagttaacctcatggtcctttttatagggctgggattgccgagtttgtggcgacttttcttttcttgtatatgactattttgactgttatgggagttgttaaggaaaaaactaagtgcccaactgttgggattaaaggatttgtttgtgctt

SEQ ID NO: 226363 - DNA, 393 bp, Gossypium hirsutum
caaaatgcgcgagtgtttgatgctagaaaacgaagacttgaagaagcgaatggaacagctccaggaagatagatgcgccgatgctgaagaactagtgtatctccgatggataaacgcttgcttgcggtatgagctgagaaattttacacccattcctggtaaaacagttgctaaagacctaaacaaaagtttaagccataagtcggaggagaaagccaaacaactaatacttgaatacgctcgcgctgaaggaatggatagcatggattttgattgtgatcaatggtcctgctcccaagccttctatagtaccgacaacggagaagcagatgatttttcattcgggaattcatccgctaagaaaaccccgaattcaagaaggattaagttttt

SEQ ID NO: 226364 - DNA, 295 bp, Gossypium hirsutum
cccacgcgtccgatcttgtttaaaatataagaaaaaaatcatacgcaatgagcactgctggtcaggttattcgttgcaaagctgcggtggcatgggaggcggggaagccactatcgatagaagaagtggaagtggcaccaccccaaaagcatgaagtccgtattaagattctcttcactgctttatgtcacactgatgtatactactgggagtgtaagggttacactcctctgtttcctcgtatacttggtcatgaagcctcagggatcgtggagagtgtgggtgagggtgtgaa

SEQ ID NO: 226365 - DNA, 395 bp, Gossypium hirsutum
gacgaggttgcagagcaggctttcacaatgagtgctcagataaatgttttatggggtgccattctttacgaacgctcgatcatggaattcaaactagggttacctctttggcaagaatgtttggaagtggctgttgagaaatttgaacttgctggagcttcaactatggatatagccgttatggtaaagaaccattgctcaaataacaacgcaccggaaggtttagggtttacaattgatgagataatgcaggcatggaatgagacttacgaagccaaaaagtggcagagcagaattccttcattccgactagaaccattagttcaacggcaagtttcgaaaaattatcatgcatgagttgcttgctgtttcgaagtgagatttataatcccaag

SEQ ID NO: 226366 - DNA, 391 bp, Gossypium hirsutum
gggagccattccttttaattactgtgttaatttagttcagctcctgtaaatgtacctgaggtatatctacaaagcatttcctgattatcattttttaatgatttagcttttaaaacaccagaccaatattcttggctagcatctgtttcaagtatcattaaatcctcatcctgtggttggtataacgttggaaaatctttcaatttgttttttattttccttatgtaggcggtatcctcttgggtccattgccatacataatcttttttgagtttcttttggagtggcttcctgatttcagccaacttagctatatagcactctgcgtacgtcaagcaacccaaaaatctttgtaattgttttttatcacatattttctctgggaatttat

SEQ ID NO: 226367 - DNA, 377 bp, Gossypium hirsutum
ttcttttaggttgtcagggaatggtgggtttgaagctctgtttaatgggggtcgcgggaattggctttacaagaggtaatgctggaaattatttcataggtccaggattagaagaattgtttgaacagctgtcagctaatgatcgtaggggccctcccccagcaactcgatcttcaattgatgcaatgcccactgttaagattactcggaggcatcttcattcttactcgcactgccctgtatgcaaagataaatttgaattggtgtctgaagcaagacaaatgccatgtaaccatttatatcattcggattgcattatcccatggctgttgcaacacaactcgtgccctgtttgccgtcaagaattgccaccacat

SEQ ID NO: 226368 - DNA, 386 bp, Gossypium hirsutum
gtaagaagctgttcaaaatgaaggtcaaaccgtacattccggatttcaagctagcttttgagcatttctgcattcatgccggaggaagagccgttttggatgaactggagaagaatttgcagctgtcagaatggcacatggaaccatcgagaatgactctctaccggttcgggaacacctcaagcagttctctttggtacgaattagcttactccgaagctaagggtagaattagaaggggtgacagaacatggcaaatagcatttggttcaggattcaagtgtaacagtgcagtttggaaagctttgaggacgataaatccggcaaaggagaaaaacccatggatggatgagatccataatttcccaagtgatgtttcaagggtc

SEQ ID NO: 226369 - DNA, 298 bp, Gossypium hirsutum
cactatgcttctgcgacctcttcctcaacatcgatcaaagcgagaactcggaggatcctgttccccaatgagcccccaaagaagatctagatgtattccactaacttatacactacttgcacctctctctgtattctaagattgggtctaactcacatgacgcgtactcctattgacctcctcaagcataatatgcaaactgaccctgcaaagtacaaaagtatttcatcacggattcggtgttctattcaacgagcaaggagtgatgggcttaatgcacagacacatggctaccctt

SEQ ID NO: 226370 - DNA, 396 bp, Gossypium hirsutum
aaaagtgatctatttagattcagacaccattgttgtagatgacatccaagagctatggaacataaatctgactggttccagaacaattggggcacccgagtactgcaatgcaaactttgacaagtatttcacaagtgatttctggtcaagcccaggattttcaaaggtatttgaaggcaaaagagcttgttatttcaacacaggtgtgatggttatggatttggggagatggagacaaggtgattacacaagggagattgagaaatggatgagagttcagaaagataaaaggatttatgaactgggttctctgccaccatttttgttggtttttggtggagatattgaagccatagatcataggtggaatcagcatggtcttggtggggataattt

SEQ ID NO: 226371 - DNA, 389 bp, Gossypium hirsutum
caagtagtggagaggtaaaagagacagaaaaatgggagaccaaacatcaagtgctggagctttgtctgatgtgttgaacaaagcgaagccatacttggctatcatatctctgcagtttggatatgccgggatgtacatcctctccaccatttgcatgaagcatggcatgagtaatttcatcctcgctacctaccgtcatgttgtcgccaccattgtcattgcaccctttgcctttgtccttgaaaggaaaattaggccaaagatgaccctgcctatcttcctcaggattgtggttcttggcttcctggagccagtgcttgaccaaaacttatactatctgggaatgaagttcacaacagcaacatattcatctgctttcgtcaacatgc

SEQ ID NO: 226372 - DNA, 387 bp, Gossypium hirsutum
tgacctcaacggtttgggcatgcaactttcctatctcaggcagtgggcttaatgccaagaccccctcagtgccttcagttgcttccccagttttgcctggtggtcacaagttgccaatgatcagtgcccaacaacagggtaaagtttcaggttccaaagaatcaagtggcaatgaaggaagaagagctgctatgctgtatttggcagctacccttttcaccacagcggctgcttcttctgcaaatgctggggtcattgatgattaccttgaaaagagcaaagctaacaaggagttgaatgacaagaaaaggttggccacaagtggagcaaacttttgaagagcatacactgttcaatttgcacctgcagttccctgagaacttacag

SEQ ID NO: 226373 - DNA, 395 bp, Gossypium hirsutum
  unsure (1)..(395): unsure at all n locations
cccacgcgtccgagaggtctcactaaatgggtacctccaccagtaaagatgacaagtggcggtgtcagggagaacattgatgtctcacgcaagaggatggatgtgccttcattggatatgcttcagtttcactggtgggattattcgaatcctggctaccttgatgctctaaaaaaccttactgatctgaaagaggaaggtaaaattaaaactgttgctttgacaaattttgatacggaaaggctgcaaataatactagagaatggaattcctgttgttagtaatcaggtgcaacattcaattgttgacatgcgcccccagcagaaaatggcagagctctgtcagcttacaggagttaaattgataacgnttctctctctctctctctctatata

SEQ ID NO: 226374 - DNA, 396 bp, Gossypium hirsutum
gtggggcttctcggatcatcgctgttgatgtgaaccccagaagatttgaagaagctgagaggtttgggattacagaatttgtgaatccaaaagactacgacaagccagttcaagaggtgattgtggagatgaccggcggaggagtggatcgcagtgtggagtgtacagggagcgtccaagccatgatttccgcttttgaatgcgtccatgatggttggggtgtttgtgtgctggtgggtgtgccaaagaaagacgatgcattcaaaactcatccaatgaatctactaagtgagaggacccttaagggtgctttttatggcaactataaaccacgcactgattttcccatggttgtcgacaaatatttgaacaaggagctggggctggatatggaca

SEQ ID NO: 226375 - DNA, 398 bp, Gossypium hirsutum
aatggtgaaggcatattactatcacttgactcacacaaaccagtaccagctccatgtttaaccaaaacttaccaacttgtcgacgatcccaccaccgatcacattgtttcatggggtgaagatgatactacttttgttgtatggcggccacccgagtttgctcgtgatcttcttcctaattacttcaagcacaataatttctctagctttgtgagacaactcaacacttatggttttaggaagattgtaccggatagatgggaatttgccaatgagtacttcaagaaaggtgaaaaacacttgctttgtgagatccatagaaggaaaacagctcagccacaagtgacggcagcgttaaaccactacaaccaccaccaccgtcatttacacacacagtc

SEQ ID NO: 226376 - DNA, 393 bp, Gossypium hirsutum
cccacgcgtccgcccacgcgtccgcccacgcgtccgcggacgcgtgggctcaactgcacgcaaatggccctctttctttgcgtcttattccttctcctttcctctgcttctgcttgtgatcgctgcctgcaccagtccaaggctgcttatttctccaaagcctctgctctttcagcgggagcttgtggatacggttccttggctttaggtttaagtggtggacaccttgctgctggtgtttcttctctttacaaagatggagccggttgcggtgcctgcttccagataaggtgcaagaattcaactctgtgcagcagtgaagggactaggatcacactaactgatctcaatcataataatgaaacggaatttgttcttagcagcagagcattc

SEQ ID NO: 226377 - DNA, 239 bp, Gossypium hirsutum
gttctttaccatctgctcgtagcttcttatttcgtttagttagaatggaggttgtattttcgtatgggggcttcgattttgtctgatttcggagccgagatcctgatcccggtttgcgccgagatagggattgccttttcgctcgtacaaagggttctagtttccaaatagaagctttctccgggccgggattcggagaactaaggttcgggcgccaaaaacgggtactccgattacct

SEQ ID NO: 226378 - DNA, 177 bp, Gossypium hirsutum
  unsure (1)..(177): unsure at all n locations
tccttctttcccaagccaattccctttctttagattcccaagncatagaatgcgttgttggcttaccagnaattctcctcaaaaggccaggctccgacctttcccttccttctatcctcttaaactctcacatggacgagggtccattcgaaccttcgaaaatgacccatccgcctc

SEQ ID NO: 226379 - DNA, 285 bp, Gossypium hirsutum
  unsure (1)..(285): unsure at all n locations
gctgaaaaagaacagctttcatttttccctgccatagaggnncctggaatctagtactctgatgatatgnagctccanactcnnatattctcctacgctgatacccagatgcacagactagggccaaactatctgcaactcccagccaatgctcccaagtgagctcatcacaacaatcaccacgaaagntntatgaatttcatgcacagggatgaagagataaattacttcccttcaaaggacgatcctgttcgncatgcagagatgttccctatcccacctgct

SEQ ID NO: 226380 - DNA, 383 bp, Gossypium hirsutum
  unsure (1)..(383): unsure at all n locations
caaagctgagttagtgaattgtgtgtataaagagtgagaaagaccctcacactggctgtctccgacctagcgagagccgagcggcccctcccataaagctgcgtcgagcataggggctcttgccccgacccatagcagctgcaagggctcgatccttttccactgatctgcccgccgctcacactgccgatgccacctttatggaggccaggaacaaagtcatgcccaacatggatcctcctaagacccctctatctttcatgcaccctcgcccgcctaccccttcctccattcctcccaaactcactggcaatttcgntcttccttatgcttctgagttagccaccaaagatggaacatttgggntcctttttttccctaat

SEQ ID NO: 226381 - DNA, 289 bp, Gossypium hirsutum
  unsure (1)..(289): unsure at all n locations
tttttctttttatttaannataaactatgtatgtatgtgtactgnacataaccgnacccagcgtttnccggagtccaatttcacttgacgagatgatatctccggttagcctttgtacgggcgttaccttcgatcgttcctgcatccttttatggctcgtatctggtcacgacacctgtccagccaccatgcaagttcttccctccatggatttcatccctaaccttactctccatagnctaattaatctctggatccagncttcttctctccggcctggctcttactc

SEQ ID NO: 226382 - DNA, 278 bp, Gossypium hirsutum
  unsure (1)..(278): unsure at all n locations
gaggcacttcaaagcagcatgaggctaaagactatgcgaaaagactattgataggctacgatgaggctgcaaaggaggncgaaacatcgcttgcctctataacaaggtcctcttcaaatacagacagagggaacaaagagaccaagtttcagcagtgcctgcttctgaatataagttattgtccttcgtcagatgtagatctgtcatgcggaaaaaatctggaggttgttgtctacaatccttagggatggaaaagggaggatattatacgaatcccg

SEQ ID NO: 226383 - DNA, 148 bp, Gossypium hirsutum
  unsure (1)..(148): unsure at all n locations
ccccaccaccaannactacttgccaatactggcataagtcactaaaccccaagaagcttattgaagttggcttttctaggctagggcctaagatgacgatgagccgaaccattaaactttacaaggnacctgatcaaccagccacccc

SEQ ID NO: 226384 - DNA, 232 bp, Gossypium hirsutum
  unsure (1)..(232): unsure at all n locations
tccggtttgattgttattttgtgatttttatttccttgctttctttgggccgtttcggtatgcatgtactacaccgaagtcaaatgaccgacaactttccgggaatctctgccctccgatctatctatgatgctattccggtcaccgtcattgattatctcctatccgnttattttctgcaccctggcctcctgtctcggctcttccttgccactttcggccgccttttctt

SEQ ID NO: 226385 - DNA, 227 bp, Gossypium hirsutum
  unsure (1)..(227): unsure at all n locations
cgtccgcccacgcgtccgcccacgcttccgttgaattgtccgttggcggactggacaaagctagctgttgtgtccgcaagaggattgtcgaccanggcagngncactcatatgccctctagggggaagactaggctttcgatactcggagttnttgactaggccggntagaacccaaagcccccagagttctggctgcttccttctttccttcctatgcatcctgct

SEQ ID NO: 226386 - DNA, 272 bp, Gossypium hirsutum
  unsure (1)..(272): unsure at all n locations
ctagctctggttagagtcttttatccatataatcgatgagctctttttgatgtgctggtcgncatttatgcccttacatcaggcattgctgggtacactgcatcttctttctattgccagctagaaagaacaaatagggagagaaacttattactaaccggaatctagnttagcagacctctttttgtcacattttgctttcttaatactgncgcaattgcttataaatccacatcagcattgccattaggaaccatagaggagatttttct

SEQ ID NO: 226387 - DNA, 324 bp, Gossypium hirsutum
cccacgcgtccgatttatagctgctcagctggaggccacttagatagttgtctacgctaattggcgttttgcaaagatacaaggcatgggttggggatgggctgctgtattctggctttacagtttggtcacttatattccacttgatcttataaaatttgcaatccgctatgtccttagaggaaatgctagggacaacctttaggagaacaagaccgccttcactacaaataaagattatggaaaagatgaaagagaagcactatgggcagctgctcagagaactctgcatgggcttcaaccacctgaaacctcaaacgtctt

SEQ ID NO: 226388 - DNA, 199 bp, Gossypium hirsutum
  unsure (1)..(199): unsure at all n locations
aaaaaacaccctttagtttatactcaaagccagagtatccacgcgcgttggatggtcccatgtcaagacactcccgcggcgagaatccgntactctgctttgctcaaagtccctcgggagttatccgccgttatgtccgcccgccatgtcgataggatgtcaccggtttccggagaatgacattcgcatttgttgcccg

SEQ ID NO: 226389 - DNA, 359 bp, Gossypium hirsutum
gtgattttggttattcaaagtcatttctactgcattcaagacccaagtcagactgttggaactccagcatatattgcaccagaagttctttctcggagagaatatgatggcaagatggcagatgtatggtcttgtggagcgactctttacgttatgttggttggtgcatacccatttgaggaccaagaggatcctaagaactttaggaaaactattagtaggataatgtcaattcaatacaaaatcccagactatgttcacatatcccaagattgcagacacctcctttctcgcatatttgttgctagcccctccaggaggatcagcatcaaagatatcaagagccatccgtggttttt

SEQ ID NO: 226390 - DNA, 333 bp, Gossypium hirsutum
tcgtgggtttatcttctctttttgcgagggtctgttgactacccccatttgcctttcattaacccagcttttcaattttcttctctgttttttttctcatcatggaagaggcaaaggtgttggaagctaaagaaggaaccatttccgttgcctctgcttttcctggtcatcaagaagctgtacaggatagagatcacaaattcttaacacaagcaattggagaagcgtataaaggggttgaatgtaaagatggagggccgtttggtgcagttgtcgttcgcaatgacgaagtcgttgtgagttgtcacaacatggttttgagaaacactgacc

SEQ ID NO: 226391 - DNA, 359 bp, Gossypium hirsutum
ccattcaattcatttcttcttctgtgtttttttgggttaattcttttattcatgatgggctgttcgccaccttggaacttgtaaccttcttgttgtgcaattaaatcttattcacagtcagagacatcacataatgatgtgtaaaggatggagcttttggcaaggatatgttgtcctgtttgctcttgctgttgttgttaaggctgagagtccttacaggttcttcgactggaatgttacttacggtgatattttcccacttggggttcgccagcagggcctgatatctattctgttaccaatgacaatctcattattaacgtccagaacaacctggatgaaccttttcttctatcatg

SEQ ID NO: 226392 - DNA, 344 bp, Gossypium hirsutum
gtgtaattgcatatccggccatactttttaatgacataccgaacatggcttcgggtgatgtacagtaccagtgcttcatatgaggaatcgaatggaccataaaccacacgccttttgaagaagcctaaagggcttacggagagatcagtgcattgagctatcattaacgaacgtgagactggacgatccagaggctatggcttacatactctgcgtgatgagaaatcgatgagagatgctattgaaggaatgaacggccagagtattgatggacggaatataaccgacaacggaccacaatctcgtcaaatccaacacctaagtggtggaagaagatttggagg

SEQ ID NO: 226393 - DNA, 358 bp, Gossypium hirsutum
cccacgcgtccgcccacgcgttcgtttacgcgtggggccgttcgtagctgattgtcagttttcgttatttttcttctttgttctttacattcttttcgtctacacaacagatagttagtaatggccggtaaaggagaaggtccagctatcggtatcgatctcggtacaacttattcttgcgttggtgtttggcaacatgaccgtgttgaaatcatcgctaacgatcaaggtaacagaacgacgccgtcttatgttggttttactgataccgagcgtttgatcggagatgcagcaaagaaccaggttgcaatgaacccgattaacaccgtcttcgatgctaagaggttgattggtcgta

SEQ ID NO: 226394 - DNA, 362 bp, Gossypium hirsutum
caggtccttggagaaagatgcttttatccaaggatgtaaactttgtcggttacgcatacaagaactttgaaattgtagatgacaatcaattacctggcattgcggagttgaagaagaagagctcaaagcccaagagaccctccatcaaatccctttttgaggacgagtccgccgcagctgccagtcaacctgttcaagggagtttcataaacctcttgccgccgcaacatgaagccccagagaatcattatagaaaatgacctgactcactttagtggtatccatgggataatagctatcgccctggaaatccaaagataacaaagctttaatattatctggtaagtagcttttgttttttg

SEQ ID NO: 226395 - DNA, 389 bp, Gossypium hirsutum
  unsure (1)..(389): unsure at all n locations
ccgggtcggacccacgcggtccgcttttccttaagggttgggggaatattttttatcaaaaaaaatgtcttggcagtaaaatacaggttttaatttacatanttccttgacattgttctatagcggttagcacatagcttctggctatttatttatttattattgacatgctcaatatctatttgcatattgttctttgataggcagtccatcaagaagcttttacatacttggatggtcagaaggaatttgctcagatagaccctaatgatttatatccttatcttcttgttaacatcgggtctggtgttagcatgataaaggtggatggagatggcaagtttgagcgagttagtggaactagccttggaggtggcaccttttggggt

SEQ ID NO: 226396 - DNA, 360 bp, Gossypium hirsutum
ggaaaacaagaaaagcagagccgcatcactttttgctagctaagctactgtgggagttattgttcttcagaacagcttctgcagtagctaataataacgttatatattatataaattttatacatcctttttaccctacgactccatatataagcaagtaaaaataaatatggctcgctctgtttcttcctttaagttccttggtgcttctgtttttgatgctctttatgtctccatatcaaggagaggttactcaggtgcaccgccggcggcagtgacggctagctttggtaggcctggagcgatggggaaagtggaacgaagatatgcgatgaaagagtcgtcgtcgtcggagacaag

SEQ ID NO: 226397 - DNA, 363 bp, Gossypium hirsutum
  unsure (1)..(363): unsure at all n locations
tcgcccacgcgtncgcggacgcgtgggtttcaaccaaaaaattcaaaaaaaaaattctaaagaagtgatggggtttccggcaaatggctcatcggacaaaccattgaagttcctgatctacggtcgaaccggttggatcggtggtttgttaggcaaactctgcgaatcccagggaatcgattacgagtacggctccggccgtttggagaaccggatttcacttgagtccgacatagccaacgtgaaaccgacccatgtattcaatgccgccggtgtcaccggtcgtccgaacgtcgattggtgcgaatcccataaggtcgagaccatcagaaccaatgtggtcgggacccttaccctcgctga

SEQ ID NO: 226398 - DNA, 356 bp, Gossypium hirsutum
cagccacaccagttgttcaaccacttactccaattcctacagcagctccaccaggacatcatccaccatcgttaccgcagcaaaagtcacatttgcaccatcaacagcagcaacaagctcaaaatacccaacttgttgtgaagcataatcaacagcaggagcctataccttcggaagtgataatggctatcccggagcaaaaggtgccaccacaggaaattggtgggagcgagggcattaagcctgcatcgtctagatggcctaaagccgaggttctagcacttataaacctaaggagtgggcttgaaaccagatatcaagaggctgggcccaagggtcctctttgggaagaaatc

SEQ ID NO: 226399 - DNA, 357 bp, Gossypium hirsutum
gtggtgaggtcctggacctctcatggtcaaagaataagcatattctatcatccgctgttgataagacagtacgattgtggcaagttggatatgaagaatgcctaaaagtattttctcacaataattatgtaacatgcgttcagtttaatccagtggatgatgattacttcataagtggttccttagatgggaaagtgcgtatctgggcaattcctggtcgtcaagttgttgattggactgacatgacagatattgttacagctgtgtgttaccgtcccaatggaaagggtgcagttgttggctcaatgaatggcaattgccacttttatgatgcatcagataactgtctgcaactta

SEQ ID NO: 226400 - DNA, 362 bp, Gossypium hirsutum
ccgacaaattaaaccatgttgttggtattttccacacaaattacttggaatatagtaagagggagaagaatggtgctctacaagcttttcttgtgaaacacatcaacaattgggtcaccagagcgtattgccacaaggttcttcgtctttctggtgcaactcaggatctaccaaaatccgtgatttgcaatgttcatggagtaaatccaaagtttttgaaaattggggagaaagttgctgaagaaagggagcttgggcagcaagccttttctaaaggagcatacttcttaggcaagatggtctgggcaaaaggatacaaagagttgatagatttgctggcaaagcacaagaatgatcttgat

SEQ ID NO: 226401 - DNA, 355 bp, Gossypium hirsutum
ggcacctgcccctggctaaggcctatggtaaaacccaggttactgttgagtactacaatgacaagggtgccatggttcccgttcgtgttcacactgtcctcatttccacccaacatgacgaaactgttacaaatgatgaaattgctgctgacctcaaagagcatgttatcaagcctgtcatccctgaaaagtacctagatgagaaaacaatcttccaccttaacccatctggccgctttgtcattggtggtcctcacggtgatgcaggtctcactggtcgtaagatcattattgacacctatggtggctggggagcccatggtggtggtgctttctctggaaaggaccctaccaa

SEQ ID NO: 226402 - DNA, 360 bp, Gossypium hirsutum
gttttctgtttccatagtttgaagtattgcacatttgactggctgtattggcctgaagctcgtcaatcctactcacctgagacacttgaatatataaaatcattggatgctgaagaagatatttcccttttgaaattccttggatgggatatgccaccagagtgcgcacgcactctccgcatctccaccatgctcctcaaaaagggtgcggagagagggttcactccccatgcgattggaagtataatgtgcagggagaatttgaaggaggaatctccaattgagcaaatggtccaagaggcacaggattccgtgcttcctggcacaagtgaagctgcatttctggagacactctctcag

SEQ ID NO: 226403 - DNA, 273 bp, Gossypium hirsutum
tcgatcagaagcaatcaatcagccgagctcgaaactctgtcaccatgggtcgtatgcgcagccgaggtaagggtatttcagcatccgctttgccttacaagagaactcctcctagttggttgaagatctcttcccaagatgttgaggagaacatttacaagtttgcaaagaagggtttgactccatctcaaattggtgtcattctccgtgattctcatggcattgctcaggtgaagagtgttactggcagcaagattttgcgaatattgaaag

SEQ ID NO: 226404 - DNA, 353 bp, Gossypium hirsutum
ggggtgaggtaaccgaaagatccttcaactacagacattgtgtgagaacgggcgtgcctagttagcatcttagcaagtccaaaatctgcaatttttgccttgaattcggagtctaataagatattgctcacttcacatcacgatgaatgatgggtgttgggcactcatggtgcatgtagcatagcccctgagcagctccaacagcaatttgcaaccttgttggccaatccaaaactgaacccatccttgacattgatgatctcttattcccatgaagccatttatcaaggctctgattttccatgtactcgtaaaccagaagctttgaatcttcactggaaatgcaacacaac

SEQ ID NO: 226405 - DNA, 359 bp, Gossypium hirsutum
cccacgcgtccgggatgctcccatgtttgttgtgggtgtcaatgagaaggaatgtaagcctgaccttaacattgtctccaatgctagttgcaccaccaactgtcttgccccattggctaaggtgatcaacgataaatttggcattgttgagggtcttatgaccaccgtccattctattactgctacacaaaagactgttgatggtccttccatgaaggactggataggtggtagagctgcttccttcaatatcattcctagcagcactggagctgccaaggctgtcggcaaagttttgccagcactgaatggcaagctgactggaatggctttccgtgttcccactgttgatgtctctg

SEQ ID NO: 226406 - DNA, 360 bp, Gossypium hirsutum
cccacgcgtccgagcgcctctgcctctgaagataggcctgatatggttaatatgtcaccggaagaagcaccatttgagcagaataatgaaggaagttcgctttataattttctttatcccgataaagatctcctcccagatgataaagaaatgaccatatttgatcatcttgaagagttacgacagaggatatttgtgtctgtattggctgttggagctgctatattgggatgctttgcattttcaaaagaactgatagtgtttcttgaagctcctgttaaagcacagggtgtacgatttctgcaactggctcctggagagtttttcttcacaactttaaaggtgtcaggatattgtggc

SEQ ID NO: 226407 - DNA, 359 bp, Gossypium hirsutum
cccacccgtccgcccacccgtccgggattgtcttaaacttgatgagagtgagggtgagaagaaaaagaaggaagctttgaaggaaaagtttgagggtctttgcaaggtcatcaaggatgtgctgggtgacaaggttgaaaaggttgtggtttctgatcgtgtggttgactcaccttgctgtttagtgactggcgagtatggttggactgcaaacatggagagaatcatgaaggcccaggctttgagggataacagcatggctggttacatgtcaagcaagaagacaatggagatcaacccggagaaccccatcatggaagagctgagaaagagagccgatgcagagaagaatgataaat

SEQ ID NO: 226408 - DNA, 354 bp, Gossypium hirsutum
gggaaagaagagaatcgaatatttgtgggaggtttgtcatgggatgtcactgagcgacagcttgagcatgcgtttagtccatttggcaaaatccttgaatctcagatcatgttggaaagagataccgggcgtccacgtggatttggatttatcacatttgctgatcgccggtccatggatgaagctatcagggagatgcatggacgggagctgggggagcgcaccatttcagtgaataaggctcaacccaagatgggtgaagatcttgatcacggttatagaggaggttactcatcaagtggcaggggtcgctatgcaggtggagacaggcctgtagcacaggatgaatgcttc

SEQ ID NO: 226409 - DNA, 360 bp, Gossypium hirsutum
cgaaaaagaccaactaatatattgttggatcggggaaggacttttggacgagcgtacgaatttgagcagtgccagaaaccagggacatttcattataggttctcttattgacgcatgcttattggagaaaggacctaataatgattatgtaaagatgcacgatgtgattcgcgacatggctttgtggattgctggtgaatctgaaaagaagttttttgtaaaagcaggtactcagttaaaggaacaaccagaagctgaaaagttggaagaggtaattagaatgtcgctgatggataatcgaattgaaaatctaactaagatattggcatgccccaatctccaaactttatttcttggatg

SEQ ID NO: 226410 - DNA, 365 bp, Gossypium hirsutum
ctctttcttctcaatattttcctctgtggagaacccatccccctcctttagggtttagcagttaaaaagagaaaagcaaaagtatggcgaccgccactgtccccgctgccgcaaggcagctttctcctaaggaagccgacatccaaatgatgttggccgccgaagtccatctcggtaccaaaaactgtgacttccaaatggagcgttacgtcttcaagcgtcgcaatgacggaatctacatcatcaaccttggcaagacctgggagaaacttcaacttgctgctcgtgttattgttgccatcgagaaccctcaggacatcattgtccaatctgcaaggccatatggtcagagagctgtactgaag

SEQ ID NO: 226411 - DNA, 365 bp, Gossypium hirsutum
cccacgcgtccgaacaacaatgattgggcaaaggcaacacgttgtccttctcatgttgtcagcttttcttctcttccaaacctcaaacgcccataatattacacgtctacttgcaaagcacccctctttgtccacattcaatcattacctcaccctcactcacttagctcccgagatcaaccgccgcaccaccatcactgtccttgccttagacaacgccgccatgtcttccctcttggataaaaacccttccatttacaccatcaagaacatcctttcccttcatgtcctccttgactactttggtgccaagaagcttcaccaaataaggaatggtactgcactagctgctactatgttccaag

SEQ ID NO: 226412 - DNA, 347 bp, Gossypium hirsutum
cccacgcgtccgagcaaattatagatatggcgaaagctgaggttgtaattgttgtgtctttgttgttggtgacaacagtggttgatgggttgggagggaggatgaggataaacgatgtgaagaaaaacaaagaggtgcaagagcttgggaggttctcggtggaggagtataacaggcggagccaagggcggttgcgtttcagtttggccaatggtgggccgtcgacggcgttggttttctctcaagtggtgggagctgagaaacaggtggttgctgggatcaagtattatctcgagattaaagccatgcaaggtggggtaaccaagacctttgagtcagtggttttg

SEQ ID NO: 226413 - DNA, 329 bp, Gossypium hirsutum
cggacgcgtgggccacccattcgttctggttcagaacccaatctccgtgggcggtctcgttatggagaaatcaccgcattcttatttgaccaccccgggagccgaagagtttgccaagaaacagggcgtggagatggtggacaatgattacttcatcacagaagataacgtggggatgcttaagttggctaaagaagcaaactcaatcctgtttgattaccgtatcccgacagttggcacctgcggtgcagctgtggacagccatttgcagattaacgggctcccgatcagcgtctacgcaccggagacagttgggtgtgtggtggttg

SEQ ID NO: 226414 - DNA, 361 bp, Gossypium hirsutum
gaggtactcgtgctttcacaaattaaccataggaatgtggttaagctattagggtgttgtttagagacagaggtgcctttactcgtctatgaattcattacaaatggaactctggcagaccatctacatgataaactatctgcatcatcactaccatgggaaatgcgtctgaaagttgctgcagagactgccggagcgctagcttacttgcactcggcaacgtctatgccgataattcacagggatgtcaagacttccaacatattgctagacaacagttacacaaccaaagtgtcggatttcggtgcatcaaggttggttccactggatcaaacgcagttaaccacattggtgcaaggga

SEQ ID NO: 226415 - DNA, 361 bp, Gossypium hirsutum
cccacgcgtccgcccacgcgtccgactctcgaggtcgagagctccgatacgatggacaacgtgaaggccaaaatccaagataaggaaggcatccctccagaccagcagcgtctgatcttcgccggaaaacagctcgaagacggccggaccttggccgattacaacatccaaaaggagtcaactctccacctcgtcctccgtctgcgcggtgggatgcaaatcttcgtgaaaaccttgactggcaagacaatcactctcgaggtcgagagctccgacacgatcgacaacgttaaagcgaagatccaagacaaggaaggcatccccccagaccagcaacgtctcatctttgccggaaaacaac

SEQ ID NO: 226416 - DNA, 363 bp, Gossypium hirsutum
  unsure (1)..(363): unsure at all n locations
tttcgctcaaattccactgcccctgaggttcccttgttagattatgaagtagctgaatgaacgtgggaaaatgggcaactagccatgcacagcttangtccaccgcgtgtggtggctaaacaactaaacgccaccacttgggataaaccaagagccagtggcggtggcggtggcactttagagtctatagtgaaccaggctacttgttttccatatggtagtaaggattctgtcggtgttgggtggggatgaattggtatggttggaccaccaccgtgtttcggcggcggcgtcgtcttcatcagccaccatggctatggatgctttagttccttgttcagaagacaagaccaccaccgtaca

SEQ ID NO: 226417 - DNA, 356 bp, Gossypium hirsutum
cccacgcgtccgggaaactagtggtacccccatatgttgatgcgattgattggtcaacatggcatgttttctgggtggatgaaagggttgttcctaaggatcatgatgacagtaactataagctagcttttgatgggttcctatcgaaggtaccgattctccctggtaatgtatacgccatcaatgatgcactgtctgctgaaggtgcagccgatgattacgagacttgtctcaagcacttggtgaagagcaacgtgcttagtgtctcaacagccactgggtttcctaagtttgatctcatgcttctcggaatgggaccggatggacacgtggcttccctctttcctggccatcct

SEQ ID NO: 226418 - DNA, 369 bp, Gossypium hirsutum
caaaaaaaatctttccagtttctattttctaaaaacaaaactgaaaatgtcttgctgcggaggaaactgtggctgcagctctggttgcaagtgtggcaatggctgtggaggatgcaagatgttccctgacataatagagaagactacaactgagactattgttcttggtgtgacaactcagaaaatgcactttgagggatctgagatgggagttggggttgagaatggatgcaagtgtggagacaactgcacttgcaacccttgcaattgtaaataagagggggggaaaatgaacaacaaagagaagcagagaggcctttgtctttttaactaaataaattctattactttagtatgtatcagcaaatc

SEQ ID NO: 226419 - DNA, 360 bp, Gossypium hirsutum
cggacgcgtgggtttagttaatgttaattgagagagaaccattacagctttgatgtctgtctgtctgtttgcttaagcacaaaatctgcagatggcttgaaaaactatcctcgacatgccactgcagccaagctccaaatgcaaaaaatgctggaaatggagcaactagccaacgttcagggtctgccaacagagaggaatacactcaataagctgatggcattgcatcctggaataaacaatcaaacaggcaacaaccataacatagtcggtcggggagctttaagcagttcagcacaaactgctttaatacttactaactaccagaatctgcttgttaggcagaattcgatgaattca

SEQ ID NO: 226420 - DNA, 361 bp, Gossypium hirsutum
attttgggcagaaacacagcaaggtattatttgatgcagtgttaaaaggacatagggactttgattcagacccttggcccctaatatctgatagtgcaaaggacctaattcgaaagatgttatgctctcgaccttcagagcgactgactgctcatgaagtattatgtcatccttggatttgtgaaaatggggttgctcctgatagggctctggatccagctgtactttctcgcctcaaacaattctctgcaatgaataaactaaagaagatggctttacgggtaatagctgaaagtctttccgaggaggagattgctggtttaagagaaatgtttacgtctatggatactgataacagtgg

SEQ ID NO: 226421 - DNA, 360 bp, Gossypium hirsutum
ttaatgcctttggaataatggattttacttttaagggactgcatgtccagtcagacagtagttgatttcattcatgaccagctaaaatcggaaagcaagctttctgttgtttgtgagagggtactcacaagtgcttagcaccatcaacagccaccggtgagggttgtgataatatgaccatgatcttggtgcagttcaagaaaccgatcaaatccacctcatccgcagaggagcaatcctcgaattccgaatccactgaaactgaaccaaagctagagggaaatgcagaaaagtagttgctgcaactgttgggggagccttggaggtgtcagatcctctgattgaagatttgacgaccct

SEQ ID NO: 226422 - DNA, 365 bp, Gossypium hirsutum
cttggatcatcttatcacaagacatttgttttttacatacaccaatttgcctccaggtcgcttgactgatttgcgtgctgctgccgtaaacaatgaaaactttgcacgtgttgctgtaaagcatcagttgcacgtgcatcttcggcatggatcaagtgcccttgagaaacagattcgggacttcgtgaaggaagttcaggatgagttattaaagccaggtttcaactcttttggattgggagattgcaaagcaccgaaagttcttggagatattgttgaatccattgctggtgccatttttcttgacagtggacgtgacactgcagttgtctggagggtttttcaacctctgttgcatcccatgg

SEQ ID NO: 226423 - DNA, 365 bp, Gossypium hirsutum
tttggggaagccaaagaaatcatgtttggctacttgtggaagaagaaccctagggttctcctgctcctcggccaagaccattttcacccatttaccatcctcaacacctgctaacaataagctacccggccttttctctcctaacaaaatttctgcttctcgattctctctccgcaatctcactttttccaggctcccattggaattgggtggtgcagtaactttgatgcctttgcatagtgttacggcttctgctttgttcacttccttgctgtctttgcataatcaaagctgggggtgtttgtcagaaggatttgcaactcctctatagcattgcctatgggctcctgttgtcgatgctgctt

SEQ ID NO: 226424 - DNA, 368 bp, Gossypium hirsutum
ccgtaagcgaccttcacgagtatcgtcaagcgtatggtggccgcagggttcgttgaagagtgctctcacgtttacagcacctgccgaagagagttcctcgaagagagcatctcgaggctcggattgcagaagctgagcatcgatgaagtccagaaaatgccgtggcaagagctcgaagacgagattgaacgctggatcaaagccgctaacgtcgcccttcgtatcctcttcccgagcgaacgcaggttatgcgatcgcgtcttttttggattcacttccgccgctgatctctccttcatggaagtctgccgtggctccaccattcagttacttaatttcgctgacgccgttgctatcggtagccgatc

SEQ ID NO: 226425 - DNA, 358 bp, Gossypium hirsutum
cccacgcgtccgcccacgcgtccgtccactcgtccgcccacgcgtccgcccacgcgtgcgcttcaatcagatggctttagaagctcttaactccccaacaaacgctgctgctccttttcacttccaagataccaatttacactgcctcgatgccttcaccaagcgtaagcgttccaagcgaccacgcttcgacgatgaccatgttcccaccgaggaagaatacctcgctctctgccttgttatgttagcacgcggcggtgctcctcgaaccacctccactaccttgactcaccaaaaacttggcacctacaagtgcagcgtttgcaacaaggcctttaattcttaccaggctttgggt

SEQ ID NO: 226426 - DNA, 357 bp, Gossypium hirsutum
aaaacaaccctcttacaatccttactttcgcctcacccttcctcggttccacgcgcgaactcatccgcctcagttcttcttccaatttgaatctccgccgtcgatctgggaccgccgtcaagaaagcaaatccaaatctacccccaatctgttaattacaaaaaaggaagggttggaattatacgaagatatggtattaggaagagcgtttgaagataagtgtgctaagatgtattacgataggaaaatgcttggtttcgttcatctttacaatggccaagaagctgtttcaactggtttcattaggctcttaaagcagcaagattccatcgtctgtacttaccgtgatcacgtgca

SEQ ID NO: 226427 - DNA, 363 bp, Gossypium hirsutum
gaatcatccaaagggggaatttgatcttgcaacgatgtccatatattttgaaggaccctacaagaccctaacaaatgcgctgtggtttctagatcttccttacacagtgggcatacaacctcctcacatagtgttcggcgtgccaagttcccatagtgtggcaccatgttattgaacaatctccaaacatgtatttttattttctctggaatatgtaaaacccaaagatccatgtaaaaaattttgtattcttcatttgtagaggacatgtgtagattgctctgtaaataatctgtaataagaactcggcacccactcctgacagtatactcacctgagccttcatacttccataccaacata

SEQ ID NO: 226428 - DNA, 367 bp, Gossypium hirsutum
cttttgcttcatctccgttgctggttaatttatatcagtcagctgagttatctaaagcatcaaagccttttgcatttaaacacaatatccctacctcagcccctgatgttttatacagatggcatttgccagagccatctgccattgatgtttctgggaactctgattgttcgacagctaagtctcgcacagctgtagtcttattaggatggttggggtctaagcagaaacatctcaagaaatatgcagattggtatacctccagacgctatcatgtcattaccttcacctttccaatgattgatattatcaattatcaagatggtgggaaagctgagaaggacgtcgacatgcttgttaatcactt

SEQ ID NO: 226429 - DNA, 362 bp, Gossypium hirsutum
cccacgcgtccgcccacgcgtccgattttactttacagaattattggtgttgaaaggacgagaggatgaatatggtcacacactaggacttgttactagtatagacctttcagctaacagtcttataggagagatccccaaagaaattggtagtcttgttggactattgtctttaaatttttcacgaaatttcctgacaggacgtataccagacaacattggcaacatggagctaatggaatctcttgatttgtccatgaatcggctaaatggtgaaatccctccaagtttctccaaattgaatttcttgaatcacttcaatttgtcgtacaacaacttgacaggacaaatcctaacaagca

SEQ ID NO: 226430 - DNA, 338 bp, Gossypium hirsutum
gttttgggcactttttgttcttggtcatgactgtggacatggtagtttttccagtaatgcagctttgaatagtgttgcaggtcactttcttcattcttcaatccttggtccataccatggatggagaattagccactgaactcatcaccagaatcacgggcacgtcgaaaatgaccagtcatggcatccgttgtctgagaaaatttacaagagtttggacaatgcaacaagattattgagggtcaccttgcctttccctatgcttgcttatcctatctatctttggagtccaagtccccgaaaaaaaggttcacattttcatccacacagtgatttat

SEQ ID NO: 226431 - DNA, 358 bp, Gossypium hirsutum
cttccccccaattaattcaattcaccctttctttgctcttgtgttttaagaggcgaggagaatggtaggtgtagtgggaaagtctgaatcacctgaaacaaaactagaagctaaaatggttgaagctatgcagcaaagggcttctaaaggaactactatcaagtccttcaacagcatcatcttaaaattccctaaaattgatcacaccttaaggaagtgcaaagctatttttgagcagtttgatgaggactcaaatggtgccattgatcatgaagagttgaaaaagtgtttgcacaagcttcaagtttgtttcacagaggaggagatagaggatttgtttaaggcatgtgatatgaat

SEQ ID NO: 226432 - DNA, 359 bp, Gossypium hirsutum
  unsure (1)..(359): unsure at all n locations
gncatactccaaaacatgacttcacttctctcctccttcatcgncgccttcattggagaggtgagggtctctcttctcatcctcggtaccttccctcttctagtccttgcaaactttgctcagcaactctctctcaaagggtttgctggtgacactgcgaaagcacatgcgaagactagcatgattgctggcgaaggtgtaagtaatatcagaacagttgcagccttcaacgcacaaaacaagatcctttcgctattttgtcatgagctccgagttccacagatgcaaagccttcgtcgcagccaagtttctggcctcctctttggcctatctcaacttgctctttacgcgtcggaagc

SEQ ID NO: 226433 - DNA, 380 bp, Gossypium hirsutum
  unsure (1)..(380): unsure at all n locations
ccggggcggccgaggcgnccgcccacgcgtccgtgaagagaaacctttattaggctttcttaatgaagtgtgtggggaagaaataatcttctccatgtgtcttttcctggattggaacccagcagccacatctatctcagtcggactttctgatggttctgtttcaataactacacttgcagagtccaaaatagaaaaattacaagagtggaaggcacatgattttgagctttggacaacttgctttgacattcaccaaccacaattagtatatacaggatcagatgactgcaaattcagctgttgggatatgcgggataatccatccgggatggttttccagaattccaaggtgcataagatgggagtttgttgcattg

SEQ ID NO: 226434 - DNA, 353 bp, Gossypium hirsutum
  unsure (1)..(353): unsure at all n locations
cccacccgtccgagcagccttatttttccttgtgtgcaccgganaagctgggggggcaagttgctttagcaacaggaccancacaagttccacttgccggggagaatgcacttccccgttatgatgaatacgcccacgagcagatcttacgagcttcatcgttgaatgtcgatggctcagcagttgatagagagatgtgtgcatttacgtacttgaggatgaacccatcgctctttcatccgggcaattggagacggtttgttgcattcgtgaagaagatgaatgagggaaaaggagctcgtcggtgttgggaagaggtggagcgggaagccgaacaattcgtgcatgtcacg

SEQ ID NO: 226435 - DNA, 291 bp, Gossypium hirsutum
  unsure (1)..(291): unsure at all n locations
ggaaatgtccnaacagatacgaagagatgcaatggttttctttctcccagattcaacaaccagcaacccactgccattgttgtctttgaaccatgtnttcttttgtctgcaaatctgtgagcaaatccgtgaggttttacgagcaagttttgggatttgttctcatcaaacgcccttcttctttcaactttgaaggagcttggttgttcaactacggtatcggcatccatttgttagaatccgagagcgttccaacaaagaaagagaaaataaatcccaaagacaaccata

SEQ ID NO: 226436 - DNA, 357 bp, Gossypium hirsutum
cccacgcgtcctcggacgcgtgggttgcttctcgacaccgacaccgtcaccggggcctgtctatattccggaaagtttctactttagccaattttttctcccagtaactatggcttcagatgcagatatggaggattatggattcgagtactccgatgaggaacctgaggaacaagacgttgatatcgagaatcaatattacaattccaaaggtttggtagaaacagaccctgaaggagctctagctggttttgctgaagtggtcagcatggaaccggaaaaggctgagtggggattcaaagctcttaagcagactgtaaagctctattaccgattagggaggtataaagaaatgat

SEQ ID NO: 226437 - DNA, 377 bp, Gossypium hirsutum
ccgggcgggccgacgcgtccggctccatttgctaaggatccaggactgttagtgggacttagagagggggcttcggtagttgaagtggttaaaaaggtcaaacctgatgtgcttcttggtttgtctggagttggcggtgtgttcagtgaaaaggtgctcaaggctttgcgtgaatctggttcaactagacctgctatttttgcaatgtcaaattccaccatgaatgctgaatgcactgcagcagatgcttttaagcatgctggagaaaacatagtgttcgccagtggaagccctttcgaaaatatcaatcttggtaatggaaaagtgggctatgtaaatcaagcaaataacatgtacctgttcccagggattggttt

SEQ ID NO: 226438 - DNA, 324 bp, Gossypium hirsutum
ttttccaatggtccaccccaagcattgttggcttttactaatttactaacccccaaatactgcgtcagggtcaagtatattgctcttctggacctggcggttgtggttggaacaataaaattgtttgtttgaatatgagagaaagggaagttaatccatttgactattatgattaatcttattttaatgaccaaacatttgatgaacaatataattctttgaacaatttcaattcttactaggacattccggtggaaattagtggtgaaaatgtgccaccacctttaaaaacatttgttgatttatatttatccgagcttttta

SEQ ID NO: 226439 - DNA, 356 bp, Gossypium hirsutum
  unsure (1)..(356): unsure at all n locations
agataaggaagggatcccaccggattagcagaggcttatctttgctggcggacagcttgatgatggccgcacgctagccnactacaacattcagaaagaatccacccttcacttggttcttcgacttcgtggcggcatgcaaatctttgtcaagactctcactggaaagacaattaccttggaggttgaaagctctgacacaatagataatgtaaaggcaaagatccaagacaaggaagggatcccaccagatcagcagaggcttatctttgctggaaagcagcttgaagatggtcgcaccttagctgattacaatatccaaaaagagtccaccctccacctagtacttcgtcttc

SEQ ID NO: 226440 - DNA, 352 bp, Gossypium hirsutum
  unsure (1)..(352): unsure at all n locations
gccacgcgtccgtgattatttcctttctttccttcttttttggttcatcgtgagcttgtcatcaaccccttttgattgttatatanattgttactattcttttaatcttttaaatattttttttccatgaggagagggagaggtgccgcagctgcaaacgccgtagctaggagaccggcactgcaacccagcggatctattaaagagccgagatacagaggtgttagaaaaaggccatggggcagattcgcggccgagattcgagacccttggaagaagaccagggtctggttagggacgttcgactcggccgaagaagccgctcgagcctacgatacggcggcgaggacgc

SEQ ID NO: 226441 - DNA, 356 bp, Gossypium hirsutum
  unsure (1)..(356): unsure at all n locations
gaaaatttcactgcgagattcatattttgttttaactcttttcctccaatttgcggcttggttgattgataccggatcaaacgtnaagaaaggagccggaggaaggaaaggcggcggtccaaagaagaaaccggtttctcgttcagtgaaagccggattacagtttcccgtcggtcgaattggccggtacttgaagaaagggcgatactctcaacgtgtgggaacgggtgctccagtttaccttgctgctgttcttgaatacctagctgctgaggttcttgagttagctggcaatgctgcaagagacaacaagaagaataggatcattccaaggcatgttctattggcagtgagga

SEQ ID NO: 226442 - DNA, 374 bp, Gossypium hirsutum
ccgggcgggcccacgcgtccgcccacccctccggttattattattttttttttcatcaatgggattccctgtgggtagacatacgttttcgtacccaaattcttcgttcacacgctatcgtttttgggtttcatcagaaacctaatcctctcactttttaattacctcggactctccgatttcctcgaaaccgacaccgtttggccggaaaacccgacccgaaccacaccttttaaaccgccggtatccgctctcttgatccgtgaaatcctacccgtcgtaaagttcgaggaactcgcgttggtcggtggtggtgatccgccggagagttgcgccgtttgcttgtgcgagttcgaaggaaaggaagagatcag

SEQ ID NO: 226443 - DNA, 354 bp, Gossypium hirsutum
aaaaacctcgcgaatcaacttgggtttcaggcgtgaaactggatgtgtggacgggttcttttggcgtaacaagttattccttaccttgggaccaaattggttattgggcagtcaaaatcgtaacaagcgttccggaagctattccggtaatacgatcgcctttggtagacatattacgtggaattgctacgtgtgggacaattcactttgacccgattctatagtttacacacttttgtattacccctccttactgctgtatttatgttaatgcatttcctaatgatacgtaagcaaggcatttcttgtcctttatagagaatatagaccatatctatatcgttaccaataatt

SEQ ID NO: 226444 - DNA, 349 bp, Gossypium hirsutum
tatgggtccagtccttactgctcatatcaccatccacccaatctggtacggccggtggcagaaatcacagaagaaaatcatccgtgagttcatcaactcgatctccgccgttgattccaaacacccttcggtggctgggtggtggaagaccgtacagctttacaccgaccaaacgggagccaacatttcccgtacggtgctattaggtgaagagaaaaacgatcgtttttactcccacgggaaatccttcacgcgcttatcgatacagtccgttatcaaaagcgctgtaacggcccgtacgaaaccgttacccatcaatcccaaaagcgggttgtacctcttgctcacc

SEQ ID NO: 226445 - DNA, 352 bp, Gossypium hirsutum
  unsure (1)..(352): unsure at all n locations
cggactcgtgggcggaaaccaatatgtatggttgcaaagcttcctgcatnagtaattgttcttgcatggttgcgttctatgacaacagctcgaggaactgtttcctttttgaccaggttggcagcttccaaaactctaatcagccgtctaatttagttgcttttgtcaaaatgtcgagcaatgcaaatggtgtagggaatggaggcggcaacaaaagcttcccatatgttgcgattatagtagtttctacggttcttgttattttgggcttactctttgtgtcatatcgatactacaagaaaaagaaaaaagttccaggatctcctgttgattcttcagaagaggatatctt

SEQ ID NO: 226446 - DNA, 355 bp, Gossypium hirsutum
aaaaagagtgcgttcaagcttatagtaatgttaggcgtgatgctttggatgagtgttgggtgattctcggagttgagaagttaagtattgaagaagttcaaaagattgaatggaaagctttggatgaaaagatgaagaaatggattcaggctgttaagattactgttagggttcttttgaatggggaaaagaggctttgtgatcagattttcaatggatcgaattcaattaaagagatttgttttaatgaaaccgggaaagggtgtgtaatgcaattgttgaattttggggaagcagtggctattgggaaaagatcatctgagaagctgtttaggatccctgatatgtatgatgt

SEQ ID NO: 226447 - DNA, 359 bp, Gossypium hirsutum
accaggcttgcacttgcagatccttctgattgctgcagcaaacctaggaatcagcttacgtgggaggtcattctagtgcatcggggtaactgtagtttcactgtgaaggcaaatgttgctgaagaagctggtgcttctgcaatcctcataataaacaaccaaacagaactcttcaagatggtttgtgaatcagatgctgatgtaaatataaaaatacctgctgtcatgcttcctcaggacgctggttccaatttggaaaattatataaataataacaccagggtttctgttgcgctttactccccaaagcgtccggcagttgatattgctgaagtttttctgtggctaatggctgttgg

SEQ ID NO: 226448 - DNA, 354 bp, Gossypium hirsutum
cccacgcgtccggtttgctagacatatgtctccgcaaggcttgcataaaaaggtgatttctacattgcttaggccccgtaactggaaagctccggtaaataggaggtttttcttggattcttatgaagtgggtgagctctgctatgctgccgaacagcttttatgcaagaacccaccttccttcagttgaaagctccggtaaaagtatttggtgatcttcatggacagtttggtgatttaatgcggctatttgacgagtatggatttccttcaaccgcaggagatattacgtacatcgattatctgtttctaggagattatgtcgatcgaggacagcacagcttggagacaatt

SEQ ID NO: 226449 - DNA, 351 bp, Gossypium hirsutum
gtggatacgaggacaaaacagactgttgaagtgagattgggtggatctatggtgctgttacagaagatattcttactggattcaaaatgcatgcccgtggttggcggtcaatttactgcatgccaaaacgcccagcctttaaaggttctgctcctatcaatctttcagatcgtctgaaccaagtgcttcgatgggctcttggttctgtggaaattcttttcagtaggcattgccctatctggtatggttatagtggtaggctcaagtggcttgaacgattcgcatatgttaacacaaccatctacccggtcactgctattcctcttctcatgtactgtacactgccagcag

SEQ ID NO: 226450 - DNA, 356 bp, Gossypium hirsutum
gggagcagccaaatacaaaggaacttaaattagggaaaagaagctaactgagatgattgggaaaaaagttacagaagctaagcaagtttgtgaaggagatgagacatctgatgagtgcaaagttgcttgggacgaggtcgaagagctaagtcaagctaaggctgatcttaggcttagacttgaaatagaaaagaaagatcctttggagtcgttttgccaggaaaatcctgagactgaagagtgtaagatctatgaagattgatgggaaaatgaatatcattttctagatctgcctattgttatttagtgggaaaatagtaaggaattaagcacctctttagaacaattgaaccttg

SEQ ID NO: 226451 - DNA, 360 bp, Gossypium hirsutum
cccacgcgtccgcacactctcagtatgtcttctttaagatccaccatttcttcgggggtgatcatatcaacttctcccacccattccttgctgcctgcagcttcatctttcaagcccatcagaaacccttgtttacctcaaacccacaagcttttcacatcaaactccaacactttctcagctcccaagcgaggtttcacttgcaaaagccaggctattccatctgataactcagctccggaaaaagttcaagaactacatgtgtatgagttgaatgagagagatcgtgggagtccagcttaccttcgtttgagtcagaaatctgtgaactcactgggtgatcttgtcccttttagcaac

SEQ ID NO: 226452 - DNA, 374 bp, Gossypium hirsutum
ccgggccggccgacgcgtccgcccacgcgtccgctacgccgctcttctttttcttaaatcgttatctaaaggtgagtcgagcgaaccttggctcaacacccatggtgatttcaaccgagttttccttataggtgatagctcaggagggaacatcgtgcatgaagtagctacacgtagtgggttcattgatttgaacccactaagactcgctggtgttatccctatccacccagggttcgttcgggctcagcgaagcaagtccgagttagaacaacccgagtcacctttcttaaccttagacatggtggatacgttcttagccttagcattgccgaatgggtgcaccaaggaccatcccattacttgtcctatgg

SEQ ID NO: 226453 - DNA, 351 bp, Gossypium hirsutum
cttcgcgccgctcttcatttttcttttctctaaggaaagctaaatccgggatccggatttcagctcaaaaatgtcgggagaggaagttgcagttgccccaactgaggttgctgctgccattggtgagccaatggacatcaacgcagccttgcctcttgtgattaggaagtccaaagctcatggtgggcttgcacgtggtttacacgaagctgccaaggcaattgaaaagcacaatgcacatctttgtgttttagctgatgattgtgaccagccagattatgttaaactggtcaaggcactctgtgccgatcacaatgttaaagtgctacgtgcacctagtgcaaaaactct

SEQ ID NO: 226454 - DNA, 381 bp, Gossypium hirsutum
  unsure (1)..(381): unsure at all n locations
gggtcgagcacgcgtccggagagattgactgtngagttctggcttgattctgacatcctttcaaagcttcagcacccgaatgtagtggccttttatggtgtgntccaagatggacctggaggaacactagccactgtcacagagttcatggtgaatggctctcttagacatgtcttgcttagcaaagacaggcaacttgatcgtcgtaagcgactcattattgccatggatgcagcatttgggatggaatatttacattcaaaaaacattgtgcattttgatttaaaatgtgacaacctgcttgtcaacttgaaagatcctgtacggccaatttgcaaggttggggacttcgggttgtcaaagataaaaaggaataccttg

SEQ ID NO: 226455 - DNA, 377 bp, Gossypium hirsutum
gggggccgccccttccgggttattaacccctttttacttaattttttaaaaaaaaaaaaaaaaaaccctgggcgcttcacttttccctaactttttaaacttgaatcccttaatcatttaaatcaatggctgaagaaccagcaccagcattggccccgcctcaatcatttgcttcgccgttgggaacttccgttttaccgctagtaaacaagctataagacatattcgctaaacttggtagccagtccactatagagttgccgcagatggcggtggttggaagcaagagcagtggcaagtccagtgtgctagagtcaattgttggccgtgatttcttgcctcgtggttccgatatatgcatacatcgccctcttgtg

SEQ ID NO: 226456 - DNA, 362 bp, Gossypium hirsutum
  unsure (1)..(362): unsure at all n locations
cggccaattaaaaatgggtccgggattggtttggagttcgcggtgttgacactggggcgggtgtgtgctgataacattagaaaccntggtttgcttgttagagaaggtgggatacctcctcttgtggcgctttctcagactgggagtgtaagggctaagcataaggctgaaacactacttgggtatctgagagaaccaagacaagatgcttcatcatctagtccttagagaagagaagtataattactcatgtagaggtagttatacctgggtgttctatttattttttgtatataaggagtgttatgatggtttgtacagtgtggttgagaaattatcgtacaagttaaaaaaaaggaaca

SEQ ID NO: 226457 - DNA, 353 bp, Gossypium hirsutum
ctgaaaaccttggcttattttcagttcttcaatcagatggctttagaagctctgaactccccaacaaacgctgctgctccttttcacttccaagataccaatttacactgcctcgatgccttcaccaagcgtaagcgttccaagcgaccacgcttcgacgatgaccatgttcccaccgaggaagaatacctcgctctctgccttgttatgttagcacgcggcggtgctcctcgaaccacctccactaccttgactcaccaaaaacttggcacctacaagtgcagcgtttgcaacaaggcctttaattcttaccaggctttgggtggccacaaagccagccaccgtaaactttc

SEQ ID NO: 226458 - DNA, 350 bp, Gossypium hirsutum
gggcaaccatacattcttcagaccattgtgttcactggtggcaaaggaggcgagggaacaaaggatttacctttggtttgacccaaccaaagaataccactcctactctgtcctctggaacatgtatcagatagtgttctttgtggacgacataccaatcagagtgttcaaaaactgcaaagatttgggagtgaggttcccattcaaccaaccaatgaagatatactccagcttatggaacgccgatgactgggccacaaggggtggtctcgaaaagaccgactggtccaaagccccattcatagccgcatacaagagcttccacatcgacgggtgcgagtcgtcggtgg

SEQ ID NO: 226459 - DNA, 357 bp, Gossypium hirsutum
aaaaaggaaacaaaagatggcaattgagattcctagagtgaaacttggaactcagggagttgaggtttcaaagctgggatttgggtgcatgagtcttacaggtcacgatcattcagtgtcagatgaagatggcatagccatcattaagcatgcagtcgaaagaggagtcactcacatcgatacagccgacctctatggacccaaaactaacgaaattctggtcggaaaggcattgaagcatctgccacgagagaaggtacagttggctacaaaattcggtgttgaaagcatgggtccagatggtccggttatcaatggcactcctgaatttgttcgttcttcacttgaggctagcct

SEQ ID NO: 226460 - DNA, 368 bp, Gossypium hirsutum
gtcaaaacacaacacttcaatcaggtttttctctatcgaatccaataggaaaaaagggaaagaaatggatggatcgggaggaagaggagcggataatgtattatcgaattacaagcttggaaaaacgcttggaattgggtcgtttggaaaggttaaaattgctgaacattcttcgactggttataaagttgctattaagattcttaatcggagaaagattaagaatatggagatggaggaaaaagttagaagggagattaagattttgagattgtttatgcaccctcacatcatacgactgtacgaggtcatagagacagcgacggatatctttgtggttatggaatatgtgaagtccggagaactct

SEQ ID NO: 226461 - DNA, 361 bp, Gossypium hirsutum
  unsure (1)..(361): unsure at all n locations
cgtccgttcaatcgnggccgggtgttcgacccactcgcttgatttgatcaaagtccgaaggcggctccagggtgaaagccatgttcccaatccggctgttcaaacactccgccctgctttagcctttcagacaaccactactactacttcctctgctatccacatgcctcctccgccggcgcgtgttggacctgtggccaccgggatcaagatcttccggaccgaaggcgtcgctgctcttttttctggcgtctctgctaccgtcctccgccagaccctctattccaccacccgcatgggactctacgacatcctgaaacagaagtggactgataaagaggccaaaaccatgcctctctcg

SEQ ID NO: 226462 - DNA, 374 bp, Gossypium hirsutum
ccgggccggccaagccgtccgcccacccttccgaacaaaactaaatttcttgaattagggtttcgataaccctaaggcgggcatatcccctacaactccgacatcatttgggtccctttgtccttcaattagatcacagcttttcgttcaaaaatatattctcttgttattgttcttaatttcaagcaacaatggcggagcacttggcctcaatctttggtacggagaaggaccgcgtgaattgccccttctatttcaagattggagcatgccggcacggggacaggtgttcacggctccacaaccggccgacgatctctccgactctcctcctttccaacatgtaccagcgcccggacatgatcactcccgga

SEQ ID NO: 226463 - DNA, 359 bp, Gossypium hirsutum
aaatgatatcattggtgtatgctttgtgggtcaagatatcacatctgagaaaggcgtgctggataagttcatccgtttgcaaggagattatagggctatcatacaaagtcttagccctttgatccctccgatatttgcttctgatgagaatacttgctgttctgaatggaatgcagccatggaaaaactgactggctacagcagaaatgaggtcataggtaaaatgctagctggagaaatctttggaggtttatgtcagctcaaaggccaggactcgatgactcgatttatgatcatgttgtatcaaggaattagtggtcggaatgctgagaagtttcccttcagctttttcgatagaa

SEQ ID NO: 226464 - DNA, 352 bp, Gossypium hirsutum
atccaatccatctcaaagactgcttttaggtttgttggggaatgtgccggggttgaaaatctgaacttgttccttcaaatttcaccatggaaggtgagctacaagagcataaaattggtgctctatgtaaatgttcacttttgcttgaattggctgcttctaatgatctagtggcctttaaaaatgaagtagaagagaaaggtttggatcttggcgaagcaagtttgtggtatggtagaagaatttggtctagaaagatgggatttgaagaaaggacgcctttgataattgcttccatgttcggtagcgtggatgttttgaaatacatcattggaagcggcaagatcgatgt

SEQ ID NO: 226465 - DNA, 385 bp, Gossypium hirsutum
  unsure (1)..(385): unsure at all n locations
cggggcgaccgacgcgtgcgctcaaagactgcttttaggtttgttgtggattgtgccgnggttcaaaatctgagcttggggcttcaaatttcaccatggaaggtgagctacaagagcataaaattggtgctctatgtaaatgttcacttttgcttgaattggctgcttctaatgatctagtggcctttaaaaatgaagtagaagagaaaggtttggatcttggcgaagcaagtttgtggtatggtagaagaatttggtctagaaagatgggatttgaagaaaggacgcctctgataattgcttccatgttcggtagcgtggatgttttgaaatacatcattggaagcggcaagatcgatgtgaatgacgcttgtggtaccgatgg

SEQ ID NO: 226466 - DNA, 386 bp, Gossypium hirsutum
ccgggccggccgacgctacgcgttgctatcagcatgaaatgattcaactttattgcgtgaaaagataaaagccgagtgtgaggattattccaccatgattggattcagtggaaaagctgagagcagctgcagtgatgaagactcgtgcaaaaagcctaaggactgcatcaaagcaaaaatttcaagggcttacgtgcgcacaaatccttctgataacagcctgattgtgagagatggatatcaatggagaaaatatggtcaaaaggttacaagagataatccctctccgagggcatacttcaagtgctccttcgccccaagttgtcccgtcaagaaaaaggtgcaaagaagtgctgaagatccatcaatcttggttgctacttatg

SEQ ID NO: 226467 - DNA, 355 bp, Gossypium hirsutum
cgtctttccttaacctctctcatcgtccatactaaaccaactcaaagcttgcaggcatggccttccgccttagcaacaatcttgttggaatcctcaacttcataaccttcctcctctcgatccccatcctcggagccggcatctggcttagtcgagaaggcgtgacggaatgcgaacggtttttggacaagcccgttatcgtaatcggagtcttcctcatgcttgtctcacttgcgggactaatcggcgcgtgctgtcgcgtcacttggctactctggctttacctagtcgtcatgttcctcctcatcgtgctcggcatcgtcttcaccatctttgctttcgcggtgacgaataa

SEQ ID NO: 226468 - DNA, 353 bp, Gossypium hirsutum
tccacacctttgattgcaccaaacatcaatgtgggtgtggatggcatggtgatgaacttggctagcctctttgcggggactgttaccaacccttttggaaattgttactaccagggcccagctgaggcgccattggaagcttcatcagcatgtcctggaatatacggcaaaggggcttatccaggctatgctggaaacctacttgtagacccttcaactggtgctagctacaatgctcatggtgagaatggaaggaaatacttgcttcctgctttgtatgatcctgctacatcatcttgctcaaccttggtctgagagtgacaacaaccttaaccattcttttatttgttaat

SEQ ID NO: 226469 - DNA, 302 bp, Gossypium hirsutum
gaaaaatggacgaaatgggaaaattaatgggaaaggatactatatttatgagaaaggaagcaagccaaaacctgatccttctatattacctattattgaggagtgtcgacggcaaaccaagcttatgcctgccggaaagcctataacaatttctgataaagaaatcctagagatggtgctgttcccagtagttaatgaggcatgtcgagttctggatgaagaagtagtggttcgagcatcagaccttgatactacatctgttcttggaatgagcttcccatctcaccgtgggggaatagtgt

SEQ ID NO: 226470 - DNA, 302 bp, Gossypium hirsutum
caactttattggcattagctggacttagacgcttgagcatgactgaaaatgttacttctgttcttccaattgatgaaatgcttccagctgttgcgcagggggctattggaattgcatgtcgaagcaatgatgaaaaaagggctaattacctagcttcattaaatcacgaggaaacacgatcggcagttacatgtgagagggcctttctagagacattggacggatcttgccgtactccaatcgttggctatgcttcaaaagacgaggatggtaattgcatatttaaaggattggtagctttc

SEQ ID NO: 226471 - DNA, 301 bp, Gossypium hirsutum
tcgtacagctgatgtgccgcagccaggaacccctgcttatattgtcaaggcatttttacctgtgatagagtcatttggattcgagactgatctaaggtaccacacgcaagggcaagccttttgtctctcagtattcgaccactgggccatagttcctggagatcccttagacaagaccatagttttgcggccttttgaacctgcaccaatacagcaccttgttcgggagttcatggtgaagaccaggcgtataaagggaatgagtgaagatgtgagcattcaacaagtttttttgacgagg

SEQ ID NO: 226472 - DNA, 306 bp, Gossypium hirsutum
cccacgcgtccgcccacgcgttcgtttaacagaagggaggagaaccctaattttgtctctcccaagagacgaaaggaagggaaaaatggtgttttacttcaaagcccggccagaagctggcgattacaccattttcatgggttttgacaagtacgagaacgaggagctcatcaaatatggcttcatcgaagatatctggttccatgtgaataagatgtcttctgcccatgtttatttaagacttaaaaagggtcaaaccatttatgatataagcgaaggcgttcttgaagaatgtgttcagtttgt

SEQ ID NO: 226473 - DNA, 311 bp, Gossypium hirsutum
caaccctttattctgattattttatgatcactataaaaaccccgttctagggctccgtctcttcctttctgtgattcaaatccccaatttgaagccacctgcctgcccctttttcaattcgccggaatgaagctcatcatcaaaaccctaaaaggcagtcactttgaaattagggttcagcccaatgataccgttatggctgtgaagaaaaacatataggatatacatgggaaagacaattatccatgtgggcaacagctgttgattcataatgggaaggttttgaaagatgaaactactttagcttgaaa

SEQ ID NO: 226474 - DNA, 346 bp, Gossypium hirsutum
gcggcgtcatcctcttcgtgatgaacgccggttacttgccttttaatgatcccaatctcatggctatgtacaggaagatatacaacggtgagtttcgttgtcctaaatggatgtccagcgatatgaaacggttcatttctcgactcctggatacgaatcccgttacaaggatctcccttgatgagatccttaaggatccatggttcaggaagggttacaaagagcccaagttccacgaggagcaacccaaggatgacgctcatgcctcaagctcgaagctgaatgcattcgatttgatatccctcctcctcgggtttgaacttgtccggggttgttggatgagtct

SEQ ID NO: 226475 - DNA, 382 bp, Gossypium hirsutum
aaaaaaaaaaatccaatttatcgattcattttcatagtgaatcaaaataaaaaaccttaaaatcattattactttaaaaaaacccagaaaaacaaaagcttagcaaacaacaatggtgaaacaccttagcgagaaatctgcgattgaaaggagggattcaaggttcacaggtgtacgtaagcgaaaatgggggaaatgggtatctgaaatcaggctaccaaacagtagagaaaggatttggttaggttcttacgacaccgccgagaaagcggcgcgtgcattcgacgccgctcttttttgcttacccgggcggtctgctaaattcaaattcccttggtacccacccgagataggcggcggtacgtctttatttcccatgaaa

SEQ ID NO: 226476 - DNA, 371 bp, Gossypium hirsutum
ggtgtctctggtgatcaattacgacctgccaaacaatcgagagctttacatccataggattggacgttctggtcgattcggacgaaagggtgttgctattaatttcgtgaaaagcgacgacatcaagattcttagagacatagagcagtactacagtacccagattgacgaaatgccgatgaatgtcgcagatctgatatgagaaatgctttcataagtgcttggaccggaacttgaagggtacggttgaacattttccatggtgttggtgtaatcgaatcatctatcttgttgcatgtttgtgtgtgattgggtttgtatgcttacgcggaggtcgaattactgaatgttttttcgaacagattaagcat

SEQ ID NO: 226477 - DNA, 377 bp, Gossypium hirsutum
aaaaaaaaaggaaagatattttgaggtttgcaaatgtcgttaacaataatatctgcagtttatgaagtttgcagtgatgcagctggtattgcaggtaacatctttgcttttgggctgttcttgtcacctataccaacatttaggagaataatcagaaatggatcaacagaacaattttcagggatgccatacatatatgctcttttgaactgtttgatttgcctctggtatgggttccccattatatctcctggtattatcttggtggcaactgtcaattccattggagctatttttcagttgatttacatcatcatttttcattgcatatgctacaaaacccaatgagcttgagatgttgggttcttggtatcggt

SEQ ID NO: 226478 - DNA, 369 bp, Gossypium hirsutum
gaataatagtactagtaggggaaatttcttgtacgcatctcaagttcttgcatcaaatggttcttcatatggtagaacaagtagtgggtcaataccgccagttttaacctcttttcatcttcaaccgagtgatcaacacccaattgtgaaaactgaagctagtacctcacaacatgcccaaaaattccattacaacaacaacaacaataaccctttgttgagagggcatcaaccaattcattaccaacaagaagggaatgaaagctctagtgaagtggaagctattaaagccaagatcatagcttcatcctagtactcaaatcttcttgaagcttacatggattggcaaaaagttggagctccacctga

SEQ ID NO: 226479 - DNA, 246 bp, Gossypium hirsutum
gaaaaatgtaagagcagatacagcaatgactggagaaatgacactgaggggtctcgtgttacctgttggtggtgtcaaggataaggtactagcagcacactgttacgggatcaagagggttattttgtcagatagaatatctgaaggatttagttgaatgtcctgcatctgctctttccagtctagagatatttgtggcaatattaatgttagacgtttttgtagcatgcattagatggtggtttg

SEQ ID NO: 226480 - DNA, 338 bp, Gossypium hirsutum
gcaatactcgaacaagaatgcggcccatgtcatcaagataccctgggagtatacagcaatcttgcagcaacttatgatgctatgggaagggtcgaagatgcaatcgagatattggagtatgtactaaaattacgagaagaaaaacttggaatagcaaatcctgattttgaagacgaaaagaataggctggctgagctcctgaaagaagcgggcaggccacgcaacagaaaagcaaaatcactggaaaatctcatcgatccgaactcaaagaggacggcgaagaaaagaggggacgaaaaaaatggggtttcagaaatttgaaaggaaggcatttccca

SEQ ID NO: 226481 - DNA, 343 bp, Gossypium hirsutum
ggaagatgcttacgatgactgcaacactgtaaatgccatatctactttgaccaccgggccggcaaggattacccttaacaagaccggtgaccattacttcatttgcagtgtccccggtcattgttccgccggccaaaagctcaaggttgaagttcgaactggtaacaccaccggtggcgttgctccgtcgccgcctgtaacttcaagcaccaccacttttacagtgggtgactctactggttggcgtgtccctaccaatgatgatttttatgaagattgtgctgatcataaacacttcgttgttggggatgatttaatgtttaattttacgaccttacagctt

SEQ ID NO: 226482 - DNA, 333 bp, Gossypium hirsutum
atccaaccaaacatgcaacagggtaccggaggatctgagacggaggttacttgggaggatcaacagaatattaacaagtttggaagattaaacaatcgatttcatgagcttgacgatgaaatcaaggttgccaaggaagcaattgataacctggaggatgctagtaatgagttgattttaactgatgaggaagtagtacggttccaaatcggagaagtctttgctcatgtccccaaagaggaagtggagaccaggatagaagagatgaaggaagtgaatagcaagaacttggaaaagctcgaggaggagaaagaatcggttctggcacaaatg

SEQ ID NO: 226483 - DNA, 383 bp, Gossypium hirsutum
ctttttgcatcttcgaaatatcctgaaagattttaaagatttcccttcactttttcttttgatcaactccattcttcagatcaccttacattgactgatcggagaatctgtgttcgtttccgaatttgcggcttttataatttggggaagaagagaattgcatgaatataaagttgtggtgtttgtactagatgaagggagcgcaggcgtggcgactaggcagcatgggtgatatgcaaatcttgcctgggtctcgccaccgccctcctttgaagaggccgatatggattatttcattggttcaattagttggccttttcctagtttgtgcttatatctattcaccacaaggcagtgctgcttgttatgtattttcttcaaga

SEQ ID NO: 226484 - DNA, 384 bp, Gossypium hirsutum
attatttcttttgtttccgctggtattctgatacagtttaaaagggaacttgaatatgagcaaacaatgcgattgtgggaagtattgtggacgcattatttgtcggagcacctccatctgtatgtgtgcgtagctatcttgaagcgctatcgagggaagataatgggagagcaaatggactttgataccctcttgaagttcatcaatgagctgagtgggcagattgagcttgatgcgatcctcagggatgcggaagctttatgtatatgtgcgggtgagaatggagctgcctgcatcccacctggaactgtaccttctttgccagttgacaatggtttattctatagtcagctagatgatgaatcactgtaaattgatttacca

SEQ ID NO: 226485 - DNA, 393 bp, Gossypium hirsutum
ccacgcgtccgtacccccgctgctcttaaccccttccgcttcgccatggcatcagagaagaagctttcgaacccaatgagggagatcaaagtccagaaacttgtcctcaacatctccgtcggtgagagcggcgatcgtcttacacgtgccgccaaggtcttggaacagctcagtggtcaaaccccagtcttctccaaggctagatacactgtgagatcttttggaattcggcgtaatgagaagattgcttgttatgtgactgtgaggggggagaaagctatgcagcttcttgagagtggtttgaaggttaaggaatatgagcttttgaggaggaacttcagtgatactggctgctttggattcggtatccaagagcacattgatcttggtatc

SEQ ID NO: 226486 - DNA, 395 bp, Gossypium hirsutum
caaaaggaaaatctccattttagcagactatcttcgccgcctcctcttcctcctatctcatagcagccatgatcattccagagaagaaccgccgcgagatctccaagtacctctttcaagagggtgtttgctatgcaaagaaagattacaacttggcgaagcacccagaaatcgatgttcccaatcttcaagtcataaagctgatgcaaagcttcaagtcaaaagaatacgtgcgtgaaacttttgcatggatgcattattactggtaccttaccaatgatggcattgagttccttaggacatatctgaatcttccttctgagattgttcccgctactttgaagaaacaagctaagcctgctggtcgtcccatgggccctcctggtgaccgccca

SEQ ID NO: 226487 - DNA, 388 bp, Gossypium hirsutum
  unsure (1)..(388): unsure at all n locations
cttagaaggtgtcttaataaacgccttctttcttcttcttctccctttctttgctgtggcgaatttttcttaagcgagaatgagagagtgcatttcgattcacatcggtcaggccggtatccaggtcggaaacgcctgctgggagctttactgcctcgagcatggaatccagcctgatggtcagatgccaagtgacaaaactgtcggaggaggtgatgatgcttttaacacctttttcagtgaaactggtgctgggaagcacgtccctcgtgccgtctntgtggatcttgaacccactgttattgatgaagtgagaactggtgcttaccgccagctcttccacccagaacaactcatcagcggcaaggaagacgcagctaacaacttt

SEQ ID NO: 226488 - DNA, 393 bp, Gossypium hirsutum
tgaatcttgatgatttacgccaattgtggcttcaccttcaatacaatctagtcagggtcatcatttgctctgctagggtagtcttcgggttaacagtctatatcatgacccgaccccgaccggtttaccttgtcgattattcttgttaccgtcctcccgaccatcttaaagccccgtacggtcgtttcttggagcactctaggttgaccggggattttgatgagtcgtcactcgagttccagcgcaagattttggagcgctcggggctgggagaagagacttatgtgcctaaagcaatgcatagtatttctccgacgccgtctatggcggcggcaagggaagaagctgaggagggtatgtttggggcattggatactctttttcgaaacacga

SEQ ID NO: 226489 - DNA, 303 bp, Gossypium hirsutum
agaacggcgggtcgcacgccgtccaaccccacccaaatccaaccgtaaaatctccttcgtggaacccactcaatgatccggcggctaattatccttccgtgggttataactgcaatccccctcccagtccttgtcccgtcgattccctttaatcgttccaccgttacctcccgtcaaacaatttcaagtcgtccgacttctttgagggaggattcggattttcctgttgacgcgttctcgtgtgaccatttccctatgtatgagttcaaagtgaggaggtgtgctcctggcatgtcacattac

SEQ ID NO: 226490 - DNA, 393 bp, Gossypium hirsutum
gaagtttcctttctcgattttctatttagccaaacaagatgcagatcttcgttaagactctaaccggcaagacgagcactctcgaggtcgagagctccgatacgatcgacaacgtgaaggccaaaatccaagataaggaaggcatccctccagaccagcagcgtctgatcttcgccggaaaacagctcgaagacggccggaccttggccgattacaacatccaaaaggagtcaactctccacctcgtcctccgtctgcgcggtgggatgcaaatcttcgtgaaaaccttgactggcaagacaatcactctcgaggtcgagagctccgacacgatcgacaacgttaaagcgaagaaccaagacaaggaaggcatccccccagaccagcaacgtc

SEQ ID NO: 226491 - DNA, 393 bp, Gossypium hirsutum
cccacgcgtccgcccacgcgtccgcggacgcgtgggttctcaactaaacttataacgttcgatcgtttaacgcaaacccatttttaagtgagggaaaggtttcagttcagagtcataagcaacatcaatggctccttcaactctgacggctcttgcggaagagaaaaccttgcaggcaagcttcgttcgtgatgaagatgagcgtcctaaggttgcttacaaccaattcagtaatgatatccctgtcatctctcttgctggtatcgatgatgttgatggcaagaggggtgagatatgcaagaagattgttgaggcttgtgaggattggggtgtcttccaggttgtggatcatggtgttgatactaaactcgtgtccgaaatgacccgtcttgc

SEQ ID NO: 226492 - DNA, 396 bp, Gossypium hirsutum
ccacgcgtccgaaccctagccgcccctttctcttaagagcaagcccgacaatgccgcccaagttcgacccgacccaagtcgtcgacgtattcgtccgcgtcaccggcggcgaagtcggcgcggctagttccttagccccgaagatcggtccgctgggtctttcccccaaaaagatcggtgaagacatcgccaaagaaacggccaaggaatggaaaggcctccgcatcaccgtcaagctcacggtgcagaaccgtcaggcgaaggtcacggtggtcccttccgcggcggcgctagtaatcaaggcgttgaaggaaccggagagggataggaagaagaccaagaacatcaagcacaacggtaacattagcctcgacgacgtcatcgagatcgctaagg

SEQ ID NO: 226493 - DNA, 380 bp, Gossypium hirsutum
gcaaaaatctcgaagcttccttttcctttttagatctcaaaattcaaaaagctcgctgtttcatctcatggctgcggcgatcgtctccgtcaaagctaggcagatcttcgacagccgtggaaatccaacggttgaggttgatgtggaaacatcgaacggtataaaggctagggccgcagttcctagcggtgcatccactggaaattacgaggctcttgagttgagagatggaggttccgattacctcgtgtaaggtgtatcgaacgctgttgctaatgttaacacaagcctcggccctgcattgattggaaaggacccaaccgagcatactgcaattgacaaattcatggttcaacaactggatggaaccctaaatgagt

SEQ ID NO: 226494 - DNA, 385 bp, Gossypium hirsutum
tccaaccttttttcccaaaaccaaaaccacgtatcaaaaaaccaaattcaccatcacagggggcaaggtccgactttccaaggaaaaaattgaaaaaatggttcaggaaccaaaaaattccaaatccgaaattgaaaaccataaaaggaaggtcaaggcaaaaaatgcattgaaaaactatccttacaatattaggaccacagttaaggacaaaaagattgttgccaacttcccagcacctgataaaaagaagatcgaagatcctattgaacaagccattcaatggttagacagcaaccaactcgccgaatccgatgaattgaagacaagatgaaggagttggagagtattctcaaccccatcattgctaagatgtaccaaggtg

SEQ ID NO: 226495 - DNA, 391 bp, Gossypium hirsutum
gttttccttgttctcttctacattcagcgaaggggtgctctgagatcacataccaaaatggtgaaggccgttgccgtccttggcagcaatgaaggtgttagcggaactgttttcttctcccaagaaggagatggtccaactaccgtgactgggaacctttctggtcttaagccgggactccatggcttccatgttcatgcccttggggacacaactaacgggtgcatgtcaactggaccccattttaatcctgctggcaaagagcatggtgctccagaagatgagaaccgccatgctggtgatctagggaatgtcactgttggtgatgatggctgtgcaagcttctccatcaccgacaaacagattcctctcacaggcccaaactccatta

SEQ ID NO: 226496 - DNA, 393 bp, Gossypium hirsutum
cccacgcgtccgggctgctcagggctctccacaactcctctttatttatttcactaattgttagaatagtgctaatcaacagaatgcaggcatccatgtcggttacctcgacgaactccacattaccaatgccagtgcaaagcagccttggattctctcaccgcttccttccttcatctcatcggttttctcaacttccgatcacccgcttttctcccgctcctacttcactcaaatgcaggggctctctttcaagctttccacttgttaatgatgaaaagaagtttgtggaggcggccaaaaaagcaaatttagtccccctttatcgttgcattttctctgatcaactgactccagtgcttgcataccggtgtttggttaaagaagatgata

SEQ ID NO: 226497 - DNA, 396 bp, Gossypium hirsutum
ctctccataaatctctcactcaacgcagagcgaataggcggagacttccaagaatctatcgcatcagctaatcacgctctaaagaatggatcaggttcaacacccatctatcatgcagaaggtagcaggccagctccttcgttctagccattctcaagattttcaaggttataatgggtctttcaggagtcctgctctataccaaaggcgtgctgcatatggcaattactccaatgctgctctgcagcatcctgtccgggcttttggagacctgtctatggttccatcaacagcttctgctatttgcgttcaggctcctgctgagaaaggatttagcggctttgctattgatttcctcatgggtggagtttctgctgctgtatcaaaaacagctgc

SEQ ID NO: 226498 - DNA, 393 bp, Gossypium hirsutum
gtcaaggccttgctcatggacattgtggtcggtggaactgatacaacatcaaccatgatggaatggacaatggctgaactaattgcaaatcctgaagcaatgaaaaaggtgaagcaagaaatagacgatgttgtcggttcggatgccgccgtcgatgagactcacttgcctaagttgcgctatctagatgctgcagtaaaggagaccttccgattgcacccaccgatgccactccttgtaccccgttgcccaggtgacttaagcaacgttggtggctatagcgtaccaaagggcaccagggtcttcttaaacatttggtgtattcagagggatccacagctttgggaaaatcctttagaattcaagcctgagaggttcttgactgatcatcaa

SEQ ID NO: 226499 - DNA, 198 bp, Gossypium hirsutum
  unsure (1)..(198): unsure at all n locations
gtcagccaattgtttgagctagctatgctcntactcaaatggcaaccaaaacgatgatgggtgcaaatatttccactttgcttctttttgttcagtgtctgcaactccattttccttggtgctaatggagatgacaatggtggttggcaaactgcccatgccaccttctacggtggtgctgatgctaccggctcaatg

SEQ ID NO: 226500 - DNA, 395 bp, Gossypium hirsutum
gcggaggatcaaattaagcggctggcgaaggatccgcaagtcgttccggctctcgttcagcaccttcgcactggcaagactcccaacgtccgtcaactcgccgcagttctcctaaggaagaagatcactggacactgggctaagctcgctcctcaggttaagcaacttgtcaagcagtccctcattgaaagcatcacaatggaacatagtccaccagtgaggcgagccagcgcgaacgtagtgagtatagttgcgaaatacgctgttccggctggagaatggcctgatctgctgccgtttctgtttcagtgtagtcaaagtccacaggaagatcatagagaagtggctttgatacttttcagctctttgactgaaacaattgggagcacctttag

SEQ ID NO: 226501 - DNA, 390 bp, Gossypium hirsutum
taggaggtaagctcgggaaagatgtctatggggttcttagagttgattatgacggtgatatggatggtgttggaggggtggaagccgtggcagaggggattaccgtcgatgaattgaccggtgatgatggtacgagctcatttaaggaattgataccttttaatggcgtcttgaacttggagggtcttcacaggcctcttttgtccatacagttgacgaagttgaaagatggtgttgcaatggggtgtgctttcaaccatgccatcctcgacggaacctccacttggcattttatgagctcttgggctcaaatctgtaacggtacttcgagctccgtcgttgtgccgccgtttcttgatcggaccacagttcgaaacacccgcgtgaagc

SEQ ID NO: 226502 - DNA, 385 bp, Gossypium hirsutum
cccacgcgtccgatttttctctcctataaataacacagccgcagtgaggaaccgaatggcggggaaaaataacctggtccttttttttttgttcaaaagcgaagccctaactcgcatgctgttcggatcttaatcgtcgaagatccgattcatatctatctctgatctgatccaaaacgaaaccacccggcctctgagaaatgacgcgtcgctgctcgcattgcagccacaacgggcacaactccagaacctgcccgaatcgtggtgtcaagttgttcggagttcggttgactgacgggttggttcggaagagtgccagtatgagtaacttatcccaattcgccgggtccaattctgccgggcataacgggaatgggtcgggttc

SEQ ID NO: 226503 - DNA, 395 bp, Gossypium hirsutum
  unsure (1)..(395): unsure at all n locations
cgacaaatgttggaaccagacccaaatctccggcttactgcaaagcaagtgcttgagcatccttggctccaaaacgctaaaaaagcccccaatgtgcctcttggtgatgttgttaagtcaaggcttaaacaattttcaatgatgaacagattcaaaagaaaagccctacgggttattgctgagttcttatccgttgaagaagttgaagatatcaaagttatgttcaataaaatggacactgacaatgatggcattgtttcggtcgaagagctgaaagccggatttaaaaattatggttcacagcttgcagagcctgaagtgcagatgctcattgaagctgttgatgctaatgggaagggaacattggactatggggaatttcttgctgnttctct

SEQ ID NO: 226504 - DNA, 393 bp, Gossypium hirsutum
accgttgtttaatatacttgggagacctagcgaggtacaaaggactatacggagatggagattctaaatcacgcgagtatgcagctgcttcaaattactacttgcaagctgcatcaatttggccatcaagtgggaatccgcatcatcagcttgctatattagcttcatattcaggagatgagctggtggccatttatcggtatttccggagtttagctgttgataaccctttttcaactgcgagggataacttgattgtagcatttgagaagaatcgccataattactcgcagctccatggggatgttaagggccccttcaaggagcctgttgtgcggctatcggggaaaggcagggggaaattggaagcaaagcttgcatctaaagatgcca

SEQ ID NO: 226505 - DNA, 398 bp, Gossypium hirsutum
ggaaatgataaatcatgcgtttggcacgccgctgatttcgctgatgggaatttgaaagaagagatgttctgtatcagatttgcttctgttgagaattgtaagaccttcatggagacagttcaagatgttgctgaaagtcagggaaagaaagaggaaaataaagacgctacagtcactgctgatctcctcgacaagttgagtgttggagaaagtaaaagtgacggtaaagaagaagatacggtcgttgcctccgacaccaaggaagccgtcaaagatgaagcaaaaacagaggaagataagaaggatgaggctgcttcaaaagcatagacctgaaagagaaagcaacaatatactcgagtaagtttattataaaaaaattaatatttagtggtttaagg

SEQ ID NO: 226506 - DNA, 405 bp, Gossypium hirsutum
  unsure (1)..(405): unsure at all n locations
ccgaagaacaaaaaccacttggtatcaaaagaacccaaaatcaccatcacaaagcgagcaagggctcgacttctccaaagagagaaattgnaaaagatggttcaagggaagcagagaaatacanaatccgaagatgaagaacataaaaagaaggtcgaggcaaagaatgcattggaaaactatgcatacaatatgaggaacacagttaaggacgaaaagattggtgccaaactcccagcaactgataaaaagaagatcgaagatgctattgaacaagccattcaatggctagacagcaaccaactcgccgaatccgatgaatttgaagacaagatgaaggagttggagagtatttgcaaccccatcattgctaagatgtaccagggtgccggcggtgacatgggt

SEQ ID NO: 226507 - DNA, 184 bp, Gossypium hirsutum
  unsure (1)..(184): unsure at all n locations
agatgagctacctttatgcaaaagggtggatgacaaagggagataggatttggcagatggcttttaagagtggatgcgactgcaacacnccggtatggaagttcaatccaaccatcaaaaaaccaacatatgggcctcgggaggattgcatccatagtttttccgcccatatccacaaaactca

SEQ ID NO: 226508 - DNA, 392 bp, Gossypium hirsutum
agagcagtgaagaaagatgatcaaaatgggttttattgttttggccttgatggtgggttccgccgcgacggtggtgacggcggctgacgagagtgggttagcgaatgagtgcagcaaagatttccagagcgtgatgacttgcttaagctttgctcaaggaaaagcagcgtcgccgtcgaaggagtgctgtaattcagtggcggggattaaagagaataaacccaaatgtttgtgttatattttgcaacaaacacaaacctctggtgctcaaaatctcaaaagcttaggtgttcaagaagataagctgtttcagttaccatcggcttgtcaattgaagaacgctagcgtcagtgattgcccaaagctttttgggttatctccgagctcaccag

SEQ ID NO: 226509 - DNA, 394 bp, Gossypium hirsutum
gaacggtatgcctgtaactgttggggtcggaaatatcatttccgacgaaggttttgcattgttgatgtcaccagcggcagccgattccgtctggaaaactcttctatctcaaggtgctattcctttaggttctaatgcctgggaaaagctaaggattacacaaggtagaccagctcctggaaaggaacttaccaatgactttaatgttctggaggctggtctttggaactcaatttcattgaacaaaggctgttacaagggacaagagacaatatcaagactcattacatatgatggagttaaacagagactgtggggtattcatttatcagcacctgcagaaccaggcagccccattacagttaatgggaaaaaggtgggaaagctgacaagc

SEQ ID NO: 226510 - DNA, 395 bp, Gossypium hirsutum
cggacgcgtgggcaaaaatggctttcagagggaaggagatgatgaagctgttgaagaaggtgggggagaaaaacctagcgcatggagttaaggaacagcttcaaaaatccattccagacagcaaggtcgtcatgaaccgcgccaaacgcggcctttacgctggccgtcacatccagttcggcaaccgtataagcgaagacggtggaaacaaatcgaggaggatttggaagcctaatgtacaagagaagcgtctatttagttatatcttagatcgccatattcgagtcaaagtaaccactcatgccctccgttgcattgacaaggcaggcgggatcgatgagtacctgctgaaaactccctaccacaagatggatacagaaatgggtctgttctgg

SEQ ID NO: 226511 - DNA, 393 bp, Gossypium hirsutum
aaacacgtttcccgttctgggttttcaatcaaattttgctttgtttcctgttgcggaagatgcagcaactcttcagtatgttgcaaggatctctcatggcgctcctttgggatccactgaccttgtggttgatcttggcggttcgtttctttggatggattgcaattccggacacgtgtcttcatcatacaggttggtctcaagctgctcggtcaactgctctagagcaaagttccatgatcttggaagcacgagttgtctattaaacaccaactgttatgtgtccccttacaatggcgtaacaggatcgacttcaatgggggaactagtggaggatgtcatagccgttgattctgttgacccttcagatgtaggccaaagcacaacagtgga

SEQ ID NO: 226512 - DNA, 402 bp, Gossypium hirsutum
tcggccacgcgttcggggacccctggggtgtaaatttcgttcccaatcaacgcctttgtggatcgcataataagccatgtcgaggagaaaggttagggagccaaaggaggagactacaaccttgggccctgctgtacgagacggagagcatgtttttcggtgttgcccacatttttgcatcttttaatgacactttcattcatgtgactgatttgtctggaagagagactatggttcgtattacaggtggtatgaaggtgaaagccgacagggatgaatcttcaccttatgctgctatgcttgcagcacaagatgtttcccagagatgcaaggaacttggaaacacggccctccacatcaaattacgtgccacaagaggtaacaaaaccaagacccctggtc

SEQ ID NO: 226513 - DNA, 395 bp, Gossypium hirsutum
gaatagcccaagtgaaagttcctcacaatcatttgtcattcaaagaggggaagctcaaaacagtgatcaatgagaaaagggcaagtgaatgtgttctttttgttactgtttttgagtctctcttcagcttctgatcagaaatggaggaaagcaatgatgtcagcttacaatggttcttcttcttcttcttccatgatgatgaatagagttgggtcctccatcctgttcccaattcatggaaatgtgtatccaacagggtactataatgttaccatcaatataggtcaccctcccaagccttactttcttgattttgatactggaagcgacctcacatggctccaatgcaacgctccatgcgtccattgtattgaggcacctcacccgctttacca

SEQ ID NO: 226514 - DNA, 347 bp, Gossypium hirsutum
aaaaaaacgggaacatagcattaaaaaaaccagaacatagcattcattaccggaaacgacgttgaaagtgatgtacacaaatatgagcaagcactccgcaaattttggaaaaatgttgaaaaactcagctttcataccataaattttcatcaacttaaataggtcaaagcataaagcatcatgtgctgaaggcagcgccaagaatttactgaggatttgggggtcggctattcgcagcagaaaccctggagccccactccaacagctctttgctagtatcatccttgtgaacgatcacttcaatgaagcataagcagtccttcttcgctcctgttgccgtctcaatt

SEQ ID NO: 226515 - DNA, 399 bp, Gossypium hirsutum
ctcctgggtgcagcttactttgttgcaggcaccgatataggaaaattcaccatgaaaactgttgatgacattaggaccttgaataagtcagttcattttaggcctgcctgcaatttctataacatgaacgagcttgcagctttgtgggaaaggaaaatccggcgaacactccctcgagttaccgtcactgaggaagaccttctctcggctgcggcagagaatattatcccacagagtgttgttgcatcattcacccatgacatcttcataaagggttgtcaaatcaacttcccaatagaaggcccgaatgaaaccgaagcctgcagtctgtacccgaatgagccattccgaacattggatgactgcttcaacgacttcttagcaaagatgaaggatgaa

SEQ ID NO: 226516 - DNA, 398 bp, Gossypium hirsutum
aattcatctacattaacgcctatggaattttccaagacatcaccagcaaccctgcagcttacggttttaaggtgacaaatgcaggatgttgtggagtggggaggaacaatgggcaaataacatgcttgccattccaaacaccatgccagaacagggatgagtacttgttttgggatgcatttcatccaagtgaggctgccaatgtgatcattgggaggagatcctacagcgctcaatctcctaccgatgcttaccccattgatatccgccgtcttgctcagctctgaaactgaaagtcgacgaggtttttgatgggaatttatagataattaattgaatcgttgtagaattctttctatatttgtgtcgttttgaattgtgtaacagcttacaatcat

SEQ ID NO: 226517 - DNA, 396 bp, Gossypium hirsutum
ctcaaatatcaaatccctcgaaaaatccttcccatccaatcaccacccgaaaccatgggcactccttccccacgcgaagaaaatgtctacatggccaaactcgccgagcaagccgagcgctacgaggagatggtcaagttcatggagaacgtcgtctccgccgtccccgctcccgacgaactctccgtcgaggaacgtaacctcctctctgtcgcctacaagaacgtcatcggcgcccgccgtgcttcctggaggatcgtctcctccatcgagcagaaggaggaaggccgtggcaacgccgaccacgtcgccgtcatccgtgactacagggccaagatcgaggccgagttgtccgagatttgcgctggaattttgaagctccttgacgagaagctt

SEQ ID NO: 226518 - DNA, 388 bp, Gossypium hirsutum
tttttggtaagcagtaactggcacatgcattatgaacaatgacttggttacggtgccgagctacgagctcaggtgcaggaatgatcctcaatggtgaattagtcgaaccataaccgtgacagacaccaactattgtacacctaactatgctttatctagtgacaatggcgggtggtgcaatcccacacaagaacactttgatttggccgaaccggcattcttgccgatagcataatattgagctggaatcttacctgatatgtatacaacggtgttatgtgttaagaaaggaagcatcaagtacaccatgaatggacattcatacttaaacatggtgttgataacgaacgtgtgaggatcaggggatataacgtaagtgtgcatcaag

SEQ ID NO: 226519 - DNA, 376 bp, Gossypium hirsutum
cccacgcgtccggcttcctggtgataatgttgggttcaatgttaagaatggcgctgttaaggatctcaagcgtggttatgttgcatccaactccaaggatgatcctgctaaggaggctgcaaacttcacttctcaggtcatcatcatgaaccatcctggacaaattggaaacggatatgccccagtcctcgactgccacacctcacacattgctgttaagtttgctgaacttttgaccaagattgacaggcgatctggtaaggagcttgagaaggaacccaagttcttgaagaatggtgatgctggtatgattaagatgattcccaccaagcccatggttgtggagaccttcttcgagtacccacccttgggtcgt

SEQ ID NO: 226520 - DNA, 357 bp, Gossypium hirsutum
cggacgcgtgggagaactttgaagttcggctgctcagattttgcctatttcccgtatttttctctcagtgggggacgatgtctacggctggtgaagctgcttgttcttacgctgctttgattctctatgatgatggaattcccatcaccgctgagaaaattgcaacaattgttaaagctgcaaatgtttcggttgaatcttattggccaagcttgtttgcaaagcttttcgaaaagtgcaacattgaggatcttataaccaatgttggtgctgctggtgctggtgctccagttgccgcagctgcacctgttgctgctggcggtggtggtggtgccgttgctcccccttctgctgagg

SEQ ID NO: 226521 - DNA, 373 bp, Gossypium hirsutum
aattggttcagaaaagaaaaatggtcaccattgatgttcctgagcaagtttcggttcttgcatatgcaggagctgttataaaggcttgtaaaggatgggggacagatgagaaggcaataattgcagtgttgggtcacagaaatgcagatcaaaggaagcaaatcaggcttgcttatgaagacctttaccaggaagatctcatcaagcgtcttgaatcacagctttctggtgatttatagaaagcagtgtatcgatcgatattggatccagcagaccgagatgccgggttagctaatgctgccatagagaaattaagccctgatcaccatgtgatcgttgaaatctcatgcaccagatcctctgaagagctctt

SEQ ID NO: 226522 - DNA, 378 bp, Gossypium hirsutum
caataattctctttctgtttctcttttttaaacatgggtatgggtttaagggggggatttcttttgattttagcttgtgttgttacactttccctctcagttttggggcgacctgccactttccttgaagattttagaatcacttggtctgattctcatattaggcaaatcgatggagggagagccatccaacttgttctcgaccaaaattcaggctgtggatttgcttctaaaaggcagtatttgttcggacgtgtcagcatgaaaatcaagctcatccccggcgactccgccggaacagtcaccgccttttatatgaattctgttacagatgctgtgcgagatgagctagacttcgagttcttgggaaaccgtacc

SEQ ID NO: 226523 - DNA, 379 bp, Gossypium hirsutum
ccttacccttccaatttcttgttctgtattttgaaaaccgaatatcaagggctctgtgttcttcttttctacttagttaaagaaaagagatgcagcacgacgaggtgatatggcaagtcatcaggcacaagcactgcagtttcatgtccaaaatcactactggtattttctgtagaaacccttataacgtcactgggatctgcaatcgtagttcctgccctctcgctaacagtcgctacgccactatccgtgaccacgatggggtcttttacttatatatgaagactatagaaagagctcataaacccaatgatttatgggaaagagtaaaattgcccagaaattatgagaaagcacttgaacttattgacaagcatct

SEQ ID NO: 226524 - DNA, 320 bp, Gossypium hirsutum
cccacgcgtccgtactactccaagcaagcattttccttacaagtttgtttttcttgtgattaatcgatatggggaggtcaatgtcccttaagcttgcatgtgtggcggtgttgtgcatggtggtgggtgcacccctggctcaaggggccgtaacctgtggtcaagtcacaagctccctcgcaccctgcattggttacttgacagggaatggcgcttgtggcgttcccccaagttgcttcgggggcataaaatcttttaacttcggcggccaaacaacaccaaacccgcaagcaacttggaaattccttaaaagggccggc

SEQ ID NO: 226525 - DNA, 384 bp, Gossypium hirsutum
  unsure (1)..(384): unsure at all n locations
gttattcttcaacaatnttattcttctttattcnntggttgctcagcgcattcatgtttgattggtctaactcattcctcgtgagctaatggtaaggttaatatattgcctcctaccaatacaagtgataaggtcactttggccctgtactatgaaactttatgcccatattgtgccgactttatcacaaatgaccttgtaaaggtattcctcagcgatctgtttaccattgtcaatctaaagttagtcccttggggcaatgctgacattcttggcgatgaaccccattgccagcatggagaagatgaatgctacttaaataccatacatagctgtgtcatctaccactggcctgatgtgaaaaagcactttgatttcattcgc

SEQ ID NO: 226526 - DNA, 376 bp, Gossypium hirsutum
gcggaggatcaaattaagcggctggcgaaggatccgcaagtcgttccggctctcgggagcaccttcgcactggcaagactcccaacgtccgtcaactcgccgcagttctcctaaggaagaagatcactggacactgggctaagctcgctcctcaggttaagcaacttgtcaagcagtccctcattgaaagcatcacaatggaacatagtccaccagtgaggcgagccagcgcgaacgtagtgagtatagttgcgaaatacgctgttccggctggagaatggcctgatctgctgccgtttctgtttcagtgtagtcaaagtccacaggaagatcatagagaagtggctttgatacttttcagctctttgactgaaac

SEQ ID NO: 226527 - DNA, 381 bp, Gossypium hirsutum
gttatttggcaatgaggagtgagctagatgcaactgatctcatcgcatctgacgtggcgagatctaatctttgctactggagaagcttgctaaccatgctatcaaattgggttcttggggatttgggaccacccttcttgaatggatcgcttccttcgctgcaatttatctattgatattggaccgtacaaactggaaaaccaatattcttacagcactgttaatcccatacatcttcttgagcctgccttccttcctgttcaacatcttgaggggagaagttgggaaatggattgcttttattgcagtcgttttgcgcttgttcttccctacacgtttcccagattggctggaacttcctggagcattgatacttctaat

SEQ ID NO: 226528 - DNA, 357 bp, Gossypium hirsutum
cccacgcgtccgaaaatcacttcatcatggcttcctcgtgtgcttcctctgccattgcagctgttgccatctccacaccaagttcccagaagaatggatcactcttgggaagcacaaaagcttcttttcttagtgggaggaaactgaaggtgaacaactttacagcaccagttggagcacgatccagcactacagtttgcgcagttgctgagcctgataggcctctgtggttcccaggcagcacccctcctccatggctagatggcagtttgccaggagattttggctttgatcctctaggtcttgcatctgatcctgagagcctgagatggaatgtccaagcagagcttgtgcact

SEQ ID NO: 226529 - DNA, 365 bp, Gossypium hirsutum
gaatagcccaagtgaaagttcctcacaatcatttgtcattcaaagaggggaagctcaaaacagtgatcagtgagaaaagggcaagtgaatgtgttctttttgttactgtttttgagtctctcttcagcttctgatcagaaatggaggaaagcaatgatgtcagcttacaatggttcttcttcttcttcttccatgatgatgaatagagttgggtcctccatcctgttcccaattcatggaaatgtgtatccaacagggtactataatgttaccatcaatataggtcaccctcccaagccttactttcttgattttgatactggaagcgacctcacatggctccaatgcaacgctccatgcgtcca

SEQ ID NO: 226530 - DNA, 378 bp, Gossypium hirsutum
atttgatctttctcttccaaaatcaattccaaaaagagagaaaatcccaccaaaaaaatggcgaattctaatggcaacaacaacgacgagcaccatgaatcgagtcctcttttgagcaaacaagtggcagaccaagatttgaaggaaaaacctagtggtaaaaaggcaaaagaagctgccgccgaggtgccagctcatccggtagttgctaccggagatgggtttgggtggacggctgatgggttgccgttggtccaccggagtgtcgtcggagaacccttgggtcgatctcaatggaactcatctctccttgcttgtcttggccgtaacgatgaattttgcagcagcgacattgaagtctgtttccttggaagcttg

SEQ ID NO: 226531 - DNA, 372 bp, Gossypium hirsutum
gacaaatgttacaactcaagttcgtgggacaatgggccacatagcaccagagtgcttgtccaccggaaagtcatgagaaaggacagatgtttttggttacgggattatgcttctagagcttgtaacaggtcaacgtgcaattgatttttcacgcttggaagacgaagatgatgttttgctgcttgatcatgtcaagaagctggaaagggagaaaatgctcgatgctattgttgatcgtaatcttaataaaaattacatcatgcaagaggtagaggcaatgatccaagttgcactgctttgtacccaatcttcaccagaggaccgtccggcaatgtcggaggtagtgaggatgttggaaggagaggggctggc

SEQ ID NO: 226532 - DNA, 349 bp, Gossypium hirsutum
atcatattttcaaaacgcataaccattattgtctttcccctttaaccactctcaccggggggaccacgacgacggggacgaaccaccccccctttacccttcttcgggttataccttcaacaacccttcaccacccttatacgggatccttcatgcataatacttactttaccttttttagcaagatccaacacttccgtttgcgcaactgctgagcctgataagactctgtggtttccaagcagcacccctcctccatggttagatggcagtttgccaggagattattgctttgatcctctaggtcttggatttgatcctgatagcctgtgatggaatgtccaatcat

SEQ ID NO: 226533 - DNA, 373 bp, Gossypium hirsutum
aaaaaagaaaaaaaaaagacagaaattaaaataaaaagtgaaagagcgaaaaagagtaaagcacaaagaaacagatttgacacagttgaaaatcttttgagtttccgtgcttaaaaaattaaactagttttaaaagaggggaaaatcatttgattttcctttttttaatttgaatttcgcagcaataactgagaatcaatcactttcagtgttttttttgggagaaaattctatgtcgagcgagagagttcccgttgagttatccaagggcgttaacggccttgaaaaaatcatcctccgcgagactcgaggcagctctgccgaggtgtatttgtatggaggacacgtgacatcttggaagaatgagcatgga

SEQ ID NO: 226534 - DNA, 377 bp, Gossypium hirsutum
tacaaacaccccctccctctttcattgtgatctccgctctcttctctctttcagatcgaaccaaaaaaacccgagcccaatggcttcttcaactggattttcactcaatttctcccctctttcaacttctttgaagcacaaccaggtacctcttcatgggatctctaatgtcaacttacttagtctcccatctcttagaatccgaccgggacctatgcgcctccgggtttcttgtgcggccaaacctgagacggtggacaaagtttgtagcatagtgaggaagcaactagcactaccagaagattcttctgttaccggagaatctaagtttgctgcactcggagccgattctcttgacacggtcgagattgtgatgg

SEQ ID NO: 226535 - DNA, 369 bp, Gossypium hirsutum
aggacagttcctttggttttgagagaaaagagtagatcttggcttctctccttcgttcgattccgcttaattatagcccgcgtttctctcagacgtgaaaaatggggctgtctttcacaaagctatttagccggcttttcgccaagaaggagatgcgtatactcatggttgggcttgatgctgcgggtaaaactaccattctttacaagcttaagttgggagagattgtcactaccattcccaccatcggtttcaatgttgagaccgttgaatacaagaacatcagctttactggttgggatggtggtggccaggacaagatccgaccattgcggagacactactttcaaaacacccaaggacttattt

SEQ ID NO: 226536 - DNA, 375 bp, Gossypium hirsutum
cccacgcgtccgagctcagctcagttcatctcattttacataactcttttctactgcggtggcgatgggggcggcgatgttgtcggagatggcgacggagatcgtggtgccagtgtgcgccgtgattggaatagctttctcgttggtgcagtgggtgatggtgtcgcgcgtgaagcttacctccgagcgccatgcgtcgtcggcgaatagtagcaagaatggttacggtgattacttgattgaggaagaggaaggaatcaatgaccatagcgttgtcaccaagtgcgctgatattcaaaacgctatctctgaaggtgcaacatcctttctttttactgaatatcagtatgttggcatcttcatgattgcttttgc

SEQ ID NO: 226537 - DNA, 373 bp, Gossypium hirsutum
cctcaagtgcatggctggcttccccaccagaaagaccaacaatgacattacctccattgctagcaacggtggaagagtgcaatgcatgcaggtgtggccaccagttggcaagaagaagtttgagactctttcctacctgccagaccttgatgatgcacaattggcaaaggaagtagaataccttcttaggaagggatggattccttgcttggaattcgagttggagcacggtttcgtgtaccgtgagcacaacaggtcaccaggatactacgatggacgctactggaccatgtggaagctgcctatgtttggttgcactgatgcttctcaagtgttgaaggagcttcaagaggctaagactgcataccccaac

SEQ ID NO: 226538 - DNA, 375 bp, Gossypium hirsutum
aaatccgcgaacatagattctgatcgtaagaggaagaaatcttcgatctgatccgcagatcgaacggcggggaaggagggcgaaaaacataaagataaagctcccacttcctccaccaatcaccaccaccaccaccaccaccacaaaaagaagagcaagatgtcttcttcatcgcccgccaatcaagtgagggcttctcacatcctcatcaagcaccaaggctcccgccgtaaggcctcttggaaggatcctgaaggtcgcgtaatctccaacactacccgagatgccgccgtctcacagctcaaagccctccgtgacgacatcacttctggcaacgctaagttcggtgaggttgcctctcgccactccgattgc

SEQ ID NO: 226539 - DNA, 373 bp, Gossypium hirsutum
ttttaatttatttgcccacaatcgctctctctctctttcagttcacttctacagccttctcttctccacgaatccaaaaaaaccaaagatgcagtacaaaaacctgggcagatcaggcttaaaggtgagtcaactatcgtatggagcatgggttagtttcggtaaccagctcgatgttaaagaagcaaagtcacttctccagtgttgtaaagacaacggagtcaactttttcgacaacgccgaggtttatgccaatggtcgagccgaggagatcatgggtcaggctattagggaacttgggtggaaacgatcggatatcgtggtttctaccaagatcttttggggtggtcctgggccaaatgataagggtttg

SEQ ID NO: 226540 - DNA, 371 bp, Gossypium hirsutum
atcagaacagtctactaagcactttggattcgttctccggaggaggcattggtagacttggtatatgctcccttggtattgttccttttattaacgctcaaatcgtgtttcaactcctcgcccaagtttaccctaaattgcaagatcttcagaaaagagaaggtgaagctggaagaaagaaaattttgcaatatactagatatgcctcggttttttgctatagtacaggcaattggccaagtactttaccttcgtccatatgtcaacgatttcagcacgcagtgggttctctcctctgttactttattgacacttggtgctgtactgacaacatatattggggaacggatttctgatctaaagcttggaaa

SEQ ID NO: 226541 - DNA, 376 bp, Gossypium hirsutum
caaaaggaaaatctcaatttaagctaattattttggcggcttctttttcttctatctcatagcagccatgatcattccagagaagaaccgccgcgagatctccaagtacctctttcaagagggtgtttgctatgcaaagaaagattacaacttggcgaagcacccagaaatcgatgttcccaatcttcaagtcataaagctgatgcaaagcttcaagtcaaaagaatacgtgcgtgaaacttttgcatggatgcattattactggtaccttaccaatgatggcattgagttccttaggacatatctgaatcttccttctgagattgttcccgctactttgaagaaacaagctaagcctgctggtcgtcccatgggc

SEQ ID NO: 226542 - DNA, 373 bp, Gossypium hirsutum
tagttctagatcgcgagcggccgctgcgatctagacggacgcgtgggagccggttcacacatctcacttctctgcaatttcactcccttagagagaaaaaaccatggcggccgcagctcaaatcagcaaaaagcgaaagttcgtcgctgacggagtcttcttcgctgaactcaatgaagtcttgactagggaactggccgaagatggatactctggtgtcgaagtcagagttactcccatgcgtactgagatcattatcagagccactcgtacccaaaatgttctgggcgagaaagggaggaggattagggaactgacctctgttgttcaaaagcgattcaagttccctgaaaatagcgtggagctttacgct

SEQ ID NO: 226543 - DNA, 372 bp, Gossypium hirsutum
ccagcatccttgtactccccttgtttcaattcccagaatccagcctccaacgccatgagaagtgagatagagagtgtttgggtgtttgcccttgcatccaaatggcgaaccttttctcaagaaagctttgcatggtcgattttcatcattcttcttgcctggctaatcatgacccttgtctactgggcttaccccggtggcccagcctggggcaaatacaggttcgtgaaccgttcctctcttactgctgctaacaagaggagaattccagggcctagaggtttgcctctaataggcagcatgaagctgatggccaactccttggctcaccaccggattgcggccgcagcagaagcatgcaaagccaagagg

SEQ ID NO: 226544 - DNA, 380 bp, Gossypium hirsutum
cggacgcgtgggcaaatttcagaaagcctgtattaaaacaaactcttgtggataaaaagattgaggaaaagaacatcgaagtgatgaagaaagaagattgcttccaaaagaacctcattaatgaggaggcattaaaaggtcaattgcaaaaacagcaaatgatctttgatcaacaacaaaggaatattaaggaactaaagcatgctattaattccacaaaagcaggcatgcaattcatacaaatgaagtttcatgaagaattcaacagtcttggtatgcatattcacggcctagctcatgctgcttctggttaccacagggttctagaagaaaaccgcaagttatataaccaagttcaggatcttaaaggaagtatccgt

SEQ ID NO: 226545 - DNA, 372 bp, Gossypium hirsutum
ggaacatgtgcacagattcaacacttcttttttttatacacactattgtggctgaagggattggggatatgaacatggaagagcaaaataacgaagattgcttccaaaagaacctcattaatgaggaggcattaaaaggtcaattgcaaaaacagtatatgatctttgatcaacaacaaaggaatattaaggaactaaagcatgctattaattccacaaaagcaggcatgcaatttatacaaatgaagtttcatgaagaattcaacagttctggtatgcatatttacggtctagctcatgctgcttctggataccacagggttctagaagaaaactgtaagttttataaccaagtttaggatcttaaatgaa

SEQ ID NO: 226546 - DNA, 373 bp, Gossypium hirsutum
caaaaattggaagctgaacaaaaggtcaccctccgagaaaagcagcaaggttctgctttggttttctttaccagtagggtgactgcagccctggctgctcaaagcctacatgctcagatggttgacaattggaccgttactgaagcgcccgaacctcgtcaactcatatggagcaacctgaccatcaagttttacaataggataatacgacaatatgtcgtttatattgtcgtgtttctgaccatagttttttatatgattcccattgcttttatctctgcagtcacaacccttaagaatctgagaaaacttctgccattcttgaagcctattgttgatatagctgcactaaagacggtattggaggcatatc

SEQ ID NO: 226547 - DNA, 376 bp, Gossypium hirsutum
cccacgcgtccggcagaacatattatcatttcctcttttttttttttttttttttttttggaggtttaacaaatggcaacaaccactgtgatcatgaccactctcccccaattcagtggtcttagacctcaattctcagctgcccctgtgaagaacttggttgctgtccaacaacctatgaggcccaaggggaagggtgctttgggagctcgatgtgactacattggttcatccactaatctgattatggtggcttctacaaccctgatgctgtttgctggaaggtttggattggctccatcagcaaacaggaaagccactgcagggctaaagctggaggtgagggacttaggcttgcaaactggtgaccctgctg

SEQ ID NO: 226548 - DNA, 375 bp, Gossypium hirsutum
cccacgcgtccgcccacgcgtccgttgacgcgtggggcgcggtgggatgcaaaggttcgtgaaaaccttgactggcaagacaatcactctcgaggtcgagagctccgacacgatcgacaacgttaaagcgaagatccaagacaaggaaggcatccccccagaccagcaacgtctcatctttgccggaaaacaactcgaagacggccgtaccttggccgactacaacatccagaaggagtcaactctccaccttgtccttcgtttgcgcggcgggatgcaaatcttcgttaagacgcttaccggaaagacgatcactctcgaggtcgagagctctgacacgatcgacaacgtgaaagccaaaatccaagacaagga

SEQ ID NO: 226549 - DNA, 376 bp, Gossypium hirsutum
tgcacttgatgattccacctcaaaggcaaaatgtgcacgtgatgcagtcactccccttgctcatatgccttatagtgatcaattggagcacaagaagaattctgtcatgcagatgctcaaaaaacttacgagaaatgcacgtaaagcatgtcctaacggtgtttcacttcctcagtgggttcttcatctagggaaagaggcggtcttccatgtgaagtagaaggtataattgaatcaccagttgtaaatggataccgtaataagtgtgagttttctgttggatattctcaacagggaaaaccaactgtggggttcatgcttgggaattttagggagggtgtgacagctgttgaagaacctgtggactgcccaaatg

SEQ ID NO: 226550 - DNA, 381 bp, Gossypium hirsutum
cccacgcgtccgcttttctctgcgagcattttccgctatggccgaagaatttgtgaagggcactgttcatcaaaacggcgtcgctgtcatcaccctcgatcgccccaaagctctcaacgccatgaacctagatatggatgtaaagtataaaagttatcttgatgaatgggaatctgatccaagggtcaaatgcgtactggttgatagtagctcgcctcgtgccttttgcgctggtatggatattaaaggggttgttgctgaaatacaaaaggacaaaaacactcctttagtgcagaaggtcttcactgctgagtattctttgatatgcaaaatttctgattacaagaagccatacataagcttcatggatggaataactat

SEQ ID NO: 226551 - DNA, 326 bp, Gossypium hirsutum
caaagctctgtctgtgtattctctttggcttatctatcgctttgatttcgcatccttgctgtgcactcgatggcaaatcgatggttgaggcctgaggtgtatccgctgtttgcggccgtaggtgttgctgtcggaatctgcgggtttcagttggtgcgcaatatctgcatcaaccctgaagtcagggtaaccaaggagaacagggctgctggggttttggacaactttgctgagggagaaaaatattctgaacatttcttgagaaaatatgtccgcaacaagacgccagaaatcatgcccagtatcaacagcttcttcactgaccc

SEQ ID NO: 226552 - DNA, 372 bp, Gossypium hirsutum
cggacgcgtgggttcatttccaagctctaaccctgcgttcaatggaaatacaagcccctcatcccatcaccaaatcttcagaccctgagaaacatgatgccaccagcggcggaaaccacgacgtcgaagacgacgagatctcccctatcgaacaagtccggctaaccgtaaccaacaccgatgacccgacgttgcctgtatggaccttccgaatgtggttcttaggcttgttctcatgcgcccttctctcttttctcaaccaattcttctcttacagaacagagcctctcattataacccaaatcacagtccaagtttccacacttcccattggccatttcatggcttctgtcttacccaaaacccagttcg

SEQ ID NO: 226553 - DNA, 378 bp, Gossypium hirsutum
cccacgcgtccggtatgggaccaaagagagagcttaagtttgctttggaatcattttgggataagaagagcagtgctgaagatttgcagaaggttgcagctgatctcaggtcagctatttggaaacaaatggctgatgctgggatcaagtacattcctagcaacactttctcttactatgaccaggtgcttgatgccacctctatgctcggtgctgttccaccgagatatggttggaacggtggtgagatcggattcgatacttacttctccatggctaggggaaatgcctctgtgcctgctatggaaatgaccaagtggtttgacactaactaccacttcattgttcctgaattgggacctgatgttaacttctctt

SEQ ID NO: 226554 - DNA, 377 bp, Gossypium hirsutum
ttgtactttcttttttacctatccatttttcatttcactcaattcttctttttcttctttaattccgtttcagcgagtgaaactgtttggatctacttctaaagcaacgaccaggagtttcttcttgacagctagggcaatggctgagctcgttaaagataaggaatccggtgtcgccgctgctggaggcggcaagatggacattgagcattcccgtaccttccttgaagctcgctctgaggaagaactcctatctggaattaagaaggaagtagaagcacgaaggttaccttcaaatgttgcagcaggaatggaagaattctatcggaattataaaaatgctgtaaactgctaatctggaactcttacttcagttc

SEQ ID NO: 226555 - DNA, 374 bp, Gossypium hirsutum
gctctcttgctcttcatccaccgtccggtttcgcttgagttaatttaagtgtaggtgagccttaacaaaaaaatgtgtcggagatatgatagccgcacaacaatcttttcccctgaaggccgtctctaccaagtagagtatgcaatggaagccattgggaatgctggctctgcgattggaatattatcaaaggatggtgttgtcttggttggtgaaaagaaagttacttccaagcttcttcaaaccttcacatctactgaaaagatgtacaagattgatgatcatggtgcttgtgctgtggcgggaataatgtccgatgcaaacatcctaatcaacactgctagggtgcaagctcaacgatacacatatgctta

SEQ ID NO: 226556 - DNA, 374 bp, Gossypium hirsutum
gttgtttcggagtgaggtttcagatgataatgattcacagggttcaacaccttgttcccccactgttctaggttctcttgaggatggagggtctggtggtaatggccaggcatttgagcggcagctatcgaagcttagctcgttcaatttcaagccaaatattaggagatctgggcagatacccattccacccgaagaattaagatgtccaatatctttgcagcttatgtatgatccagtcataattgcctctggacagacatatgaaaggatctgtattgagaaatggcttggtgatgggcatgacacctgcccgaagactcaacagagactttcacatctctctttaacttccaattattgtgtaagggtct

SEQ ID NO: 226557 - DNA, 364 bp, Gossypium hirsutum
gttcttcgctagggttattcttcattcaaagagaaggaataagatgcttcctctttctctactaaaaacggcacagggtcatcctatgttggtggaactgaaaaatggggagacatataatggacatttggtcaattgcgacacttggatgaacatccatcttcgtgaagttatctgtacttcaaaggatggagacaggttttggagaatgcctgaatgctatatccgtggaaatacaattaagtatcttcgagttcctgatgaggtaattgataaagttcaggaagaaacaaagagtcgtgcagataggaagcctcctggtgtaggccgtgggagaggcaggggtcgagaagatggtcctggt

SEQ ID NO: 226558 - DNA, 378 bp, Gossypium hirsutum
cccacgcgtccgcccacgcgtccggtaagcagcggctaccctaacctcgtcttgctctctactaatttcagctatggccgacgaagctgtggttgttccagatcccacccagatcgatgtcaagctctttaaccgctggagcttcgaggatattgaggttactgacatttcactggctgattacattggagttgcggcatccaagcacgccacatatgttcctcacaccgccggaaggtactccgtgaagcggttcaggaaggcgcagtgccccattgttgagaggctcaccaactctctcatgatgcacggtagaaacaatggcaagaaactcttggctgttaggatcatcaagcatgctatggagattattcattt

SEQ ID NO: 226559 - DNA, 379 bp, Gossypium hirsutum
cccacctcaacaacaagatggcttctcccctctccctggttggattattgagtggctcaaggctgtgaagttcattgattcaaagcatttcaatgtcccatttgggctgggagcagtggagcttgtggcaggtagggaaagtgccattgcccaaatcatcagaacagttaccaacaaagtctacaacatcacattctcagttggagatgccaaaaatgggtgccatggatcaatgatggttgaagcatttgccgccaaagataccttcaaagctcccttcaaatctgaagggaagggaacattcaagactgtaagcttcaagttcaaagcaattgcaccaagaactagactcactttctacagctccttctaccatacc

SEQ ID NO: 226560 - DNA, 426 bp, Gossypium hirsutum
  unsure (1)..(426): unsure at all n locations
cccacgccgtccgcaaatnccctacactttaatataatccantgcggttttcgttttgtgaaatgccgtacggagaggagtggcggagtgcggcgttgacgcgtattcgcgaattggtcagcttccgacccgnnctgcaagnncccaagannagtgccgnntcaggaatgcaangnnaagagctgtctctnngttgttaaaaccctgggaaancctttgcattgagggttacccccctgcnnctcaaagattggctttcaaatctctgaggagttgtgcatntggttgtggcatcntgtgtcaagaaatgcccatttgaagcaattcaaatcatcaacttaccaagggatttggataaagatacaacccatagatatggccccaatacttttaaactacacaggttaccagttccaaggcctgggc

SEQ ID NO: 226561 - DNA, 373 bp, Gossypium hirsutum
tgtgtcgtgtctgacgggtttcacttgcatagctagcaaagctaaagagtttgcaagatggggagcatggatagcttttggcagctgggggattatcttcgaggacaatcaaaagcctcagagaataaccaatggctgatggttgcctctaaactggctgagcagacgaggaaaaagggtgaacgcctgagcaatcttgatctttcgaagggtccagccgaaataaggacaagggataaatttggtttccgggaagacaacaaattcgagaaccttaacttcaatatgttaaacttggactccaagattggagataatgcaagcaaaagctcattccgaaatggtacctacaatataaatgctgtttaccaga

SEQ ID NO: 226562 - DNA, 323 bp, Gossypium hirsutum
ggaaacagcagcatcagaaggcatcatcaacaatcaacagccatagtagttgtgaattctgttggttgactcaagaggatgtgattaggttccttcttggttccattggggtcttcactccacttcctgctttgtctattgactctcttggcatcgttagctctgatgtgcttgccattgactactactcccctgcatcttctacagttggagccatctcaaagtcccttgcccagcaaacttctgttgccattgtggacagtgatggcactttcattggagagatatcacccttcactctcgcttgttgcgacgagacggtc

SEQ ID NO: 226563 - DNA, 376 bp, Gossypium hirsutum
gacgacttcggaattgcggttgcagccaaacaacttggacgcttctctcttcagtcatactcccttttactgcgaggagaacgtctattttctttgcaagaaactttgttcatccgagatagcagatgctcaaggatctgatcttttcgtcgttttcatttccaatgacaataaacagattccactgtggcatcaaaaagctagccatagagcagatggtgtaattctctgggattaccatgtaatttgtgttcagaggaagaaagatggtggtactcatttagtatgggacttggattcaagtcttccatttccttgtcctttagctacctatgtgtcagaaactatccggccatcatttcagctcttttcggag

SEQ ID NO: 226564 - DNA, 372 bp, Gossypium hirsutum
cggacgcgtgggaaaacattcacatttctttgataatggctgccagaaggattgcctctctcttatcttcgtcggcaacttctttgggaaggttttcaagttggggaagaagaattaatagctttagtactgctgctgctgcgattgatgaacctatacatccatctattcaagtagatcatactcagcttctcatcaatggacaatttattgatgctgcatcaggaagaaccttccctacagttgatcctaggacaggagatgtaattgctcgagttgcagaaggagatctcgaagatgtaaatcgtgcggttgctgcagctctaaagctttcgacgaaggaccatggcctaagatgactgcttatgaaag

SEQ ID NO: 226565 - DNA, 378 bp, Gossypium hirsutum
caactctcaaaaaattcccgaaccaatccccatcgttgaccgaccctctgcgcaaagaccacgtgtccttccccgcccgccgcgccgatcggactctcagcctcgcgccccctcctcgtgcggtggctcgtgaggtttccgacggagcattggcggcgatgaagaaggggttggagaaagatccgcgcgcgctgtggcggagatacgtggattggctgtaccagcacaaggaacttgggatttacttggatgtgagtcgggtcgggttcagcgatgagttcgttaaggaaatggagccctgtttcgaagcggcgtttcgggcgatggaggagttggagaaaggtgcgatcgcgaatcccgacgagggtcgcatggtgg

SEQ ID NO: 226566 - DNA, 381 bp, Gossypium hirsutum
cccacgcgtccgcccacgcgtccggttactcagcatcacctccttttacactctcgaattcgcattctcttcactcattttccaatccatggccaagggagagaaaaaacctgcagagaagaagcccgcggcggagaaggctccggcggagaaaacaaaagccgagaagaagatcccgaaggacgcagcctccggcgagaagaagaagaagaggacgaagaagagcgtggagacgtacaagatctacatcttcaaggtgctgaagcaggttcaccctgacatcgggatctccagcaaggccatggggatcatgaacagcttcatcaacgacatcttcgagaagctcgctcaagaatcttccagactcgcgcgctacaacaa

SEQ ID NO: 226567 - DNA, 232 bp, Gossypium hirsutum
atggtttcttcattcacttgcctcaaatccatggctggctttcccaccaggaagaccaacaatgacattacctccattgcttgcaaccgtctaagagtgcaatgcattcatgtgtctccaccaattgtcaagaagaaatttgatactttttcctacctgccatacctttattattcacaattgtctaacgaagtataataccttcttacgaagggattgattcctttctttg

SEQ ID NO: 226568 - DNA, 377 bp, Gossypium hirsutum
caaaaggcgactgaaaatggagcattcatatgtgcccagggatctgcaactgcctggatatgttcccgtctcccttgctcagtccaccattcttaccgtctatggtctctcttccctgctcgtcgtctcccttgtttggttcctctctgggcgatcgcgcagcatatctaaacttgatagattgttgatgtgctggtgggctttcacgggacttacacacataattcttgaaggatattttgcattctcccctgaattctataaagacaagactggattttatctggctgaagtttggaaggaatatagcaaaggtgattcaagatatgcaggaagagactcagcaattgttgctgttgaaggaataacatcagttc

SEQ ID NO: 226569 - DNA, 379 bp, Gossypium hirsutum
cccacgcgtccggttgagaactaagaaggagaagcaaatggcttcctcaatgatctctgccccagctgttaccactgtcaaccgtgccggtgccggcatggttgctccattcactggcctcaagtccatggctggcttccccaccaggaagaccaacaatgacattacctccattgctagcaacggtggaagagtgcaatgcatgcaggtgtggccaccagttggcaagaagaagtttgagactctttcctacctgccagaccttgatgatgcacaattggcaaaggaagtagaataccttcttaggaagggatggattccttgcttggaattcgagttggagcacggtttcgtgtaccgtgagcacaacaggtcacca

SEQ ID NO: 226570 - DNA, 356 bp, Gossypium hirsutum
  unsure (1)..(356): unsure at all n locations
aacgaaaagaacttaaatcaaaatacttaatagcatggcgatacatttatacaagaacttctaccccgggcacacgcaatggagccgtanacagtcaagtgaaatccaatccacgaaataatttgatctatggacagcatcgttgtggtaaaggtcgtaatgccagaggaatcattaccgcaaggcatagagggggaggtcataagcgtctataccgtaaaattgattttcgacgaaatgaaaaagacatatatggtagaatcgtaaccatagaatacgaccctaatcgaaatgcatacatttgtctcatacactatggggatggtgagaagagatatattttacattccaaaggg

SEQ ID NO: 226571 - DNA, 370 bp, Gossypium hirsutum
cgccaatcagctgtccgccttgaccgaccgtccggcatcgtcttggccctcgatttttcccttttgtaaaccttttttcaccaattcccgaaatggcagtgaaaccctccaaggccgaaaagaaaatcgcgtacgacgcgaaactgtgccagctcttagatgagtacacgcagatcttgatcgccgcagccgacaatgttggctcgaaccagctccagaacattcggaaaggtctccgaggcgactcagttgttttaatgggtaagaacactatgatgaaaaggtctgttaggatgcatgctgagaagactgggaaccaagctttccttaaccttatccccttgcttcagggaaatgtgggtttgatctt

SEQ ID NO: 226572 - DNA, 268 bp, Gossypium hirsutum
gttcgaagagaagaagagagaagaagaggagcttaggttcgccacgactcggccggcgagcagcgtgatatcgtggctggaagaggtagccaagtcggtgaagttcaacgtgaagaaaagtgagtcaaaggtgaggttacagggtcaagaatgtggattgaaaggaaaattagcttttgctgctgacatatttgcagtgtcgccattgtttttggccttggtagttaaaatagattacgggtttactcttattttcatttagttttgt

SEQ ID NO: 226573 - DNA, 226 bp, Gossypium hirsutum
aaatactatagaaatccaagaaaaaaaatttaaaaaaacccctaattctataaaaagatcgaagtaaagtagaatcagaagcaaaaatcgccgaggaaaacaagatgtcggggcagcatgaagaagataagaagcccggcgatcagttcgcggcttacatcaacctcaaagtcaaaggccaggacgggaatgaaggtttcttcaggatcaaaagaagcccacaatt

SEQ ID NO: 226574 - DNA, 444 bp, Gossypium hirsutum
gcacgcgtgcggctcatctacgattgtggaaagcggatctttctcgttccacagtgttatgctgagaaacaagctctcggggaagtgagtccagagcttctggatacccaggtgaacccagctgtgtgggaaattagtgggcatatggtgttaaaaaggaggaaggactatgatgaggcgtctgatgaaaatgcttggaggctcctggctgaggtttctctctctgatgagaggttccgggaagtgaatgcactcatctttgaagtcattgccagtggcaaagatggcattgaacatgctgctaagagtctgccttaggagcccgatacttaagctggatccactgaagaagaaagcgccatcaccaaaaccttccaccgcgctttggtgggtgggacacatgaatgggttgtttgcattaggaactggcatccacaaacaata

SEQ ID NO: 226575 - DNA, 471 bp, Gossypium hirsutum
aaaaaagtgaaaagggtaatggtgttgctcctgctacaaggtctccaatggctttaatggggtcatctagaaatgaaaaccaagaagtgaataccagcatgagaactgccgagaccatgctgcggttggtgcctatggctttaggggttgctgcacttgttgtcatgctcaaaaactcacagtccaatgactttggctccgtttcatactcagatcttggtgctttcaggtacttggtgcatgctaatggtatttgcgcaggctattcccttctttcagctattatagcagctgtgcctagtccttctactatgcctagagcttggactttcttcctactcgatcagattcttacatacgtaatcttgggagctgctgctgtttcaaccgaggtgctttacttagcatacaaaggagactcatgcattacttggagtgcagtttgggggacatttgctggtttctgttata

SEQ ID NO: 226576 - DNA, 255 bp, Gossypium hirsutum
gcagactacaagcgggatttgtagggtttttgttccattcctcttccgcatatccgtagcctttcaatatgacaaagagaaccaagaaggccggtattgttgggaaatatgggacccgttatggagctagtctgcgcaagcagattaaaaagatggaagtcagtcaactcagcaagtacctctgtgaattctgtggaaagtttgcgtggattagaaaagctgtcggtttttggtgttgcaaagactgtggataag

SEQ ID NO: 226577 - DNA, 299 bp, Gossypium hirsutum
ggcaaccaaaacgatgatgttgcaaatattttcacttttcttctttttgttcagtatctgcaacgccattttccttggtgctaatggagatgacaatggtggttggcaaactgcccatgccaccttctacggtggtgctgatgctaccggcacattggggggagcttgtggttatggaaacctgtacagtcaatggtatggaacgagcacagcatctttgagcactgcacttttcaacaatggcttgagctgcggtgcctgcttctagctccgttgctacaattatccttaatggtgca

SEQ ID NO: 226578 - DNA, 384 bp, Gossypium hirsutum
cccacgcgtccgctaaaatctcccaatttcccaattctttatctgtagggttccgttcttagcttcaaatttgcaaatttagatctcaatcactcaaatcactgaaaaaacaacccagcaaaatgtacggattcgaagctatgacgttcaacatccacggcggttacctagaagcgatcgtgagaggtcaccgggccggtctcttaaccgccgccgattacaacaatctctgccaatgcgagacccttgacgatatcaagatgcacctctccgccaccgaatacggtccttacctccaaaatgaaccttcaccattgcatacgactactattgtggagaaatgcactcttaaactcgttgatgagtataagcatatgctatgcc

SEQ ID NO: 226579 - DNA, 331 bp, Gossypium hirsutum
gaagccgccgaagagagagtcgagaaagggaaacagagagcaagagaaaatgaagaccatactgtgatcagagaccatggatatccccgatggggtcaatatcaaagtgaaggctaaaatgatcgaggttgaaggtcccaggggtaagctcactcgtaacttcaagcacctcaacctcgatttccaccttaccaaggacgaggagaccggcaagcgtaagctcaggatcgaggcctggttcggtaccagtaagaccagcgctgtcatccgtaccgtccttaaccacatcgagaatcttatcaccggtgtcaaccaaagggtaccgggacaa

SEQ ID NO: 226580 - DNA, 315 bp, Gossypium hirsutum
gcaccagcaggcattatacccccgagcaatttgctgatgttcttattcaacaatacactgagcagcttcaggctttgtataactatggggcaaggaagtttgcgttgattggagtgggtcagatcggttgcagtcccaatgaattggctcaatacagtggagatggttaaacatgtgtggagagattcaatgctgcaaaccggatcttcaatgtcaagcttaaagggctcgttgatcaattcaacatcgactattccgatgccaaattcatctacatcaatgcttatggaatttccaagatcattacaagcaacc

SEQ ID NO: 226581 - DNA, 395 bp, Gossypium hirsutum
gtttgctctgtatatagaaattttctttctcgattttctctttagccaaaaaagatgcagatcttcgtcaagactctaaccggcaagacgatcactctcgaggtcgagagctccgacacgatcgacaacgtgaagaccaaaatccaagataaggaaggcatccctccagaccagcagcgtctgatcttcgccggaaaacagcttgaggacggccggaccttggccgattacaacatccaaaaggagtcaactctccacctcgtcctccgtttgcgcggtgggatgcaaatcttcgtgaaaaccttgaccggcaagacaatcactctcgaggtcgagagcttcgacacgatcgacaacgttaaggcgataatccaagacaaggaaggcattccccc

SEQ ID NO: 226582 - DNA, 444 bp, Gossypium hirsutum
cggacgcgtgggagcagctcactttctccttcatcaaaccccaaaaacctagctttgcctcctttataatttcttggattttggtgaactttacgaatccaagatcagagtataaaggattcgagttttaacccagaattaagtacttctgttctttttgatctttgggttgaaattgtctacacaaagagggtgatttagaaatggatgctgatccatggactctttgtctttcttcaactgctaggagatatcaatcagctcttcagtcacgatctgatatgtttatggggtttgaagaaatggatggagaagacgatataagagaggagtttccatgccctttttgttcagagtatttcgatatcgtgggcttgtgctgtcacattgatgatgaacattctgtggaggcttacaatggggtttggcctgtctgcgcaatga

SEQ ID NO: 226583 - DNA, 486 bp, Gossypium hirsutum
cagagatgatgaagaacacaattaaggagtgcgaacagccagcgattgaaggagaggaaaaatattgtgcaacctcactggagtcaatgattgactatagcatttccaaactagggaaagttgatcaggcagtctcaacagaagtggaaaaacaaaccccaatgcaaaagtatacaatagcagctggagtgcagaagatgacagatgacaaagctgtagtgtgccacaagcagaattatgcatatgctgtcttctattgccataaatcagaaacaacaagggcttacatggttcctttagagggtgctgacggaacaaaagccaaagcagtagcagtctgccacacagatacatcagcatggaaccctaagcatttggcttttcaagtcctaaatagtgaaccaggaaccattcctgtctgccatttccttcctcgggatcacattgtttgggtccctaagtaaaaatcctgaagagtagattcat

SEQ ID NO: 226584 - DNA, 395 bp, Gossypium hirsutum
ctctcaatactgtttcactaaaaaatgccaatcaaaaaagatccttcgattccaccgccgatgatcagcaagatcggcccttacaccgtcttcgttaccccttcgtcaaccccttctccaactgaccctcctgtttttcactctcccaagaaggcggcgccgccttctccttctccttatccttctgctccgccgcctgtccagccacctccccaacagttcgacaagtctttccttacttcccaatccctttccgatggttcatttttgggtttcttcaaaaacgctgccttcaaactccaaaacgctcattcaagcttggatgaccatttagctcgttggttaggcttaaatcagtccaagtatcaatgggcattggacgattattatgagag

SEQ ID NO: 226585 - DNA, 172 bp, Gossypium hirsutum
cttagaaggtgtcttaataaacgccttctttcttcttcttcttattccttgattgctcggtagcagtctctcttaatcgaaaatgagagagtgcattctgatccacatcggtcaagccggtatacaggtcggaaacgcttgctgggagcttttctgtcttagcgcttggaat

SEQ ID NO: 226586 - DNA, 399 bp, Gossypium hirsutum
cggacgcgtgggttcttcattctcactctctctccactgaactcttgctaaacggtatcgttttagtcagtctttcatcaatggcgaaagaaccggttcgcgtcctcgttactggagctgcaggacaaatcgggtatgctcttgtacccatgattgctaggggagtcatgttgggtgctgaccagcccgtgatccttcacatgcttgatatcccacctgctgcggaggctttgaatggtgtcaaaatggagttggtggatgctgcttttcctcttctaaagggtgttgttgctacaactgatgttgttgaggcatgcactggagtcaatgttgctgtcatggttggtggtttcccaaggaaggaaggaatggagaggaaagatgttttgtcaaagaatg

SEQ ID NO: 226587 - DNA, 217 bp, Gossypium hirsutum
tattggtccgccaaccgaattcaactatgattgccagcatcttggtactggcccacaaacactgacagaaattgctgagggtcgtcattctttttgctcggccatctcaaatgccaaaaacccagccatcattgttggtgctggcctgtttgagagggacgacaaagatgcaatttttgctgctgttgaagccattgcgaagaatggaaatgtcatc

SEQ ID NO: 226588 - DNA, 463 bp, Gossypium hirsutum
gcgaaaatctcgaagcttccttttccgttttagatctcaaaattcaaaaagctctctttttcatctcatggctgctactatcgtctccgtcaaagctaggcagatcttcgacagccgtggaaatccaacggttgaggttgatgtggaaacatcgaacggtataaaggctagggccgcagttcctagcggtgcatccactggaatttacgaggctcttgagttgagagatggaggctccgattacctcggtaaaggtgtatcgaaggctgttgctaatgttaacacaatcatcggtcctgcattgattggaaaggacccaaccgagcatactgcaattgacaatttcatggctcaacaactggttggaacccataatgagttgggttggtgcaaacaaaatcttgtgtcaaatgccaatcttgccgattcccttctgtttttaatgttgaactgaagttcatta

SEQ ID NO: 226589 - DNA, 462 bp, Gossypium hirsutum
gaaaaaaatggttggtgtgtttaggttagtgagggggtatccgggaccaagtggctttggttcagcctccaccgcccaagaggttaccgaagggattgatggaaccaacttgactgctctagttaccggaggagcaagtggaattgggttggaaacttctagagtattggctcttcgtggagtccacgtcatcatcggtgcaaggaacatgaaagccgcgaatgaagcaaagaacaaaattgttagagagaacacatgagcccgtatagatgttctggagctggatctttgctctactagttcaatcagatcatttgccgacaatttcattgctcttcatcttcctcttaatatcttaataaacaatgctggcatcatgttttgttcctttcagctttcttaagatggaatagaggtgcaggttggcacctatcattatagacattttccttttaacaaact

SEQ ID NO: 226590 - DNA, 293 bp, Gossypium hirsutum
ctctatttaaaaaaaaagagcaatttttttgaggtggtagtatacaaaaacaaaatgaagatctgttgcattggagctggttatgttggtgggcctacaatggctgtgatcgcgcttaaatgtccggatattgaagtggctgtcgttgatatctctgtacctaggatcgctgcctggaacagtgaccagctccctatctatgagcctggtcttgatggtgttgtgaaggagtgtcttggcagaaaccttttcttcagcactgatgtatataaacatgtgcgttaggctgattt

SEQ ID NO: 226591 - DNA, 406 bp, Gossypium hirsutum
cccacgcgtccgcttcatggacatttggggtgaagtggtcaccaagtgggaatactttggcttatgtaggtcataattctatgatttacttcgttgatgatattggtccttcccctttggcccagaatgttgcattccgtaatttgcctcttcgtgatgtccaatttttttcagagaaaatggtcataggcgtgggatttgactgcaacccaatgatttttgcagcagataaatcaggattatggagctttatcagattcttaggtgaaaggaaagaattcttgtcaggtccaaaatctggttctcagttttctgaagcatttggcaaattatatggtcaagcaaagcatggattgagcaatgattcggttgaaccttcaaaaatacagggagctggtcatgacaa

SEQ ID NO: 226592 - DNA, 428 bp, Gossypium hirsutum
cgaccgctaaaacgtttcctggtcttaatccaaattccgatcggaagatcaagttagggctttcagtcgattttcaatggaaagaatcagaagagcttcgcatgcaggatcttggtacactgataacccaaaaaaactggcggaagagcttgatggatggatcacggcggctggcttgcctaaatcctctgatgtaagaggtgtaattgctccgcatgcaggttattcatattcaggtcgtgctgcggcctatgctttcggaaatatagacccaacaaacatttctcgggtattccttcttggtccatctcaccattattacactccaaaatgtgctctgtcaactgctacagtatacaagacaccaataggggacctacctattgttttggaagtcatcgaagagctgaaagcttcaggaaaatttg

SEQ ID NO: 226593 - DNA, 437 bp, Gossypium hirsutum
ctatcctgattctcataagttgcaggcatacccgttgaatgcttttgggggccaagtttaccactttcctgtggataaccgatttcattatgccccatttaatgtgatcactcatggatacccgtacgaattccagttccaagattttcagtactttgtggtcatagattttgaggctacctgtgacaaggagagaaacccacatccacaggagattatcgagtttccatctgttattgtgagtagtgttactgggcagctggaagcttgttttcagacatacgtccgaccaacttgcaatcaactcctgagtgatttctgcaaggatctgactggcatccaacaaattcaggttgatagaggtgttactttgagtgaagctcttatttagcatgataaatggcttcggaaagatggcattaagaacactaactttg

SEQ ID NO: 226594 - DNA, 429 bp, Gossypium hirsutum
gaacaaacgatgctcctgccctgcatgaagcagatattggactagcaatgggcatttctggaaccgaggtggccaaggagagtgccgatgtcataattctagatgacaatttctcaacaattgtgacagtagccaaatggggtcgttcggtatacataaacattcaaaaatttgtacagtttcaactgacagtcaacattgtcgcattgatcgttaacttctcctcagcatgtttgacagggactgctcctcttaccgccgttcagctattgtgggtcaatatgattatggatacactgggagcacttgcgcttgcaactgagcctccaactgatgaactaatgaagcgtgcaccggttggaaagaaaggaaactttatcagtaatgtgatgtggaggaatatattttgacaatccttttatcagttta

SEQ ID NO: 226595 - DNA, 135 bp, Gossypium hirsutum
gaacaaactatgctcctgccctgcatgaagcagatattggactagcaatgggcatttgtggaacggaggtggccaatgagagtgcctatgtcataattctagatgacattttctcaacaattgtaacagttgcca

SEQ ID NO: 226596 - DNA, 335 bp, Gossypium hirsutum
aaacgccttcgatttaccttcgatttccatttacttctctattgctacgtttttgaatttttagtgagcgaaaatgagagagtgcatttcagtccacatcggtcaggctggtattcaagtcggaaatgcctgctgggaactttactgccttgaacatggaatccagcctgatggccagatgccaagtgacatgactgtctgaggaggtgatgatgcttttaacacctttttcagtgaaactggtgctggatagcacgtcctttgagctgtttgtgtggatcttgtgccttctatatttgtataattgatgtctgtgtacttatcgtcttcttttt

SEQ ID NO: 226597 - DNA, 491 bp, Gossypium hirsutum
cggacgcgtgggaaaatttttaatttttttctgggaatgtgcagttcaagataagatagctttacacgtttcccaattcagcaatccatttctgcaaccaaaaacacaaaacactccatcaatttataaactcgaagcaatttgaagaaatcccatcactcatttcacctccaatccttttaaaaacagggcattcaatatgcaggagaccaataattctcgagtcaaccaacgaattgcaacaatctcggctcatctcaacccacccagtttttcccacatggagggtagttcgggtttgggtcgagctgactgccgagccgaaggtgggtcaactggtttcaaggtggcgattttgggagcggcaggtgggatagggcaaccgctatcattgttgatgaagatgaaccccttgggttctggtcttcatctttatgatgggggtaacactcctggggtactgctgatttagccacatggatactggagct

SEQ ID NO: 226598 - DNA, 411 bp, Gossypium hirsutum
ctgtactatgcttcatcctgggtatggtttcctttctgagaatgcggtttttgtagaaatgtgcagagatcacaggatcaactttattgggcctaaccctgacagtattcgtgttatgggtgacaaatcaactgcacgagaaacaatgaagaacgcgggtgttcctactgttccgggaagtgatggattgttacagagtacagaggaagcaatcaagcttgcccatgagattggctttcctgtgatgatcaaggccacagcaggtggtggaggacgtggaatgcgtctttctaaagagcctgatgagtttgtgaatgtactgcatcaagccaaaagtgaagcttcatcttcttttggatatgatggagtttatttggagaagtacatgctatatcctaggctcattgattt

SEQ ID NO: 226599 - DNA, 373 bp, Gossypium hirsutum
gccgaaccctccatttctctctgcaaccagcggcacccaaagatgcaaatcttcgtcaaaaccctaacggggaagaccataaccctagaggttgagtcttccgacaccatcgacaatgtcaaagccaagatccaagacaaggaaggcatcccacccgaccaacagcgcctcatctttgccggcaagcagctcgaggacggccgcaccttagccgactacaacatccagaaggaatccaccctccatctcgtgctccgtcttaggggaggtgctaagaagagaaagaagaagacctacaccaagcccaagaagatcaagcacaagaagaagaaggtcaagctcgctgtgctacaagtctacaaggtggttgaat

SEQ ID NO: 226600 - DNA, 393 bp, Gossypium hirsutum
aaaaacatccctaagaatcctttcatttcacccttttcctccatatcttcagtgtctcactctctccgtgcttcactccagtttctcctttccctcttcgaagaaaaaatgcgtgagatccttcatattcaaggtggccaatgcggcaaccaaatcggagccaagttctgggaagttgtttgtgctgagcatggcatagatgcaactgggcgttaccaaggagacttggatcttcaacttgagcgaatcaatgtctactacaatgaagccagttgtggtagattcgttcctcgtgctgttctcatggatcttgaacctggaaccatggacagcatcagatctggccctgtcggtcagatttttagaccagataacttcgtttttggtcaatct

SEQ ID NO: 226601 - DNA, 473 bp, Gossypium hirsutum
gttgcacttgagggaaagaaaaaaaaagaagaagaagcttgaatctatttttttgaagatggagggtaaagaagaagatgttaagctaggagcaaacaagttctcagagagacaacctattgggacatcagcccagacagacaaggactacaaggagccaccagcagcacccttctttgagcctggtgaactcaaatcatggtctttttacagagctggtattgccgagtttgtagccaccttcttgttcctttacatcaccgtcttgactgtcatgggtgtgtctcagtctaaaaccaaatgtgcaaccgttggtattcaaggcattgcttgggcttttggtggcatgatctttgcccttgtttactgtactgccggcattttatgtggtcatattaaccctgctgtgacctttggattgtttctagcaaggataactgcatttacaagggcattgttctatatgattatgc

SEQ ID NO: 226602 - DNA, 279 bp, Gossypium hirsutum
gatcaattaaaaagaaccgaaaaaaaatacacagatttagacagaagcatggccagccagctcgtaggaacaaagagagcttgtgtcgtgggtggcagcggattcgttgcctcattgctggtcaagttgttgctcgagaagggttacgccgtttacactacagtcagggtccctgacaaccagaagaagatctcttaccttgtaactctacaagagttgtgagactttgtgatctttcagtcggtttttactgttgtagggtgcttttgttgcccttat

SEQ ID NO: 226603 - DNA, 468 bp, Gossypium hirsutum
gttgaaaggaggattctatgttgatccagaagctaagcttttgttcattgttagaatccgcggtatcaatgccatgcacccaaggaccagaaagatcttgcagctcctacgtttgagacagattttcaatggtgtttttcttaaagtgaacaaggcaacaatgaacatgcttcaccttgttgaaccttatgtgacttatggatacccgaatctcaagagtgttagggaactcgtttacaaaagaggttttggaaagttgaacaagcagcgagttgccttgaccgacaacgcaattgttgagcaggcactaggcaagttcggcatcatttgtgttgaagatctcatccacgagataatgactgtgggacctcatttcaaggaagccaacaactttctttggccatttaagctcaaggcaccattgtgtggtctgaagaagaagaggaaccatttcgtctaaggtggaga

SEQ ID NO: 226604 - DNA, 334 bp, Gossypium hirsutum
aaaaatactgcattggtgggcataccatttttatccgtggaattgaaagaaattcgaattcgcaattctcgccggtggttaggggataaaatattttcaggaacaaacaaatcataatgattttagtctttattttcaggcattttttgatgtcttgcaatatatacatatagatgattgttatcaatatagttttttttttgggaattttttactaatagaatgttataaaactttttctaagatatttcttttaatattgttttgggggggatttattttttcatcattatttttgctgaaaaaatttttttatcaatattttttttttcca

SEQ ID NO: 226605 - DNA, 471 bp, Gossypium hirsutum
aatagcaatttaatttttttttaccatttcatatccaaacttcaaacaaaagggaattttcttgtcataattttctgaggaattcatcgatggcaaccaaagtgtatattgtatactattccatgtatggacatgtggaaaaactagcagaggagataaagaaaggggcggcatctgttgaaggtgttgaagcgaaactatggcaggtccctgagactctgtcagatgagattcttggaaagatgagtgcaccaccaaaaagtgatgtaccgatcattacaccacatgaccttcctgaggctgatgggtttatttttggcttcccaacaagatttggcatgatgtctgcccaattcaaagcatttatggatgcaactggtggtctatggagaactcagcaacttgctggaaaacctgctgggatattctatagcactggatctcaaggtggcggacaagaaactacaccgt

SEQ ID NO: 226606 - DNA, 464 bp, Gossypium hirsutum
gccggatatgcaagggaatttcttcaactcgatgaggatgtttctaaaagatgctgaagaggagattgctaagatcaaggcatatgaaagaaaagctttgttgcaagtaaaagaagttactgaatattttcatgggaatgcaacaaaggaagaagctcatcctttcagaatcttcatgattgtgaaagatttcctttcaatattggatcatgtctgtaaggaagtaggccaaatgcaggatagaacaatggtgggttccgccagatcctttcggatatctgcaactgcttcactaccagtccttagcaggtataatgtgggacaagacgcaagttcagatgacgaaagcttgtctccgtgaagctgcacgaatacgggtcctaagacttactcccacagttggacccttttccagctaaaccaacagttaggatgtctcatttaccatctcaagcatcatgtca

SEQ ID NO: 226607 - DNA, 363 bp, Gossypium hirsutum
cggacgcgtggggcaaaaccaggaaagggaaaaatggacgcaattgattcagttttcgatccgctaagagagttcgctaaggatagtgttcgtcttgtcaagagatgccacaagcccgatcgaaaagaatttacgaaggtggcgtttcgtacagcgatcggattcgtggttatgggattcgtagggtttttcgtcaagctcatctttatccccattaacaacattattgttggatctggttaggaagcatgagaatcagttccaagtttcagactgtaggcaaaagatagaagttagtacttgttgcaattgactgagaggtacattatctgatttcatgatctaattcaaactttttcatgg

SEQ ID NO: 226608 - DNA, 448 bp, Gossypium hirsutum
gtttttaatgcaaggtaaagctggtcaccatacaccagttttcgagaagtaccgtcagaaggcggagtacttcatgtgttcattgatcggaaagggtagccgtaatattcagaagactcccggtggtttgatttacagacagagatggaacaacatgcagttcgtgacaagcgctttgttcttggcaaccgtttactctgattatctaacttcctataggggaagcttgaagtgtgctgctgtcaatgttgcaccatttgagcttctttcttttgcgaaatctcatgtggattaccttctcggagacaatttaagagctacaagctatatggttggcttctgtaacaattatcctttacaagtttatcaccgaggttcttcgttagtctcgatctttgtcaaccctaatttttttgccagccgacttggtttcgcaactttgtttaca

SEQ ID NO: 226609 - DNA, 461 bp, Gossypium hirsutum
gttcattttgtctttgcgccggtcttctatctcctcgactcacttcccagccaaaggtaagccatggttaagcataacaatgttattccaaatgggcactttaagaagcactggcagaactacgtgaaaacttggttcaaccagccagcaaggaaggctagaagaagaattgcaaggcaaaagaaagcagtaaggatctttccaagacctactgctgggcctcttcgccctgttgttcatggccagaccttgaagtacaacatgaagttgagagctggcaacggtttcactcttggagagcttaaggcagctggtatttcaaagaaacttgcacccaccataggtattgctgttgatcaccgccgtaaaaatcgatatcttgaaggtcttcaagccaatgttcagagacttaagacctacaaggccaaacttgttgttttaccaagatgtgctcgcaaatt

SEQ ID NO: 226610 - DNA, 429 bp, Gossypium hirsutum
aaacaatatcaatataacaataatatatatatttcattcgaattcaaagtggattcttattttctatattctgtattctttttagattcaattagattcaagggctaagcactgaatcaaaaaaaaacagagaatagattcatgggcccctactttataatataatgaaaggcatgcttgatagaaagattagatcacataaagtcaacgaatgaggtgggttcattaacaactcacagatgaaaaaatggcaaaaaagaaagcattcactccccttctatatcttgcatctatagtatttttgccctggtggatctctctctcatttaataaaagtctgaaatcttggattactaattggtgggatactaggcaatccgaaacttttttgaatgatattcaagaaaagagtattctagaacaattcat

SEQ ID NO: 226611 - DNA, 315 bp, Gossypium hirsutum
gcgaaagcttatctcttttcgtctctgaatctgatcaatcaacacctgaaaaggaaaacttacgaacaacaactactactagtctactacccagcactagaagcagctcgtagccagccatggatgaagagtacgatgtcatagttctaggaactggtctcaaggaatgcatcctcagcggtcttctttctgttgacggactcaaggttctgcatatggataggaatgattactatggaggagagtctacatcactcaacctcattcagctctggaagaagtttagaggaaatgataagcctcctgctcaattgg

SEQ ID NO: 226612 - DNA, 406 bp, Gossypium hirsutum
gaccagaacacagatcgctctcgcgctttccctcaatcaatcatttttcttaccatgaagattatagattttttcctgatctcatcacttctcttctcaatctctagggctgaatctattgcatcagttttcttcatcgacagttctactcatcaattccttcgcgctccatcctctaacgatgtctctcagtcagagccaatgttgttacctgaagttggtgcgactgcatcagtcttgcttggttttccaccacccattacactttcagctgctggctcatctaagctgaatgaggttctcatttctaatccgtttgatagacctcgtgctgtttttatgcttgaagttagtggagttgatgatcctcttggtgttggacccaagaatgctctctttcacaaag

SEQ ID NO: 226613 - DNA, 471 bp, Gossypium hirsutum
ccagtggaaatatcttatgatggagttcaaacatcaaacatcgacactctcattgatctttcttcttatgatgcctggttttgccctttctgatgtcaatcaagacaaagcagaatgttctaatcagctagtcgggcttgctccatgtctcccatacgtaggcggagaggcaaaaacacccaccatagattgttgcagtgggctcaaacaggtgctggataagagcaagaaatgcctgtgtgtgttgattaaagataaagacgacccgagcctcggcctcaagatcaacggtactcttgcgggaactcttcctagtacttgtcgagccagtgctagcatgacagaatgtatctccctgctgcacttggcacccaattcccaggaagcaaagttatttgaaggatatcaaaagctgatagaggggcatggcagtactcttgctgccaccgggaactccactagcagaccatc

SEQ ID NO: 226614 - DNA, 444 bp, Gossypium hirsutum
atttaagtaacaaaaatggtgttcgaggtgatgaaagtgccaacgacgccgtttgatggccagaagccaggcacttctggacttcgtaagaaggtgaaagtttttgttcagcctcattatttgcagaatttcgtacaagcaacattcaatgcccttacacccgagaaagttaagggtgccacacttgtcgtttctggtgatggtcgttatttctcaaaggatgctgttcagataataatcaagatgtcagctgcaaatggagtaaggcgtgtatgggttggtcaaaacggattactttctactccagctgtatcagctctaatacgcgaaagggttggtgcagatggatccaaagcaactggtgcttttattttgacagccagtcacaatcccggtggccctaatgaggattttggaattaaatacaacatgggaaatggggga

SEQ ID NO: 226615 - DNA, 457 bp, Gossypium hirsutum
atctctccttgacgttgccagataacgtcttcaaggaagcaaaaaatcttaaagtcttagatttgactggcgtgcatttttcttctttaccttcatcaattggtctcctaactagcctcagtacattgtgcctagatcactgcaagttgggagataacctaaccattattggagtgctcaagaacttaaatgtgcttagccttttgcaatctgatatcaaaattgtacccaaggaaattgggcacttgttgaagctaaagttgttagatgtaagtggttgtactaaactcgaaaaaatttcagctgacgtgttgccacgtttgtcaaaattagaagaattatatatgggtggcacttctattcaatggggacaacccaatgctagtcttgctgaactgaacacactgtctcatttgtccactttagaagttcaaattccggacgccaagtctgcccc

SEQ ID NO: 226616 - DNA, 311 bp, Gossypium hirsutum
gcctttttcttttgcctttttgtcatttcccttaattaattgtctcttatggagtcgttctcttttttgttgataatttcaattttctatcttctcttcaaaatatggaattggatcaataacgtgagagaccaacaatgttacattttggattaccaatgctacaagcccagtgatgataggatggtggggactgagttctgcggggaagtgataaagaggaacaagaatctcggactcaacgtgtacaagttcttgctgaaagcctttgtcagatcatgcattctagaactaacctactccccgaggat

SEQ ID NO: 226617 - DNA, 372 bp, Gossypium hirsutum
atcgggatagatgcccacagtgcaaagggaacaaggttactcaggaaaagaaggtgctggaagtacatattgagaaaggaatgagagatggtcagaaaattacatttgagggacaagctgatgaggctccagatacaataactggagacattgtttttgtattggaacaaaagaaacaccccaaatttgataggagatttggggacgaactttatgttgaccacaaactcagtttgacagaggctctatgtggttttcagtttgccctaactcaccttgatggcaggcagctcttaattaaatcaaaccctggcgaggtcgttaagcctggtcaatacaaggctatcaatgatgagggtatgccccaccatc

SEQ ID NO: 226618 - DNA, 323 bp, Gossypium hirsutum
gcagccaccaatgccattaaggaatggggccagcccaagtccaagatcacccaccttgtctttggcaccactagtggtgtggacatgcctggggctgactaccagctcaccaagcttttgggcctccgcccgtccgttaagcgcctcatgatgtaccaacaaggttgcttcgcaggggggacggtgctccgagtggctaatgacttagctgagaacaacaaaggtgctcgtgtacttgttgtgtgctcggagattaccgctgttaccttccgtggacctagtgacactcacctatacagtcttgtaggccaagcattgtttgg

SEQ ID NO: 226619 - DNA, 401 bp, Gossypium hirsutum
cggacgcgtgggggtgtacctagcactgcaattagagaaatctctctcttgaaggaaatgcaacatcgtaatatcgtcaggttgcaggatgtagtgcacagtgagaagcgtttatatttggtatttgaatatctggacttggatttaaagaagcacatggattcatatccagaatttgggaaagatccacgaatgataaaagcattcctttatcaaattctccgtggcgttgcttattgtcattctcatagggttcttcatcgagatctaaaacctcaaaatttgctgatagatcgccgtaccaatgcactaaagcttgctgattttggtctggcccgagcatttggtattcctgtcagatcatttacacatgtggttgtttactttgtgggacagagcac

SEQ ID NO: 226620 - DNA, 411 bp, Gossypium hirsutum
cccacgcgtccgcaatggcttacttaacccatttcatccttttattactcataaatttagctggggcccaacaaatctcaaacacgtgaatcatcatcatcaacaacaaccaacccaacaacaacagaagattgttacaaccgttggatctacatcagaaacctcccatcaaggttcaatcttgatcttctgacaaactgtatcaaatacccaattgttgataatttttgtccgtacttagctaatcatggtttaggacaaaataacccataccaaatttcgtaattggtatataactgatcctttattacttgaacttatcttccatagacgaatccaggaattaccctttgtctacaaatgatcctaatgatttccaatgctatgtttttttcttattattttgctata

SEQ ID NO: 226621 - DNA, 303 bp, Gossypium hirsutum
gtcttgatacacgcccccatttattttatttttcaaacaaattttcccttcaattttcgtatgggttcctaggaaaagaaatatgagagagtgcatttcagttcacatcggtcaggccggtattcaggtcggaaatgcttgctgggaactttactgtctcgagcatggcattcagcctgatggccaaatgccaagtgataagactgttggtggaggagacgatgcttttaacaccttttttagcgtaactgtttccgggaagctcgttcgtagcaccatttttcgtgatctttttccttactg

SEQ ID NO: 226622 - DNA, 474 bp, Gossypium hirsutum
ctttgttttagttgccataacgtcaccttccaatacaacccacaatgaggcaacaatatgtcttcactactctcacgttgctcatcctgttttccctcagttgttcaacaacattagcccaagctccggcactggctccagcaccttctggtccgacaaacgtcaccaagatcctcgaaaaagccggtcaattcaccctcttcattcgtcttctaaagtccactcaagtggccaaccagctgctcggtcagctcaacaattccaacaatggtatgaccgtttttgcaccaacggacaatgctttctccagccttaaatcgggcacattgaattcactcaccgatgaacaaaaagtggagctggtgcaattccacatcgtcccaacatacctcacctcgtctcagttccaaaccattagcaatcctttgagaacccaagctggtgatagtggcgatggcaagttccctctcaata

SEQ ID NO: 226623 - DNA, 471 bp, Gossypium hirsutum
gttaaaatgctttcagagaaacagttgagagaaactgaggaattaaaggcgaaggctcaggtttgtcatgcacaaccagatgacctcattgacttctaccatttaaaaagtcgcaagggaatgagtcagcttgaattggaggatgaggtccaagatgatttgaaacgtgcaactggagagtttgtcaaggatgcagatgatgcaaataagcttaatcgcattcttcaactgactggatttagtgacccagtatatgctgaagcatatgtgactgtccatcactatgatattgttcttgatgtcactgttattaatcgaaccaaggaaactcttcagaatttgtgcttggagttggcaaccatgggtgatctgaaacttgttgagcgtccacaaaactataccctcgctcctgaatctagcaagcaaataaaggctaacatcaaggtgtcttcaactgagactggtgtcata

SEQ ID NO: 226624 - DNA, 393 bp, Gossypium hirsutum
gttatcttcaacaatttatcttctttattctggttgctctgccattcatgtttatttctccaactcattcctctttagctaatggtaatgttaatatattgcctcctaccaatacaagcgataaggtcactttggctctgtactatgaaactttatgcccatattgtgccgactttatcacaaatgaccttgtaaaggtcttcctcagtgatctgtataccattgtcaatctaaaattagtcccttggggcaatgctgacattcttggcgatgaaccccattgccagcatggagaagatgaatgctacttaaatactatacatagctgtgtcattctactactggcctgatgtgttaaatgctctttgattttattctgctgctcggagcaac

SEQ ID NO: 226625 - DNA, 453 bp, Gossypium hirsutum
tttttctttgctgttttaagaaaaacattgcgaatagggagaagggtgagagagataaaaggggaacaaaagaactgcaaaaaaattgaacttttttttcctaaaaaacctcaattagaagagcgattatcgcttcatcttccccgaaacgacttcgtcagcttgcagatttttttcaggttgcttttgttgccatggctgctgctgcgactgcctctggtggtccacgatatgctccgcctgaccctactcttcccgaaccatggaaaggcctggttgatggaaaaactggttatctctacttttggaatccggtaacaaatgtcacgcaatatgagaggcctagagggatagattctgtcccaaaatcttcttcagtgcctatgggttcttcaattctggttcaacaatcttctgaagggcgttataagtataagtttgagaaggaaaatg

SEQ ID NO: 226626 - DNA, 295 bp, Gossypium hirsutum
ctagttctagatcgcgagcggccagcgattgaaggagaggaaaaatattgtgcaacctcactggagtcaatgattgactatagcatttccaaactagggaaagttgatcaggcagtctcaacagaagtggaaaaacaaaccccaatgcaaaagtatacaatagcagctggagtgcagaagatgacagatgacaaagctgtagtgtgccacatgcagaattatgcatatgctgtcttctattgccataaatcagaaacaacaagggcttacatggttcctttagagggtgctgtcg

SEQ ID NO: 226627 - DNA, 344 bp, Gossypium hirsutum
agaagagcaaagattttgtcaagttcaaggcccgctgctccaagtacttgtacacactttgcgtgtcggatgctgagaaggctgacaagttgaagcagtcccttcctcgaggagcaaaacgtctagttcctgtgggtcttggagatgatgatcaatgcattgaagatgactttactgcctgacgtgaatcagtgtggcccgagttagatcagcttctgcgtgatgacgatgatgcaacaactgtttctaccccatacactgctgctgttttggaataccgtgttgtattttatgatcctgcaaatgcacctgtcaaggataagaactggaacaatgcaaatggc

SEQ ID NO: 226628 - DNA, 171 bp, Gossypium hirsutum
tacctggattccacatagctactgtgtacgatccagcgaaacctctattatatgaacagcctttgtggattcatcagagaaagaagacccgggcgagcgtgtctcttgttccactctgtgatacgacttgcaaggagcgggataagtgggtgctctcgggcgaaaatgaaa

SEQ ID NO: 226629 - DNA, 434 bp, Gossypium hirsutum
gtgatggcttcaaagcggatattgaaggagctcaaggatctccagaaagatcctcctacctcttgcagcgctggccctgttgctgaagacatgtttcattggcaagcaactattatgggtcctccagatagcccgtatgccggtggggtgtttctagtcaccattcatttccctccggattatccatttaaaccacccaaggttgcattcaggacaaaggtatttcaccctaatattaacagcaacggtagcatttgccttgatattttaaaggaacagtggagccctgccctcaccatatccaaggagtagctgtcaatctgctcactcctgacggatccaaatcctgatgaccctttggtgccggagattgcccacatgtacaaaacggataggaacaagtatgagacaaccgctcggagcttgacccaaaa

SEQ ID NO: 226630 - DNA, 321 bp, Gossypium hirsutum
cccacgcgtccgcggacgcgtgggtgaatcagtgcgtcttgatagttttgacatggacaggagggtatctctggtaccaccagatggtgaatttcctgtcatgaactaccgaatgacgcaagaattttagcctcctttccgtattaatagattaattgaagaagctggacagcttaaagctgtattgattattaaagttctctgcggagttccctttaaacattactgtcaacacaattgctgtacaaattccacttgctaaattttctacttatacttgtttttaattgtaatcccatgctttttttcaaagatctgttt

SEQ ID NO: 226631 - DNA, 486 bp, Gossypium hirsutum
cacgcgtccgcaacaatttatcttctttattctggttgctcagccattcatgtttatttctctaactcattcctctttagctaaaggtaaggttaatatattgcctcctaccaatacaagtgataaggtcactttggccctgtactatgaaactttatgcccatattgtgccgactttatcacaaatgaccttgtaaaggtattcctcagcgatctgtttaccattgtcaatctaaagttagtcccttggggcaatgctgacattcttggcgatgaaccccattgccagcatggagaagatgaatgctacttaaataccatacatagctgtgtcatccaccactggcctgatgtgaaaaagcactttgatttcattcgctgcacagagcaacaaagctcaaaagaaccgcttgtcaagaacagagcagcaatgtggaaacaatgcagtgaaaagctgggaatgagtgctcacagaatcaacaaatg

SEQ ID NO: 226632 - DNA, 377 bp, Gossypium hirsutum
atcggttctagatcgagagcaacagcagataagatatcttcatcaaacaaggaaaaaacttaacaagtaaaacaattgagagaagatgtcctggcaagcgtatgtagatgatcacttgatgtgtgatattgagggcaaccatctctctgccgccgctatcattggccaagacggcagcgtttggtcccagagctccaatttccctcagttcaagccagaagaaatcactggcatcatgaatgacttttctgaacctggatcgcttgctccgactggattgtaccttggtggcacaaaattcatggtgatccaaggtgaacccggagctgttattctagggaaaaagggccccggaggtgttactgttaaaaagacca

SEQ ID NO: 226633 - DNA, 277 bp, Gossypium hirsutum
caaaaatggatggttattgtagcagaagggtaatcatgtttttggtgtttgcatttgcagcaataagcagagggtatggacaagaatcaaccactcttgttcctgcaatcatcacctttggtgactctgtggtagatgtgggcaataatgactatctccctaccatcttcaaggctaactattctccttatggacgggactttgtcaacaaaaagcctactgggaggttttgtcatggaaaattatccattgacatcacttgttaatttttgatgtt

SEQ ID NO: 226634 - DNA, 417 bp, Gossypium hirsutum
aaaacacgcacccaaaaaataaaaccctttgaaaaccaaagaaggaagaagaagatgtcgtggcaagcttatgtagatgatcacttgatgtgtgaaatcgaaggaaaccatctctctgccgccgctatcatcggccaggacggcagcgtttgggcccaaagcgccagtttccctcagctcaagcctgaagaaattagtgccatcatgaatgactttaatgaaccgggttcactcgctccgaccgggttgcaccttggtggcacaaaatacatggtgatccaaggcgaaccgggagctgttatccgtgggaagaagggacccggaggtgttactgctaagaaaccaatatggtctcgcttatcggaatctatcaagaacctatgacacccgtccaatgcaacatgatcgtattgaggc

SEQ ID NO: 226635 - DNA, 269 bp, Gossypium hirsutum
ctagagtttagtttgatcagcaaccctctgctcttcttcttccttaaacaagcaaaacaaaaaaaaaaaaaattatgggtggcgaaggaaaggtctatactttggctgaggtttctcaacacaacaatgccaaagactgttggcttatcattgagggcaaggtatatgatgtgactaaattcttggaggatcatcctggtggtgatgaggtcctgttgtctgcaacagggaaagatgcaagtgatgattttgaggatgttggctatagt

SEQ ID NO: 226636 - DNA, 289 bp, Gossypium hirsutum
gccttcccccttttacactcccccttcagatatcttcattttcatcttcttcctctttctttctggtctttgttttcttcaaatactgccctttcattttccttagttcttgttaaaaagaaaatgtgtgggattttagctgttttgggctgttctgatgattctcaggcaaaaagggttcgggtgctggaactttcccgtaggctcaagcaccgtggtcctgactggagtggcctctaccaacatggagactggtatttggcccatcaacgccttgccatcattgatc

SEQ ID NO: 226637 - DNA, 369 bp, Gossypium hirsutum
aaagtaccagtttatataatggaaatagattaacaatggttcaaaacctctaatcaataatataatcagttcaatatttcctggtaaacaggaaggcattgcagtaggaaggacttttgctgctcttaagaattataaagtggatggtaacaaggaaatgatggctattgggctgatgaacatggttggctcctccacttcttgctacattacaactggggccttgtttcgatcagtggttaatcacaatgcaggagcgaaaagtgctgtgtttaacatagaaatgtccattacggttatggtgacccttagaattctcatgccgatattacagtacacaccaaacgtggtgggtgtgagctatttttg

SEQ ID NO: 226638 - DNA, 471 bp, Gossypium hirsutum
atttgttgggtaaattcgagctctctggcattccaccagcacccagaggcgttccccaaattacagtttgcttcgacattgatgctaatggcatcttgaatgtctctgccgaggacaagactactggccagaagaacaagattaccataacaaatgataagggtcggttgtcgaaggaagaaatcgagaagatggttcaagaagccgagaagtacaagtccgaggatgaggagcacaagaagaaggttgaagccaagaattcattggagaactatgcctacaacatgaggaatactatcaaggatgagaagattggttcaaagcttgacccggctgacaagaagaagattgaagatgccattgatggagcaatccaatggttggatggcaaccagctagccgaggctgatgaattcgaggataagatgaaggagctcgagagcatctgcaatcctatcattgccaagatgt

SEQ ID NO: 226639 - DNA, 474 bp, Gossypium hirsutum
cccacgcgtccggcaagaagctgctgttctctctctctctctttcccatagtttcacccatcttttaatccatcgctcacaaaattatgggtttgaaggaggaattcgaggagcatgccgagaaagttaagaccctcccggccgccccttcgaatgatgacatgctcattctctatggactgtacaagcaagctactgttggaccagtgaataccagccgtcctggaatgttcaacatgagggaaaagtacaagtgggatgcatggaaggctgttgaagggaaatcaaaggaggaagcaatgggggattatatcaccaaagtaaaacaactgtttgaggctgctggaagttcttgatgtgtgtgtgtatgaccaatgaaactggtgtaatttcaagcccttgtcggttacttggggttttcattactatgaataaattatgtacctcttttctattgctattatgttatttaca

SEQ ID NO: 226640 - DNA, 449 bp, Gossypium hirsutum
cgtgaatctaatcggctattgtgcagatggggatcaaaggattttagtttatgaatacatggcaaatggatctttggaacatcatcttcttgatttgccccctggtaaggagccattggattggaataccaggatgaaagtagctgaaggagcggctaaaggactagaatatttacacgattttgctgatccgctgataatttatcgcgactttaaagcttcaaacatattactagatgagaacttcaatcccaaactctcggatttcggacttgcaaagttaggtcctactgaagggaaagaccatgtatcaactagggtcatggggacctatggttattgtgctgctgaatatgcaatgacaggccagctgacgacaaaatccgatgtttacagctttggtgtaatgtttctggagcttatcttggggaggagagcttttgattttt

SEQ ID NO: 226641 - DNA, 465 bp, Gossypium hirsutum
cttctgtatctttattttctcgcctttgacgaggagccgacgctaccatggttcacgtcagtttctaccgcaactatgggaagacctttaagaagccacgacgtccgtatgagaaggaacgattggatgctgagttgaggcttgtaggagagtatgggctccgatgcaagagggagctgtggagggttcagtatgctttgagccgcatccgtaatgctgctagggaccttctcactcttgatgagaagaaccctcgtcgtatttttgaaggtgaagcccttcttcgtaggatgaacaggtatggacttttggatgagagccagaacaagcttgattatgtcttggctttgactgttgaaaacttccttgagcgtcgtttgcaaactctcgtgttcaagactggtatggccaagtcaattcaccatgcacgtgtgttgatcaggcaacgacacataagggtcggga

SEQ ID NO: 226642 - DNA, 470 bp, Gossypium hirsutum
caccactgagatttgttaggtccggcaatcagatttttgctgtacacgaacaatttccttaaatttctgtgttccagagctgatacttcttctagagatgagatcatttaaaaaattataattatgaattatccaccagagaaggttgtgaggttccaggactggaattcagagaaaacctgcgaagtacattatactaataataatgggataaattcagggaaatttacatttgcaataaattcattttcagaaaagtttcaaagaggggttgaatctggttctgagaggattaaagcgattagaaagtcatttaaatctagttcattcaaccatgttgttgctaaaggctttggttctagtaagaaagttcttgatccacaggggccattccttcaacgctggaacaagatatttgtattatcatgtataatagcagtctcaattgatccactgttcttttacgttct

SEQ ID NO: 226643 - DNA, 317 bp, Gossypium hirsutum
gaaatacacaagaaaaaaaaacaagtgatctgataatattgaagactttatttctgttaacatgcattatgagtactgctggtcaagtcatccgttgcaaagctgcggtagcatgggagtcggggaagccactgtcaatagaggaagtggaagtggcaccaccgcagaaggatgaagtccgtattaagatactcttcacttctttatgtcacaccgatgtctacttctgggatgctaagggacaaaacccttttgtttctcgcatactaggtcatgaagctggagggattgtggagagtgtaagtgagggggtgact

SEQ ID NO: 226644 - DNA, 430 bp, Gossypium hirsutum
caaccaaaaatttcttgatggcctcaccagtacccttgacatcggccgccggaagcggaggagggggcggctgtggtgttgcaccttttcttttgaagacatacgacatggtggacgactctgcgaccgacgatatagtgtcatggagctcccacaataagagctttgttgtttggaaccctcctgaattcgctcgtcttttgcttgccacttatttcaagcacaataacttctccagtttcatcaggcagcttaatactgatggattccgtaagattgatcctgaacgatgggaatttgctaatgaagattttgtgaaaggtcaaaagcatttccttaagaacattcacccggaaaaagccgattcacagcccacagtaatccttatgggtttttcgtagattccgaaagggctggattcgaagaagaa

SEQ ID NO: 226645 - DNA, 472 bp, Gossypium hirsutum
ggaaaagatgcagatattcgtgaaaaccctaaccggcaagactataactctcgaggtcgagagcagcgataccattgacaacgtcaaagccgagatccaagacaaagaaggaatcccaccggaccaacaacgtctcatcttcgccggaaaacagctcgaagatggccgtaccttggctgactacaacatccagaaagaatcaacacttcatcttgttctgaggttgagaggtggaattattgagccttctttgatggctttggctcgcaaatacaaccaagacaagatgatttgccgcaagtgttatgctcgtctgcatccaagagccgtgaactgccgcaagaagaagtgtggtcacagcaatcagttgaggccgaagaagaagatcaagtagacactggctggtgttatcctgtctgctttaaaagaaattgaatgtcagaccaggaaaatatttccatggagttctttt

SEQ ID NO: 226646 - DNA, 445 bp, Gossypium hirsutum
cccacgcgtccgctttccttcctctttctctccttttatcttggcttttcatttataacttaccaagtttttgctttagtttttcttccagtgtttgattacttggaatctgataaaaaatggaatatgaagatcagatcaaccaggccatggaccccaaatacgaatgtcttttatttgatctagatgacactctttatcctctgacttctggtatatcaagtgaagttaccaagaacattcaagaatatatgattaagaagcttggaatcaaggacaatgttcctgaattatgtgtttcactgtataagcattatggcacaacaatggctggtttaaaggctattggttataactttgagtatgatgattttcatagtttcgttcatgggagactggcctatgcaaagctaaaacctgaccctggtttaaaggatctcttgct

SEQ ID NO: 226647 - DNA, 470 bp, Gossypium hirsutum
gcaaaggcagatgaacttgatgctgaagcagcttctcactgagatattgtttcgagatggtggggtttatcttttacttggttcgagaggtgctggagaggaaggtgaactgagacgatttttgactgatcataaagcaagacaacagtttctgctagaagctgcccgccaatgccaagattctgggctgtacgacaagtctatagagattcagaagagaattggagcattttcgatggcattggatacgataaataagtgcctctctgaagcaatttgtgccttatcacgtggtagattggatggtgagagtcaaactgttggcctcattcactccgtgaacgagatcttggagactttcaaatattatcctgaagtcaggttccaagagagggaacattgttttggacaacaaaccatattaagacagctcgagactatattattgatccataaattgacgagacttg

SEQ ID NO: 226648 - DNA, 474 bp, Gossypium hirsutum
gaaagaattaggagaagaaggcctcacgggtaatgaatgggaagatcgaaaaattggaagaagaaaggattttttggttagacgcatggaattggctaagcattttattcgaacaaatatagaaccagaatggatggttttatgtctattaccggttcttcctcccgagttgagaccgatcattcagatagatgggggtaaactaatgagttcggatattaatgaactctatagaagagttatctatcgaaataatactcttaccgatctattaacaacaagtagatctacgccaggggaattagtaatgtgtcaggaaaaattggtacaagaagccgtggatacacttcttgataatggaatccgcggacaaccaatgagggacggtcataataagggttacaagtcgttttcagatgtaattgaaagcaaagagggaagatttcgcgagactttgcttggcaaacgagtcga

SEQ ID NO: 226649 - DNA, 467 bp, Gossypium hirsutum
gcgtccgattatgtgatagataggggtggggcattttattgggggacaagtgagtggtctgcacaacagattacggaagcatggggagtagctgagaggttggacctggtaggcccaattgtggagcagccggagtataatctattgactaggcacaaggttgaatccgagtaccttcctctgtataccaactatggtctaggtcttacaacatggagtccgcttgcttctgtagtgcttactggaaaatacaacaaaggaaatataccatctgacagtcggtttgctttggaaaatttcaaaaatcttgctaaccgatcactaattgatgatgtgttgaggaaagttaatggactgaagccaattgctgatgaacttggtgtaccgttagctcaacttgcaatcgcatggtgcgctgcaaatcccaacatatcatcggttattactggtgctacaaaggaatctca

SEQ ID NO: 226650 - DNA, 407 bp, Gossypium hirsutum
tagatcgcgggcggccgctcgcgatctagaaataataacaataattctctttctgtttctctggtttaaacatgggtatgggtttaaggaatggatttcttttgattttatcttgtgttgttacactttccctctcagttttggggcgacctgccactttccttgaagattttagaatcacttggtctgattctcatattaggcaaatcgatggagggagagccatccaacttgttctcgaccaaaattcaggctgtggatttgcttctaaaaggcagtatttgctcggacgtgtcagcatgaaaatcaagcttatcccctgcgactccgcccgaacagtcaccttcttttatatgaattcttgttacagatgctgtgccatgattagctagacttcttgttcttgg

SEQ ID NO: 226651 - DNA, 466 bp, Gossypium hirsutum
tatctattgaaatggctgcggtgagagaagctttgctaaagcgcctgagggtgaacgcaacatctctgtcgctgctccgtaaccctaaacctagccttaacggtctctttgctctcaccttcaacgccgtccatcgtcgtttttccgacgacgtcatgggctcatttctcgacaaatctgaggtcaccgatcgcgtcgtctccgtcgtcaaaaacttccagaaagtagatccttccaaggttaccccaaatgcccattttcaaaatgatctcgggttagatagtttggacactgtggaggtagtcatggcccttgaagaagaatctgggtttgagatacctgataatgaggcagacaagatcagcactatcaatcatgctgttgagttcattgcttctcaccctcaggcaaagtagagtgaaacgtataaactctctttctttgctttcactttgctcatgtgaga

SEQ ID NO: 226652 - DNA, 446 bp, Gossypium hirsutum
aagaaaaacgctgcttgcaggtatgtcatcatccgataagccagaattagttgaaagggatgttaaggacaaggtggatgacaaagaagacaacagtggatttatagacaaggtcaagggtttcattcatgacattggtgagaagatcgaggaaacaatcggctttggcaagcctactgcagatgtagctgagattcacctcccttgtatcaatcttgagaaagcagaaattgtcgttgatgtcctcataaagaacccaaaccctgttccaatccccctcgtcgacattgactacctcattgaaagtgatggtagaaaactcctttcaggcttgattccagatgctggaaccatccatgctcatggtgaggagactgtcaaaataccagttactttgatatatgatgatatcaaaagtacatatgatgacattaagcctggcagca

SEQ ID NO: 226653 - DNA, 316 bp, Gossypium hirsutum
gcgaaaccctagccactctctgctcaactcgccaatgggggcttataagtacgtgtcggagctatggaggaagaagcagtcggatgtgatgaggtttttacagagggtgaggtgctgggaataccgccagcatccgtcaattgttagggtcaaccatcctactcgccctgacaaggcacgccgcttgggttataaggccaaacaaggttatgtggtttaccgtgtccgtgttaggaggggtggtcgcaagaggcctgttcctaagggtattcgcgtatggttagcccacaaaccagggtgtcacccaattgaagtt

SEQ ID NO: 226654 - DNA, 472 bp, Gossypium hirsutum
ccacgcgtccgcaataaatcacttgcctcgtttccatcgacaacttctctatatctctctcttctctctatttccccatctccctgtctcactacattgctctgattcttgttcacgtcaagcttggtagcactgaagctttggcttaaatgggtatttgctattgtaggcattttctgtttttctcaatggcaatggatgcttcactgactatgtgcaaatcggtcacatcacctcctggcttattcttggggagaagtagagttattaggagttcccagtgtacctttatggtgggaagcaggatcaactttcctaggcagaaagctcagtcaacccaagttaaatgtaaatctagcaggtgtggagtagctcttggtgctaaatgccgtgctgagaaaattttggtggcaaatagaggagaaattgctgttcgtgttatccgaacagctcatgagatgggaataccatg

SEQ ID NO: 226655 - DNA, 382 bp, Gossypium hirsutum
cccaaagcaaaacaaaagccatgtctcagactgttgtgctcaaggttggcatgtcatgccaaggatgtgttggagccgtgaagagagttctggggaaaatggaaggtgtggaatcatatgaagtagatttggagcaacagaaagtgactgtgaagggcaacgtccagcctgatgctgtgctgcagaccgtgtcaaagaccggaaagaagactgccttttgggaagcagaagctttggctgaatccgaggcgaagccagccgaatccgaggtgcagccagccgaaaccgaggcgaatccagccgaaaccaaggtgaagccagccgaaactgaggcgaaaccaacagaacccgaggcaaagcccacggaagctgttgctgcagc

SEQ ID NO: 226656 - DNA, 363 bp, Gossypium hirsutum
cccacgcgtccggggctccaaggcttcttggttttcaatgctgttggtggtggtactggttctggtcttggatctcttctcttggagcgtctctctgttgactatggaaagaagtcgaagcttggtttcaccgtctatccttcacctcaggtttctacatcagttgtagagccttacaacagtgtgctgtccactcattcactccttgagcacactgatgtcgctgttcttctggataacgaagcaatatatgacatctgcaggcgttctttggacattgaacgacccacttatacgaatcttaaccgccttgtctctcacgttatctcatctcttaccgcatctttgagggttgatggagcc

SEQ ID NO: 226657 - DNA, 450 bp, Gossypium hirsutum
ccacgcgtccggccttatccgcttattgcgctgccgcgggtattccttccattgtctttttacctgcgaataagatctccattgcacaattagttcaaccaattgcgaacggcgcgttcgttttgagcattgacaccgatttcgacggttgcatgaagttaatccgggaagttaccgccgagctaccaatttaccttgccaattcattgaacagtttaagactcgaagggcagaaaacggctgcgattgagattttacagcagtttgattgggaagttccagattgggttattgttcctggtggtaatttgggtaatatttatgctttttacaaagggtttaaaatgtgtcaagaactagggcttgttgataggatacctagattggtttgtgcccaagcagccaatgccaatccactttatctgtattataaatctgagtggaatgagt

SEQ ID NO: 226658 - DNA, 456 bp, Gossypium hirsutum
cccacgcgtccgatggttactcctagtaaggttcattaccttagacctcgtaggcatttagctggagccactaagaatgtttcagaaacattggaagccactgctgatgtttatgtttcatcagatgaaaatcatgcttgtcatgaagcaacgaggatcaagaatgcctcctctgtcatgcctaatcgccttggaaggagtatgggaccttcaggctatttcacaccttctagccaaaggagaacactggggagagatgctcaaaatctcctcaattatttcaaaaagatgcaggctgaaaatcctggcttctattatgctatacagcttgatgatgataatcggatgactaatgttttctgggctgatgcaagatcaagggcagcttacaattactttggagatgcagttacttttgatacaatgtatcgaccaaatcagtatcagatcccattt

SEQ ID NO: 226659 - DNA, 470 bp, Gossypium hirsutum
attcatacctgtgtttttctttcatcttttcacttaaattttgcttttagaagaggaaaaaagagagccaatttaggctctgagatgtatatgaaattcattgttcttcctctgatgcttgttgctgaaaatcaagttaaattccaagaaagggagtgggaaaaagagagataaacaaagttcctcatctaggtggactccaatggcggcatcggttatgaaagaaggtaaaaaaacggagtccgttgttattgtgaagcttgcggagtgcgattgttgcggtttaacggaggagtgtacgcaagcttacattgctagcgtaagagaaaaattcgaagggcggtggctttgcgggctttgctcggaggccgttaacgacgagacggttagatcggaggaagatatcacgactaacgaagcaatggatcggcacatgaagttttgtgagcagtttaaatcgtcgagtccac

SEQ ID NO: 226660 - DNA, 463 bp, Gossypium hirsutum
gaagttctccttgccatggctgaagaattgggagtttttattccttatgttggaggtgtcgaacatgctaatgttttgttgcctccgttggagactctttgcattgttgaggagacttgtgtgagggataaggctgttgagtcgttgtgtagaattggtgctcaaatgagagagcaggacttggttgagttctttattccattgttgaagagattggctgctggtgagtggtttacagctcgagtttcctcttgtggattgtttcatattgcatacccaagtgccccagaggcactgaaaactgaattaagaacattatacggtcaactttgccaagatgacatgcccatggttaggagatctgctgcgacaaatcttggaaaatttgctgctactgtagaagcacctcatttgaaggtggacattatgtctatgtttgatgatttgacgcatgatgatcaaa

SEQ ID NO: 226661 - DNA, 376 bp, Gossypium hirsutum
cccacgcgtccgctcagctatggaagatgattattctttttatcctgatgaagccgatgatgaacctcgtgatggtgagaatgaaggaaagaaaagagattttaccaaattagaactaaaactcgatcatggtaatcgcccattatgggcttgtgctgatgggcgtatatttttggagacattctcccctttatacaagcaagcttatgattttctcattgctatagctgaacccgtttgcaggccggagtcaatgcacgagtataatctcacaccacattccttgtatgctgcggtatctgtggggatggagacagaaacaattatatcggtcttgaataaattattcaagacttagcttcctaatgaatgattg

SEQ ID NO: 226662 - DNA, 431 bp, Gossypium hirsutum
ctctgccaaaacagagccaatctcctctcaacccttccttaacgctgccgccggcgtcggtggcgtcgccgctgccatcctcaaatccggattcaacagcggcaatggaagcaccaaagtatgtatgggaaggcgcaattcctcttcaaatccatctccacgaatcccaagtcaccactcttcctcctcctcctcctgctctgatcttagctccacggatcgggtatctgccgctgttagcgcctttgattaagccctattttagcagcacacttcctccaggtgttgataccatttggtttgattacaatggcctccctctcagatggtacataccgactggagttctttttgatcttctgtgccctgagcctgaaaggccttggaagatcactgtccattttagaggatatcccggaaatgtattgata

SEQ ID NO: 226663 - DNA, 451 bp, Gossypium hirsutum
aaaaaaaagaaaagaaaagaacaaggagtagcagaagagatgaagctaacgtggaacaagaacaacaacaacaacaacaagcggtccagggaagctattgcaagctaccctaatcttccctttgatcaacaagatccctcgcatgatgatatgcagttgcagaatcaagaacacgcccattctcaacatcaagacaaaccctctgctgatgctttggattctgactttaaacaacttgcccaatccttccaagcccaaggcaacaagcttgctgaggatgggaagtaccgggaagcacttgggaagtgggagacagcacttaatttgatgcctgaaaatgcagttttgcttgaacagaaagcacaagttctactcgaactaggggatgcatggagtgcattgaaggcagccactcgagccactgaattggaaccatcatgggcctgagcat

SEQ ID NO: 226664 - DNA, 461 bp, Gossypium hirsutum
agctgctgggttagaagatcggcttgtccatggcttgcttgttgcttcactgtttccttggattatttcctcccacttttctggagctatatatgtttcccaaagcttgcacttcaggtctcctgtttacgtcggagatgaaattgtgggtgaggtaaaagctatcagcattaaacaaagcaagaagagatacatagcaaaactatcaacaaagtgcttcaagaatggcgagcttcttgttcttgatggtgaggccatggcaattctaccaactctagctctggaacatgatagtagaagaagctgatataaagttgaacttgtaagtcatgaattcattacacagcttgataactgttgggattgcagaaagttgactgacatgttttcaattttggattaatattatttaggttacatatcaactctaaaacccaagtgcttcagtcaaaacacatttc

SEQ ID NO: 226665 - DNA, 375 bp, Gossypium hirsutum
agcacctccccgtaagcaaaccacaaaggaaagcttggagagagacccaaaaacaatgtctaaggaagttagtgaagaaggacagggtcgtaaggactatgtggaccctccaccggcacctctgattgacatggctgaactcaagtcatggtctttttacagagccctcatagctgagttcatagccactctcctcttcctctatgtcactgttgctactgtaattggtcacaagaaacaacaagatgcatgtgatggtgttggtctcttgggtattgcatgggctttcggtggcatgatctttatccttgtttactgcactgccggtatctcaggtggacacattaaccctgcggtgacttttgggttgttttt

SEQ ID NO: 226666 - DNA, 358 bp, Gossypium hirsutum
  unsure (1)..(358): unsure at all n locations
gtggagcagtaatcatgagctttcgagatctggaagccggacggccattggtgtcgaggcaaaacctgatcaacggcaagcaagacgccacgcaagcagtggcctctggcattttccagatcaacaccgcagtcaccacctttcagcggctcgtcaacaccctcggtactcctaaggatacgcctgagctccgagaaaagctgcataaaacaaggctacatattgggcaattagtgaaggacacttcggctaaacttaaacaagctagtgaaacagatcacagtgccggaattagtgccagcaagaaggtagcagatgctaaactngcaaaagattttcaagcagttttggaaagagt

SEQ ID NO: 226667 - DNA, 387 bp, Gossypium hirsutum
gcgagcggccgctcgcgatctagaaccggacgcgtggggaaaaaaaagaagaagaaggaaccaccttgatggctactttggcggcggttgcagctcgtaggatagcgactgtacctcgaacaccacctccctgtcaagccgcttctctcattacccgccggggtcttgccggcgctgcagatcaccatggacccccaaaagttaattgttggcaagaaccaatgaacccagctaattggaaggaagagcattttgttatcgtctctttaactggttggggtctggttttctatggcggatacaagttcttaactaaaggcaaaggcaagaaagaagagaacacagtggaaacggcaaaaaaaatgaggttggagcttttaattttta

SEQ ID NO: 226668 - DNA, 457 bp, Gossypium hirsutum
cttcactcacgtccttcacttagcggctcaggccggcgtacgttacgccatgcaaaacccacagtcgtacatcagctccaacattgcaggctttgttaacttgctcgaagtagccaaagcagccaatcctcagccatccattgtttgggcatcatcgagctccgtttacggcctcaacaccgaaaacccattctccgaacgcgaccggacagaccaaccggctagcctttacgccgccacaaagaaagccggcgaagaaatcgcccacacttacaaccatatctacggtctttcccttacggggctaagattcttcacggtttacggtccttggggaagacccgacatggcttatttcttcttcactaaagacatcctacaggggaagtcgattgacatatacaagaacgcatgatcaggaaagaggtggcgcgtgacttcacctacatagacgacg

SEQ ID NO: 226669 - DNA, 439 bp, Gossypium hirsutum
caggatatggctgagagaaagagaaggaagcttaagttgttagccgaaacaataaatttggataaaaaaaaagcaaccgaggaggaggagagtttgaagctacaaacgtgggctgatcttcctgtggaacttttggaattgattctgtgccgcctaacactagaggacaatgttcgagcttctgctgtatgtaggaggtggcataaggttgcagttgcagtccgggtggttaaccaatcaccgtggcttatgtactttccaaaatatggtagcttgtatgagttctatgatccagcagagcgtaaaacctactctctcgagctgccagagctacaaggatccagggcttgttacaccaaagatggttggttgttgctgtaccgacccagaaatcacggtgtgttcttctttaatcccttcaatcgccacatgattaagc

SEQ ID NO: 226670 - DNA, 361 bp, Gossypium hirsutum
tttgtttgctctgtatattgaaattttctttctcgattttctctttagccaaaaaagatgcagatcttcgtcaagactctaaccggcaagacgatcactctcgaggtcgagagctccgacacgatcgacaacgtgaagaccaaaatccaagataaggaaggcatccctccagaccagcagcgtctgatcttcgccggaaaacagcttgaggacggccggaccttggccgattacaacatccaaaaggagtcaactctccacctcgtcctccgtttgcgcggtgggatgcaaatcttcgtgaaaaccttgaccggcaagacaatcactcttgaggtcgagagctccgacacgatcgacaacg

SEQ ID NO: 226671 - DNA, 412 bp, Gossypium hirsutum
  unsure (1)..(412): unsure at all n locations
cggacgcgtgggctactccaagcaagcattttccttacaagtttgtttttcttgtgattaatcgatatggctagctcaatgtcccttaagcttgcatgtgtggcggtgttgtgcatggtggtgggtgcacccctggctcaaggggccgnnacctgtggtcaagtcacaagctccctcgcaccctgcattggttacttgacagggaatggtgctggtggcgttcccccaggttgctgcggcggcataaaatctctcaactccgccgcccaaacaacaccagaccggcaagcagcttgcaaatgcatcacaagtgcggccgccggcatttctggcatcaactatggtattgcaagcggactcccaggcaagtgcggtgtcaacattccttacaagatcagccctagcactgact

SEQ ID NO: 226672 - DNA, 457 bp, Gossypium hirsutum
accacaactacagcgaagagagaaaaagggaaaaaagcgtcgtcgtttttggttcttcttcttcttcttcttcttccctctctctctctctcttactctgaagctcctcttcgttctttcatttactcagtattgtaaaagatggccgacggtgaggatattcaacccctcgtctgtgataatggaactggaatggtgaaggccggttttgctggtgatgatgctccaagggcagtttttcccagtatcgttggtcgtccccggcacactggtgttatggttgggatgggtcagaaggatgcctatgtaggagatgaagcacaatctaaaagaggtatccttactttgaaatatcctattgagcatggtattgtgagcaactgggatgatatggaaaagatctggcatcatacattctacaacgaactccgtgttgctcctgaggagcaccctgtgc

SEQ ID NO: 226673 - DNA, 315 bp, Gossypium hirsutum
gtgcgatcctaggcatgggaagtacatggcatgctgcctgatgtatcgaggagatgttgtgcccaaggatgttaatgctgctgttgctactattaaaacaaagaggactgtgcagtttgttgactggtgcccaactggtttcaaatgcggtattaactatcagcccccaactgttgtacctggaggagatcttgctaaggtgcagcgagctgtttgcatgataagcaataatacagcagtggctgaggtgtttgcacgcattgaccacaagtttgatctcatgtactcaaagagagcttttgtgcattggtatgt

SEQ ID NO: 226674 - DNA, 252 bp, Gossypium hirsutum
catgggtgggtaactccgccaagctttgcccaggtgtatgcgcttacccttttgccgtacgtgaatacatgccgatgttgtagccggtaaagtcacccaacggtgacgttggatttgacggtatgattagtgtgatcggacacgaaattgttttattagcaaccaacccactggttaacgtttggtacgcctgttattgacccatggtttttgaggaaatttcggatctatgtgtgtgtatatatggatctt

SEQ ID NO: 226675 - DNA, 421 bp, Gossypium hirsutum
cccacgcgtccgggagaatcttctgctgttaattctttcatgactgcagccaaggttgtcatcgttatttttgtcattattgttggatctttcaaagttgatgtagataattggtctccttttgctcccaatggtgttaaacatatatttacgggagcaaccgtagtattctttgcatatgttggatttgacgcggttgctaattctgctgaagaatcaaagagacctcagcgtgatttgccaatcggaattttgggaagtctgcttgtatgtgttattttatacgttggtgtttgcttagtgctcaccgggatggtaccttacaacctccttggcgaggatgctcctttatctgaagcgtttacatccaagggtttgaaatatgtttcttatttgatcagtattggagctggtgctgggc

SEQ ID NO: 226676 - DNA, 477 bp, Gossypium hirsutum
cccacgcgtccggcaaattgtaacttgaaactagaaagcaaacatgaagctgctcaagcttatgttgatgctgctcattgctataagaagacaaatgtaaaggaggctatatcctgcctgaaagaggcagtgaacatgttttgtgatattggaaggctcagcatggctgccaagtattataaggaaattgctgaattatatgagtctgaacagaacactgagcaggccattgattattatgaaaaggcagctgatttcttccaaaatgaagatatatcaacctctgccaaccaatgtaagcagaaagttgcacaatttgctgctcagatagaacaataccagaaagctgttgagatctatgaagatatagcacgacagtcactttccaataacttgctgaagtatggagctaaaggacatcttctaaatgctggcatttgtcaactgtgcaaaggtgatgttgcaatcaccaatgca

SEQ ID NO: 226677 - DNA, 370 bp, Gossypium hirsutum
cgcgtccgtattatctgctcctcttagtttccctttttgtcccttgattatttgatactcccacctcatggctgccgctgatgatcgagttacgaagccaaatgtaaaggatgctatatcctacctgatagaggcagcgaacatgttttgtgatattggaaggctcaacatggctgccaagtattataaggaaatagctgaattatatgagtctgaacagaacacttgacattccattgattattatgaaaaagcagctgatttcttccaaaatgaagaaatatcaacctctgtcaaccaatttgtagcaataagttgcacaattagttgttcagatatgaacaataccagaaagctgttgagatctatg

SEQ ID NO: 226678 - DNA, 413 bp, Gossypium hirsutum
gcattagcaaccatagccatggcttcctcaccaaaactcttctctatgtctatcctcttcctttttgccctcttctccatgcaaatccatgctagagagtacttcagcaaattcccaagagttaacatcaatgagaaagagacaacaaccagagagcaaaagcacgagaccttcgttccccagaccacccaaaagccagaagaacaagagccaaggttcattcctgaaacccaaaatggttatggcctttacggccacgagtcaggctcaagccggcccagtttcaccaccaaagaaacctatgaaccctatgtcacccctgttagattccaccctgatgagccctataacagcatccccgaatccttcaacaattaatgacacttactactacaacaagaatgcctacgagt

SEQ ID NO: 226679 - DNA, 261 bp, Gossypium hirsutum
cccactcgttcgagagtgcgttagcaaattccctttagttaacatcaatgatgaaagagacatcgtccagagagcaaaagcacgagaccttctctccccagaccacccaaatgccagaagaacaagagccaaggttcattcctgaaacccataatggttttggcctttactgccacgtgtcattctcaagcctgtctagtttcaccaccaaagaaacctattaaccctatgtcaccccttttattagccaccttgtttagc

SEQ ID NO: 226680 - DNA, 317 bp, Gossypium hirsutum
ctgaaatccctgcctataatcaatctcttagcaaagggccaagctatagacaatggcagaaggcgaagaggatctgccgagggatgctaagattgtcaagtcactgcttaaatcaatgggcgtggtggactatgaacctcgtgttatccatcaatttctcgagctttggtatcgctatgtcgtggatgtactgacggatgcacatgtgtactctgaacatgccggcatgcaaaccatttattgcgatgatgtcaagcttgctattcaatctaaagtcaattacaacttctcgcaacccccatccagagaggtgcttt

SEQ ID NO: 226681 - DNA, 399 bp, Gossypium hirsutum
gcattagcaaccatagccatggcttgctcaccaaaactcttctctatgtctatcctcttccttgttgccctcttctccatgcaaatccatgctagagagtacttcagcaaattcccaagagttaacatcaatgagaaagagacaacaaccagagagcaaaagcacgagaccttcgttccccagaccacccaaaagccagaagaacaagagccaaggttcattcctgaaacccaaaatggttatggcctttacggccacgagtcatgctcaagccggcccagtttcaccaccaaagaaacctatgaaccctatgtcacccctgttagattccaccctgatgagccctataacagcattcccgaatcctccaacaattaaaacacttactactacaacaag

SEQ ID NO: 226682 - DNA, 285 bp, Gossypium hirsutum
tccacgcgtccggttcttgcattatgcgaccatccagccattttggacaaaagtgagacacagggtttattcagtgctgactccattgaacgtgcttggcaaatacttgatcaaattcctggaagggcaactggtgcctacagtcatagccagtgtatcaagggattactagatactattgctgccggaattgagggtcaagatggatttcctgctgagccaattgatattttcttgacagatggagcgagccctgcattgcacattatgatgcacttgctgata

SEQ ID NO: 226683 - DNA, 450 bp, Gossypium hirsutum
atcagcgatccgggtatctacttgagacaagaggaagcataatataccaagttgagaccagagcaagagtaattatatttgatatttcaacacttgaaggcaatagggttttgcggaataattcatcttcatttaacctttcacatagatctttaactagagaacatggaggtcttatgagttggcccgaacatttctttaggggaagacaacatacacaaaatcatgacgcatctgatcaacaagtaaacagattgtcagcgagagccatgcagttaagcatatttggcagtaaggtaaatttgccacagcgtagctggagtttatcaaggatgaatcagtctcagccaataaacaacccgtcatataatagatttctttcattccctggccatctactggtctctgccggatcagaaggagcttctactatgacgaagaatcacaaag

SEQ ID NO: 226684 - DNA, 404 bp, Gossypium hirsutum
cccacgcgtccggctcatcccacttccttatatcctccggtccgcggacatgcctcgactggcaccctgggacgccacctggcaaggcggctcgtggagatcggtgtcaaggacgtcttctcagttcctggtgacttcaacttgaccctcttggatcatctaatagcagaacctgagctgaacttagtcggttgctgcaacgagcttaacgccggatatgcggctgatggctatgcacgcgctaagggcgtgggagcctgcgtcgtgactttcactgttggaggcctgagtgtgcttaacgctattgccggtgcttacagtgagaatttgcctgtgatttgcatagttagagggcctaattcgtatgattactgtaccatccggatcttgcatcatactttttg

SEQ ID NO: 226685 - DNA, 306 bp, Gossypium hirsutum
catggcttgctgtctcatgtaccgaggtgatgttgtgcccaaagatgtgaatgcagctgtggctgccatcaagaccaagcgcacaatccaatttgtcgattggtgcccgaccggatttaagtgtgggatcaattactttccaccaactgtttgttccggcgatttgtctctaccaattttttttttctagttttttttctctcatatttgtttcatgcgttgttttttaagttagtttttcttgcacacatattttttttaggcaaagttttcttttgtacaatattttgttttcttcaagttttt

SEQ ID NO: 226686 - DNA, 197 bp, Gossypium hirsutum
cccacgcgtccgcttcttgttcctttacatcaccgtcttgactgtcatgggtgtgtctcagtctaaaaccaaatgtgcaaccgttggtattcaaggcattgcttgggcttttggaggcatgatctttgcccttgtttactgtactgccttgtattcaggtggtcatatttaccctgctgtgacctttttattgattc

SEQ ID NO: 226687 - DNA, 227 bp, Gossypium hirsutum
gaaactggtgccgggaagcacgtccctcgcgccatctttgttgatctggagcctactgttatcgatgaagtgaggactggtacgtaccttcagttattccaccctgagcaactcattattggcaaagaagatgctgccaacaatttcgttcgtggccatttttcaatgggcaaatagattgctgatctctgcttggatcagtatccttaagcttgctttttactgta

SEQ ID NO: 226688 - DNA, 416 bp, Gossypium hirsutum
atagaattacgaaagctcatctctctctctctctctctctagatttcaccccttaggtttctctttccacacagagacagagagagaatcagaggagcttaatcgagatttgatattcctcaccacagatggatcagatattgaacaaggtgggctcctattggctcggccagaaggccaacaaggagatcgattccgtcggcgacgacctcaactcattatccaccagtattgaagggggagccaaatggttggttaataaaatcaaaggaaaaatgcaaaagccgttgccagagctgttaagagagtataacctgccaataggaatcttccctcgtgatgccacaaattatgaattcaatgaagagactgggaagctcactgtttttattccagcaatatgtgaaaggggatac

SEQ ID NO: 226689 - DNA, 218 bp, Gossypium hirsutum
cttaataaacgccttctttcttcttcttctccctttctatgctttttcgaatttttcttaagcgagaatgagtgagtgcatttcgattcacatcggtcaggccggtatccaggttggaaacgcctgctgggagctttactgtcttgagcatggattccatccttatggttcttatgccaagtgactaaactgtcggttgaggtattttttcttttaac

SEQ ID NO: 226690 - DNA, 423 bp, Gossypium hirsutum
attaacttctgatccgaatatgccaacaattagtgctgaaggtagaccgcctccaaagataggaaatcttggacacttgacacgcatatctaacaaacttgttcagcttggaaatagcaatgctgaaattcaggcacatctgcaggaaaacagtgaatgggttgattggcacactaatgtcttattaaagcgtaatgctacagaaaatatctatcagtgggcttgtgggaggccaacagctctacacgaccgaaccagagacagtgatgatgatgattaccatgatagggattatgatgttgcagccttggcaaataacttaagccaggcatttcgatatggcatttacagtaatgatgatatggatcaggtacatggctcactcgaaagagatgatgaggatggttacttggatgatgaatc

SEQ ID NO: 226691 - DNA, 274 bp, Gossypium hirsutum
atcgggagcagcccggcctttgtttttcccaaggacgtcaatgctgcagtcgcctccattaagaccaagcgcaccattcagtttgtcgattggtgtcctactggattcaagtgcggtatcaactaccatccacccactgttgtccttggtggatatctttccaaggcccagttagctgtttacttgttttttaactgcatcagtgatgctgttgtcttctgtcgtattggccataattttttttctttatgtttgtctaacgtatctttttttt

SEQ ID NO: 226692 - DNA, 427 bp, Gossypium hirsutum
ctcagccaaaagggctctgctttggagttctttctttcttcctttcttctggcgtactttgggtgcccactctaatcatggtatccaagcacaatccatcgggcaacaaaaaacggagcccactatctatatttgctgttattggtttgtgttgtttcttctacattctgggagcatggcagcgaagtggttttggcaaaggagatagcatagcattggaagtaacaaagcaggcagactgcagtatcttaacaaatttgaactttgaaacacatcacaacgatgtagagattgttgagccttccaaaccaaaagctcatgtgtttaagccgtgtgatgtaaaatacactgattacacccctagccaagagcaagaccgagccatgtagtttcccaaggattacatggattaaccgggaaagacact

SEQ ID NO: 226693 - DNA, 292 bp, Gossypium hirsutum
gcaatactccaagcaaccattttccttacaagtttgtttttcttgtgattaatccatatggctagctcaatgtcccttaagcttgcatgtctgttggtgttgtgcatggtgatgggtgcacccctggctcaaggggccataacccgtgctgatggcttagtcggcctcccacgctaccttcctttattgtcagggaatggagatggtgctgatgccacaggttgctgagccatcgtcatgaatgccttgggatcgctctgtggtgatacataagaaccgatctagcttgtaa

SEQ ID NO: 226694 - DNA, 432 bp, Gossypium hirsutum
cccacgcgtccgcccacgcgtccggttctagatcgcgagtctgccgcccttttttttttaaattaggtggctatcaatggacgggcataatttggaagactcaaagcaaagcactgttgatatgtctgttttcgtgcaaaatcttcttcaacaaatgcaatccaggtttcaaacaatgtcggagtccatcatcacaaagatagatgaaatgggagaccgtataaatgagctggagcagagcatcaatgacctaaaagcagagatgggaatggagggctctccatcctctttagccccaccaaagcataagtcatgactgagcgaatcaagaagttgactctgcattaaaactggccagagattgtatttagcggttaatggtgaatgttatattggtcaaatttggggattatcttggttagagactacttt

SEQ ID NO: 226695 - DNA, 452 bp, Gossypium hirsutum
gccttcttccatccactattttcgttcatgagggaaggctcgaacgaatatagaattactatagagttttatgggtggtagtctcaaccatcttctccattatttttcttcttatagacattagctttgcttaatcaaaattccctttttgatttccattcacaaagttccgttttagataaataagtgaagacagaaacttcagaatagaaacaaccattcaactataagaacaaagaatatattccccatggctctgttctccggtcatcagcattctattatcaccttcttcagcatcattctccttgtgtttcttgatggtgttacggcagccacctttacattcatcaacaaatgcgattacacagtatggcctggaattctagctaatccaggaagtccaaaacttgaaagtacaggctttgaacctaccaaaggcagctctcgtc

SEQ ID NO: 226696 - DNA, 353 bp, Gossypium hirsutum
aaaaaaatttctctggaaacaaagcaactatcaactacgtttacctcagatctaaaacacctcgtctcagatccactaaattcaccatgtctactactttcagcggcgatgaaacggctcccttcttcggcttcctcggcgccgccgccgctctcgtcttctcctgtatgggagctgcatacgggacggctaagagcggtgtgggtgtggcttcaatgggtgtgatgaggcctgagttggtgatgaaatccattgttccagttgttatggctgaggttttgggtatttatgggttgattattgctggtattattagtaccggcatcaatccaaaggccaaatcgtattatttt

SEQ ID NO: 226697 - DNA, 456 bp, Gossypium hirsutum
gctagccttcagttcagcaaagagcccaacaatctctacaacctccactcctacaaacactctgggttggcaaacaagaaaacagtcaccattcaaagtgggggcaaagaccagtctgtgctgctagcaaccaccaagactaagaagcagaacaagccttcggccttgcttcacgagtcctttatgaaaaaggagttccccaggatggccaaggcggtcaaaaaccaggtgacagacaactactacaggccagatttaacaaaagcagcccttgctaggttgagtgctgtgcacaggagtctaaaggtagccaagtctggtgttaagaagaggaacaggcaagcattgaaggttcgtggcttgaaaagagctagacctttcaggttgtatgagctctgctatttttatttgcccagacatttatttaccatctttttttgaattgggattattttt

SEQ ID NO: 226698 - DNA, 232 bp, Gossypium hirsutum
cggacgcgtggggcattagcaaccatagccatgtcttcctcaccaaaactcttctctatgtctatcctgttcctttttgccctcttctccatgcaaatccatgctagagagtacttcagcaaattcccaagagttaacatcaatgagaaagagacaacaaccagagagcaaaagcacgtgaccttcgttccccagaccacccaaatgccatgaagaacaagagccaaggttc

SEQ ID NO: 226699 - DNA, 353 bp, Gossypium hirsutum
cttctatagaggtctgctctgctcaacatcctatctctttctctcgaccaaagactcatatccacgcgtgaatctttgttccagcttgttagaatggagacatttctattcacatctgagtctgtcaacgagggtcaccctgacaagctttgtgaccagatctctgatgctgtgctcgatgcctgccttgcccaggaccctgacagcatggttgcctgtgaaacatgctccaagaccaacatggtcatggtctttggagaatttaccaccatagctaatgtagactatgtgatgattgtgcgttgctcgtgccgcatcattggatttgttttttgttttttgggttttgatgc

SEQ ID NO: 226700 - DNA, 357 bp, Gossypium hirsutum
cccacgcgtccgctttgcactttcccgataatcaccaaaccaaacccaaagcttggactttacttcaagaatatcattaatatgctttttgtttgattgttttctttctttttcttttttcctaatggattcagctactctccttgatcgtgctttgtttcaactcactccaactcgaactagatttaatctggtgctattctacataggaaagaatgagtatgcttgcttctgggctttttgaacccttcatttgtcacctcaaatttgcaagagatcatatctccaaaggtgggtattcgatttctctgcagccacctgctccctctacacctttggtcaccaaggcttcttttg

SEQ ID NO: 226701 - DNA, 386 bp, Gossypium hirsutum
accatccagtgcaaggtgtgcatgcaaacattcatctgtactacaacagaagtgaaatgccgggagcatgctgaggcgaagcatcctaaatccgacctatacacatgttttcctcatcttaaaaagtagcacactggggaagtggagatggcttgtagcatgcatctatcttgtcccattggtactgtatgagtaacttcttaaaatctctctcacaaaagccctataagctctcacttggtgatttcgatgatgcaattgtcatgtcgtgttctgtctcgatacttgcttgttgcttgattttgatatgattaatgtggtaaagctggtggtgttatttgtggagctgttttttcttaacctttttttgccactttgtctatgaa

SEQ ID NO: 226702 - DNA, 327 bp, Gossypium hirsutum
cttagaaggtgtcttaataaacgccttctttcttcttcttctccctttctttgctttttcgaatttttcttaagcgagaatgagagagtgcatttcgattcacatcggtcaggccggtatccaggtcggaaacgcctgctgggagctttactgcctcgagcatggaatccagcctgatggtcagatgccaagtgacaaaactgtcggaggaggtgatgatgcttttaacacctttttcagtgaaactggtgctgggaagcacgtccctcgtgccgtctttgtggatcttgaacccactgttattgatgaagtgagaactggtgctta

SEQ ID NO: 226703 - DNA, 396 bp, Gossypium hirsutum
cggacgcgtgggtacagatttcatcatcaccagtactttccaggaaattgcaggaagcaaggacactgttggtcaatacgagagccacactgctttcactcttcctggtctctaccgtgttgtacatggtatcgatgtgtttgatcccaaattcaacattgtttcccctggtgctgatatggagatatacttcccttacaccgaagagaagcggaggttgaagcatttccatactgagatcgaagaccttctttacagcaaagttgagaatgaagaacacttatgtgtgctcaatgaccgcaacaagccaattctgttcacaatggcaaggcttgatcgtgtcaagaacttaaccggactcgtcgagtggtacggcaaggacgcaaagttgcgtga

SEQ ID NO: 226704 - DNA, 451 bp, Gossypium hirsutum
tgtactgggcgcccgacgtccgagactcgttgcctagactgtgaacccacttccgaaaactgcactcagacctgccctccttacataatggaatacggtttaggttccactgctgggcttctattagtagaaaaccttgctttcccccagaaaaccttccaagatttccttgtcggatgctccatcctctccaaccgacagcccgctggaatagccgggttcggtcggagcgctgagtctataccctcccaattaggcctcaagaaattctcttactgtctcgtttctcgccggttcgatgacactggcgtcagcagcaacatgttgttggaaaccgggtcgggttccggtgatgccaagaccccaggccttagctacacaccgttttacaggaaccaagtggcttcaaacccaagtttcaaaagagtctactacgtaactcttacgtaaa

SEQ ID NO: 226705 - DNA, 173 bp, Gossypium hirsutum
ggtgaggatattcagccacttgtttgtgacaaatgaactggaatggttaaggctggatttgctggggatgatgctccccgagccggatggcctagcatcgttggtcggccacgtcacaccggtgtgatggttggcatgggccagaaagatgcatctgtcggtgatgaatctta

SEQ ID NO: 226706 - DNA, 402 bp, Gossypium hirsutum
ccagtcccagaactcgtcggctgccttcgcactgctcgagctgctcccgcggcgagagcggttcgccgcgtgccgggcggtggacggactgggaacggctccctcggtggcctttctcgggcgactaacagtcgactcagaactgttactgacaaggggaatcctactgtttaatttaaacatagcattgcgttgtgtcctgttgattgctacgcaatgttatattttctctagttgctctttattgttaataataatttataatttaattcgttctctgttattatccctcttcttctaatatattctctcttaatctatatataataatttatttttttttacttaaaatactattattattttcatattcttattcacttataacttcaaactttatta

SEQ ID NO: 226707 - DNA, 443 bp, Gossypium hirsutum
  unsure (1)..(443): unsure at all n locations
atcataaaaaggaaagaaaaaaatgaagctcttgtttctaactttgctgctttgttctcttcttctatgttcttcagtttttgcaccaacaatggctcagcctcgttcacctttttgtgaagggaaatgcaaagggaggtgcaataaagcggcggtttgggatcggtgcttcaaatattgcggcatatgttgcgaggagtgtcaatgcgttccgtccggtacttacgggaacaaacacgagtgtccttgctacagagataaggtgaacaacaagggcaaacccaaatgcccttgaaaatgaaatatattcgagttcgggatttaatcaagcttaaagatcgaggacgaagaggccatatatatatatatatgcatgttgatgatgatgntattataaaaataaacttgttttgttggtggtattttcctttggggtttggggt

SEQ ID NO: 226708 - DNA, 400 bp, Gossypium hirsutum
gttctagatcgcgagcggccgctcgcgttgtcttcgaggctgatatcttcgtcaccacaaccggtaacaaggacatcatcatggttgatcacatgaggaagatgaagaacaatgccattgtttgcaacattggtcactttgacaatgaaatcgatatgctcggtcttgagacctatcctggtgttaaacgcatcaccattaagcctcaaaccgataggtgggtcttccctgaaaccaaaactggcatcattgtgttggctgaaggacgtctgatgaacttgggatgtgccactggacacccaagttttgtcatgtcctgctcgttcactaaccaggtgattgcccagctcgagctatggaaggagaaggcaactggaaaatatgagaagaaggtttacgt

SEQ ID NO: 226709 - DNA, 382 bp, Gossypium hirsutum
gcggactaccaacttaccaagctcctaggactgagacctttcgtgaagaggatcatgatgtatcagcaaggctgattagctggtggaaccacacttcgaatagccaaagatttggctgaaaataacacggacgctagtgttacagtgaaatgcatatgcaccgccttgagacctatcctggtgttaaacgcatcaccattaagccttaaaccgataggtgggtcttccctgaaaccaaaactggcatcattgtgttggctgaaggacgtctgatgaacttgggatgtgccactggacacccaagttttgtcatgtcctgctcgttcactaaccaggtgattgcccagctcgagctatggaaggagaaggcaactggaaaata

SEQ ID NO: 226710 - DNA, 412 bp, Gossypium hirsutum
ggaggatagaggagagagatctctgcgaataatccatggcgggcgattcagagatgaacccagagcaggtagaagaagagttcagcgtatggaagaagaacacccctttcctttacgatctcgtcatttctcaccctctcgaatggccttctttgactgtccattgggttccttcttctcccactccttacggacctgaccctacttttaacgttcacaaactcgtcctcggaactcacaccagcggcggcgcccccgattttctaatgatcgccgacgcagttctccccactctcgcctctgaatccaatatcgctgctaaaaatgatgacccagttatccctaaggttgagataacacagaaaatgcgtgttgatggggaagtcaacagggctagatgtatgcctcaaaa

SEQ ID NO: 226711 - DNA, 414 bp, Gossypium hirsutum
aattcttattccttttatatttttcctctccaattttccgtcactttcccgagaaaatgagagaaatccttcacatccaaggtggccaatgcggcaatcagataggagccaagttctgggaagtcgtatgtgccgaacatggcatcgattcaacgggtcgatatggtggtgactcggagctccagcttgagcgaatcaatgtttactacaacgaagccagttgtggccgttttgttccccgcgcagttttaatggatctggaacccggtaccatggatagcgtaagatccggtccttacggacaaattttcagacccgataacttcgttttcggacagtcgggcgccggaaacaattgggctaagggacattacactgaaggagcggagcctatcgattccgttctcgacgtaa

SEQ ID NO: 226712 - DNA, 395 bp, Gossypium hirsutum
cccacgcgtccgcggacgcgtgggcaatgccactaccaacagctgccctctctgttcctgcagtgttcttctccatctgtctggccgctttcttccttctcttcctccaataatccccatgtcagcagcttctgccccgcccccaccgctctccccaaattcccttccctctccaagcccaaaacccctcttcgcaacctcacccctctctccgccgtttccatcgagaaagaaaccctcatctccgagcgcccccacactttcctccgtgaagccgacggaggagatgactgttccgtcaggtctcgctttcagcgcatgatattggaggcccaggaaagcgtgtgctctgccctcgaggctgttgacggagctggcaagttcaaggaagactc

SEQ ID NO: 226713 - DNA, 438 bp, Gossypium hirsutum
ggtacatgttcgaacccgggacctgttggatcgaatgacattggaggaaaagatcggacaaatggtccagatcgaacgcagcgttgcttcggccgacgtgatgaacaagtatttcattgggagtgtattgagtggaggagggagtgccccttctccacaagcttctccagaggcttggataaacatgatcaatgactttcagaagggtagtttagcaacccgaatgcagatccccatgatttacgggattgatgctgttcatggcaacaacaatgtttacaaggcaacaatttttcctcacaacattggtctaggtgctaccagggaccctaaactggttaagaaaattggggctgcaacagcacttgaatctagagcaactggcattccatatgttttcgcaccttgtatagcggtttgccgagatccgagatgggg

SEQ ID NO: 226714 - DNA, 386 bp, Gossypium hirsutum
gttctcacttaacccgtttgcctccggcatctttccactcatggcttcggagaaagaagctgcccttgctgctgctccctctgattctcctaccatatttgacaaaatcatcaacaaggaaatcccagctaccgtggtgtatgaagatgataaggtcttagctttcagggacatagctccccaggctcctacgcacattttaattattccaaaatcaaaggatggcctaacgggtttgtctaaggctgaggagaggcactgtgaaatccttggctgccttctttatactgcaaagcttgttgcaaaacaggaagggctggaagatggattcaggattgtgatcaatgatggccctaaaggatgccaatctgtgtatcacattcatg

SEQ ID NO: 226715 - DNA, 351 bp, Gossypium hirsutum
gggccggtatgatcttctaccgcaaaggaccaaagctcttcaaagaagggccaacctgaaggtgcggtgtatgattttgaagacaaaatcaattttgcggatttcccatcccttcagggtggtccgcacaatcaccagattggtgctttggctgttgccttgaaacaatccatgtcacccgggttcaaggcttacgctaaacaagttaaggccaatgcagttgccattggaaagtaccttatgagcaaaggataccagcttgttacaggaggaaccgagaaccaccttgttctttgggatctacgaccttttggattgactggcaacaccgttgagaaactttgtgacctt

SEQ ID NO: 226716 - DNA, 427 bp, Gossypium hirsutum
gggaattacgagaggaaactggagttgagtctgctgaaattatcgccgaggttccgacatggttgacatatgattttccaactgcagtaaaggccaaagtgaatcgactctggggaggcgaatggcacggaaatgcgcagaaatggtttcttatgaaattaacaaaagacgagagcgaaatcaacttagcaaccggagaggtagaaccggaatttgccgagtggaaatgggcaactcccgaagaagtagttgagcaggcagtggattataaaaggccaacatatgaagaagttatgaagacctttcagccatactttagtgataatggcaaagccaccaaatgtaaatcaacaaaatggtgaatgcaatggtcgtaaaagttctatgaagaatctatattaagagttggatcgtattttgttatttt

SEQ ID NO: 226717 - DNA, 347 bp, Gossypium hirsutum
cggacgcgtgggcagaaaaatggtgaaagcagtgtctgttcttagcagcagtgaaggtgttagtgggactgttttcttcactcaagagggagatggcccaactacagcgacggggaacatttctggtcttaagcctggcctccatgggttccatgttcatgccctaggggacacaacaaatggttgcatgtcaacaggacctcacttcaatcctgctggaaaagagcatggtgctcctgaagatgtgaatcgccatgctggtgatctaggaaatgtcactgttggtgctgatggctctgcgagtttctctattgtcgacaaacagattcctctttttgggccacact

SEQ ID NO: 226718 - DNA, 459 bp, Gossypium hirsutum
cccacgcgtccgagcaaatttcacaaaaacaaattcaaacccaaaacctgaaatcccaatattcgcccacccatttgcaacgatcaccttgaaaatcacatatccatggagtttaattgctcatctcctaccaccatccctgtggtttcaacttttgcatctccctttgacacttctgccgctgtcaatggctcagactccacgtcaaccaggaagcccatcagcctatggccaggaatgtaccattcaccagtaaccaatgctttatgggaagccaagtcccaaatctttgagagactccttgacccaccaaaagatgcacccccacagagcgagttgctcaccaaaaccccttctcaaagcaggaccagcattcctttataattatcatcagactacaatttgagagaacagtacaggggatccctggaatgaagttagaattgggaagttgtttga

SEQ ID NO: 226719 - DNA, 411 bp, Gossypium hirsutum
caaagcattagcaaccatagccatggcttcctcaccaaaactcttctctatgtctatcctcttgctttttgccctcttctccatgcaaatccatgctagagagtacttcagcaaattcccaagagttaacaccaatgagaaagagacaacaaccagagagcaagagcacgagaccttcgttccccagaccacccaaaagccagaagagcaagagccaaggttcatccctgaaacccaaaatggttatggcctttacggccacgagtcaggctcaggctcaggctcaggctcaagccggcccagtttcaccaccaaagaaacctatgaaccctatgtcacccctgttagattccaccctgatgaaccctataacagcatttctcgaatccttcaacaataaagacacttact

SEQ ID NO: 226720 - DNA, 426 bp, Gossypium hirsutum
taataacaataattctctttctgtttctctggtttaaacatgggtatgggtttaaggaatggatttcttttgattttatcttgtgttgttacactttccctctcagttttggggcgacctgccactttccttgaagattttagaatcacttggtctgattctcatattaggcaaatcgatggagggagagccatccaacttgttctcgaccaaaattcaggctgtggatttgcttctaaaaggcagtatttgttcggacgtgtcagcatgaaaatcaagctcatccccggcgactccgccggaacagtcaccgccttttatatgaattctgttacagatgctgtgcgagatgagctagacttcgagttcttgggaaaccgtaccgggcagccatatacggttcaaaccaatatctatgcccatgga

SEQ ID NO: 226721 - DNA, 451 bp, Gossypium hirsutum
caaaaccaagtagatatttctttcaatggctggaattgctactacttgttattatttgaccctctcttctacaagcactaggaaaacctggttggaattaaagaccaactatggaagagccacacctatccggagaagaaacttaagcattagagctgaagtcaattttgtaaatgctgaagaagccaaaaaacttatagctgttgagggttatgccgttctcgacgtccgcgataaatctcagttcgatcgagctcatatcaaatcatgttatcatgttccccttttcattgaaaacacagacaatgatcctggcacaattgttaagaggactttgcacaataacttttcaggcttattctttgggttgccatttacaaaactcaatcctgaatttgtacagtccgtgaaaagtcagttttcgcccgaatctaaattgttacttgtatgt

SEQ ID NO: 226722 - DNA, 489 bp, Gossypium hirsutum
ggttttcaggtttgccattcactgggaggtggaacagggtcagggatggggacattgttgatatcaaagatcagggaagaataccctgaccggatgatgctaacgttctcggtgtttccatcacctaaagtatcggatactgtggttgaaccctataatgcgaccctgtcagtgcaccagcttgtggaaaatgctgatgaatgcatggtccttgacaatgaagctctttatgatatctgcttcagaactcttaagctcacaaatcccagctttggtgacttgaaccatttgatttcaacaaccatgagtggagtcacatgctgccttcgcttccctggccaactcaattccgatcttcgaaaactagcagtaaacttgatcccattcccacgcctccattttttcatggttggttttgcacctttaacatcccgggttcacaacaataccgagctttaacgatcctcgagctaactcaacaaatgtggg

SEQ ID NO: 226723 - DNA, 476 bp, Gossypium hirsutum
gttttaaatttgatcttctcttccaaaatcaaatccaaaaagagagaaaatcccaccaaaaaaatggcgatttctaatgacaacaacaacgacgagcaccatgaatcgagtcctcttttgagcaaacaagtggcagaccaagatttgaaggagaaaccaagtggtaaaaaggcaaaagaagctgccgccgaggtgccagctcatccggtagttgctaccggagatgggtttgggtggacagctgatgggttgccgttggtccaccggagtgtcgtcggagaacccttgggtcgatctcaatggaactcatctctccttgcttgtcttggccgtaacgatgaattttgcagcagcgacattgaagtttgtctccttggaagcttggtcccttgtgtgctatatggaaccaatgtcgaaagacttggatctgattctgggacatttgcgaatcactgctggccatactcgggttttac

SEQ ID NO: 226724 - DNA, 398 bp, Gossypium hirsutum
gaccacgcgtccgatttaattcacttcctttcttttaatcccaccttttttactccagattttctctagaaccatgcgtggagatggcttttctcatgccttcacctgaaatttccaccgcctctgcaaaatttttctctaaccctaccccccgccctaaatttctcaagagctgcgcgatttcgaagaacgacgacgagaaagtttggtcaaggaccaacgctagggtcggtgttaaagatgccggcagtacggtttcgtgtttgagccaaaacttgaggttgtacgtacaattttcggctccggtgaagcgaggatcgaagcccatcatagagtgagaggagatgcaggattattacgtgaatatgggttacgctattcggaccttgagagaggag

SEQ ID NO: 226725 - DNA, 303 bp, Gossypium hirsutum
cggacgcgtgggcggacgcgtgggctgaatgattattttgagaaagcacttgacgatattttgaatgttattcctcgggataggcacacgtatttgttttcagcaaccatgaccaaaaaggtgaagaagctgcaaagggcatgtctgagaaatcctgtgaagattgaagctgcctcaaaatattctactgttgacacattgaagcagcaataccggtttatacctgcgaagtacaaggattgctatcttgtttatattttgactgagatgtctggatgtacatatatggttttcaaattaact

SEQ ID NO: 226726 - DNA, 452 bp, Gossypium hirsutum
atttgtattaagaatcgccctttagtgatcagtgtggtgaagaaaaatgtcttgctgtggtggaaactgcggttgcggctgcggtgtgcaagtgcggcagcggctgcggcggttgcaagatgtaccctgagatgaactttgctgagcaaaccacaaccgggacacttgttcttggcgtggcaccccggaaagcgcactttgatggagctgaaatggaaactggggctgaaaatggctgcaaatgtggagataactgcactcgtaacccttgcaattgtaaatgagaaaataaagctaagcatattatggaagctgatcttaataatatattatgtatttgggtttttctattttaaattattttttattatttattttgttcatcttttttttttttttttcttttagtattatcattttgtttactaattatttttattattttttatatt

SEQ ID NO: 226727 - DNA, 373 bp, Gossypium hirsutum
caacaccttttttcaatagcttcatttccaccactgcaacaatgccacatttctctaattctgtgcaagcttaagtatgtcaagcttggctaccaatatctcgtcaatcatattcttacacttactcttatacctgtcatggctggtgttcttattgaggttcttcgtttaggccctgctgagattgttaatctctggaattcccttcattttgatcttgttcaaatcttgtgctcttgtttctttattatctttgtagccactgtttacttcatgtctaagcctagaagcatttaccttgtggattatgcatgctacaaacctcctgtcacttgtcgtgttccttttgctactcttatggagcacttcaggc

SEQ ID NO: 226728 - DNA, 405 bp, Gossypium hirsutum
cccacgcgtccggattggtatctgaaacattatctggaagtgtggtttttaatgatgcaatcattcagttcgcagctgacacccttccatttgggggcattggtgaaagtgggataggaaaataccatgggacattctcctttgacacatttacacactacaaggcagtggccagaagaagcttactcactgatttttggtataggttccctcatggaacaattacaaactggaactccttgagaatacttacaattaccattattttggattgctgcttgtcattttggggttgaagaggtctagaaagacttttctcgtcaactagtactttcagatatatacatatacctctttatccatgcatggctatattataagcaacatttaaatgttggtaacgat

SEQ ID NO: 226729 - DNA, 439 bp, Gossypium hirsutum
ccacccgtccaggactttggtggcactgtaaacagtattatgcattgaacataactaatttaaggtcctaactggatggtaacctcctggatcggtgatggaataagtactgggtaaacacccttttttcttaaccttttttgggtaatggagattatgttgcaggacaaatttcgaatttagctgaaaagctggagcaagcagagaaccaactggctcactctcgcattggcccactaggaccccctcgaaagaagttgcaggaagaatctcagcttgctaagattactagagatagtgcaaagataactgtggagcaagtccatggtttaatgtcacaggtcatcaaagacattcttttcaactctgtacgacagtcgagtaggtcccagaacgatcagtctggtcctgagcctatgattgaaacctaattctaaca

SEQ ID NO: 226730 - DNA, 360 bp, Gossypium hirsutum
  unsure (1)..(360): unsure at all n locations
tnnccatgggaattagtcatgtgaagtgttcttataaagggaaacaccaactgctatagcgtgtaatacaattaacatggaattaaatagtaatgatgtcgtccacaaagggcaattgagattttacaacttaaaatgacaatacctccattatatctcacacagatgggaaatatttgtttaggttgaaggggagggaataaaattcttcactcctcgaatcacccttgaaggatcggaacttgtcccaccagtgcttacccctgtccttcctaatcccactgtccttgcggtgcaatgtgttttcgaggaaaaatgccaagcattccgctacgaacgcttccgatgagaatggcacat

SEQ ID NO: 226731 - DNA, 461 bp, Gossypium hirsutum
cccacgcgtacgctctgattgatcctccaaaagaatggctcgcactatcaaagaccctagaaaggctaagagaaagaataagggctcaaaaaaaggcgatggagcatcaacgtcttcttcagagccgacaattcagccaagggtttggcaaccaggagttgatgaataggaggaaggagaagagcttcaatgtgatccttcagcttataattcacttaacgcttttcatattggatggccttgtatgagctttgatatcgtacgtgattagctgggtgcagaccggcaagattttccacatacggcgtatactgatgcagggactgatgcagagaacgctacttggaactctattggagtgttcaaagtaagcaacatttctggacaaaggcgtgagctggttcctaagaaatattccgaggatgatcctgatatggatggtgaaagtagtgatagtgatg

SEQ ID NO: 226732 - DNA, 397 bp, Gossypium hirsutum
cggacgcgtgggaaaatgggttatcttcaacaatttatcttctttattctggttgctctgccattcatgtttatttctccaactcattcctctttagctaatggtaatgttaatatattgcctcctaccaatacaagcgataaggtcacttttggctctgtactatgaaactttatgcccatattgtgccgactttatcacaaatgaccttgtaaaggtcttcctcagtgatctgtataccattgtcaatctaaaattagtcccttggggcaatgctgacattcttggcgatgaaccccattgccagcatggagaagatgaatgctacttaaatactatacatagctgtgtcatctactactggcctgatgtgaaaaagcactttgattttattcgc

SEQ ID NO: 226733 - DNA, 479 bp, Gossypium hirsutum
aaaagaatgaaccaaccctctttcgtaatctgaaatctgacaagaatttggattatagaactgggttttatttgtttaaaaaaaacagtgtggaaagtgagtctttttttattttctttgatcttcttttagtattctgaaacagagatggtaagtggggcaagaaccgaagggcatatctcagcgcgagtgagcaagacaatacaatcaatcaaggaaatagtcggtaatcactcggatgatgatatctacgttgccttgaaagaggccaacatggatcctaatgaaactgcccagaaattgcttcatcaagatacatttcatttagtaaggagaaagagagatcggaagaaagagagcattgggtaccaaggttccatggatccaagaaaattttctgagaatgccggtcaagtgatgaaatttcgtacatacccttgacgtggttctcgaagaggaggctattctcggaatgctct

SEQ ID NO: 226734 - DNA, 480 bp, Gossypium hirsutum
cccacgcgtccgcccacgcgttcgctcaccagtaatttgctaaatgattttttttttaacgtgtgggttcgattatcatcgaagcccgcctcaccatacggtcctttcgaaaccgttatttgcccggattttcgaatctaaatacagatatggttcgtgttgccagaaccatgggacataattcagcgcgagtgagcaagacaatacaatcaatcaaggaaatagtcggtaatcactcggatgatgatatctacgttgccttgaaagaggccaacatggatcctaatgaaactgcccataaattgcttcatcaagatacatttcatttagtaaggagaaagagagatcggaagaaagagagcattgtgtaccaaggttccatggatccaagaaaattttctgagaatgccgtcaagtgatgaaatttctacataccttgaacgtggtttttgagaggaggctattttcggaatgctctgt

SEQ ID NO: 226735 - DNA, 481 bp, Gossypium hirsutum
gaaaacaggtagagaaatctagaaaaaaattatcacaattccgtatttgaccgctctaaccacgtatttcagctatggccttctgttcgcgtttggccaattccgtgatttcttcaggaaaatcttcgattggtggcacgccagcaatcttgagggatatgcgccgatctgtttaggacttgaagatttctatactcggcgcttgtatcttcgtattcaggattgtttcggaagaccgatagcgagtgctccagatggttggtttgatgtagtggagcgctactccaatgacaataataaaacattgaagcgaactgacaagataagcaggtgtcttaacttgggatcatacaattatcttggcttcacagcagcctgaatattgcacgccccgtgtaattgattcattatgtagattttcggcaagcacttgtagtactcgtgttgaaggaggaactacaacactgcataaagaactgga

SEQ ID NO: 226736 - DNA, 320 bp, Gossypium hirsutum
  unsure (1)..(320): unsure at all n locations
gaagtagtctctacaattccaacgattgggtttaatgtataggttgtacaatacaacaacatcaagtggcaagtatgggatttaggttgggcaaagtggaaatcctgcagctgttggggttgtattgtcaaacatgactgntgcatttgactattggcttttgggtgtggaggaaccttttgtctttgaaccctaccacaaagctctgcgaaagccaattgtctactatatggttggtcaaattatatcccgcctttgattgatttcagaaattcatatgttggcaatcttttttttttttttgaaatagaggagaagct

SEQ ID NO: 226737 - DNA, 371 bp, Gossypium hirsutum
cggacgcgtggggcaaaggctgcaaagaagggatgagagagacaattcaatggtcttgttgatggctacaggaaaaccctaaaatgtgatggtattgccgggctttatcgtggtttcaacatttcatgtgttggaatcattgtttaccgaggtctatattttggaatgtacgactctctgaagccagtgcttttgactggaagcatgcaggatagtttcttcgctagcttagctcttggttggctcatcacaaatggtgctggccttgcatcttacccaattgacactgttcgtagaagaatgatgatgacttctggtgaagctgtcaaatacaagagctcgctcgatgccttctgttagatcttgaaaaa

SEQ ID NO: 226738 - DNA, 343 bp, Gossypium hirsutum
cccacgcgtccgttcttgttccttccttcgccgtctattgcttttagttgcctcgatttcagagggaatcataatgggtaaggaaaggactcacattaacattgtggtcatcggccacgtcgattctgggaaatcaaccaccactggccacctgatttacaagcttggtggtattgacaagcgtgtgattgaaaggttcgagaaagaagctgctgagatgaacaagaggtcattcaagtatgcttgggtgcttgacatgctcaaggctgagcgtgagcgtggtatcaccattgatattgccttgttgaaattttataccctctaaatacctctgcactgtgat

SEQ ID NO: 226739 - DNA, 343 bp, Gossypium hirsutum
  unsure (1)..(343): unsure at all n locations
gtacgcaaaaaatcaaaaccctaactngctcactctctgcatatttattcctaaccctatccgcttctattacctgttttcaatctcacgcatttgtgtcaaaccctaaccaaaggcaaaaggaaaaaaaatggcagaaagaggcggaggtgaacacggcgctttcaagcgtggctttggtggtggtagaagtgaccgtggtccaaaatgcatgcgccgcggccgcaaggactaagaggaaaaatgggttcccgtcacgaaactcggccgcttattcaaagccggcaagatcacatcccttgagcaaatctaactccattctttccctatcaaggagtaccaa

SEQ ID NO: 226740 - DNA, 448 bp, Gossypium hirsutum
cttgaatggccctgtaggccctgcaggctattcttgcaagaagacagccaccgaagatgactggtctttctccggcctcctccgtgccgcaagcaacacttcgaacctcgtaaaagctgcaataacaccagccttttcgactcaattcccgggtgttaacggactcggcatttcaatacctcgtttggatttagctgttggtggagtgatacctatgcatacacaccctagggcttctgaactcattcttgtttacaaatgacttgccgactgacattattgaaggaaccacttttctggatgctgctcagattaagaaagctgagggggttcttggaggaactgggtaatattatttgaacttgttgagagtccctttttttttcgtatgctttaacggttgcttgtgtcttcttggcaagggaagttggtgggaattactagcaaa

SEQ ID NO: 226741 - DNA, 372 bp, Gossypium hirsutum
ccacgcgtccgaaagaaatcaaaaccacaaggtgaagaaggtaaaaaccagcagcggcaaaggcaataaaaggtgaagccaaagagagagagatatatacataataaaaaagattcttcaaaagaacacagctatggctcctcatggagaaggatcagatgcttcagtggaagccatggttgctcaagtcgaaaaacacccaatttcatcaatccttatcatcattgctatgcaaacagaagctttgccggtggtgaataagttccagttgattgaaaaccctcattcttcgtttccaaaaggggtcccttggatccattatcatggtgcatacaaggacatcataatcaatctagtgtggcccggaaaaga

SEQ ID NO: 226742 - DNA, 433 bp, Gossypium hirsutum
aagaaaagtccacttttcttatagattactcgtttccttcaagctagctctctctttatttagatcttgaagtgtgagatggcgacaacatcagcaacaaccttctcaattgggtcgactgtctccttcggaagcaggggaaatccacttccacaatctaaaccttttgttgcgaggttcacctccccaaattcacttgcaagttttagtggtctcaaggcagcaacatatgtgaactgtgagtcagagtcctcattcttcagcaaggaaagcagcgccgctcttagaggctcatttgtaccaaaagcacagaaagcaaaccagaagtctcagaatggtctacagcctgtggcatcttacaaagtcgcaatacttggagctgctggagggatagggcagccattagcccttctaatcaagatgtctccattag

SEQ ID NO: 226743 - DNA, 181 bp, Gossypium hirsutum
caccccttcgattttcccaggttgtagaagatgtcattaggtgaggatattcaaccacttgtttgtgacaatggaaccggaatggttaaggctggatttgctggggatgatgctcccccagccgtattccctatcattgttggtcggccaccttacaccggtttgattgtttgcattggcc

SEQ ID NO: 226744 - DNA, 321 bp, Gossypium hirsutum
ggggaaaaccatattgctctcttgggctacttagtgggactccctgatagcggagcctacatggagaaaaggttcgctgggcctcgttctatcaccatccttggtttgaacactggaacactggacatatcacaaaatggttggggccaccaggttggaattgatggagaaaagaagaaattgtttactgaggaaggctcaaagtctgttcagtggacaaagcctgaccaaggaggaccattaacatggtacaagggatattttgatgcaccagaaggggacaacccagttgccattgttatgactggtatggggaagggt

SEQ ID NO: 226745 - DNA, 380 bp, Gossypium hirsutum
ctactttccctttgccttacttaccactgaaatcaatgtttggagtccaagcatgaggctttcacactgtgctttcaccctgcttgtcatgctgctgggtttggcatccagtgatgtgaaccaagacaaagcggaatgcactgatcagctagtcgggcttgctccatgtcttccatacgttggtggacaggccaaagcccccaccctggattgttgcggtgggctgaaacaagtgttggttaagagcaagaaatgcctgtgtgtgttgattaaagatagagatgaccccagtcttggcctcaacatcaatgctagtcttgctgcaaccctccctcacacttgtcatgacaactgttaacattacggaatgcatttccctt

SEQ ID NO: 226746 - DNA, 403 bp, Gossypium hirsutum
ccacttcttcccttccattttacttagttttagttgccttaacgtcaccttccaatacaacccacaatgaggcaacaatatgtgttcactactctcacgttgctcatcctgttttccctcagttgttcaacaacattagcccaatctccggcactggccccggcaccttctggcccgacaaacgtcaccaagatcctcgaaaaagccggtcaattcaccctcttcattcgtcttctaaagtccactcaagtggccaaccagctgctcggtcagctcaacaattccaacaatggtatgaccgtgtttgcaccaacggacaatgctttctccagccttaaatcgtgcacattgaattcacttcacccgtgaacaaaaagtgcagctggtgcaattccacattgtt

SEQ ID NO: 226747 - DNA, 439 bp, Gossypium hirsutum
accggcgatatcaaaagcacttccccagtctcctggatttatcttctgcagtcaactccaccatattcctaagtttctctcgcaagctctttgcaatcccaaaaggagaaataaaaatctttttggggaaggacatggcagccgaggaggctcttgacttgtcaactttgcagtctcagctaagtgaaactcatgaaatttggaaccagaagatggaaaaacaccaatgccaggtagattttttacaagacaaaattatggaggtaaaggcttgcttacaggggtcggaggaggaatcaaaggaggtagatgttctttggcgtatggtaaaaactactgcaactttgttggcttacttggaatcaaaagctagagtgatggctgttcctgatttaaccctatagtcatgtggcatttaactattagaatgggtagggct

SEQ ID NO: 226748 - DNA, 430 bp, Gossypium hirsutum
  unsure (1)..(430): unsure at all n locations
caagactcgggggctcggagctggcaaagctgcataccttacatattgggaaagtgctgcccgcatgatcgcggacgtatcgaaatctgacaagattgttgttgagaaatcaacagtccctgtcaaaactgctgaggcaattgaaaagattctcacccacaacagcaagggaatcaaattccaaatcctttcgaaccctgaatttcttgctgagggaactgcaattcaagatctttttaaccctgatcgtgttcttatcggaggccgggaaaccccagaaggcaataaggctgtccaagcattgaaagaggtttatgctcattgggttccctgaggagagaattcttaccaccaatctttggtctgcagagctttccaagcttgctgccaatgctntcttggctcataggatctcatccgtgaatgccat

SEQ ID NO: 226749 - DNA, 306 bp, Gossypium hirsutum
ttcagattctttctccattataccttgttagaataaagaaatgggaggcaaagaagaggatgtttggctgggagcaaacaagtggtcataaaggcaacctatagggacaacagcacagacagacaaggactacaatgagccaccaccagcttccacttatcgaacatggtgagctctacttatggtcttattgtagagctagtattgcttaaaatgaatcaatttattatttctagtggtactaataatatttatcctttttgttaggatataattaaacaatttcaacggtttaattgagcgaaa

SEQ ID NO: 226750 - DNA, 420 bp, Gossypium hirsutum
cccacgcgtccgcttgcaacaagtctgttcaagttgcttctcaagtataggccggaggacaaggcgggcaagaaggaacgtctcctgaagaaagcccaagctgaggctgaaggaaaagctcccgaatcaaagaagccaattgttgtaaaatatggactcaaccacgttacctacctcattgagcagaacaaagcacaattggtagttattgctcatgatgtggatcccatagagttggtagtatggctccctgcattgtgcagaaagatggaggttccgtactgcattgtgaaggggaaatcacgtttgggatcaattgtccacaagaaaactgcttccgtcttatgcttgaccactgtcaagaatgaggataagctggacttcagcaaaatccttgaggctatcaaggcaaacttcaat

SEQ ID NO: 226751 - DNA, 284 bp, Gossypium hirsutum
cggacgcgtgggcggacgcgtggggtccttacgctgtgtctgaagcatgcatttgcctgcaagagaacaacataccgtacgacgtggtcatctccgattgtggaatacggatctttcttcttccacagtgatatgctgagaaacaagctcttggggatgtgagtgcagagctttctaacacctatgcagaccccactcagtagcaaaataaggcacacctagggttatacccttatgaggtctatgaaactatgtggtgacgttattcctgcaaagggtgcttt

SEQ ID NO: 226752 - DNA, 399 bp, Gossypium hirsutum
  unsure (1)..(399): unsure at all n locations
cgccgtttccgtacatttcccctaaaatctccacagacaaaatgcaagaaatgaaggctgagattgcaaccaaaaattcaaagaaggcaaatctattagatcacaattccctcaaacacatcctcgacgaatccgtccctgagatcgttacgagtcgtgggtatgcggaagacgtgaggatgagcaatgtcagattattcattggaacgattatcattgtaatcgctctatttgctcagttttacaaaaagaagttccctggaaaccgtgatttcctcattggttgcattgtattgtatataagtttcaatgtaatactccagctgttcagctacagaaaggaaaagaacccaattatgtttacttaccctncttctggatccgtcaccaccaccggat

SEQ ID NO: 226753 - DNA, 387 bp, Gossypium hirsutum
ctttttatttttttcagagcctgcttcaccaatctccgctctgttcagcccgcgatcttttgatcttgctctatggctaccatttccaagctctctaaccccaacccagtcgcttctctttcatcatcttccaaacccagatcttcttcatcgcttaaatgcttcgttgggttccctaccaggcctggtttctgctctaagctggtttcatcttctagcttgtcctcgataaacacccaccctttcaggggctccttggttgtcaggtgttctcttgctcgatggaaacgagagttcagtgaagaggactactttgcatgatctgtatgaaaaagaagggcagagctcatggtatgacaacctttgcaggccagtgaccgatttgct

SEQ ID NO: 226754 - DNA, 450 bp, Gossypium hirsutum
gctatctatgtttccaagctttttcatgaggctgtactttctcctggtgttctaaatgtggtctctggatttggtcctacagctggtgcagcactttcaagtcacatgaatgtcaacaagttatcatttacaggttccactgctacaggcaagattgtactcgcactcgctgcaaaaagcaaccttaaaccggtaacattggaactcggaggaaaatctccgttcattgtgtgcaaagatgctgacgttgacaaggctgttgagcttgcacattcagccttgttctttaaccagggtcagtgttgttgtgccggttctcgcactttggtacacgaaagcgtgtatgatgagttcgtaaagatagccaaagctcgagcactgaaaccaggtttcggggttcccttcatgacggggttcttactttgcccttttttttgttattggcaattt

SEQ ID NO: 226755 - DNA, 338 bp, Gossypium hirsutum
cccacgcgtccgctctctctctctctctctctcatgtctgaagcagtaaaatcgaaaggatgggtcaagggacaccaggcggtttgaaccggcaaggtcttcccggggaccgtaaaggcgacggatcgaacaagaaggaaaagaagttcgagccagccgcaccccctgcgagggtgggtcggaagcaacgaaaacaaaagggtccggaagcggctgctctacttcccacagtaaccccactcatcaagtgcaagctacggctgttaaagctggagcggatcaaggattatttactaatggaagaagagttcgtagccaattatgataggcttaagccc

SEQ ID NO: 226756 - DNA, 464 bp, Gossypium hirsutum
aaccactcaaacaccccatctttgactcctccctcttctttaactccgtcatcttaaaaaaaaaaaagtggatagttgagctgctattgagattttcttttttctccccaaccctgtcttatcttggttgctacctgcctcctgcatgaaacagaaacagagttccctttcttgtttctcactgttgcgatgaagtatatccggaccaacaacttgaaacggttattctcattaaaaagacgcagtttcgaagaaggtggtgccaaccaacatggggttttcgaagaagacaccaccaatgatagttttaagattgcttctgttgcagagcgttctcagcgaccttcctggcgaagcttctcctttgaagaaatttttgttgccaccaatgcttttagctcagagaatttggtagggaaaggagggtttgcagaggtatacaaaggagtactaaaggacgggga

SEQ ID NO: 226757 - DNA, 434 bp, Gossypium hirsutum
aaaagagagagagagaaaggatggttttctcaactgtgttaacatcagttccaaatctctaccttaccaggaaacccaagaatattcacatccaaattcgatgcctatcgtcaccatctgtatcaatttcaagtcaatcaaatttgacccaattcgatttaaaggcttactgggctaccctttatgcagaaatcactcaaaagcttgaagaagcaatcccagtgaaatacccagatcagatctatgaagctatgaggtactctgttcttgcaaagggtgctaagcgagcccctcctgttatgtgtgtggctgcctatgaaatctttggggataatcgactcgctgcttttcctactgcttgtgctcttgaaatggttcatgctgcttcactaattcatgatgaccttccttgcatggatgatgctctagaacgc

SEQ ID NO: 226758 - DNA, 448 bp, Gossypium hirsutum
  unsure (1)..(448): unsure at all n locations
gcggcacagcaagccaatgagtggagcgcagattttattctcaaaaaaccaacttcacttcccatttgctagtcttccacgatgactcccctccacttcttcctcctcctcctcctttcgtcagctgctttaatctccgcggccgccgccaccgccaccaccgcatatccttccatcccgggcaccgattccacaactgattgtggcctatccggaggggacgagaatccagttcccatccgtcgcgaagtctacggtaacggcaagatattcgacatcagccataggtacaccgtcgacatgccgtcttgggaatccaaggacggcgtgggacagttcctatggttgcctaaaagcatgaagaacggntccctcgctaataattcggggatgaaactcccaacttacaccggcacccaccttgacgctcccggacacgtcatcgatc

SEQ ID NO: 226759 - DNA, 338 bp, Gossypium hirsutum
  unsure (1)..(338): unsure at all n locations
attctttcctgggtcaatctttgcttctcatttcaatggtgtccatcactcaaaatggtacctcaaatggccatttgcagagcttttgcagcgccacaaatggtggtgttggtgttgcggnagaccctttaatctgcggggtcgccgccaccgtcaccaccgcatattcttacatccatggcaccgattccacatctgattgtggcctatccggaggggacgtgattccagttcccatccgtcttgatgtctacggtaacggtaagattttcgacatctgccataggtacaccgtctacatgccttcttgggaatccatggtcggcttgggacaattt

SEQ ID NO: 226760 - DNA, 412 bp, Gossypium hirsutum
aaactcgtgtggtcttatgcaaggccacaacgtgttagacaatttctttggctggttttcaaggaacgcttactaactaatgcagaacgttgcagaagaggtatgccaaattcttcttcttgtaagctttgcggatgcgttaatgaatctattcttcattctttaacgggttgtcgtaaggtaagagatatttgggaacaagtcattcctttaagattaatgcatcgcattcctttaagattaatgcatcgtttcttctcttactcgctaaaggactggctaagggtcaacttgggtaatgtatttggcttagttttttatgaacttgattggaggtctctgttcggtatactttatttgaagatttggaaagaaagattttcgtatgtgtttctaggatgttcaattcttt

SEQ ID NO: 226761 - DNA, 453 bp, Gossypium hirsutum
aacgcaagcaaaaaatttaatgttcgataatactttattttgataaaaataaaatgccgatttctcgaatcgcagtcgggtctccggccgaagccggccaagctgatgcactcaaggctgctttagccgagttcatttcagtgcttatttttgttttcgccggtgaaggctcgggcatggctttcaacaagttgaccgacgatggctcctcgacaccggcgggtttagtagctgcggcattggctcacgccttggcgttgtttgtggcggtttcgatcggggctaacatttccggcggacacgtaaaccccgccgtcacgttcggtgctttcgtgggtggccacattacattggtgaggagtattttgtattggatagctcagttgcttggatctgtcgttgcttgcttgcttctcaagttctcaaccggtggaatgacaacatcggcatttt

SEQ ID NO: 226762 - DNA, 202 bp, Gossypium hirsutum
tccacgcgtccgttcttcttcttcaaactagcttaaaaacaagaggaaaaaaatgggtggagaaagaaaggtctacactttggctgaggtctctcaacacaaccatgctaaagactgttggcttgtcattgagggcaaggtacaatttcttctattctgtagaaatatcatggataagtatatccccaatctcggactgagt

SEQ ID NO: 226763 - DNA, 443 bp, Gossypium hirsutum
ctagatctttgcatcaatggtcccaaggaaaagttagattcaactgtcataagccagcctgctatttatgtcacaagtctagctgctgtggagctgcttcgtgcccgtgatggaggcccgcagattattgattctgttgatgtcacttgtggtctcagcttgggtgaatatactgcactagcttttgctggggcttttagctttgaggatggactcaagcttgtcaaactaagaggagaagcgatgcaggaagccgcagatgctgctaaaagtgctatggtcagtatcataagacttgattcggagaaggttcagcaattgtgtgatgctgccaaccaagaagttgatgtagctgataaagtgcagattgcgaattacttgtgtcctggaaattatgcagtatctgggggtctcaaaggagtgcaagcagtggaagctaaagc

SEQ ID NO: 226764 - DNA, 422 bp, Gossypium hirsutum
cccacgcgtccgtgaaccctaaaaaccctaatcctaattagtaaatttcagtatattaatttgttagatctgtctcagctgctctccaagtctttcaagtcgccatggcatcagagaagaaattgtcgaacccaatgagggaaatcaaagttcaaaagctcgtcctcaatatctccgtcggcgaaagtggcgatcgtctcacacgcgccgccaaggtcttggaacaactcagtggtcaaacccctgttttctctaaggcgagatataccgtgagatctttcggaattaggcgtaatgagaaaattgcttgctacgttacggtgaggggagagaaggcaatgcaacttctcgagagtgggttgaaggttaaggaatacgagcttttaaggaggaaccttagcgattctggctgcttcgggatt

SEQ ID NO: 226765 - DNA, 332 bp, Gossypium hirsutum
gctttacatccttctttctgcaggaaaatacggtcaaagatgaccctccctatcttcctcaggattgtcattctcggtttcctcgagccagtgcttgaccagaatttatactttttgggaatgaagtacacatcagcaacatatgcgtcggctttccttaacatagttcctgccgttaccttcataatggcaatgatttttaggttagagaaaatcaacgtggagaagatacgaagtgtggcaaaaactattgggactgctatcacagtcatgggagccacggtgatgactttcatcaaaggtcccattattgactttttcaagcacggtgg

SEQ ID NO: 226766 - DNA, 380 bp, Gossypium hirsutum
caaagcaaagctttagcaaccttagccttggtttcctaaccaaaactcttctttatggctatgctcttcctttttgccggcgtggtccatgcaaatccatgctagagagtacttcagcaaattcccaagagttaacaccaatgagaaagagacatcaaccagagagcaagagcacgagaccttcgttccccagaccacccaaaagccagaagagcaagagccaaggttcatccctgaaacccaaaatggttatggcctttacggccacgagtcaggctcaggctcaggctcaggctaaagccggcccagttttaccaccaataaaacctatgacccctattgtacccctgttagattccaccctgatgaaccctattaca

SEQ ID NO: 226767 - DNA, 468 bp, Gossypium hirsutum
tggggattaaacatgtaaaaggcatgctgctttatggacctcctggtactggcaaaactctcatggctcgtcaaattggaaagatgttgaacggaaaggaaccaaagatcattaacggtcctgaagtcctgagcaagtttgttggtgaaactgagaagaatgttatggacctatttgcagatgctgagaatgatcaaaaggacttgtggtgactaaagtgatctgcatgtcataatgcttgatgtttttggtgctttttgtaagtatattttttaaacttgtttttgtaacaaattttttacacagttttttttctatattttttttctttaaaatctttttttatcccctctttttttcgattttctttttcttctatttttgtcgtctagatttatttttctaccattgattttactgaaattaattttttattgacataattttttcaaactaattttttttttc

SEQ ID NO: 226768 - DNA, 397 bp, Gossypium hirsutum
  unsure (1)..(397): unsure at all n locations
gcattaccactttgatctaatcctcaatttcccaatttctcttgaaaccctaatcctaaatcgatttcccaacttcggcgttctaatggccactgaggaaccaactgtcgccgtggaatctgcgcctgagctggcggaagagaatcccgctgaggctacagccaatcccaaatctggcaaagcaaagaaagctaaagagcccaaagccaagaaggctgcagctcctatgaagcgacgagctcctcctgctcatcctccttacgaagagatggtcaaggatgcaatncgtactttgaaggagaagactggatcaagtcagtatgctatcactaaattcattgaagagaaacagaagaatcttcctggaaattttaagaagcttctgcttttcatttga

SEQ ID NO: 226769 - DNA, 330 bp, Gossypium hirsutum
cgcctcggtcgtttagttttcttttcatttctttaggagggtggtcaatatggggtcttcgatgttgccagatctcggagctgagatcttgatccccgtttgcgccgttattggaattgtcttttctcttgcacaatggcttcttgtttccaaggtgaagctctccccgggtcgagactcgggttcccccggtaacaacggtgcgggtgggaaaaacggctattccgattacctcattgaagaagaagaaggtcttaatgaccataatgttgttattaagtgtgctgaaattcagaccgtcatatctgaaggagcaacctcatttctttt

SEQ ID NO: 226770 - DNA, 378 bp, Gossypium hirsutum
aaagaatggcatatgaagggattctgttggggatgggtaatcctctccttgacatttggttagtcgtggacgaagagtgcttgaaaaaatatgatatcaagttgaacaatgcaattttagctgaggagaaacaccttcccatgtatcaagaaatggcatccaagcccaatgtagagtatattgctggaggtgctactcaaaattcaatcaaagttgcacagtggatgcttcaaattcctggtgcaactggttacattggctgcattgggaaggacaagtttggggaggaaatgaataagaactcaaaagctgctggtgttaatgttcaatatcttgaggatgaaactgctccaacaggaacctgtgctgtttgtgttg

SEQ ID NO: 226771 - DNA, 415 bp, Gossypium hirsutum
ggatctctagcttctactcaggcaaagaagtccaaggaagatctgaaagaagttactcacaaagtttactttgatgttgaaattgctggaaaacctgctggtcgaattgtcattggactcttcggaaaggcagttccaaaaacagcagaaaacttccgagcactatgcacaggtgaaaaaggtgttggaaagagtgggaaacctctccacttcaaaggaagtgctttccaccggattattccaaacttcatgattcaaggtggtgattttacacttggtgatggaagaggtggagaatcaatctatggtgagaaatttgctgatgagaatttcaagctgaagcacactggacctgggcttttgtcaatggcaaatgctggtcccgacaccaacggctcacaattcttcatcacaa

SEQ ID NO: 226772 - DNA, 381 bp, Gossypium hirsutum
attttccaaaaccctcttctcctgcgcacagtaaacaaaatccatggatcttgaaaacggaactgttcgatacgaagatgaatatataacgaattctcgaggactaaagctatttacatgcagatggttaccagtaaacgaagaacccaaagctttaatctttctctgccatggttatgcccatggaatgcagtatcaccatgaacagtactgcaatccgattggtgaaagcaggatatgcagtttatggcatagattatgaaggccatggcaagtcttcggggttgcagggctatatctcaaagttcagtcatgttgttgatgattgttccgattatttcactgatatttgtgagaaaaaggagaataaaaagaagatga

SEQ ID NO: 226773 - DNA, 440 bp, Gossypium hirsutum
  unsure (1)..(440): unsure at all n locations
ttatctctgaaggtgtcttaataaacgccttcgatttaccttcgatttccatttacttctctattgctacgtttttgaatttttagtgagcgaaaatgagagagtgcatttcagtccacatcggtcaggctggtattcaagtcggaaatgcctgctgggaactttactgccttgaacatggaatccagcctgatggccagatgccaagtgacaagactgtcggaggaggtgatgatgcttttaacacctttntcagtgaaactggtgctggaaagcacgtccctcgtgctgtctttgtggatcttgagcctactgttattgatgaagtgaggactggtacttaccgtcagctttttcaccctgagcaactcatcaacggcaaggaagacgctgccaacaacttcgctcgtgggcactacactatttggcaaagagatcgt

SEQ ID NO: 226774 - DNA, 304 bp, Gossypium hirsutum
gtttttcttgtgattaatcgatatggctagctcaatgtcccttaagcttgcatgtgtggcggtgttgtgcatggtggtgggtgcacccgtggctcaaggggccgtaacctgtggtcaagtcacaagctccctcgcaccctgcattggttacttgacagggaatggtgctggtggcgttcccccaggttgctgcggcggcataaaatctctcaactccgccgcccaaacaacaccagaccggcaagcagcttgcaaatgcatcaaaagtgcggccgccggcatttctggcatcaactatggtatt

SEQ ID NO: 226775 - DNA, 419 bp, Gossypium hirsutum
  unsure (1)..(419): unsure at all n locations
acgaccacgcgttcgaaaatggatggttattgtcgcagaagggtaatcatgtttttggtgttcgcgatttgcagcaataagcagagggtgtggacaagaatcaaccactcttgttcctgcaatcatcacctttggtgactctgtggtagatgtgggcaataatgactatctccctaccatcttcaaggctaactatcctccttatggacgggactttgccaacaaaaagcctactgggaggttttgcaatggaaaattagccactgacatcactgctgaaactctggggtttacaacttatccaccagcttaccttagcccataagcatcagggaagaaccttctgcttggagccaattttgcttcagctggctctggctatgatgacaaagctgncatggtgaatcatgccatcacat

SEQ ID NO: 226776 - DNA, 379 bp, Gossypium hirsutum
caaaatcatgaggagcatttgtgttgtgcttcttatctctttgcctttccttctccgcattgcccagggtttcgatttccacgacaaggatttagcgtcggaggatagtttgtgggatctatacgagcgctggcggagccaccacacggtttccaggagtctcgacgagaaacatcggaggttcaatgtgttcaagcagaatgttttgcatgttcacaacaccaacaacaaggacaaaccttataagttgaagatcaacaagtttgctgatatgaccaaccacgaatttaggaatgcttacgctagttccaagattaaacatcataagatgttccaaggaaagtcccgtggcgccgggagtttcatgtacgagaacgtc

SEQ ID NO: 226777 - DNA, 232 bp, Gossypium hirsutum
  unsure (1)..(232): unsure at all n locations
aaattcctttctcgagcgtttcttttttaactctacagttctgaacgaatccatagaatttgaccaagaagaagaagaagatgtcgtggcttacatatgtagatgagcacttgatgtgcgatatcgatggcaaccatgtntccttcgccggcatcaggggtcacgacgggagacattgggcgcaaagctccaatttgcctcatgtcaaacatgaagagatcaatgccatcat

SEQ ID NO: 226778 - DNA, 288 bp, Gossypium hirsutum
agaagataggaatcgaagaactaatgccatagctattctctttcggcaaacacagaagaattgtggttagatcaacgatgcaacagggagattacagctcctattatcaatatccttacctttcaaaccccaactccaaccccaaccctaaccagcaataatgactatctccctaccatcttcaatgctaactatcctccttatggacgggactttgccaacaaaaagcctactgggaggttttgcaatggaaaattagccactgacatcactgctgaaactcttggg

SEQ ID NO: 226779 - DNA, 294 bp, Gossypium hirsutum
  unsure (1)..(294): unsure at all n locations
gtttgggcaaagatggtgaagaattggaaaaagtctttgattttggtgctgtttacagtctgcgttctggggtttaagccaagaggtgttaatgccnaaacagatcaagcagatgcttctgctctaggggttatgtataccagcttaaattcaccacagcagctaacatgttggactgctagcaatggtgatccatgtgggcagttctggaaaggcgttacttgctcgaacaaactctcacttgaattaaactttcaatttattggcctttccggtttgttaaattttcatatt

SEQ ID NO: 226780 - DNA, 374 bp, Gossypium hirsutum
atctttgccttcaatcgataacgcgctctctttttctctcatcgaaggttttgatggcgtcaaaattgcagcagttgcaatctaaggcgtgtcaagcgtcgaagtttgtggcaaaaaacggaactgcttactacaagcaattgttggaacagaataagcaatatattcaggagccaccaacagtggagaagtgcaatgagctgtctaagcagctgttttatactcgacttgccagtatccctggccgtaacgaggcattctggaaggagcttgattatgtcaagaatctgtggaagaataggcaagaactgaaggttgaagacgctggtattgctgcattgtttggactggaatgctttgcatggttttgtgct

SEQ ID NO: 226781 - DNA, 236 bp, Gossypium hirsutum
ctcaaactaccatcgagatcgattcattgtacgagggtatagacttttacaccacgataactcgtgcagggtttgaggagcttaacatggatctttttaggaagtgtatggagccagttgagaagtgtttgagggatgctaagatggataagagcagtgtccatgatggtgttcttgttggtggttcctctcggattcctaaagagcaacatttgtttcaagactttttcaacggg

SEQ ID NO: 226782 - DNA, 313 bp, Gossypium hirsutum
cccacgcgtccgggcaagcccgatttaatcatctgaaactacagtgatggtaatatcgtcggctccttgctggcacataagttgggagttacacagtgtacgattgcccatgctttggagaagacaaagtatccagattccgacatctactggaagaagctcgaggataaatatcatttctcctgccaatttacagctgatcttttcgctatgaaccatacggatttcatcatcaccagtaccttccaagaaattgccggaagcaaggacactgttggtcaatacgagagtcacactggtttcactctttccg

SEQ ID NO: 226783 - DNA, 344 bp, Gossypium hirsutum
cccacgcgtccggttacatgcatgcctttcttttcttactgcacgaatggtaatatcgaggacggctctctgtaacataagatggggagtctcacattgtacgattgcccatgctttggagaatacaaagtatccatattccgacatctactggaagaagctcgtggataaatatcatttctcctgccaatttacagctgatcttttcgctatgaaccatacggatttcattattaccagtacctttcaagaaattgtctgaagcaaggacactgttggtcaatacgagagtcacacttttttcactctttctggtctataccgttttgttcacggaattgatg

SEQ ID NO: 226784 - DNA, 302 bp, Gossypium hirsutum
  unsure (1)..(302): unsure at all n locations
tcttgctaaacctgaaatgactgctgctgctgttgtatacagaacaacaaatactggtaacggacaactggttcaagtgcaaaacagccagcatcaacaacaatatgcgggttattctcagattcatcatgcatcacaatctgttgcacctacctccagcacggctgccccatatgcatatgaattcactgatccaactcatgctcaaatgtattacactcagcctatggcacccaacatgcctnctcagtaccaaaccatgactgcagtagtcttgccagatgcacccacgcaactttcga

SEQ ID NO: 226785 - DNA, 438 bp, Gossypium hirsutum
cccacgcgtccggttcctcttcttccctctcttttgtttgtctaaaaacagttgcttccctgcttgatttcgttgtcatggacactcccacccctctcttctccttgctttgtttcttcctcctctccctcttcttaggtgaggagcaacatgttgttgaagggtcaagggtgtggacctttggtttcagacccaagatgttgtttgtgttcggggattcctacgctgatacagggaacaacaggaaagctttggcaagttcctggaaacttccttatggaattacattccccgggaaacctgctggccgtttctctgatggtcgtgttttgactgatttcatcgctgggtacttggcgattaagacaccagtgccctacagatacaggaaagaactggggggtcgtctcaagtatgggttgaactttgcttatggag

SEQ ID NO: 226786 - DNA, 301 bp, Gossypium hirsutum
gtcgtctatcataactccgcggtgcagagccttggtgctttcaaaaggcgtaaattacaaaggggtgggctttttaaagtactaccaacaccacccacgatcgcacaattctcaaatggcaagggacctggaccaaatgctcgcattggctacattgatggggcattctatctctttcatgctgggcatgtggagatcctcaagaaggcaaggcagctcgtagactttttgctagttggtatctaccctgactatatcgtgagtgagcagaggggtttgcccctcccagttatgcatttac

SEQ ID NO: 226787 - DNA, 362 bp, Gossypium hirsutum
tcgcggacgcgtgggcagctaccggaaaatgtctacgtcaccgtccgtcaccgaactccaggtggagaactttacgttccctccgacggtgaagcctcctggttccaccaaaactctgttccttggtggcgcaggggagagaggattggaaatccaagggaagttcataaagttcaccgcaattggagtttacctggaagatagcgccgtgaattgcctcggcgttaagtggaagggtaagagcgcggtggagttaacggaatccgttgagtttttcagagacgtcgttacaggtgattttgagaagttcgtacgggtgacaatgatattgccattaacgggttaacaatactctgagaaag

SEQ ID NO: 226788 - DNA, 395 bp, Gossypium hirsutum
gttggagataataatagcacactttcgagggtagattctggcagaaggcgtcaattacaaaggggtcagctttctcaatttctaccaacatctcggaggattgtacaattctcaaatggcaagggacctggaccaaatgctcgcattgtctacattgatggggcattcaatctctttcatgctggccttgtggggatcctcaagaaggcagggcagttggaaaacttttggttagttggtatctaccctgactatattgtgagtgagcagaggggaatgccgtacccagttatgcatttacttgagcgcactcttagtgtgttagcttgccgttatgttgatgaagttatcatcggtgcaccttgggaattacaaaggacatgattacaactttc

SEQ ID NO: 226789 - DNA, 394 bp, Gossypium hirsutum
  unsure (1)..(394): unsure at all n locations
ggaaattggttcagaaaagaaaaatggccactanttangttcctgagcaggtttcggttcttgcagatgcagatgctcttaaaaaggcttgtaaaggatgggggacagatgagaaggcaataatttcagtgttgggtcacagaaatgcaggtcaaaggaagcaaatcaggcttgcttatgaagacctttaccaggaagatctcatcaagcgtcttgaatcagagctttctggtgatttcgagaaagcagcgtatcgttggatattggatccagcagacctagatgccgtgttagctaatgttgccataaagaaattaagccctgatcaccatgtgatcgtcgaaatttcatgcaccaaatccgctgaagagctcttggctgtgaggagagctta

SEQ ID NO: 226790 - DNA, 467 bp, Gossypium hirsutum
tttttgttcaaggaccacttcttcccttccatttttctttgttttagttgccataacgtcaccttgcaatacaacccacaatgaggcaacaatatgtcttcactactctcacgttgctcatcctgttttccctcagttgttcaacaacattagcccaatctccggcactggccccggcaccttctggcccgacaaacgtcaccaagatcctcgaaaaagccggtcaattcaccctcttcattcgtcttctaaagtccactcaagtggccaaccagctgctcggtcagctcaacaattccaacaatggtatgaccgtttttgcaccaacggacaatgctttctccagccttaaatcgggcacattgaattcactcaccgatgaacaaaaagtgcagctggtgcaattccacatcgtcccaacatacctcacctcgtctcagttccaaaccattagcaaccctttgaga

SEQ ID NO: 226791 - DNA, 465 bp, Gossypium hirsutum
  unsure (1)..(465): unsure at all n locations
ggatcatgnttccggccgccgccgccgccggccgtcaaacgccgacgaaaatggctttcgagggattagttctccgcggcaccatgcgagcccacactgacatggtcacagccatcgccactcccatcgacaactccgatatgatcagtcacttactactcgcgacaagtgcatcatcctttggcacttgaccaaagacgaaaagacctacggtgtcgctcgccgccgtctcaccggccattcgcactttgttcaagacgttgttctctcttctgactcccagttcgctctctccggttcctgggacggtgagcttcgtctttgggatttgaacgccggaacatccgctcgtcgnttcgtcggccacaccaanaacgtgctctccgttgctttttcaattgataaccgtcagatcgtttcggcttctcgtgatcgaagcattaagctctggaacacccttggaga

SEQ ID NO: 226792 - DNA, 456 bp, Gossypium hirsutum
aacgaattgatctccagagtacaaactagatcgaggtattctgataaaagcttcaaattgatattgtctgggtagattgcttcttggtaaccaagatggttgtacttgctgcttcaattgtaagcaagtctggaaaagtgcttctctccaggcagtttgtggacatgactcgcataagaattgaaggtcttcttgctgcttttcctaagttggtgggtacaggaaagcaacacacatatgttgagactgagaatgtgcgatatgtttatcaaccaatagaagctctttatttgctttttgtaacaaacaaacagagcaacattcttgaagatttggagactttaagactgctctccaagctggtaactgagtattcttactctctagatgaggagggtattggcaagactgcttttgaactgatctttgcttttgatgaagtcatttgtcttgggc

SEQ ID NO: 226793 - DNA, 200 bp, Gossypium hirsutum
  unsure (1)..(200): unsure at all n locations
gagaggaaagnactncgcgggggcatgctagcccacactgacatgcccacagccatcgccactcccatcgacaactccgatatgatcgtcacttactctcgcgacaagtccatcatacttaggcacttgaccaaagacgaaaagacctactgtgtcgctcgccgccgtattaccgaccattcgcactttgttcaagacga

SEQ ID NO: 226794 - DNA, 326 bp, Gossypium hirsutum
gccatctctgtatccgtctttgcagcacccttaaacttttctgcacgagttatacgaacaaagagcgttgagttcatgcctttcaccttatcatttttcctcacattgagtgcagtaatgtggtttgcttatggactatttattaaggacctctgtgtagctctccctaacgtactaggcttcatcttggggatgctccagatgcttctctacgccatttacagacacagtgaaaaggttaacatagaggaaaagaagctaccagctgaacaaatgaaacgcatcagtgacttacttaccacattaagcgactctgtagtttaccc

SEQ ID NO: 226795 - DNA, 199 bp, Gossypium hirsutum
tcccggtcgaccacgcgtccgggtggaaccaagcctaatatttccaccatgggtgccgatcagttcgatgacttcgagcctaaggaaatgtttcaaaagctgactttctttaactggtggatgcttagcattttctttggcaccctctttttcaacacttttttgatctacatacacgacaatgtggggtggcttcttt

SEQ ID NO: 226796 - DNA, 415 bp, Gossypium hirsutum
atcaaaaggtcgaattgcttccatgctagtggcggctaatatccatgccatatgaatagcaacccttatatgattgcttttggtattgttgaaatcattttctctcaaattcctgactttgatcgactatggtggctttccattgttgctgctgtcatgtctttcacctactctacaattggacttggccttggtattgctaaagtagcagaaactgggaaaattaggggaagcctgactggaatcagtgttggaactgtgactcaaacccaaaaaatatggaggagtttccaggcacttggagacattgcttttgcctattcatactcccttatactcatttgaaattcaggacacccctttaaggctccaccatcagaaatcaaagacaacggtagaaagccacccttgataa

SEQ ID NO: 226797 - DNA, 438 bp, Gossypium hirsutum
  unsure (1)..(438): unsure at all n locations
attgaaattcttctatataatttcaatttccaatactgaaatatatgtgttcatttttttgagttatttttgaggaagaagatgaagttcggtaaggaatttgcagcacaaatggtgcaagaatggcaggaagcatacatgcattacagtaaactgaagtcaatattgaaagatatcttaagattcaaacaaaaaaacaaggaaccattgacaatggctacaacaacaacaacaacaacaaaaggggcattgaatcgaagagcatcactttatagggcatttagtggacttacaaatcggtataaaccagnttctgcaatgaagaacaatgaagatgaagttatattagtgagtgcagttcaagaaggaggggttggaggggattaccaaacaatgtttcttatgccaggtgaagaaggaggtgcgttctagtttcct

SEQ ID NO: 226798 - DNA, 199 bp, Gossypium hirsutum
gtcagccaattgtttgagctagctagctctttccctaatggcaaccaaaacgatgatgttgcaaagtattttcacttttcttctttttgttcagtatctgcaactccattttccttggtgctaatggagatgacaatggtggttgtcaaactgcccatgccatcttttacagcggtgctataactacctgcacaacgac

SEQ ID NO: 226799 - DNA, 447 bp, Gossypium hirsutum
tctcaaatctcctcctcctcctcagaaatcttagtttcatcaccatggcctcaaatcccaaggtcttctttgacatgactatcggtggtcagcccgctggtcggattgtgatggagcttttcgcagattgcactcctcgcactgctgagaacttccgtgccctctgtaccggcgagaaaggcgtcggccgcagcggtaagcccctccactacaaaggctcctctttccatcgtgtgatccctaactttatgtgccaaggaggtgacttcacggccggaaacggtaccggaggtgaatccatctacggatccaagttcgctgacgagaacttcatcaagaagcacactggtcccggtattctctcaatggctaacgctggtcccggaactaacggatctcagttcttcatttgcacggctaagactgagtggctcgaccgaaagcacg

SEQ ID NO: 226800 - DNA, 455 bp, Gossypium hirsutum
cggacgcgtgggttaaaattcaattatggtgaaacctagtgaaaatgggtctcagtcaatagcaccctttctaaaaaaatgttatgaaatggtggatgatgagtctactgatgcgataatttcatggagtcaaaataacgatagttttataatttgggatatgactgaattttcagttcatttgctccctaagttcttcaagcacagcaatttttcctctttcatcaggcaactcaatatttatggttttagaaaaattgatacagaccgttgggaatttgcaaatgatggattcgtcagaggtcaaaaggacttgcttaagaatattgctagacggaaacactccccaggatctgagcagcgtaaaccattgcagcagcagccactacagcagctggagaacactgttggatcatgcgaaaacaatgaaacactggactgtggaaggaagttga

SEQ ID NO: 226801 - DNA, 329 bp, Gossypium hirsutum
gacacacgcttctgaaatcttttttcaatacacttttgctaaagatgcagatcttcgtcaaaacccttaccggtaagaccatcaccctcgaggttgagagtgctgacaccatcgacaatgcgaagcataaaattcaagacacggaaagcatcccaccacaccagcagcgggtaatcttcgacggaaaacagctgggggacggccgcacctttggcgattacaacattcagaaggaatataacctacaccttgcactccgtgttcgagggggcaagaagatcttcgagaaaaccttaaccggcaagaccatcaccctggaagtcgagagc

SEQ ID NO: 226802 - DNA, 460 bp, Gossypium hirsutum
  unsure (1)..(460): unsure at all n locations
gttattgctcatgtggaccacgggaaatcatctcttaccgattctcttgtggctgctgctggaattattgcacaagaagttgctggtgatgttcgtatgacagatacccgtgctgatgaggctgagcgtggtatcacaatcaagtctactggtatctctctttattatgaaatgtctgatgactctttgaagagctacaaaggagagagacaagggaatgagtacctcatcaatcttatcgattcccctgggcacgttgacttttcatccgaggtcacagctgctctacgtattactgatggtgcccttgntggtgttgactgtattgaaggtgtctgtgtgcaaacagagactgttctccgtcaggctcttggagaaagaatcaggcctgtcttgactgttaacaagatggataggtgcttccttgagctccaggttgatgnagaggaggcttaccaga

SEQ ID NO: 226803 - DNA, 464 bp, Gossypium hirsutum
gatcttttctctccccaaacacctcattttcctgtgtaaaaaaaaacaaaaaagaagcgtaagtgaagaaggagaagaagaaaaagaaaatggcggaccagcttaccgatgaccagatctctgagttcaaggaggcctttagcctctttgacaaggatggcgatggttgcattactaccaaggaactgggaactgtgatgcggtcactcggacagaaccctactgaggcagaactccaagatatgattaatgaagttgacgccgatggaaatgggaccatcgatttccctgaatttctcaacctgatggcaaggaaaatgaaagatactgattctgaggaggaacttaaagaagctttcagggtgttcgataaggatcagaacggtttcatatctgctgccgagcttcgtcacgttatgacaaatcttggcgagaagcttaccgacgaggaagtcgatgagatg

SEQ ID NO: 226804 - DNA, 214 bp, Gossypium hirsutum
cccacgcgtccgcccacgcgtccggtctaggtgcatatagtgattccagaggtattccaggcgttaggaaggaggttgctgaattcattgagaggcgtgatgggtatcctagtgacccagagctcatatttctcactgacggtgccagcaaaggtgtgatgcagatcttgaattgtattatccgtggtcaaggggatggggttttggtatctgt

SEQ ID NO: 226805 - DNA, 461 bp, Gossypium hirsutum
ctctctttctatattttttctttctgctaataatttcttttgtcaccagcggcgtcggaagacaggaaaacaccggtgttgtttgaaatggcagcttcgagaatggatctggacgggagaccaataaagccaattacgatatgcatgattggagcgggaggcttcattggctctcacctctgcgagaaattaatgtcggaaacgccgcacaaggtgctcgccttggacgtttacaatgacaagattaagcacctcctcgagcctgactctctcccttgggctggccgtatccagttccaccgacttaacatcaagcacgattctaggcttgaaggcctcatcaagatggcagatctcacgataaatcttgcggcgatctgtactccggcagattataatacacgcccgctcgatacgatttacagcaattttattgatgcactttctgtggtgaaatactg

SEQ ID NO: 226806 - DNA, 409 bp, Gossypium hirsutum
cccacgcgtccggtttattttctctctaaaaagtggtgcattagaatccttacatcaaacagatggcaaccatggagaaggggttagagtttgagaacaagaatttaggcctgaagcacctaaacttcgtcagggtggctacgatccacgccttggtttgcatctcgaacctttacaattactctaaacagaactcggggccgttgagatccaccgtcgacgccgtcgagcgtgccgttaccaccgtcgtcggtcccgtctacgggaaaatttaaggatgtctctcgtcattttcttggattccttgataacaaggtagatgaggttttacacaaattctgttgagcattcttcaattccagccaatcatgtggtttatcattcctacgttttggttcaaaaggcttat

SEQ ID NO: 226807 - DNA, 468 bp, Gossypium hirsutum
  unsure (1)..(468): unsure at all n locations
ggcggcgacgccctcaaaaccaacatcacaacattgggttcgctcgtcctcccattctccgaacaactcttcttcttcgccaccctaatttggcgccatttctttggcggcgataaatccaaaacctccctatcaccgtcgtcgaagccatacatccccgactacaagctcgccttcgaacacttctgcgtccacgccgcaagcaagacggtgctagacgagctgcaaaagaacttggaactcagcgaaaacaacatggaagcatcgaggatgaccttacaccggttcggcaacacatcgagcagcagcatatggtacgaattggcttatttggaagctaaagaaagggttaaaagaggggataggatctggcaaatagccatcgngttctgggtttaaatgcaacaagtgtggtttgcgatccatgcgtcgtgtgaggaagccttcaagggataacccatggggtga

SEQ ID NO: 226808 - DNA, 355 bp, Gossypium hirsutum
cctcaatctctctaatcctcgctttcttccccatcttacacaccttcgattttcccaaggttgtagaagatggcagaaggtgaggatattcagccacttgtttgtgacaatggaactggaatggttaaggctggatttgctggggatgatgctccccgagccgtattccctagcatcgtcggtcggccacgtcacaccggtgtgatggttggcatgggccagaaagatgcatatgttggtgatgaagctcaatcaaagagaggtattatgactttgatataccctatcgtgcatggttttgagtgctactggtaaggttctgtaaatatattccctctctttcttttattaccag

SEQ ID NO: 226809 - DNA, 435 bp, Gossypium hirsutum
cccacgcgtccgctggtctttccccaaataaggtgataggcattggcctgttatggggccctgactgcacggtggaattcttaaaaaagttcaaactaaagctaattatcaggtcgcatgaaggcccagatgcaagagaaaaaaggcctggtcttggaggaatggatgaaggatacacaatagatcatgatgtggaatcggggaaactgataactgtatttagtgctccagactacccacaatttcaggcaacagaagagagatacaataacaaaggagcatatgttgtactaaagccccctggttttgataatcctgaatttcatagttttgaagccattaccccaagacccaaggtgaatccatactatgactttgaggaggtgattgattctgatgaagacttggatttaacttcaatggggacttctgact

SEQ ID NO: 226810 - DNA, 453 bp, Gossypium hirsutum
  unsure (1)..(453): unsure at all n locations
gaaaaaggaaaaaagcatttgtaattgtaattgtttcgagatctctgtgtgtatagacagtctcaaatggcagtagctgcagcaccagatcacttgttccatttgaggaacaatttctacttgggttcctttcaggctgccatcaacaacagcgatctttccaacctcttccccgacgacgccgtcgagcgcgactgcctcgtctaccgctcttacatcgctctcggcagctaccaactggtgatcaatgagatcgacttcggcggttgaacttctctccaagcccgtaaactgctggccctctatctctccaaccctcatgataaggaatcaacaattgcgagcttgaaagaatggntagcagatccagcgattggaagcaatgccttaataaggntgattgctggaatcgtttcatgcatggagaagattataatgaagctcttaaacaca

SEQ ID NO: 226811 - DNA, 463 bp, Gossypium hirsutum
  unsure (1)..(463): unsure at all n locations
cgggaagaccgaggagcaggttaaggcacttggtgtcgattaccgtgttgggaaattccctttcttggcaaatagccgaaccaaggctattgatgatgctgaaggaatagtcaagatattggctgacaaggagacagacaaaattcttggagtccatattatggcaccaaatgcgggagagctcatccatgaagcagtccttgccattaattatgatgcatcaagtgaggacatcgctcgagtgtgccatgcacatcctacaatgagtgaggcattgaaggaagctgcaatggccacctatgacaagccaattcacatctagaaatatggatttttacatgttattcttcattttgatttatgtttgaanaatttcgagattgactcggcagcagtcagcacaaactgttcattttcttgttgtccttactcgaaacagatggcgtgcttgaatagacatttg

SEQ ID NO: 226812 - DNA, 394 bp, Gossypium hirsutum
attgcgcttcttttttatgtgtatcttttgtagtttgttgttaggccatagggaaaaacaagggaggggatgggcaacctattttgttagtgtccaagtagaccaatcaaccggagcgataaaggaacgatttggcaagtttgatgaagttctagagcctggacgccattgcttaccttggcgtattgtgagacagcttgccgggcatatgactctgcgattacagcagatagaagtgcgttgtgagaccaagactattgacactgtatttgccaacgttgcggcatacatacattgtcagcgccctgactgagaaggctaatgatgctctatacatacttagcaacccctacgtactaaactgaagcctatgagcttgatgatattatggcat

SEQ ID NO: 226813 - DNA, 411 bp, Gossypium hirsutum
ttttgcccataagtctactcccagtttcccttaatcctccatgggcaaaggcggaggttgtgtcccaagcaaaaagagacaaccttcctctgccgaaggctctgccactgccactgccactaccgccaccaacaacgcacccatcgaagccgatgaagaaactcacgaaactgccagtgtagctgtgaatcctacgaatgcgcaatcagttaccgccactttaaaaatctttattgtttactactccatgtatggtcacgtggagaaactggccaagcggatgaagaaaggggtcgacggcgtggaaggggtagaagcggttctttatcgggttcccgagacgctcccggctgatgtgctggaccatatgaaggtgccgtcgaaaaacccccgaagttccagagattaaag

SEQ ID NO: 226814 - DNA, 446 bp, Gossypium hirsutum
cttacatagttccgttccattttccctaacaaacctgcatcagatccgatcagatttaactcagatccatccgtatcgggtcttctaaattccagatctttacttttctcgagtaaaggaagaaagaggaagggagagatgagagagattattagcgtccacattggccaagctgggattcaagttgggaattcatgctgggagctttactgtcttgaacatgtaatccaccccgatggaacaatgccgagcgacacctcaatgggcgtcgcacacgatgctttcaacactttcttcagcgaaacgggttcgggaaagcatgtgcctaaagctgtctttgttgatctggaacccactgttatcgatgaagtccggaccggcccttatcgccaactttttcaccctgagcagcttattttcggcaaggaagatgctgctaataattt

SEQ ID NO: 226815 - DNA, 351 bp, Gossypium hirsutum
tcacgatcctttctctatttctcgatcctaactccgggaatttttttttccatttcgttttccgggaaatagttttcccggaaaagtacgagccaaattgtctatcgggccaatcagaaaaaaagaatcagtagctttcttttgaatggggcaacaacaatcaaaagacgagttgctatacaatcaagtcaattatggtaacgcagaagggatcaaatctcttttccgtgaaggcgcaggcctcgagtggatggatagagaagggaaaacgccgttgatattagcgtgtttgaatccacagctttttgatgttgccaagactttgatcgaacttggttctaacgttaacgc

SEQ ID NO: 226816 - DNA, 456 bp, Gossypium hirsutum
gttgtcggcggccgagaacaatttaattacgagtttgttcctaaaaacatagccgccgacacgttcaagttgcatttcctgtcggaaaccaatgaacgaggagtagagaacaatctctacccttttgtttttctcaatgtcgatggaaacctgttcattttcgccaacaatcgagctattttgcttgattatgtgaacaacaaggtggtgaaaacttaccccaaaataccaggtggggagccaagaagctatccaagcacaggttcggctgtattgctaccattgaagaacttgacagccgccactattcaagctgaagttttagtttgtagcggtgctccaaaaggatcatttgtccaagcattacaaggtaagttcgttaaagccttgaacacttgcgccaggatctcaataaccgacccgaaaccaaaatgggtcttggaaactatgccttta

SEQ ID NO: 226817 - DNA, 439 bp, Gossypium hirsutum
cggagatggaagccacattgaacttgcatgcattgtttcagagccccaacccatggcacgtttctgtctcttacgcacgtgcattgcagaacactgtgcttaagacatggcaaggacgtccagagaatgttgaagctgcacagaaggctcttttggtgcgtgcaaaggcaaactctctggctcaactcggaaaatactctgccgagggtgaaagtgaagaagccaagaaaggaatgtttgttaagggctatacctattaaggcgtaagacactgtaatatctggtttttgggcatctatggctttttgtgcgaggattattacttgctgttagataagttttttacacattattgttatgcctcctgaaactagggaggttgaataagttacttgagagagtagaaagatcattcctcgaatactttcctagacgcctt

SEQ ID NO: 226818 - DNA, 325 bp, Gossypium hirsutum
cccacgcgtccggctcccttctctaaagaaacactgttaggtagccgtttttgctttcagaaaatctaccgcagtttgcagttgagaggatggtgagagtcagcgttttgaatgatgcactcaagagcatgtacaatgccgagaagaggggcaaacgacaggtcatgatcaggccttcctccaaagtgatcattaagtttcttttggtcatgcagaagcatggttatattggagagtttgagtatgtcgatgatcacagatctggaaaaattgtggttgaattgaacggaaggctgaacaagtgtggggtgattagtccttattt

SEQ ID NO: 226819 - DNA, 459 bp, Gossypium hirsutum
  unsure (1)..(459): unsure at all n locations
gcggtagcggagaggaagtggctgagcgagtattgagccagccatctttggccgggttgcagggccccacggtatgtccagttttttgtaagcgtgatggaaaagtaactgctgactactatgccatagtcatatgcgtacctaagaaagctttatacaagtctgtacaacaattgagagcgattggaggcagcggggtgttgatatcacctttgacctacatttttgatgaagagaccccaagatggagagaacttctttcaaagcttggtatctagtccatttgggattgaggcatgggtgttttacttgcatttcatataaaaagctgaaaaatttgtaagtgccanagtggttgaaaatttacttttgccgagagatagggaccttcaaagtgtgtcatggtggtcttgtttctcagtagtggcattcttcagccccttgtttcttttgtcaata

SEQ ID NO: 226820 - DNA, 435 bp, Gossypium hirsutum
ccacgcgtccggtgagttgaagaagaacaaaataatgagctgcaatggctgccgagttttacgaaaaggatgcagcgagacatgtgtgttacggtcgagtttacggtggattgaatcggctgaagctcaaggcaacgctaccttgtttctcgctaagttttttggccggagtgatctcctttcgcttatctcctccgtccctgaatctcaacgtcccgctttgtttcagtctttattgtttgaggcatgtggacgaactgtgaatccggtgaacggagcggtggggttgttatcgagtggtaactggcatatctgtcaagcggcagtggaaacggttcttcagggcggagctttacgaccaattttggctggatcctggacaccgagttgtgacgagtcatcaaatcgtttttgtgtaactcgggcaactttgaa

SEQ ID NO: 226821 - DNA, 404 bp, Gossypium hirsutum
caagaagaaggggaggaagagattgtggagttgtcttctgattgtttgtgaactgggaagttaaagataaagagactgatagatatatcaacaaagagatgggatctttcaagggtcatgctttgccagggacactgtttctgatggtgggtgtatggcacatatggagttccgtggttcggtttgtgtcaaaccccaagtcttttgaggtcagagtatggagcccagttcctgggtttaatgggaagatgaatcactttgtgactatatgttgtagccttcggcgctttcattgatctgtggattgggcctttgtattcaaccaactcaagtttttgtggatggagtcttgaatccatcacacttgaacgattttgagcatttaaggatgcttctaatgtttt

SEQ ID NO: 226822 - DNA, 429 bp, Gossypium hirsutum
cccacgcgtccgcccacgcgtccgttcccttccattttactttgttttagttgccataacgtcaccttgcaatacatcccacaatgaggcaacaatatgtcttcactactctcacgttgctcatcctgttttccctcagttgttcaacaacattagcccaagctccggcactggctccagcaccttctggtccgacaaacgtcaccaagatcctcgaaaaagccggtcaattcaccctcttcattcgtcttctaaagtccactcaagtggccaaccagctgctcggtcagctcaacaattccaacaatggtatgaccgtttttgcaccaacggacaatgctttctccagccttaaatcgggcacattgaattcactcaccgatgaacaaaaagtggagctggtgcaattccacatcgtcccaacatacc

SEQ ID NO: 226823 - DNA, 387 bp, Gossypium hirsutum
gaaagggatcagagaactgtatttgcttatcagataaccttgaaggctagtgaaagagatatttatgagttcttctctagggctggcaaggtacgagatgttcgcctcataatggatcgaaattcaagacgttcgaagggatttgcgtacgttgagttctatgatgtggatgtcagtccctatggcaatagcactctctggccagcctcttcttggtcaaccagtgatggtgaaaccatcagaagctgaaaagaatcttgctcagtcaactacatctgtggcagctggacagataggttcacatgctggtggagcgaagaggtttgtgttggcaacctacatttcaacattacagaagatcaacttcgtcaggtttttgaatctttt

SEQ ID NO: 226824 - DNA, 463 bp, Gossypium hirsutum
cggacgcgtggggccaaaaccaaaatatgaagatactatgccttcacgggtttagaaccagtgggaagttcctgcagaagcaaatcagcaaatgggatccttctctttttcttcatcactttcaaatggattttcctgacgggttatttagtgccggaggaaagtcagacatagaaggcatattccctcctccatactttgaatggttccaattcaacaaggaattcacagagtacacaaaccttgaggaatgcatctctcacttgtgtcaatatatcacccacaatggcccttttcatggattgctcggcttttcccagggtgcaactcttggtgctcttctattgggctacaaggcacaggggaaggtgttaaaggagcatccacctttcaaaatgtttgtatcaatatcaggatcaaaattcagagagccaagcatatgcgaggtggcttacaaagacaa

SEQ ID NO: 226825 - DNA, 319 bp, Gossypium hirsutum
ctcgagaaggagttctactaaaatgaccaaactgttggaactgttgcaagctacatcaatactagtgtctctgatcagaaagctgtactggagactgcacataaaatcactgatgagaaggtgacgagaaatgatacacaagagacaaatggtacaagagcattccagattcaagatgtgctttccctggaaaatgaagattctgatgagacgacaaccttgcttgataaaaaggataatgtgtgtgtaatgtcaaatagacaatccatgtatccagtgctccaagttgattcgagattgatatcagatttggtgttgt

SEQ ID NO: 226826 - DNA, 259 bp, Gossypium hirsutum
tcgttctaccacggagttcaatctatttcaatttcatccgggaaggctatgaagcttgggtcattgtataattttctttctctctgctgggcatgggttggaggaccaggatcagctatactcaacttgagtggcatagtaataaagccaacttgctatatgctgacatgaatgcatccttctatgccttaagatggaagatctacaccgagatgcaagaaaagaccagagcagctattaaatctgaatctcaatctaa

SEQ ID NO: 226827 - DNA, 265 bp, Gossypium hirsutum
gtcttaataaacgccttcgatttaccttcgatttccatttacttctctattgctacgttgttgaatttttagtgagcgaaaatgagagagtgcatttcagtccacatcggtcaggctggtattcaagtcggaaatgcctgctgggaactttactgccttgaacatggaatccagcctgatggccagatgccaagtgacaagactgtcggaggaggtgatgatgcttttaacacctttttcagtgaaactggttcttggaagcacg

SEQ ID NO: 226828 - DNA, 455 bp, Gossypium hirsutum
cggacgcgtgggttccgagcagatcgaatggttatgcttgctaaggcacttgaatatcaagatttcaacaaatttgatcgtatacgggtccctaaaatccgttatgctggaatgcttcagtatgatggcgagttgaagcttccaagctgctaccttgtttctcctccagagattgatagaacatcgggtgaatatttggtgcataatggtgtccgtacttttgcctgcagtgagactgtcaaatttggccatgtcactttcttctggaacgggaaccgctccgggtatttcaatcctcaaatggaagaatatgtggaaatcccgagcgatgttggcattacgttcaatgttcaacctaagatgaaggcattggagatcggtgaaaaggctagggatgctattctgagtgggaaatttgaccaggtacgtgtgaacataccaaatggtgacatggg

SEQ ID NO: 226829 - DNA, 301 bp, Gossypium hirsutum
gaatcgcatattactttgatctctccaacgaaatttaagtaataaaaatggtgttcgaggtgatgaaagtggcaacgacgacgtttgagaggcgcagataccaggcacttctggtcttcgtaagaaggtgaaagtttttgttcagcctcattatttgcagaatttcgttcaagcaacattcaatgcccttacacccgagaaagttaagggtgccacacttgtcgtttctggtgatggtcgttatttctcaaaggatgctgttcaaataataatcaagatgtcagctgcaaatggagtaagg

SEQ ID NO: 226830 - DNA, 464 bp, Gossypium hirsutum
  unsure (1)..(464): unsure at all n locations
ctctctctctctattctctttggcttatctatcgctttgatttcgcatccttgctgtgcactcgatggcaaatcgatggttgaggcctgaggtgtatccgctgtttgcggccgtaggtgttgctgtcggaatctgcgggtttcagttggtgcgcaatatctgcatcaaccctgaagtcagggtaaccaaggagaacagggctgctggggttttggacaactttgctgagggagaaaaatattctgaacatttcttgagaaaatatgtccgcaacaagacgccagaaatcatgcccagtatcaacagcttcttcactgacccaaagtgaggcttcactcttgctttatgctgaaactaaaaaataaaaaaaatagaagaactaagtcttattcaatcaataccaagttatgccctttctttctgctgactgtgatgcaaatntgtgttggttttgcacttggatg

SEQ ID NO: 226831 - DNA, 457 bp, Gossypium hirsutum
gtctgccataactggcggcgcttccgtttctctttttggccctaagaagactaaaggccgtggtttccgccaggacaaccccgatcgtcattcccatctggcctccggggactttgactctatcgggtctgacgggggccccggcccccaagatctatggaagatgggataatttggtcactggggtcatgaggaacacaagaggatgatttgcacaatacaattgggtgaatttggggagatcaagaaatttgcatttaaatcttgatcgtcgcactggatttgtcaagggatatgcactgattgaatacgaaaagtttgaagaagccaaaaatgccatatctgcaatggatggagcagaacttcttacgcagactatgaatgttgattgggcctttagcaatggacccagtgttggagcctcttaaagaaaaaatatagagctggacggacacat

SEQ ID NO: 226832 - DNA, 456 bp, Gossypium hirsutum
aaaagtactctgtttttgctctgtttttaagtcatggtggtaatggtaactccactttgcttgctatattggctgttaatttcaacatggtggcttatggtttcaacgtcaggaatggtgtggattccattaactcattcattatcaaaaacccaattcaccactccacaccacttgcttaaaaccacctcaactcgttcagcaactcggttccgccagcatcatcaccaccgtcacaaacaagtgtcagtccctctttcacctggtagtgattatacgctttcgtttactcttggttcaccttcttcttcaactatttcactttatcttgatactggtagtgatctcgtttggcttccttgttcaccatttgaatgtattttatgtgaatcgaaaacgccgccgctttctcctccgcttaatctttcttcatctgctaccgccgtaccatgcaaa

SEQ ID NO: 226833 - DNA, 261 bp, Gossypium hirsutum
agccaaaaaaaaaaaaaaaagcctctttcctgtctctcgttctttttcctgttcaatcatgtcttggttcattagcaaatatgctgatgagttggctaaaaacgctgcttacattggaacccctggaaagggtatgcttgctgctgatgaatccactggcaccatcggcaagcgtgtttcaagtattaatgtagagaatgctgcatacaacaggcgtgctctacgtgagctgctattcacaactactggagctttttatca

SEQ ID NO: 226834 - DNA, 380 bp, Gossypium hirsutum
cccacgcgtccggaaagagaaagaaaacgcaacaatatttcactgaaaaccatgaatactggcttggcaaattacgaattctgcgactgcttttgatccaatccgtctttcgactatacccttgagatgacccatactcattactaatggcacctctatcgctaaacaacaggacagtttccagacaccacggatagaacagctacatacaagtggcgaatatgaccaggaaagtcctcaactaccaatctgtcattctttcacagccaagtcaaaccttgcccatctgtcgaatcgactctatcgatcgtcgccttggtctcggtttcaaagaaaacgaagccgctgcttatctccttaaatttcccacgttttcgtaa

SEQ ID NO: 226835 - DNA, 355 bp, Gossypium hirsutum
gatatttggacctggaaagtggggaggagagtcaacagtgctggcttctatggtgatagatttgtgcatcttcccgaaagtcttcgaaaggcaaatagtccaaaagtctttgcgagcaagccagcacttgaacgttttatccggttgaatttcccagatgcagatgttaatgcgttctttgcttcatttgtttggaagatccctgccgttgtggaatctcctactaaagtggcagctgcgcctgcatcaccagctgaaggaacagaagatgatcagcatgaatgtgtcacataaggtcttcttataacccataggaagagggctccccctccttccccattcagtacttctagtt

SEQ ID NO: 226836 - DNA, 183 bp, Gossypium hirsutum
gaaaaccacaaaagcttcagtgtttcttcttttcatcatcttctcagtcacaccatcatcctttttgtttggtgtggccaacgctacaaatgaacctgtgctcgacactgatggcaacgaagtccaaacaggcaccgaatactacgttgtgtcggcgatatggggtgctggtggtggtgggct

SEQ ID NO: 226837 - DNA, 400 bp, Gossypium hirsutum
aaaccctaacggctacactcttctctcactttctaaactaacaaaagaaaacaatcacggaaatggagttttctcaagctgacttcgatcgccttttactctccgaacacactcgtaaaatctctgaagttaactacgccaaggaccctcttgatgctgagagaaaaggcgtgctgaggcttccagaatcaggcgaaaataccctgacagaattccagtctgaccaaggtgcttatttgcttttaccatcatatgtcatccggacacatgggataaaacaacagcgtgaaactgttaaaagaactccaaggaagcaattagagcttgttcttgaggccctggatacactgggaaacaccaaatggaggataaattgtaggattcttggagtactaaacac

SEQ ID NO: 226838 - DNA, 452 bp, Gossypium hirsutum
gacatatctcatgattgatgaagatgaacctattcttgagaaagcaattgggactgaaattgaatggtatcctggaaaatgcttaacgcaaaagcttcttaaaaagaagcctaagaagggttcaaagaatgccaagccaatcactaaaacagaggagtgtgaaagtttcttcaacttcttcaatcctcctcaagttcctgaggatgatgaagacattgatgaagatactgctgaggagctacaaaatcaaatggaacaagattatgacatcggatcaacaattcgagacaagattattccacatgctgtgtcatggtttacaggagaagctatccagggagatgagcttgatatagatgacgatgaagaagatgacgatgatgatgatgaggaggaggaagaggatgatgtagaaagagatgaggatgaggatgctgatgatgaggatgctg

SEQ ID NO: 226839 - DNA, 338 bp, Gossypium hirsutum
gggaaacatgttcttcttctggtagtagtagttcatgcgactccggcttaacatgtcaaacttgcgccggaaatggaaatacccgacccagatgcactcggattcaaccactcagccctacatcaaaggtaaaaggtttgccatttaacaaatattcttggctcacaactcacaactcttttgcactcaaaggggtaaagtctgaaactggatcctctattattgcacccactaaccaggaagacaccatcaccaatcaacttaagaatggggttcgtggacttatgctggatatgtatgacttcaatggtgatatatgggtatgcaacttccttggg

SEQ ID NO: 226840 - DNA, 403 bp, Gossypium hirsutum
gccgcctccaagagaagacagagaggtctcctcactactcaccgtaatgggtcgtgtcattcgagctcaacgtaagggtgccggttcggtcttcaaggcccataccaaccaccggaagggtcccgcccgtttccgcagcctcgacttcggtgaacggaacggttacctcaaaggtgtcgtcaccgacgtcattcacgaccctggccgtggcgctccgttagcccgcgtcgttttccgccaccctttccgttacaagaaacagaaggaattgttcgtcgccgccgagggtatgtacaccggacagttcgtgtattgtggtaagaaagctacccttatggttggaaatgtgttgccccttagatctatccctgaaggagcttgcggctgcaacgttgagcaccat

SEQ ID NO: 226841 - DNA, 295 bp, Gossypium hirsutum
atctatatccttctgtttctggtcaagccaatctcaaaagactccccttttagctcacagctcgggtcttgagtactataatgggggaggagaaggttcacatcaacattgtggtcattggccatgtcgactctgggaagtctacaaccactggttatttgatctacacgcttgttggcttagacaagcagaggattgatcaggttgagtaatgatcgttctcacttaccaataagacacttttacctatcaacttaagattgcggttcgtggacttacgctggatttgtaatac

SEQ ID NO: 226842 - DNA, 338 bp, Gossypium hirsutum
atatatgcaattaaccatacagatctgatcatcaccagtactttccaggaaattgcaagaagcagggacgctgtttgtcaatacgagagcgacactgctttcactctttctggtctctaccgcgttgtacatggtatcgatgtgtttgatcccaaattcaacattgtttcccctggtgctgatatggagatatactttccttacaccgaatagaatcggaggttgaatcattttcattctgagatcgaagaccttttttacagcaaaggtgtggaatgaataacacttatttttttctcaattaccctatccaagccaatttctgttcacaatttcta

SEQ ID NO: 226843 - DNA, 433 bp, Gossypium hirsutum
ggaaccctttccccctcgcttgcccacctccgtttcctccaaaacctctccgtcgccgataacaagcttaccggtcctatcccgacggagctcgctgtcctatccaatctccgttacctaaacctttccaacaatgttttcaatggttcctttcctacccagctttcccagctgaaaaatcttcaggtactcgatttatacaacaacaacatgacgggcgagctgccggtttccgtcacagagcttcccaatttgcgtcacttgcatttgggagggaactatttcagcggtcagatcccgtcaagttacggccgttgggagcatcttgaatatttagccgtttcgggtaacgaactcagcggtaaaatcccacccgaaatcggcaacttaacgaagctgaagcagttgtacattggttacttcaatagtttcg

SEQ ID NO: 226844 - DNA, 445 bp, Gossypium hirsutum
cccacgcgtccgcccacgcgtccgcccacgcgtccgtccacgcgtccgatttcttgaagagagaaaaatgatgtgttactgccgcttgtttgttttgcttgcactctcaagttttgtggtcgaaagtcgacatctcaaaggaaattcatacgaattatccaacttccatccttccggcaccaatgccaccattgaacccaaaatatgggcagttttagttgctggctccaatggttttgtaaattataggcaccaggcagatatatgccatgcatatcaaatcttgaaaaatggtggactagaagacgaaaatattatcgtttttatgtatgatgatattgcattcgacgtagaaaatttgagacccggtggtcataatcaataaccagatggagacaatgtttataaaggagttcccaaggattacacaggggaagatgtaaat

SEQ ID NO: 226845 - DNA, 251 bp, Gossypium hirsutum
agcaaaaataaaattgaggggcttattgaatcaatctgataatcgcacttgtgctgattgtggtgctccagatccaaagtgggcatcagcaaatattggagtctttttatgcttgaaatgttgtggtgtgcacagaagcctcggtacacacatatccaaggttttatctgtggcattggatgaatggtctgatgaagaaattgatgccatgattgaagttggaggaaattcctctgctaattcaatctatg

SEQ ID NO: 226846 - DNA, 310 bp, Gossypium hirsutum
cattttccttcattttctcagcgaattcgaaaccgaaaacgcaagaaatttttcattttttcttgagtcgaggcaacttttcaatctgggttttgcttgaatattcatattaactttgttttatacttaaaaaagatgacagaagcgagtaagaaaagcatgaatccggaaccagttcatgttcaaagcacagcttcgtcaaacgaaacaagatcaaacaacaatctccccaattttcttctttcagtgaggctaaaatacgtgaagctcggctaccattatttaatctccaacgccatgtatttaatgc

SEQ ID NO: 226847 - DNA, 215 bp, Gossypium hirsutum
  unsure (1)..(215): unsure at all n locations
gcaaccatggtgaagtattcaagagaaccggacaaccctactaaatcttgcaaagctaggggttcgtacgttcgtgttcattttaagaatagaccanaaactgcctttgccatccgaaagctacctttgacaaaggcaaagagatacttggaggatgttattgcccacaagcaagcaattccgttccggcgcttctgtggtggagttggactaac

SEQ ID NO: 226848 - DNA, 317 bp, Gossypium hirsutum
caaggtcacccggaccggttgttgccggatcggggtcaagttggtatgacccaacacttcatgaggagtgactccgatctcctcatgggaacctgtcatcgacgcggcgtccatgccatgggcggtatggcagcacaaattcccattagagatgatccaacagcaaatgaagcagcctttgaacttgtaagaaaagataaacaaagagaagttaaagcagggcatgatggaacatgggcagcttatccaggtcttaataaaacatgcatggaagttttaccaacaccatggggaactcttcgaaccaaatcgaaact

SEQ ID NO: 226849 - DNA, 438 bp, Gossypium hirsutum
gtttttaacagatcaagcagatttgctagtcttctaagcatcaaatgtgcaattgcagggaagagtctgtatttaagattctcatgctttactggtgatgctatggggatgaacatggtttccaagggagttcaaaacgttttagatttccttcaaaccgatttccctgacatggatgtcattggcatctcgggaaacttctgttccgacaaaaagccagcttcagtaaattggattgaaggccgaggcaaatctgtcgtctgtgaggccatcattaatggtgatgtagtgaggaaggtcttgaagacaagtgtagaatctctcgtggagcttaacatgcttaagaaccttactggttctgccatggctggagctctgggtggtattaatgctcatgccaatgacatttgtcactgctgtctatatagctactggcca

SEQ ID NO: 226850 - DNA, 462 bp, Gossypium hirsutum
  unsure (1)..(462): unsure at all n locations
attgatcagcatgtcaccttgcctcaatttcattacgggaaactcgtcgaccccgtctcaacaatgctgcgacacagcttgccagtgtcgtgcgttcgtcaccccaatgcttgtgtgaggtccttaatggtggtggttcgtcgctggggatcaacgtcaaccggactcaagctttggccttacctggcgcatgcaatgttcagactccacccatcagtgcctgtaatggtgcttctccagcgcctgcagactctccagttggatcaccagaatctgggagtacaatccccacaggtggatctaaaactgtaccatcctcagaggaagatggatcaccatcatcatcatcgagtggaagcaccatgaccaaattgacactctcattattgttcttcctcattgtggccatatcacattgaatcttctatcctatttggaaaacattntatgatattattgatt

SEQ ID NO: 226851 - DNA, 447 bp, Gossypium hirsutum
atcttattttggtatcccctcttttttttttctttttttttctcagttcttattcttgcaaagatggcagcatcgtcagcatgcttgctaggaaatggtccgtctactcacagaacaaaatcgaagttgagtaaagaattttatgggaggaatattgtatttacccctgccatttcatctttgggtcggaaatcgaatgccgtactcgtaaaggcatctttaaaacataaacaacatgaaggaagaaggggattcttgaagtcattactcggaactgctggaattggagttccggctttactaggaaatggtaaagcatatgctgatgaacaaggggtttcttcctcgagaatgtcgtattctaggtttttggagtatttggacaaggacagggttaaaaaagtggatttgtttgaaaatggaacgatagctattgtggaagctgtc

SEQ ID NO: 226852 - DNA, 451 bp, Gossypium hirsutum
gtggttctcaatcaggcggcagcatgctctggtagttatggctgacagtctttactactcaagggtgccgcgattactgcaagcgtggttttgatggcaaaaattgcattgctgatgaacattacttgccaacttttttccatattatagatcctggtggtattgccaactggtcagtaacacatgttgactggtctgagagaaagtggcaccctaaatcctatagggctcgggatgttacatacgagctactgaagaatattacgtcaattgagttgagtgtgcatgtaacaagtgatgaaaagagagaagagcaggtacaggcctgcctatggaacggtgtccgacgaccatgctacctatttgctaggaaattctatccagaaaccctacataaactgatgaagcttcacaatttttgaatataaaatttttggttggatgtgacaat

SEQ ID NO: 226853 - DNA, 453 bp, Gossypium hirsutum
atgaatcttcctttaatagttctctacttttattgaaaatcaagcgtttgttttggagatggatgcaaccctcgattccaagcttgtgtcgaatgaagctgttgatatgaaaatcatgaagaaattaggtgatgatgatcggcggcaaggcttgaccaaggcgaaaaatcggtcgtatgctttggtgtcgtacaaggagttgccggactatatgaaggacaatgagttcatactgaattattatagggctaattggtctctcaaggaagctctttttagcgtctttcgttggcataatgaaacacttaatgattggacgcacttacttgggtttcttctatttctgggattaaccatggccaatttttatggaattcctacatattgtttatcttattacattctttatccgttcgttaattatttatgatttcctcaggtttttttatattc

SEQ ID NO: 226854 - DNA, 462 bp, Gossypium hirsutum
ctacaatcgaaacccttaggcggcgactactcgagcttcataacacccgaagcttttaactatggcggatgtagagacggaggttgcgacggccggtgtgcccaagaagagaacattcaagaagtttagcttccgaggtgtcgatttggatgctctccttgatatgtccactgatgagcttgtcaagctcttccctgctcgagctcgcagaaggttccagaggggtttgaagagaaagcccatggctctaattaagaagcttcgcaaggcgaaaagggaggctccacctggtgagaagccagaaccagttagaacccacctgcgtaacatgatcattgtacccgaaatgattggaagcattatcggtgtgtacaatggcaagacattcaaccaagttgaaatctagcctgaaatgattagccattaccttgctggagtttctatttcgtacaagccagttaa

SEQ ID NO: 226855 - DNA, 428 bp, Gossypium hirsutum
gttttcgcttcacttttttaatctgtcacgtttcattgactaatttggctgataaaatcattcgggtgagtgttttaaaattttgagttgggcttaatcaatctctgttttttctcggtttcagctgccatggctaccgacccttcaccccaaatcccaatgagggccagttcaaagagctcaaacaattcgatacacccagtggatgtggaaaccccacctgttaggactccaacaccaatcatttacagagaaatcaagcatttcaagaaatggataccttggttggttcctgcttttgttgttgctaacactgttatgtttatcatcaccatgtacgttaacaattgtcccaagaattccgtttctcgcgttgctgatttcttaggcagagtctcctttcacccctttaaggagattccttttct

SEQ ID NO: 226856 - DNA, 411 bp, Gossypium hirsutum
gtcatccatccttcactcctgaagaaacttcacagttgatgcctcctttggcctcagaacctagggttctgcaatagaatactcgggagcttcccaatctgataggaaaaaccagcttcctattgctgtggataaacctgctgaagatggctacaactggcgtaagtatggacagaagcctattaaaggctgtgagtatccacgaagctactacaagtgtacctatcttaattgccctgtgaaaaagaaggtggaacgatctgcttatggccaaataaccgaaattatatacaaaggcgctcacaatcatgaaatgcctcagcaaaataaacaagcaaagggtggtagtgatggaaatgcaaattcacaggcatatcctgaatttggttctcaggttgcagctttaaattc

SEQ ID NO: 226857 - DNA, 425 bp, Gossypium hirsutum
  unsure (1)..(425): unsure at all n locations
cccacccgtccggcgaaatcaaaagccagcagcgctgcatctaaaagaagcagtcgtttgacaattattggccatgggtaaggttaacggatctctacctcgtcctgtaagggtgagaggccaacctcctaaagtggccaaccaggacaggaaaaaaaacccccgtggccggcttacaaagcggtgcaatacacccgccgttcgtcaacgcagtggttggatttggcaaaaaaaggggacctaactcatctgagaagtaagagatctatgtaggtgaaagaaggcaagaagccttgttgaaagctttgatggattttaagtctttgntttcttttgataatggttttatgatactggtttcaaggattggattgaactaccattttgtttgctagatattatggggtattgttatcaattatctt

SEQ ID NO: 226858 - DNA, 301 bp, Gossypium hirsutum
acgcgtccggcaatagtactactactccaagcaagcattttccttacaagtttgtttttcttgtgattaatcgatatggctagctcaatgtcccttaagcttgcatgtgtggcggtgttgtgcatggtggtgggtgcacccctggctcaagagtcctggacgctgtcaaaagcttacacaaagtcgatccttccacggtgacacctgatgttcatttgcagaaagatttagggttagatagcttgcacaatgtggagattgtcatggctttagaggaagagttcaagctggaaattccaga

SEQ ID NO: 226859 - DNA, 455 bp, Gossypium hirsutum
ttctgattatctacttgatgaagccacaaacttgtggggacataatcttgacttaatggataatcgggttttaagatatccaaatcgtgtgcagaacttatacttcacattcctctttgtgcttcgagctgtgacaaaggcagctgattacttggaacaagctgaatacgataccggtaatccaaccgaggacttaaaaacacattccctaatgagacagctactttataatccaaaattgcaagctgcatgcccacttccatttgatgaagctaaattatggaaaggacaaagaggacctgaactgaagcagaaaatacaagctcaattcaaaaatatcagtgcgttgatggactgtgtagggtgtgagaaatgtcgactttggggaaagcttcaggttcttggtcttggaactgcattttgagatactttctcttgtaatggtgaagatcact

SEQ ID NO: 226860 - DNA, 418 bp, Gossypium hirsutum
ataaccgtatgttacatgggagaaaaacagaaagaggtcgtaagcgtgatactcttacgataaaggttgtgaaaaagtatatccattatgcaaaacacaggattcagcctgagctgactgatgaggcttcagaacacattgctacagcttacgcagagctcagaaatgccagttcaaatgcaaagactggcggaacccttccaatcacagctagaaccttggaaaccataattcgtctatcaactgctcatgcaaagttgaagttaagcagaaaggttacaaaagttgatgttgaagctgctctgaaagttctaaattttgctatttatcataaagaattgacagagatgggggatcgtgaacaagaacggcaaagagaagaagcaaggacacacagagcggatcgtcaagggccaac

SEQ ID NO: 226861 - DNA, 525 bp, Gossypium hirsutum
  unsure (1)..(525): unsure at all n locations
tccggannnattcccnngggtcgacgccaacgcccgtccgtgttttaatgtcataaacaatanntcgatcnntcccgggntcgttatttaccatgtggnctggtcgacccaatattaccaccgagggatgcgtgttttttacccggatagtgatagaaanccaaatgcttcnntgcgattcttgagtatttagagggaaataccgaccgactgtcatctcnctttctttcctgaaaaacttccttcgtataccgactatgattctgcaacacaattcaggaagcgtctgaaaagcttggcaagcaaagaacatcctatagatgttccgagaaacgtaactacccaaatgtacataacagcttccatggataaaattgttcacaacttttctgcgtatatggactatactcttctttcaagcttaaacaatataagctgggtgaacccctcaacagatgtgcttcaagcttattacaggaacttgagtggattctataccttggattttctggatgagccttccta

SEQ ID NO: 226862 - DNA, 395 bp, Gossypium hirsutum
tttttatttttttcagagcctccttcaccaaactccgctctgttcagcccgtgatcttttgatcgttctctatggctaccatttccaagctctctaaccccaacccagtcgcttctctttcatcatcttccaaacccagatcttcttcatcgcttaaatgcttcgttgggttccctaccaggcctggtttctgctctaagctggtttcatcttctagcttgtcctcgataaacacccaccctttcaggggctccttggttgtcaggtgttctcttgctgatggaaacggtagttcagtgaagaggactactttgcatgatctgtatgaaaaagaagggcagagtccatggtatgacaacctttgcaggccagtgaccgatttgctgccactgatt

SEQ ID NO: 226863 - DNA, 439 bp, Gossypium hirsutum
gcaatagtactactactccaagcaagcattttccttacaagtttgtttttcttgtgattaatcgatatggctagctcaatgtcccttaagcttgcatgtgtggcggtgttgtgcatggtggtgggtgcacccctggctcaaggggccgtaacctgtggtcaagtcacaagctccctcgcaccctgcattggttacttgacagggaatggtgctggtggcgttcccccaggttgctgcggcggcataaaatctctcaactccggcggccaaacaacaccagaccggcaagcagcttgcaaatgcatcaaaagtgcggccgccggcatttctggcatcaactatggtattgcaagcggactcccaggcaagtgcggtgtcaacatcccttacaagatcagccctagcactgactgcaacagcgtcaagtgaagttttggca

SEQ ID NO: 226864 - DNA, 308 bp, Gossypium hirsutum
attcccggtccaccacgcgtccgcttgggttgagtgtagagatgaggaaaatcatcgtttccaaagctcttttcttctatgctgggctgtccttttcagctggcgcggcggttgcacagaatgaggaagaccaatgtctcgccatgaacttctacaaggcttcttgtgaccacgctgaagacattatcaacgatcaagttaagctactgtacaagctacacaaaaacactgctttttcttgcctgaaaaacattttccatgactgttctatccagtcatgtgatgcttcactgctgctggacttccac

SEQ ID NO: 226865 - DNA, 308 bp, Gossypium hirsutum
gcccacgcgtcgcccacgcgtcgcccactctctgaagcgaggacgtggagggtcaggtggggacaagttcagatgtactgggtttaccagggcagccacagtgaactgtgctgataacactgtgctaaaaccttatatatctcgggaaaggaatcaagggccgttcaccggttgccctctgcttggttggagatatggtgatggctaccgtcaagaaagggaagcctgatctagaagaaggtttgcctgctgcattggagacacgcagccatgttcataaggttgtgtttcatttatcttatttaatt

SEQ ID NO: 226866 - DNA, 248 bp, Gossypium hirsutum
  unsure (1)..(248): unsure at all n locations
tcacacaagctcatttgatgcaagtgacacgcaaggtcgntaacacaccatcacttgttctccattttattgcaacaataacttaagatcgagatcccattcaagcagacccgaaatggaagggatagagcattaggtaatcaaagccaatggcataaatattcacgtcgcttagaaagggaaaggccctgtaatccttttccttcatggattcccagagctctggtatacatggcgccatcaaatca

SEQ ID NO: 226867 - DNA, 343 bp, Gossypium hirsutum
ctccaagcaaccattttccttacaagtttgtttttcttgtgattaatccatatggctagctcaatgtccgttaagcttgcatgtctgttggtgttgtgcatggtgatgggtgcacccctggctcaaggggccataacccgtgctgatggcttagtcggcctcccacgctgccttccttttttgtcagggaatggtgatggtgctgatgccacaggttgctgtgccatcgtcatgaatgccttgggatcgctctgtggtgatacataggaaccgatctagcttgaaatcgggttcggatttgggtggaatttcaaattggtgtgttatggaatcccaacttaaa

SEQ ID NO: 226868 - DNA, 299 bp, Gossypium hirsutum
cccgaaaaaatggtccagacaaaccagtctggttccggcaatgatttcaagctcgtcggattctggaatgtgcgtccggtcaaatccaaaatccgatcggttcaccgtcaaacgtttccaccacatcgagttttggtgtaccgacgccactaacgtcgctcgccgattctcatggcgtctccgtttgcacaaccgaggtctttaaaacacattcactcatgagacagctccatgcttattatctatctgcgttcccgtgtccctgaactttttttttcactggcccccttattttccct

SEQ ID NO: 226869 - DNA, 312 bp, Gossypium hirsutum
agagaatgctgcttactgtactagaagcgttactttctcaataaaccctgattttctttttttggagcatggtcccgagaatttttgaagcatcaacaagaaagaaatacccggaaagtctacttattcagaaggtatgttcaagaaccaattgcaagagttggctcaaagaagttgctttaatctaccatcttattcgtgcatccgggaaggccctgatcacgctcctcggtttaaagctactgtaaactttaatggagagacctttgaaagccccatgttttgctctactttgagacaagcggaacacgc

SEQ ID NO: 226870 - DNA, 159 bp, Gossypium hirsutum
caaaaaccaagatgttgaccttagtatgtacaaagtaaattctcttcttgaagataatgaattttgtggatgttgacgcactgatggaaattatacccagttgactgacctttacaacatatacaaggaccaaggtctggagattttggcattctcatg

SEQ ID NO: 226871 - DNA, 404 bp, Gossypium hirsutum
  unsure (1)..(404): unsure at all n locations
cccacgcgtccgcccacgcgttcggcggtcgtgttcatttcctttccctttcaccagcctctgtattcgatcgaaaaacaatggcctcttcttcctctctcaccctatctcaagccctccttgcccgagccatctcttcccatggctccgcccaaccctctgatcaccgcgtctctctctctgccctctctattcccactttctccggccttaaatctgctgccccacgcccttccacttnccgtcngccgccttccacgcgctctacctggaatcaccaagtccgttctgccgctgtcgagacgattggtactgccgccgagacttcattgatcgagaaatcggtcaacacgatcagattcttggccattgatgctgtcgagaaagccaattcaaggcattct

SEQ ID NO: 226872 - DNA, 243 bp, Gossypium hirsutum
  unsure (1)..(243): unsure at all n locations
tgggtggacgaacgcgtccgggtggaggtgcttcctttgtggtggttctacctttcctttcatatacgcctactgtntgtattatgggaatgctcggtcagacatgggaggcttcatgcaaacttcgttcttctttgggtacatggcctgcatttgctatggctttttcctcatgcttcggagctattggcttccgtgcatctctgctctataggcaacacattgaccgatctatgaagtgtg

SEQ ID NO: 226873 - DNA, 408 bp, Gossypium hirsutum
  unsure (1)..(408): unsure at all n locations
gggtccgacccaacgcgtccgcatctggtggcatgtgcctttactttctgaaccagngtttttctccaattagtgctcgtcctgagtgtgttgagagggttttgaaaacacggtatcatgatgccatgattaaactgcagccgcagaacaaagaacttgacctgcttattgttattcttccagataataatggctctctttatggtgatttgaaaaggatttgtgagactgatcttggtattgtttcccagtgctgcttgactaaacatgtatttagaatgagcaaacaatatttggccaatgtggcattgaaaattaatgtcaaggttgggggaagaaatactggtcttggtgatgcaatatcaccaaggataccttttgtcagtgaccgttcgaccttaatttttg

SEQ ID NO: 226874 - DNA, 345 bp, Gossypium hirsutum
gtttcgatatttgtattaagaatcgcccttctgcgatcagtgaggtgaagaaaaatgtcttggtgtggttgaaactgcgggtgcggctccagttgcaagtgcggcatcggctgcggcggttgcaagatgtaccctgagatgaactttgctgagcaaaccacaaccgggacacttgttcttggcgtggcaccccggaaagtgcactttgatggagctgaaatggaaactggggctgaaaatggctgcaaatgtggagataactgcacttgcaacccctgcaattgttaatgagaaaaaaaagctaatcatattatggaagctgatctaaataatatatgatgtatt

SEQ ID NO: 226875 - DNA, 352 bp, Gossypium hirsutum
ctttgccttgtgtaaagacattggcaacagagaacatcagttctatctttggtttgaccctacaagaaacttccacacctattccatcatttggaaaccccaacacatcattttcttggtggataacacccccattagagtcttcaaaaatgctgaatccattggtgtaccattccccaagagccaacccatgaggatttactctagtttatggaatgctgatgattgggccacaaggggtggattagtgaaaactgattgggcaaaagcacctttcacagcttattacaggaacttcaatgccaatgcttgtgtctggtcaggaacaagttcatcatgggctaaaactaac

SEQ ID NO: 226876 - DNA, 452 bp, Gossypium hirsutum
actcacttgacctgagattttgttttcttttgtttttctgtaatggggaagattaagatcggaatgaacggatttggaaggatcgggcgtttggttgcgagagttgctctccaaagcgaagatgttgagcttgttgctgttaatgatcctttcatcaccactgattacatgacctatatgttcaagtacgacagtgttcacggtcaatggaagcaccacgagcttaaagtgaaggactcaaagactcttctctttggtgaaaagcctgtcactgtttttggcatcaaaaaccctgaggaaattccatggggtgaggctggtgctgaatatgttgttgagtctaccggtgtcttcactgacaaggacaaagctgctgctcacttgaagggtggtgcaaagaaagtgattatttttgctcccagtaaggacgcccccatgttttgtgtttgtgt

SEQ ID NO: 226877 - DNA, 408 bp, Gossypium hirsutum
agtaccagtattttctcggattctttcttctttttttgatcaattttactttggtttcggctgagattaatggatcggtgcttaaaatgagaggaggaacttcttctgttcaatttgatcccacttctgttactcaactctcatggcgccctagggcttttatttacaaaggatttttatcaagtgaggaaagtgatcaccttatttttcgggctaaggataagttagagaagtcaatggtggcagatgatgtatcaggccagagtattgaaagtgaagttcgaaccagctccggcatgtttcttgagaaagctctggatgaagtagttgctgatattgaagccaggattgcagcatggaccttccttccagtagagaatggggaggcactacaaaaactgcactatc

SEQ ID NO: 226878 - DNA, 468 bp, Gossypium hirsutum
gttttctttcttatttttcttaatttatcatgaaactaatcaataggcttagtcccaaacatctctttcgatctaataaaaagggtccatccactgtctccaagttcgatccttcgtcgtatactacttccggttctgcttcatcgtcttcgtcagaatccgtttcctcagttcacaaaggaaatcagtaccctttagcgccaacagttggaaccggaacacccaccagtgttttgcccgaaacatcggttgactggttagatttttctgctaatttttatgtagaactttgccaagcttttaaaacgatggataaagataacgatggggttattaccagaagcgaggtcgaggctttgcttagcaagttcgccaggcagccgccgagccaagaagagatttcgtccatgcttggcgaggtggatggagacggcgatgggtgcatcagcctggaaacgttgatgaacc

SEQ ID NO: 226879 - DNA, 472 bp, Gossypium hirsutum
gcgttcttcatatggttttcctgtttgtttccatggataacctgtaccattaccttgtaatcatcttattcattcttctcaccatcaaacttttgactcataaaaccaaaaatttgcctcccagtcccttttctctgccaattattggccaccttcacctcatcaaaaacccactttaccaatcactgaccacgttattatccaaatatggccctgttttatatctcaaattcggttgcagacatgtccttgttctttcttctccttctgctgttgaagaatgcttgaacaagaatgatataatatttgcaaaccggcctcggactatggctggggatcttatgacgtacaactacactactttcgtttgggactccttacggatcactttggcggaaccatcgccgtctcagcgctgttgagatcttctgttctaacagcgttgaaaagttttcttccatacgtgaagaag

SEQ ID NO: 226880 - DNA, 221 bp, Gossypium hirsutum
  unsure (1)..(221): unsure at all n locations
cggacgcgtgggcggacgcgtgggcaacaatgttnctancagtagctcgatcggccgccggaaagcgccttcttcgccgaggatatgcgcactgaatctgttcccgatcggaaggtcgcggttttgggcgctgccggagggattggccagcccttggctcttcttatgaagcttaaccctcttgtttctcaactgactctctatgatatcgctaacactcc

SEQ ID NO: 226881 - DNA, 248 bp, Gossypium hirsutum
cgaagatgttgagcttgttgctgttaatgatcctttcatcaccactgattacatgacctatatgtgcaagtacgacagtgttcacgggcaatggaagcaccacgagcttaaagtgaaggactcaaagactcttctctttggtgaaaagcctgtcactgtttttggcatcaaaaaccctgaggaaattccatggggtgaggctggtgctgaattatgttgtttagtcatactggtgtttcactgacaag

SEQ ID NO: 226882 - DNA, 450 bp, Gossypium hirsutum
aaaaaaaaagaaaacaaacaaacattggtggcctgagtatactatgaggaagtgggcgatcccttgggctttggttcttcgttgcctggtcagtctcctctcagatcatgggagaaaagtacaagcaaatgccgaggaaggaggtgtagatcctcctaaagtcgaggaaaagatcggcgctgtgcctcatggcttacaaactgattctgatgtagttaaaagggaatcggaatccatctcttcgagatcgcttcgcaataatgcggagaagtttgagttccaagctgaagtgtctcggcttatggatatcattatcaattctctttatagcaacaaggatattttcctgagggagttgatctccaatgcttctgatgcactggacaagattaggttcctttcactcacagacaaagaagttttgggtgaaggcgacacttccaagctgga

SEQ ID NO: 226883 - DNA, 382 bp, Gossypium hirsutum
gcagactcgagcaggagagcttcgaaaaaccagccaaatcctcttcctgtacttgcaatccttgctaaggatgttggtgagctagcagtccatgagacgaaggttttcagtccaatactgaagggttggcatcctttggcagctggtatagccgtggccacccttcattcttgttatgcaaatgagataaaacagttcatctcaggtattatggagttaactcctgatgctgttcaagtcctgagagctgcagataaacttgagaaagatcttgttcagattgcagttgaggatgcagtagacagtgaagatggtgggaaggccataatccgtgagatgcctccttatgaggctgaaactgcaattgccaatctggttaaag

SEQ ID NO: 226884 - DNA, 225 bp, Gossypium hirsutum
gcgaaaatctcgaagcttccttttccgttttagatctcaaaattcaaaaagctctctttttcatgtcatggctgctactatcgtctccgtcaaagctaggcagatcttcgacagccgtggaaatccaacggttgaggttgatgtggaaacatcgaacggtataaaggctagggccgcagttcctagcggtgcatccactggaatttacgtggctcttgagatgag

SEQ ID NO: 226885 - DNA, 210 bp, Gossypium hirsutum
tcttattacacagtgagctttttgcagtgttttatttattgattctcttagttctcgttttcatcggagaagaaaagtcaaaaaacaaaaatttcatggctcggaaattctttgtcggtggcaactggaaatgcaatgggacaactgaggaggttaaaaagatcattacaacattgaatgaagctgaagttccttctgaggatgttgtgg

SEQ ID NO: 226886 - DNA, 392 bp, Gossypium hirsutum
atggcttcatcatctcctctttctcccattctcctctctctgtttctagtattcatttgtggggtgtgagctcaaacggctcccgcccctgccccctctggccccttgaatttcactggaatccttgacaaaaatggccaatacacctacttccttcagcttttggcacagactcaagttgggagccaagtacaaactcaactcaaaaccaccactgaaggctttaccgtctttgctcccacagataatgccttcaacaaccttaaacctggttccgtcaataacctggacccacaacagaaagtacaactagttctataccacgttatttccaaatactactccttgaacgatctccaatttgttagcaaccccgttagaacccatgctgt

SEQ ID NO: 226887 - DNA, 443 bp, Gossypium hirsutum
gaaaacccttaaacctctttgcctttttcttttcgtttcattttcgacgaaataacaatgagggaaatccttcacgtgcaaggaggccaatgcgggaaccaaatcggatccaagttttgggaagtgatctgcgacgagcacggtgttgatcctaccggaaagtacagtggagatggatcatccgatattcaattggagcggatcgatgtgtattacaacgaggcttccggtggaaggtacgtccctcgtgcggtactcatggatcttgaacccggtaccatggatagtatcagatccggtcccattggccagatctttagacctgataatttcgtgtttggacaatccggtgcctgtaacaacttggccataggtcattacaactaaaggagctgagttttttgatgctgattttgatgttgttagtaatgaggcccttaata

SEQ ID NO: 226888 - DNA, 469 bp, Gossypium hirsutum
accacgcgcactatactcgagcgtaaaactccgtctctttgtccagctccgatcccaacaagctgatctccaaagccgacaaactaacaaagctaagtcttacaaggtggagtgcagattggaaaagtgctactcttttatatgaacaagctgcaaatggatttcgagtttcaaaggattatgagaaagcaaagttggcattcgagaaagcttccaaaggacaagagatgctagcttctccctgggatgctgctaaacacatggagtctgctgctgctttagcaaaggaactacgcaactggactgaggttatcgatttttacagaagggcatctgagctatacatgcagtgtgacagaccacaacctgcatctgattcacttgccaaggctgcccgtgctttggaggatgctttgcctgatgatgctgttcagctatataccgatgcttgtgttattcttgaagatga

SEQ ID NO: 226889 - DNA, 393 bp, Gossypium hirsutum
ggaattcgttatcgacaaagaagctgctatggtttctcaaacaatccgtaacatgcttacttcgtgcaggtggtttcgctgaggcggagcatggggaagtgactttcccggagataagtgctgtgattcttgagaagatttgtcagtatttttattggtctcttcaatattccaggggcaaagagactgagttccacattgaacccgaactgactctggagctgatgatggctgcgaattatctccatacttagccaattttcgtattttaggtctgttattctgcccgagaggagtatgtatgtaagcgtgcttttttgcttttattcttcaatgctaattgtgttgtttttataatattctttttatgattggtttttacttattagtatt

SEQ ID NO: 226890 - DNA, 436 bp, Gossypium hirsutum
gcctggttggtgaaatcattggcagatttgagaagaaaggcttctatttgaaagggttgaagctcatcagtgtggatcgatcttttgccgagaagcactatgctgacctgtctgcaaagcccttctttaatgggctcgtagagtacattatctccggtccggtcgttgctatgatttgggaaggtaagaatgttgttaccacaggtcgcaagattatcggagccacaaacccagctgaatccgctccgggaacaatccgtggtgactttgcaattgacattgggaggaatgtgatccatgggagtgattccgtcgagagtgcaaggaaggaaatcgccctttggttccctgaatgccctgttaactggcagtgcagcctttacccttggatctacgagttgaaattaattgtataatctgttgaccgttatggctc

SEQ ID NO: 226891 - DNA, 333 bp, Gossypium hirsutum
cccacgcgtccgcccacgcgtccgcccacgcgttcgggagaaaggaaaccaaaccaaactagtgagccgctgcttctcttcttctgtatcccaaaatggttgcttttaggtttcatcaataccaagtggtgggcagaggccttcctacagaagcagatgagcatcccaagatttaccgtatgaagctttgggccactaacgaagtccgtgccaaatccaagttttggtattttttgaggaagctgaataaggtgaagaaaagcattggacaagttttggcttttaatgagatctttgagaaatgcctctaccaagatcaataactttggcatt

SEQ ID NO: 226892 - DNA, 481 bp, Gossypium hirsutum
atcaaacacaattcatagaaagtaaaactccgactccatgtccagctccgatcccaacaagctcatcttcaaagccgacaaactaacaaagctaagtcttacaaggtggagtgcagattggaaaagtgctactcttttatatgaacaagctgcaaatggatttcgagtttcaaaggattatgagaaagcaaagttggcattcgagaaagcttccaaaggacaagagatgctagcttctccctgggatgctgctaaacacatggagtctgctgctgctttagcaaaggaactacgcaactggactgaggttatcgatttttacagaagggcatctgagctatacatgcagtgtgacagaccacaacctgcatctgattcacttgccaaggctgcccgtgctttggaggatgctttgcctgatgatgctgttcagctatataccgatgcttgtgttattcttgaagatgatggaaaggaacag

SEQ ID NO: 226893 - DNA, 378 bp, Gossypium hirsutum
ccaagcatcactctcatggcttccatcattgaatctggttggctgtatctgatcacgcatttcagcgacttccaactagctagtatgggaagtttccttcttcatgaaagtgtttttttcttatctgggcttccatttatatatcttgaaagagctggattgctaagcaaatacaagattcagacaaaaaacaatacccctaccgctcaagaaaaatgtatcactcgcctacttttgtatcattttagcgtcaatttaccgcttatgattgtctcgtatcccgtcttcagatgcatgggcatgagaagtagtctaccattgccatcctggaaagtggttctaactcagataatattctacttaattctggaggatttc

SEQ ID NO: 226894 - DNA, 395 bp, Gossypium hirsutum
  unsure (1)..(395): unsure at all n locations
caacccttcctaaataaagagggaaaaacgaaatgcagggatatcactgntattacgataaaagaaactnggnattttgaaatcttaacctgaggaccgtgcaccttaataagttaagaaatttgctaggcttgatattgacccgaattctattacatggagaagagtgatggatgttaatgatcggttcttgaggaaaatcaccgttggccagggcccggaagagaaagggatggtgagggaaactggatttgatatttcagttgctagtgaaataaaggcagatttagccctgactacgtcttttgcttatatgagagagaggctaggaaaaatggtgattggaaatagcaaggctggtgaacctataactgctgatgatcttggtgttggag

SEQ ID NO: 226895 - DNA, 449 bp, Gossypium hirsutum
agctggtgcattgctctcatatgatccaaaccttcgcttgccactttggccttcagctgatgaggctaggaaacagattttgtccatttgggataaggcagatattgtcaaggttagtgatgtcgagctcgagttcctcaccggtagcaacaaagtcgacgacgaaactgccatgaaactttggcgacccaactttacactgctcttggtcacccttggtgaaaagggtagccgatactacaccaagaatttccgtggggcagtcgatgctttccatgtcaataccgtggacacaactggcgccggtgactcctttgttggtgcattgctatgcaagattgttgaaaacccaaccattcttgaggatgaagcaaaattaagggaagtgttgaaatttgcaaatgcatgtggagccatcacgacgaccaaaaagggagcaatccctgcac

SEQ ID NO: 226896 - DNA, 442 bp, Gossypium hirsutum
cgtccgttttaattttattgttccttccttcgccgtctacttcacttgtgacatcgatttcaagtgaatcagagggggtaaggaaaagagtcacattaacattgtggtcattggccacgtcgattccggaaaatcgaccaccactggccacctgatctacaagcttggtggtattgacaagcgtgtgattgaaaggtttgagaaagaagctgcggagatgaacaagaggtcattcaagtatgcttgggtgcttgacaagctcaaggctgaacgtgagcgtggtatcaccattgatattgccttgtggaaatttgagacgaccaaatactactgcactgggattgatgcgcctggacaccgtgactttatcaagaacatgattactggtacctcgcaggctgattgtgctggtttgattattggttccaccactggtggtttt

SEQ ID NO: 226897 - DNA, 463 bp, Gossypium hirsutum
ctttctctctcctctcttccctgatctcattagatccattcaaagggcaacaaatcatcagagcaggaagtaaagcaaattaagaaaaatggcagcaacattaggagactcaagctcctggtccactgctcttgtcaagatttcaccttatactttctccgccgtcggtatcgccattgccatcggcgtttccgtcctcggcgccgcctggggaatttacataactgggagtagtttgatcggtgccgctattaaagctcctcgaatcacttccaagaatctcattagtgtgatcttctgcgaagctgttgctatctatggtgttattgtggcaattattttacaaacaaagttagagagtgttccttcatcacagatatatgaaccagagactcttagagctggatatgcaatctttgctttaggaattattgttgggtttgcaaaccttggttgcagattg

SEQ ID NO: 226898 - DNA, 401 bp, Gossypium hirsutum
attttgaaggggaagtccataccaatatttgtttcttgctaatcatggtacggtggctagggatgtgtacctacattgatgatattggtaaagggtgtttagcagcactggatactgccgagaagagtaccggtagtggagggaagaagaagggtccggctcaactgagggtatataatttggggaatacttcgcctgtgccagtttcagatcttgtgagtatcttggagaggctgttgaaagttaatgcaaagagggatattatgaagttgccacgaaacggggatgttcagtttactcatgccaatattagcttggctcagagagagcttggatataagccctcaactgatttgcagactggttagaagaaatttgtcaggtggtattcttggttacta

SEQ ID NO: 226899 - DNA, 342 bp, Gossypium hirsutum
ggcgttcccccaggttgctgcggcggcatataatctctcaactccgccgcccaaacaacaccagaccggcaagcagcttgcaaatgcatcaaaagtgcggccgccggcatttctggcatcaactatggtattgcaagcggactcccaggcaagtgcggtgtcaacatcccttacaagatcagccctagcactgactgcaacagcgtcaagtgaagttttggcatggaaagttcaccagctagtggaagccaaaataacgatagctacagaataaatatggatgttaaaattccagagttgtgggttgtgtactatgccgctttatgcgactacgtaatattt

SEQ ID NO: 226900 - DNA, 350 bp, Gossypium hirsutum
cccacgcgttcgcccacgcgtccgcccactcgttctaacaaaaccaagacacctggtcctggtgcccagtcagcacttagagccctcgctcgttctggcatgaaaattggacgcatagaggatgtcacccccattcccaccgatagtactcgtagaaagggtggcagacgcggaagaaggctgtgattctttgcttcatatctgctactcagccgctgctgctggcggtttgacattaggaattctctttgcttttgaaacaattttctgattagattcaagtatgctttgctctgttcttatgttgcacacttgtagttcctgaatggattttgatccttgtatcttaa

SEQ ID NO: 226901 - DNA, 241 bp, Gossypium hirsutum
aaaaaaaatgaaggcaatagttataactacaggaggaggcccagaggtgttgcaattgcaacaagtagaagacccagaactcaaagatgatgaggttctcatcaaggtagaagctaccgctctaaaccgggctgatactctacagagaaaaggttcctaccctccttcaaagggtgcttgcccttaccctggtcttgaatgttctggtactatacaagcccctggcaagaatgttctgggc

SEQ ID NO: 226902 - DNA, 347 bp, Gossypium hirsutum
cggacgcgtgggcaaattctcgactcatcggtttcagttcagctgctcctcaactactatggcaaccagaatgtctgttagatacgtttctcgtaggttctcgagtgggagtgggaagatactcagtgaggaagaaaaggctgctgaaaatatttacatccagaaaactgagcgagagaaattggagaaacttgcacgcaagggacccaagccagaggagaaaccgtgtgctggttcagggggtgctgcgaccgatggtagcacttcctttacatttggaacatctgctgagaaagtatcaaccgataattaccgaaactacggtgtttcttgctggtgatgcaacc

SEQ ID NO: 226903 - DNA, 123 bp, Gossypium hirsutum
ggtatctcaggtgtacacattaaccctgcggtgacttttgggttgtttttggcccgcaaagtgtgtgtgattagggctgtggctgacatggtgtcacagtgcttgtgtgctatatgtggagtt

SEQ ID NO: 226904 - DNA, 324 bp, Gossypium hirsutum
cggacgcgtgggatagcatagcaggttagtccaactccacacccaccaccgttggctgtttttgatcatccgaaaaagaatggtgaccgtggaagaagttcgtaaggctcaacgtgcccaaggccctgccaccgtgttggccatcggcacatcaaccccacctaattgtgttgatcagagcacataccctgactactatttccatatcacaaatagtgtgcacaagaccgagttgaaagagaaattcaagcgcatgtgtgaaaaatctatgatcaagaagcgatacatgtaccttacagaagagatttttaaagagtttcccaa

SEQ ID NO: 226905 - DNA, 341 bp, Gossypium hirsutum
ccaaaatatctgctttttcttagttttcctttttgtcccttgtttatttgatatttccccctgatggccgccgctgatgtcgaggtccggtgcttcgtcggagggctcgcatgggccaccgacgaccgggccctcgaagaagccttcagtgcgtttggtgaaatcgtcgaatcgaagatcattaatgatcgtgagactggaagatcccgaggctttggattcgttactttccgtgacgagaaagctatgagggacgcgatcgaaggaatgaacggtcaaaatcttgatggaaggaacatcaccgtcaacgaagcccaatcgcgcacaagtggaggcggtgg

SEQ ID NO: 226906 - DNA, 457 bp, Gossypium hirsutum
aagaaaacccccctttcttttctccatttcacactaaaaagattatatctttttgtattttttttttgttagctttcatttcattggagcatcaatggcggattcaaaggggtacatttccaaaacagagcttgaaacccacaaaaaaccagatgatctttggatctcaatccaaggcaagatctatgatgtaactcaatggagtcaccaccaccctggtgggccacttccattactgaacctcgccggtcaagacgccaccgatgctttcatagcttatcatcccggcatagcttggcaatatctcgacaagttcttcactggttattaccttgaaggttacttagtctctgatatatccaaagattatagaaagctagctgttgagttctcaaagatgggtctttttgacaagaaaggacatgggacatgtattttacttaccatcatagcattg

SEQ ID NO: 226907 - DNA, 413 bp, Gossypium hirsutum
gaaaagagaagacaagaaaatggcctccgatcagaccctttttcactgctgcctcctcacactttacataatcgccttaccaacatggatcagcctttacttcctccaagccccttacggcaagcacaaccgccctggttggggtcctaccatctctccacctttggcttggttcctcatggaaagtcccaccctctggctcactttctttctctttccctccggccaacatttctacaaccctaaatcattccttcttatctccccctttctctttcactacttcaaccgcaccgtcctttaccctcttcgcctctccaggaacaccacccaaaccagggcttttccggtgagtgtagcttttatggcgtttgggtttaatcttttgaacggttatttgcaagccaggtggg

SEQ ID NO: 226908 - DNA, 383 bp, Gossypium hirsutum
aataagcacctccccgtaagcaaaccacaaaggaatgcttggagagagacccaaaaacaatgtctaaggaagttagtgaagaaggacagggtcgtaaggactatgtggaccctccaccggcacctctgattgacatggctgaactcaagtcatggtctttttacagagccctcatagctgagttcatagccactctcctcttcctctatgtcactgttgctactgtaattggtcacaagaaacaacaagatgcatgtgatggtgttggtctcttgggtattgcatgggctttcggtggcatgatctttatccttgtttactgcactgccggtatcttaggtggacacattaaccctgcggtgacttttgggttgtttttggcc

SEQ ID NO: 226909 - DNA, 249 bp, Gossypium hirsutum
  unsure (1)..(249): unsure at all n locations
tgttttcccttttgtctactcnctctttttccaaccctaaccctacctcaccaaccaggattcaacatgaagggaggaaaatccaagtcagatactaagagtgccaagctatccgtgaaatccaaagctggaaagaaatcggggaaggctgccaaggatccaaacaagccaaagaggcctgctagtgccttctttgttttcatggaggagttccgtgagcaatacaagaaggatcaccctaaaaacaaa

SEQ ID NO: 226910 - DNA, 280 bp, Gossypium hirsutum
cgtgaatttgccaaaacccagattgattatatccttggcaaaaatcctcgaaaaatgagctatgttgtgggctttggtaaccattatccaaagcatgttcaccatagaggggcatctatccctaagaataagatcaaatataactgtaaagggggatggaaatggagggatacgtcaaaaccaaaccccaacacacttgtgggagccatggtagcaggacctgacaagcatgatgggtttcgtgatgttcgtaccaactacaactattcggagctaactc

SEQ ID NO: 226911 - DNA, 440 bp, Gossypium hirsutum
ctgaaattgcgtgagccgctatagttacgattccctccagcctagattctcataattgtgtgtgccctctgcaaaggctttagtgttcattcgcttcgttgaatttctatcttcttttgatctgaacggagtttggtaatccagttttcgtcttctgttgattcaggaaatcttagtttttgaattgcgtgactgaatgatctaatggagtctaaaggtgggaaaaagaagtccagtagtagtaagtctttattctacgaagctcctctcggttacagcattgaagacgttcgaccaaacggtggaatcaagaagttcagatctgctgcttactccaactgcgctcgcaagccatcctgatatactcacaagcgtgccgtctgaccactagtagtggttaataaaactgttatttgccttgttagttaagtttagattat

SEQ ID NO: 226912 - DNA, 417 bp, Gossypium hirsutum
  unsure (1)..(417): unsure at all n locations
ggcgacgagagtacctttaccttggtggcttgctctcatctggtgtgtccgtgcttctctggttgcattttgcttcctgcatctttggtggttccacagccctctttatgactgagatctacttggggtttttggtgtttgtgggatatatgatagttgacacgcatgacatattcttgaaagcacacttggttgacctggactacttgaagcatgccctgactcttttcactgattattctgctgtatatgtcctcattatcgatattatttattcaatatcatctatttttattttgataattaagtaaaggagtgactaactttcaaaccattatttttttaacttatttctatttatctttttcttttagtatatttaataatggngttctttttttttttatatcttttttt

SEQ ID NO: 226913 - DNA, 436 bp, Gossypium hirsutum
aggcaatccattttccccgagtaaaacgccaaataaaacaaaaaatatgagagaaatcttgcgcgtccaaggtggtcaatgtggggaccagatcggggctaagttctgggaagtcatatgcgacgagcatggagttgacaacactggaaaatataacggtgactccgaccttcagttggatcgcatcaatgtctactacaatgaagccagtggtggaaggtatgtcccacgcgctgttctcatggatctggagccgggcactatggattccgtcagatctggtccttttggacaaatctttcgccccgataacttcgtcttcggacagtctggtgctggcaacaactgtgccaagggtcattacacggagggagctgagctcattgattctgttcttgatgttttcaggaaagaggctgagaattgtgattgcttg

SEQ ID NO: 226914 - DNA, 451 bp, Gossypium hirsutum
cgatcttcgaatacaacgggagtgccctaatatccatggtaggcaagaactgcttcgccattgccagcgatcggagactcggagtgcaactccaaactatcgccaccgatttccagaggatttataaagtccacgatcgcctcttcctcggtctctccggcctcgccaccgatgctcaaaccttgtatcaaaggcttgtctttcggcacaaactgtatcagctaagagaagaaagagacatgaaacctgagacttttgctaaccttgtttctgcgattctttacgagaaaaggtttggtccatacttctgccaacctgtaattgctggattaggagatgaagacaagcccttcatttgcaccatggattccatcggagccaaggagcttgcgaaagattttgttgtagctggcactgcctcggagtctctctatggtgcctgtgaatcaat

SEQ ID NO: 226915 - DNA, 284 bp, Gossypium hirsutum
ctttgatttcgagagtagatcttcgctcgcttctttctttcgtcgaactccgcgtaataatctcgcatatttctcgcagacgttaagatgggggctgtctttcacaaagctgttcagccggctttttgccaagaaggagatgcgtatattgatggttggacttgatgctgcttgtaaaaccaccattctttacaagctcaagttgtgagagattgtcaccacaattccaaccattggtttcaatgtggaaactgtggaattcaagaacatcagctatactgtct

SEQ ID NO: 226916 - DNA, 273 bp, Gossypium hirsutum
  unsure (1)..(273): unsure at all n locations
ccaaaaagaggtaacaatggtggtgttttctagntaacctgtccttccccaannacaagaaaataatctgaaagattcactagaagaagcagctgaagataaatcactttcaaaatcacaaaacattgatccatcatcattaaatcaagatggttccaatggacggtcaagatcattagctagacttcattctcaaaatgatttcttgaatgctacttctcttgtttcataccgtatttttttctcataatatataatttcattcttttaatt

SEQ ID NO: 226917 - DNA, 203 bp, Gossypium hirsutum
atttgaatgaggcccaaattgctcttggttgattatccaaccagtggcgtcgacagtgcttcatcattttttgtaacccagactttacaaggcctgtcaagagatggtagaacttgtatagcttcagttcatcaacccatcagtgaagtctttgagctatttgatcaagtatatttgctggctgaaggcaaaaccatttattt

SEQ ID NO: 226918 - DNA, 370 bp, Gossypium hirsutum
ggacgcgtgggctaacacacattcttcactattttagcaaagcaaaaaaaaaaaaaaaaaggtaaaaattttgctatgcaattcaatcccatcacttctcaaactaaaaaactcccttcatatgctcttccacccatggcaagtcttatatctcccaaggtttctattgtcttcactcttccacctctctccaaaggggttgaagatctgaaactgcctttcatggctccaaagctgttacaccattcttcccacaccattccaccttataagattgaaatctttaaatctttggattatttatctagggataacattctgattcatcttaaacaagtttataaatgtttacaacctaaggattttcttc

SEQ ID NO: 226919 - DNA, 452 bp, Gossypium hirsutum
aacagcctctggtcaatggaacaatgtaggcaagggaagtcggcaaaatggatccgtaacgtggggaaaaggattggctctgagggctgggcacgggggtcccagtcccgaacccgtcggctgccggcgcactgctcgagctgctcccgcggcgagagcgggtcgccgcgtgccggccgggggacggactgggaacggctccctcgggggccttccccgggcgacgaacagtctgctcataactgttacggacaatgggatttctacttgttcatgaaaacttatctttcagatccttacattgagtgccgagggtatgttgctttttctttgttcatttttgttcctctttagtccgaagagcaaaacaaattaataatgaaaagcccatcaaaaaaagctcaccagcaaaaacagttaacctaatattttcaagctgtgcttaattgatc

SEQ ID NO: 226920 - DNA, 239 bp, Gossypium hirsutum
  unsure (1)..(239): unsure at all n locations
gntcagccaattgtttgagctatctagctctttcttaaatggcaaccaaaacgatgatgttgcggatattttcacttttcttgttgtggttcaaagtctncaactccattttccttggtgctaatggagatgacaatggtggttggcaaactgcccatgccaccttctactgttgtgcttatgctaccggcacaatagggggagcttgtgtttatataaactctttctattaatgttat

SEQ ID NO: 226921 - DNA, 449 bp, Gossypium hirsutum
gcctaacatggtgacccccggttctgactcctttaaggttgccccagaggttattgctgagtacactgtccgtgccttgcagcgtaccgtccctgctgcagttcccgctattgtgttcttgtctggtgggcaaagtgaggaggaggctacccttaaccttaatgccatgaacaagctccagaccaagaaaccatggtcactctctttctcatttggacgtgcccttcagcagagcactctcaaggcctgggctggaaaggaggaaaacgtgaagaaagcacaagatgctttccttgttaggtgcaaggctaactcggaggccaccttgggtacatacaagggtgatgcaaagattagtgagggtgctgcagagagccttcatgttaaggactacaaatactaagaatttagtcttgtggtctgtgtatcagagaaattttctgtattga

SEQ ID NO: 226922 - DNA, 349 bp, Gossypium hirsutum
caaaaaccctacaagatttccacactcatcaaataatcaaccaccttgttcatccacagcgccttgtcaaaatgaaggtgatagccgctgtcttgcttgccgttttgggtgggaacactaacccttctgccggtgatttgaaggctattctcggatcagttgcagctgaggctgataatgataagatagagatgcttttatccgaagtcaaaggaaaagatatcaccgagctaattgcaagtggaagggagaagctggcttcagttccgtctggtggtggtggtgttttcactgcctctttttttttttgggggggggggtggggttttattttttttatatttttttt

SEQ ID NO: 226923 - DNA, 449 bp, Gossypium hirsutum
cgaaaagaaaaaatggctttgaattttaatgccatcgcctcgaaatctcagaagctcccttgctttggtcttccaccaaaagccacccgtagatctcccaagttttccatgatctccaccattccttctggctccaaagaggttgggaatctgaaaaagcctttcacgcctccaaaggaggtgcctgttcagatcacccactccatgccgcctcacaagattgagatctttaaatctttggagggctgggctgagaacaacattctgactcacctcaaaccagttgagaaatgttggcaacccgccgactttcttccagatcctaattctgatggatttcatgagcaagtcaaagagcttagggaaagggcaaaggagatcccagatgattactttgtagttttggttggtgatatgatcaccgaggaagccctttcaacttatcaaac

SEQ ID NO: 226924 - DNA, 449 bp, Gossypium hirsutum
agaccattcgacaatggtgacaatccctttctttgtcctaatcatcctccttttcctctccagctccgcggccacaccaaagagcggtgcaggtcacgacctggtccgttcatcatgtgtccacgccagctatccaagcctctgttttagcaccctttcttcctactccggcccagccaacaccccacgtgagttagcccaagccgccgtaaaagtcagcctgtcccgtgcccggaaagtgtcgaactacttgtcgacgagtgtgacggggtacaacaagagggaacgagtcgcactgagtgactgcgtggagcaaatagatgagtcgatggaggagttgagcaagacactaggggagttgaagcacttgagaggggagacgttcgagtttcagatgagtaatgcgcagacatgggtgagtgcggcgctgacgaatgaagacacgtgtc

SEQ ID NO: 226925 - DNA, 451 bp, Gossypium hirsutum
caccttctctactccaaattttctctagaaccatacttcgagatggcttttctcatgccttcacctggaatttccaccgcctctgcgggtttttctctaaccctaccccccgccctaaatttctcaagagctgcgcgatttcgaagaacgacgacgagaaagtttggtcaaggaccaacgctagggtcggtgttaaagatgccggcagtacggtttcgtgtttgagccaaaacttgaggttgtacgtacaattttcggctccggtgaagcgaggatcgaagcccagcaaagaggaagaggagaagcaggattattacgtgaatatgggttacgctattcggaccttgagagaggagttcccggacatcttttacagggagctcagttttgatatttacagggatgacattgtattcaaagatcctctcaatactttcatcggaatcgacaa

SEQ ID NO: 226926 - DNA, 383 bp, Gossypium hirsutum
cccacgcgtccgcccacgcgtccgcccacgctttctgtagatcttcgttcaaccacgcctagtggccgctcggatttttctcaggcgtgaaaaaaatggggctgtctttcaccaagctattcagccggctatttgccaaaaaggagatgcgcatactgatggttgggcttgatgctgctggtaaaaccaccattctttacaagctgaagttgggagagattgtcactactattcccaccatcggtttcaatgttgagaccgttgaatacaagaacatcagcttcactgtttgggatgttggcggccaggacaagatccgaccattgtggatacactatttccaaaacacgcaaggacttattttcgtggttgatagcaatgat

SEQ ID NO: 226927 - DNA, 456 bp, Gossypium hirsutum
cggacgcgtgggctttactcttctgtgtgaggataaaaaggaaaaacctttccacaaatctgtatctgcatctgctttgaaactaaaaatggaaatcaataaccaccatgaaggaggtttcgaaatggagaagaagcccaagacgaagatcgtatgcactctgggtcctgcatccaggtccgtccctatgatcgagaagctgttgagggcaggcatgaacgtcgctcgtttcaacttctctcatggatctcatgcctaccatcaggaaacccttgacaatctcagggcagctatgctcaacaccggtattctctgcgccgtcatgctcgatactaagggtcccgagatccgaactggttttcttaaggatggaaaaattcaactcaaacagggtcaagaaatcaccataacaactgactatagcataaagggtgatgagacactgataagtatgag

SEQ ID NO: 226928 - DNA, 278 bp, Gossypium hirsutum
aaaccctagcaacacactatttcatcctttcttatatcaaagtgcaaaccctagcttcttcgtgtcctcctcggctccatttgtgggtccctcaatatcaaagtaaaaatgaaggtggtcgccgcttacttgctcgccgtactcggaggaaacgcttccccttccgccgatgacttgaaggttattctcggatcagttggtgctgaggctgatgatgataggatagagttgctattatccgaagttaaaggcaaagatattaccgagctaattgcttg

SEQ ID NO: 226929 - DNA, 237 bp, Gossypium hirsutum
  unsure (1)..(237): unsure at all n locations
cggacgcgtgggcggacgcgtgggttcctctctctctatatctaaagggttctttagattttctggccagtttcttctattaagaagatggcctcccacattgttggatatccccgtatgggaccaatgagagagcttaagtttgctttggaatccttctgggataagaagagcagtgcccnatgatttgctaactctctattgctgtttcttaatgatattcatttttttatcatt

SEQ ID NO: 226930 - DNA, 351 bp, Gossypium hirsutum
ggctcagaaaaaacgaagagctcatcgttgatggataacttattgggccttcttcggattcggggtaaacggggctttaacctgggcgttcgtgatgttcgaagcagcgatccttacgttgttgttaaattggataaacagaaattgaagactcgtgtaataaagaaggatgttaatcctgagtggaatgaggatttaactctttccataacagatcctagtactccaataaaactgacagtttatgaccatgacacttttagcaaggatgataaaattggaaatgcatagattgacattcatgccggacatagaagccttgaaagtggatgtggatggtatttcgattgg

SEQ ID NO: 226931 - DNA, 457 bp, Gossypium hirsutum
cttctttcaaccgcgcctaataaccgctcggttttttctcagacgtgaaaaaaatggggctgtctttcaccaagctattcagccggctatttgccaaaaaggagatgcgtatactgatggttgggcttgatgctgctggtaaaaccaccattctttacaagctgaagttgggagagattgtcactaccattcccaccatcggtttcaatgttgagaccgttgaatacaagaacatcagcttcactgtttgggatgttggtggccaggacaagatccgaccattgtggagacactatttccaaaacatgcaaggacttattttcgtggttgatagcaatgatcgtgaccgtgtggttgaagctagagatgagttgcacaggatgttgaatgaggatgagttgagggatgctgtgcttctagtatttgcaaacaagcaagatcttccaaatgctatgaa

SEQ ID NO: 226932 - DNA, 432 bp, Gossypium hirsutum
gaaattttgtgcaaatttgaagcattctgagaggttgaattcaggagtcatggtagtggaaccatctgaagctgttttcaatgacatgatgagcaaagtcaatactttgccttcttatactggaggagatcagggttttctgaattcttactactctgatttctcaaatgcacatgtttttgaccctaatatacccgaggaggtgctgaaatcccgtcctgctcctgagatggaacgactttctactctatacaatgcagatgttggtctttacatgcttgtcaacaagtgttatttttatgatagtgatctgtgtgtatttacttatcatttttttttctttattcttggattttgtttctttttattctttgatcctttttattttcttatttttttatttcatttttattatgttttatttttattttt

SEQ ID NO: 226933 - DNA, 365 bp, Gossypium hirsutum
  unsure (1)..(365): unsure at all n locations
cgggtccgaccaacccttccgaatctgtttcgaagtctgtgatttggttctccatttttatgcaatccacagaggtggtggtcgtgtgattctaactggtcgacgatgtgtctatgcatctcancttacggccaagccaaggcttctcgagcccgtttacttagtcgagatccaagctcctgagcaagcacttgttggtttttcagtgttcttaaccagaaacgtggacacgttttctaggaaatgcatagtgcctggatcaccactctacaacataaaatttttcctttcattcatcgtgttatatttcttattcagcacactaatggctgttacatgtgtgacttgctttcccactatttgtt

SEQ ID NO: 226934 - DNA, 227 bp, Gossypium hirsutum
ccccctaattgcggcctttgatgtggagttccgcggcttcaacggagggctcgcatgggccaccgacgaccgggccctcgaagaagccttcagtgcgtttggtgaaatcgtcgaatcgaagatcattaatgatcgtgagactggaagatcccgaggctttggattcgatactatccgtgactagaaagctatgagggacgcgatcgaaggaatgaactgacaaaatc

SEQ ID NO: 226935 - DNA, 441 bp, Gossypium hirsutum
gttctccaaaacgacatcgatttgttgaacccttctgccgagctcgagaagaagaagcacaagctcaagcgtcttgttcaatcgcccaattccttcttcatggatgtcaaatgtcaaggctgcttcaacataacaaccgtatttagccactctcaaactgtggtggtgtgtggaaactgccagacggttctgtgccagccgaccggcggtagagctagactcaccgagggctgctctttcaggaaaaagggtgactaaatccgatccagcggcaacgattcgaggaagaggttttttttgtatgatcccactctggttatctttttgatgtggttaatattgtcttaaatcttcgaaggagaattaaggattttagaacgactattatgttctattgttctttgattattgtggatggttttttttgttttttttttttgt

SEQ ID NO: 226936 - DNA, 459 bp, Gossypium hirsutum
ctgactccctctcccttttccaaaaagagagagttcccctctccatctaaaaaaatggaatatcggtcgagatctatccacaaatccggctccatcatgatctccgccatcctcttcctctttctgatccacacctctcattgcttctaccttcctggtgtcgcccccgaggacttccaaaagggagatcctttgaaagtgaaagtgaacaaattgacctctataaagacacaacttccttattcatattattccctccctttctgtccaccaaaaaagatagttgacagtgcagaaaatctcggggaagtgcttcgtggtgaccgtattgaaaactctccttatgtgtttaaaatgcgtgagccacaaatgtgttctgttctttgccggattacacttgatgccaaggctgcaaagcagtttcaggagaagattgatgatgaatatcgagtcaatatg

SEQ ID NO: 226937 - DNA, 381 bp, Gossypium hirsutum
cggacgcgtgggcggacgcgtgggtggaatttgtaattttccgaaagctgaagtggccggaactgtggcctaacctcaggaatatggaaaagggtgaagatgggaagaggaaagatagagataaagaggatcgagaacaccacgaatcgtcaggttacgttttgcaagcgcaggaatgggctgctgaagaaagcatacgagctgtcagtcctttgtgatgcaaaagttgctcttatcgtcttttccacccgtggccgtctctactagtactccaacaacaacataagatcaacaatagagaggtacaagatggtatgtggcggtaccttaaacacaaataccgtcacggaaataaatgcttagttttatcaacaagtattt

SEQ ID NO: 226938 - DNA, 316 bp, Gossypium hirsutum
ttttgaaattaccctttcttcttcttcttcctcgtcggcgtcgtcgccggcgttgttctcgtcggcttcggcatcaactccggtggctctctctcgctcgccgtagattccttttcatttcttaaacatgaacgagaaggccagcgttaccaaggagctcaacgccagacaccgaaagattattgaaagtcttcttaaattgccggagaatagggaatgcgccgactgcaaagccaaaggtccgagatgggcaagtgtgaatctaggtatctttatatgcatgcaatgttctgtgatccacataagtcttggtgtt

SEQ ID NO: 226939 - DNA, 293 bp, Gossypium hirsutum
  unsure (1)..(293): unsure at all n locations
atctctttgagtgacttcttttagttctctcttcgtttcacctccgtgcacttcgaaaaatggtttctcacattgttggatatgcccgcatggcacctaagagagagcttaaatttgctttggaatctttctgggacaacaagagcagtgccgaggatttgcaaaaggttgcagctgatctcangtcatccatctggcaacatatggctgttgctgggatcaagtacatcccgagcaacactttttcttattacgaccaggtgctttatgcaacatttatgcttggagctgtt

SEQ ID NO: 226940 - DNA, 315 bp, Gossypium hirsutum
tacggaggtggcagtcccccatcatatggaggtttcagtccaccaactactcccattgatccaggaactccaagcattccctcacgtgcattctttcctgctccaactccaccaattggtggtacatgcgatttctggaggagtcaccccacactgatatggggtctgcttggttggtggggcactcgatgcaacgcatttggcgtgaccaacgctcctggacttggaacaagcatgagcttgccccaagcactctcaaacacacgtactgatggacttggggcagcttaccgggaaggaacagccttatttttt

SEQ ID NO: 226941 - DNA, 227 bp, Gossypium hirsutum
tttttgttttctaagttttcaaagctttcatgtcttcttccattacatccaagcctttccttggagctactaaacccaattgttgtgtttctcctgatcttcaaagactttctttttcctctcttcgcatctcaatcaaaccaagaacccacaaatagcttcagatacaagcagctgggagcacatttggaaattatttccgagttacaacttttggagaatctcat

SEQ ID NO: 226942 - DNA, 438 bp, Gossypium hirsutum
atcgatctcccgagagtgaagaagatacagttttcaaactagatcgaggtcttctgataaaggcttcaaattgatattgtctgggtagattgcttcttggtaaccaagatggttgtacttgcggcttcaattgtaagcaagtctggaaaagtgcttctctccaggcagtttgtggacatgactcgcataagaattgaaggtcttcttgctgcttttcctaagttggtgggaacaggaaagcaacacacatatgttgagactgagaatgtgcgatatgtttatcaaccaatagaagctctttatttgcttcttgtaacaaacaaacagagcaacattcttgaagatttggagactttaagactgctctccaagctggtaactgagtattcttactctctaaatgaggagggtattggcaagactgctttgaactgatct

SEQ ID NO: 226943 - DNA, 357 bp, Gossypium hirsutum
tattgatccacgccatcgttacgggcataatttgcatatttactatgaagagtggtgtaaagctgatgctggtcaaccatttttctactggttggatttaggtgatggcaaagatattaatcttaacgagtgcccgagatcgaagcttcgacaacaatgcatcaagtatctcggaccccaagagagggtaaattatgagtacattgttgctgaaggaaagattatccataaacaaaccagaaacgtactcgatacaatcgaaggattgaaagaagggaaatggatattcgttatgagcacctcgaagaaattgtatccggcaagaagaaagaaggaatgtttcatcaatcgagtttc

SEQ ID NO: 226944 - DNA, 171 bp, Gossypium hirsutum
ggaagttgaggactgcttgtgagagagcaaagaggtccctttcatcgacagctcaaactaccatcgagatcgattcattgtacgaggggattgacttttacaccacgataactcgtgcaaggtttgaggagctcaacatggatctttttaggatgagtttataaccagttc

SEQ ID NO: 226945 - DNA, 408 bp, Gossypium hirsutum
gttttgtatttcatactcatttagcccctttcattagcatcgaaatcactccagttttctttatcactgaaaaatgtcttgctgtggtggaaactgtggctgcggttctggctgcaagtgtggcagtggctgtggaggatgcaagatgtacccagacctgaacgttgccgagatgaccacaactgagactctggttcttggtgtagcaccccagaaagcacactttgagggagctgagatggaattcggggctgagaacggctgcaagtgtggagacaactgcacctgcaacccttgcaattgtaaatgattagagaccatagccatagctccctggaagcagagacgcctttgtctttaagaaataatatgttttagtggttatgtgtttttagaaataagtatcct

SEQ ID NO: 226946 - DNA, 440 bp, Gossypium hirsutum
gatcgatatgcaactcaagcttgttgctggcaactcatctggcactgtcactgcttattatctgtcatctcaagggccaacccatgatgagatagactttgaattcttagggaatctgagcggtgacccttacattttacacaccaatgtctttacacaaggcaaaggcaacagagaacaacagttctatctttggtttgaccctacaagaaacttccacacctattccatcatttggaaaccccaacacatcattttcttggtggataacacccccattagagtcttcaaaaatgctgaatccattggtgtaccattccccaagagccaacccatgaggatttactctaagttatggaatgctgatgattgggccacaaggggtggattagtgaaaactgattgggcaaaagcacctttcacagcttattacaggaact

SEQ ID NO: 226947 - DNA, 449 bp, Gossypium hirsutum
cttgatttcaaactcgaagtctccgccactactaccagctttctattcatcgctcaacccaatggcagtcgcttccaactcgctcgtttctttcatccacggctcattgagtcaacccggaaggacctcccactttcttccttcaccttctctttctttccccggatctcgctcgctctctctgaaactcacccgccgctccaactcgccccttctttgctctttagatgcaaccaacgccacagataaggacaccccaatcgaaacaaggttcccagcttatccaactgtgatggacatcaatcaaataagagagatattaccacacagattcccattcttgttagtggatagagtgatagaatataatccaggggtatcggctggtggtataaagaacgtgaccataaatgataacttttttcctggacattttcctgagaggccca

SEQ ID NO: 226948 - DNA, 413 bp, Gossypium hirsutum
ctaaagtaaaaaagtaaatattgtgttgaaatatggaagaacaattgatatttgcgtgggcaatgatattctgcatcgccatagcgcccgtctatggggaatactattccaagactgttacacctagttcaaaggcggaaaaagtgaccaatcttcacttcttcctccacgataccctcagtggagaaaaccctagtgcagttctggtagcccatgctaacctcaccaggaaagaccattccccagttccgtttggcagcttgtttgctatcgatgatccgctcagagtagggcctgaaccaacatccaagataatcggcaacgcccaaggactgtacctatcatccagtcaagatgcttccaagtttacaatagttttgtacgctgattttgcgtttacgactggcaagttt

SEQ ID NO: 226949 - DNA, 306 bp, Gossypium hirsutum
caggttttgaaaaatataaatttagagatcaagaaaggtgaactcaccgccatcgttgggactggaggatccgggaagtcttctagactggcttcagttcttggtgagatgcacaaaatatcaggaaaggttaagctttgtgggacgaccgcatacatagctcagtcatcttggattcagaatgggacgattgaagacaatatcctattcggtttgccgatgaaccgggagaaatatagggaagttataagggcttgttgtttagagaaagacttggaaatgatggagtttggtgatcatacagaa

SEQ ID NO: 226950 - DNA, 334 bp, Gossypium hirsutum
cccacgcgtccgaaaaaaaaaaaagaagcaaaaatacatggccaaagttctgttgttcattgctgtatgtgtgcttccagctgggggtagtgctacacgcattctgaataaccaattggtggttgaaggctatgtgtactgtgatacttgccgtgctggttttgaaacccctaagactagaaggctagctgatgccatggttaagctggtatgctccgacaggaagaccggcggagttgttttcgagaaggagggatataccgacaaaaccggaaaataccagattcgtgtatccgaggatcacttggatcagatctgtgatgcaattcttgtg

SEQ ID NO: 226951 - DNA, 343 bp, Gossypium hirsutum
gtgaaaaagagaggtgttttttctttttgaaatttgagattacaaaaacacgaatgagctgagctctgattatttcgaaagcaagtggagttcagctctctttgaagactcgaatatcgcaataaactgtgaagatttggggatcaaagctcaaagggtaaaaagtacctccgttagatctttaccgtcaaacgagagaattaaaaaaaaaatgtcggttcaagagtacctcgacaagcatatgctctctcgcaaaatcgaagacgccgtcaatgccgctgttcgagctaaaacttcggatcccgtcctcttcatctctaatcatatgaaaaaaagcggttct

SEQ ID NO: 226952 - DNA, 365 bp, Gossypium hirsutum
cagattctttcaaaagaaatcgtcaaacctgcttctccagaaattcatctaaaagaacccttgcggactctgtgtatttgatcaggtgactcccaccacttacgctccaatcatattattttatgccccgagtgataccaacacctccaatattttgactcagctgaagaaatctctttcagaaaccctaaacatcttatatcccttctctgggagaatctttagtaacatgttcatccatgatttcgatgccggtgttccgtttttatcggctcgaatcggttggtgattatccgagtttcttaagcatcatcaaattgagaccttgaacaacttgctcctatgccctgcttttttacaagggt

SEQ ID NO: 226953 - DNA, 400 bp, Gossypium hirsutum
ttcttcaattcttgtttttgtggcaaacacatggcatgctcaaggactgtttgtgtaatggatgctggcggtcaccttggctccggcgttgtccacttgctcttacatagaggctacactgtccatgctgcccttcagccccatccaaatgggttccaatcagttgaggagctgtttccttgtagtaataaaaatttgaagatattcgatgcagacccttttgattaccacagcattacagctgcattgaagggatgttgtggtttattctactgctttgagcctccatctgaccattctacttatgatgaattcatggcggaaattgaggccagagctgcacacaatgtgttggaagcatgtgctcaaacagattcaattgagaaggtggttttcagat

SEQ ID NO: 226954 - DNA, 398 bp, Gossypium hirsutum
ccaacccgtccgcgacagttcctttgattttgagttgaaaagagagatagatagaagagtagatcttggcttctctggtgggttcgattccgcttaagtatagcccgcgtttctctcaaacgtgaaaaatggggctgtctttcacaaagctatttagccggcttttcgccaagaaggagatgcgtatactcatggttgggcttgatgctgctggtaaaactaccattctttacaagcttaagttgggagagattgtcactaccattcccaccatcggtttcaatgttgagaccgctgaatacaagaacattagctttactgtttgggattgttggtgaccagtacatgactcgtccattgttgagactctactttcaaatcacccaaggacttatttt

SEQ ID NO: 226955 - DNA, 304 bp, Gossypium hirsutum
gttgaagcgaaagcttatctcttttcgtctctgtatctgatcaatcaacacctgaaaagaagaacttacaaacaacaactacgagtagtctactacccagcactagaagcagctcgtagccagccatggatgaagagtacgatgtcatagttctaggaactggtctcaaggaatgcatcctcagcggtcttctttctgttgacggactcaaggttctgcatatggattggaatgattactatggaagagagtctacatcactcaacctcattcagctctggaagaagtctataggaaatgatta

SEQ ID NO: 226956 - DNA, 390 bp, Gossypium hirsutum
ctaactttctttcccatcactatcaccactaccttccatggctgagcaacagcaggaacaacagcagtcaagatccacaggcaaggtcctttggttcgatgaccaaaagggtttcggctttattcatcccgacgatggtggcgaagatctcttcgttcatcaatcttccatcaaatccgaaggctatcgtagcctcgctgagggtgaatctgtcgagttcactgtttcccaaggcaacggaggcaagacccaggctgttgatgtcaccgcaatcggtggctctcaaatcagtaagaaggaccgtcgcactggcggcggcggttggagggctggaaacgatcggaggaacggaagcggcggttgttataactggcggggatctgaatcatc

SEQ ID NO: 226957 - DNA, 340 bp, Gossypium hirsutum
aatgaggaatggaaattgcaatgatttaggcagtgaaaaggactttggaaatcttggtagcactgggtacttttgctttgaaactgtttttggaccaaaagaatgaaaccttagatcaaaacaagaggaaacgcgcagctgaattgaggactatcttcaccagactaggccctactttcataaaattgggtcagggtttatccaccagacctgacctttgccctccggagtatctcgaggagctggctcagctgcaggtattcctgtattttatggcctagtacagcagtcaggactacatgcattagtagatgaaaaaaaagttcctataacaatggac

SEQ ID NO: 226958 - DNA, 418 bp, Gossypium hirsutum
cttccactccaaaaaactgtagctatggctaacattttcctatatttttgcctcttctgtagctgaggtgtattaactcattcaggtggtgaggaggctctggtcactcaactccctggcttttctggcacttttccttcaaatcactactctgggtatgtgaatgtcgatcaaaatcatggcaagaacatgttttactattttgtggaatctgaaaggaatccgtcagaggatccactggttctttggctcaatggtggacctggatgttccatctttgacggctttttttacgagcacggtcctttcaatggttaagcaacatatgctatttgatagtttggcccaactacattctatattccttattagtgttcccaaggtctcttaccattatttattttatattttttcaatt

SEQ ID NO: 226959 - DNA, 383 bp, Gossypium hirsutum
cttcactctcccaccccgaccgcttgattttgatcagacggtaatcatgccgatcagaaacataggcgttggccggcctgaagaagctactcatccagatgctcttaaagcagctttagctgagttcatatcaacgttaatcttcgtttttgctggatctggttcaggcatggcttttaataagctgaccgacggcggtgcaacaactccggctggtctcgttgccgcctctctagctcacggatttgcgcttttcgtcgctgtctcagtcggtgctaacatctccggtggccatgtgaatcccgccgttacattcggtgctttcgttggcgggaacattactcttttacgtggtatcctttattggattgctcaactccttg

SEQ ID NO: 226960 - DNA, 441 bp, Gossypium hirsutum
aaaaggctatcaataggctacacagaggctgagaaggttgttgcatcttcacttgcttgcttaactgattcgaagtcatcctttggatgtggggacccaaccaccaatttccagcagtgtccacttctgaatataacttactgtcctgcatcagaagctgacctgtctcatggaaagaacttaattgttgtggtctacaattctttgggatggaaaagagaggatgtcatacgttttcctgttgttaatgaagatgttactgttcatgattctgagggaagaaaaattgaatcacagcttgttccaatagttgatgcctatgtggacctaaggaagtattatgctagggcatatttaggtagcagcccaggtgatgtacctaagtattggattgcatttacggtatctgttccacctcttggcttcagcacttacaccatc

SEQ ID NO: 226961 - DNA, 358 bp, Gossypium hirsutum
  unsure (1)..(358): unsure at all n locations
actattcctactacaattcttttcttcgatccttcttttcttgaagttggggtcttagctgctgctgtttatttttatgggtaaggtggtaataanagcccaacctatataatattattattattctaatggagtcttaatgatttttactgtgatgagaatatccatttcattacatgatcttaattgaatctatctacaattctttgggatggaaaagagaagatgtcatacgttttcctgttgttaatgaaaatgttactgttcatgattctgagggaagaaaaattgaatcacagcttgttccaatagttgatgcctatttggacctaatgaaatattatgctagggcatattt

SEQ ID NO: 226962 - DNA, 332 bp, Gossypium hirsutum
cccacgcgtacgccttctctgaaaactaattgatatcgtcggctgtctctcatttctgttactgatcggtcttccgccgacgggagcacccaaaatggtagctcaccgtctatcttctactaaacctgttcaagctctcaagccaacaaagaagatttctttagaggaagataccggtaaagcctccgacgcactgccgcttcccttgtacctaacgaatgccctgttcttcaccctcttcttctcggtggtttatttccttctttcccattggcgtgagaagatccgtacctacacacctttccatgtagtaaccttttcagagatcatcg

SEQ ID NO: 226963 - DNA, 398 bp, Gossypium hirsutum
ctggtatctccaagagatggtcagactcgtgagcatgctttgcttgcttttacccttggtgtcgggcaaatgatttgctgttgcagcaagatggatgccactacccctaaatattcgaaggctaggtatgatgaaatcgtgaaggaagtctcttcctacttgaagaaggttggatacaaccctgacaagattccatttgttcccatttctggttttgagggtgataacatgattgagaggtctaccaacttggactggtacaagggccctacacttcttgaggctcttgaccagatcaatgagcccaagaggccttcatacaagcctttccgtctaccacttcatgatgtgtacaagattggtggtattggaactgtcccaattggtcgtgttgaaac

SEQ ID NO: 226964 - DNA, 442 bp, Gossypium hirsutum
tcgtccacagcgttcgtttccttctctccactccaaacaagattgaagaaaacccttaaacctgttgggctttttttttcgtttgattggggacgaaataacaatgagggaaatccttcacgtgcaaggaggccaatgcgggaaccaaatcggatccaagttttgggaagtgatctgcgacgagcacggtgttgatcctaccggaaagtacaatggagatggatcatccgatatccaactggagcggatcgatgtgtattacaacgaggcttccggtggaaggtacgtccctcgtgcggttctcatggatcttgaacccggtaccatggatagtatcagatccggtcccattggccagatctttagacctgataatttcgtgtttggacaatccggtgccggaaacaactgggccaaaagtcattacactgaaggagctgag

SEQ ID NO: 226965 - DNA, 422 bp, Gossypium hirsutum
gcacgttggtgctgttcaacctggtgaacgtgtttttgtaattgatgatttggttgcaacggaagaaactctgtcaggtgccatgagagtcttagaacgcgttggtgctcaagtggtcgagtgtgcatgtgttattggactccgcgaggtcaaggggcaacgtagacttaatggaaagccactttatattcttgtggagccacgtgagatagatggatgttattaagagaaaagtgattcatgagcaacctttgttggtttacgtttcttggccaatgtcatttggtttcctttttggctttttttggatgaggcttttttcttatttagaagtcttttattatttttttaacacttatttttattttttttcttttatttttttttttttttaattttaatatatttaattatttatcatt

SEQ ID NO: 226966 - DNA, 302 bp, Gossypium hirsutum
cccacgcgtccggaaaaagttcagcttcagttatgtcgtgttgaagaagaaactaaacgggtggctgtgattcgtgaggagggggaagcacttgcagatcctatgaggaaggaagttgctcaggtgaggaagaagattgatgcagttaacaaagaattgaagccgttaggtatctcttgccagaaaaaggaaagggagttcaaggtagcccttgatgcattcaatgaaatgaacaaggaaaaagttcatctaatcactaatttaattgttctggtgagtgaatagcgtattgtttttgattt

SEQ ID NO: 226967 - DNA, 382 bp, Gossypium hirsutum
cacaaaaacaaaagaaaaattacagtgaaaatggcaacccttaaagttccagctcatgtacctgccccttctgaggatgctgagcaacttcgtaaagcttttgaaggatggggtacaaatgagcaattgattatcgacattttggctcacaggaatgcagctcagcgcaatttgattcgtaaaacttatcgtgaagcttatggggaagatctccttaagtctttggatgaggaactttcaagtgactttgagcgagctgtggtgctgtttactttggaccctgcagagcgtgatgcatttctggctcatgaagctacaaagaggttcacatcaagccattgggttctcatggaaattgcttgcactaggtcttcacatgaac

SEQ ID NO: 226968 - DNA, 442 bp, Gossypium hirsutum
gtggaaacaagccgactgcaaaacgctgcagctgaagccctaacttttccgctcacctctgtgcgaccagccgctcctctattcggatcttccatggctacgataccagttaacccaaaacccttcttgaacaatttgactggaaagactgttatagtgaagctcaaatgggggatggaatacaaaggttttcttgcatctgttgattcatacatgaacttgcagcttggcaatgctgaagagtatgttgatgggcaattcactggaaatttaggggagattttgatcagatgcaataatgttctctatcttcgtggggttccggaagatgaagatatagaagatgctgacaaggactagatggttcacatgtggttgaaatagaacctttggtatttgattagaggtgctgtaacttttgtttatcatggttggatgtcat

SEQ ID NO: 226969 - DNA, 433 bp, Gossypium hirsutum
caatattcaagacattttcagctcgttttttgacggagggtcggtagaagaggaagagagaatggtgaagggcgatgatgtaagtgttgaattggatgcaacactagaagatttgtacatgggaggtactcttaaggtttggagggagaaaaacatcttaaaaccagctccaggtaaacgccgctgtaactgcagaaatgaggtctatcataagcaaattggtccagggatgttccaacagatgactgaacaggtttgcgagcagtgccaaaatgtgaaatatgaacgagagggatactttgtcacagttgatattgagaaaggaatgcaagatggacaagaggtggtcttttatgaagatggtgagcctattatagatggagaacctggagatttgaagttccggattcatacagcaccccatgaccgattc

SEQ ID NO: 226970 - DNA, 368 bp, Gossypium hirsutum
atcaaagcttcaaaatggcatttgtcaaggctcagaaaaccaaagcttactttaagcggtttcaggtgccatacaaaagaaggagagagggaaagactgactaccgggctaggattcgcctaatcaatcaagacaagaataagtacaacactccgaagtaccgattcgttgtccgatttagcaacaaagatgtcaccgcacaaatagtttctgctaatattgctggtgatatggttcttgcttctgcttactcacatgagcttccacgatatgggcttgaagtgggtcttacaaactatgccgcaacttattgcactggtttgctgttggggcgccgtgtgcttaagatgcttgaaatggatgaagag

SEQ ID NO: 226971 - DNA, 424 bp, Gossypium hirsutum
ctcattttaactataaatactcgtttctcttgccattttcgtttccccctagaaaaaacagatggcgaaactgaaatctctaagtctggtattcttttcccatctctttctggtttcctcttccgccgccgtattccctgtcttagacgacctacgttttgccgggtcgagttttccgtcggtgcaagcaaagaaattgataagggagttgaatttgtttcctaaagaggaagttaacctggtcgatcgaggccgagtttcgttaccccaggattcgaagctggtggaaaagcggttcaagttccccggtttggaagcccttggtggggtttctgttgaccgattgagtcatcatgctggctattacaagcttcctaattcttatgatgccagaatgttctatttcttctttgaatcacgcagt

SEQ ID NO: 226972 - DNA, 438 bp, Gossypium hirsutum
ctctcatttaccgccatcaatggctaactctcttctctcttctaacttctttggtactcaactggggctgtctcctccaacaccagaagactacaagaaagttgcaggttactcaatccatcctcaacaagaaacccaactctagccacagtgttaaaaccctccaatctcatgccactattgctgccttactcttctcttccgtagccccacaagcactcgccgttgacaacgccccacccactcccccacctgtaattgaagcccagcctacgaagccaagcccatcgaaccagtcgcccttctcccaaaacctgctcttaactgctcccaagcctcaatctcaatcctccgatcttccggagggcagccaatggaagttcagcgaattcttgaacgcattcaagaaggggaaagtggagagagtcaagttcaaca

SEQ ID NO: 226973 - DNA, 331 bp, Gossypium hirsutum
gcgtgcgcagagctttcttcgacgagcagccatttgtaatctatcatgggtcattctaacgtctggaactctcgccccaaaacctacgggcctgggtctcgcgcatgccgagtgtgtggaaaccctcatgccatcatcaggaagtacgggctcatgtgttgcagacagtgcttccgtagcaatgccaaggaaattggattcattaagtaccgctgaggaatgtgtatatggctcgaagttggaaacactttttagctagcatgaacctgtgcttcgaaattgtagcaacatttaacataacattagcgttttctcataatgtaagtgtaaa

SEQ ID NO: 226974 - DNA, 356 bp, Gossypium hirsutum
caatattcaagacattttcagctcgttttttgtctgagaggtcattctgacgaggaagagagaagggcccaaaacctacaggcctgggtctcactcattccaacactataagatccgtacatcggaggtactcttaaagtttggagggagaaaaacatcttaaaaccagctccaggtaaacgccgctgtaactgcagaaatgaggtctatcataagcaaattggtccagggatgttccaacagatgactgaacaggtttgcgagcagtgccaaaatgtgaaatatgaacgagagggatactttgtcacagttgatattgagaaaggaatgcaagatggacaagaggtggtctttta

SEQ ID NO: 226975 - DNA, 208 bp, Gossypium hirsutum
atccatttaaaccacccaaggttgcattcttttcttaggtatttcaccctaatattaacagcaacggtagcatttgccttgatattttaaaggaacagtggagccctgccctcaccatatccaaggtgttgctgtcaatctgttcactcctgacggatccaaatcctgatgacctttaggtgccggagattgttcacatgttctatga

SEQ ID NO: 226976 - DNA, 369 bp, Gossypium hirsutum
ggaaataaaatctctgaaagggaaaaaaaaactcttaatcaacagatcgaagtgaaaatggagtgcgtgttcggtttagtgggcaacgactttgccatagtggcggcggacacgtcggctgttcacagcatccttgttcacaaatctaacgaagataagatcatgatcctcgattctcacaaactcatcgccgccagcggtgaatccggcgacagagtgcagttcacggagtttgtacagtaaaatgtggccttgtatcatttccttaacagttttcctttgacaactgccgcctccgtttatttcactcgttgagatgctggccctgccctattgttgaatccttactttttggtcattcttttttgc

SEQ ID NO: 226977 - DNA, 380 bp, Gossypium hirsutum
cctctgtgccgtgtcttgcgggtttcacttctctgctagcaaaggatctgcaagatggaaagcatgaatagcttttggcagttaggagatgatctccggggacaatctaaagcctcagaggatcacaaatggttgatggttgcctccaaactggctgaacagacgaggataaagggtgagcgaatgaacaatctcgatctttcaaagggtccagctgaagtaaggacaagggataaatttgggttccatgaagacaacaaattcgagaaccttaacttcaatatgttgaacttggactccaagatcggagatagtgtaagcaaaagtaccttccgaaatggtatttacaacaccgatgctgtttaccagaaaaattacag

SEQ ID NO: 226978 - DNA, 409 bp, Gossypium hirsutum
  unsure (1)..(409): unsure at all n locations
ccggncgaccacgcgtccgctctcaagacctgggcaggaaaagaggagaatgttaatattgttcaagatgctttgctcgttatgtgcaaggctaactcagagggcggtttgggtacatacaaaggtgatgctgagctttgtgagggtgctgcatagagccttcatgtcaaagactacaaatattaagaaattaggcttgtagtcaaatatgtgatgtttagaggagtaaaattcagtattgatattatttttcttgattgtatactttttgtttttttattaaattatttcttatattattttataatttttttttttattattatacatgattttctatttttattttttttaaatattattttatttattttaattttatctatgtgtcattatatttttattttta

SEQ ID NO: 226979 - DNA, 325 bp, Gossypium hirsutum
atttgattgcgcaaaagacagccgctggtctatccaaattaggcattcaaaagggagatgccatgatgattctcctccacaactgtgccgaattcgtcttcgccttcatgggagcttccatgataggagccgtttctaccaccgctaacccgttttacacctccaaagaaatcttcaagcaattcaaagctgctcgagccaaactcatcatcactcaatcccaatacgttgacaagcttaaagacaccaataacaacaacgacggcgtcgaaaacttccccaaaataggtgaagatttcaaggtgatcaccatcgacgacccccc

SEQ ID NO: 226980 - DNA, 315 bp, Gossypium hirsutum
aattgaccttgctcgaaccctagctgatcgagatggattttcaaacatcaagtttctggttgatgatattcttgagacaaagttggatagacagtttcaacttgtcatggataaggggactctcgatgccattggcttgcatcctgatgggcctatcaaaaggattatgtattgggattcagtttcaaagttgttggcccccggtggaatattagtgattacatcttgcaaccatacaaaagatgaattggtccaagaggtggaaaatttcaatcaaaggaacattgcaatatcccaggagccaagtgcaacgaa

SEQ ID NO: 226981 - DNA, 338 bp, Gossypium hirsutum
ggaaggatgccttccacctgcgagtccgtgttcacccattccatgtcttgcgtatcaacaaaatgctttcatgtgctggagctgataggctccaaactggtatgcgaggtgcttttggcaagcctcagggaacatgtgctagagtagccattggtcaggtcctcctttcagttcgttgcaaggacagcaacagtcatcatgctcaagaggcccttcgacgtgctaagttcaagttccctggtcgccaaaagattattgtcagcaggaagtggggttttcacaaaagttcagtccaaactgatttattttgtaaatttaaagtcatgagaattaacatt

SEQ ID NO: 226982 - DNA, 252 bp, Gossypium hirsutum
ggattttgagcctccttgagtctcatctcattccttctgcttcatctgccgagtccaaggtgttgtgccttaaaatgaagggtgattatcataggtatcttgctgagttcaagactggtgctgagaggaaggaagctgctgagagcactttgttggcttacaagtctgcacaggatattgctctcggtgacctatcgccaactcacccaattaggctggttcttgctcttaacttctttgttttcttctatg

SEQ ID NO: 226983 - DNA, 216 bp, Gossypium hirsutum
cggacgcgtggggatggatgtggagaggaggcattttattttcaagcctgttattaaaaaggcaggggtagaatttgatggtgcggcgggcaataaatttgcttccttgcggtaggagcgttccattaaaaactgcttcatttttccttgtcctattcaatatttttgcccaattttttaatgcatattaccatcacttttcttttttttatcttt

SEQ ID NO: 226984 - DNA, 366 bp, Gossypium hirsutum
agaagaagtacgttgatctcgggtgcatcattgtcagccgcaagatctttgtctggacggttgggaccttggtcgtctcagccgtgcttgccggattaatcaccttaatcgtcaagaccgttccacgtcatcaccacggcaagcctcctcctgataactacactctcgcacttcacaaagccctcatgttcttcaatgctcagcgttccgggaagttacccaagcataataacgtgtcctggagaggaaactcgtgcctccgagatggaaagttcgatcccggcactacaatgaaggatctggtctgcggtttctactacgccttgatatgcttatcaagtttatctttcttttgattttttgccc

SEQ ID NO: 226985 - DNA, 320 bp, Gossypium hirsutum
ggattttgagcctccttgagcctcacctcattctttctgcttcatctgccgagtccaaggtgttgtaccttaaaatgaagggtgagtggcataggtatcttgctgagctcaagactgttgctgtgaggaaggaagctgcttagagcacttctttggcttacacgtttgcaccgtatcattgtcttagtgtcttaatgcttacttatccatttaggcttttacacgcttttatcttttttgcattcttcttttctttttctttgtcttatcatttatttttctccttctttccttttttatttttctttttttttttactt

SEQ ID NO: 226986 - DNA, 313 bp, Gossypium hirsutum
  unsure (1)..(313): unsure at all n locations
atagaagtcatatggaactcgtttgtcgtagaggtcaactgccatagggttttgggagggcttgaggtgattaacttggtcaccgaacaagtttccaattngaaagtcaatggtctattctttgccatcgggcacgagcctgccaccaagtttttgggaggtcagctggagctttactcatatggctacgttgtcactaatccaggttcaacttataccatcatgcacttttttttttcttccttagtattttcattatatgatttatttacaagctttttttttttacttatacctttttcattttaactct

SEQ ID NO: 226987 - DNA, 357 bp, Gossypium hirsutum
cgcgacccacgcgtcctcggacgcgtgggcttgtaacgagcttcgtgggtggagctggctttccacgcgggaaacatcataggggggatattgccaccacagaggggggaaacaatgcagagcgattcatccatggtggcatttccattgctgactactcccatcgaatccaactacagggcatgcaccattccttacagattcccttccgataatcctcgaaaggctacccctactgaaattgcctggatcgaccttttccgcaattccattcccttccttcaagaagagagctgatagcgatactactgtggttgatgcttcaactaaagctgagaaatttgttcaaaggtattc

SEQ ID NO: 226988 - DNA, 332 bp, Gossypium hirsutum
gttgaccagagcgggaaagggaagcataaggttcatagtcactttgacagagcgttggagagtgggccttatacgttgaagtacagaggaagcatgtggggctacaaacgattctttagaagaacaactttagaaagttctgactacattaaggatgattgcctaatcatgaactgcactgttggagtagtcagaactcgccttgagggaccaaaactgtcttctattcctgtaccgccatcagacatgggtcagaatcttagagctttgttagaatccgaagttgggtgtgatataatgtttcaaggtggtgatgagacatttaaagcaca

SEQ ID NO: 226989 - DNA, 381 bp, Gossypium hirsutum
cttaatcacaaacccaaatctccaattctgtttcatttttcagcaaagctagaaagacaatgactagaggatattgagactgcagagcaacgtggaggggagttctcggccaaggactaccatgatccaccacctgctccattgattgatgctgaagagttaaccaaatggtcgttttacagggcagtgattgccgagttcattgctacacttctcttcctgtatgtcactgtgttgaccgtgattggttacaaggtccaaaccgacccttgttaagaacactgttgaccccgattgcggtggcgttggtattcttggtattgcttgggctttcggtggcatgaacttttttcctgtttactgtacctgtgtgtttttttg

SEQ ID NO: 226990 - DNA, 350 bp, Gossypium hirsutum
gcaaagctcctctcttcttcctcttcattttcctctgaattctttgtctctatttaaaaaaaaagagcaatttttttgaggtggtagtgtacaaaaacaaaatgaagatctgttgcattggagctggttatgttggtgggcctacaatggctgtgatcgcgcttaaatgtccggatattgaagtggctgtcgttgatatctctgtacctaggatcgctgcctggaacagtgaccagctcccttttctatgagcctggtcttgatggtgttgtgaaggagtgttgtggcataaaccttttcttcattactgttgtagagaaacattgttgtttgaggctgtttattgcttt

SEQ ID NO: 226991 - DNA, 413 bp, Gossypium hirsutum
ggaaggatgccttccacctgcgagttcgtgttcaccctttccatgtcttgcgtatcaacaaaatgcgttcatgtgctggagctgatagggtccaaactggtatgcgaggtgcttttggcaagcctcagggaacatgtgctagagtagccattggtcaggtcctcctttcagttcgttgcaaggacagcaacagtcatcatgctcaagaggccctccgacgtgctaagttcaagttccctggtcgccaaaagattattgtcagcaggaagtggggtttcacaaagttcagccgaactgattatttgaaatataagtcagagaatcacattgtccctgatggtgttaatgctaaagctctttggatgtcatggacctctagctaatcgggagccaggaagagcattccttcatgc

SEQ ID NO: 226992 - DNA, 420 bp, Gossypium hirsutum
cccacgcgtccgagtacaacggatcttggtacataaagaaaactaaagaagcggacctttaaagttccactgaagatagtggaggagaacaacaggacctggaatgcctttttcaaaagaatctttggctgaatctaaacatagattggaagcattggacaagaaggatgcagagcgaagaagaacagcagagttaaaaaataaccttgaagaatatatatatgctacgaaagagaagcttgaaacatctgaagactttgaaaaagtatcttcaaatgatgagcgccaatctgttatcaaaaagcttgatgaggttcatgtatggttgtatactgatggtgtagattcgattgtcttattttttcaagttctgtttatgtttattttatgttacttttttttttcatttttttttttttt

SEQ ID NO: 226993 - DNA, 381 bp, Gossypium hirsutum
ctagttctagatcgcgagcggccgccaaaacgtgtgcaagtgcatcaaatcggcggtgaacgggattccgtacaccagcaataacgtcaatctcgcagccggcctacctgctaaatgtggtctccaactcccttacagcatcagcccctccactgactgcaacaaggtgcagtgaggttgatgatgatgatatggaaggagtggaagaaggttccagcttagcttatataagtatcttgctaaagttataaaattttatttaggttgttttttatttttagatatatatttgtttaatttttattaaaatgttgttattctttttttatatatttctttattttgttttttattattattattatattttatttttatatt

SEQ ID NO: 226994 - DNA, 320 bp, Gossypium hirsutum
ccacgatttccaccccttattctataagtttgatttaactgctagacacaccacgctcatttctgggttctgttttccttggtctgtggtacattcagcaaaggggggctctgagatcacataccaaaatggtgaaagccgttgccgtccttagcagcaatgaaggtgttagcggaacttgtttcttctcccaagaaggagatggttcaactaccgtgactgggaacctctctggtcttaaggccggactccatggctttcatgttcatgccctaggggtcataacttacgggtgcatgtctactggacccctatataat

SEQ ID NO: 226995 - DNA, 387 bp, Gossypium hirsutum
cccctaaaaagcttgtgcttggatatggctgaaaactccagtaaaatggctgtttctcattctagcaagctgcctgtgtttcgctttcgtgctctcggaaagcaacttattgataaagaagacctacatcgtccaaatgcacaagtctgcaatgccagcatcattctcaagtcctctggaatggtactcatcgaaattaaagtcggtaatgtccgatacccagagtgaaggtgaaggagatggtgaaaaataggatcatctatagctaccaaaatgcttttcatggtgttgccgctcagttaactgaagaagaagctgagaggctaaaacaagaagatggtgtagttgctatactttcagagaccaattatgaattacacaccacaa

SEQ ID NO: 226996 - DNA, 384 bp, Gossypium hirsutum
cccacgcgtccgatttcgaaagaggttttcgattactctgatcgaagaattaaagggataagtaaacaagattggtagaatggctctagttgctggaggatcgtcaacattgaaccccaatgcccctctgtttgttccggctgtttatcgccaagtggaggatttctcacccgaatggtggaaactggttacgacaacaacttggtaccgtgactattggatcagccagaaccaggatgaagatggcttttacgacaacaccgaggatgatgtatttgatgtcaatgacattgttgatttgctcgcagatccctttgactttgtctctgacgaagatctccagttcgaagagttcatccaatctaatgaaatggaaaccatagc

SEQ ID NO: 226997 - DNA, 269 bp, Gossypium hirsutum
atactctcttccactcagtggcactgaatataaccagtaagctacctaactcagtttctggtcatggtcaaaatgttactgaacctaggcctaatgcaactcaaaacgaagaatgtcgcgccccttctccaacagctcttcagactcaggcagatcttctatcttctgttattgagagggtgggtgagcttgaacagaaagtagttacactacaagcgaagccatctaatatgtcttatgagaaagaggagttgttgaattttgctgta

SEQ ID NO: 226998 - DNA, 358 bp, Gossypium hirsutum
caggaggaagaatccttcccttttttcttttttttcccagaaagagcgattcctttcccttccgttctagttcctcgtttactgtgtcttcttctttcccttctgattataataagatttgggtttcgttatcctctgaaactctcgtctctggtttgaaaggagattgaaaaaatatggctgaagaacatagatgtcaagcaccacagttatgtgccaacaactgtggatttttcggaagcccgacgactcaaaatctttgctctaaatgttatcgcgatcctcaacttaaagaacaacaatctttctctgccaaacaagcctttaatcacactttcgttccttcgtcgtcttcatt

SEQ ID NO: 226999 - DNA, 322 bp, Gossypium hirsutum
tgcaaggaaaaaaaaaaaaaaccagacatggctttcaacactgttgcatccgctgctcttcttggtaccttgaacttgttggtctggactttggttagctctacctacgtgccttgcccaccaccaccaaagagccacaagcctacccacaagagcccaccctcggcacctaaacagccagccacttgccccaaagatacactgaaactaggtgtttgtgctgatttgttgggctcggtgcgcgttgttgttggacctgctaggtccaaatgctgctcactcatttcgggtttggctgattctcgatgctgttttttacctt

SEQ ID NO: 227000 - DNA, 303 bp, Gossypium hirsutum
cagaaccctctctctttctgtctttttccctcgcattttttctagggttgtccacctccaatccactgtatcatttcccagagctggggtgccccttgaaatggctgccgtgactgcagctcagccgcgctcttccaagaccgagtcctacgttgacaacaagcgcaaagaagacattctccaagccaacatcaaggctgcccgagctgtggctgactcctttcgaaccagcttatgacccaattgtatggacaaaattatctcaaccgccttctgctaattcttcaatattcaactatcttt

SEQ ID NO: 227001 - DNA, 320 bp, Gossypium hirsutum
  unsure (1)..(320): unsure at all n locations
ggaatgttacgtacggtgacatttaccctcttggtgatcgtcaaacgggtcttctcataaattggcaatttccaggccctgatatggactctgttaccaacnataacctcatcatcaacgtctataacaacttaaacgaatcttttctcctctcctggaatggagtccaacaaatgaggaactcgtatgaagacggcgtgtttggcacaacctgccctattccaccaggaaagaacttcacatacatgcttcatgttatggatcaaatagggagtttctattactacccatcacttggattccacaaggcagttggtgtc

SEQ ID NO: 227002 - DNA, 315 bp, Gossypium hirsutum
ccgatcttgacatcagatacatgattaaaatctgtaagatgcttggtttggcagctcttgtagaggtgcatgatgagagggaaatggaccgcgttcttggtatagaggggattgaacttattggtatcaataatcgtaaccttgaaacatttgaggtagatatcagtaacacaaagaagcttcttgaaggagagcgtggccagatgattcgcaagaaagatataattgttgttggagaatcggggctttttactcctgatgatgttgcttatgtccaagaagccggtgttaaagcattttttgttgttgagtgga

SEQ ID NO: 227003 - DNA, 458 bp, Gossypium hirsutum
cccctaaaaagcttgtgcttggatatggctgaaaaccctgtaaaatggctgtttctcattctagcaagctgcctgtgtttcgctttggtgctctcggaaagcaacttattgataaagaagacctacatcgtccaaatgcacaagtctgcaatgccagcatcattctcaagtcctctggaatggtactcatcgaaattaaagtcggtaatgtccgatacccagagtgaaggtgaaggagatggtgaaaataggatcatctatagctaccaaaatgcttttcatggtgttgccgctcagttaactgaagaagaagctgagaggctaaaacaagaagatggtgtagttgctatacttccagagaccaagtatgaattacacaccacaaggagtcctatgttccttggattgaaccagaagaaagtactagcatttggtctcaaaacctgcagatcatgatg

SEQ ID NO: 227004 - DNA, 419 bp, Gossypium hirsutum
ctcgaacccagaattcgcagtttcttcctaacaattccctgttggatgcttggtagaaatcgtggaaaactctaataaagggagcgactttatttcatttatgtttgccaccaatggcatctccttcgcagtcaactaacttccccaccatcatcttcatcttgttttcattcgttctcatccgaaccataaatgccgttcctttcatcgtgttgcacggcattagtgataaatgtagtggccatggagttactcgatttactaagcttctaagcagctggtctaattctcaaggatactgcgtggaaattggagatggttcatgggattcatggactatgccccttttggaacagacatcaattgcttgtgaaaaggtgaaaaacatgactgaacttagccaaggttacaacatggtt

SEQ ID NO: 227005 - DNA, 262 bp, Gossypium hirsutum
ggaggacagttcctttggttttgagagaaaagagttgatcttggcttctctccttcgttcgagtgggcttaattatagcccgcgtgggtctcagacgtgaaaaatggggctggctttcacaaagctatttagccggcttttcgccaagaaggagatgcgtatactcatggttgggcttgatgctgcgggtaaaactaccattctttacaagcttaagttgggagagattgttactaccattcccaccattggttttaattgt

SEQ ID NO: 227006 - DNA, 363 bp, Gossypium hirsutum
gcgagttaaagagaccgagggatctctttgtcttctcagattttctctttccatctctcaattctgagaaccctaatttctctgctggtccttttgcttaatcaatcgatcctcgtcaatggccaacagtaatctccctcgaagaatcatcaaggaaactcaacgtctcctcagtgaacctgcacctggaattagtgcttcaccatcagaggataacatgcggtatttcaatgtgatgatccttggtccaacacagtcaccatatgaaggtggggtttcaagttggaactatttttgcctgaagaatatcccatggctgctcccaaggttcgatttcttacaaagatatatcattctaacatt

SEQ ID NO: 227007 - DNA, 268 bp, Gossypium hirsutum
gccttttcaggatggggaactaatgagggcttaatcatagatatattgggtcacagaaatgccgagcgcgaaacttgattcgaagggctacgctgaaacctatggagaggatctcctcaaggcactagacaaggagctctcgaatgactttgagaggctggttttgctttgggctcttgatcctgctgaacgtgatgcccttttggctaatgaagccaccaaattgtagactttaagcatttatgtccttacagaaataatttgcaca

SEQ ID NO: 227008 - DNA, 402 bp, Gossypium hirsutum
ttctcgcttctgattcaaatcagatcttaagaaaaccgtgaaccgcatcgatctgatctgcaaaatgactagggatttcgtagggcaaagaatataaacgaaagaagaaatggcgggggcagcatctgcactatttcttctagatataaagggccgtgttctggtgtggcgtgactaccgtggcgacgtctctgctgctcaagctgaacgcttcttcaccaaactcatcgaaaaagagggagatccgcagtcgcaagatccagtggtgtatgataatggagttacgtacatgtttatacaacacagcaacgtgtacttgatgactgcaacaaggcagaattgctatgctgccagtcttcttttcttcctttaccgtgtagttgatgttttttagctttattt

SEQ ID NO: 227009 - DNA, 473 bp, Gossypium hirsutum
  unsure (1)..(473): unsure at all n locations
cgtcgcttcgccatggcatccgagaagaagctgtcgaacccaatgagggaaattaaagttcaaaagcttgtcctcaatatctccgttggtgaaagtggtgatcgtctcacccgtgctgccaaggttttggaacaactcagtggtcaaacccctgtcttctccaaagctaggtacactgtgagatctttcggaatcaggcgtaatgagaagattgcttgctacgtgacagtgaggggagagaaggctatgcagcttcttgagagcggtttgaaggtcaaggaatatgagcttttgaggaggaacttcagtgatactggctgctttggattcggcatccaggagcacatagatcttggaatcaagtatgacccttcaacccggtatctacggtatggatttctatgttgttcttgaacgagctgngtaccgtgttggccgtcgtcgcagatgcaagtcacgtgttggtattcagc

SEQ ID NO: 227010 - DNA, 333 bp, Gossypium hirsutum
tgaatatctcctgaagggaataaaaacggtatatgctaatgttagaggtttagcaaatagaggaggaattaccaaggataaggcggaaaaagctctctcaatgcttaaaggagttctggattactctgaatttaaagacgtagacatggtcatagaggctgttattgaaaatgtcgctttaaagcaaaaaatattcagtgagatagagaaggcttgccctcctcactgcattttggcaacaaacacatccactattgacctcaatttaatatgaaaaaaaatgaactctcaagatctgtctatttgagctcactttttcaagtcctttccatc

SEQ ID NO: 227011 - DNA, 353 bp, Gossypium hirsutum
ggtaaacaaaaatggatggttattgtagcagaagggtaatcatgtttttggtgtttgcatttgcggcaataagcagagggtatggacaagaatcaaccactcttgttcctgcaatcatcacctttggtgactctgtggtagatgtgggcaataatgactatctccctaccatcttcaaggctaactatcctccttatggacgggactttgccaacaaaaagcctactgggaggttttgcaatggaaaattagccactgacatcactgctgaaactctggggtttacaacttatccaccagcttaccttagcccagaagcatcagggaagaaccttctgcttggagccaatttt

SEQ ID NO: 227012 - DNA, 428 bp, Gossypium hirsutum
gtggcctctggcattttccagatcatcaccgcagtcttcacctttcagcggctcgtcaacaccctcggtactcctaaggatacgccggagctccgagaaaagctgcataaaacaaggctacatattgggcaattagtgaaggacacttcggctaaacttaaacaagctagtgaaacagatcacagtgccggaattagtgccagcaagaaggtagcagatgctaaacttgcaaaagattttcaagcagttttgaaagagtttcagaaggctcaacgacttgcagctgaaagggaaacatcatacgctccatctgttcccaaggcagttcttccttcaagttactcggctgatgaggtagatgtagattcagatggaggggctggtcagcaaggctttctttttgaatcaagaagacagaatggttttgt

SEQ ID NO: 227013 - DNA, 441 bp, Gossypium hirsutum
cggacgcgtgggctcagttcaggaaaatctctggctatgttacccaaactgacaatctttttcccctccttacagttgaagaaaccctcatgtttagtgccaagttacgtttaaggcttcctcaagctcagttgagtagtagggttaagtccttgatccaggaacttggactagagcatgtagccatggctcgagttggtgatgatcgggttcgtgggatatctggtggtgaaagacgacgggtttctataggtgtagatgtgattcatgatcccaaagtgttgattcttgatgaaccaacttcaggtcttgatagtacgtctgcacttcaaattatcgatatgctcaaggtcatggctgaaaccaggggaagaacgataattctcagtattcaccagccttggtttcgggttggttaggttatcaagtcgatgcttttga

SEQ ID NO: 227014 - DNA, 302 bp, Gossypium hirsutum
  unsure (1)..(302): unsure at all n locations
cccacccgtccgcaaccctcttcctttcccttacttgcacagagacagaaatccaaggagtttgggggcaaaaccctaacccccagagcagtcaccccagtaagctatctatcgtctctcaatcatccttattatcagtcatggctgctgcagctccagagggttctcaanttgatgctcgccagtatgatgctaaaatggatgaacttgaagctgtggggcaagatttctttacctcatataataaggtttattaccacttttgatgttatgggaatgcaagaaaatctttttaagggcat

SEQ ID NO: 227015 - DNA, 398 bp, Gossypium hirsutum
cccacgcgtccgccacgctttaatttgtttttgcttctctcgctttatttctcgtatattaatggcgggtcggggtaagactcgtgggatccggagcctcgaagaaggcaacatcaaggagtagcaaggctgggcttcagtttccggtgggtcgtattgctcggttccttaaagctgggaaatatgctgagcgggtcggagctggagctccggtttacctcgccgccgttcttgaatatcttgccgctgaggttcttgagctagccgggaatgcagccagggacaacaagaaaacccgaatcgtgccacgtcacatccaacttgccgtaaggaacgacaaagagctgagcaagctgttcggcgatgtgacgatcgccaatggtggtgtgatgcccaac

SEQ ID NO: 227016 - DNA, 413 bp, Gossypium hirsutum
atcactcgtcctggtattaacggtacagcgtttcgattttcatagagaaacctcgaaacttctacgtagtgagaggaaagtttgagtacgtgcgatggctcgctcgtggagagcaagcggctctttggtggctctagctatagtcttgtccggatgcttctttgcaatctcaattgccaaggaggaagccgcgaaattgggaacagtcatcggaattgatcttggtacaacttattcttgtgttggtgtgtacaaaaacggtcatgttgaaattatagccaatgaccaaggtaaccgtattactccatcgtgggtggctttcactgacagcgagaggctcatcggtgaggctgcaaagaatcaagcagctgttaacgctgaaagaaccatctttgacgtcaagagacttattg

SEQ ID NO: 227017 - DNA, 420 bp, Gossypium hirsutum
  unsure (1)..(420): unsure at all n locations
cccacgcgtncgtccacgcgtncgctttttttttcttttcgactttcggctactgagtcaccaaacgagttaaggaaaagagagacaagtttcaccaaaccatggggtcgatccccgatcctggcgagttgaccgagttaacccagccgagtttcgatgagttccagcgtcaaacgtctctgatgacgagctgtactctcctctggaaagaactgtcggatcacataaattcacttgagcagaacctgataaagcagtcggagaccttgaaacgcaaaatcgaggcactggactcggagaccaaggcttcactcgactcactcaagaagcgggaactcagtatcgaggacagtgtcaagatcgcactcagccgagtcgagttcaacaccaaagctgccatgaggacccttggcgatgacg

SEQ ID NO: 227018 - DNA, 366 bp, Gossypium hirsutum
  unsure (1)..(366): unsure at all n locations
cttagacatgcagctggagaagcacctgagccgagtttggtctaggaacattgagaaacaaaggccagctgaggaatgggagattgatttggctaagttggatttaaggaatgttatagctcatggcacctatgggactgtttatcgtgccacttatgataatcaaaatgttgcaggaacctgagccagatgaggaagtagaaaatgaagcagatgaaaggctgttgttgagttcatggctgatctcgttgccaagagggataccaaggcaacaccaccaaagaaggagaaaggttgttggttcaggttttgctcgatntgttagccgctccggtctccaaatacgttccacaagatgtgtctcgt

SEQ ID NO: 227019 - DNA, 411 bp, Gossypium hirsutum
  unsure (1)..(411): unsure at all n locations
cccacgcgtccgccggaaggcgtnttgatacacgcccccatttattttatttttcaaacaaattttcccttcaattgtcgtataatttcctaggaaaagaaatatgagagagtgcatttcagttcacatcggtcaggccggtattcaggtcggaaatgcttgctgggaactttactgtctcgagcatggcattcagcctgatggccaaatgccaagtgataagactgttggtggaggagacgatgctttcaacacctttttcagcgaaactggtgccgggaagcacgtccctcgcgccatctttgttgatctggagcctactgttatcgatgaagtgaggactggtacctaccgccagttattccaccctgagcaactcatcagtggcaaagaaagatgctggcaacaatt

SEQ ID NO: 227020 - DNA, 439 bp, Gossypium hirsutum
gcgctttctacccccattatttccggaacaagccaagggagtggagagtacttttcccgggtcggagtcggtaaaccggctaaacaattctacatggttcttgatactggaagtgatatcaactggattcagtgtgagccctgtaacgaatgttaccaacaatccgaccccatatttaacccatccgggtcctccacttacagcccggttacttgcgaatcaaaacagtgctcttctcttgaagtttccgcttgccgtagcgggaaatgcctataccaagtctcgtacggtgatggatcttacacggtgggtgatttcgttaccgagacagtgtcgtttggaaactccggtaacatgaatggagtggctttgggttggggccatgattatgaaggctgtttgttggagcggggggtttgtttggactcggggtggaccc

SEQ ID NO: 227021 - DNA, 450 bp, Gossypium hirsutum
gtggtatcaccattgatattgccctgtggaagtttgagaccaccaaatactattgcaccgttattgatgcacctggacaccgtgactttatcaagaacatgattaccggtacctcacaggctgactgtgctgttctcattattgactcgaccactggtggttttgaagctggtatctctaaagatggtcagactcgtgagcatgctttgcttgcttttaccctcggtgttaggcagatgatttgctgctgcaacaagatggatgcaacaaccccaaagtactcaaaggcaaggtttgatgaaattgtcaaggaagtctcttcttatcttaagaaagttggttacaaccctgagaagatcccattttgtcccaatccttggttttgagggtgacaacatgatcgagagatctacaaacctcgattggtacaagggttctactcttcttgag

SEQ ID NO: 227022 - DNA, 476 bp, Gossypium hirsutum
gacccatgcgtacgatataaaaaatgaagctcttgtttctaactttgttgctttgttctcttcttctatgttcttcagtttttgaaccaacaatggctcagcctcgttcacctttttgtgaagggaaatgcaaagggaggtgcaataaagcggcggtttgggatcgatgcttcaaatattgcggcatatgttgcgaggagtgtaaatgtgttccttccggtacttttgggaacaaacacgagtgtccttgctacagagacaaggtgaataacaagggcaaacccaaatgcccttgaaaatgaaatatattcgagttcgggatttcatcaagcttaaagatcgaggacgaagaggctatatatatatatgcatgctgatggtgttattataaaaatgaactggtttattgctgttggtttcccttgggtttttggtttggtagcggtgaataaaactttccttatatttttccatca

SEQ ID NO: 227023 - DNA, 316 bp, Gossypium hirsutum
tgataagttggtagaagcaatcaaagcaaagaagaatggtaaggctgttatcgttggtggaggttatattggtcttgagcttggtgcagccttgaaaattaacaatcttgatgtcagcatggtgtacccggaaccatggtgcatgccccggcttttcacctctggcatagctgctttttatgagggttattatgctaataaagggatcaaaattataaagggaacagttgcagttggattcacctttgactccaatggaaaggtgaaggaagttcaacttaaggatgtcagtgttctgtatgctgacattgttgtg

SEQ ID NO: 227024 - DNA, 373 bp, Gossypium hirsutum
cccacgcgtccgatcagtcaagaaataaaccatggcaacgaatgaagtaaaagttttgggttcctggccgagtccatatgcgatgaggccaaggattgcccttaacctcaaatccctcacttacgaatacattgaagagaagttatgggaaggcaaaagcgagcttcttctccaatcaaaccctgtttacaagaaaatcccagtcctcattcacggcgataacaagccaatctgcgaatctctcatcatcgtacaatacatcgacgaggcttggtcttccggtccttctattctttcttctgatccctgtgaacgtgctgtcgctcggttttgggctgcatatcttgacgacaagtgtgtcccagcggtgaaa

SEQ ID NO: 227025 - DNA, 424 bp, Gossypium hirsutum
ctcctccttcccctttagccgtctttccctcccttcctctcagatcaaagcttcaaaatggcatttgtcaaggctcagaaaaccaaagcttactttaagcggtttcaggttccatacaaaagaaggagagagggaaagactgactaccgggctaggattcgcctaatcaatcaagacaagaataagtacaacactccgaagtaccgattcgttgtccgatttagcaacaaagatgtcaccgcacaaatagtttctgctaatattgctggtgatatggttcttgcttctgcttactcacatgagcttccacgatatgggcttgaagtgggtcttacaaactatgccgcagcttattgcactggtttgctgttggggcgccgggtgcttaagatgcttgaaatggatgaagagtatcaaggcaatg

SEQ ID NO: 227026 - DNA, 453 bp, Gossypium hirsutum
gttatctctgaaggtgtcttaataaacgccttctttttaccttcgatttccatttacttctctattgctacgtttttgaatttttagtgagcgaaaatgagagagtgcatttcagtccacatcggtcaggctggtatccaagtcggaaatgcctgctgggaactttactgccttgaacatggaatccagcctgatggccagatgccaagtgacaagactgtcggaggaggtgatgatgcttttaacacctttttcagtgaaactggtgctggaaagcacgtccctcgtgctgtctttgtggatcttgagcctactgttattgatgaagtgaggactggtacttaccgtcagcttttccaccctgagcaactcatcagcggcaaggaagacgctgccaacaacttcgctcgtggccactacactattggcatagagatcgttgacttgtgcttg

SEQ ID NO: 227027 - DNA, 242 bp, Gossypium hirsutum
ctgcctttaatttatttggctgctaactctggtgcccgtattggggtagctgaagaagtcaaagcctgttttaaagttggttggtctaatgaatccagccctgagcgtggttttcagtatgtctacttaactcctgaggattatactaagattggatcatcagtcattgcacatgagatgaagctggccagtggagagagcagatgggtgatagataccattgttgggaaagaggatggttt

SEQ ID NO: 227028 - DNA, 417 bp, Gossypium hirsutum
ggagactggcgcgcgttctacaccctgatgtctcggctaatggtcgaaacgacgtcgctgccaacgagttcatcaaagtacatgaagcctactctacgctatcggatcctgagaaacgggcggattatgatcgaacgttgttgttcaggccaaggcggtccttttctgtttccgtcgaatcgatggccggtccaacgttttctgggttttctggttattcgaaacgaacatgggaaaccgatcaatgttggtgatacttgagataaactgtgaaatccatagatggattttggtttattttcattctttttggcttttggggaattactgatttggtgctaatttcgcctgtaaaaatagaaatatgttaactaaaacaaggctgttttttttttattaaaaaataataaaaatatt

SEQ ID NO: 227029 - DNA, 441 bp, Gossypium hirsutum
ccaggactcttcgccaagccatggctcggtgggtcactcgagccatcaagttccggttctgccccatccttgaagaagctcaagccaaaagtgagcctgttgatctacaagacgtattgcttcggctcacgtttgataacatttgcggattagcttttggaaaagacccggaaacatgcgctcaacgactccccgagaacggcttcgcttctgcttttgaccgagccaccgaagcatctcttcaaaggtttattttgccagaggttttatggaagcttaagaaatggcttcggcttggattagaagccagtctgagccgaagccttgtccacatgaatgagtatttatccgacgtaatcgttacacgtaagcaagaactgctgagtcagtagaaagatgggaacccacacgacgatttgctttcaagattcatgaggaaaa

SEQ ID NO: 227030 - DNA, 449 bp, Gossypium hirsutum
cggacgcgtgggtttgaattaataaaaacaaaatttatataaggagagagaacaaacaaaaaaagtcttctctatctttgttctcgcctttaacatcaacaacaaaaagaaaaacagaattatcgaaggaaagatctgaaagagaatggcaacttttgcagggactacccagaaatgcaaggcttgtgaaaaaactgtttacttggttgaccagcttactgctgacaacaaagtttatcataaagcttgcttcaggtgccaccattgcaagggtacccttaagctaagtaattatagctcctttgagggtgtcttgtattgcaagcctcactttgatcaactatttaagatgactggcagcttggataaaagttttgaaggaactcctaaaactgttagggtagaccgatcaacttgaccaggtcaccaacagcaaattttcgggattg

SEQ ID NO: 227031 - DNA, 464 bp, Gossypium hirsutum
accggaacggcaggcccgacccgacgcgtccgaaacgacaacgtttccagatccacaatggcttctacattcagcggcgatgaaacggctccgttcttcggctttctcggcgccgccgccgctcttgtcttctcttgtatgggagctgcatatgggaccgctaagagcggtgtcggtgtggcatctatgggtgtgatgaggccagaattggtgatgaaatcgattgtacccgttgttatggctggtgtcttgggtatttacgggttgattattgctgtcattattagtaccgggatcaatcctaaggcaaaatcgtattaccttttcgatggttacgcccatctttcatctggtcttgcttgtggccttgccggtctttctgctggaatggctattggaattgtcggtgatgctggtgtcagggctaatgcacaacaaccaaaaccttttggtggaacgatact

SEQ ID NO: 227032 - DNA, 456 bp, Gossypium hirsutum
gacagccaccaacttttgtccccctaactatgctttatctagtgacaatggcgggtggtgcaatcccccacgagaacactttgatttggccgaaccggcattcttgcagatcgcggaatatcgagctgggatcgtccctgttatgttcagaagggtgtcatgtgtgaagaaaggaggcatcaggtacaccatgaatggacattcgtacttcaacatggtgttgataaccaacgtgggaggggcaggggatataacgtcagtgtccatcaagggttccaaaacaggatggctacctatgtccagaaattggggccaaaactggcagagcaatgcttaccttaacggccaaagcctctctttcaaagtgactgccagcgatagcaggactatcacaaactacaatgtagtgcccgctggttggcaattcggacaaacttttgaaggaggccagtttta

SEQ ID NO: 227033 - DNA, 238 bp, Gossypium hirsutum
ttagaaggtgtcttaataaacgccttctttcttcttcttcttattcctttattgctttttagaatttttcttaatcgaaaatgagagagtgcatttcgatccacatcggtcaggccggtatccaggtcggaaacgcttgctgggagctttactggcttgggcgtggaataccagcctgtgggtagataccaagtgacataaacttgtggagggggggatgatgcttttaacacctttt

SEQ ID NO: 227034 - DNA, 355 bp, Gossypium hirsutum
ggcggagagcgtggcgcttttaggcgcggcttctttggtatgaaggggtgaccgtggtccaagaggcaggcgccgtggccgcaaggacgaagaggagaaatgggtacccgtcacgaaactcggccgtttagtcaaattcgggaaaatcacgtccctcgaacaaatttaccttcactctcttcctatttaagagtaccaaatcattgaccagctcgtcggccctttcttgtaagacgaagtcatgaagattacttccgttcagaaacaaacacctgcaggccagcgcacgcgttttaaggcctttgtcgtcgtctgagacggaaacggacacgtcggattgggtgtcaagtgcagc

SEQ ID NO: 227035 - DNA, 318 bp, Gossypium hirsutum
ctttctctttatattcatcactcgaagcaaaagtaaaagggaaaggtaaaggagggttttgaggagggtgaaagatggctggttacagggcaaaagatgactaccactttcttttcaagggggtgcttatcggggatttgggaggaggcaaggctaacctttttttaagggtcaccaagaaccaggttaaccttgagttcaaaggcactattggcggtgaggtcgcttcttggagcttggatggtgaaggtgagggcattaaggcttaaatttgggacactggtgggcaaaaaagggaccggggtattaccaggggct

SEQ ID NO: 227036 - DNA, 368 bp, Gossypium hirsutum
gcagtcttgcattttgttttcccttttttttccccacacctttttttaaacccatttgctaaaaatgcactgggttcttccagtgttgcttgccgttatcggagttactgcactgctcgatgtaactccggtaagtgggtaccgtccatggccgtacttaaaacccaacagctccgacttaatgttcggaggctctaataaatttgagggctcatcggagtttatccatatgagatatcatatgggtccagtccttactgctaatatcaccatccacccaatctggtacggccggtggcagaaatcccagaagaaaatcatccgtgagttcatcaactagatctccggcgttgattacaaacaccctt

SEQ ID NO: 227037 - DNA, 402 bp, Gossypium hirsutum
gccaattgtttgagctagctagctcttactcaaatggcaaccaaaacgatgatgttgcaaatattttcacttttcttctttttggtcagtatctgcaactccattttccttggtgctaatggagatgacaatggtggttggcaaactgcccatgccaccttctacggtggtgctgatgctaccggcacaatggggggagcttgtggttatggaaacctgtacagtcaagggtatggaacgagcacagcagctttgagcactgcacttttcaacaatggcttgagctgcggtgcctgctacgagctccggtgcaacaatgatcctcaatggtgcattagtcgaaccataaccgtgacaggcaccaacttttggccccctaactatgctttatctagtgacaat

SEQ ID NO: 227038 - DNA, 449 bp, Gossypium hirsutum
  unsure (1)..(449): unsure at all n locations
gagaagtcggccttattactctctaaagactactgaacaaccttcagaaaagaagaaaggatttggtgattggatgaacttgatgaagcctggcaccgaggagaaagatcattgggtccctgatgaagctgtttcaaagtgtactgcatgtggaactgattttggagcttttgtgcgcaagcaccactgcaggaactgtggggatattttctgtgacaaatgtactcaaggtagaatcgctctaactgctgatgagaatgctcaaccagttagggtttgcgaccgatgcatggctgaagtgactcagaggctgagtattgctaaggaaacagcaagtaaacctgctgctttacagagtcatgaggatcttgctaggaagctngaggagatggaaaaaaattgcagagcatcatcaggttccaagtcagatggatctggtagacggatga

SEQ ID NO: 227039 - DNA, 459 bp, Gossypium hirsutum
atcgttctcaactcgtctctccggcttcatttcctttttgctcagatctcctcatctctcccactttttttctttcttctaatacccaatggccgtcactttctcaaatctccacaccgagtctggtcttaaagctcttaatgacttcctctctggaaaatcttacatctctgggaataagctgaccaaggatgacataaaagtttatgctgctgttctgaagaaccctggtgattctttccccaatgttagccagtggtataattctgtttcttctcaacttgcggccagcttccctggcaaagctgttggcgttgggtttggtggcaaagctgctccagctgagtctgctaaagctgaggctgcagatgatgacgacgacttggatctattcggtgatgagacagaggaggataagaaggctgcagaggagagggaagctgcaaagaagtcagctaa

SEQ ID NO: 227040 - DNA, 430 bp, Gossypium hirsutum
cggacgcgtgggtccaaaaatgatgatcggagatttaattcaaccaaatcccaccatcaaaatccccgtaggggacccattcaacgatccgacggctagctttccctccgttaactttaactacaacaatgcagtcagtagtccttgccccgtcgattacctcgggtctctccaccgttacctaccgtcaaacgactacgagtccgattcgtttagtgatgattcggacttgcctgttgatgcattctcatgcgaccatttccggatgtacgagtttaaggtgaggaggtgtgctcgtggaaggtcacatgactggactgagtgttcgtacgctcaccctggtgagaaggcccgtagaagggtcccgcataagtttcattacctttgtaactgtttgtcccgattttcgtaagggaagctgtttgaaagg

SEQ ID NO: 227041 - DNA, 400 bp, Gossypium hirsutum
atttcagttcacattggtcaggccggtattcaggtcggaaatgcttgctgggaactttactgtctcgagcatggcattcagcctgatggccaaatgccaagtgataagactgttggtggaggagacgatgctttcaacacctttttcagcgaaactggtgccgggaagcacgtccctcgcgccatctttgttgatctggagcctactgttatcgatgaagtgaggactggtacgtaccgccagttgttccaccctgagcaactcatcagtggcaaagaagatgctgccaacaatttcgctcgtggccattatacaattggcaaagagattgttgatctctgcttggatcgtatccgaaaacttgctgataattgtactgggctccaaggctttttggttt

SEQ ID NO: 227042 - DNA, 289 bp, Gossypium hirsutum
actggaggagatcaaaagggtaaaaggaatggtctgtctgctaaaaatttaatggccgagaggcgccgtctaaagaaactcagtggtaggctttacatgttgcggtccgatgttccaatgattagcttaatggatagagcatctattcttggggatgccattgcgttcctggaggaactactgcacagcatcaacgatcttcataacttatctgctttcaaccctggttggtctgtggtaacacatactaacattttcatacattatctttcaagtctgtttccttgcc

SEQ ID NO: 227043 - DNA, 456 bp, Gossypium hirsutum
ggaaattggttcagaaaagaaaaatggccaccattgatgttcctgagcaggtttcggttcttgcagatgcagaagctcttagaaaggcttgtaaaggatgggggacagatgagaaggcaataatttcagtgttgggtcacagaaatgcagttcaaaggaagcaaatcaggcttgcttatgaagacctttaccaggaagatctcatcaagcgtcttgaatcagagctttctggtgatttcgagaaagcagtgtatcgttggatattggatccagcagaccgagatgccgtgttagctaatgttgccataaagaaattaagccctgatcaccatgtgatcgttgaaatttcatgcaccagatcccctgaagagctcttggctgtgaggagagcttatcaagctcgatacaagcattcccctgaaagaagaattggctggtcataccaaagggagacac

SEQ ID NO: 227044 - DNA, 344 bp, Gossypium hirsutum
cccacgcgttcgcggacgcgtggggaaagtacaactagttctataccacgttattcccaaatactactgcttgaacgatctccaatttggtagcaaccccgttagaacccaagctggtgaggatttcggcctcaacgtaactggcctgaacaaccaggttaacgtctcaagcggggttgtcgagactcagattaacaacgcattatatcaaaagaaacctctggcaatttatcaagcggacaaggtgttgttgcctgaggaggtttttgaagctaaatactcagcgggtgcaccttttaccggggacaaagaaattatccacagggtcttcattgaactcaaga

SEQ ID NO: 227045 - DNA, 462 bp, Gossypium hirsutum
aattgtttgagctagctagctcttactcaaatggcaaccaaaacgatgatgttgcaaatatttccacttttcttctttttgttcagtgtctgcaactccattttccttggtgctaatggagatgacaatggtggttggcaaactgcccatgccaccttctacggtggtgctgatgctaccggcacaatggggggagcttgtggttatggaaacctgtacagtcaagggtatggaacgagcacagcagctttgagcactgcacttttcaacaatggcttgagctgcggtgcctgctacgagctccggtgcaacaatgatcctcaatggtgcattagtcgaaccataaccgtgacagccaccaacttttgtccacctaactatgctttatctagtgacaatggcgggtggtgcaatcccccacgagaacactttgatttggccgaaccggcattcttgcggata

SEQ ID NO: 227046 - DNA, 456 bp, Gossypium hirsutum
gtgacctcgaagcatccaaagcattgaaatacccttcttcaatttcccgattccaacaagtgatttcaaaaaaccctaaccctatctccagtttcaaccacgtcttgagttcgtttcgcttttcttttcgtaggtcgctgctaattctctcttttcttaatcgatggcggctaaacctcttacgagtgaagcaatcgccctcacagaaaagaaaatggacatgacattggatgatatcattaaaatgtcaaaaaatacttcacataaatctaagaaacagcgaaggataccgaataaaatccagagacctgtgagtaatgctgctaaagataaggccttgaaggtacgacagtacatggactcgcgggcctctgttagacagggggttctagctcaaagaaggtctaatttccaggggaaccggtttccttttgcggctgaggctgcacgtagggc

SEQ ID NO: 227047 - DNA, 443 bp, Gossypium hirsutum
  unsure (1)..(443): unsure at all n locations
gtcgtttcgttcaaagactacgaaagaaagccgcatctcttcacaatgtaagtttagaacaagggacagtaacatctctacttgaagaaaatggtattgtcaaaggagtgcactataaagataagagtggtcaattgctaacagcttatgctcctctcaccatcgtctgtgatggttgtttctcgaatttgagacgctctctctgccattctaaggtggatatcccttcttattttgttggttttatcttgacgaactgtaaacttccaaaagaaaaatatggagtttttatattagcagatccttcacctatcctattttatcccattagtagcacagaaattcgttgcttggtggatgntcctaggcaaaatctaccctcttgtttcaatggggaaaaggctcattacttggaaactttggtggcttccaaggttcttcct

SEQ ID NO: 227048 - DNA, 186 bp, Gossypium hirsutum
  unsure (1)..(186): unsure at all n locations
cccacgcgtccgcgctaggttcagggccgtngttgacaagtgtggtgctctgttgttgtgtgatatggctcacattagtggcctgggtgctgctcatgaggcaaacaatccgtttgagttctgtgacattgttacaaccatcatccacaagagcttgtggtgtcctagggctgcaattatttttta

SEQ ID NO: 227049 - DNA, 443 bp, Gossypium hirsutum
gcgtctctctcttagtctttaagcataaaattttattagaagaagcactctattgctctgtttctctcgttgtagcataagatcaagatcaactgttcttcaaccaaaagggaaaaagctgtggagtttttaagaaaacaaatgataaagccaggctcgttatcgcaacaattcttggaattgtgattggattctttattggtgtttcatttccgtcagtttccttttacaagattcacttaccttcaaaccttagatcggcttttgatgcatccatagctaatgaccaagactttatggtcaggtcacctgagagaactgcagacaatcttcctaagatatatgttcctacaaatcctcgtggtgcagaattgttaccttctggaattgttggtccagaatctgacctttacctgcgcaggttatggggtggacctagtgag

SEQ ID NO: 227050 - DNA, 469 bp, Gossypium hirsutum
ctgcttataatctacttcaactatgctgttctttattctcagcttcttacaaaggaacctcgctgcaatcttacgcatatctggctgggcttcgttatcttttggatcaggcagtagtgtacgcagtgtttgcgggaaacctagcgggtttggagcattcatttttggtattaaccggagaagagaacttccaatggctcaagtggtgcaataaatatactcgattctgcacccaaatcggaggatccttgctctgcggcttcgttgcaagcttactaatgttttccatcgcttccatctccgcattcaacttgttcaggctgtattcccccaccaagttcatgcacttgaaactctaatcataaattacggttaatgtggtattaaaaatttttaactttataaattgattgatattttgccatataatttaaaatttttaaaaataaaatgtttgtgaaggtaaaaa

SEQ ID NO: 227051 - DNA, 428 bp, Gossypium hirsutum
gtggacgcatgtttgctcctaccaagatctggcgccgctggcaccggaaaatcaacgttaaccagaagcgttacgccgttgcttctgccatcgccgcctcccctgttccttccctcgtcatggcacgtggccaccgcattgaggctgtaccggagatgccgctggtcatttctgacgctgttgagagcgttgagaaaacctttggtgcaatcaaggttttgaaacagatcggagcatatcctgatgttgaaaaggctaaagacagccaaggaatccgacccggaaaaggaaaaatgaggcatcggtggtacatttgccgtaaaggtactttgattgtttacggaactgttggagctaagcttgttaaagcctttcgtaacattcctggcctggaggttgccaactttgagaggcctaatttgttgaaa

SEQ ID NO: 227052 - DNA, 466 bp, Gossypium hirsutum
caaaaaccctgaataattctcatttcccctctatttcccaaattgttattagtattttcttttcacatgatccagacattaagatgacacaaccgtcggtcatactagcaaccgccagctatgatcacactattcgattttgggaggcaaaaagcggccgctgttaccgtactattcaataccccgattctcaagttaatcggcttgaaataaccccagacaagcgctacttggctgcagctggtaatcctcacattcgtttgttcgatattaattccagcagccctcaacctgtaatgagctatgattcgcatacaaataatgttatggctgtaggatttcaatgtgatggaaagtggatgtattctggttctgaggatggcactgtaaagatttgggatttaagagctcctggttgccaaagggaatatgaaagtcgtggtgcagttaacacccgtgtcttaca

SEQ ID NO: 227053 - DNA, 446 bp, Gossypium hirsutum
atggctacctatgtccagaaattggggccataaactggcagagcaatgcttaccttaacggccaaagcctctctttcaaagtgactgccagcgatagcaggactatcacaaactacaatgtagtgcccgctggttggcaattcggacaaacttttgaaggaggccagttttaagacaatattatagtgtccgtctaatattaaaactggaattgacatattacttatataaggcacatgagcgttttatgccgaggtagcaaagtggcgcccgctggctttatgtgtgaaataggcgagcaagtgccattagcctataatatacacatttcctatagtgaaccaaactattaaatttggacttttgaggggatatccataatgtctgaaatttggttgttgatgattgaccatgttatttatgggttcattattgaaatcctcttt

SEQ ID NO: 227054 - DNA, 440 bp, Gossypium hirsutum
gttggttttgatactatatgcaaggtcaattcctatctcatcagtaatgtctgcactgatgctctctctgcggagaagtactattattttatccgtcttatgggaaggaaggcatcacatgttgccctggaatgcaccctccaatctcatcccaatatggtaattcttggtgaagaagtggctgcatcaaagcttacactctttgacataacaaagcaaatttgtgatgcagttcaagctagggccgagcaagacaagaaccatggggtcattctcctgcctgaagggcttatagagagcattcctgaagtgtatgcgctattgaaggaaatttacagcttgtttaggcaaaatgtatctgctgataaaatttcttcccagttaataccttgggcatattctttgtgtgaatttcttccacatttcataaagaaacagct

SEQ ID NO: 227055 - DNA, 279 bp, Gossypium hirsutum
cgtcacggcagccgggttattgtcggctaatccaccgcaattcggtgcatcgttggtacaaaaagctatagaagcgcacaacgcgaaggccatcgaagaacgaaacaaggagtgggaagcagcaccgaagatattcgagtacaaggatgctggtgtgaactgcgtggcggtggggagctctcccaggttcaaggtatacgatgtggatttcgggtggggaaaacccgtaggggtgaggagcggattcaacaacacgtttgatgggatggtgtatttgtt

SEQ ID NO: 227056 - DNA, 465 bp, Gossypium hirsutum
cttaagttggtttccatgattctcatggtgtgcatgacgatgatgagtgcacccaaggcagccaaagccgccatcacgtgcagcgacgtggtgaaccacttgatcccgtgcttgtcctacgtacaaaacggcggtacacccgctgctgcatgctgcagtggggtaaaagcactctacggcgaggttcagacctccccggaccgccaaaacgtgtgcaagtgcatcaaatcggcggtgaacggaattccgtacaccagcaataacctcaatctcgcagccggcctacctgctaaatgtggtctccaactcccttacagcatcagcccctccactgactgcaacaaggtgcagtgaggttgatgatgatgatatggaaggagtggaagaaggttccagctcaactagataaagtagctagctaaggttaaataagctgtgttggtgtgtttgtttttagaaaattct

SEQ ID NO: 227057 - DNA, 382 bp, Gossypium hirsutum
cggacgcgtggggttggctctttcttttttgtttctgtttcctctctttttattgaaaaattagggtttccgtcagcggtattgagaatcaatggcgtcgacttcgaggaagataatgttgaggagctccgacggagagacttttgaggtggaggaagcggtggcggttgagtcgcagacgatcaagcacatgatcgaggacgattgcgccgacaacgagatccctctcccaaacgtcaccagcaagatcttgtccaaagtccttgagtactgcaagaagcatgtcgatgctgctgccgacaaggaaaagactcccgatgacgaactcaaggcttgggatgctgattttgtcaaggttgaccaaaataccctctttgacctc

SEQ ID NO: 227058 - DNA, 368 bp, Gossypium hirsutum
cccacgcgtacgcggacgcgtggggcatttctgatcctccccggacactgacaaatagcaccagaaatggctgttggaggttttggcggcgtctatggacctgtcagcagcttcaatggcaagatcacagcttcggtggtgatcacctgcatttttgctgcttcaagcggcctcatatttggttatgacattggaatttcaggaggtgtgacaactatgcaaccatttcttcagaaatttttcccatcagttttaagaaaagcagcagaggcctaaaccaacatctattgcgtgtatgatagccaagttttaacatcctttacttcttcactgtacattgctggttaagctgccttactggttgctag

SEQ ID NO: 227059 - DNA, 350 bp, Gossypium hirsutum
cccacgcgtccgaaaaaggaaaaaaaaaatgaagctcttgtttctaactttgctgctttgttctcttcttctatgttcttcagtttttgaaccaacaatggctcaacctcgttcacctttttgtgaagggaaatgcaaagggaggtgcaataaagcggcggtttgggatcgatgcttcaaatattgcggcatatgttgcgaggagtgtaaatgtgttccttccggtacttatgggaacaaacacgagtgtccttgctacagagacatggtgaataacatgggcaaacccaaatgcccttgaaaatgaaatatatttcgagttcgggatttcatcaagcttaaagatcgag

SEQ ID NO: 227060 - DNA, 323 bp, Gossypium hirsutum
cggacgcgtgggaccttcttcaagcatagccatgactactgaaatggtaatggttgatgaagtcccttttcctccacaaatcacagctaccaagccactatctcttttgggtcatggaattaccgacattgagattcactttttgcaaatcaagttcacagcaattggggtttaccttgaaccagaagttgtaggacatttgcaacaatggaaggtgaagcctgggaacgtgctagctgaagatgatgacttcttcgaggctcttattaatgctccagtggagaagtttctgagagttgtggtgattaaggagatcaaaggtt

SEQ ID NO: 227061 - DNA, 390 bp, Gossypium hirsutum
tatctctgaaggtgtcttaataaacgccttcgatttaccttcgatttccatttacttctctattgctacgtttttgaatttttagtgagcgaaaatgagagagtgcatttcagtccacatcggtcaggctggtattcaagtcggaaatgcctgctgggaactttactgccttgaacatggaatccagcctgatggccagatgccaagtgacaagactgtcggaggaggtgatgatgcttttaacacctttttcagtgaaactggtgctggaaagcacgtccctcgtgctgtctttgtggatcttgagcctactgttattgatgaagtgaggactggtacttaccgtcagcttttccaccctgagcaactcattagcggcaaggaagacgc

SEQ ID NO: 227062 - DNA, 427 bp, Gossypium hirsutum
ctttttgagctttcgtgtttgtctattgaattcttttcctcactttctcgaaaaaaaaaatgtcttcaggttgcaattgcggatctaactgcagctgcggtgacaactgctcatgcagcaggaaccttaaccttggatattcggagaagacaaccagcactcagaccatcatctccggagttgcgccagtgaagatgacctttgagggaccagagatgagcactactgaatcaggacatggatgcaagtgtggatcaaactgctcttgtgatccatgcaactgttgaaaagcttgatgaaagccatagattatgaaaaaaagaaagcagcaaaaataacaggcctctgtaatgatatattgtcaaggatggatgcctgcaaggtctataattatgtctctgtctgtgtcttgagtaatagaagcttt

SEQ ID NO: 227063 - DNA, 435 bp, Gossypium hirsutum
cgaggaggctgctccgcccgctttcgatgaggtccaacacccattgtttgtcacttggaagaaggttgtgaatggtggggagcctcgtctacgaggatgtatcggcacacttgaagcttgtcagttgattaatgggtttagggactatgctctgacgagtgctttgagggaccgcaggttccctcctattcaagctaaagaactgcctaacttagaatgtacagtttctattctgactgattatgaaacagctaataactaccttgattgggaggtaggaaagcatggcataattattgagtttgttgatgattataatacaaggcgaagtgccacatatttacctgaggtgccggcacatgaaggttggactagagtggaggcaattgactcacttatccgggaagcaggctttagtggccccataaccgagtc

SEQ ID NO: 227064 - DNA, 391 bp, Gossypium hirsutum
  unsure (1)..(391): unsure at all n locations
gtcagccaattgtttgagctagctagctcttactcaaatggcaaccaaaacgatgatgttgcaaatattttcacttttcttctttttgttcagtatctgcaactccattttccttggtgctaatggagatgacaatggtggttggcaaactgcccatgccaccttctacggtggtgctgatgctaccggcacaatggggggagcttgtggttatggaaacctgtacagtcaagggtatggaacgagcacagcagctttgagcactgcacttttcaacaatggctngagctgcggtgcctgctacgagctccggtgcaacaatgatccttaatggtgcattagtcgaaccataaccgtgacagccaccaacttttgtccccctaactatgct

SEQ ID NO: 227065 - DNA, 399 bp, Gossypium hirsutum
ctctctcttctctgccgatttctccgttcttcaaaatttaagttttttctgctaaaaagttgctatgggtaaggagaaggttcacatcaacattgttgtcattggccatgtcgactctggaaagtcaacaacaactggtcacttgatctacaagcttggaggtattgacaagcgtgtgatcgagaggttcgagaaggaagctgctgagatgaacaaaaggtcattcaagtatgcctgggtgctcgataagttgaaggctgagcgtgagcgtggtatcaccattgatattgccttgtggaagtttgagacaaccaagtactactgcactgtcattgatgctcctggacatcgtgacttcattaagaatatgattacgggtactttttaagctgactgtgc

SEQ ID NO: 227066 - DNA, 399 bp, Gossypium hirsutum
ccgcacaccagtccagagtttctatcaggaagaatgtctgtccctttgctgtcaaagaagattgtgaagaagcgtgttaagaagttcaagagaccacaaagtgaccgcaagatctccgtcaagacaaactggcgaaggcccaagggtattgactctcgtgttaggaggaagttcaagggatgcactttgatgcccaacatcggttatggctcagacaagaagactcgccactatcttcccaacgggtttaagaaattcgtcgtgcacaatgtccaagagctagaacttctcatgatgcacaacaggacatactgtgctgagatagcacatgatgtttcgacgaagaagaggaaggaaattgttgagcgagcggctcagttggatgttgtcgttaccaac

SEQ ID NO: 227067 - DNA, 442 bp, Gossypium hirsutum
  unsure (1)..(442): unsure at all n locations
tccaaacactagtagaaggtttagttttacaaacatgtctagttccggtgtccttaagttggtttccatgattctcatggtgtgcatgacgatgatggagtgcacccaaggcagccaaagccgccatcacgtgcagcgacgtggtgaaccacttgatcccgtgcttgtcctacgtacaaaacggcggtacacccgctgctgcatgctgcagtggggtaaaatcactctacggcgaggttcagacctccccggaccgccaaaacgtgtgcaagtgcatcaaatcggcggtgaacggaatttcgtacaccagcaataacctcaatctcgcagccggcctacctgctaaatgtggtctncaactcccttacagcatcagccccttcactgactgcaacaaggtgcaagtgaggttgatgatgatgatatggaaggagtggaagaa

SEQ ID NO: 227068 - DNA, 413 bp, Gossypium hirsutum
  unsure (1)..(413): unsure at all n locations
cccacgcgtccggaaaatgaaggtttccgttatttctctcaaaggcactcacttcgatatcgaagtcaaacccgaagatgcggttgcagatgtaaaaaagaacatagaaactgttcaaggggctgatgtttatcctgctgcacaacaagtgcttatctttaagggaaaagttcttaaagatgacacgacactggctgaaaacagtgtcaatgaaaatagctntattgtgatcatgttgacaaagaataagggtgcatctggtgagtgttcaactgcttcagcagctcctacaaagaaagctcctgaggcaagtagtctgccaacagctacagtacgagcttcgactgcacctgttgtgacgtttggtgtggctgcaccttccgctgaaatctgctcctgttgcttaaagtact

SEQ ID NO: 227069 - DNA, 340 bp, Gossypium hirsutum
ttttctttctgctaataaatttttgtcaccagttttgttggaagacaggaaaacaccggtgttgtttgaaatggcagcttcgagaatggatctggacgggagaccaataaagccaattacgatatgcatgattggagcgggaggcttcattggctctcacctctgcgagaaattaatgtcggaaacgccgcacaaggtgctcgccttggacgtttacaatgacatgattaagcaccttctcgagcctgactcttttccttgggctggtcgtattcagttccaccgacttaacatcaagcacgattctaggcttgaaggcctcatcaagatggcagattct

SEQ ID NO: 227070 - DNA, 380 bp, Gossypium hirsutum
tcgtccacgcgttcgtccacgcgtccgcccacgcgtccgttccaagtttatgaagaaacagctggcctgatggttaatgatccagttctgcggacacacaagcccctgtctgttgagttgggaccaggaatattgggaaacatttttgatggcattcagaggcctttgaaaactattgccaaaagatcgggtgatgtgtatatccctagaggagtttctgtcccagctcttgacaaagatgctctttgggactttcagcctaaaaaaatcggtgagggagaccttctaactggtggagacttgtatgctaccgtctttgaaaacagtttgatgcaacatcatgttgccctgcctcctgatgcaattgggaagataactta

SEQ ID NO: 227071 - DNA, 368 bp, Gossypium hirsutum; identical to SEQ ID NO: 192868

SEQ ID NO: 227072 - DNA, 306 bp, Gossypium hirsutum
caaaactgtcggaggaggtgatgatgctttttacacctttttcagtgaaactggtgctgggaagcacgtccctcgtgccgtcttcgtggatcttgaacccactgttattgatgaagtgagaactggtgcttaccgccagcttttccacccagaacatctcatcagcggcaaggaagacgctgctaacaactttgcccgtggtcactacaccattggcaaggagattgtcgacctctgtttggaccgcatcaggaaacttgctgataactgcactggtcttcaaggattcctttgttttaacgcttg

SEQ ID NO: 227073 - DNA, 302 bp, Gossypium hirsutum
cactctcccaccccgaccgctattttgatcagactgttatcatgccgatcagaaacatagccgttggccggcctgaagaagctactcatccagatgctcttaaagcagctttagctgagttcatatcaacgttaatcttcgtttttgctggatctggttcaggcatggcttttaataagctgaccgacggcggtgcaacaactccggctggtctcgttgccgcctctctagctcacggatttgcgcttttcgtcgctgtctcagtcggtgcttactcttttacgtggttttccttattggat

SEQ ID NO: 227074 - DNA, 350 bp, Gossypium hirsutum
tatgaattccagaggcattattatttccaatgttatttttaaaaattcacctttttggaacattcaccctgtttattgcagcaatgttgttattcgatatgttaccatcctggctccgaccgactcgccgaacaccgatgggatcgatccagattcaagctccaatgtttgcatagaagactcgttcatttcaaccggagatgatcttgttgctgtaaaaagtggatgggacgaatacgggattgcttacggacgtcccagctctcacatcaccatccgacgtgtaacagggtcatccccatttgccggtatcgcagtgggaagcgaaaccttcggcggagtggagcacg

SEQ ID NO: 227075 - DNA, 284 bp, Gossypium hirsutum
aaaacatcatgcctcagggaaagcttcaagttgttcttgttagtgccaaaggtctcgagaacacagattttctctgtaacatggatccttacgtgcttcttacttgccgaacccaggagcagaaaagcagtgttgcatcaggaaaaggatcagaaccagaatggaacgaggatttcatattcaacatctccgaaggtgcttcggaactcgcactgaaaataatggacagggatgctggttctcaagatgatttcgtgggagaagtttctataccactggagcct

SEQ ID NO: 227076 - DNA, 316 bp, Gossypium hirsutum
  unsure (1)..(316): unsure at all n locations
cccacgcgtccgctcatctgcaccagccgtctttatggggaggagacctgcaaggngttagtgcgccaaatcaagaataagccataccccaaatctcgatactgccgtggtgtcccagatcctaagatcagaatttatgatgttgggatgaagaaaaaaggcgttgatgagtttcctttctgtgtccatcttgtgagttgggagaaggagaacgtctcaagttaggcattggaagttgtccgtattgactgcatcaatgacatgtgcaagtttgcagtgtaggatgctttccatttgagagtgcgggtttatccct

SEQ ID NO: 227077 - DNA, 298 bp, Gossypium hirsutum
ttttcctccaacaggagttatgattcggctgtttaaagtaaaggaaaagcagagagaacttgctgaaaatgcaaatgggggagctcctaccaaaaagcaaagtccaggagagtagcgtttgcacaaagatatttctgagcttaaactacccaaatcttgggctataacaattccaaatggaaaggataacctgatgaattctgaggtttcaactcgacccgatgaaggatattatttctgcggcacaattttattctccctttaagtgtgtcccggctatcccgatgaggcacccaaa

SEQ ID NO: 227078 - DNA, 438 bp, Gossypium hirsutum
ctcttttcttctcttgagacactgctaatattttttttattgtcgtctccggcgttcgaagatcataaaaaaccggagtcgtttcaaatggctacgagaacggatctagatgggaggccaataaagccgatgacgatatgcatgatcggtgccggaggcttcatcggctcccacctttgcgagaaattgatgtcggagacgccgcacaaggtgctcgccttggacgtttacaatgacaagatcaagcacctcctcgagcctgactctctcccttgggctggccgtattcagttccaccgacttaacatcaagcacgattctaggctcgaaggcctcatcaagatggcagatctcgtgataatcttgctgccatctgtactccggcagattataatacgcgttcactagacacgatttacagcaattttattgatgcac

SEQ ID NO: 227079 - DNA, 370 bp, Gossypium hirsutum
gaattgcctgatggacaagtaattactatctgtttctgagagattccgttgtccagaagtgctgttccagccatctctcattggaatggaagctgctggaatccatgaaactacctacaactctatcatgaagtgtgatgtggatatcaggaaggatctctacggtaacattgtgctcagtggtggttcaaccatgttccctggtattgcagaccgcatgagcatggagatcactgctcttgccccaagcagcatgaagatcaaggttgttgctccaccagagagatagtacagttgcctggatcggaggatctattttggtttactttatctcccttttattatttgttggatttcctagtggtgagtt

SEQ ID NO: 227080 - DNA, 349 bp, Gossypium hirsutum
gagcagacagactagaaaagaagagaagatggatcattcattcatcatgatcaagcctgatggggtccaaagaggcctggttggtgaaatcattggcagatttgagaagaaaggcttctatttgaaagggttgaagctcatcagtgtggatcgatcttttgccgagaagcactatgctgacctgtctgcaaagcccttctttaatgggctcgtagagtacattatctccggtccggtcgttgctatgatttgggaaggtaagaatgttgttaccacaggtcgcaagattatcggtgccacaaacccatcttgttccgctccgggaacaatccgttgtgactttgcaatt

SEQ ID NO: 227081 - DNA, 399 bp, Gossypium hirsutum
tcgtggacgcgtgtgctcgtgacatgaccattttctttaaagaagagctgataatgtactcattcaagaccatcgacggtaggggcgccagtgttcatattgcagggggtccatgcattaccgttcagtatgagaccaactttatcattcatggactcaacatacatgattgttaacaaggagggtatgctatggtgagggcttcccctcgtcactttggttggtggttcatatcatatggggttggcgcggccttttctgtagattttttatgttatgatggcctttatcttattttttttttcaatatatttttttttacaccatttttctttctctccactttttttcttcacacttttctgttacctagatcctgttttttaaataatttttttt

SEQ ID NO: 227082 - DNA, 385 bp, Gossypium hirsutum
gtcgagagagaataacagagggaaagcttaagctttggcggccgaggaggacagcggagagttttacctccgctactacgtgggccacaaagggaaattcgggcacgagtttttggagttcgagttcaggccagatgggaagctccgatacgctaacaactccaactacaaaaacgacaccatgatccgcatagaggtcttcctcactccttccgttcttaaggaatgccgccgcatcatcgccgacagcgagataatgaaggaagatgataacaattggccagaaccagaccgtgttgggcggcaagagcttgagatagtgatggggaatgagcacatctcttttacaacttcaaagattgtgtcccttgttgatgttcagagc

SEQ ID NO: 227083 - DNA, 351 bp, Gossypium hirsutum
  unsure (1)..(351): unsure at all n locations
gtctgtttggaggattttaatcttactgagtgcttcttttgcagntaggtgcatggaaaagagagatggcggcagttcccggacagttgatttgggaggtagtgaagaagaacaattgctttttggtgaggcagtttggaagaggaactgctagccttcagttcatcatagagcccaacaatctctacaaccttcactcctacaaacactctgggttggcatacaagaaaacatgtcaccattcaaagtgggggcaaagaccattctgtgcttcttgcaaccaccaagactaagaagcagtacaagccttctgccttgcttcacgagtcctttatgaaaaaggtgttcccc

SEQ ID NO: 227084 - DNA, 377 bp, Gossypium hirsutum
cggacgcgtgggcaaaaaagcaacaaatattttccctttgattccctgccaaaaaggtaacgctcacacagtttcaggaaatggatcttgacgacgacggaggcacctctgatcttagcaccagtgctggagaacctaacgctgccaccgataaaatttgtgaaagctcagcgtttcagattaagccatttaaagaagagccaatagattcccaccctccgccgcctatcggggtggtccctgtttccatgcggcctctacccactgttaaacgctcctccaccaaggaccgtcataccaaagtcgagggccgcggtcgaagaattcgtatacccgccacttccggcgccaggatctttcagctgactcatgaactc

SEQ ID NO: 227085 - DNA, 272 bp, Gossypium hirsutum
caaacgcgagatttgtagatttatttcccttgtctatttgcctccgaatcaatggctttgccgaaccagcaaactgttgattatccgagcttcaagctcgttatcgtcggtgatggaggaactggaaaaactaccttcgagaagaggcatctaactggagagtttgaaaagaaatacgagccaaccattggtgtggagggtcattccttgaacttcgtcactaactgtggcaaataccgctgctactgctgggatactgctggacaggagaa

SEQ ID NO: 227086 - DNA, 320 bp, Gossypium hirsutum
gattcctatcgacaatggccgccgccgccacttctttaccccgcgaggaaaatgtctacatggcgaaactcgccgagcaagccgaacgctacaaggaaatggctgacatcatggagaaaggctctggctcacgcgacaacgaggagctcaccgccgaggaaaggaacctcctctccgtcgcttacaagaatgttatcggtgctcgccgtgcttcctggcgcatcatctcctccattgagcagaaagaggagagccgttgttacaatgaccacgtcgctactatccgttgttaccgggccatgatcgagtcctagcttact

SEQ ID NO: 227087 - DNA, 320 bp, Gossypium hirsutum
  unsure (1)..(320): unsure at all n locations
aaggaagcaacagggaaaaaangggcaccgccnccacccggaagggccccccactgatcggcaacagagaagctcgaattctcgtactgggtcttgacaatgctggcaaaactactattctctatcggcttcagatgggtgaggtagactctacaattccaacgaattgtgtttaatgtagagactgttcaatacaacaatatcaagtttcaagtatgggatttaggtgggcagacaagcatcaggccatattggagatgctttttccccaatacatcagcaataatttatgttgatgattaagtgacactgatagaatt

SEQ ID NO: 227088 - DNA, 378 bp, Gossypium hirsutum
  unsure (1)..(378): unsure at all n locations
aaaagaaataactaagaagcatcaatactcaatttcgacggtggatatcgagaggaagcaagcggcatcggcggaagagatatgcaccgccaagagcggcgccaagcaaggggaagggctccggcaatactatatccaacacatccacgagcttcagctcaacctccgccaaaaaacccacaatctcaaccgtcttgaagcccaacgcaacgagctcaattcccgagtgagaatgcttagagaggaactgcagctgcttcaggaacctggancctatgttggtgaggttgtgaaagttatgggtaaaaacaagggcttagtcaagggtcattcagaaggaaaatatgttgtcgatattgataagaatattgatatcac

SEQ ID NO: 227089 - DNA, 326 bp, Gossypium hirsutum
aaaaaaaaaatcacctactctctcactttgttctcttcttgttcctgtcctctttcaccaaactatcgccgacaacctctccaaaagaatggcatatgaagggattctgttggggatgggtaatcctctccttgacatttcgttagtcgtggacgaagagttcttgaaaaaatatgatatcaagttgaacaatgcatttttagctgaggagaaacaccttcccatgtatcaagaaatggcatccaagcccaatgtagagtatattgctggaggtgctactcaaaattcaatcaaagttgcacagtggatgctttaaattcctggtg

SEQ ID NO: 227090 - DNA, 414 bp, Gossypium hirsutum
ttgacatctactatgtgtgataagagaacatttgtctctgcggtcaagtatttccgcgagaaatacaatgtggtgcttaaatatgcatccttgcctgcacttcaaagtggaagcgaagctagacctgtctacctgccaatggagctttgtagtatcgttgagggtcaaagattcacaaaataactaaatgaacaacaagttagatctctgctgagagcaacttgtcaacgtccgaacattagggaggggaatattacaaagatggtccaggtcaataatttttgaggtggaggagcttgttactaaagaatttggaatgcatgttcgcaaagaacttgcattgattaatgcacgagttctgaatccttcagggcttaagtatcacgattgtggacgtggcaaatttgttaatcc

SEQ ID NO: 227091 - DNA, 219 bp, Gossypium hirsutum
atttgaagccttcttcgaatttcctaatccatgatgcaaattttcgccaagaccctaaccggaaagactttcacattggaggtggagagttctgatactattgacaatgtaaaggccaagattcaggacagggaaggcatccccccagaccagcaaaggttgatcttcgctggtaagcaatttgaggatggccgaacgttgcttgatacaacattcata

SEQ ID NO: 227092 - DNA, 509 bp, Gossypium hirsutum
  unsure (1)..(509): unsure at all n locations
aaaaaaaaaatccatccatcatgtctccaatttatatctagctttatatccttagttatcatcgttaccatgggcgttgccgttgccggcgccgggaagacgcatgtcatcgatttccgatggcctaacctctacccagaaggcatggcctgggacccattagcccagcacttcatcgtcggttccctaaaccaccgtacaatccactccgtttccgacgcaggcgttgtcgaaactctgatctccgaccccaccctccctgaaaacgttactgttttaggtctgacggtagatttcactaaaaaccgccttctcgcttgcctccactctgtttcccctctccctccattcaacgccctcgtcgcctacgacctacgcacccgccgncgnctttttctctccctcctcccctccgaccccgattccctcatcgcctcaatcggccgcgggcgtgacgttgcgaacgacgttgccgtcgacttcaagggaaacgcttacgtcaccaactc

SEQ ID NO: 227093 - DNA, 445 bp, Gossypium hirsutum
  unsure (1)..(445): unsure at all n locations
gagctatgctccttcccaactgtctctttcgcatggttgtttcagcaatcctgttgtcgaaccgccgctcagagaggcggagagccaagtaccgacttgtccacgttgttcgaacccacaaaggggccgatgacaaggcctaccgatgcgtgtttgaagaagaagacaaagacggcaaagttgggatatcattatctaaagatctcatggctatagctggagaggctntaaaatccaacattaccacaatagggcctttggtgcttccagggtcggaacaactcctatttcttctcactctgatcgggcgtaaagtcttcaaccccaagtggaagccttatatcccagacttcaagctggcgtttgagcacttttgcattcatgcttgagggcgagcagtgatagatgaacttganaagaacctgcagctggcagcaaaacacgt

SEQ ID NO: 227094 - DNA, 392 bp, Gossypium hirsutum
gggaaagtgggttgtgcaaggagctattgatgttgtcaatgttgccaatccttcagccgaagatgctgatgaggatgaaggtgttgatgacgaatctgtgaaggttgttgacattgttgacactttcaggcttcaggagcaaccccctttcgacaagaagcagtttgtcgtgttcatgaagaagttcatcaagaacttgacaccgaaactggatgcggaaaagcaagagtcctttaagaaaaacattgagggagcaaccatagttttgctttcaaaattgaaggaccttcaatttttcatcggagagagcatgcacgatgatggatgtttggtatttgcttactacaaggatggtgctgttgacccgacatttttgttactttgcgtatgca

SEQ ID NO: 227095 - DNA, 509 bp, Gossypium hirsutum
atttgcttgagcatcaatatcacatgatgatttattctgtgcctccaaaggttcctatggctccaatacaaaatgggatccatcccatgcccgttaacaatttaccaatgggataccctgtgctgcaacaacctcaatttccagctgcagggcaacctcatatggactccatgggtatatcaagctgtcatgttgtcaacggagtccctgctaccagcaactttcaacctatgcggatgaattctgggaatgacatggtgatggacagcaatgccagtgatgtaatacctgcagttccaccaaccactgccatgtcatccatgtcagagatgcctttgagctgtacatcagtagcatccagtgggagttttcccttcagtgcatcagatatgtcagggatgggagtagacacatcggcacttgattcagccttcacaacagatgtggcaagttcagtaggattgcagctgggacaggataatgaaactgggaattctagagattccttt

SEQ ID NO: 227096 - DNA, 479 bp, Gossypium hirsutum
gttaggccactttgatggcaaaaagggagatttagtctgacatgcagagaagccgaatcaaacagatagggtgatggaactgagcattcaaaaaatagaagcctagattaggctagagtacgatggagatgttggatataacagctagtttaattgaggaggatccttaaacagaggtgagtcttatagcgacaaaagaaagcttctttcaaggattggcgtgctcttgtgggattgctgcatatcacttcatgggctgctgatgataacctacttcaactatgctgagcttgattctcagcttcttacaaaggaacctcgctgcaatcttacgcatatctggcttggctcagctatattttggatcaggcagtagtgtacgcagtgtttgcgggaaacctagcggttgtggagcactcattcttgggattaaccggagaagagaactttcaatggcttaagtggtgcaataaatatac

SEQ ID NO: 227097 - DNA, 479 bp, Gossypium hirsutum
caagatcagaataagaaaaacgctgcttgcagtattcatcatccgataagccagaattagttgaaagggatgttaaggacaaggtggatgacaaagaagacaacagtggatttatagacaaggtcaagggtttcattcatgacattggtgagaagatcgaggaaacaatcggctttggcaagcctactgcagatgtagctgagattcacctcccttgtatcaatcttgagaaagcagaaattgtcgttgatgtctctataaagaacccaaacctctgttccaattcctctcgttgacattgactaccttattgaaagtgatggttgaaaactctcttcatgcttgattccatatgctggaaccattcatgcttattttgaggtgactgtcaataatctcattactttgatttatgatgattcaaaaagtcttttgatgacattattcctggctttttcatttcattatggctgatagtt

SEQ ID NO: 227098 - DNA, 429 bp, Gossypium hirsutum
gaaatttccaagttcttcttcaataccctcacatttcattcgatcaaaagaactcaaatctttatgagtccaccatgggaggaggaaatgcccaaaaatccaagatggctcgtgagaagaacttggaaaagcaaaaagctgccgccaaaggaagccagcttgattctaacaagaaggccatgaccatccagtgcaaggtgtgcatgcaaacattcatctgtactacaacagaagtgaaatgccgggagcatgctgaggcgaagcatcctaaatccgacctatacacatgttttcctcatcttaaaaagtagcacactggggaagtggagatggctttgaacatgcatctatcttgtcccattggtactgtatgagtaaccttttaaaatctctctaacataagccctattagctttcacttggtgattt

SEQ ID NO: 227099 - DNA, 470 bp, Gossypium hirsutum
gttttcaacagagcgttggggacttgaaagaagctgatttgaaaggaaagaaagtgtttgttagagtcgatctgaacgttccattggatgataacttcaacataactgatgacacaaggatccgtgctgctgttcccaccaccaagtatttgatgggtcatggctctaaagtcatcctctctagtcatttggatttcgcccggcattgaagaattagtcaagaagctgaaggcaaggaataccgatgtttatctaatttccaggggcttctgccaaatgatcaatcctgttgcatcaatccttggaattctacaagaaaacatttttgccaatcagctgctctttggaagttctggggagtttttgggattcgatgctaatgatcccacttcgaggagtggaagaaaagctacaggttgtcaactaaatagaaatgttaagggatacaaggaactagtcatgattggtga

SEQ ID NO: 227100 - DNA, 140 bp, Gossypium hirsutum
ctctagtccgactttgtgaaatgacttgagaggtgttggatatgtgggagctctcgggcgaaattgaagtaccactacttttaacgtggttttacttattccgggaatcggaggcggggcacggcccctttttttggacc

SEQ ID NO: 227101 - DNA, 413 bp, Gossypium hirsutum
cccacgcgtccgggcaaggagggcgtcttggtatgatcatctcttccattgagcagaaggaagagagcagaggaaatgaggatcatgttgcacaactaaaggagtataggggtaagattgaagctgagcttagcaagatctgtgatgggattttgagccttcttgaatctcacctcattcctttggcctcatctgctgagtcgaaggtgttctaccttaagatgaagggtgattatcacaggtatcttgcttagtttaagactggtgctgagaggaatgaagctgtcgagagtactttgcttgcttacaagtattgttatgatattgcttttgctgagctttcttctacttatactattaggttgttgcttgcatttatcttttatgtattattctatataatttattacatt

SEQ ID NO: 227102 - DNA, 320 bp, Gossypium hirsutum
ctcagctcaagcctgaagaaattagtgccattatgttatgactttaatgaaccgggttcactcgctccgaccgggttgcacctcggtggcacaaaatacatggtgatccaaggcgaaccgggagctgttatccgagggaagaagggacccggaggtgttactgttaagaagaccaatatggccttgattatcggaatctatgatgaaccaatgacacccggccaatgcaacatgatcgttgagaggctcggcgattatcttctcgaacagggtttatgattctcttcagtgtgtgttcttaatttgaatgcatttctttt

SEQ ID NO: 227103 - DNA, 505 bp, Gossypium hirsutum
aaaaaaaaaaaaaagaaaaaaagtttaaacaaaatttatgttgaaaaatgctcttttcatcgatcgccaaagagcaaccgcgaacccccgtcgatcgcaggagagagggaatcgggataaatggggaagaaaaggaagtcgatagcgacgagcctcgatgaggttgatcggactatgtacgcctccttttgcagcgccgctaactccttgtcttacctttatactcagaccatgaatcagcaaaaactctccttccaagctggcaaacgccatggccttgaaaaaatctatcagtggatatggagacaacaagagggaggatcaagagttacaacaatggatatccttagttaccttcatgaatgaactggaccattgtgaagagccatcaacgtcacctatagcacctagcgaacagcagtattcccagcctgcaatgccattcattgaatacctgtttcatggtctttacaggctcatctggccaaactgttttgctaggtaa

SEQ ID NO: 227104 - DNA, 252 bp, Gossypium hirsutum
actactactccaagcaagcattttccttacaagtttgtttttcttgtgattaatcgatatggctagctcaatgtcccttaagcttgcatgtgtggcggtgttgtgcatggtggtgggtgcacccctggctcaaggggccgtatcctgtggtcaagtcacaagctccctcgcaccctgcattggttatttgactgggattggagctggttgcgtttccccatgtcgctgctgtggcttttaatttttcatttt

SEQ ID NO: 227105 - DNA, 244 bp, Gossypium hirsutum
cttcctttacctccgttcttttgccgtcgcattttttattctcagagatttgttcttttcgcttctttcgttatggggaagatcaagatcggaatcaacggatttggaaggatcgggcgtttggttgccagagatgctctccaaagtgaagatgttgagctcgttgctgttaacgatcctttcatcaccaccgttttcatgacctacatgtttaagtttgacagtgtttacggtcaatggaagt

SEQ ID NO: 227106 - DNA, 425 bp, Gossypium hirsutum
cccacgcgtccgcccagtggaaatatcttatgatgtatttcaaacatcaaacatcgacactctcattgatctttcttcttatgatgcctggttttgccctttctgatgtcaatcaagacaaagcagaatgttctaatcagctagtcgggcttgctccatgtctcccatacgtaggcggagaggcaaaaacacccaccatagattgttgcagtgggctcaaacaggtgctggataagagcaagaaatgcctgtgtgtgttgattaaagataaagacgacccgagcctcggcctcaagatcaacggtactcttgcgggaactcttcctagaacttgttgagccagtgctagcatgacagaatgttttttcctgctgcacttggcacccatattccatgtagtcaagttttttggaaggatattaaaa

SEQ ID NO: 227107 - DNA, 474 bp, Gossypium hirsutum
atcccattcatgtcgctgcctccaatgactttgatatgaaaataaatgggattcttagcattatcctgcaagatgagggagattcattcgccaagagggctgaaatgtactatcaaaagagacctcagctcatccaaatggttgaagacttgcacaaatcctaccactccttagctgataagtacgagcagctgagatcccaactcaaccacggttctcatccaacactattatcgtcgttgtcaagtcctgtcaaccaagtccaaggacatgttgagttgaatgctgaagatcctgatcttgagaccgaattcgacgatgatgtcccgaatcatgtgtctagcaaggagtcaaagatgaaggcagaggataaaattaggcagggagagaaaaagaaaaggagcaatggcattggaatgcagcggaatacaagtgatggttatgaagcggccatgttggaaaatgagaagctgt

SEQ ID NO: 227108 - DNA, 436 bp, Gossypium hirsutum
  unsure (1)..(436): unsure at all n locations
gaagaaggcaaatagacttgagaaagaaaaacagtctcaaaatgcagcagaagtcaggcttcctcatcctcttcctctccctcattttccttcctctcatcttctccgacgccagaaaggaggctcccctcggaggttggaggccgatcaaagacaccaaggacccacacgtgatggagatcgcggaattcgccgtcgaggagtataacaagcagtcaaatgggagtttaaagttggataaggtggtgaaaggcgagactcaggtggtggccgggacaaattaccggctgattttgcaggcgaagaaaggggcagtcgataacacgtatcaggctgtggtgtgggagaagttgtggctgaatctcatgaatctcacctnctttaaccttgtcaagggttagattgggatataaagttatttatggtcatatatgtt

SEQ ID NO: 227109 - DNA, 336 bp, Gossypium hirsutum
atcgcgagcgcgcgccctactgggagactaatcgtttgatgttagctgattgtgccattgggttcggcaggaacgccattggcggaagagatggtaagatttatgtggtcactgactcgggcgatgatgaccccgttaaccccaaaccagggacattactgtatgcggtgattcaagacgaacctgtgtggatcattttctctcgtgacatgaccattcatctaaatgatgagctgataatgtactcattcaagaccattttcggtaggggcgccagctttcatattgtatggggtctatgcattacctttcttatgtgaccaacattatcattca

SEQ ID NO: 227110 - DNA, 509 bp, Gossypium hirsutum
cattctcaaccgccggcagttggcggctcttcctctgccattagaaaccgcccacgtacgctggcggaactaaccgtaccgcttcctcaacgaaccgtatccctccccgtccctcttccacttcctccggcttccaacgctgctcggtcaacctgctccaacggtaacgctaactctaaacaagtcaacttatcggaaatcgatcgggtcaaccgaataggaagcggcgcgggaggcaccgtgtataaagtcatccaccgtccttcgtctcgcctttatgcacttaaggtcatctacgggaaccatgaagagaccgtccgtcgtcagatccgtagagagatcgaaatcctccgtgatgttaatcatcctaacgttgtcaaatgccatgaaatgtacgatcaaaatggcgaaattcaggtcctattggaattcatggatgttggatctttagaagggactcatatatcacacgaatctaacttatcggttctagctcgacaaattctcaa

SEQ ID NO: 227111 - DNA, 336 bp, Gossypium hirsutum
cccacgcgtccgaattaatgcaggggacttggcatgtacaatccagacaatcgcatttctcgctgctgtatatggaaaagacgaggaatatggtgactccagattactgaaggaaaaccagattggacagaaaggacctgtattaataatctgtcccacttctgtcatctgcaattggaagtgtgaattctccagatgggcaccctttaatgtctctctttaccatgggtcaagccgtgaactcattcttgagaagctacaagctaatggagttgaagttcttggtaccagttttgacacattctgaatttatggaaatcttttgtcaggtatcaa

SEQ ID NO: 227112 - DNA, 495 bp, Gossypium hirsutum
  unsure (1)..(495): unsure at all n locations
cccacgcgtccggcagagatccccctaaatttgctctcttctcaaagcatttttctttcatctctacttcatggcacagtctactgtatcccaggtttctgtagctgttcccgttggaaacgacatttctctgaggagatctgtaactaagaggaacattataagctttggtaacaagtcatgggcttccaccttgtcttttgatttgaaatcacgaaatgcacagaagaacaaaccgtacatagtatgcatgtcagtgcaacaagccagcaaatccaagattgcagtttcacctttggagttggagattgcaaaagagcccccactaaatacattcaagcccaaggagccttacacagctaccatcgtttctgttgagagacttgtcggtccaaaagcttcaggcgagacttgtcatattgncattgatcatggcggtaatgttccatactgggaagggcagagctatggtgatatccctcctggtgaaaattc

SEQ ID NO: 227113 - DNA, 472 bp, Gossypium hirsutum
acagcatcatccattgattcccttcccttctgctccctccctcttccattaaaaaagaagacagaaagcagctatcaaaatggctactttgctagcggctgcaggtcgtagagcaactactctatctcgatccccggctctgtctcaagccgcttctctcattcctcgccgtggtcttgccggcgctgcggatcaccatggacccccgaaggttaattgttggcaagacccaatgaacccatctaaatggaaagaagagcactttgttattgtctctttatccggttggggcctgcttttctttagcggatacaagttcttcactaaaggcaaaggcaagaaggaagagaacatggtggaaacgacacattaatgaggttggagtttctaaattttacatatagtccatgaataatgtgttgctggaacttccatgtccttgggcatcatcttcacttttctggtttccttt

SEQ ID NO: 227114 - DNA, 394 bp, Gossypium hirsutum
agtcaactaggggtcaagtgcagtagagattcatgttcccgacaatggagagtttcgggttttgtgtccttatgcttacaatcgcaatggtggcatcacccgcactttccgatctggtcctttccaaagtcgatcgacgcatatatttgacatcacatattgttcggatttcttcaactatgaaggtggagaatgcaggttccgaaaaggagtccaaggttttgctggcttttcctgagcaacaagccaaaaatatggcatatttgattgctactccacatgaagggaaagggaaaggaaaaaaccctgttgttgttctccctgttgaggctgccaacctaatatacatgcttgctgctttgcattctatttagtatctttgtctaaggtttta

SEQ ID NO: 227115 - DNA, 496 bp, Gossypium hirsutum
gtgctacaacagctgctggaagattggtggcttctcatggatttcttgaggctgtttggccttacagtggtcattatctaccaactgaagacaatttcaaggaattcattattttccttgaagaacacaatgtggatttaaccaacgttaagagatgtgcagtagatgagggctacacctcaaacaaagttgtcggctatgagtccaagcatggggtaattaaagatacaatggaaacagaaaaatcgagagattcaaagactgtagaggtcgatgatgagcccgcaaatgatgagtgcatcagaactgaaagtcttgaagttagcatagacagcagtgcagcacaagcattcaacatggccaaacctttgtcttgcaagtggacaagtgggattggtcctcgaattggctgtgtcagagagtacccaaaagaactgcaattccaagctctggaacaagttaacctgtctcccagagtcacccctggtcgctttgg

SEQ ID NO: 227116 - DNA, 477 bp, Gossypium hirsutum
ttcatctctctctctatctttctgtatctctttgagttacttatttttggttctctctccggtttcacctccgttcacttcgaaaaatggcctctcacattgttggatatccccgcatgggacctaagagagagcttaaatttgctttggaatctttttgggacaagaagagcagtgccgaggatttgcaaaaggttgctgctgatctcaggtcatccatctggaaacaaatggctgctgctgggatcaagtacatcccgagcaacactttctcttattacgaccaggtgctcgatgcaacatcgatccttggagctgttccacctagatatggctggaacggtggagagatcggatttgacacttacttctcaatggccagaggaaatgcctttgtgcctgccatggaaatgaccaagtggtttgacaccaactaccacttcattgttccagaattgggccctgatgttaacttct

SEQ ID NO: 227117 - DNA, 373 bp, Gossypium hirsutum
gtttggccactttgatgggaaaaaggaaaaaagaggcagaaatttagagaagttgattcaaacagaaagggtgatggaactgagcattcagaaaatagaagccttgattaggctaagtacgatagtgatgttggttttaacagcttgtttaattgggttggattctcaaacaaaggtcatcttctacgttcaaaagaaagcttctttcaaggatttgcgtgctcttgatggattgctgtatatcacttcattggctgctgcttataatctacttcaactatgctgctcttgattctcagcttattacaaaggaaccttgctgcaatcttacgcatatttggcttggcttcgttatattttggatcaggcagta

SEQ ID NO: 227118 - DNA, 349 bp, Gossypium hirsutum
aggaaatgggtttttgcccttgttttggttggaccaaagtcaagaagctgaagggtgatgacaagaaagaacttggcagaaaatgcaagcctcaattgtgttctggagttggttcagtaggatcaaaaagcattgcaggcttaagaaaggagtcatctgctacaactgatgaggctaatgatgacaagagggctcacactttcaactatcaacaactagcaaatgcaacacaaaatttcagaaaagaatccttgatagggcaaggtggatttggggctgtttataaagggcaattagaaagtactggtcaggttgtagctgttaaaccgctttattagattgtgtttct

SEQ ID NO: 227119 - DNA, 452 bp, Gossypium hirsutum
caagcgataaggtcactttggctctgtactatgaaactttatgcccatattgtgccgactttatcacaaatgaccttgtaaaggtcttcctcagtgatctgtataccattgtcaatctaaaattagtcccttggggcaatgctgacattcttggcgatgaaccccattgccagcatggagaagatgaatgctacttaaatactatacatagctgtgtcatctactactggcctgatgtgaaaaagcactttgattttattcgctgcacggagcaacaaagctcaaagaaacggctggttaagaacagagcagcaatgtggaaacaatgcagtgaaaagctgggaatgagtgctcacagaatcaacaaatgctatacttctggatatggacttaagcttctgctacaatatgctaatgagactgcaaagctaaagccaccccatgagtatgtg

SEQ ID NO: 227120 - DNA, 508 bp, Gossypium hirsutum
accatttgtctcaaaccctaaccaaaggcaaaaggaaaaaaaatggcagaaagaggcggaggtgaacgcggcgctttcaggcgtggctttggtggtggtagaggtgaccgtggtccaagaggcaggcgccgcggccgcaaggacgaagaggaaaaatgggtacccgtcacgaaactcggccgcttagtcaaagccggcaagatcacatcccttgagcaaatctacctccattctctccctatcaaggagtaccaaatcatcgaccaactcgtcggcccttcactgaaagacgaggtcatgaagatcactccagttcagaaacaaactcgcgccggtcagcgtacgcgcttcaaggccttcgtcgtcgtcggtgacggaaatggacacgttggactcggtgtcaaatgtagcaaagaagttgcgacggctataagaagggcgatcatattggctaagttgtcagtgataccggttagaagaggttacttggggaataagatcggaaaac

SEQ ID NO: 227121 - DNA, 421 bp, Gossypium hirsutum
aaggtgtcttaataaacgccttctttcttcttcttcttattcctttattgctttttagaatttttcttaatcgaaaatgagagagtgcatttcgatccacatcggtcaggccggtatccaggtcggaaacgcttgctgggagctttactgtctcgagcatggaatccagcctgatggtcagatgccaagtgacaaaactgtcggaggaggtgatgatgcttttaacacctttttcagtgaaactggtgctgggaagcacgtccctcgtgccgtcttcgtggatcttgaacccactgttattgatgaagtgagaactggtgcttaccgccagctcttccacccagaacaactcatcagcggcaaggaagacgcagctaacaactttgcccgtggtcactacaccattggcaaggagattgtc

SEQ ID NO: 227122 - DNA, 369 bp, Gossypium hirsutum
tcggtgcatgaatggacgcaaaaaaatgtttttatttttacttggcgtttgttttctagacacttttggtcacttgataatgacagcgggcatttccatcaccagttcctcccagaagtttacgaaaaaccaactctacttcaactgtctacgaccttccttctctcgcctcattacctccacttcacttacgaccctcctaacactactctgtccgtcgccttcatctctactccttccaaactcggcggatggattttctgggccataaatcccaacgccaccggcatgggcggttcccaagcactcgttagttacaaaaactgcatcaccggcgtttgctgtcgtgcatacttttgacatcagctc

SEQ ID NO: 227123 - DNA, 407 bp, Gossypium hirsutum
  unsure (1)..(407): unsure at all n locations
tagcatgcaatgaagggtgttaggcggaacctgttttctttctcccaaggaaggaagatggtccaactaccgnnngactgggaacctttctggtcttaagggccggactccatggcttccatgttcatgcccttggggacataactaacgggtgcatgtcaactggaccccattttaatcctgctggcaaagagcatggtgctcccgaagatgagaaccgccatgctggtgatctaggaaatgtcactgttggtgatgatggctgtgctagcttctccatcaccgacaaacagattccactcacaggcccaaactccattatcggaagagctggagttgtccatgcagatcccgatgaccttggcaagggcggccatgagctcagcaaaagcacaagaaatgctggc

SEQ ID NO: 227124 - DNA, 466 bp, Gossypium hirsutum
  unsure (1)..(466): unsure at all n locations
cggacgcgtgggcggacgcgtgggcttgaaatagatcagaaccttttcttcttcttttattttccctttcttttccaataactctcatttgtttaggttagatctgcgagagaaaaaaagagagcgagaaatggggagaatgcgacagtatttggcaatgaaaacggatcctgttgctcaagaattgatcagttccgatatcaaagaactcaagctggctgcgattaaattgatggatgatgcaactaaacttggaggtcttggttttggaacttcttttcttaaatgggtcgcctcattttctgctatttatttattaatcctggaccgaacaaactggagaacaaacatgttgacctcactnttggtaccttacatcttctntagtcttccttcaggattgttcagatttctaaggggggatgttggaaaatggattgccttcattgctgtccttttaagactg

SEQ ID NO: 227125 - DNA, 440 bp, Gossypium hirsutum
ctacattcttcttcctccataatcaaaagctctctctcaaattttttaaaaaaacttaaaaggctcccttttttttaaagaaagatttaaatggccgtcgattccgcaatctcgtctcctttgggtccgccggcatgcgagaaagatgcaaaagctttgcgattcatcgaggaaatgactcggaacgccgacccggttcaagaacgagttttgtccgatatcttaactcaaaactcccaaaccgagtaccttcgaaggttcaaactcaatggggcaagcgatcgtgactcgttcaaatccaaacttccggtcattacttacgaagaccttcagcctgaaatccaacgtatcgctaatggcgaccgttccgtcaatttatcagctcacccaatctcagaattcctcaccagctcccggactttagctggtgagaggaaact

SEQ ID NO: 227126 - DNA, 369 bp, Gossypium hirsutum
cagagctttcttcgacgagcagccatttgtaatcaatcatgggtcattctaacgtctggaactctgaccccaaaacctacggccctggctctcgcgcatgccgagtgtgtggaaaccctcatgccatcatcaggaagtacgggctcatgtgttgcagacagtgcttccgtagcaatgccaaggaaattggattcattaagtaccgctgaggaatgtttatatggctagaagttggaaacactttttagctagtatgaacctttgtttcgaaattgtagcaacttttaagataacattgctgttttattctaatttagcttaaaagcttgaaggctctgtttttgcaattggataactttgttgcttttt

SEQ ID NO: 227127 - DNA, 316 bp, Gossypium hirsutum
gatagcacgagccgtagtgcgccgattgcatcattttgaaatggcggtccctaagctgtctaagaagattgtgaagaagcgtggcaagaagttcaagaggccccaaagtgaccgcaagatctccgtcaagacaaactggcgaaggcctaaaggtatcgactcctgtgttaggaggaagttcaagggatgcactttgatgcccaacaatggttatgggaccgacaagaagactcgccactaacttaccaatgggtttaagaaatatgaaggcataacgtccaagagctggagctattcatggagcacaacaagacat

SEQ ID NO: 227128 - DNA, 405 bp, Gossypium hirsutum
ccacgcgtacgcgtacgcgtgggcagtttcgtcggaaaaaaatggcttcatttttcttggcgtctcttttcttcacctgttgggcgctgcttatttcaccggcgatttccctcacctgttcctcccagaagtttacgaaaaaccaagtttactccaactgcctcgaccttccttctctcgcctcttacctccacttcacttacgacccttctaacactactctctccgtcgccttcatctctactccttccaaacccggcggatggatttcctgggccataaattccaacgccaccggcatggccggttcccaagcactcgtcgcttacaaaaactccaccaccggcgttgtcgtcgtgcatacttttgacatcagctcttattcttcaattgtgcccgaaggat

SEQ ID NO: 227129 - DNA, 245 bp, Gossypium hirsutum
aaattttcccacgctttctggctttctcgagaacaaagaaaaaaaacatgagggtacagcagaggccgatccgcgcgctgtcgatgtgggtgagacgacagccgccgaaggtgaaggcttttttgggggtagtatcggggatggcagcgcttgttttttttcgattcatcgtacacgaccatgacaatttctttgatgcctgccaggctgtccactccattggaatctttgtccttatttataag

SEQ ID NO: 227130 - DNA, 483 bp, Gossypium hirsutum
caaataccagccaaacatcgtcgtcttctacactcttctctggtaagttcatcgaaagatcaaatcaagatccctgccaaaatgaacgacgctgatgtatccaagcagatccagcagatggtgagattcatccgccaggaagcggaggaaaaggctaacgagatctctgtttccgctgaagaggagttcaacatcgagaagcttcaattggtggaagcggagaagaagaagattaggcaggagtacgagaagaaggagaagcaagttgaaatccgaaagaaaattgagtattcgatgcagcttaatgcatctaggatcaaggtccttcaggctcaagatgatgtggttaatgcaatgaaagaatcagcatccaaggaccttctcaatgtgagccatgatcaccatgtttacaaaaggcttttgaaagatctaatcgttcagagtttagttagactgaaagagcctggagtcctacttcgttgt

SEQ ID NO: 227131 - DNA, 133 bp, Gossypium hirsutum
ctctgaccttacaagggtattggtgattttcttgcgaacaatcaaggatgaaggatttagttctttgtggagagggaacactgccaaccttattcgtgattaccctactcaggcctcgaactttgccttcaag

SEQ ID NO: 227132 - DNA, 421 bp, Gossypium hirsutum
aacactagtagaaggtttagttttacaaacatggctagttccggtgtccttaagttggtttccatgattctcatggtgtgcatgacgatgatgagtgcacccaaggcagccaaagccgccatcacgtgcagcgacgtggtgaaccacttgatcccgtgcttgtcctacgtacaaaacggcggtacacccgctgctgcatgctgcagtggggtaaaagcactctacggcgaggttcagacctccccggaccgccaaaacgtgtgcaagtgcatcaaatcggcggtgaacgggaattccgtacaccagcaataacctcaatctcgcagccggcctacctgctaaatgtggtctccaactcccttacagcatcagccccttcactgactgcaacaaggtgcagtgaggttgatgatgatgatat

SEQ ID NO: 227133 - DNA, 420 bp, Gossypium hirsutum
cccacgcgtccgcccacgcgtccgggcggcttctgcttctatttacaatcttctcactctcctgctcctttctggcatcccttttaccttctccgagctcgttaaagagcagcctctggtgttgaaataccacaatgggccactcttgaaggggaagatcactgttaatctcatttggtacgggaagttctccccaacccaacgctccataatcgtcgatttcatcaactctttgagctccgccgtcaaacccaaggttccgtcggcgtcgttttggtggaaaacgacggagaaatacaagtccgggttcttcactttggtcgtgggcaaacaaattcttcttgtaaattacccgctcggtaaaatccttaagtacccacacttgccggcggtggccggggaatttaacggcgttggttc

SEQ ID NO: 227134 - DNA, 451 bp, Gossypium hirsutum; identical to SEQ ID NO: 198824

SEQ ID NO: 227135 - DNA, 379 bp, Gossypium hirsutum
gtcgtatctctccttctaaaaccctacttatctcctcctcgcaaaaccctagccccttccttttttctttcgtagtaatcatccatggagttctggggtattgaagttaagtctgggcagcctattaaagcagatcctggtgctaactacgttatccattttttcccaggcttcacttggagagtccaagaacaaagcagaatccgttccactctatgtgaatgttgatggaaagaaacttattctgggaaccctttcccaccagatttgccctcaattatcttttgatttagtatttgatgaagagtttactggaacatgttgaaagctttactttattagttcaaaagcttcttcgacatgatccactctctttctt

SEQ ID NO: 227136 - DNA, 373 bp, Gossypium hirsutum
  unsure (1)..(373): unsure at all n locations
gaaaatcctgcacccgctcctgacgctctacggtttaaagagcaggccataacaaatctatctgatcttcttagacaagagaaccgagcagaggagctcagaagccttctgacccaactgaggcccttttttgcactaattccaaaggcaaaaactgctaaaattgtccgtggtataattgatgatgtagcttaagataccaggaacatcagatctccagatttctctttgcaaagaagtggtgcattggactctggctgataaatgaattttttttttttaaaataaataaagaaaaggggggggggggggggtggggggatatacaaaaaanccaaaaaaaggatatgtattgttaggttttttggtatat

SEQ ID NO: 227137 - DNA, 270 bp, Gossypium hirsutum
cggacgcgtgggcggacgcgtggatcaactttggccttgcaagcggactcccaggcaagtgcggtgtcaacatcccttacaagatcagccctagcactgactgcaacagcgtcaagtgaagttttggcatggaaagttcaccagctagtggaagccaaaataacgatagctacagaataaatatggatgttaaaattccagagttatgcgttgtgtactatgccgctttatgcgactacgtaatataatctttatctacaaattagtatc

SEQ ID NO: 227138 - DNA, 409 bp, Gossypium hirsutum
ctttttccctctttcgtgatcttcgatcttcgttctttttcccttttgggtttaccatataatcttcgcaattgaatcaaagtgagaaaacagttatcgagcggcgtcgtaatggaggcacacggcgccggactccggcgagttttggtgttggcattttgcgttgccgggatttggtctgcctatatttaccaaggctttcttcaggaaactctgtccaccaagcgatttggttccgacgggaagaggtttgagcatcttgcatttcttaacttggcgcaaaatgtggtctgcttagtttggtcttacataatgataaagctttggtccagtagaagcaatggtggtgctcccttgtggacttattggagtgctggaatcacaaatacaattggtccggccatgggta

SEQ ID NO: 227139 - DNA, 299 bp, Gossypium hirsutum
  unsure (1)..(299): unsure at all n locations
gtcgtcccaagggctcaaagcagatggnttacattgaaagaacacctttgatggttgctgctacatatggtagcatcgatggtattaaacttatcctatctttattcgatgctgatattaatcgtgtgtgcggccatgacaaaagcactgcactccactgtgctgcctctggtggggcttcaaatgctgttgatgttgtgaagctgttattagcatcttggtgccgatgccaatattgttgatgcatatgttcatttttctctatagttaggtttcttcttttttattcttaactcttt

SEQ ID NO: 227140 - DNA, 436 bp, Gossypium hirsutum
ctttgttattatcgccctaagcactttccccagttcccacgagtcatggaagctcttcaagcctcatctcttcgagcttcccctctaaaacctctccaaaaacccaaactcaatatccatttccccaatgcatcgagactcgttcccaggccaaccaagaaattctcttccatcaccgcttcatcccccaccgtatctgctcccaagcgcgagaaggaccccaaaaaacgggtcgttattacgggtatgggattggtttccgtttttgggaatgatgtcgatgcttattacgataagttgctggctggggaaagcgggatcggactcatcgaccggttcgatgcttccaagtttcctacccggttcgccggtcagatccggggtttctcttctcagggttacattgacggaaagaacgataggcgacttgacgatt

SEQ ID NO: 227141 - DNA, 250 bp, Gossypium hirsutum
atttctggcatgcagcttccgccgcagggaaaatatttatggaggcagcgagaactgtgaaagacgtttctccccacgagttcgcgaagggctacgccgcccacctgaaacactgcggcaagattgagcttcctccatggaccgatattgtcaagggtggtaaattgaaggagcttccaccgttcgaccctgattggtactatattatagctgctatcatggcaagggaaatctacttgtggggaggtct

SEQ ID NO: 227142 - DNA, 114 bp, Gossypium hirsutum
ctaaggtgtctgacactgttgtcgaaccttacaatgcttctctctctgttcaccagcttgctgagactgcgtttaaatgtatggttggggacaaccaatctttttatgatattt

SEQ ID NO: 227143 - DNA, 447 bp, Gossypium hirsutum
gccatttccaatggagaactcgttcacattggttacgattttcggtctgctgtttactttaggcaatgtaggtcctcaagctgaggccgcgagggcgtttttcgtgttcggagattcattagtcgataacggtaacaacaactatctagctaccacggctcgtgctgatgcttacccttacggtatcgactatcctactcatagagctactggccggttctctaatggccttaacatcccagatcttataagtgagcaaattggctctgaaccaacattgccatatctgagcccggagctaaacggacaaaggcttcttattggtgccaactttgcttcagctggaatcggcattctcaacgacaccggagtccaattcgtcaatataattagaatcggcgagcaatcacagtacttcaggcaatatcagcaacgagtgagtgcact

SEQ ID NO: 227144 - DNA, 127 bp, Gossypium hirsutum
atcctttcatcaccactgaatacatgacgtactttgttaagtacgacagggttcacgggcaatggaagcatcatgagctgggggggaacgactcaaagacccttctctttggtgaaaagcctgtcac

SEQ ID NO: 227145 - DNA, 399 bp, Gossypium hirsutum
gtttaaagaatttggttgaggaaaaggactagttttttaaagagctgcaggaaaatattgctgctgttagttttactcctcaaagcaaaatgggaaagatgctgatggcaaagtgtagaacattgcaagaggaaaatgaggagattggtactcaagcagaggaaggaaagatgcatgaattggccatgaaacttgccttacaaaaatctcaaaatgcagaacttagaagccagtttgaagcattatacaaacaaatggaagggctgacaaatgatgcggaaagatcaaatgaaatggtgtttatcttgcattagttaaattaatttttttctgtataataaattttctattatatttttttatatgtacttaatattaattcttttgattttttttttt

SEQ ID NO: 227146 - DNA, 399 bp, Gossypium hirsutum
attgatcttggtatcaagtatgacccttctactggtatctatggtatggacttctatgttgttctcgaacgagctgggtaccgtgtgggtcgtcgtcgcaggtgcaagtcacgtgtcggtattcagcaccgagtcaccaaggaggattccatgaagtggttccaagtcaaatatgaaggtgttatccttaacaagtctcaaaatatcggggcataggaatagccaggtaaacaagatcaatcgagttgtttttaagatttttgctacttgatattggttttaagtttgtgtatcagttgtagtttggctgaagagatttgtgaaatgctaaagtaattttgctgttggattaaatggcttcatttaatatagcacttggaaaacacaatgtcttttctt

SEQ ID NO: 227147 - DNA, 457 bp, Gossypium hirsutum
aaggaaagaaaaaaatgaagctcttgtttctaactttgctgctttgttctcttcttctatgttcttcagtttttgcaccaacaatggctcagcctcgttcacctttttgtgaagggaaatgcaaagggaggtgcaataaagcggcggtttgggatcggtgcttcaaatattgcggcatatgttgcgaggagtgtcaatgcgttccgtccggtacttacgggaacaaacacgagtgtccttgctacagagataaggtgaacaacaagggcaaacccaaatgcccttgaaaatgaaatatattcgagttcgggatttaatcaagcttaaagatcgaggacgaagaggccatatatatatatatatgcatgttgatgatgatgttattataaaaataaacttgttttgttgcttgtattttcccttgggtttttgtgttggtagtgttgaataatatttt

SEQ ID NO: 227148 - DNA, 180 bp, Gossypium hirsutum
gtggatgttactgagttccaaaccatctttttgtcatacccccgtatacatttcatgctctctggatatgcacctgtcatctcagctgagaaagcataccatgaacaattgtcggttcccgagatcacaaatgctgtgtttgagccttcaagcatgatggcaaaatgtgtccctaggctt

SEQ ID NO: 227149 - DNA, 451 bp, Gossypium hirsutum
  unsure (1)..(451): unsure at all n locations
cccacgcgttcgtccacgcgttcgcccacgcgtctgttatancatcttaccaccttctgtggaaatcgttgataatacacagcatgtagccagcctaaccgaaccaattgatttgtgtattggattacaaatcgagagaaatagaggatacggtataaaaacgccaaagaactttcacgacggaagttatcctatagatgctgtattcatgcctgttcgaaatgcgaatcatagtattcattgttatgggaatgattatgaataacaggagatactttttctagaattatggacaaatggtaatgtttaattggtagttgttctttattaattattcttttaatatttggttttttatatttttatttgttttataatttattaaatcattatatgttatattggtgaatctaatttatttatggtgggttattcgatttctttgatattt

SEQ ID NO: 227150 - DNA, 364 bp, Gossypium hirsutum
cattctatagaagtcattttcactgattaccctgtataatctatgtctattgggaggactctttctactgaatgtcacccgctagatgcggtgtgcatcgtcgtcacaggtgcaagtcacgtgtctgtattcaacaccgagtcaccaaggaggatttcatgaagtggttccaagtcaaatatgaaggtgttatccttaacaagtctcaaaatatcggggcataagaatagccaggtaaacaagatcaatcgagttgtttttaaagatttttgctacttgatattggttttaagtttgagtatcagttgtagattggctgaagagatttgttaaaatgctaaagttatttttgctgttggattta

SEQ ID NO: 227151 - DNA, 197 bp, Gossypium hirsutum
cccacgcgtccgcccacgcgtccggctttttcttatttttcctttttgtcccttgtttatgtggtatttccccctcatggccgccgctgatgtcgagttccggtgcttcgtcggagggctcgcatgggccaccgacgaccggaccctctaagaagccttcagtgcgattggtgaattcgtcgaactcgaatatcact

SEQ ID NO: 227152 - DNA, 348 bp, Gossypium hirsutum
cgcgagcggccgctcgcgatctagaactttcatttgattatgttacaattgaatcccgatctacgatagtgaaatgttctctttgtttaaccgttatgaatgatgtttttcttggaattagtgatgatgttttcttgtatatgatatctggaacctgggttttggaagtcttaagtaatggcaagtgagtttggggaatctgcttgccattcgccccaaaatccatcttgctctagtaacaatggtaatggtgatgctggtaactttgagtgcaatatctgctttgaaataactcatgatcccattcgtactttatgcggtcatttttattgctgtccttgtttgttc

SEQ ID NO: 227153 - DNA, 442 bp, Gossypium hirsutum
gcccacaactacagagaagagagtaaaggggaaattatagcgtcgttgttcttgcttcttcttctacttcgctctctctctttctgcgaagttcctccttcgttcttttatttattcagtattgtaaaagatggccgacggtgaggatattcaacccctcgtctgtgataatggaactggaatggtgaaggccggttttgctggtgatgatgctccaagggcagtttttcccagtattgttggtcgtccccggcacactggtgttatggttgggatgggtcaaaaggatgcctatgtaggagatgaagcacaatctaaaagaggtatccttactttgaaatatcctattgagcatggtattgtgagcaactgggatgatatggaaaagatttggcatcatacattctacaacgaactccgtgttgctcctgaggagcaccct

SEQ ID NO: 227154 - DNA, 455 bp, Gossypium hirsutum
aaccattaaagcttggaacaagcttaaggaagttcttaaatggccccaaagagaggtgtaaaggttgctgccccggccaagaagaaacaagagaaggttgtgaatccactgttcgagaagcgtccaaagcagtttggtattggcggggcactacctccaaagaaggatctacatcgatttgtaaagtggcctaaggttgtccgcattcaaaggaaaaagaggatccttaagcagaggttgaaggtcccaccagcattgaaccagtttaccaagactcttgataagaaccttgctacgagtctattcaagctgcttctcaagtacagaccggatgacatggcagccaagaaggaacgtctactgaaaaaggctcaggctgaggctgaaggcaaagcttctgagtctaaaaaaccaattgttgtgaaatatggacttaaccatgttacctaccttat

SEQ ID NO: 227155 - DNA, 400 bp, Gossypium hirsutum
gcagccgcagccagcaagcagcagtagcatcagttttagcggaagaatgtctcacaggaaatttgagcacccaaggcatggttcccttggatttcttccaaggaagcgagcctctcgtcacagaggaaaagtgaaggcattcccaaaggatgaccctaccaaaccttgcaagctcactgcctttctggggtacaaggctggtatgacacacattgtcagagaggtcgaaaaacccggatctaagcttcacaagaaggagacatgtgaagctgttacaatcattgaaacccctcctatggtgattgttggggtggttggatatgtgaagacaccacgtggccttcgctccttgaacaccgtctgggctcagcatctgagtgaggaaagtcagcgcccgttc

SEQ ID NO: 227156 - DNA, 404 bp, Gossypium hirsutum
ttccagggacgacgccacgcgttcgaccacgcgtacggaacatccttgcagctttgtctttagaattgagtccatcaagtcttgcaacagatcataggagagtgagattcaacataccatcagggacttcaatgtcatgccctcatgtgagtggaatcgcttgcttgatcaaggccagacacccagattggagtcctgcagcagttaaatctgctctaatgacaaccgcttatgttcatgataacatccataatccactccaagactctttcactgcagcaggcttcactccctatgatcatggagctgggtatatcaaccctttgaaagctctagacccaaggtttgatctatgacatttcaacccagggattactttttaatttcctttgtacacagaaatt

SEQ ID NO: 227157 - DNA, 401 bp, Gossypium hirsutum
gacatgaggaataagctttgtgataaataccatgtttttgtcactgcttcggataaggaagagttaatggctaagcttcaggagacagaggattggttatacgaagatggagaggatgaaactaaaggtgtttatattgccaagcttgaagagcttaagaagcaaggtgatcctattgaagaacgttacaaagagtattctgagaggggaactatcattgatcagcttgcttactgcattaacagttacagggaggccgtcatgtcaaacgataccaaatttgatcacattgaacttgccgaaaagcagaaggtttttgaatgagtgtgttgaagctgaggcctggctcatagagaaataacagcatctagatcatacttccaagttttgtcacacctgtt

SEQ ID NO: 227158 - DNA, 304 bp, Gossypium hirsutum
acggattccggttcgagccacgcgtcacgcgtgctaacaacattagcccaagctccggcacctgctcttgcaccttctggtccgacaaacgtcaccaagatcctcgaaaaagccggtcaattcaccctcttcattcgtcttctaaagtccactcaagtggccaaccagctgctcggtcagctcaacaattccaacaatggtatgaccgtttttgcaccaacggacaatgctttctccagccttaaatcgggcacattgaattcactcaccgatgaacataaagtggagctggtgcaattccaca

SEQ ID NO: 227159 - DNA, 262 bp, Gossypium hirsutum
ttacgcccacgcgtgcgcacgagcgaccgactttttttttgttttgtgcgatccctataaccttcaacgagctcgctaaaaaggagcctctggtgttgaactaccacaatgggccactcttgaaggggaagatcaccgctaatctcatctggtgccggaagttcttcccaacccagcgctccataatcgttgatttcattaactctttgtgctttgccgtcaaacccaaaattcccgctgcgtggttttggtggaaaaccaa

SEQ ID NO: 227160 - DNA, 230 bp, Gossypium hirsutum
ctcgaaatcttcttcattctcattctctctccactgaactcttgctaaacggtatcgttttagtcagtctttcatcaatggcgaaagaaccagttcgcgtcctcgttactggagctgcaggacaaatcgggtatgctcttgtacccatgattgctaggggagtcatgttgggtgctgaccaggccgtgatcctttacatgcttgatatcccatctgctgcggatgctaaa

SEQ ID NO: 227161 - DNA, 145 bp, Gossypium hirsutum
aaaaccaaagcttactttaagcgggtggaggtttcatacaaaagaaggtgagaaggaaagactgactaccgggctaggattcgcctaatcaatcaagacaagaataagtacaacactccgaaataccgattcgttgtcccaattt

SEQ ID NO: 227162 - DNA, 256 bp, Gossypium hirsutum
aaggaagacaacgatggtgtctttgaagttacagaatcgtctcgccgctagcgtcctgaagtgtggtccgttcaaggataggcttgggcctaataaaatcaatgaaatctccatggtcaactccaggcataatgttaggaaacttgttaaggatgtttttagtatctcttaatcttttcaatttttattctctatctttttctctacaatataattatatactattataataattattcaactttatttatttatt

SEQ ID NO: 227163 - DNA, 459 bp, Gossypium hirsutum
ctttgcttcaagagagaaatgagtcctagccaggattactgtgatgattactacaaatacatgtatccatgtgcccctggagctcaatactacggccgtggtgctttgccaatttactggaactacaactatggagctgctggcgatggtataaaagttgatttgttgcaccaccctgagtatctcgagcagaacgcaactattgccttccaggctgccatctggaggtggatgaccccaatcaagaagaaccaaccttcagcacacgacattttcgtgggtaactggaaaccaaccaagaatgacacagaggaaaaacggggtcctacttttggctccaccatgaacgttctctacggagattacacttgcgggcaaggcgatatcgatcccatgaacatcatcatctcccattaccttcattaccttgacttactaggtgttgggcgagaggaagca

SEQ ID NO: 227164 - DNA, 466 bp, Gossypium hirsutum
atcaatttgagtactgtttcttgttctctcttttttggcatcccctgcaatggcgtctgatcttgagaccaaagccaaagaagccttcatcgatgaccacttcgagcttgcgctccatctctactctcaagccatccaacttaatcctaaacacgccgagctctatgctgaccgtgctcaagccaacatcaaactcaataatctcactgaggctgtggcggatgcgaacaaagcgattgagttggatccttccatgtctaaagcttatctgcgtaaagccactgcctgcatgaagcttgaagagtatcaaactgctaagtctgcactggagactggcgctgctttggcacctgcagaagcaagatttttcaagttgattaaagaatgtgaagagcgaattgcagaagaaactggtgatgtatcaatgcatatgccagagcattggcttaaaatggatgtcccgcaa

SEQ ID NO: 227165 - DNA, 270 bp, Gossypium hirsutum
gtccatttacttcaagcaagcatttcccttttttggtgtttaaccaacaaaggcatctgagtgggagactttagccaaagaggggggcatcgataaccacttcgagctcgcgctccatctttactctcaagccatccaacttaatcctaaacacgctgtgctttatgctgaccgtgctcaagccaacatcaaactcaataatctcactgatgctgtggcggatgcgaacaaagcgattgttttggatcctttcatgtctaaagcttatct

SEQ ID NO: 227166 - DNA, 261 bp, Gossypium hirsutum
atttcctctttgggtccaaacttggaggcggctggatataaaacaggatcgggaggatgttgtgtttttcttgccaatatagacaccaaatctgatgcgactgttaatttcaatggcaattcataccatttgcctgcatggtctgtcagcatcttaccagactgtaagaatgtagttatgaataccgccaaggttaactctatgagtgtgaattcaagcttcaagcatgaatatttgaatacaaatgctgattcaactgac

SEQ ID NO: 227167 - DNA, 311 bp, Gossypium hirsutum
ccacgcgttcgcaacaaccacatgacccatcctttttggtgatgttgctagggcacagtggctggtacacaagggacaaggaggtgcaagtgaccattgcctacaaccatttcggagagggacttatccagagaatgccaaggtgtatgcatggatatttccatgtggtgaacaattactacactcactggtgaaatgtatgttattggtggaagttctaactttatatctcttctgtttttctattctttatttgattatttcattatatctattatgaattatgatgtatttctatttgttttatttta

SEQ ID NO: 227168 - DNA, 385 bp, Gossypium hirsutum
aactctccagttctcaacgaattttgtgtatttcaccaagaagaagaagaagatgtcgtggcaaacatatgtagatgagcacttgatgtgcgaaatcgatggcaaccatctctcctccgccgccatcgtcggccacgatggcagcatttgggcccagagctccaatttccctcagttcaaacaagaagagattaatgccatcatgaatgactttgctgaacctgggtcacttgctccaactggattgtaccttggtggcacaaaatatatggtgatccaaggcgaacccggatatgttattcgagggaaaaagggatctggaggtattactatttaaatgaccaatatggctttgctcatcggaatctacgatgagccaatggct

SEQ ID NO: 227169 - DNA, 301 bp, Gossypium hirsutum
cggacgcgtgggctcacacggacgggagggagacgtgaaaaggaagacaacgatggtgtctttgaagttacagaagcggctcgccgctagcgtcctgaagtgtggccgtggcaaggtttggcttgatcctaatgaaatcaatgaaatctccatggccaactccaggcagaatgttaggaaacttgttaaggatggttttgtcattcggaagcctaccaagattcactcccgatcttcgtgcacgcagaatgaaagaggtcaagagaaagggtcgtcattctggctatggtaagaggaaggg

SEQ ID NO: 227170 - DNA, 400 bp, Gossypium hirsutum
aagatatcataaaaaggaaaaaaaaatgaagctctttgttctaactttgctgctttgttctcttcttctatgttcttcaggttttgaaccaacaatggctcagcctcgttcacctttttgtgaagggaaatgcaaagggaggtgcaataaagcggcggtttgggatcgatgcttcaaatattgcggcatatgttgcgaggagtgtaaatgtgttccttccggtacttatgggaacaaacacgagtgtccttgctacagagacaaggtgaataacaagggcaaacccaaatgcccttgaaaatgaaatatattcgagttcgggatttcatcaagcttaaagatcgaggacgaagaggctatatatttatatatgcatgctgatgggggtaattataaaaat

SEQ ID NO: 227171 - DNA, 407 bp, Gossypium hirsutum
attcttattccttttatatttttcctctccaatttgccgtcactttcccgagaaaatgagagaaatccttcacatccaagttggccaatgcggcaatcagataggagccaagttctgggaagtcgtatgtgccgaacatggcatcgattcaacgggtcgatatggtggtgactcggagctccagcttgagcgaatcaatgtttactacaacgaagccagttgtggccgttttgttccccgcgcagttttaatggatctggaacccggaaccatggatagcgtaagatccggtccttacggacaaattttccgacccgataacttatttttcggacagtccggtgcgggaaacaatctggctaagggacattacactgaatgagcggaacttaccgatttccgttctt

SEQ ID NO: 227172 - DNA, 465 bp, Gossypium hirsutum
cctatttttaccagcgccactttctctgtacatatattgctttgctctttttttctaactacagatcaagaaccaaaaaggataaaactatggctgcggctgtcctccggaaccctaattcgaggcgccttttgtcattctcttccccgatttactggtcctgtcgtggctttatctctgcttccaacttctcagtttccgatcttctctctggaaatgaggaggcggcagctcacgctaacgctaacccttggtggagatccatggctactttcactcgcacaaaacctcatgttaatgtaggaacaattgggcatgttgatcatggaaagaccacactgactgcagcaatcacaaaggttctggctgaagaaggaaaagccaaggctattgcctttgatgaaattgacaaggctcctgaggagaagaagagaggaattacaattgccacggctcacgtggagt

SEQ ID NO: 227173 - DNA, 195 bp, Gossypium hirsutum
gatagaaaaatggagaacgcaatcaacagacaattagttttgcttaatcatttacaaccctcttgtcaatctcatcaatcatctgctgctattctgtttccttcaaactgcgcggcgggggatagcgctgcctatcaccggacggctgcttttggggatgatgttgtgattgttgcggcatgttacactgctctt

SEQ ID NO: 227174 - DNA, 319 bp, Gossypium hirsutum
  unsure (1)..(319): unsure at all n locations
atagcatcagtcaaatccctacctggcatctttgttgatcctcccatccaanccctaaatttttgaatgatcaaagaaaaaattgggtaattcttcatcgatcccatgcaatttctttgagaaaatatatctaatacccagaacaaaataaaagaaatgtatagcattttcaaagaacaagcgatagagtatgtgaagcaagcggttcaagaagacattgctgggaactatagcatagcttttcctttatacatgaacgcgctcgagtatttcaagacccatttgaaatacgagaagaaccccataatttgggtggcta

SEQ ID NO: 227175 - DNA, 221 bp, Gossypium hirsutum
aaacacctcattttcctgagaaaaaaaaaattatatgaagcgtaagtgaagaaggagaagaggaaaaatgaaaatggcggaccagcttaccgatgagcagatctctgagttcaaggaggcctttagcctctttgacaaggatggcgatggttgcattactaccaaggaactgggtactgtaatgcggtcactcggacagaaccctactgatgcagtacttc

SEQ ID NO: 227176 - DNA, 356 bp, Gossypium hirsutum
cggacgcgtgggcggacgcgtgggttttgggtgctttatctgaccaacaataacaccaccaactcctcatcgttatcttgaactcccaggattaatcctgtaatagccaaggcactgcgtactgaagcagctgccacagcacagcccataaaaatggtgaaagctatcagggttcatcaacttggtggacctcaggtccttaaatgggaggatgtggaacttggggaacccaaagagggtgagatacgtattaaaaacaaagctattggactgaatttcatcgatatctattttcggaaaggagtttataaggctgctaccatgcccttcactccaagaatggaagctgttggaga

SEQ ID NO: 227177 - DNA, 340 bp, Gossypium hirsutum
aaaagtggaaggctctctgaaccttacaagggtattggtgattgtttcaagcgaacaatcaaggatgaaggatttggttctttgtggagaggaaacactgccaatgttattcgttatttccccactcaggccttgaactttgccttcaaggattacttcaagaggcttttcaacttcaagaaagacagagatggttactggaaatggtttgctgggaacttggcatctggtggtgcagctggtgcttcttcccttctctttgtctactccttggattatgctcgaactcgtcttgcaaatgatgcaaaggcttcaaagaagggaggagagagacaattta

SEQ ID NO: 227178 - DNA, 187 bp, Gossypium hirsutum
aaaagtggaaggctctctgaaccttacaagggtagtggggattgtttcaagcgaacaatcaaggatgaaggatttggctctttgtggagaggaaacactgtcaatgttattcgatatttccccactcacgccttgaactttaccttcaaggattacttcaagaggcattttaactttatgaaagaca

SEQ ID NO: 227179 - DNA, 175 bp, Gossypium hirsutum
ctcgttgctgttaacgatcctttcatcactactggatacatgacctacatgtttaagtacgacggtgttcacggtcaatggaagcgtcatgagcttaaggagaaggactcaaagacccttctttttggtgaaatgcctgtcacagttttcgatatttgaaactctgtggtaatcc

SEQ ID NO: 227180 - DNA, 399 bp, Gossypium hirsutum
gttgtctccgaggctgatatctttgtcaccactactggtaacaaggacatcatcatggttatacgcacatgaggaagatgaagaacaatgccattgtttgcaacatcggtcacttcgacaatgaaattgacatgctcggtctcgagaattatcctggtgtcaagcgcattaccatcaagcctcaaaccgataggtgggtcttccctgaaaccaacaccggcatcattgtgttggctgaaggacgtctcatgaacttgggttgtgctactggccaccctagctttgtcatgtcatgctctttcaccaaccaggtgatcgcccagctcgagctgtggaaggagaaggcaaccggcaagtacgagaagtaagtgtacgttttgcctaatcacccttgttgag

SEQ ID NO: 227181 - DNA, 458 bp, Gossypium hirsutum
gtagatcttctttcaaccgcgcctaataaccgcttttatttttctcagacgtgaaaaaaatggggctgtctttcaccaagctattcagccggctatttgccaaaaaggagatgcgtatactgatggttgggcttgatgctgctggtaaaaccaccattctttacaagctgaagttgggagagattgtcactaccattcccaccatcggtttcaatgttgagaccgttgaatacaagaacatcagcttcactgtttgggatgttggtggccaggacaagatccgaccattgtggagacactatttccaaaacatgcaaggacttattttcgtgggtgatagcaatgatcgggaccgtgtggttgaagctagagatgagttgcacaagatgttgaaagaggatgagttgaggatgctttcttttaatatttgcaaacaggcagatcttccaaaggtatga

SEQ ID NO: 227182 - DNA, 453 bp, Gossypium hirsutum
gattcctaaacgaaaccctattttcctatctgttttctttgtttcgctcctcgccatcgcctccgctaaagtattcttcgaagaacgttttgatgagggatgggaaagtcggtgggtaaaatctgactggaaaaaggatgagaacatggctggggagtggaattacacttctggaaaatggaatggagatcctaacgacaaaggtattcaaactagtgaagactacaggttctatgctatttcagctgagttcccagaagtcaacaacaaagataagactctagtcttccaattttctgtcaagcatgagcaaaagcttgattggggtggtggctacatgaaagtgctcagcggtgacattgaccaaaagaaatttggtggggaaaccccatacaacatcatgttttgggcctgatatcttgctgtatagcactaaaaaagtgcatgcttttt

SEQ ID NO: 227183 - DNA, 367 bp, Gossypium hirsutum
ttccggaattcttattccttttatatttttcctctctatttttccgtcactttcccgagaaaatgggagaaattcttcacatccaaggtggccaatgcggcaataagataggagccaagttctgggaagtcgtatgtgccgaacatggcatcgattcaacgggtcgatatggtggtgactcggagctccagcttgagcgaatcaatgtttactacaacgaagccagttgtggccgttttgttccccgcgcagttttaatggatctggaacccggaaccatggatagcgtaagatccggtccttacggacaaattttccgacccgataacttcgttttcggacagtccggtgcgggaaacaattgggc

SEQ ID NO: 227184 - DNA, 388 bp, Gossypium hirsutum
gaggagagagccaggcaagaagctgctgctaaaatgtgcagcagaagagtcatcgaaacaagaaaagggtggggaagaacaggatgcgacgatgacagaacgtgctagtgagggagcttcagaagctgataataagaaaaatgaatttttgcaggctcttgcaatgtcgatggatgagcctgcctccagccatgatttacaggatactgagatgtcagatgcagctactgaggatccagagctggcattagctcttcaattatccgtgcaagacagtgcaaaagattcatctagtcaggcagatatgagtaagttattggcagaccagtcattcgtattcttcatccttgtatcgctttctggggtagatccaaacgattccttcatt

SEQ ID NO: 227185 - DNA, 425 bp, Gossypium hirsutum
gcaaagcattagcaaccatagccatggctttctactcaaaactcttctctatgactatcctgtggctttttgccctcttctccatgcaaatccatgctagagagtacttcagcaaattcccaagagttaacaccaatgagaaagagacaacaaccagagagcaagagcacgagaccttcgttccccagaccacccaaaagccagaagagcaagagccaaggttcatccctgaaacccaaaatggttatggcctttacggccacgagtcaagctcaagctcatgctcaagctcaagccggcccagtttcaccaccaaagaaacctatgaaccctatgtcacccctgttagatttcacccttgtgaaccctataacagcattcccggaaccttcaacaattaaaacaattacttctacaacaaggat

SEQ ID NO: 227186 - DNA, 419 bp, Gossypium hirsutum
cggacgcgtgggtttttgcagaaaaagcttctgcttctcctatatatattttttatgatgcctagcgtcaacccagaccaatccgacaaggatcccgagcccttcgtggaggtcgatccgaccggtcgttacggtcggtacaccgaacttctaggatccggagccgtcaaaaaagtttaccgggcattcgatcaagaagaaggaattgaagttgcatggaaccaagtcaagctaaggaatttctccgacgatccggcgatgatcgatcggctttattcggaggttcgagtgataaggtcatgaaccaacaacaacataatctccttgcacaggacttggcgtgacgaggaacataacacactgaatgtcataaccgctgtatgtacttttggaaatttgatggtatataggaagaaaca

SEQ ID NO: 227187 - DNA, 388 bp, Gossypium hirsutum
cggacgcgtgggtttttttttctttttttttttgttaataagaattcaaaagtttcttttactgaaggaattaaatcatgtttatcttcgattggttctatgggatccttgcttcccttgggttatggcaaaaagaggccaagatcttgtttttagggcttgataatgccggcaaaaccacgctgcttcatatgctcaaagatgagagattagttcagcatcagccaacacagcatcccacatcggaggaattgagtattgggaaaatcaagttcaaggcattttgatttgggaggccatcagattgctcgaaaagtttggaaagattactaccccaaggtgggtgctggcgtgtacctagtggatgcttacgacaaggagaggtttg

SEQ ID NO: 227188 - DNA, 367 bp, Gossypium hirsutum
cccacgcgtccgctctgcaaaaatggcaaggaaaattgtgctcattctggtactgagatgcctgtgcattgggctagcagctgctgactggaacatcttgaacccaatatggaatatcaatgcaagacaagatagcttgaaaaactactgtgaaagttggaggatcaatgtggagctgaacaacataagggagttcgatgtagtgccccaagaatgcgttgctcacatcaagaagtacatgacttcatcacagtacgatgctgactgccagagagctatcgaggaagtgacactatacttaagccgctggtgctctttgataggtgatggcaagatgcatggattttcgatggtgatgatacactca

SEQ ID NO: 227189 - DNA, 444 bp, Gossypium hirsutum
ggcgggtggtgcaatcccccacgagaacactttgatttggccgaaccggcattcttgcagatcgcggaatatcgagctgggatcgtccctgttatgttcagaagggtgtcatgtgtgaagaaaggaggcatcaggtacaccatgaatggacattcgtacttcaacatggtgttgataaccaacgtgggaggggcaggggatataacgtcagtgtccatcaagggttccaaaacaggatggctacctatgtccagaaattggggccaaaactggcagagcaatgcttaccttaacggccaaagcctctctttcaaagtgactgccagcgatagcaggactatcacaaactacaatgtagtgcccgctggttggcaattcggacaaacttttgaaggaggccaagtttaagacaatattatagtgtccgtctaatattaaaactgg

SEQ ID NO: 227190 - DNA, 367 bp, Gossypium hirsutum
gctttttaatttttcattatgggaaagatcaagatcggaatcaatggatttggaaggatcgggcgcttggttgcgagagttgctctccaaagcgatgatattgagctcgttgctgctaacgatgctttcatcaccactgaatacacgacctacatgtttaagtacgacagtgctcacggccaatggaagcatcatgagctctatgagaaggactcaaagacccttctctttggtgaaaagcctgtaacaggtttcggtatgagaaaccctgtggaaatcccatgggctgaagctggagctgagtattgtgctgagtatacacggggctttactgacactgacaaggctagttatcacttgaaggggg

SEQ ID NO: 227191 - DNA, 146 bp, Gossypium hirsutum
gaacgaggcacttaggtcgtatgcggcccatgtagctcaacttcgcaataaaggattgcctacgattgggactacgttaaagacagagaaggcatgcaatcccttccttcggacgttaaggacagagattcggcaggcattagata

SEQ ID NO: 227192 - DNA, 253 bp, Gossypium hirsutum
gcgcccacgcgtccgcggacgcgtgggttgtaataccactactgctaacgtcttttcatttatttggagctaaaagtgtttagctcttcgcttcgagagagaccatgttggtttaccaggatctcatctccggtgacgagcttctttctgactcattcccctacaaggaaatcgagaatgggatgctgtgggaagttgagggaaagtgggttgtgcaaggagctattgatgttgacattggtgccaatccttc

SEQ ID NO: 227193 - DNA, 459 bp, Gossypium hirsutum
  unsure (1)..(459): unsure at all n locations
ggcgggtggtgcaatcccccacgagaacactttgatttggccgaaccggcattcttgcagatcgcggaatatcgagctgggatcgtccctgttatgttcagaagggtgtcatgtgtgaagaaaggaggcatcaggtacaccatgaatggacattcgtacttcaacatggtgttgataaccaacgtgggaggggcaggggatataacgtcagtgtccatcaagggttccaaaacaggatggctacctatgtccagaaattggggccaaaactggcagagcaatgcttaccttaacggccaaagcctctctttcaaagtgactgccagcgatagcaagactatcacaaactacaatgtagtgcccgctggttggcaattcggacaaacttttgaaggaggccagttttaagacaatattatagtgtccgtctaatattaaaacttgaatngacatattact

SEQ ID NO: 227194 - DNA, 464 bp, Gossypium hirsutum
  unsure (1)..(464): unsure at all n locations
gtcttctcttatttctttcgatacaatagaatagaatagaatagcaggcaaagcatggccatggcttttgcgaccttcaatctatctccttctctaagatttgttagcaacaacaaaggctttttcgattctcaattatccaacttttttttatcatcacatttgttccttgggacttcttctttctcggtgccaactctcagtttctccaccattcatcaaacctcgtgtcgcccccacatcaacgcctcaccatgctcctctacttccttcagatgctttgcccagaaatcaccggttgatggcctcggcagtaacggcgcttccgagagactggttgtgctagttattggtggaggaggaagagaacatgcactttgctatgcattgcagcgctctccttcttgtgatgccgtcttctgtgcaccaggcaatgctggtatttncagctctgggaatgcaac

SEQ ID NO: 227195 - DNA, 420 bp, Gossypium hirsutum
  unsure (1)..(420): unsure at all n locations
aaaaaattcaaaaaagaactagaaatttattatcgctcacagtctctttgagaaagcccaataattccctctctcatttttaattttggatattttttttgccctagattttctctctgtaagctctacctagagaagaagccatggctaatgcagcgtctggaatggctgtgcatgatgactgcaaactgaagttccttgagttaaaggccaaaagaacataccgctacatagtattcaagattgaggagaaacagaagcaggttgttgtggaaaagcttggtgagccaagtcaaagctatgatgatttcacttcaagcctccctgctgacgaatgtcggtatgctgtctatgattntgactttgtgactgctgagaattgccaaaaaagcaggattttcttcattgcatggtctcctg

SEQ ID NO: 227196 - DNA, 464 bp, Gossypium hirsutum
ctcaatcccaatcccaatcccaatcccaaccccaaccccaaccccatccccatcatcccttctttctttcccatgcctcgattcttcaatcctttcctcttatccttatttttctgtgttttagggttagggtttggcgttgatttcggtcaagctttcaaagtcccctttagggtcagtgatgttctcccggtgcttccgcaccaggtatcttggccggtcttgaacactcttcattccgccgttgacttgttgccggcttttgtcggctccgtgaccccgaacaatggctcaattgattggaaaggatcttgctttcatggaaacgaggctcgtctcgagttcaccaatagcgatcgcgacgattcgggattgggcggtggtgtgcttcacctcacgacatctgaagcgcacagctggacctgtatggatctttatgtctttgcaacaccttataggattac

SEQ ID NO: 227197 - DNA, 403 bp, Gossypium hirsutum
cccacgcgtccggggttatcttcaacaatttatcttctttattctggttgctctgccattcatgtttatttctccaactcattcctctttagctaatggtaatgttaatatattgcctcctaccaatacaagcgataaggtcactttggctctgtactatgaaactttatgcccatattgtgccgactttatcacaaatgaccttgtaaaggtcttcctcagtgatctgtataccattgtcaatctaaaattagtcccttggggcaatgctgacattcttggcgatgaaccccattgccagcatggagaagatgaatgctacttaaatactatacatagctgtgtcatctactactggcctgatgtgaaaaagcactttgattttattcgctgcacggagcaa

SEQ ID NO: 227198 - DNA, 333 bp, Gossypium hirsutum
tcaactctcaaaccttcaagtctcatttctttctctttctctttctctcactagagaatccaagtttctgtttggccaaagagaaaataattaatgatggtgggaaaagatcaagatctgggtttaagtctaagcttgagttattctcaaaatcatcattcgcttcagttaaatctaggcccatctctcgttccatcttctgctaatcaatgctactctccttctgatccaaacatggaatctttacgggcagagactagatcatctcttaaagggatcgacgttaacaggctgccatccacggtcgattgtgaagaaaaagcctgagtttca

SEQ ID NO: 227199 - DNA, 431 bp, Gossypium hirsutum
gggaagtggaaacccttgaactccaaattttaaagcatttgaagaatttcactaacgagatggaaattgattccgagtcggaaaaaccaagtgttaaaatcccagaagaaggcggttcaatgcaaatgaattcctcggaaaaaaagggaggcgatgatgaaaaagagcagcttgctggtattatggacaagttaaatatcgagtcatcttcttccggcttcaagaaaaaaccagtaattatcattgttgttggaatggcagggagtgggaaaacgacgttgcttcataggcttgtttgccatactcaagcttcgaatattaggggttatgtgatgaatcttgaccccgctgtaatgacccttccatttggtgctaatattgatataagagatactgttaaatacaaggaagttatgaagcaattcaatctt

SEQ ID NO: 227200 - DNA, 461 bp, Gossypium hirsutum
ctctctctctctattctctttggcttatctatcgctttgatttcgcatccttgctgtgcactcgatggcaaatcgatggttgaggcctgaggtgtatccgctgtttgcggccgtaggtgttgctgtcggaatctgcgggtttcagttggtgcgcaatatctgcatcaaccctgaagtcagggtaaccaaggagaacagggctgctggggttttggacaactttgctgagggagaaaaatattctgaacatttcttgagaaaatatgtccgcaacaagacgccagaaatcatgcccagtatcaacagcttcttcactgacccaaagtgaggcttcactcttgctttatgctgaaactaaaaaataaaaaaaatagaagaacttagtcttattcaatcaataccaagttatgccctttctttttgctgactgtgatgcaaatttgtgttgggtttgcacttga

SEQ ID NO: 227201 - DNA, 366 bp, Gossypium hirsutum
ctcgtattcatcttcttacatactgtttgtcagaaaaaaaaaacatgaaaaccaaagtcttttactgttgtttggtcttgttttttctgggttttcagggttatgttgatgcaagactattagtagaatcaaaaccggatagagatgatactgctgcttatgctcgttggttggtctcccagaattcttgggggattttaactacattatcaattgagttggaagggtcaccatttgggaatgtcgtttcgtttagtgatggggtacctggaaaaggtactggtgtcccatatttctatttgtcaacccttgatccaacagcaagaaatgcattaaaagaccatcggtccttacttgcaattcagt

SEQ ID NO: 227202 - DNA, 424 bp, Gossypium hirsutum
aaaaggaaaaaaaaatgaagctcttgtttctaactctgctgctatgctctgttcttctatgtccttcagtgttttgaaccaacaatggctcatcctcgttcaccttttcgtgaagggaaatgcaaagggaggtgcaataaagcggcggtttgggatcgatgcttcaaatattgcggcatatgttgcgaggagtgtaaatgtgttccttccggtacttatgggaacaaacacgagtgtccttgctacagagacaaggtgaatttcatgtggctacccaaatgccctttaaaatgaaatatatccgagttcgggatttcatcaagcttaaagatcgaggacgaataggctatttatatatttatgcatgctgatggtgttatataaaaaaaaactgtttattgcctgttgttttctttgggttttg

SEQ ID NO: 227203 - DNA, 403 bp, Gossypium hirsutum
ggctgagggtgggtttggatccgttcatagaggacttctcccagatggtcaggcaattgcagtgaagcggacacaaattggctagttctcaaggagatcttgagttttgctcagaggtggaagtcctgagctgtgctcagcacaggaatgttgttatgctgattgggttctgtattgaggatagaaggcgactgctggtttatgagtacatatgcaatggatccctagattctcatctatatgggcgtcatcggtaacctttagaatggtctgcacggcaaaagattgcagttggtgcctctataggtctgagatacctttcatgaagaatgcacagtttgctgcattgttcaccgtgacatgcggtcgaacaacattttcattcacccttgatttttaacct

SEQ ID NO: 227204 - DNA, 385 bp, Gossypium hirsutum
cccacgcgtccgcccacgcgtccgtccacgcgtccggttcagagagctgtctgcatgatctccaactcaaccagcgttgcggaagtgttttcccgcattgatcataaatttgatctcatgtatgccaagcgtgcatttgtgcactggtatgttggtgagggcatggaggaaggagagttttccgaggcacgtgaagatctcgctgccctggaaaaagattatgaagaagttggcgctgagtctggtgaaggagacgaaggggatgaggaggagtattgagggatgtaccgttatccgtttgctactgtgatgtattttcttgttgattttggatgtgtgttttcagggttgaatacctgggtataatgactagtttttggtattt

SEQ ID NO: 227205 - DNA, 421 bp, Gossypium hirsutum
cccacgcgtccgaaaggactgaaaaagaaaaacagaaatggctccgaaagcagatacccaatctgccggcgctgtcgctgcagctgacgcatcctctcaattctcaatggacccactattccacatcttgaaagtcgtcccttactccttccttcgcgctccgcgcctccgcctcaagatcccctccgtctcccttccttccgccatgactgtcttttctctcgtcctcctcacttacttcatggtggtctccggcttcgtctacgacgtcatcgtggagccccctggcattggctctacccaagatcctgccactggcgccgtccgacctgttgttttcctttcaggtcgagtcaatggtcagtacatcatagaaggactctcctctgggtctatggttgtggctggtggcattgggatt

SEQ ID NO: 227206 - DNA, 176 bp, Gossypium hirsutum
cccacgcgtccggccaattgtttgagctagctagctcttactcaaatggcaaccaaaacgatgatgttgcaaatattttcacttttcttcgttttgttcagtatctgcaactccatttcccttggtgctaatggagatgacaatggcggttgtcatactgtccatgccaccttcta

SEQ ID NO: 227207 - DNA, 429 bp, Gossypium hirsutum
cccacgcgtccggccaattgtttgagctagctagctcttactcaaatggcaaccaaaacgatgatgttgcaaatattttcacttttcttctttttgttcagtatctgcaactccattttccttggtgctaatggagatgacaatggtggttggcaaactgcccatgccaccttctacggtggtgctgatgctaccggcacaatggggggagcttgtggttatggaaacctgtacagtcaagggtatggaacgagcacagcagctttgagcactgcacttttcaacaatggcttgagctgcggtgcctgctacgagctccggtgcaacaatgatcctcaatggtgcattagtcgaaccataaccgtgacagccaccaacttttgtccccctaactatgctttatctagtgacaatggcgggtggtgcaat

SEQ ID NO: 227208 - DNA, 388 bp, Gossypium hirsutum
aaaaaaaagatgtctctagtgactgaagagatcaaaggcagcgcttcagaaatttaccatggagatgagatatgtcaagagaaatcaaagtttctgctggaggaaatgggcatgcccagtggacttttgcctctcaaagacattgaagaatgtgggtatgtgaaggacactggtttcgtgtggctgaaacaaaagaagagcataacccacaagtttgacaagattggtaagcttgtttcctatgcaactgaggtcacagctgtggttgagaaaaacaagatcaagaagctcactggggtgaagaccaaggagcttctggtttggatcacactcagtgatatctatgttgatgatccaccaactgggaatatcactttcaagacacctg

SEQ ID NO: 227209 - DNA, 404 bp, Gossypium hirsutum
tttcatttcgagaaaaaaagcagcagaggccgcggctttcacttcccttctctcacctcttacagaagccagaagtcagtttagtagcaatggcgtatgctgcgatgaagcctaccaagccgggtttggaggagccccaagagcagattcacaagatccggatcactctctcctctaagaatgtgaaaaacctagaaaaagtttgtgctgatttggttcgcggtgcaaaggataagagactgagggttaagggaccagtaagaatgcccaccaaggttcttcacatcacgaccaggaagtctccctgtggtgaaggaacaaacacatgggatcggtttgagctccgtgttcacaagcgagttattgacctattcagctcccctgacgtggtgaagcagatcaca

SEQ ID NO: 227210 - DNA, 337 bp, Gossypium hirsutum
caatgctcaactataactggatctctctccgtttttcgtggagtctaaacatttttttgctgtatgcaggagttggctctatgggcttgatgacttctgtgttgttgtcatctgatgggaagacactagaagctgaggcagctcatgggactgtaactcgacatttcaggctttatcaaatgggacaagaaaccagttcatactgttttgcctctatatttccatggacaagaggactggagcatacggccaaactagataaaaatggaaggttgctggactttgttcacaagttggaggctgcttgcattgagacagttgatgcaggaaaaatgac

SEQ ID NO: 227211 - DNA, 253 bp, Gossypium hirsutum
ctcccagtttcccttaatcctccatgggcaaaggcggaggttgtgtcccaagcaaaaagagacggccttcctctgccgaaggctctgccactgccactgccactaccgccaccaacaacgcacccatcgaagccgatgaagaaactcacgaaactgccagtgtagctgtgaattctacgaatgcgcattcagttaccgccactttaaaaatctttattgtctactactccatgtattgtcacgtggtagaaac

SEQ ID NO: 227212 - DNA, 352 bp, Gossypium hirsutum
attcattttctttctgccgaacgaagatatatttctagattctcagtgaataatgatcaagtgagacacaacttatttagttcggatttttcggataaaaaagaagagaggatttacgattattcagaattgaatcgaataataggtactgggcattgtgatttcatatattctgctattctccacgagaatgctgatttattggcaaagagacgaagaaatagatttattattccatttcaattgattcaagaccaagagaaagaactaatgctacattcccattccggtatctcgatggaaatacccataaatggtattttccgtagaaaaagtattctttgcttttttt

SEQ ID NO: 227213 - DNA, 471 bp, Gossypium hirsutum
gctacctgcaaaggtggaccagctgaaatcattgtccacggtaaatctgggttcaacattgatccttaccatggtgatcaagctgcagaaatccttgttgatttcttcgacaaatgtaaaaaggaaccatctcactggaatgacatctctgagggtggcttgaaacgtatccaggagaaatacacatggcagatatattcggagaggctattaacattgacgggagtgtatggattctggaagcacgtttccaaccttgaccgtcgcgagagccgccgttacctggagatgttttacgctcttaagtaccgcaagctggctgaatcggttcctctggcagaggaggagtaaaacaaaggaagaggcgggttttccctggaggatttttctgagttcttcataataataataataataataataataataattatcctttggtggtttcataattatggccggacaagaaaa

SEQ ID NO: 227214 - DNA, 424 bp, Gossypium hirsutum
cgagatttcgggcctttacaatccgggttctccagtcgatgcttactcgtgcgatcattttcggatgtttgagttcaaagtccggcggtgcgggcgtggccggtcgcatgattggaccgagtgtccatacgctcatcccggcgagaaagctcgccggagggacccgaggaagtttcattattccggtatggcttgctccgatttcaagaaagggaattgtcggaaaggagactcttgcgagttcgctcatggagtttttgagtgctggctacaccctgctcgttaccgaaccctgccgtgtaaagacgggtcgggttgtcggcgtcgggtctgtttctttgctcatactccggaccagcttagggttatcaactttgctgattcttttgatagttcaccaccttgtacgaaagcaatgtcgttt

SEQ ID NO: 227215 - DNA, 307 bp, Gossypium hirsutum
gaagttgtctgcgcgtgacagatccgctttctgcagtcaatgtctttctcgtgcgatcattttcggatgtgggagttcaaagtccggcggtgcgggcgttgccggtcgcatgattggaccgagtgtccatacgctcatcccggcgagaaagctcgccggagggacccgaggaagtttcattattccggtatggcttgctccgatttcaagaaagggaattgtcggaaaggatactcttgcgagttcgctcatggagtttttgagtgctggctacaccctgctcgttaccgaaccctgccgtgttaag

SEQ ID NO: 227216 - DNA, 453 bp, Gossypium hirsutum
gttgaaactggtgtcctcaaacccggtatggttgttacttttggtcctactggtctgaccactgaagttaagtctgttgagatgcaccatgaatccctcccggaagctttccctggtgacaatgttgggttcaacgttaagaacgttgctgttaaggatcttaaacgtggttttgttgcttcaaactccaaggatgatccggccatggaagctgccaacttcacctcacaggttatcatcatgaaccaccctggccaaatcggaaatggttatgccccagtccttgactgccacacctttcacattgctgttaaattttctgagctgttgaccaagattgacagactatctggcaaggaactctgtaaggtacccatgttcttgtaaaacggagatgcaggtatggaaagatgattcccacccaacccatggtgcgttaaacttttttcgtat

SEQ ID NO: 227217 - DNA, 389 bp, Gossypium hirsutum
gcggcttctgcttctatttactattttctcactctcctactcctttgtgccatcccttttaccttctccgagctcgttaaagagcagcctctggtgttgaagtaccacaatgggccactcttgaaggggaagatcaccgttaatctcatctggtacgggaagttctccccaacccagcgctccataatcgtcgatttcatcaactctttgagctctgccgtcaaacccaagattccgtcggcgtcgttttggtggaaaacgacggagaaatacaagttcggttcctccactttggtcgtgggcaaacaaatcctcctcgaaaattacccgctcggtaaaatccttaagaacccacacttgccagcgttggccgggaaattcaacggcgt

SEQ ID NO: 227218 - DNA, 390 bp, Gossypium hirsutum
cttctcaagaccgtttcttctcacgaatcctccatatttaagacagtcttcctgagttattagaggtttatcctaacaaatctgtgaagggttgagaaaaaataaacaactatttttaatggcatctagagtttcattaaagactaaaggtaaaggagggaaggggtctaagggctcggatgagaaatcaactacgcagtgcttgaaagagtggagcacatgggctatgaagaaagccaaagtggtaacgcactatggcttcattcctctggtgatcattatcggcatgaactctgaacccaagccccaactttatcaattgctaagccctgtctgattcagttgcttatttcttaaccacccagatcttgggttaactatgtaatttgt

SEQ ID NO: 227219 - DNA, 458 bp, Gossypium hirsutum; identical to SEQ ID NO: 196692

SEQ ID NO: 227220 - DNA, 270 bp, Gossypium hirsutum
cccacgcgtccgcccacgcgtccgcccacgcgtccgagaacctcaagcttggtatccatgaggactctcagaacaggactaaaattgccgaattgctccgctaccactccaccaagagtggtgatgagatgaccagcttgaaggactatgtgaccagaatgaaggagggtcagaatgatatctactacatcactggtgagagtaaaaaggctgttgagaactctccctttcttgagaagctgaagaagaagggttatgaggtcctttaca

SEQ ID NO: 227221 - DNA, 335 bp, Gossypium hirsutum
  unsure (1)..(335): unsure at all n locations
gtagggtttttcactgagaagaaactagaaacatagaaaccctttgcagatttgtttgttttcaacagttttaagctctaatactaacgaaatcgtaaatcatgcacgccccggttctcgttctaaaggattcgttgaaacgggagtctgggacgaaggttcaccatgctaacatccaagcctccaaggctgttgctgacattattcgaacaacattgggtcctcgatccatgttgaaaatgctccttgatgcttctggaggtattgttgttactaatgatggaaatgctatcctacgcgagttagatcttgcacatncagcagcaaagtcaatg

SEQ ID NO: 227222 - DNA, 388 bp, Gossypium hirsutum
ttcaaaaaaaaaaagactaaaaatccagcagtgaggtgcagggaaacagaacacaaaatggcgacagttccaggacagttgatttgggaggtagtgaagaagaacaattgttttttggtgaaacaatttggaagaggaactgctggcgttcgattcagcaaagagcccaacaatctctacaatgtcaactcttacaaacactctggtttggcaaacaagaaaactgtcaccattcaacctgcaggcaaagaccagtctgtactcttagccacaaccaagtctaagaaacagaacaagccttcgagcttgctccataagtctgtcatgaaaaaggagttccctaggatggccaaggcagtcaaaaaccaggtgacagacaactactaca

SEQ ID NO: 227223 - DNA, 461 bp, Gossypium hirsutum
cctcagcttaattcagctgaaaatggcaccttcatctccgccacaaacaccgccgtccgccgtggttattgtcctcctcttactcttctccacggcattgctttgtgaatcaaggttaagcttagattactactccaaaacctgtcccagtttcaccaaaatcatgcaagacaccataaccaacaagcaaatcaccagccccacaaccgccgccggtacactccgtctatttttccacgactgtcttcccaacggttgcgatggttccatcctcatatcttccaccgcattcaacaaagctgaacgtgatgccgacatcaacttatctctccctggagatccatttgacctcattgttcgagccaaaacagcccttgaactcgcctgtcccaacaccgtctcttgctccgacatcctcgccgtcgctactcgtgacttagtcaccatgcttggtggaccgt

SEQ ID NO: 227224 - DNA, 469 bp, Gossypium hirsutum
aaagggttgtaacattagttgttgatgcgttgatggaacaaggatcaatcaatggaggctactaatccgaatccgagttcaatgagcggcgtcgctgctgcttccgccgccgagcttctatgctgtgcgaacgcgagagcactgttggattccgtcgacgcatttctattcgattgcgatggtgttatttggaaaggcgacaagctgatcgatggagtcccacagacgttagatatgcttcgatccaaggggaagaaactggtattcgtgaccaacaactctaccaagtccagaatccaatatgctaacaagtttcagtctcttggactttctgtcaatcaggatgagatattttcgtcttcttttgctgctgctatgtacttgaaggtcaaccagtttcctcctcacaagaagtttatgtcataagcggggaaggcataagacaagagttgcaacttgctggatttac

SEQ ID NO: 227225 - DNA, 463 bp, Gossypium hirsutum
cccgcgggtacggattcgcgattcgcgccacgcgtccgacttgcgactcttaaaagaaattaaccatggcaacgagtgatgccgaagtgaaagttttgggcacatgggcgagtccattcgtgatgagggtaaggattgccatgaacatcaagtctgtggcctatgaatttcatcaagagaggttatgggaaggcaaaagcgagcttctcctcaaatcaaacccagttcacagaaaggtccctgtcctcattcatggtgatgacaccatctgtgagtctctcattattgtccaatacatcgatgaggtttggccttctgctcccattcttccttctgatccccatgaacgtgccaccgcccgtttttgggctgcttatcttgacgacaagtggttcccttccttgagagctattggtatggctgaaggagaggatgcaaggaaagcagccatagggcaagtgga

SEQ ID NO: 227226 - DNA, 277 bp, Gossypium hirsutum
ctcacggtaaaaagatctcccttcccctctctttctctccggcggcgatctcaaatcaccgggggatcgcaccgtaacgcccgattactcgtcacctctgtgatctcctctgacacctcgtggtttcagtttattctaactcgtcgccatcatgaatcccgaatatgattatctgtttaagcttttgcttattggtgattctggtgttgggaaatcatgtctacttttgaggtttgctgatgattcatatctggatagctacattagtaccattggt

SEQ ID NO: 227227 - DNA, 451 bp, Gossypium hirsutum
atatcttccatttcacgcctataaatatcctttcaatcacacctcaataaatcattgctttcactactttcaattcttcattccttctgtcattttgggttttactcttcttcttttttttgtgaaatcaagatggatcttgatctttctccaaagctggcaaagaaagtgtacggtgacgatgctggaagctactacgcatggtgccccgatgaacttcctatgttgcgtcaaggcaacattggtgcagccaagttggcccttgagaagaatggctttgccctccctctttactctgattcttccaaggttgcttatgtccttcaaggggctggtgttgctgggattattctccctgaatcagaggagaaagtgattgcaatcaagaagggtgatgcaattgctcttccatttggtgtcatcacctggtggtacaacaaggaggacactg

SEQ ID NO: 227228 - DNA, 408 bp, Gossypium hirsutum
gctggggatgatgctccccgagccgtattccctagcatcgtcggtcggccacgtcacaccggtgtgatggttggcatgggccataaagatgcatatgttggtgatgaagctcaatcaaagagaggtattttgactttgaaataccctattgagcatggtattgtgagcaactgggatgatatggaaaagatttggcatcataccttctataacgagcttcgcgttgccccggaagagcacccagttctgcttactgaggctcctcttaacccaaaagcttatcgggagaaaatgacccaaattatgttcgagaccttcaatgcccctgctatgtatgtagctatccaggccgtgctctcactttatgccagtggtcgtacaaccggtattgtgatggactcgggagat

SEQ ID NO: 227229 - DNA, 460 bp, Gossypium hirsutum
cccacgcgtccgcccacgcgtccgtgaaaatcaagaaggaaaaaaaacccttaaaatcaaaaccctaatcctatttttttttcctttttgattgtagaaaacaaagcaagccctcaactggacaacatggggtctgaacagaatcaaggaaccagctttcccccgtcggagccgaagctttgcgctaacggttgcgggtttttcggaacggcggcgaacatgaacctctgctccaagtgttaccgggacctccgtgctggggaggagtaagcggcgaatgcgaaagctgccatggagaaatcccttagcgtcaaaccgaaagaagatgttgttgtggagacgtttaagcccgttgagaagctgcctcatgcgggttcatcatcagcggcggttgagcaaccggcggtggctttttccggtgatgaacagcccgagccaaaattggcgagcaggtgcttta

SEQ ID NO: 227230 - DNA, 353 bp, Gossypium hirsutum
ggtacaaccaaagattagtgcttatatcgggactactttctaatccaaccattgcatgggacgtgcatttcaatttgcatgaattatttgaactgggacatgcaattcatgctaggcctgagtgcagctgccagtgttcgagtgagtaatgagctaggggcaggccatccaagggtagcaaaattttcagtgtttgtagtgaacgggacaagcatattgataagtattgtattcagcgcaattgctttgatattccgagttggattgaacaaagcatttacaagtgattctgaggctatagaagtagtttgcagacttgtctccactgcttgtcatctcttgttttcttaatg

SEQ ID NO: 227231 - DNA, 349 bp, Gossypium hirsutum
ggaagccaaaatttctagaatgaaaacttgtgttgatagcagctcgaaaattaccataaaagggacttacaaagaaaatacagtccgttttaagtttgagccatctgcaggatgcttccaagtatatgaagaagttgcaaaaaggttcaaaggtcaaaacgggacattccaactgaactatttagatgatgtaggggaatgggcattgttggttttcgtcttatttttattctagtgttttgttaaattttttattatatttattttatttcttcgtgttatattctttttttcttttagatctatgtatttttattgatttggggaattacattttatttatgtttaa

SEQ ID NO: 227232 - DNA, 412 bp, Gossypium hirsutum
agaacacaagtatccagtctagtcctccaatcaaacgccccttttgttaactgtctcaactttagccatttgccttgtttttagcaaaacaatgtctactttagttcctgatttcccaaatctttcttaatttttcttccgattttcattttcgggttttacaaatagatttcgtcttccaattttccctagaaaaagaaataaaaaaaatgatgccaagtgaacagcaaagtcatgatcaacatcgggatccgttatcgtgtgttatttacgagctgtcggcgctagtcctgaatctcctccgatcgccaccgacgccggttccgactaagatatcggcggtgggattcgcttggctgatgctagggatatcggtttctttaatgctttgtggatcagtgactttcttttt

SEQ ID NO: 227233 - DNA, 367 bp, Gossypium hirsutum
tcccggtcgaccacgcgtccggtagaaggttaagttttacaaacatggctagttccggggtccttaagttggtttccatgattgtgatggtgtggcatgacgatgatgagtgcacccaaggcagccaaagccgccatcacgtgcagcgacgtggtgaaccacttgatcccgtgcttgtcctacgtacaaaacggcggtacacccgctgctgcatgctgcagtggggtaaaagcactctacggcgagggtcagaccttcccggaccgccaaaacgtgtgcaagtgcatcaaatcggcggtgaacggaatttcgtacaccagcaataacctcaatcttggaggcggcctacctgctaaatgtggtcttc

SEQ ID NO: 227234 - DNA, 445 bp, Gossypium hirsutum
aaatctctgagggaggtttgaaacgtatcgaagagaagtacacatggaaaatttactctgagagactattaaccttgaccggtgtctacgggttctggaagcatgtgtccaacctcgaccgcctcgagagccgtcgttaccttgagatgttttacgctcttaagtaccgtaagctggccgaatcggtacctttggcagttgaagagtaaattgaagttgccggggaaagaattgggagggatttccgagttcttgagaataatctttgttgttttggcattttgatccaactcttttgttttctctgttcttttatgtgtatttgtctttgttcatgttttgggcattgtttcaacatctgggcgttgagcccatcaattctaagtaaagaaaacatggcaacttttgcttcaaaaaaaaaaaaaaaaaaaaataaagggcgggc

SEQ ID NO: 227235 - DNA, 344 bp, Gossypium hirsutum
cccacgcgtccgccagggtttcaactcactcttcaatcttcgactgaaccgctagagttgcgggtgatcgtaaaagatggtgctttctcagaagattcacgaggctttcaaaggaactgtagagagaataacagggccccgcaccatctctgcttttaaagagaaaggggttttgagcgtctccgagttcatcctcgcgggcgacaatctcgtctccaaatgccctacctggtcttgggaatcaggagagccaagcaagaggaagtcctatttaccgcccgaaaagcaatacttgattactaggaatgttccttgcctgaggagggcttcatcggttgtacaag

SEQ ID NO: 227236 - DNA, 451 bp, Gossypium hirsutum
cccacgcgtccgaaattccattccattctattgaatatcttccaatcaatatctctctttcttgcatcacaataaaaagtttctctctgttaagaattcatgtcggaccagggtaaaccattgccgaaattcggtgaatgggatgtcaacgatcctgcatcagccgatggatttacggtgatctttaacaaggcaagggatgagaagaaaacaggtggcaaacccgagtcactggaaaaagctgacactcatggtaagcctggagccgaccccaacaaaccccaatccaaaaaatggctttgctgcgttcaagccccgcaggcggaatcttgaagaactcatgccgatataagagcttccactgcatgatgaagcccccaccttatatcctaaacaagatagggatgaatggggggcatttgataaagctcttttgggattggatttgatt

SEQ ID NO: 227237 - DNA, 470 bp, Gossypium hirsutum
attagctctgaagatcatgttggctatttttcacaaggcattcgctaatccaccagaggagctgaagagtccagcttgtcataaatctaccaagaagcctaaacagcctgaagaaaccctaaatgatttcctatctcatgaccctcacaacactttgtccatgagctttggcaacgctgctgttttggcttatgtccggcatgaacgtgctgcttcagttcatcagaggttgtgtagagagcttgcactcatagtcagcctgtagccaacccgctcaaaccccaatccaaaagctggctttactagattgaagccccgcaggcagaatcttgaagaactcatgccgatataagagcttccactgcatgatgaagcgcccaccttatatcctaaacaagatagggatgaatggggggcatttgataaagctcttttgggattggatttgatttttggttgtaaaaatttat

SEQ ID NO: 227238 - DNA, 415 bp, Gossypium hirsutum
gaacatggttggctcctccacttcttgctacattacaactggtgccttctctcgatcagcggttaatcacaatgcaggagcgaaaagtgcagtgtctaacatagtaatgtcgattacggttatggtgacccttctcttcctcatgcctttattccagtacaccccaaacgtggtgttgggagctatcattgtgtcagctgtagttggccttatagacattccagcagcctgtcaaatttggaagatcgacaaatttgatttcattgtgatgttgtgtgctttcttcggggttattttcatctcggtccaagatggtcttgccatggcagttgggatgtctattttcaagatccttctgcaaattactaggccaaagacagtgatgttggggaacattcccgggacagattttttc

SEQ ID NO: 227239 - DNA, 469 bp, Gossypium hirsutum
cggacgcgtgggcggacgcgtggggtgacggaatgcgaacggtttttggacaagcccgttatcgtaagcggagtcttcctcatgctcgtctcacttgcgggactaatcggcgcgtgctgtcgcgtcacttggctactctggctttacctagtcgtcatgttcctcctcatcgtgctcggcatcgtcttcaccatctttgctttcgcggtgacgaataaaggtgctggagaagctttgtctgggaaagggtacaaggaataccgacttggtgattactccaactggttacagaagagagtcactagccagaagaactggaataagattaagagctgtttggctgatagtaaagtctgtactgatttccgcgataagtatctgaatgcttctgcctcggagttttaccagacgcatttgtccgccgttcagtctggttgctggaagccatcaaacgactgccaattcacgt

SEQ ID NO: 227240 - DNA, 436 bp, Gossypium hirsutum
ctaagctctcgtttctcaaatttctctctcattcgcttttcttccgtttggctcaaattcaaaagtctctcgcggatccctctgcgattatctccaaagggatcaacaggtagagaggataaatggggctgtcattcgctaagcttttcagccggctttttgccaagaaggagatgcgaattttgatggtgggccttgatgcagccggtaagactaccattttgtacaagctcaagcttggagagattgtcaccactattcccaccatcggatttaatgtggaaactgttgaatataagaacatcagtttcactgtctgggatgttggtggtcaggacaagattcggcctttgtggaggcattacttccaaaatacacagggtctcatcttcgtggttgacagcaatgacagataccgtgttgttgaggccagggt

SEQ ID NO: 227241 - DNA, 384 bp, Gossypium hirsutum
cggctttcaaaaaattttcaacacacaaaattggttttaacaattaaacacaatctaaagcaagtttggttgcagccgttgcacggtttcgtggctgatcctctcttgtttcaaatctttgttgctgtggttgattgcccttctatcaggatggctggaccagcaccattcgttgatctgggaaaaaaagccaaagaccttctgacaaaagattacaattttgaccagaagtttactctttcaatgctgagcaccacgggaatgggacttacagccacaggactcaagaaggaccaaaatttttttggtgacataaatactgtgttttagagtggaagttcttctgtggatatgtaagttggtacctattcttatgtgtctcat

SEQ ID NO: 227242 - DNA, 470 bp, Gossypium hirsutum
gtgaaaatggggagtgttgtgcacgcatcaatctcaactgttagggtggggctctacttctggtgctggtaatgggattcgggccaattcccaatatactgtgtgccgagatcttcccgacacgggttcgtggcatctgcattgctatatgcgcccttactttttggatttgcgacatcattgtcacgtattcgctcccgttgctgctgaaatcagttggccttgctggcgtctttggcatgtatgcagtcgtatgcgttatatcatgggtgtttgtcttcttaaaagttccagaaaccaaaggcatgcctcttgaagtcattacagaattctttgcagttggtgcaaagcagattgcagctaccaaggacaactgagatcggtttatttctttgattttcatggatattgaaagttttgatttttgttcaaaatttctcctcattcgaataggcagagtttgatttatg

SEQ ID NO: 227243 - DNA, 388 bp, Gossypium hirsutum
acggatacaaccacagactggtgcctatatcttcacttttctctttcaagttttagggtttagatgcttgttttctctctaaatttcagctgtcctcaagaatacacttattttgctgcagatcgtctaattttctaggacatggactcgtttgagcaggatggaaatggggcggcacctgactctctgcctccacccccacctgtgcctcctgatgtggtgcctatcaaagcagaacctgaacctgcaaagaagaaggttgtgcgagtcccaatggccaagcgtggtcttggatctaaagggcagaagataactcttctcaccaatcacttcaaagtgaatgttggaagctctgattgacacttcttccattactgagtttctcttt

SEQ ID NO: 227244 - DNA, 419 bp, Gossypium hirsutum
ggtccggaacggcagggccgggccgacccatcgcgtccggctagatcgcgagcgtgggtctatttgtccatggatcttacacctcagcaacttatccgatggaacggctccgacccatccaagcccatctacgttgcaatcaatggtcgcatctacgatgtcaccgccggcaaatccttctacggtcctggtggtgcctactccatgttcgccggcaaagatgccagcagagctcttgcaaagatgagcaagaacgaagaagatgtctgtcccaacattgacggcctctctgaaaaggagatggatgtccttaacgattgggtcaagaaatttgaagctaaataccctgttgtcggcccgcgtgtctcctgaaaatttgcacctttcctctatgttgggtgtaatttggttcggtttta

SEQ ID NO: 227245 - DNA, 378 bp, Gossypium hirsutum
aaaagtaaatcaaggagtttctactataaataacatatagcaatagaaaaagagtacataatttattcatagtaatgaaaaccccaagtaacaaacaagggcttgaaattacaccattttcattggccatacacacacacatcaagaacttccagcagcctcaaacagttgttttactttggtgatataatcccccattgcttcctcctttgatttcccttcaacagccttccatgcatcccacttgtacctttccctcatgttgaacattccaggacggccggtattcactggtccaacagtggcttgcttgtacagtccatagagaatgagcatgtcatcgttcgaaggggcggccgggagggtcttaactttctc

SEQ ID NO: 227246 - DNA, 446 bp, Gossypium hirsutum
  unsure (1)..(446): unsure at all n locations
atttcccttttcttctcttcaaccccacctgctaaaatgcaccaatttccggtgcttcctagccggatcgcagtgtctgtactgctgatggtaactccagtcattgggtaccgtccatggcctcacttaaaacccaacagctccgatttaacgttgggaagctccaagaaattcgagggctcatcagagttcgtccaaatgagataccatatgggaccagttctcaccgccaacatcaccgtacacatagtttggtacggccgatggaaaaaatctcagaagaagatcatccgtgagttcatcaactcaatctccgccgttgatgccaagcacccttctgttggccggctggtggaagaccgtacaactttatacggaccaaacgggcgccaacatctnccatactgtgcatntagggggaagagaagaacgaccgattttactcg

SEQ ID NO: 227247 - DNA, 377 bp, Gossypium hirsutum
acattttcaaatttttcattgaccgagagatatagggattgttctccaatggcaacccaaattgattgtaacaatgaggaaagcttctcatatgccctccaaatcgtcacctcttcagtactgcccatgtcgatgcatgcggcggttcagctggacatcttcggaatcatggcgaaatgcgggccagacgctaaactctccgccaaggagatcgcggcacagttggctaccaacaactcagaggcggcctccatgctggaccgaatccttttattgttagccagccatggaatcgtgggctgcttcgtggtggatgaggaaaagggtaatcctcgtaagctgtacagtttgacgccagtcttcaaattctttgtgcg

SEQ ID NO: 227248 - DNA, 255 bp, Gossypium hirsutum
gaaggaaatatctaatacatgtacaaatgtgttgatcagatattacctcagttgctttattacttgtcgctgaagaatgatgcggaatctctcgattgggcaacgatagcagtatacacatgtgaagcctcttgtgaaggtgttggatacaaacaggaatttgcctgggtacaacttggtactgctattaattgcccttcatagttgctttgatttgatcatcgtctccattttaatctatattccactttcctt

SEQ ID NO: 227249 - DNA, 477 bp, Gossypium hirsutum
  unsure (1)..(477): unsure at all n locations
aaaaaacagagagctaacttgctctgttttttctcatcatctttctttctccccctaaatgcggacttcatatatactttatatcaacgatgtcggtaaaagagtgcggcaatcacgggaaataccgccggaaaatcttccggcgaatcatcgccggcatcctaatcttcattataatcgttctgataacaattcttctcatatgggccatcctccgtcccagcaaacccaggttcatcctccaagacaccaccgtctacgctttcaacgcctccacccctaacctcctcacctncaatttccaagtcacttttatcttctcgaaaccccaacgacagaatcggcatttactacgaccggctcgacgtttacgccacctaccaaaaccaacaaatcaccctccgaacatncatccctccaacgtaccagggtcacaaagagatcaacgtttggtcacccttcggcaatgggaattca

SEQ ID NO: 227250 - DNA, 474 bp, Gossypium hirsutum
ctgtgtccgacacccgtgtcccgagtccaggtaacataggagatagtttcaatttatcctgttctgtcacctccaaatctgactccagctcaatcaaatcgagtttgtaatgctcttgctctgcttcagtgtgtagcttctcatccagacacaaggatgttattcctgaatgctcatatacccttgtatctgtatcctttccttaatacgaccagtaagtcaaggccgtttgagtatttgaggcttactagcttaggtgtcattggtgccttggtgaaggttgatgatactgaagttatcagcttcctcctgtccactgagataatcccattatgtctgcgcacaatggagatgggcagtgaactgtcgaaaacagttgctacttttatagttcagaagattctactagatgatgttggcttggactatatttgcaccacttgaaagcggttcttgcagttggtcgagttctgg

SEQ ID NO: 227251 - DNA, 419 bp, Gossypium hirsutum
atgtgagaaggatctttctttctttattctgcacatcttaaccttaaccacatcataagatagagatcgcttaaacggtcgagttatggagactgtcttttcagcagcaagtagatccatttccaagctcattagcttcaccgctttgcttcttttcttgttttcctgctctactttcacttctactgaagcttatgatgcgcttgatccaactggaaatatcactatcaaatgggacgtaataagttggaccccagatgggctatgtgctgttgttacaatgtacaatttccaacagtatcgccatattcaggcacctggttggacattggggtggacatgggccaaaaaggaagtaatctggagcatgatgggaggccaaaccacggaacaaggggattgttcaaaatacaaaggga

SEQ ID NO: 227252 - DNA, 360 bp, Gossypium hirsutum
ggctcttcaaaatcctcgtcatcgtctcaccatcttgcggatggaacttgatatccagaggtttgtgcaaaattcagagcagcagcaatttgagttccaacattttcccacttcttatcttcggcttgctgcacatcgtgttgctcaacattatgggctggtaactatggtttatgataatggtttagatggcctaagaaacagaatcgtggcgaagaaagcaggggaaatcaaatggccctgtgtttgtttgtctgaaattcctgccaaaaactcggaaaatgataaaccagaacaggttaaaattgctattaagcctaagcccaaataatggatctgtaaatgaagctaaatcaaatc

SEQ ID NO: 227253 - DNA, 475 bp, Gossypium hirsutum
  unsure (1)..(475): unsure at all n locations
gcgaagtctgcaaaatggatccgtaacctcgggaaaaggattggctctgagggctgggcacagggcggcttgatatatactttatatcaaccatctcactaaaagagttcgtcaatcacgggaaatacctccgcaaaatcttccggcgaatcatcgccggcatcctaatcttcattataatcgttctgataacaattcttctcatatgggccatcctccgtcccagcaaacccaagttcattctccaagacaccaccgtctacgctttcaacgccttcacccctaacctcctcacctccaatttccaagtcacctctatcttctcgaaaccccaacgacagaatcggcatttactacgaccggctcgacgtttacgccacctaccagaaccaacaaatcacccttcgaacattcattcctncaacgtaccaaggtcacaaagagatcaacgtttggtcacccttcgtcaatggga

SEQ ID NO: 227254 - DNA, 428 bp, Gossypium hirsutum
ccggcaacgcttattttcctccataaagatgcaagaaaaaaaggcagaaaccgcaaataaaaacgcgaagaaggcgaatctattggatcacggctccatcaaacacatcctcgatgaatccgtcactgagattgttaagagtcgcggatatgtagaagatgtgaggatgagcaatatcagattattgcttggaactattattattgtaatcgctcttgttgctcaattttacaaaaagaagttccccgaaaaccgtgatttcctcatcggttgcatcgtattatatatagtttttaatggagtactccagctggtcatatacactaaggaaaagaatgcaattctctttacttatccttctgctggaccgaaccagcactgtgttcgggctcttaaagtaccaagattcttgatctttatacacttac

SEQ ID NO: 227255 - DNA, 415 bp, Gossypium hirsutum
cccacgcgtccgcggacgcgtggggtaaaagtctctacttcgactcggacacgacagtggaagtgtgttgaatcaagaacagatagtaagcgcctttattatggacgctttattctgtctccacttatgaaaggccaagccgacacaataggcattgcgatgcgaagagctttgcttggagaactagaaggaacatgcattacacgtgcaaaatctgagaaaataccccacgaatattctaccatagtaggtattcaagaatcagtccatgaaattttaatgaatttgaaagaaattgtattgagagggaatttgtatggaactcgtaacgcctttatttgtgccaagggtcccggatatgtaactgctcaagacatcatcttaccaccttttgtggaaatcgttgataatacac

SEQ ID NO: 227256 - DNA, 185 bp, Gossypium hirsutum
gagcaagttaagctactgtacaagcgacacaaaaacactgctttttcttggctgagaaacattttccatgactgtgctgtccagtcatgtgatgcttcactgctgctggactccacaagaaggagcttgtctgagaaggagacagacaggagctttggcctaaggaatttcaggtacattgagac

SEQ ID NO: 227257 - DNA, 241 bp, Gossypium hirsutum
ggcaaatggagaaacctccccaagagagctggtttgaagagatgtggcaaaagttgcagacttagatggctgaattatcttagaccagatattaaaagaggcaacatctctcatgatgaagaagaactcattataagactccataatcttcttggcaacagatgggctttaatagctggaaggctaccccggcgaacagacaatgaaatcaagaactactggaacactactttatgtaaga

SEQ ID NO: 227258 - DNA, 457 bp, Gossypium hirsutum
cttgagcgtggccgagtttgatcagattctaaaggcttgtgaagaaaacggggttcagattatggacggtaccatgtgggtgcataatcccagaacccataaaatgaagcagtttttaaacgacaaggagcagtttggtcagcttagaacggtaaacagttgcttcacattttttgccgatccggattttctcaagaatgatattcgtgtgaagccagatcttgatgctcttggagctctcggtgatgccgggtggtatggcatcaggtcaatcttgtgggcagctgactatgagctaccgaaaactgttacagccttcagaaatccagttctaaatgaagcaggtgtactactagagtgtggagcgtcactactttgggcagatggcaaaattgcaaccttccattgttctttcttatcaaatttgacaatgaatcttactgttataggaacattg

SEQ ID NO: 227259 - DNA, 236 bp, Gossypium hirsutum
ctctttgcaaagacttcagccacgcagcccctctaccgatccaaacaatgggacgcgtccgtacgaagaccgtgaagaaatcgtctcgtcaggtaatcgagcggtactactctcgcatgacccttgatttccacaccaacaaaaaggttatagaagaagtagctattatcccattcaagaggctccggaacaagattgctgggttctcaacccatttgatgaaacggatccagaag

SEQ ID NO: 227260 - DNA, 371 bp, Gossypium hirsutum
ttcaaactcaaaatgcaagaggtacttccacaaccgtttgaagccatcaaaacttacatggacagccatgtataggaagcaacataagaaggacattgctcaagaggccgttaagaagaggagacgtgccacaaagaagccatactccagatccatcgtcggtgccaccttagaggttatccaaaagaagaggagcgagaaacctgaagttcgtgacgctgctcgggaagctgcactccgagaaatcaaggaaaggatcaagaaaaccaaggatgaaaagaaagcaaaaaaagccgaagtagcggcgaagtaacaaaagacgcagggcaaatggtatcatttctaacggtggggtaccaaaagggttcaac

SEQ ID NO: 227261 - DNA, 428 bp, Gossypium hirsutum
cccacgcgtccgtcccttttcattttcagccatctccttgccgattcattcctaagaaaattttcaacgttatttcaaaaagcaggcacagaaaagaacgttaaggaggaaagatgttgggaatagtaaggcaaaaaaatgttagggcagtcattgctgaagattcgtcctgcaatatcggtgttacgaagctactcatcagcagcaaaacagatgacagtgagagaggcattgaactctgctcttgatgaggaaatgtcagctgatccgaaagtctttttaatgggtgaagaggttggagaatatcagggtgcatacaagatatccaaggggcttttggagaagtatggacctgagagggttcttgatactccaattactgaggctggttttgctgggaatggggttggtgcggcttactatggtct

SEQ ID NO: 227262 - DNA, 303 bp, Gossypium hirsutum
ctctcgttctttttcctgttcaatcatgtcttgcttcattagcaaatatgctgatgagttggctaaaaacgctgcttacattggaacccctggaaagggtatccttgctgctgatgaatccactggcaccatcggcaagcgtctttcaagtattaatgtagagaatgttgaagacaacaggcgtgctctccgtgagctcctattcacaactcctggagctcttcagcacctcagtggtgttattctctttgaggaaaccctttatcaaaaaaccgcttcgggcaagctcttcgttgatgtttt

SEQ ID NO: 227263 - DNA, 467 bp, Gossypium hirsutum
gcagacccttccgaagcacacgattctcatgagacagctgaaggcgagacaggtgaagggaatggggacaattcggaaccgataactcggtcatgtacatacagctacgaccagctgaagtccaaatctgaaaatccagtaactggaattgacttcaaacgcagagagacttatttgtccgatgaggagttcgagacggtattcgggatgccgaaagaagcattttacaagttgccaaagtggaagcaagatcttcaaaagaaggaagttgatctattctagagcttcatgcacttgaacaagtgatttaagtgtttccgctgcattctacctagcaatccctcgtatatttgatctttaattccgcccaaaaatcatgggttcgtctacacgatgcctggattaccatttttgtgccctttttccttcttgataaacgtacgtgtaattagtattcggatggattt

SEQ ID NO: 227264 - DNA, 463 bp, Gossypium hirsutum
ctttatagttctggtctgctcaacactcttccttctctctaaatctaatactcagatccgcgggtaatttttgtcacagctcattagaatggagacctttctattcacatctgaatcagtgaatgagggtcaccccgacaagctctgcgaccagatctctgatgctgtgctggatgcttgccttgcccaggaccccgacagcaaggttgcctgtgaaacatgcaccaagaccaacatggtcatggtctttggagagattaccaccaaagccaatgtagactatgagaagattgttcgtgacacatgccgctctatcggatttgtttctgatgatgtggggcttgatgctgacaactgcaaggtcctggttaatattgagcaacagtgcccctgtattgcccagggtttccatggccacttcaccaagctccctaaaaaaatttgagtttgtgcccagtgttat

SEQ ID NO: 227265 - DNA, 186 bp, Gossypium hirsutum
cttttgcacccgctctgtttctatctcggctctgacgagaagccggcgccgacatgggtcacgtgagcttctaccgcaattatgggaagacctttaagaagcctaggcgtccatatgaaaaggaacgattggatgcagagttgagacttgtaggagagtatggactccgatgtaagagggagttgt

SEQ ID NO: 227266 - DNA, 196 bp, Gossypium hirsutum
gcgcaaaaaaaaaaaatggcaaaatcatcataggaagagaaccaacaaaaagcttttgtttgggctggtgctgataattctggaatcctctcccctttcaatttttccagaagggaaaatggtgatgatgatgtcacattaaaaattctttactgtggagtgtgccattcagacctacatactttgtgaaatgact

SEQ ID NO: 227267 - DNA, 307 bp, Gossypium hirsutum
tatgttccccagctggctcaactcatttatgacataaaccaagggtcaagtccagattcctacagggatgtcaagggattcatgatcgggaatgctgcgatcaacgaaccgacagacacgttggggctgttcgattatgcatggagccacgccatcattttggaccaactctacgacaaaataaacaaggaatgtgactttaaacaaactaataatctaacggttcaatgcgccgatcatatgaaaggtttcatggatgcttatgctaacatcgatatgtacagcatctacactcctgtttgcatta

SEQ ID NO: 227268 - DNA, 370 bp, Gossypium hirsutum
caaaaagcaaataatggcagaaagaggcggcggcgaacgcggtgctttcaggcgtggcttcggcggcgggagatccgaccgtgggccaagaggtcggcgccgtggccgcaaggatgaggaggagaaatgggttcctgttacaaaacttggccgtttagtcaaatcgggaaaaatcacatccctcgaacaaatttacctccactccctccccatcaaggagtaccaaatcatcgaccaactcgttggcccttcactgaaagacgaggtgatgaagatcactcccgtccagaaacaaacacgtgccggccagcgcactcgtttcaaggcattcgttgtcgtcggcgacggaaacgggcacgttgggttgggg

SEQ ID NO: 227269 - DNA, 403 bp, Gossypium hirsutum
tgctacacaaattatagaatcctttcgacaatcctccgtgtctcagccaaaagctaccgccatgggaagggttggaaatctctctccacagcagcgccaatctttcgactctcaaggttttcttgtgattgaatcatttgcgagccctgcagaaattgaagctatgaggaagagaatggacggaatgcttcatgcctttgaccctaccaccaccgcttttattttctccaccaaaaattaggtaaaattgaccagtgaatacttctatgaaagtgctgaaaaccattcctttttctttgaagataaagcaattgatgaatatgggaaatttaaagcaaccgaaggatcttttctatttataatatgtcggcatgccttaccatgatgatttgatccacttttt

SEQ ID NO: 227270 - DNA, 165 bp, Gossypium hirsutum
atcccgttctttggcacagattctttcatatcatcgtagcattataagctatctacaggaaaggtatcctgatgaacacggaccgtttgttattacagccacttgtcttgaaacctttataaaaagttgtgctggctactctgttatcacatatatacatgtaat

SEQ ID NO: 227271 - DNA, 200 bp, Gossypium hirsutum
tcgagcgccagcgcgtccgaagggttctttagattttcttaccagttccttttattatgaaaatggcctcccacattgtttagtatggccgtatgggaccaaagagagagcttaagtttgctttggaatccttttgggataagaagagcagtgcctatgatttgcaaaaggttgctgctgatcttatgttatttatttgg

SEQ ID NO: 227272 - DNA, 220 bp, Gossypium hirsutum
aaaaggaaaaaaaaatgaagctcttgtttctaactttgctgctttgttctcttcttctatgtgtggtcgagtgtttgaaccaacaatggctcagcctcgttcacctttttgtgaagggaaatgcatagggaggtgcaataaagcggcggtttgggatcgatgcttcaaatattgcggcatttgttgcgaggagtgaaaatgtgttctttccggtacttat

SEQ ID NO: 227273 - DNA, 222 bp, Gossypium hirsutum
gggaaccaagataaaaagtttttggcttggcctaatttgtaagcttggaggttaagggaaaaaactatggttgaagagggacaggtaattgcctgccacactgttgagtcatggcagcagcagttccagatgggaaacgagtccaccaaactgggggggggggatttaacagcatcatggggcgggccatgccgttttatttaaccaatcctggtggatctt

SEQ ID NO: 227274 - DNA, 155 bp, Gossypium hirsutum
ggaggttgaggactgcttgtgagagagcaaagaggactcttttatcgacagctcaagcggccgtggagatcgattcattgtacgagggtattgtcttttacacctcgttaactcgtgcaaggtttgatgagctcaacaagtatcttttcttgtag

SEQ ID NO: 227275 - DNA, 132 bp, Gossypium hirsutum
ctggaaagttatttgagctccgtcctgagcagtatgtcatgaaagtgggcgagggagatggggctcagggcattagtggattcactgctcttgatgttccacctcctctcggacctctctggattctggttg

SEQ ID NO: 227276 - DNA, 354 bp, Gossypium hirsutum
gccaaagatgccgaagaacaaaggaaagggaggaaagaaccgtaagaggggaaagaacgaggccgatgacgagaaacgtgagcttatcttcaaagaagatggccaagaatacgcccaagtctcacgcatgttgggtaacggccgctgcgaagctatgtgcatcgacggcaccaagcgcctctgccacatccgggggaagatgcacaagaaggtctggatcgccgccggcgacatcattcttgtcggccttagggattatcaagatgacaaggcttgacgtatcttgaatatacattcccgtagaagctaggcttttaaaagcttattgtgagcttccctagaattaccatgttt

SEQ ID NO: 227277 - DNA, 240 bp, Gossypium hirsutum
gggtgtcttaataaacgccttcgatttactttcggtttccatttacttctttatttctacggtggtgaatttttagtaagcgaaaatgagagagtgcatttcagttcacatcggtcaggctggtatccaagtcggaaatgcctgctgggaggcttactgccttgaacatggaatccagcctgatggccagatgccaagtgtccagactgtcggaggaggtgttgttgcttttaaacacct

SEQ ID NO: 227278 - DNA, 306 bp, Gossypium hirsutum
cccacgcgtccggaaaacacaccctcctttccatttccattcattctttctctgtcgaaggaggcttgagtgatggcgtcccaacaacacctggagaagatgcagctccgtcagaactataggaatctttggcacactgatctcatcactaccattcatcgccaccctctttattgttgctttgctttatggtgtggaccatgtgcatcctacatgctccggaaacgagcgctttatggtgacatgtcaaggtatacatgttgtgctggttatttgccatgtagtggtacggagtaatacgatatt

SEQ ID NO: 227279 - DNA, 193 bp, Gossypium hirsutum
gaaaaagggcgaccagcgccgagaagcaagcagacaacagagggaagggtagttttaagcactgattaatgccctaattgtggaggtccaactgctggaggacaaacgatctgtgatgaacaccaattaaagcttgaaaatgctcgactaaaagaagagactgaccgaataagaacaatagctagaaatggat

SEQ ID NO: 227280 - DNA, 337 bp, Gossypium hirsutum
cttatccaccagcttaccttagcccagaagcattggtgtatgaaccttctgcttggagccaattttgcttcatctggctctggctatgatgacaaagctgccatggtgaatcatgccatcacattgacccagcaattagagtatttcaaggaataccaggcaaagctagcaaaggtagcaggcagcaccaaatcagcatccattaccaaggatgcactgtatgtattgagtgcaggaagcggagactttctacaaaactactatgtcaaccctttactttaccatgcctatacttcagaccagtacggcttattccttattgatcccttcacaaact

SEQ ID NO: 227281 - DNA, 332 bp, Gossypium hirsutum
  unsure (1)..(332): unsure at all n locations
cccacgcgnccgaaaaaggcagaaagccagctttttattnccncaggaccagcggaaaacgagtggcggactcaagcggaagangcgagggccgacgancccaaanaccggcgagaangggggcgcaccccagaacgcaagcagcggagagccgcactgccagccgagaaaggtggggctgccaatctcctccatcaatatcaggggttttggcacaccactcgccagttacaagcagtgcttacttgccaaaaccacttttaagctcatgagacagatattttccttggtaccactccaaaatcaggagcaacatggttaaaggctattgt

SEQ ID NO: 227282 - DNA, 190 bp, Gossypium hirsutum
cccacgcgtacgcggacgcgtgggcgagccgattttttctacctcataaagctccttttgatcggcgacagcggtgtgggtaagagttgcctgcttttgcgttttactgatgcctcattcactacaagttttattacgtcaattggaattgactttaagataaggaccatctagcttgatggaataagga

SEQ ID NO: 227283 - DNA, 457 bp, Gossypium hirsutum
ttttcacctaataatggaaggcggtggaccaccacaggcggcggacactgagatggcggagcaacccaacccacaaaaccaccagcaacagccgccacaaatggcaattgggttggagaatatcccggcaactcttagccatggcgggaggtttattcagtataatatattcggtaacatttttgaggtcactgctaaatataaacctcctattatgcccattggtaaaggagcctatggtatcgtatgctctgcgttgaattccgagacaaatgaacaagtggcgttgaagaagatagcgaatgcttttgataacaaaattgatgctaagagaactcttcgtgagatcaaattgcttcgttacatggatcatgaaaacgtagttgcaatcagggatataattctcgcaccaaagagagaatgcgttaatgatgtttatattgcatatgaactgatg

SEQ ID NO: 227284 - DNA, 363 bp, Gossypium hirsutum
cttttcagctgtctcggcatttgcacaggatgattaagaccaaggtcttgttatgaacttctgcaaggattcttgtcctcaggctgaagacattatcaaggagcaagttaagctactgtacaagcgacacaaaaacactgctttttcttggctgagaaacattttccatgactgttctttctagtcatgttattactttatttcttttatactttttattattgattttttattgactatttatttattcatttcattattatgatttctctcaattataattcaattctcttattatttatattttttttctattcaaattattttattcttttcttttatgttttaatattttttttatat

SEQ ID NO: 227285 - DNA, 420 bp, Gossypium hirsutum
gctggtgctcatactaattacagcacaaagtcaatgagaaatgatggtggcatcaatgttatcaagaaggcgattgagaagttgggtctgcgccacaaggagcatattgccgcctacggagagggtaacgagagacgtctaactggtcgtcatgagactgcagatatcaactcattctcatggggtgttgcaaacaggggagcctccatccgtgttggtcgtgacactgagaaggatggaaaaggctacttcgaagacagaaggccagcatcaaacatggatccttacgttgttacatcaatgattgctgagaccaccattatctggaagccttaagagggggtggaaattgaaggttgtgaaagacgagaaggaaaaacctcattcagattaataaaaccccctctttcatctttcttt

SEQ ID NO: 227286 - DNA, 370 bp, Gossypium hirsutum
atttttatggtagccttcctgattcaatgaggaagcttggtacatgtagttcaatcagtttaggaggaaactctttgaggggacaagttccagattggattggagaattgacaagccttgaaagtttggatctttctgcaaataatttctctggtaaagttccatcttctctgggaaatctgcagttactgagagaattgaatctgtcaatgaaccagtttactggtgcattgcctgaatcgatggctaattgttataacctattggctatagatgtcagccagaatttgttaaccggcaatgttccatcatggatgtttaagatgggagtgcaggttgtcctgttttctgggaataaacttattggaaa

SEQ ID NO: 227287 - DNA, 453 bp, Gossypium hirsutum
cgcaaattccctttccttttcgctttctcatttcttctcatttccgtcaccatcctcctcttttcctactcctcctcttccccttccctcctcctctccaccaatttccaagtttccgatcctcttcctccaccgccgcgtccgttaccctcacgatctccgaacaatgtccccgtctcctccacgaaaccggttcccaagaccaccgccgcagcttctgacgtggacttgaatgtgagtttggatataaaatgggagaactgtcagttaggtccgttggcggtggattatataccgtgcttggataattggaaagcgattaaagaattgaaatccaggaagcggatggagcatagggaaaggcattgtccgaagcccaatccgagatgtttggcgcctttgccgattggttataaaggtccggttcattggcctaaaagcaggggacatgat

SEQ ID NO: 227288 - DNA, 444 bp, Gossypium hirsutum
ctccattctgtgagtgacttggcaaatatttaccatctatataatttactgtgcttgattaagttgcctttggattggggaataaaaacgaaggtactcattactggtaactagataacttctgatgttgctctttcaggttctagaacacaaaactccaaaggaactgctagttaacagagaaagcgcattctcgaaaatggttcagtgtacagggcctgcaaatgccaaatacttacgtagcttagttcttgaaggtgaggaaaaagggttcagtaaggaacatgccatgcggttagatggtcagaagagagggcaagcttcaccccactggattgctgatgcacagtctgccctgcctgttagtctcacttcttctctaaatgatattcaaagacttgatactggagatagagaaaatcacctatgatgactttcggtgag

SEQ ID NO: 227289 - DNA, 460 bp, Gossypium hirsutum
gtcgatttctttgaaaagtgtaagaaagatccatctcactgggataagatctcccaaggaggcttgaaacgtatcgaggagaagtatacatggaagatttactcggagagactattgaccctgaccggagtgtatggattctggaagcatgtttccaaccttgaacgccgtgagagtcgtcgttaccttgagatgttttatgctcttaagtaccgcaagctggctgaatcagttccattggcagaggagtaaatttaagctgttaaataacattgggccggtttttcttggagaataatattctgttttgtaatttcaattggagaagctcttttgtatttcatcttgtcttttccttttccttttttcgccggcattgtttgaacatggggttgtgcgcccgtcaattccagttaaatatggtgacttttgtttttcacgttcctatcttttttatttt

SEQ ID NO: 227290 - DNA, 354 bp, Gossypium hirsutum
  unsure (1)..(354): unsure at all n locations
atcgcgagcggtcgntcgccgcgagcggcctcttttttttttatcttagatcatttctagacgcagcgaacgatggagaaagcgatcaaccgacagcaagttttgcttcaacaccttaatccttcagcttcttctttttcgtcgtaccaaaacaactctgccctctctgcattggctttgttagctggagatagcgctgcttatctaagaactaatgtatttggagatgatgtggtgatagtagcagcatataagaccgcgctttgcaaatccaagcgagggggtttcaaaggttcctattcctgatgaattacctggaccttgtttttaactgccagtgattggagaaaacaa

SEQ ID NO: 227291 - DNA, 382 bp, Gossypium hirsutum
gagcagcagcagcagccatggttctcaagacggagctttgccgatttagtggtgccaagatataccctgggaaaggcatcagatttgttcgtggagattctcaggttttcctcttttccaattcgaaatgcaagaggtacttccacaaccgtctgaagccctcaaaacttacatggacagccatgtataggaagcagcataagaaggatattgcccaagaggccgtgaagaagagaagacgtgcagcaaagaagccttactcccgatccattgttggtgccaccttagaggttatccagaagaagagaagtgagaaacccgaagttcacgatgctgacagggaaaccgcttttcgattcatcatggaatgaggatattgttc

SEQ ID NO: 227292 - DNA, 438 bp, Gossypium hirsutum
  unsure (1)..(438): unsure at all n locations
ccgagatctgaaaaaaaaaatcacctactctctcactttgctctcttcttgttcctgtcctctttcaccaaactatcgccgacaacctctccaaaagaatggcatatgaagggattctgttggggatgggtaatcctctccttgacatttcgttagtcgtggacgaagagttcttgaaaaaatatgatatcaagttgaacaatgcaattttagctgaggagaaacaccttcccatgtatcaagaaatggcatccaagcccaatgtagagtatattgctggaggtgctactcaaaattcaatcaaagttgcacagtggatgcttcaaattcctggtgcaactggttacattggctgcattgngaaggacaagtttggggaggaaatgaagaaaactcanaagctgctggtgttaatggtcaatatcttgggatgaaact

SEQ ID NO: 227293 - DNA, 342 bp, Gossypium hirsutum
accgtaccggaactcgcagtgttccgactcaacccacgcgtactggaaagctgtgagatacaataggagatggtgatgctgttgttacttttaacttccgagcagatcgaatggttatgctcgcaaaggcactcgagtatcaagatttcgacaaatttgatcgcgtaaaggttcctaaaattcgatatgctggaatgctccaatatgatggtgagttgaagcttccaggccgctaccttggttcttccccccggattgacacgaacattcggcgaatatttggtgcacaatggtgtacctacttttgcgtgccgggagaccgttaaatttgggccatggcac

SEQ ID NO: 227294 - DNA, 398 bp, Gossypium hirsutum
aacttgtgtactttatcaaagtgtatgcccaacaatgccgcccaagtttgacccaacacaagttgtcgatgtgttcgtccgcgtcaccggcggcgaagtcggagctgctagttccctcgctccgaagatcggtccactcggtttatctcccaaaaagatcggtgaagatattgccaaggaaaccgcaaaggaatggaagggtctccgcgtgaccgtcaagctcactgtccagaaccgtcaggcgaaagtcatggttgtcccgtcggcggcggcgctggtgattaaggctttgaaggagcctgaaagggataggaagaagaccaaaaacatcaagcttaatgggaacatcggccttgatgacgtcattgagaatgctaaaggaatgaggccaaggtcga

SEQ ID NO: 227295 - DNA, 413 bp, Gossypium hirsutum
cattatttttcctgcattttctccctcgccaaacagaaatcttagatcatttctagacgcagcgaacgatggagaaagcgatcaaccgacagcaagttttgcttcaacaccttaatccttcagcttcttctttttcgtcgcaccaaaacaactctgccctctctgcatcggcttgtttagctggagatagcgctgcttatctaagaactaatgtatttggagatgatgtggtgatagtagcagcatataggaccgcgctttgcaaatccaagcgagggggtttcaaggatacttatcctgatgatttacttgcacctgttttaacggcagtgatagagaaaacaaatttgaatcctagtgaagttggggatattgttgtgggaacggtattggcaccaggatctcaacgagct

SEQ ID NO: 227296 - DNA, 413 bp, Gossypium hirsutum
ctacgtttgttataccaacaaacgatccatgcaccggatccatttattgatgagcggtctgcttttatttaaagctttgaatctgatctgcgctgccgaagataagcattacgttaaggttaccggaactcctcacggctgggatgttttattctacatttttcaatttattcgtgtcgttttgcttttcaccgtcatcattttgatcggcaccggttggtcctttttgaaaccatttttacaagaaagggaaaagaaggttttgatgatcgtgatcccgcttcaagttttagctaatggtgctttgatcgagatcggtgaaactgggccttttattaaagatttggtgacatggaatcagatgtttttgctggtcgttataatgtggtgttgggctattattatccccaatt

SEQ ID NO: 227297 - DNA, 421 bp, Gossypium hirsutum
ctcaaggcttaaagctagcaagagcagatctgcgtcatttcttcctcagaagacccatcaaacagaaatgaagttcaacattgcaaatccgactactggttgccaaaaaaagctggaaattgatgatgaccagaaacttcgagccttttttgacaagaggatctcacaggaagtcagtggtgatgccctcggtgaggagtttaagggctatgtattcaagatcatgggaggctgtgataaacaaggttttccaatgaagcaaggagttctcactcctgggcgtgttcgtcttttgcttcacagaggtactccctgcttccgtgggtatggtaggagaaatggagagcgtatgatgaagtcagttcgcggttgcattgtttgtcaggatctttcatgtttgaacttgtctttgtgaaaaagg

SEQ ID NO: 227298 - DNA, 254 bp, Gossypium hirsutum
aaagtggtagatcgatctcagccgttttttattgttcgctaaggcgactattgatacggggggaggagcatatgctgggcttcaagatcccaccaaagtcggactcgttcatgtcaacagcgattatgcggatttggatgtggccgcatttaaagctaccaaccatgtcgagtgtcctccaatagaaaggcatcctagaaaaataatcattgcgacatcagctattcggcctcgagcagatgttgcttattgaa

SEQ ID NO: 227299 - DNA, 404 bp, Gossypium hirsutum
gtgaccttgggttgagtgtagagatgatgttttttatgggtgccaaagatctcttcttctttgctttgctttccttaacagctgtgtcggcatttgcacaggatgaggaagaccaaggtcttgttatgaacttctacaaggattcttgtcctcaggctgaagacattatcaaggagcaagttaagctactgtacaagcgacacaaaaacactgctttttcttggctgagaaacattatccattactgttctgtccagtcatgttatgcttaactgctgctggactccacaagaaagagcttgtctgataaggatacagacaggagctttggcctaagggattttaggttcattgagaccatctaagaagcttgagaaaggggatgtcccggtattgtttctttg

SEQ ID NO: 227300 - DNA, 248 bp, Gossypium hirsutum
gtagataaagttaatattacgtagtcgcataaagcggcatagtacacaacccacaactctggaattttaacatccatatttattctgtagctatcgttattttggcttccactagctggtgaactttccatgccaaaacttcacttgacgctgttgcagtcagtgctagggctgatcttgtaagggatgttgacaccgcacttgcctgggagtccgcttgcaataccatagttgatgccagaaatgcc

SEQ ID NO: 227301 - DNA, 407 bp, Gossypium hirsutum
gcaaccgaaaaccgaatcaagatcttctttttcttatcgagctacaaaaaagaaaaatggatctcagaatcatgggtttcgattctccgctcttgaatactctccaacacatgatggatctttctgacgatacggagaagatcccgaacgcaccatcaaaggtttacatgcgggatgccaaagccatggctgcaacaccagcggacattaaggagtaccccaagttttacgtgttcatggtgaacatgccggggctgaaataagggaccataaaggccaaggggagggccacaatatgctcttggtcatcggggaaagggaacgagaggtagtgtaagaatgagccatgttcgtgagaatggataggctggtcggtaagtttatgatgaaatatgcgttgtctgaga

SEQ ID NO: 227302 - DNA, 413 bp, Gossypium hirsutum
gttgagacttggagatcccaaggaattaccaaaccatggaattcttaggctatacaaactttgcctttgttgttttcctcgtctcttttcactctctgtcggcttgctctcaatccgagtctgaggatcatgaatttaactatgacgaagaaacaaggaggggtccatcgcgttggggcacactcaaacccgaatggagaacctgcagcgacggacgaaagcaatctcctattgatattggaacagtccaagtcaattctgagttgggagagttgcaaaggaactatacatcagctcaagctattttgaggaataggactgaagatgttgcggtggtatggtcaggggatgctggaaacatcaccatctatggaacaacttatagagtggttaactgtcactggcattcacct

SEQ ID NO: 227303 - DNA, 398 bp, Gossypium hirsutum
  unsure (1)..(398): unsure at all n locations
cccacgcgnccggccttnnnccaaggaaaaaaaattagattttaattcagttctatgtgcagaacaggcgaaattcccaaaaagacctgcaccaaccactccttcactgctattccattattcctcttccttccatcagtaaaacttacttacattcacgtaaaattcagttcctaagttcctattacaaccactttggattatataggacgtaaataaaataaatcataaataaaataaatcaaggttcgaaaaaaaaggtaattttgaaagagggagaaaaacttacggagcgaataaggtgaggagaagtgaggaggcatttggcactccagaggggatcgtttaggtcagcaccgtggagttccagctcggtcggcagtccaccatcggtaaca

SEQ ID NO: 227304 - DNA, 231 bp, Gossypium hirsutum
caactacagcgaagagagaaaaagggatataaagcgtcgtcgcttttggttcttcttctgcttcttcttcttccctctctgtctctctcttactctgaagctcctcttcgttctttcattcactcagtattgtaaaagatggccgacggggaggatattcaacccctcgtctgagataatggaactggaatggtgaaggccggttttgctggcgatgatgctccaagggca

SEQ ID NO: 227305 - DNA, 384 bp, Gossypium hirsutum
cggagagcagtccctagaaacaattattttgattcttaaaaaaaacacacacacacacacacagattaagacagaagcatggccagccagatcgtatgaacaaagaaagcttgtgtcgtgggtggcagcggattcgttgcgtcattgctggtcaagttgttgctcgagaagggttacgccgttaacactacagtcagggaccctgactaccagaagaagatctctcaccttgtaacactacaagagttgggagacttgaaaatcttttaggcggatttaactgatgaaaggagctttgatgcccctattgctggttgagaccttgtctttcatgttgcgacacccgtttactttggttttgtagatccagataatgacattatc

SEQ ID NO: 227306 - DNA, 411 bp, Gossypium hirsutum
agcagcgccgctcatctgcttctcttctccttctcttgcctttccaggttccaaactctcgttcttcctccagctcctatcctttaacaggaaatggcggttacattcaacgacttgggttctgctgccggcttgaagaagctcgatgagtatctcctcactcgcagttacatctctggataccaagcttcaaaggatgatatcaccgtctacacagctctatctggggccccatcgtctagctatctgaatgtttctcgatggtacaaacacatcgatgcccttttgaggatctcaggtgtttctgaagaaggctgtggtgtgactgttgagggatttgctcccgctgaggctgtggccactccttcaactgcagattcaaaggctgcagctgctgaagatgactacgat

SEQ ID NO: 227307 - DNA, 425 bp, Gossypium hirsutum
atcaatttgaagccttcttcgaatttcctcattcaagatgcaaattttcgtcaagaccctcaccggaaagaccatcacattggaggtggagagttctgatactattgacaatgtaaaggccaagattcaggacaaggaaggcatccccccagaccagcaaaggttgatcttcgctggtaagcaacttgaggatggccgcacgttggctgattacaacatccagaaggagtccacactccacttagtgcttcgcctccgtggaggaatgcaaatttttgttaagactttgactgggaagaccattacattggaggtagagagttcagataccattgataatgttaaggcaaaaattcaggacaaggagggaattcccccagaccaacagaggctgatttttgctggtaagcaactggaggatggcc

SEQ ID NO: 227308 - DNA, 426 bp, Gossypium hirsutum
aagcaaagcattagcaaccatagccatggcttcctcaccaaaactcttctctatgtctatcctcttcctttttgccctcttctccatgcaaatccatgctagagagtacttcagcaaattcccaagagttaacaccaatgagaaagagacaacaaccagagagcaagagcacgagaccttcgttccccagaccacccaaaagccagaagagcaagagccaaggttcatccctgaaacccaaaatggttatggcctttacggccacgagtcaggctcaggctcaggctcaggctcaagccggcccagtttcaccaccaaagaaacctatgaaccctatgtcacccctgttagattccaccctgatgaaccctataacagcatccccgaatccttcaacaataaagacacttactactacaacaagaa

SEQ ID NO: 227309 - DNA, 404 bp, Gossypium hirsutum
gaagctggtgcatcgtttgtacccagaggttgaccctgccctcaaccccgaccatgttccacacatactccataaatgccctgatcagatcccagaccccaaggccgtccagtatgtgagaaacgaccgtgggacacccatggttttggataacaactactacaggaacatactggacaacaagggtttgttgattgtggatcaccaactggcgtacgacaaaaggaccagaccttatgtgaagaaaatggccaagagccaagactatttcttcaaggagttctcaagggccattactctcctctctgagaacaatcctctcactggtagcaagggtgagatcaggaagcaatgcaatcttgcaaacaagcttcactaaaatgcctcgccaaagagaaagccga

SEQ ID NO: 227310 - DNA, 395 bp, Gossypium hirsutum
cggacgcgtgggtttcttctcattttcgagaacatttttttaaagattttttctatatattctttgaagatattaatcagaaaaatggcgctggtttctttcatcggaagggttctttttgcgtcagtgttcatcctctctgcttggcaagagttcaatgaatttggcgtcgatggtggtccagcggtgaaggagctgaggccaaagttcaacgtcttctcaaagactgtctcatctcacacagggttgcaagtgcctgaatttgatatcaagtatgtggttgctgctgctgtagcctttaaaggtgttgggaggattctctttacctttggcagcaccatcggagcttatcttctggttttgcatcaactcattcttactcccattgtttatga

SEQ ID NO: 227311 - DNA, 410 bp, Gossypium hirsutum
gttgagatggtctcgtttgtgaaggagaaagaatcatgggaaatggatacaccgcaaaagatcgaagctgctgggaagaagaaagaagaagggaacgcactattcaaggctggtaaatttgagagagcatcaaaacgatatgaaaaggctgttagcttcatagagtatgactcttctttcaacgatgaggagaagaaacaagcaaagttgctaaaagtaaattgtaacgttaacaatgcagcttccaaattgaagctcaaagattacaagcaggccgcaaaactgtgtactaaggtattggagcttgatagcgggaatgtgaaagcactctacaggagagctcaagcgtatattcaacttgttgacttggatttggcggaagctgatatcaaaaaagccttggagatcga

SEQ ID NO: 227312 - DNA, 330 bp, Gossypium hirsutum
ctcgccgccgcctgcgtctctctcttcatctctctgaacctaaaagtctttagcttttcgcttcgagagagaccatgttggtttaccaggatctcatctccggtgacgagcttctttctgactcattcccctacaaggaaatcgagaatgggatgctgtgggaagttgagggaaagtgggttgtgcaaggagctattgatgttgacattggtgccaatccttcagccgaagatgctgatgaggatgaatgcggtgatgaccaatctgtgaaggttggtgactttgtgacactttcaggccttaggagcaaccccctttcgacaagaagca

SEQ ID NO: 227313 - DNA, 309 bp, Gossypium hirsutum
cagaaatgggttttcccgatgcattcgcaatctttgtgattttttaacccaaccctgaaaactccctactggtcatgacaatccaataggagggggagagatcttgatctattgacaatgtaaaggccaagttgtaggtaaggtaaggattccccccagaccagcaaaggttgatcttcgctggtaagcaacttgaggatggccgcacgttggctgattacaacatccagaaggagtccacactccacttagtgcttcacctccgtggaggaatgcaaatttttgttaagactttgactgggaagacca

SEQ ID NO: 227314 - DNA, 403 bp, Gossypium hirsutum
gcttccaatttcaatcccctctaaaacccattacctttccttcatccaccaccaaaagggtccccattttcaaatgcaaagcctcgttttccaccaccactactacagagctcgagcctgtcttcacctccgtcaagtccttcgctcccgccacggtagccaatctcggcccaggttttgacttcctcggcgctgccgttgatggtctaggcgacttcgtttccctcagcatcgacccttctgtcagccccggtcatgtcaccatctctgagatctctgggtcctctaaactctcttccaatcctctctttaactgtgccggcatcgctggcattggcactatgaaaatgttgaatgttcggtcttttggccttttactcaaactcgaaaagggcttaccttt

SEQ ID NO: 227315 - DNA, 421 bp, Gossypium hirsutum
ctagaaccctcactattcttttcttttgtttgtttatatggcatctcaagccagcctcctccttcaaaaacagctcaaagatctttgtaagaatccggttgatgggttctcggccggattggttgatgaaaacaatatctttgaatggagtgttacaattatcggaccacctgatactctttatgaagggggatttttcaatgccatcatgagctttccgcccaattatccaaacagccctccaacagtgaaatttacatcagagatttggcatcctaatgtttatcctgatgggcgtgtttgcatatcaattcttcatcctccaggtgatgatccaaatggttacgagcttgcaagtgagcgctggatgccagtccattccggtggaaagtattgtattgagtatcatatcaatgctttc

SEQ ID NO: 227316 - DNA, 415 bp, Gossypium hirsutum
gcggctcctttttccttctcgctctctagggttttcttggtcaagtaaaaaatgaaggtggtcgctgcctacttgcttgccgtcttgggagggaacctttccccttctgccgatgatttgaaggatattctcggatctgttggagctgaggctgatgatgataggatagagttgctattgtccgaagttaaaggcaaagatatcaccgagctaactgcatctggaagggagaagttggcttcagtcccttcaggtgggggtgctgttgctgctgctgctcctaccactggtggcggtggtgccagtgctgcaccagctgctgaggccaagaaagaggagaaggtcgcagagaaggaagagtccgatgatgatatgggtctcagtcttttcgattaagcccagtaatgcaaatgtc

SEQ ID NO: 227317 - DNA, 349 bp, Gossypium hirsutum
gaaaatggaaggagatatcaaccagaagctgctaacagagactactaagaacgaagaggaagaagtgctatttaaagaaagattatggaccgagatgaagaaattgtggattgtggctggtcctgcaattttcacccggttttcaacctttggtgtcactgtaatcagtcaagcttttgttggtcatcttggtcctactgaacttgctgccttttccctttgtttcactgtccttttgaggtttggcaatggcgttctgcttggtatggccagtgcattggaaacactctgtggtcaagcatttggagcaaaacaataccatatgcttgggatataccttcaaagatca

SEQ ID NO: 227318 - DNA, 416 bp, Gossypium hirsutum
gacgtcaacgtcttctgtgaatggtgaatatcctgttgttattattccgaagtggccagacaggctaacaagagctccttcaagggccttggtcgtgaaaaacgggattgatttgtttcgggcagacacaaggaggtggacaaggagagtagcctattataagaatactctgaatctgaagcttgggagtccagcagtacgcaatgtcatggacatgaatgcattttttggaggttttgcagcagcacttgtatcagatccagtatgggtgatgaatgttgttcctgctcggaagccattaactcttagtgtaatatatgacagaggccttattggagtatatcatgattggtgtgaacctttctcaacatacccacgtacttacgattttattcatgtagctggcattgaatcac

SEQ ID NO: 227319 - DNA, 417 bp, Gossypium hirsutum
tcaattccaaaacacacaccaaattccagcacccaaaatattgtctcctctgcaagccgtattctaggttggtcctagcactggccatggcattggtggcagctacggtgcctgtttatgggcagagaactatcaacactccatgcaccccatcggcacttaacatcttcactccttgtatgaacttgcttaccaatagcagtgccaatggtacttcgcccactgcagattgttgcaactcgcttaaaacgctcacatcgagcggcatggactgtttgtgcctcattgtcaccgggagtgtcccgttccgtatacctatcaatagaactctagctatttctctttccccgagcttgtagcatgcctggtgtcccccttcaatgcaaagcctctgttggtgcacctgttcctgctcca

SEQ ID NO: 227320 - DNA, 357 bp, Gossypium hirsutum
acacggtcctggatgaccggagctcgtcccactcgtcacgcgccatactcttttagtcctctcgatcccaaagctagctctcgattccgaatctctcccagaagatgcagatctttgtgaaaacccttactggtaaaaccatcacccttgaggtggaaagctccgatacctttgattatggcaagggcaaaatccaagaccaagaagggatttcttcagaacaacaagaggcttttttttgccggaaaacaactcgaggatgggcgaactcttgccgactacaacatccaaaaggagtccaccctccacctaatccttcgtctaaggggggggcatgcagatatttgtgaaaaccct

SEQ ID NO: 227321 - DNA, 342 bp, Gossypium hirsutum
gttttaccttgtaagaaaacttaaggaatcggacataattgaggccttcgaactggaaattggtcctcacagattctcttaccaagaactcaaaaaagcaacaatgggtttcagggacaaagagctacttggatttggtggattcggtagagtttacaaaggaactttgcagagtacaaacactcaagttgctgtcaaacggatttctcatgaatcaaagcaaggtctaagagaattcgtgtcagagattgcgagtatcggccgtcttcgccatcggaatcttgttccgctccttggatggtgtcggggccggggtgatctgcttatttgctatgattatat

SEQ ID NO: 227322 - DNA, 396 bp, Gossypium hirsutum
aaaaaacccagactaaacaaaaacagagattgaatcatcatgtcacggcgatcatcagggacatggttgaggttatgcctcgtaatatttgcggtagtttcagcactggcagtatgtggacctgctctttattggagattcaagaaaactgtcagattcgtcgattccaaatcctcttgtcctccttgtatctgtgattgtcctcctcctctttccctcctcaagattgcccctgggttggccaatctctcagtcacagattgtggaagcaacgaccccgatctcaagaaagagatggagaagcaatttgtgggaccttttaacccaaagagttgaagttgcaagaagctgtcgccgaagagcacactcgccatatgaacatcacctttggggaag

SEQ ID NO: 227323 - DNA, 343 bp, Gossypium hirsutum
tagcaaagctaaagagtttgcaagatggggagcatggatagcttttggcagctgggggattatcttcgaggacaatcaaaagcctcagaggataaccaatggctgatggttgcctctaaattggctgagcagacgaggacaaagggtgaacgcctgagcaatcttgatctttcgaagggtccagccgaaataaggacaagggataaatttggtttccgggaagacaacatattcgagaaccttaacttcaatatgttaaacttggactccaagattggagataatgtaagcaaaagctcattccgaaatggtacctacaatataaatgctgtttaccagaaaa

SEQ ID NO: 227324 - DNA, 413 bp, Gossypium hirsutum
  unsure (1)..(413): unsure at all n locations
gtgtagcgattctcagttagtcttttctttaagcttacagcttctctccagagttttataatgggtaaggagaaggttcacatcaaccttgttgtcattggccatgtcgactctggcaagtcgaccactaccggtcatttgatctacaagcttggtggtattgacaagcgtgtgattgagaggttcgagaaggaggctgctgaaatgaacaaaaggtcattcaagtatgcttgggtgcttgacaagcttaaagctgagcgtgaacgtggtatcaccattgatattgccctgtggaagtttgggaccaccaaatactattgcaccgttattgatgcacctgtacaccgngactttatcaagaacatgattaccgattcctcacaggctgactgtgctgttctcattattgactc

SEQ ID NO: 227325 - DNA, 163 bp, Gossypium hirsutum
caaaaccctaacggctacagctctagaattcaagcctttcgaccatggcggatgttgagacggaggtagcggcggctggagtgcccaagaagagaacattcaagaagtttagcttcagaggtgttgatttgaatgctctccttgatatgtccactgatgtgct

SEQ ID NO: 227326 - DNA, 347 bp, Gossypium hirsutum
catccgcatattctctctaccctaatctacaattcttcttcgatttcatgtaaatctgcatcatttaattttttttttcaaaagacaaaaccctcttatgttctatcgtagcagttttatttatttacttgtaatttattttcaagtagaaaattaaacatgacgaagaagagaaaatccgacgccacgcgccttgacgaggttgatcggaccatgtacaccagtttttgcagcgctgcgaactccctctcccagctttacacccaggctatgaaccaccaacgcctttctttttaggccggtgaacgttacgcgctggagaaactctatcaatggattctgaggca

SEQ ID NO: 227327 - DNA, 447 bp, Gossypium hirsutum
  unsure (1)..(447): unsure at all n locations
cccacgcgtccggagcatcaatatattcccgattttattctgttcgataattgctttgtgttgtttaatccaaatggctgaatctacagacgcaacgaaatcatcttcggcggcggcggcggcggcgggtgggacggatgcggcggtccacatcgtttacaccgagaggcctcaggatgagcagcctgaagcctaccatatccggaccctctccaacgtcctcggcagcgaagaagctgctaaggaagccctgatctacagttacaagacggctgccagtggcttctccgccaagcttactccccaacaggttgccgaaatatcaaaacaacttggtgttcttcaagttgtcccgagcaggacactccagctacattctggaccaggcaagctgcactaaggctcaagaaactcttntaccctactaaaaacaaaatcctatggaac

SEQ ID NO: 227328 - DNA, 265 bp, Gossypium hirsutum
  unsure (1)..(265): unsure at all n locations
attcttcacaaaaaagaaaagaaaaaatacagtgaaaatggcaacccttaaggttccagctcatgtacctgccccttctgaggatgctgagcaacttcgtaaagcttttgaaggatggggtacaaatgagcaattgattatcgacatattggctcacaggaatgcagctcagcgcaatttgattcgtanaacttatcgtgaagcttatggggaagatctccttaagtttttggatgaggaactttcaagagacttgaacgagtct

SEQ ID NO: 227329 - DNA, 311 bp, Gossypium hirsutum
gttctagatcgcgggcggccgctcgcgatctagagctattttcagcaactaaaaaaaaaaaaaggccccaaacagacaatagcctaggacaggaggatctctcagggtttaggtgatggcttcaaagcggatcttgaaggagctcaaggatctccagaaagatcctcctacctcttgcagcgcaggccctgttgctgaagacatgtttcattggcaagcaacttttatgggtcctcctgacagtccttatgctggtggagtgtttttattatctcttgttgtttttttgtcacttcatatttttttccatt

SEQ ID NO: 227330 - DNA, 255 bp, Gossypium hirsutum
ggatagccctatagcagcagcattagaagcagaagcaaagggtttagagacgaaatggcagcgaaaaggaagactcccgtcaagaccagaaacccggatctgatccgtggtgtgggaaagtattccaggtctaagatgtaccacaagcgtggcctttgggcaatcaaggccaaaaatggcggtgcttttccccgccatgatcccaaacctaaggcccccgctgccgctgagaaaccctccaagttttacccctct

SEQ ID NO: 227331 - DNA, 359 bp, Gossypium hirsutum
cggacgcgtggggagattatcaatttgaagccttcttcgaatttcctcattcaagatgcaaattttcgtcaagaccctcaccggaaagaccatcacattggaggtggagagttctgatactattgacaatgtaaaggccaagattcaggacaaggaaggcatccccccagaccagcaaaggttgatcttcgctggtaagcaacttgaggatggccgcacgttggctgattacaacatccagaaggagtccacactccacttagtgcttcgcctccgtggaggaatgcaaatttttgttaagactttgactgggaagaccattacattggaggtagagagttcatataccattgataatg

SEQ ID NO: 227332 - DNA, 453 bp, Gossypium hirsutum
gaagatttcacagtggccaaaagcttctggaacatacaagaggactactgttattactcagggtgcagatccggtaattgttgccgaggatgggaaagtgaagcaattccctgttattttgttacccaaggaaaagcttgttgatacaaatggtgcaggtgatgcctttgttggaggctttctttcacaattggttcaagggaagtccattgaggattgcgtaagggctggttgctatgcatccaacgttatcatccaaaggtctggatgcacatacccagaaaagcctgaatttaaataaagctattccactttcctgatctcctctccactgttgttttcaagtttctgattgttaagaaccctcttgctaattgaattttgtttttaattttcctatttggcggtgtcatttcgatgcctgcattcttgaatggcatatgagaataacat

SEQ ID NO: 227333 - DNA, 359 bp, Gossypium hirsutum
gtctgctactgctcctactaccccagcaatgaaccaagttgaccttccatttattttggagggtgtgtcggaggatgctcgtgtcgattgttggaacttgagccaggcagcaatgagacatgagacggagtcctgtttcgtttatgctgatcagttgaagcaaagatgtgtggaacagttcaaagaagggactttggggattgaacagcttgccgctgttgatggcttatgcgacttagtttctaaagtggttgatgcatctgaacctgctaggacattccatgtaaatctttcgatttttactttgaatccctgattttttggagatttggtcagattattttccataattccccatt

SEQ ID NO: 227334 - DNA, 422 bp, Gossypium hirsutum
ataacctccaagactttcttctcttgcacaaccttatcacctttgcattgtgggcaacgatccttatcgttgatggtttcaccagtacccttgcactcattgcaaggatgctgcatttgttgagaagggtatgcagaatggacaaaggattactttcccaggagaagctgatgaagcgcccgatacggttactggggacattgtattcgtcctgcaacagaaagatcatcctaaatttaaacgaaagggtgatgacttatttgtagagcatacattggcacttactgaggccctttgtggctttcagttcatactgactcacttagatggcagacaacttctcattaaaacccaacctggggaagtcgttaagcctgatcaattcaaagcaataaacgatgaaggaatgccgatttatcaga

SEQ ID NO: 227335 - DNA, 363 bp, Gossypium hirsutum
tgactaccaattgattgacatttctgaggatggatttgtgagtttgctgactgagagtggtgacactaaggacgatctgaggctcccaactgatgagaacttgttgaaacagatcaaggatgggtttggtgagggaaaagacctggtggtgtctgttatgtcggctatgggagaggagcagatctgtgctctcaaggacatcggtccgaaatagtttgagatttgatgattctaagtatgttattacaaatcttaaatggaattatttttataagtggcttttaatatcttgccctttcaagacttggggtagggtatataatgttgttgaatgggtcttttttgtttggttcggtatgctta

SEQ ID NO: 227336 - DNA, 419 bp, Gossypium hirsutum
  unsure (1)..(419): unsure at all n locations
atggcatcatcccttctctctagaactcttttgggtcaccgcttaattcgattttcctcgtctctccctcagaaccccttgattttctctaatcttttcaataagagagagttccgtgtacaggctgagtcttaccataccacatataaggcctctggtcagcattctcgtttaatggcttctgcagcaattgagacaagaagtaattnttcgacacagtctctttctaccaatgatccggttgtttctgttgattggcttcatgctaatttaagggagcctgatttggtattggatgcatcatggtacatgccagatgagcagaggaatccaattcaagagtaccaggttgctcacattccctgtgctcttttctttgatggtggtggaatatctgatcgaactacaaagttgccgca

SEQ ID NO: 227337 - DNA, 385 bp, Gossypium hirsutum
ggattagaaggccattttcgtgatccgaaaccgaacatagcttacatgagatcagctttggacattctaggaacaatggggttacctatatggcttacggaagtcgatgtcggtggaggaccagatcaggcacacaacttggaagatatactaagggagggctattctcatcctgcagtcgaagggattatcattttcggtggtccgatagccgccggattcaagtgtttgacgctagcaaattatgatttcgaacctacgcctgtcggagaagttgtagacaagttgattaatgagtggaaatctgggaggagacaagttagaacagatagtagaggaatgtctgcaattttactctttcatggtgattacagggtagaagtga

SEQ ID NO: 227338 - DNA, 404 bp, Gossypium hirsutum
cggacgcgtgggttttattccgctattttctctctccccaaacacccttttaagccaaaaggaggacaatggccgatcagctcaccgatgatcagatctctgagttcaaggaggcctttagcctattcgacaaggacggcgatggctgcattactaccaaggagctcgggactgtgatgcgatcacttgggcagaaccctactgaggcagaacttcaagatatgattaatgaagttgatgctgatggaaatgggaccatctattttcctgaattccttaacctgatggcgaggaagatgaaggatactgattctgaggaggaacttaaagaggctttcagggtttttgacaaggatcagaatggtttcatatcagctgctgagctgagccatgtcatgacaaat

SEQ ID NO: 227339 - DNA, 252 bp, Gossypium hirsutum
tcaaaacaagtgaaaatatctctctcttcactttcttctcttttcaacgcacggggaaaggcggggaggccgtagacaatctctcttgcgctcttctcgtagaatggatcagattcaacatccaactgtcatgcaaaaagtagctggcccgctcctttcttttagcattttccgagattttcaagggtatgatgggtctttcaagaggcccgccctattccaaagactttttgcatattggaatttttttca

SEQ ID NO: 227340 - DNA, 451 bp, Gossypium hirsutum
tcttagaaggtgtcttaataaacgccttctttcttcttcttcttattcctttattgctttttagaatttttcttaatcgaaaatgagagagtgcatttcgatccacatcggtcaggccggtatccaggtcggaaacgcttgctgggagctttactgtctcgagcatggaatccagcctgatggtcagatgccaagtgacaaaactgtcggaggaggtgatgatgcttttaacacctttttcagtgaaactggtgctgggaagcacgtccctcgtgccgtcttcgtggatcttgaacccactgttattgatgaagtgagaactggtgcttaccgccagctcttccacccagaacaactcatcagcggcaaggaagacgcagctaacaactttgcccgtggtcactacaccattggcaaggagattgtcgacctctgtttggaccgcatcagg

SEQ ID NO: 227341 - DNA, 293 bp, Gossypium hirsutum
gaacgcagtatctctaactacctccgcctgtctttcaacgagaagagaacaagaaaagaagctgagaaatggcacgcaagaagatcagagagtacgattccaagagattgttgaagcagcacttcaaaaggttttccgcctactatttgcccatcaaatctgcacaagtgacggagtcaactgatttcaatgagctagtagagaaggagccatggcttttgtcgcaaaaactggttgtcaagcctgatattgttgttggaaagcgtgggaagagtggtttgggtggcttggaa

SEQ ID NO: 227342 - DNA, 260 bp, Gossypium hirsutum
ggaaaataatttgtagataaaggtaatattacgtagtcgcataaagcggcatagtacacaacccacaactctggaattttaacatccatatttattctgtagctatcgttattttggcttccactagctggtgaactttccatgccaaaacttcacttgacgctgttgcagtcagtgctagggctgatcttgtaagggatgttgacaccgcacttgcctgggagtccgcttgcaataccatagttgatgccagaaatgcc

SEQ ID NO: 227343 - DNA, 331 bp, Gossypium hirsutum
gaaggtattaagacaatgaagaaaggtgaaaatgccatctttaccattccccctgcacttgcgtatggcgagtctggttcaccaccgaccattccccccaatgcaaccctccaatttgatgttgaattgttatcttggacaagtgtcaaggatatttgcaaagatggtgggttatttaaaaagatacttattgaaggtgacaaatgggagaatccaaaggaccttgatgaagtgctcgttaactatgaagctaagctcgaggatggcacatcggtggcaaaagccgaaggcgtagagctcactggtaatgatggtctattctgttctgctt

SEQ ID NO: 227344 - DNA, 450 bp, Gossypium hirsutum
ccggtttacgagatgaaggactaccttgactggactgaagggaaggggatttgggctcattcagataaaggaccatcaccatctccatatgtagcaactctacgagcgcttgtccaagcttctttttgtatggccatgtttctttacctttcaccatctcatcccttgtcctggtttactgatcctgcctaccaagaatggggattctggaggaagttgagttaccagtatatgtctggttttacaatgcggtggaaatattatttcatctggtcaatttcagaggctgctttgattatatctggcctgggtttcagtggatggactgaatcttcaccaccaaaaccaaaatgggttcgagcaaaggttgttgatatcctaggatttgagttagcaaagagttcagtgctgttaccacttgtctggaacatacaagtcagcacctggctt

SEQ ID NO: 227345 - DNA, 375 bp, Gossypium hirsutum
gtcgacatctcaaaggaaattcatacgaattatccaacttccatccttccggcaccaatgccaccattgaacccaaaatatgggcagttttagttgctggctccaatggttttgtaaattataggcaccaggcagatatatgccatgcatatcaaatcttgaaaaatggtggactagaagacgaaaatattatcgtttttatgtatgatgatattgcattcgacgtagaaaatttgagacctggtgtcattatcaataaaccagatggagacaatgtttataaaggagttcccaaggattacacatgggaagatgtaaatggggacaatttacttgctgcaatacttggaaacaaaactggtgttaggggtggaa

SEQ ID NO: 227346 - DNA, 438 bp, Gossypium hirsutum
caaaagcaaagatgaggcctctagacgagaaagaaaccaccgccgttttcgaaaaaatctttaaattcaccgggaacaacctgaagaacatagtcgagaacccatctcatgaaggacccgacaaggaacccggtcgctattgtttcaggctacacaaaaacaaggtctattacgtcagcgactccctcgtcaaacgagccactaacgtcgccagaaccaagctggcttccattggaacctgcgtaggtaggttcacccacggtggcaacttccatctgaccatcgaatgcttaaacctcttggctgctaacgccaagcacaaggtttggctgaaacccacgtcggagatgtcgtttctttacgcgaatcacgttttgaaaggtgggctagggaggataacggagagcatcgcgcctggtgatggggttgtggtttttt

SEQ ID NO: 227347 - DNA, 450 bp, Gossypium hirsutum
cccacgcgtccgaaaaaaatgtccaaggaagtgactgaagaagggcagagccgaaaggactatgtagacccaccaccagcacagctggtggacattaacgagctcaagctctggtcattttacagagctctcatcgccgagttcatagccacactcctttttctctacgtcacaatagccaccgtaatcggccacaagaaacaacacgatgcgtgcaatggagttggtcttttaggcattgcatggtctttcggtgggatgatctttatcctcgtttattgcaccgccggtatctcaggtggtcacattaaccccgccgtgactttcgggttgtttttagcccgtaaagtgtcactaataagagctgttacttacatggtagcttaatgcctgggtgctatatgtggtggtgggctaggcaaagcttttatgaaccatgaatacaccacc

SEQ ID NO: 227348 - DNA, 441 bp, Gossypium hirsutum
gttctagatcgctagcgatctagaacgatcaatgtgcaaaacaagaactcatcatactttgtcgaatggattccgaacaatgtgaaatccacagtttgtgacattcctccgagtggattgaaaatggcatccacgtttatagggaactctacttcaatccaggagatgttccggagggtgagcgagcaattcactgccatgttccgaagaaaagctttcttgcattggtacactggagaagggatggatgaaatggagttcacagaagctgagagcaacatgaatgatttggtttcggagtaccaacaataccaggatgccactgcagaagacgaggagtacgaggaatatgaggaatacgaggaagaggcttaaaggatgctccttgttctttttatcatgtaggacattcggttgtgcaattttcgctttgctggtttt

SEQ ID NO: 227349 - DNA, 304 bp, Gossypium hirsutum
ctttggcaaagaaaacacaggtgtacctcactagttttcacttatggagttctcgagaaaatcccttgtgatcaagatgttgatctcagcaatatttctattgggattatcgagttcgagtgtagcggagtttcgactcgccagacatgcgacgacgagtacgacgatcgagtatccggcgttaaactgtcggaaacacagtgcggttctgacggaattcggtggtgttggtgacggcaaaacatccaacacggaggcgtttaaagctgctatagcaattctcagccagctcgcggaagatggt

SEQ ID NO: 227350 - DNA, 447 bp, Gossypium hirsutum
ctttgtatgatcaccctggcaaggcagacatgttggagcaacttattcttgagttggagcattcaattaggattaatgggagatatcctgataggacagagaaggagcccccttcaacacttttgtggattttgttctttttggctcagcattatgacagaagaggacagtatgatgttgctctttcaaagattgatgaggctatacagcacacaccaaccgtaattgatttgtactctgtcaagagccggatattgaaacatgctggtgatttggtagctgcggcttcattggcagatgaagctaggtgtatggacctcgcagaccgttatattaacagtgaatgtgtcaagcgtatgttgcaggctgatcaggtggctttggcagaaaaaactgctgtgttgtttacaaaagatggggaccagcacaacaaccttcatgacatgc

SEQ ID NO: 227351 - DNA, 321 bp, Gossypium hirsutum
gttgaaaaagagagactatttttggtggaaatgttcagatgaattcatccatggcaaccaaagtgtacattgtatactattccatgtacggacacgtaaaaaaacttgcagaggagatacagaatggggccacatttgctgaaggtgttgaagccacattatgttcagtccctgagactatattcaaagaaaggctcgtatagatgagggcactaccaaaaagtgatgtaccggttattacatcgaacgatcttgctgatgccgatggatttgtttttgcttacccgactatgattcggaatgatgttcgcacaatttcaa

SEQ ID NO: 227352 - DNA, 448 bp, Gossypium hirsutum
ccacgcgtccgcttcactcccgtcctcacatttcccaacaaaaagcgaaggaaatcattttcatcaatcccccccatcacccttctttatctttcccacggaaacgaagagcaaatcagaaaaccttgtgaagaaaaaatgagggaaatcttgcatatccaaggaggccaatgtgggaaccagatcggggctaagttctgggaagtcatatgcgatgagcatggaatcgacaacactggaaagtataacggtgactccgatctccagctggagcgtatcaatgtctactacaatgaagccagtggcggtaggtatgttcctcgcgctgttctcatggatcttgaacctggcactatggactccgtcagaaccggtcttttcggccagatctttcgtcccgataaccttgtcttcgggcagtctggggctggcaacaactgggccaagg

SEQ ID NO: 227353 - DNA, 401 bp, Gossypium hirsutum
gatcaatgctactaatggaactgctggtgcatttgatgtcacaaccaagggaattcttcattcagctctggaaagatgtgagtattggagattatcggataagaaggggaagcctcctggggttgttggatggtggccatctcgtgctgttacctttatagagaatcatgacactggttctacccagggtcattggaggttcccaggtggaaaggaaatgcaaggatatgcttatatcttgactcacccaggaacgccggctgtgttctacgatcatattttctctcatcatcgatctgagattgccaatcttatctctgtcagaaacagaaacggaatccattgccggagtttagttaaaaatcgtcaaggcaggaagggatgtgtttgcagccattatt

SEQ ID NO: 227354 - DNA, 348 bp, Gossypium hirsutum
cacatatccaatggcttcgatcgctgtcggagacgtgttaccggacggtactctgtcctactgagacgccgacgattatctgcagcctgtgtgcgtacattccctggctgacggttaaaaggttatcatcactggcgttgccagggcctgtacccctacttgcagtttgaagcatgtctctggactatagagaaagcaggggagctgaaatccatcggcggtgatgtaatcatgtgcatcagcgcgaacgatccctttgcgatgaaggcatggaccacaacttaccctgagaacagagatgggacgtatccagctgatgggctagctacatacacccacgcccttggt

SEQ ID NO: 227355 - DNA, 441 bp, Gossypium hirsutum
cggacgcgtgggctgacgcgtgatatccatactttgctcaccaaaactcttctctatgtgtatggtgtacctttatgccctattctccatgcaaatccatgctagagagtacttcagcaaattcccaagagttaacaccaatgagaaagagacaacaaccagagagcaagagcacgagacctttgttccctaaaccacccaaaagccagaagagcatgacccatggttcatccctgaaacccagaatggttatggcctttacgttccacaagtcatgctaacgcttaggcttatgctcaagccgctccagtttgaccaccaaagaaacctattaaccctatgttacccatgtaatattcctccctgatgaaccttataacagaattctcgatccttcaacattataatactcatactattacacaaagatgcctacaattt

SEQ ID NO: 227356 - DNA, 443 bp, Gossypium hirsutum
  unsure (1)..(443): unsure at all n locations
caaaaggaagatagtcagccatggatgttcttagagcttcttcttctacccttgttcattcaccatacatttcaacaacaacaagaagaaacaaaacccaatttcttaaacccatctttcaccatttaaagttaaaattaactgtgtttgattcatctttcacattgtttgaaagaaatggatcgaaattgaggttgtttatgacgttaccatcgtccccggcatcgacaacggaatccatcgagccacctatgctggaacttgaggctgatggttgcgagaaagagagattcgattggtactcacattggtacccggtgatgccaatatgtgatttggataagagggtgccccatgctaagaaagtattgngacttgacctagtggtgtggtgggataggaatgagaatgaatggaaagtgtttgatgatacttgtccccat

SEQ ID NO: 227357 - DNA, 441 bp, Gossypium hirsutum
attgtgggtggagaagaagcggtgacggatctaacttggaactccctttctcttcttaccgctattgccgacctatctctaaccccctcaatttctctcaggtagatattccttgtgttcaagcgtcttcatggcttcaaagcggattttgaaagaacttaaggatttgcagaaggatccaccaacttcctgtagtgcaggtcctgtagcagaagacatgtttcattggcaagcaacaattatgggcccctccgatagcccttttgcaggaggtgtgtttttggttaatattcattttcctccggattatccattcaagcctcctaaggttgcatttaggaccaaggtctttcatccaaacatcaacagcaatgggagcatttgtcttgatatcctaaaagacagttgagccctgcactgaccattttcaaggtgtggttt

SEQ ID NO: 227358 - DNA, 295 bp, Gossypium hirsutum
gtaagtgtaaagatcacatataagacacatactgtgatagtttccgcctacttttttatgtagggagacacataagatcgaaggggagaaacataaatgcacctacaatgatagggtttgcaccaatagcctaatatagaccaacatattgcacttaacattgataagaaaggctttgccaatcttgtttataacagaactaccaataaagtcgatgagactgttgtaagagcttataagggcggagaacttcctgtttatggtttccaacatcctgaagcccgagttgagtcaa

SEQ ID NO: 227359 - DNA, 460 bp, Gossypium hirsutum
cccacgcgtccgcaaagcattagcaaccatagccatggcttcctcaccaaaactcttctctatgtctatcctcttcctttttgccctcttctccatgcaaatccatgctagagagtacttcagcaaattcccaagagttaacaccaatgagaaagagacaacaaccagagagcaagagcacgagaccttcgttccccagaccacccaaaagccagaagagcaagagccaaggttcatccctgaaacccaaaatggttatggcctttacggccacgagtcaggctcaggctcaggctcaggctcaagccggcccagtttcaccaccaaagaaacctatgaaccctatgtcacccctgttagattccaccctgatgaaccctataacagcattcccgaatcctccaacaataaagacacttactactacaacaagaatgcctacaagtccactaagcagcaa

SEQ ID NO: 227360 - DNA, 445 bp, Gossypium hirsutum
tggagacctaattagcctttcagaacaagaacttgtagattgtgataccagcaactatgggtgtgaaggaggatacatggactatgctttcgagtgggttataaacaatggcgggatcgatagcaaaaccgactacccctacactggtgtggatggcacatgtaacaccaccaaggaggaaaccaaggttgtatctattgatggctatcaagatgtagagcaatcagatagtgctcttttatgtgccgtagctcatcaacctgttagtgtgggaatagatggttccgccattgattttcaactatacactggtggaatttatgatgggagctgctcggatgatccagattacatagaacatgctggtttaatagcgggctatggttcacaaggtagtgaagagtattggattgcgaataattcatggtggacatgttgggggata

SEQ ID NO: 227361 - DNA, 431 bp, Gossypium hirsutum
caacaggcagctcttcttccttttctgcgtctcatcatcaaaccccaaactcttaactagcctcttcctcctcctctttactttaatttcattttgctttcacaaatctaagaccagagctccaaaagattgaatttttaacccctcaaattaaaatccttcctttttcgcgttttcggttgaaaatttgtataaaaaagagggtgatttagaaacaatggatgctgattcatggagtgctcgtctttcttcagcttctaagagatatcaatcggctcttcaattacgatctgatatgcttatggggtttgaagaaattgatggagaagatgaaataagagaggagtttcgatgccctttttgttcagagtatttcgacatcgttggcttgtgttgtcacattgatgatgagcatccaatggaggctaaaa

SEQ ID NO: 227362 - DNA, 282 bp, Gossypium hirsutum
cttaataaacgccttctatcttcttcttctccctttctttgctttttcgaatttttcttaagcgggaatgagagagtgcatttcgattcacatcggtcaggccggtatccaggtcggaaacgcctgctgggagctttactgcctcgagcatggaatccagcctgatggtcagatgccaagtgacaaaactgtctgaggaggtgatgatgcttttaacacctttttcaggggaactggtgctgggaagcacgttcctcgtgccgtctttggggatcttgaacc

SEQ ID NO: 227363 - DNA, 164 bp, Gossypium hirsutum
tgacttcttcagaaactatctttccttaaaaaatggttactttaaggtttaaccagtcccaagtggttggaagggctcacccaccaaaaagcgatgagcatcccaagatctataggatgaagctctgggccaccaatgaggttcgggccaaaattcaagttctg

SEQ ID NO: 227364 - DNA, 342 bp, Gossypium hirsutum
cttaataaacgccttctttcttcttcttctccctttctttgctttttcgaatttttcttaagcgagaatgagagagtggcatttcgattcacatcggtcaggccggtatccaggtcggaaacgcctgctgggagctttactgcctcgagcatggaatccagcctgatggtcagatgccaagtgacaaaactgtcggaggaggtgatgatgcttttaacaaccttttcagtgaaactggtgctgggaagcacgtccctcgtgccggctttgtggatcttgaacccactgttattgatgaagtgagaactggtgcttaccgccagctttttcacccagaacaac

SEQ ID NO: 227365 - DNA, 237 bp, Gossypium hirsutum
gctaataaacgcgtggtctattagtcatctccctttctatgctttctcgaatatttcttaagcgggaatgagagagtgcatttcgattcacatcggtcaggccggtattcaggtcggaaacgcctgctgggagctttactgcctcgagcatggaatccagcctgatggtcagatgccaagtgacaaaactgtcggaggaggtgatgattctttttacacctttttcagagaaactgg

SEQ ID NO: 227366 - DNA, 340 bp, Gossypium hirsutum
cggacgcgtgggctgagattgcctaaagatgcaactgaggctccgattttgcctaccgataatttgcctcaagattttgactggagagaaaaaggagctgttacacccgtcaaaaatcagggttcatgcggatcatgctggtcttttagtacaacaggagccttggaaggagctaactttttggcaactgggaaacttgtgagcctcagcgagcaacagctcgtggattgtgatcacgagtgtgatccagaagaagcaggttcatgtgattctggatgcaatggggggttaatgaatagtgcttttgagtttacctctaaagctagtggacttattcgtg

SEQ ID NO: 227367 - DNA, 410 bp, Gossypium hirsutum
gtgcccggactcgacgccatcgcgtgcggcagtttgcacctacatatcatgattatgtactgtacaaccataatgatggtgatgagggaacaaggaaataccggtcgaggacttttgtgccaactgggcccgagatggatgctgctagaagaaacaaacacatgattggaaacaagctagaagatattcagctatccagtctcccttcatatggtacaagtgctccccaaaaccctagctctgtaccagattctacaagcggtgatcttacaaaatcatcactgcttgtggaccactcaaattcttattctgcgccatacgatatgtcacttattgacatggatctatccagttacccttcaaaagttcctgcagcgaaagatactgaacctaggtgaccagtgtgtagt

SEQ ID NO: 227368 - DNA, 429 bp, Gossypium hirsutum
cggacgcgtggggaaaaataacagccacaacattgggaacctgtctgccaacaaatatagtggcaacaaccattgcaacaaagatattaataataacagcaacaccaactccaactccaacaacaacgagaacagcaacgcaaacaatgctgccgataaaaggttcaagactttgcctgccgccgagacactcccgagaaatgaggtgcttggtggatacatctttgtttgcaacaatgacacaatgcaagaagatcttaagcgccagctatttggtttaccgccaagatacaagggactctggtcgggccatcacacctggcttgccattggttctttataactacaccaatcaatcagtgcatggtatttttgaggcagcaaggtttgggggttctaacattgaaccaactgcttgggaagacaaaa

SEQ ID NO: 227369 - DNA, 466 bp, Gossypium hirsutum
gcaagtattgataataacgcacctaattattcgaattacgaatggggttcggatgtaaatgctggaaccacagtgggttataataattatgtaaattatgatcagtcgagtgttgatcaaaattcaggaaactatggaaacaatgatcaaaatattggtagttatgcaaattatgctgattatagtagctatcaatcgagtagtgatccgaatattgggggtgttgatgctgctactagttatgggagttatgagagttatggaaattaccatgtacaatatgagaataattggggtgatgggtcaacaacagcttctatgttgcctgagaccactgggatagctgactttggggtgaaaattaagggaaagagagggaggaatgatttaccagtggaaattgttgaggtgaagcaggatgatcttacgaagaatcggcccagggaagaccaagtcaagatgactg

SEQ ID NO: 227370 - DNA, 434 bp, Gossypium hirsutum
cacgcccccatttattttatttttcaaacaaattttcccttcaattttcgtataatttcctaggaaaagaaatatgagagagtgcatttcagttcacatcggtcaggccggtattcaggtcggaaatgcttgctgggaactttactgtctcgagcatggcattcagcctgatggccaaatgccaagtgataagactgttggtggaggagacgatgctttcaacacctttttcagcgaaactggtgccgggaagcacgtccctcgcgccatctttgttgatctggagcctactgttatcgatgaagtgaggactggtacgtaccgccagttattccaccctgagcaactcatcagtggcaaagaagatgctgccaacaatttcgctcgtggccattatacaattggcaaagagattgttgatctctgcttggatc

SEQ ID NO: 227371 - DNA, 369 bp, Gossypium hirsutum
cggacgcgtgggctgagattgcctaaagatgcaactgaggctccgattttgcctaccgataatgtgcctcaagattttgactggagagaaaaaggagctgttacacccgtcaaaaatcagggttcatgcggatcatgctggtcttttagtacaacaggagccttggaaggagctaactttttggcaactgggaaacttgtgagcctcagcgagcaacagctcgtggattgtgatcacgagtgtgatccagaagaagcaggttcatgtgattctggatgcaatggggggttaatgaatagtgcttttgagtataccctcaaagctggtggacttatgcttgaggaagactacccttacaccggcacttat

SEQ ID NO: 227372 - DNA, 396 bp, Gossypium hirsutum
ggtggccaatgcggcaaccaaatcggagccaagttctgggaagttgtttgtgctgagcatggcgtagatgcaactgggcgttaccaaggagacttggatcttcaacttgagcgaatcaatgtctactacaatgaagccagttgtggtagattcgttcctcgtgctgttctcatggatcttgaacctggaaccatggacagcatcagatctggccccgtcggtcagatttttagaccagataacttcgtttttggtcagtctggtgctggtaacaactgggctaagggccattacactgaaggtgctgagttaatcgactccgtacttgatgttgttcgtaaagaggctgaaaactgcgattgccttcaagggttttaaggttgtcattccctggga

SEQ ID NO: 227373 - DNA, 451 bp, Gossypium hirsutum
tcaatttgctctgaagatcatgttggctatttttcacaaggcatttgctaatccaccagaggagctgaatagtccagcttctcataaatctaccaagaagcctaaacagcctgaagaaaccctaaatgatttcctatctcatcaccctcacaacactttctccatgagctttggcaacgctgctgttttggcttatgtccgccatgaacgtgctgcttcagttcatcagaggttgttttgtgggttttgatgacatatactgcctcttcttagggagcttgaacaatctatttattctgaatatacaatatggtctttccaaatggagcattatagcgttattttgtgattttagcatttaggacgcctgagggtatggggttccataccccttctgtatatggttggttatgggatctttgaagggatgctttttcttttttgtgtattc

SEQ ID NO: 227374 - DNA, 470 bp, Gossypium hirsutum
ggctcaatgaaagtcagcctgtcccgtgcccgtaaagtgtcgaactacttgtcgacgagtgtgacggggtacaacaagagggaacgagtcgcactgagtgactgcgtggagcaaatagatgagtcgatggaggagttgagcaagacattaggggagttgaagcacttgagaggggagacgttcgagtttcagatgagtaatgcgcggacatgggtgagtgcggcgctgacgaatgaggacacgtgtcttgatgggttcgaaggagttgacggcaaggttaaatctaatgtgaagaggaagatcacgaatgtggctaaagttaccagtaatgctctgtacatgatcaataggcttaatgaaagtcgtggtaggcaccgttgaatctttgatgatgatgatgatgaataattggatggtgggatttatctagcttattatggttcttaaatataagttatattttgattttt

SEQ ID NO: 227375 - DNA, 461 bp, Gossypium hirsutum
gttttataaaaaccctaaacggcctgatatttatctcttagaacgaaaaatcccaaacgcctcgctctaagaaaaaaacaattatggcaagcaaagaacccgaacacgagcacagagaagatgaagaagctcctgccgccgaggatgaagacactggagctcaagtcgcccctattgtcaagttagaggaagtcgctgtcagtacaggcgaggaaaatgaagatccgatcctcgatctgaagtcgaagctgtatcgatttgataaagaagggaatcaatggaaagagagaggtgctggtactgtgaagctgttgaagcacaaagagacaggaaaagttcgccttgttatgaggcaatctaagactctcaagatctgcgccaatcatctagtgttgccgacaatgacggtgcaggagcacgctgggaatgataaatcgtgcttatggcacgcctctgactat

SEQ ID NO: 227376 - DNA, 209 bp, Gossypium hirsutum
atcaaatcagtttctcccctaaatttactgaaattttatagcatgactccttatttctccgatgtgggggttcgaatacaacgggagtgccctaatatccatggtaggcaagaactgcttcgccattgccagcgatcggagactcggagttcaactccaaactatcgccacctgatttcagaggatttataaagttcacgatcgcctct

SEQ ID NO: 227377 - DNA, 286 bp, Gossypium hirsutum
caaacaccccgccgcagcaaccatctaccatccatcttctcattctactctttacctaccaagagcaagaaacctcaacaatcaacaactaccaactagatttggattaagtcacccaaaaccaatcaaccaaccaagcaaccgagaagcaaaaagaatggattctgattatggcattcccagagaactttctgatcttcagaaactccgatctcaataccaaccacagctccctccttgcctcgagggaactactggcagggttgagtttggtgataccactaca

SEQ ID NO: 227378 - DNA, 398 bp, Gossypium hirsutum
cacaggcttggaagggaactaagctagaggtagagagaaagaagggagttgccaaaatgtcgtcgttcttgcagtcatttctggatcccaagaaaagctggttggcagctctgcacatgaaatccctttccaagcgcctccgcaaatacggtcttcgctatgacgatttatacgaccgttactatgatttggatatcaaggaggcgttgaatcggctgccccgcgagatcgtcaatgcccgcaaccaacgccttaagcggtcgatggacctctttatgaagcacgagtattcttcccttaaaccttttgcaaatgctaacaccatttaggagcttatctcaagatatgttttgctcttggtaggtctttgacctgtataactttatttaccaaattcc

SEQ ID NO: 227379 - DNA, 432 bp, Gossypium hirsutum
cccacgcgtccggtttattgcattaaataaatcatgaaatctttccttcctttctttgcattcctctcacttctcctgtttgtagacaccattgcagcagctaggaaagatgctggagagtactggggagctgtaatgaaagatcagcctatgcctgaggcactccaagagcttgttcggattgaggctgccgttgccaaccccgatgagaaaaccaagtgccatacatcaggtaacattgagcttaaggaagagaagattattgttaatgaggagttcgaaccaaggccaaacatttcagcttacggtgatgacgctaatctaaaaggagataaatcatcatcttttgcaaaagattttgaaccgagacctaacatttcggcttacgggggcgatgatgctggtcttaaaggacagaaagaatcattcact

SEQ ID NO: 227380 - DNA, 424 bp, Gossypium hirsutum
gcaaagcaaagcattagcaaccatagccatggcttcctcaccaaaactcttctctatgtctatcctcttcctttttgccctcttctccatgcaaatccatgctagagagtacttcagcaaattcccaagagttaacaccaatgagaaagagacaacaaccagagagcaagagcacgagaccttcgttccccagaccacccaaaagccagaagagcaagagccaaggttcatccctgaaacccaaaatggttatggcctttacggccacgagtcaggctcaggctcaggctcaggctcaagccggcccagtttcaccaccaaagaaacctatgaaccctatgtcacccctgttagattccaccctgatgaaccctataacagcatccccgaatccttcaacattaaagacacttactactacaac

SEQ ID NO: 227381 - DNA, 296 bp, Gossypium hirsutum
aggaaacttgctgataactgcactggtcttcaaggattccttgttttcaacgctgttggtggaggtaccggatcaggtcttggttctctccttttggagcgtttgtctgtcgattatggcaagaaatccaagttgggtttcactgtctacccatctcctcaggtctccacttctgttgttgagccttacaacagtgttctctcaactcactcccttttggagcacactgatgtggctgttctccttgacaatgaagctatctacgacatttgcaggcgttctcttgacattgagcg

SEQ ID NO: 227382 - DNA, 284 bp, Gossypium hirsutum
cttgaatatcttggacgagttgttttcaacaccaacggcatgctttaccctgatagtgtggttggaactgattcccatacaactatgatagatggtcttggagtagctggctggggagttggtggtattgaagctgaggcagccatgcttggtcagcctatgagcatggttttgcctggtgttgttggattcaagttatctggaaaattaagaaatggtgtgacagctacagacttggttctaactgtgacacaaatactgaggaagcacggtgttgttggcaa

SEQ ID NO: 227383 - DNA, 299 bp, Gossypium hirsutum
cccacgcgtgaaggtgtcttaataaacgccttcgatttaccttcgatttccatttacttctctggtgctgacgtttttgaatttttagtgagcgaaaatgagagagtgcatttcagtccacatcggtcaggctggtattcaagtcggaaatgcctgctgggaactttactgccttgaacatggaatccagcctgatggccagatgccaagtgacaagactgtcggaggaggtgatgatgcttttaacacccttttcagtgaaacttggtgctggaaagcacgttcctcgtgctgtcttt

SEQ ID NO: 227384 - DNA, 471 bp, Gossypium hirsutum
  unsure (1)..(471): unsure at all n locations
ctgcgctattctttcatttcaatagccttttccggctctctatcgcccccctcccatagctctagagattattcctttctcaaaaatttcttcttttctcataatacatataaaaaatcctccttcttttatactcttctctttgtcttatataatctcagggtgatagagcaacaaaaatacgaccatatatcaaaggaaaaaaaataaagagagattcaagggataatacgatgaccaagttaccttctttgtttctggttttgactttggtttctgtttttgtttgtgggtttggaaaaaggataccaattctgtcatttgatgaanggtatagtcagttgtttggagatgataatctagttcttcacagaaatggtaaagctgttcactcgtctttgaatgagagaacaaggtctggatttgtgttttaagacctttacttgcatgggttcttcaatgctttaatta

SEQ ID NO: 227385 - DNA, 224 bp, Gossypium hirsutum
cttaataaacgccttctttcttcttcttctccctttctttgctttttcgaatttttcttaagcgagagtgagagagtgcatatcgattcacatcggtcaggccggtatccaggtcggaaacgcctgctgggagctttactgcctcgagcatggaatccagcctgatggtcagatgccaagtgacaaaactgtcggaggaggtgttgattctttttacacctttt

SEQ ID NO: 227386 - DNA, 263 bp, Gossypium hirsutum
cggacgcgtgggtggtgagcctattcccacaaacaagcgccaccgtgccgctgagatcgtggagggacaagaaggtggtcgatgaagtaccatggtttggtattgagcaagagtacactttacttcaacaaaatgtgaaatggcctttgggatggcctgttggaggctatcctggtcctcagggtccttattactgtgcagctggtgctgacaagtcatttgggcgtgatttcttagatgctcattacaaggcttgtttgtat

SEQ ID NO: 227387 - DNA, 369 bp, Gossypium hirsutum
  unsure (1)..(369): unsure at all n locations
agcctctcgggtttgatgtccacaagaaaaactacaagatgagactccagaatttgaaagcagggggagaaggaaaccttaatgtcgccactganatatttcaagtggcacctagtttacatatggttgaggtccgaaaagcaaaggtggacacattggaattcaatacgttctacaaaagccttttgacctgtctggaagatgttgtcttgaaaactgatgaggacataaaatagttgcacgtatgaattgacctatgtttccaagttaataaaaattgtggatatttatacttttattattttcaattgtggggggtggggggggtttttttttaatatatttattatttcttatttacattaattt

SEQ ID NO: 227388 - DNA, 337 bp, Gossypium hirsutum
cttcaataatttcttccgttgatctttgttagagatagctttttaatttttcattatgggaagatcaagatcggaatcaatggatttggaaggatcggcgtttggtgcagagttgctctcaaagcgatgatttggctcgtgctgttaacgatcctttcatcaccactgaatacatgacctacatgtttaagtcgcagtgtcacggtcaatggaagcatcatgagctaaggtgaaggactcaaagacccttcttttggtgaaagcctgcacagtttcggttcagaaaccctgaggaaatccagggctgaggctggagcttggtatgtgtgagtctact

SEQ ID NO: 227389 - DNA, 149 bp, Gossypium hirsutum
atacatctctcatctgggttgtcgtttctatagctgaagaaactcttcaatggctgaaaagagcaaggttttgatcatcggaggaactggatatctgggaaagttcattgtggtagccaatgcaaaaaagggacatcccactttcgttt

SEQ ID NO: 227390 - DNA, 414 bp, Gossypium hirsutum
caaccatagccatggcttcctcaccaaaactcttctctatgtctatcctcttcctttttgccctcttctccatgcaaatccatgctagagagtacttcagcaaattcccaagagttaacatcaatgagaaagagacaacaaccagagagcaaaagcacgagaccttcgttccccagaccacccaaaagccagaagaacaagagccaaggttcattcctgaaacccaaaatggttatggcctttacggccacgagtcaggctcaagccggcccagtttcaccaccaaagaaacctatgaaccctatgtcacccctgttagattccaccctgatgagccctataacagcatccccgaatcctccaacaataaagacacttactactacaacaagaatgcctacgagtccactaagc

SEQ ID NO: 227391 - DNA, 475 bp, Gossypium hirsutum
cccacgcgtccgcgagaatccacgacccttcccttcctccgtagacagattgtagtagtatctcgatcctatacaccgccgcagccgaccgccgtttattttttcataccgcggccttacggcgacgatgagggtcgactggggcgatcttcctgaagaaccacaacagccggagcaagattctaacctcaatttcgactttttttctcttatttccaagcccaaggattattataagatattggaagttgattacgatgctacggaggatgctattcgctccaattatatccgtcttgcactgaaatggcattctgataagcaaaaggacgatggggatagcgccactttaagatttcaagagataaatggggcttaccaggttctcattgatccagtcaaaaggagtgagtatgataatgaaggggatgttgcatgtgtatgactatgacataattgggtacctgaaccgttt

SEQ ID NO: 227392 - DNA, 376 bp, Gossypium hirsutum
cttagcttaaaaaatcttgaatccgtactctcctacttccctcgttatcgtcaatggcttcggacaagaagattaagatcgggattaacggatttggaagaatcggacgtttggttgccagagttgctcttcagaggaacgatgttgaactcgtcgccgttaacgatcccttcatttccaccgattatatgacatacatgttcaaatacgacagcgttcacggtcaatggaagcaccatgatcttaaggtcaaagactctaaaaccctcctcttcggcgaaaaacccgtcactgttttcggaatcaggaaccctgaggagattccatgggctgaagccggggctgagttcgttgttgagtcaactggagtgtttac

SEQ ID NO: 227393 - DNA, 399 bp, Gossypium hirsutum
aaaatggttatggcctttacggccacgagtcaggctcaggctcaggctcaggctcaagccggcccagtttcaccaccaaagaaacctatgaaccctatgtcacccctgttagattccaccctgatgaaccctataacagcatccccgaatcctccaacaataaagacacttactactacaacaagaatgcctacaagtccactaagcagcaaaacttgggcgaggccattttcaccgagaaaggatggagcaccaaggaaaaccagaacaacaactactacaacggcaacattaatggcgagaagcaaggcatgagcgatactaggtacttggagaatggaaagtactactatgacgtcaagagtgagaacagctattatccaaaccagctcgacaact

SEQ ID NO: 227394 - DNA, 165 bp, Gossypium hirsutum
  unsure (1)..(165): unsure at all n locations
cggacgcgtgggatggcataagtgtgaatgtcactctcatattttcgcttgctagatacgaggctgttattgatgcttacttggacggccttgaggcttctgggttgagtgatctnttcagtgatacttagagtgcatttctttttggtcagtggtgtttatttt

SEQ ID NO: 227395 - DNA, 438 bp, Gossypium hirsutum
ccacgcgtccgctttttctcccttttagcatatagacaatagcaaatacagcaatggcttccagtgggcagcttcatgtggatttcgagctcaagtctcctgcagaaaaagtgtggggaaccattagggactccaccacgattttccctcaagccttgtcccatgattacaagagcattcaagtgctagaaggcgatggcaaggcccctggatctgttcgtcttattaactatgccgaagggtctccaatcgttaaggtatcaaaagagagaatcgaatcagtggatgaagctgagaagaaatatgtttacagcatcattgatggggatctcctgaaatactacaagactttcattggcaagatcattgtggttcccaagggagagtcgagcttggttaaatggtcctgggagtttgagaaggcaagtgaagagatcc

SEQ ID NO: 227396 - DNA, 416 bp, Gossypium hirsutum
cccacgcgtccgggtttcggttcttgcagatgcagaagctcttagaaaggcttgtaaaggatgggggacagatgagaaggcaataatttcagtgttgggtcacagaaatgcagttcaaaggaagcaaatcaggcttgcttatgaagacctttaccaggaagatctcatcaagcgtcttgaatcagagctttctggtgatttcgagaaagcagtgtatcgttggatattggatccagcagaccgagatgccgggttagctaatgttgccataaagaaattaagccctgatcaccatgtgatcgttgaaatttcatgcaccagatcccctgaagagctcttggctgtgaagagagcttatcatgctcgatacaagcattccctggaagaagatgtggcttgtcataccaagggagaca

SEQ ID NO: 227397 - DNA, 431 bp, Gossypium hirsutum
cttctctggtaagttcatcgaaagatcaaatcaagatccctgccaaaatgaacgacgctgatgtatccaagcagatccagcagatggtgagattcatccgccaggaagcggaggaaaaggctaacgagatctctgtttccgctgaagaggagttcaacatcgagaagcttcaattggtggaagcggagaagaagaagattaggcaggagtacgagaagaaggagaagcaagttgaaatccgaaagaaaattgagtattcgatgcagcttaatgcatctaggatcaaggtccttcaggctcaagatgatgtggttaatgcaatgaaagaatcagcatccaaggaccttctcaatgtgagccatgatcaccatgtttacataaggcttttgaaagatctaattgttcaaagtttagttagactgaaagagcct

SEQ ID NO: 227398 - DNA, 312 bp, Gossypium hirsutum
ctccaagcaaccattttccttacaagtttgtttttcttgtgattaatccatatggctagctcaatgtcccttaagcttgcatgtctgttggtgttgtgcatggtgatgggtgcacccctggctcaaggggccataacccgtgctgatggcttagtcggcctcccacgctgccttccttttttgtcagggaatggtgatggtgctgatgccacaggttgctgtgccatcgtcatgaatgccttgggatcgctctgtggtgatacataggaaccgatctagcttgaaatcgggttcggttttagggtggatttt

SEQ ID NO: 227399 - DNA, 391 bp, Gossypium hirsutum
ggcttcctcaccaaaactcttctctatgtctatcctcttcctttttgccctcttctggatgcaaatccatgctagagagtacttcagcaaattcccaagagttaacaccaatgagaaagagacaacaaccagagagcaagagcacgagaccttcgttccccagaccacccaaaagccagaagagcaagagccaaggttcatccctgaaacccaaaatggttatggcctttacggccacgagtcaggctcaagctcaggctcaggctcaagccggcccaatttcaccaccaaagaaacctatgaaccctatgtcacccctgttagattccaacctgatgaaccctataacagtatcctcgaatccttcaacaataaagacacttactactac

SEQ ID NO: 227400 - DNA, 339 bp, Gossypium hirsutum
gctatttcaaagtcaaaccaaaaggctacagacttgaaacaagaaacatcccaggataaagagggaaagtttctagatgatgatcattcacatgatacacctgctaaaatacttcgaaggcaacttagagatgatagacgtgagaagcgggccactgaattggtgaaacaagatgagaaagttaccgtgaaacttgaaagtgctgccattgaacgatccaaagctgtagactctgctgttttgggcaaatacaatctatggaggagagaaaatgagaatgttaactctgatttcacagtgcgcttgatgagggatcaaattataatgtcaaaggtttat

SEQ ID NO: 227401 - DNA, 442 bp, Gossypium hirsutum
ggttggcatccttcggcagctggtatagccgtggccacccttcattcttgttatgcaaatgagataaaacagttcatctcaggtattatggagttaactcctgatgctgttcaagtcctgagagctgcagataaacttgagaaagatcttgttcagattgcagttgaggatgcagtagacagtgaagatggtgggaaggccataatccgtgagatgccttcttatgaggctgaaacttcaattgccaatctggcttaagggttggttcttgacaagtttttatcagtcttaagttatgtgatgcctggaatttgctacttatgttgttttatcctaatacttatttattagggttttcttcgttttatatttgtatttttgtttattattgattagttcttttatttcttatctatactttatacttttttgtcttatttac

SEQ ID NO: 227402 - DNA, 105 bp, Gossypium hirsutum
aacaaattgaggatgaaactatgaagtttgcacattatttaggtattaaggttgtttcaattgttggtggtcagtcaatagaggaacaagggtttaggattagac

SEQ ID NO: 227403 - DNA, 417 bp, Gossypium hirsutum
caagatgctcagcatattgtcaatgctgcaagaaatgcaaaaatggctagactgaaacaggccaaggaagaggcagagaaagagattgctgaatatcgtgctcaagtagagtatgagttcaagaagaaggtggcggagagtagcggatactcgggggctaatgtgaagcggctcgagacggaaacagatgcaaagatcaatcacttgaaaaacgaagctgcaaggatatctcatgatgttgtacagatgcttttgaagaatgtgacaactgtgaggaactagggggtcttccatgaagactgatggtttaattttctactacattctatcaattcccaaaactcagctcatgcttgggaacaattttatgtcattattttatcatttgttggtatttttgtttgggccatgttcctg

SEQ ID NO: 227404 - DNA, 395 bp, Gossypium hirsutum
cccacgcgtccggtttttgttcgattggttctatgggattcttgcttccctcggtctatggcataaagaggccaagatcttgtttttagggcttgataatgctggcaaaaccacgctccttcacatgctcaaagatgagagattagttcagcatcagccaacacagcatcccacatcagaggaattgagcattgggaaaatcaagtttaaagcttttgatttgggaggccatcagattgctcgaagagtttggaaagattactacgccaaggtggatgcagttgtttacctggtagatgcttacgacaaggagaggtttgctgagtcaaaaaaggagttggacgctctcctctctgatgaatccttggctaatgttccattccttgataattggt

SEQ ID NO: 227405 - DNA, 430 bp, Gossypium hirsutum
cccacgcgtccgcccacgcgtccgcccacgcgtccggaaaatatctctctcttcactttcttctcttttcaacgcagggtgaaaggcggggaggccgtagacaatctctcttgcgctcttctcgtagaatggatcagattcaacatccaactgtcatgcagaaggtagctggccagctcctttcttctagcatttcccgagattttcaagggtatgatgggtctttcaggaggcctgccctataccaaggacattttgcatatgggaattattccaatgctggaatgcactatcctattgttccatcaacagctaccgccatttgtgttcaagcccctgcagagaaaggatttaccagctttgccattgatttcctcatgggtggagtttctgctgctgtgtcaaaaacagctgctgctccgattgagcg

SEQ ID NO: 227406 - DNA, 257 bp, Gossypium hirsutum
attagcaaccatagccatggcttcctcaccaaaactcttctctatgtctatcctcttcctttttgccctcttctccatgcaaatccatgctagagagtacttcagcaaattcccaagagttaacaccaatgagaaagagacaacaaccagagagcaagagcacgagaccttcgttccccagaccacccaaaagccagaagagcaagagccaaggttcattcctgaaacccaaaatggttatggcctttactgccacg

SEQ ID NO: 227407 - DNA, 452 bp, Gossypium hirsutum
attaaagctcatgaaaataggaaacagttattctccaaaagtacaataagagagaacccgtttcaacatcaaacgagatccgtagctgagccacctccttggtctagttcttcaaaggtccccacgagttcaccactgttaggaccgccaccaaatggagttcaagctggaagccaactgagacgaaggccagctgtggatggcacgccttcaaaccacatggaaatgcctatgttgcaacaggtagttcccaggcaagaggaatactctcaaggtagatcagttgcacttcaaaatgtcgaatctacaatttcagaacttagtgggatctttacacatctagcttcaatggtttgcacatttaaggtgaactagctttcaggattgatgaagatatggatcaatcattagctaatgtcgaaggtgctcgtagtgcttctattgggcatttt

SEQ ID NO: 227408 - DNA, 427 bp, Gossypium hirsutum
tttccctaacaaacctgcatcagatccgatcagatttaactcagatccatccgtatcgggtcttctaaattccagatctttacttttctcgagtaaaggaagaaagaggaagggagagatgagagagattattagcgtccacattggccaagctgggattcaggttgggaattcatgctgggagctttactgtcttgaacatgtaatccaccccgatggaacaatgccgagcgacacctcaatgggcgtcgcacacgatgctttcaacactttcttcagcgaaacgggttcgggaaagcatgtgcctagagctgtctttgttgatctggaacccactgttatcgatgaagtccggaccggcccttatcgccaacttttccaccctgagcagcttatttccggcaaggaagatgctgctaataatttt

SEQ ID NO: 227409 - DNA, 265 bp, Gossypium hirsutum
tttccctaacaaacctgcatcagatccgatcagatttaactctattatccatccgtatcgggtctgctaagggccagatctttacttttctcgagtaaaggaagaaagaggaagggagagatgagagagattattagcgtccacattggccaagctgtgattcaggttgggaattcatgctgggagctttactgtcttgaacatgtaatccaccctgatggaacaatgcctagcgacacctcaatgggcgtcgtacaccatgctt

SEQ ID NO: 227410 - DNA, 305 bp, Gossypium hirsutum
ttccacttcaatttttttccctctctctaacagcgacgatcgatttttattaattttgtttgccgtcggatctttggttttccattttgattcaatcaggattgcttcgttttgaacccaggcgacgatgaagaaggctatcggtcaaactgttagagagcttaagagagaggttaataagaaagttctcaaagttcctggaatagagcagaaggttcttgatgctaccagtaatgagccatggggtcctcatggatcactttttgcatatattgcaatggctacaagaaactatcatgagtttt

SEQ ID NO: 227411 - DNA, 263 bp, Gossypium hirsutum
attacgtggagagccttttttttgtgtagcgattctcagatagtcttttctttaagcttacagcttctctccagagttttataatgggtaaggagaaggttcacatcaaccttgttgtcattggccatgtcgactctggcaagtcgaccactactggtcatttgatctacaagctaggtggtattgacaagcgtgtgattgagaggttcgagaaggaggctgctgatatgaacaaaaggtcattcatgtatgctttggtgctt

SEQ ID NO: 227412 - DNA, 201 bp, Gossypium hirsutum
gcatttctctgttgaaggtcagctcgagtttaaggcgattctgtttgtaccgaagagggctccagtttgatctctttgatacgaggaagaagatgaacaacatcaagctatatgttaggagggtgttcattatggacaattgtgaggagcttatccctgaataccttgggttagtgaaaggtgtcgtggattctgatgact

SEQ ID NO: 227413 - DNA, 406 bp, Gossypium hirsutum
cagaaacaacaagggcttacatggttcctttagagggtgctgacggaacaaaagccaaagcagtagcagtctgccacacagatacatcagcatggaaccctaagcatttggcttttcaagtcctaaaagttgaaccaggaaccattcctgtctgccatttccttcctcgggatcacattgtttgggtccctaagtaaaaatcctgaagagtagattcatacactataagtttcatcatagtgtgcattaaaacagcttaaagcaatatccagtttgttctataataatatacccacgagtttagttatgtgaaatctatccatgaatcatgttcttggtaatggataaaatgatattactttctgtatcacaatggtttggtgataaatgtattagtatttgaagt

SEQ ID NO: 227414 - DNA, 341 bp, Gossypium hirsutum
gcaccctgtgcttttcacggaagcaacctctcaaccccaaggccaatagagaaaagatgactcagatcatgtttgagaccttcaacgtacctgctatgtatgttgccatccaggccgtcctctctttgtatgccagtggtcgtacaacaggtattgtgctggattccggtgatggtgtttctcacactgtgccaatctatgaaggatatgcccttccacatgccatcctccgtcttgaccttgcaggtcgtgatctaaccgatgccttgatgaagattcttactcgagagaggttacatgttcaccatcactgctgaacgggaaattgtacgtggcatgaa

SEQ ID NO: 227415 - DNA, 352 bp, Gossypium hirsutum
ggtgggtctaccgggctgttcatatacgcctactgtttgtattattacaatgcacggtcagacatgtcaggcttcatgcaaacttcgttcttctttgggtacatggcctgcatttgctatggctttttcctcatgcttggggctattggcttccgtgcatctctgctctttgttcgacacatttaccgttctatcaagtgtgagtaggaagttggatggtcttcccttttcacaagaagtaagcatacctttgctttatcagaaccagttgataggtagtttatcaaaagattctacgacgatgattacgaaaagagcagactggaagcgcatgggtgctttgggctgcttt

SEQ ID NO: 227416 - DNA, 335 bp, Gossypium hirsutum
ggaggaggcttcggatcaacctccgatgcctccccataaaaacatatggagagcactaatggtggcacagcttgcaggtagtaataaagcgagatcatatagttgagcggttaatgctcgaagaacatgctttgtagatgttctacacaaagagcatccgattcataagcatgctggtggcgggaccgacttttgtccatttaaagttttcaaggataaaattgtggaaccccattttatccacgactacaatacccttagcaatgcacatttggatgagtcaaagcataagcctgaaaccagtaagttatcacacctgttccgttggatctttc

SEQ ID NO: 227417 - DNA, 441 bp, Gossypium hirsutum
gctttgaagatagtattagcatgctggtttcttctgcagtcccagagggtaaaggagtatcgtcttccgccgccgtggaagttgctagcatgtcagctatagcagtcgctcatggattgagcattagtccaagagagcttgccctactctgccaaaaggtggagaatcacattgtaggagccccatgtggtgttatggaccaaatgacttcagcatgtggtgaggcaaataaactacttgcaatggtttgtcagcctgctgagataattggtcttgtaacaattccaagtcatttccgattttggggaatcgattcaggaatacgacacagtgttggaggtgcagactatggatctgttcgaataggagcctttatgggtcgaaagattataaaagctacagcatcaactaggttgtctcaatcaatgtctactgctaatg

SEQ ID NO: 227418 - DNA, 404 bp, Gossypium hirsutum
cctgtacaaagatttcatgatccagcctccttgggatacagaaataggtaacaagttcatcattcattacacatatggatgcgactatgatttgaagggtaggttaacctatggaaagattggagaatggaggttcgataaaagatcatttgatactgaagcaccaccaagaaaccttcccctgcctcctcctggtgttccggaaagtgtggtgacactggtgaaaatggtaaatgaagccacctcaaacattccaaattggggttcatagaaaagggaaaaaggaaggttaggggtgcaattgcaagatataggcaaagagggctcccttcatttcagttgttagctgcagatattgggttggtcatgggtgggaaagaaagaaagggagtgtttgggtatat

SEQ ID NO: 227419 - DNA, 353 bp, Gossypium hirsutum
attaccgcaatcagggtttgatatttcccttttttgcatttttcacatttttgaagaaaatacttagagagggtaatttagaatttcaatctgaggtaggggtttttaaagcttccaatggcgtttttaggcgacgcgctacggcaagcgtttatgccgaagcacgagtacgagagcctacgggaggaagataaagcttggacgaagctacaaaggccgatcttaatcggttccatagtgatcatttgtgttgcgatcttcgttggcatgattataagcttgaagattgtgttttcgggagatgatttgaagcgaccgttttgcgatgaccggagactgcagcctttgccgtt

SEQ ID NO: 227420 - DNA, 335 bp, Gossypium hirsutum
atggtttgatgagagctactgatgtgatgattgccggcaaggtcgccgttgtctgtggttatggtgatgttggaaagggttgtgctgctgccttgaagcaagccggtgctcgtgtcattgttactgagattgatcccatctgtgcccttcaggctcttatggaaggacttcaggttttgaccctagaagacgttgtctccgaggctgatatcttcgtcaccacaaccggttacaaggacatcatcatggttgatcacatgaggaagatgaagaacaatgccattgtttgcaacattggtcactttgacaatgaaatcgaaatgctcggtcttgag

SEQ ID NO: 227421 - DNA, 323 bp, Gossypium hirsutum
gacggatcgacggtgagagccttcgtgactgacgaccaacagttcacgaagagcgtggatgagcgtttcgcagctcttgacctcaacaacgacggtgtcctctccaggtccgagcttcgcaaggccttcgagtctctgcgtctactggagtcccacttcggtgtcgacggcgccactccccccgacgagctcactcagctttacaacttcattttcgagaggtttgattgcgatggcagcggcaccgttgacctccaggagttcagatctgagaagaataagattctgcttgctattgctgatggattgggatcctgccctat

SEQ ID NO: 227422 - DNA, 344 bp, Gossypium hirsutum
cttaattatttctctatctcttgcaatatgcctccagcctcgcccgatttctccagctctgtcgagcttaagtatgttaagcttggctaccaatacgttgtggatcattttcttactctcttgttggttcctgtcatggttggtatccttattgaagttgttcggttcggccctcaagagattgctaacctatggaactccctccattttgatcttattcagatattgcgctcttgtttcttcatcattactattggcgctgtttactttatgtccaagccacgatgcatatacacttgggattatacatgctacaagccttctttgacttgcagggtttcttt

SEQ ID NO: 227423 - DNA, 437 bp, Gossypium hirsutum
cccacgcgtccggcagaattcgaagtttgaggaacacagaattagtagggaaagggatgtgattctaagggaaatggaagaggttgagggtcaaacggaggaggttatttttgaccatttgcattcaactgctttccagtacactcctcttggtagaactattctcggacctgctgataatattaggacgatcaccaaagagcatctgcaaaactatattcagacacactatactgctcctagaatggtcattgctgcatccggtgctgttaagcatgaggaaattgttgaccaagtgaagaagttgtttaccaagttatcgtctgatccaaccactggttctcagttagttatgaacgaaccagcaacttttactggttctgaggttagaatgatcaatgatgatgtttctctggcgcaatttgctgttgtttttg

SEQ ID NO: 227424 - DNA, 305 bp, Gossypium hirsutum
atttgaagccttcttcgaatttcctcattcaagatgcaaattttcgtcaagaccctcaccggagggaccatcacattggaggtggagagttctgatactattgacaatgtaaaggccaagattcaggacaaggaaggcatccccccagaccagcaaaggttgatcttcgctggtaagcaacttgaggatggccgcacgttggctgattacaacattcagaaggagttcacactccacttagtgcttctcctacgttgaggaatgcaaattttttgttaagaacttttacttgtgaagaccattac

SEQ ID NO: 227425 - DNA, 231 bp, Gossypium hirsutum
accacgcatacgttctgtaaaaggattggctctgatggctgggcacgggggtcccagtcccgaacggtgcatctgcctgcgcactgcgcgagctgcttccgcggcgagagcgggtctcctcgtgccggccgggggacttactgggaacggctccctcgggggcctttctccgtcgacgaacagtcgacttagaactggtacggacaaggggaatcctactgtttaattaaa

SEQ ID NO: 227426 - DNA, 253 bp, Gossypium hirsutum
cccacgcgtccgctttgaatttgggagtggatttgcaggtactttcttgaccggtagtgaagggaatgatgagttctatactgatgaacatggaagaataaggacaagaacaaatcgctccggtgggatacagggtggaatatccaatggggaaattataaatatgagagtagctttcaagccaacagctacaattggttagaaacagcacacggtgactctagaaaaacaagagattgaactactagcccgt

SEQ ID NO: 227427 - DNA, 362 bp, Gossypium hirsutum
cggacgcgtgggcggacgcgtgggcggacgcgtgggcaaagttgtgataaaggcaatgtctgaggctagtgaaaataaaccggtttctgggttgccaattgacttgaaaggtaagagggcatttattgctggtgtagctgatgacaatggatatggctgggcaatagcgaaatctcttgctgctgcaggtgctgaaattctagttgggacatgggtgcctgctttgaacatatttgaaaccagcttgcgacgtggaaagttcgataaatctcgagtattgcccgatggctctttaatggagattaccaaagtatattccctagatgcaatctttgacaaccctgatgatgtacctggagata

SEQ ID NO: 227428 - DNA, 347 bp, Gossypium hirsutum
tgctggcaagaaggcatggctcaattaagcctaacgaggcctcaatccctgaaggaaatgagtgtgaggttggtttgaataagagttttgggttttcgaagcattttacgtctcattatgagcttggtgaggaagtggggcgtggacattttggatatacttgctccgctaaggccaagaaaggaagcctcaaaggcaatgacgctgctgtcaaagttattcctaagtccaagatgaccactgcatttgccatagaggatgtaagactagaggtgaagatactacgagctttaactggtcataagaacttggtttagttctacgatgcctattaagatgatgaaaat

SEQ ID NO: 227429 - DNA, 440 bp, Gossypium hirsutum
cccacgcgtccgcccacgcgtacgattttccttctgctaccttctctcaacccaaacacatatgtggcgggaaaaagaaaaagcttgagcgaacaagaaaatggccgatcagcttaccgacgatcagatctttgaattcaaggaggcctttagcctgttcgacaaggatggagatggttgcattactaccaaggagttgggaactgtgatgcgatcactctggcagaaccccactgaggcagaactgcaagatatgattaatgaagtcgatgcttatggaaatgggaccatttgattttcctgaagttcttaacctgatggcaagaaaaatgaaggatacagactctgagggggagcttaaagaggcattcagggtgtttgacaaggataagaatggggttatttctgcaggcgaactgcgccatgtcatgacaaacctt

SEQ ID NO: 227430 - DNA, 253 bp, Gossypium hirsutum
ggctgccagaaggatttcctctctcttatcttcttctgcaacttctttgggaaggttttcaagtgggggaagaagaattaatagctttagtactgctgctgctgcgattgatgaacctatacatccatctattcaagtagatcatactcagcttctcatcaatggacaatttattgatgctgcatcaggaagaaccttccctacagttgatcctaggacaggagatgtaattgctcgagttgcataaggagat

SEQ ID NO: 227431 - DNA, 364 bp, Gossypium hirsutum
ccaacgcgtccgttcaatatcctttgaaactcagtgtttaagctttgattcccaagttttttttgtttaagaaatggctcaggcaagaggcggtgcaatagcggtggcagcggtggcggcggcggtgctctgcttgttgctgagtcactttgagttggctcaagcagcaacgtatactgttggtggaaccggtggttgggccattaacgtggctggttggaccaaagataagcgttttaaggctggtgatacacttgtattcaaatacaacccatcaatccacaatgtggtagctgtaaacagggcaggttacagttcatgcacaaccccaaaaggtgctaaagtttaccagtcgggcaaggat

SEQ ID NO: 227432 - DNA, 428 bp, Gossypium hirsutum
cgggatcctggcttcggtgctttcggagaatccagattttcatttggactttttctttcggctgtgatcaaggatgattcactttgtacttttaattagtcgacaagggaaagttaggttgacaaaatggtattctccttattctcagaaggaaagaacaaaggttatccgtgagctcggtggggtgattctcaatagagggccaaaactctgtaattttgtggattggagaggatttaaagttgtttataaaagatatgctagtccttacttctgcatgtgcattgatcaggatgacaaccaattagaggctctagaaatcattcatcaacttgttgagatacttgatcgatactttggcagtgtctgtgaattggatttaattttcaaccttccataggcccattatttattggatgaactcttac

SEQ ID NO: 227433 - DNA, 341 bp, Gossypium hirsutum
ggtttccgccgcgacggtggttacggcggctgacgagagtgggttagcgaatgagtgcagcagagatttccagagcgtgatgacttgcttaagctttgctcaaggaaaagcagcgtcgccgtcgaaggagtgctgtaattcagtggcggggattaaagagaataaacccaaatgtttgtgttatattttgcaacaaacacaaacctctggtgctcaaaatctcaaaagcttaggtgttcaagaagataagctgtttcagttaccatcggcttgtcaattgaagaacgctagcgtcagtgattgcccaaagcttcttgggttattttctagctcaccagacg

SEQ ID NO: 227434 - DNA, 283 bp, Gossypium hirsutum
cttcgaagctctttgtttaaaaattttcaaatttaatttttgcatattaagatctaaccttttcaggtgcagacgcactctcagatcccagctctagaacttcaattctctccctaaaagtttggagacaaatgggagaaacacgagacaacgatgcctacgaggaagagctcctcgattacgaggaagaagaagagaaagcccctgactctggcactgctaaagtcaatggcgaggccggcaagaatggctatgttgggattcacagctctggattcagaga

SEQ ID NO: 227435 - DNA, 358 bp, Gossypium hirsutum
ggctatgaaactttttatatcaatgaacctggggctcttctctttcattctcatcctcacacactttctgctgaaaagctcgattcgcgtccaagttcttggctggatttgtgttgccatctctgtatccgtctttgcagcacccttaaacattatggcacgagttatacgaacaaagagcgttgagttcatgcctttcaccttatcatttttcctcacattgagtgcagtaatgtggtttgcttatggactatttattaaggacctctgtgtagctctccctaacgtactaggcttcatctttgggatgctccagatgcttctctacgccatttacagacacagtgaaagggtaaca

SEQ ID NO: 227436 - DNA, 354 bp, Gossypium hirsutum
cccacgcgtccgtgaggttcggttaggcctgtataaaagaaaaaaggatttctctttcgtaggcttgtgttacgctgtggttgaagaaaggtctcataacatttgaagccaagcaaagttcagattaggatttagggttttttgttttcttttctttttgtgaaaggcaaaatggatctggatatgaacgtgaacgcccctcactcaatgggcacaacaatcatcggagtcacctacaatggtggtgtcgtcctcggcgccgactctcgtaccagcaccgggatgtatgttgctaatcgggcatttgacaaaattgcacagctcactgataacgtctacgtttgccgttctgga

SEQ ID NO: 227437 - DNA, 387 bp, Gossypium hirsutum
agccactctctgctcaactcgccaatgggggcttataagtacgtgtcggagctatggaggaagaagcagtcggatgtgatgaggtttttacagagggtgaggtgctgggaataccgccagcatccatcaattgttagggtcaaccatcctactcgccctgacaaggcacgccgcttgggttataaggccaaacaaggttatgtggtttaccgtgtccgtgttaggaggggtggtcgcaagaggcctgttcccaagggtatcgtgtatggtaagcccacaaaccaaggtgtcacccaattgaagttccagcgcagcaaacggtctgttgctgaagagcgtgctggccgaaagttgggaggtctcagagttgttaactcgtactggatc

SEQ ID NO: 227438 - DNA, 299 bp, Gossypium hirsutum
caaatctctccatcttcttgtggtcaagcccatatcaaaagacttcccttttagcacacagggcgtgtgtcgagtactataatgtgtagggagaacgttcacatcaacattatggacattggccatgtcgactctggtaagactacaaccactgttcatctgaactacaagcttggtggtatcgacaagctgttgattgaagctttgagcacgaggcttcttttattaacaaaatgtcatttaactattcatgcgtgcttgacaagctttaggccgcgcgtgaacgttgccttaccatg

SEQ ID NO: 227439 - DNA, 362 bp, Gossypium hirsutum
gctcaagaagctaaggaagaaaatggaaatgccaccaaccaagtaataacagagttgggaactgtgaaatacaagcgctggatttgcatattgctctgtataatctttctcctctgcggccaatcagtagccgcattgctgggaagactttactttgacaaaggtggaaaaagcaaatggctatcaacactaattcaatttgcaggtttccctattctagtccctttctattgcatttctcggcccaaaatgctcactgccaatcattgtagcattggaagtaataaccaaccatcaattatgatgctgggtttgggctatgtaaccttcggcttgatgtcagcttggaatggctttcttta

SEQ ID NO: 227440 - DNA, 411 bp, Gossypium hirsutum
  unsure (1)..(411): unsure at all n locations
gggaagccctatcaagacgtcaagcgctccgccgattcaatgtaccttccgtttgatgtagttggagattctagaggcgctgccaagattcgagtttcgagcgatgttagttactccgttgaggagttgttggggatgattttgaagtacgcgtcgaatttggcggagtttcattctaaagtgacggttaaagatgcggtgatttcggtgccgccgtattttggacaggcggagaggaaagggttgttgaaggcggcggaaatggccggaataaacgtcatttcgctgataaacgagcattctgnggcggcattacagtatgggatcgataaaaatttctcgaatgagtcgagacatgtgattttgtatgatatgggttcgagtaggacttatgcagctcttattttttat

SEQ ID NO: 227441 - DNA, 343 bp, Gossypium hirsutum
  unsure (1)..(343): unsure at all n locations
ctaggttaccagctaattatgctgtttggttgggggaaataaagccagtttcctactttcaggaagggtatatggttagcatggtctactacactgatgagattgttcaactcttggttgaccaatacaagggatctggaaaacctttattgttcctcctacatgggcttaacactgatagcaataatttctcaaaacctgccgagtttaagggaatagaaaattttgagagagatttgacaactctgcatcccgtattgaccgagtgccgagtttgcaagtcagatttggagcttgctcttatccaaattgcanacaatataagttctgaagctcatgttga

SEQ ID NO: 227442 - DNA, 371 bp, Gossypium hirsutum
cgctcacctcatctccgtcccgatcgaagcacacgcctcctccctctttttctcctttttccgtaagctaaacaaacgcagctcgatcttcaaatccctacacctaataaatccatcggttttcgttttgtaaatccgacggaaagatggcggatcgcttgacgcgtatcgcgattgtcagctccgaccgctgcaagcccaagaagtgccgtcaggaatgcaagaagagctgtcctgttgttaaaactgggaaactttgcattgaggttacccctgcctcaaagattgctttcatctctgaggagttgtgcattggttgcggtatctgtgtcaagaaatgcccatttgaagcatattaaatcattcactta

SEQ ID NO: 227443 - DNA, 434 bp, Gossypium hirsutum
gcacactatctatctccttatgctgtgaaggttcagtctctaagtgttaaattgcctgattctggaattgaatcctatacaaaactggagaacacaaagattcatggttcagaaatcaaatatggtccttatgagaatattccttcattctcgtactcacccatagcagttcattttgaaagcaatttaccctttgctgttgctcatgaattggtgagagagatagaaatttcccattggggtaatgtgcaagtcactgagcattacaagctcatacatggtggtgcccagagcaagggtgaattttccaggcttgatttccaggccagacccaacgttcgtggtgcatcggcctttaagtatcttgttgcaaacttgccaccaaaggcacattctgtttattacagggatgaaattggcaatatattaacatc

SEQ ID NO: 227444 - DNA, 439 bp, Gossypium hirsutum
  unsure (1)..(439): unsure at all n locations
actcacaagagaagcagccgctcctccttccatctcctaaacaaggttcagccataatggattcgcagattaagtttgctgtggtggtgaaaataatgggaaggaccggttcaagaggtcaagtgacgcaggtgagagtgaagttcttggacgatcagaaccggttcattatgaggaacgtgaagggaccggttcgtgagggagatatcctcacattgctggagtctgagagagaagctaggaggcttcgttgaagggttatttttatactttttggggtttatgcttgttttgaattgtctaccgtattgcttttgaattacgtttagtaggtattcgtatatcgagacttgcgatttgngagaatggttgttgcttaaaccctgggatttatgatgattatgttgaaatgaacttgaattggttttaggttttgttt

SEQ ID NO: 227445 - DNA, 461 bp, Gossypium hirsutum
  unsure (1)..(461): unsure at all n locations
tccgaagactaccgggtcttttcctttttcggttaagttcccagaagttaacaacaagggcaagactggagtcttccaattttctgtcaagcatgagcagcagcttgactgtggtggtggttacatgaaactactcagtggtgacattgaccagaagaattttggtggtgacaccccatacagcattatgtttgggcctgatatctgtggaagcacaaagaaagtacatgctattcttcattacaaggggacaaaccacttgatgaaaaaggaagttccatgtgagactgaccaacttactcatgtttacacatttattctgcatccggatgctacttacaaaattcttattgataatgttgggaaacgaactggtagcttgtacactgattgggatcttctcccaccgaagagaatcaaggatcccagtgcanagaagcctgaagattgtgatgacaagg

SEQ ID NO: 227446 - DNA, 459 bp, Gossypium hirsutum
  unsure (1)..(459): unsure at all n locations
gagcggccgctcgcgatctagactcaacaacagccagcgggtcaaccggctaacgcagatgaggttcggactttgtggatcggagatttgcagtattatatggatgagaattatctcttgagctgttttgcccaaactggagaggttgcttctgtaaaagttatccgcaacaagcaaaccggtcaagtggagggctatgggtttattgagtttgtttcaagagctgctgctgagagagttttacaaacatacaatggtacacctatgccaaatggtgagagcaactataggctgaactgggcatcctttagttcaggtgataggcgagatgagacccctgagttcacaatctttgttggagacttggctgctgatgttacagattacatgcttcaagagaccttcnaggcacactttcctttcggtgaaggtgcaaggntgtgattgataggatcactg

SEQ ID NO: 227447 - DNA, 389 bp, Gossypium hirsutum; identical to SEQ ID NO: 197174

SEQ ID NO: 227448 - DNA, 372 bp, Gossypium hirsutum
gaaaaatggttctctgataaaaatttccgtttgtttcctgagcaaatctcgggaaggaatgggcgttttttccccctgttgttaactcgttgtgattgtgaagctttctttaaaagaatcctagttaactcgacgcgtttacccagaaagaggtgaagatgtcaactcctgcaaggaagagattgatgagggattttaagaggttgcagcaagatcctcctgcaggaattagtggtgcacctcaagataacaacattatgctttggaatgctgttatatttggacctgatgacaccccatgggatggaggtacgggtaagctgactctttagtttacgggggattatccaaacaaaccaccatctgttcgtt

SEQ ID NO: 227449 - DNA, 404 bp, Gossypium hirsutum
cccacgcgtccggttttctttgatgtttattggttcgttgcttgtaccttgagctcttcttgtagtgatgctttccctttggtctatagaattctggtgcttattttcattttgttaatagttggggttattgtttggatcattgtggctaattggcatcggatcgagttgactgtgaggattatcggggttgcttccgatgcgctttcgaggaatttagggttgtttttggtgataccgttgttgaccgttggattgttggcttattatgcgtcaattgttgtgttcttggtgttttctaggtttaatgggaaaattgtggctaaagaatcgaatggggagtatacttgtgtttggaaacaagatagctgggtgcctgcttattttacattggctatttgaca

SEQ ID NO: 227450 - DNA, 254 bp, Gossypium hirsutum
cggacgcgtgggttcgttttgttttttttctttgcatttaaactccaagctctcatcaatggctggtgcagctactatctcaccagccacgctgctgaaagatgagcttgacatcgtgattcccaccattaggaacttggatttcttggagatgtggagaccttttttccaaccttactatctcatcatagttcaagacggtgatccttcaaaggccatcaaagttcctgaaggctttgattacgagcttttca

SEQ ID NO: 227451 - DNA, 444 bp, Gossypium hirsutum
tttcggtttccatttacttctttatttctacgtttttgaatttttagtaagcgaaaatgagagagtgcatttcagttcacatcggtcaggctggtatccaagtcggaaatgcctgctgggagctttactgccttgaacatggaatccagcctgatggccagatgccaagtgacaagactgtcggaggaggtgatgatgcttttaacacctttttcagtgaaactggtgctggaaagcacgtccctcgtgctgtctttgtggatcttgagcctactgttattgatgaagtgaggactggtacttaccgtcagcttttccaccctgagcaactcatcagcggcaaggaagacgctgccaacaacttcgcccgtggccactacactattggcaaagagatcgttgacttgtgctttgaaccgtatcaggaagcttgcttataacctg

SEQ ID NO: 227452 - DNA, 387 bp, Gossypium hirsutum
cttcgctaaaatgtatgcctcaaagtttggagtcgatgagtccaaaatgatggaaagactttggggtgagaacttttttgatccagctaccaggaaatggaccaccaagaacactggcactgccacctgcaagcgtggttttgttcaattctgttatgagcccatcaagcagatcatcaacacttgtatgaatgaccagaaagataagctctggcccatgctacaaaagcttggtgtcaccatgaagtctgaagagaaggacttgatgggtaaggccctcatgaagcgtgttatgcagacctggcttcctgcaagcagtgctctccttgaaatgatgatctttcacctaccctctcctagcgtggctcaaaaatatcgtgttgagaa

SEQ ID NO: 227453 - DNA, 402 bp, Gossypium hirsutum
cggacgcgtgggcggacgcgtgggccccgttgaaaaaatatgggtttccaaagaaacatattgggtttccttttcttgatattggcttcactaacaagcctctcttctagccttcctagtgaatactccatagtggaacatgagattgacgcatttctttcggaggaaagggtgttggagatcttccaacagtggaaagaaaagcatcggaaagtgtaccggcacgccgaggaggctgagaaaaggtttgaaaatttcaaggggaatttgaagtatatcctagagaggaatgcaaagagaaaagcaaacaaatgggaacatcatgtgggattgaacaagtttgctgatatgagcaatgaggaagtcagaaaagcttacttgtcaaaagtgaaaaagcccatc

SEQ ID NO: 227454 - DNA, 350 bp, Gossypium hirsutum
cccacgcgtccgattccacctgaccaacaacgtcttatcttcgccggcaagcaactcgaagatgggcgcaccttagccgactacaacatccagaaggaatccactctacaccttgtcctccgtctgaggggaggtgcgaagaagagaaagaagaagacctacaccaagcccaagaagatcaagcacaagaagaagaaggtcaagctcgctgtcctccagttttacaaggaggatgagtccgcgaaggttcatagactgagaaatgagtgccctaatgcggaatgtggcgcccggaccttcatggctaaccattttgataggcactattgctgcatgtgtgagctcactta

SEQ ID NO: 227455 - DNA, 377 bp, Gossypium hirsutum
ggcaatcagatttttgctgtacacgaacaatttccttaaatttctgtgttccagagctgagacttcttctagagatgagatcatttaaaaaattataattatgaattatccaccagagaaggttgtgaggttccaggactggaattcagagaaaacctgcgaagtacattatactaataataatgggataaattcagggaaatttacatttgcaataaattcattttcagaaaagtttcaaagaggggttgaatctggttctgagaggattaaagcgattagaaagtcatttaaatctagttcattcaaccatgttgttgctaaaggcttttgttctagtaagaaagttctttgatccacaggggccattccttcaa

SEQ ID NO: 227456 - DNA, 291 bp, Gossypium hirsutum
gattttgatgctttcatctgcaatagcggtagtgatctcttctattcaactattaaccctgaagatggtccctttgtaattgacttctattatcactcacacatcgagcaccgttggggtggggaagggttgagaaagactttggtccgttgggctggatcggttactgataagatggaagggaatgaggagcatattgtcactgtagctgaacacctttcgaccaattactgttacacatttgaagtgaaaaatgcagtgagggtttcccttgttaaagagctcctaaag

SEQ ID NO: 227457 - DNA, 380 bp, Gossypium hirsutum
  unsure (1)..(380): unsure at all n locations
cccacgcgtccgtagccagccctttccaccagtaaaagagaggctgaggctttgcaaaactcaggtatgatgcctttgattagctcacttgtttgggttccttttctccttcttcccctgctgctgctgctgctactctccaagcagaagacccatcaagttaagaaagaacacaattacaagcttcctcccagtcctcccaggctaccaattataggtaacctgcaccagcttggtgaattgccacacagttctctttcccaactttctcgcanatatggtccagtcatgctccttcatctaggtcgtataccggtgcttattgtttcatcagccgaggcggcgaaggaagtcttaaaagtcaatgatcttgcttggtg

SEQ ID NO: 227458 - DNA, 377 bp, Gossypium hirsutum
cccacgcgtccgtagccagccctttccaccagtaaaagagaggctgaggctttgcaaaactcaggtgtgatgcctttgattagctcacttgttagggatccttttctacttcttcccctgctgctgctgctgctactctccaagcagaagacccatcaagttaagaaagaacacaattacaagcttcctcccagtcctaccaggctaccaattataggtaacctgcaccagctgggtgaattgccacacagttctttttcccaactttctcgcaaatatggttcagtcatgctccttcatcgaggtcgtataccgctgcctattgtttcatcagcctaggcagctaaacgtagttctaaaggtcaatggatcttgtt

SEQ ID NO: 227459 - DNA, 407 bp, Gossypium hirsutum
gaaagtctcaatggcaaccctcaaagttccagttcacgttccttctccttctgatgatgctgagcgacttcggaaagcttttgaaggctggggtacgaacgagcaattgattatcgacatattggctcacaggaatgcagcacagcgcaattcaattcggaaagtttatggcgaagcttatggggaagatcttgtcaagtgtttggagaaggaacttacaagtgatttcgagcgggctgagctgctttctacgttggaccctgcatagctgagatgctcatctggctaatgaagctacaaagaaggtcacatcaagcagttggatgtttatgggatagcttgcagaaggtcgtcgcatgaactactcaatgtgaaaaaggcgtatcatgctcgctataagaaattcc

SEQ ID NO: 227460 - DNA, 371 bp, Gossypium hirsutum
tggcaaccaaaacgatgatgttgcaaatattttcacttttcttctttttgttcagtatctgcaggtgcattttccttggtgctaatggagatgacaatggcggttggcaaactgcccatgccaccttctacggtggtgctgatgctaccggcacaatggggggagcttgtggttatggaaacctgtacagtcaagggtatggaacgagcacagcagctttgagcactgcacttttcaacaatggcttgagctgtggtgcctgctacgagctccggtgcaacaatgatcctcaatggtgcattagtcgaaccataaccgggacagccaccaacttttggtcacctaactaatgcttatctagtgacaatggc

SEQ ID NO: 227461 - DNA, 339 bp, Gossypium hirsutum
cccacgcgtccggatcaattttcttagacctggtaagaatctcaaaaaatatggctcctggggtgttattactggaccaactgatggtatcggcaaaggatttgcctttcagctggctaggaaagggcttaatcttgtcttggtgggccgtaatcctgataaactcaaagacgtttccgattcaatcttggccaagaatgccaagattcagatcaagacagttgttgtggacttcactggcgatcttgatgaaggcgtgaagaagataaaagaaactattgaaggactggatgtgggggttttgattaacaatggtgggatttcatatccttatgccag

SEQ ID NO: 227462 - DNA, 377 bp, Gossypium hirsutum
gtccgaggaaattgcacaggttggaacaatatctgcgaatggagaaagggagattggcgagctcattgccaaggccatggagaaagttggcaaagaaggtgttattaccattgctgatgggaaaaccttgtacaatgaattagaggttgttgagggaatgaagcttgatagaggctacatatccccttactttatcaccaaccagaagaaccagaaatgtgaattggagaacccacttattttgatccatgagaaaaagatctctaacttgcctgctttggtgaaatttttggaattgttcttgacgaagcaaaggcctttactaattgttgctgaagatcttgaaagtgaagcacttgcaactcttatttttaaca

SEQ ID NO: 227463 - DNA, 472 bp, Gossypium hirsutum
cggacgcgtgggtcttcaccgagactttgatcaccaaaccaaaaatcgaacacgaaattcctctttttccccagatctggacccgtcgccggtcttagcaacctccgatccaatcatttcacctattgatttcaattcattaaacgtgtgacgcgacccactggatcgaagatgccggtggccgcttctgccatctacttcttgaatcttcgtggcgatgtcctcatcaatcgtctctaccgagatgatgtcgggggaaatatggtggatgccttccggatgcacattatgcaaacaaaagaactcggaacttgtcccgtgagacagattggaggttgctctttcttttacatgagaatcagcaacgtatacatcgtaattgttgtcagcagtaatgctaatgtagcttgtgctttcaagttcggcgttgaggctgttgccttgtttaaatcattttttggtggcgcttttg

SEQ ID NO: 227464 - DNA, 405 bp, Gossypium hirsutum
aagggaagtcggcaaaatggatccgtaacctcgggaaaaggattgtaccgaatttgatatcaaggaagcacacaaatagtgcagctacagttctctatgcattttttgggcttcggttactttacattgcttggagagcagatacaaaggggtctcagaaaaaggaaatggaagaagtagaagagaaacttgagactggccaagggaagacatattaccggcgctttcttaccagattttgtacacctatctttttggagtcatttattttaacatttctagccgaatggggggatcgaagccaaattgccacaattgctctagcaacacataaaaatgcagtgggggtagcggtgggagccataataggacacaccatctgtaccttactggccgtggtgggag

SEQ ID NO: 227465 - DNA, 436 bp, Gossypium hirsutum
cggggtacaacaagagggaacgagtcgcactgagtgactgcgtggagcaaatagatgagtcgatggaggagttgagcaagacattaggggagttgaagcacttgagaggggagacgttcgagtttcagatgagtaatgcgcggacatgggtgagtgcggcgctgacgaatgaggacacgtgtcttgatgggttcgaaggagttgacggcaaggttaaatctaatgtgaagaggaagatcacgaatgtggctaaagttaccagtaatgctctgtacatgatcaataggctcaatgaaagtcgtggtaggcaccgttgaatctttgatgatgatgatgatgaataatggatggttgtgatttatctagcttattatggttcttaaatatagtttttattttgattttggttgcaagctgtatatgtaaatgtttttat

SEQ ID NO: 227466 - DNA, 392 bp, Gossypium hirsutum
cccacgcgtccgcgaaattggcagaaaatgaaggtttccgtcaaaactctcaaaggcactcacttcgatatcgaagtcaaaccagaagatgcggttgcggatgtaaagaagaacatagaaactgttcaaggggcagatgtttatcctgctgcacaacaaatgcttatctataagggaaaagttcttaaagatgacacgacactggctgaaagcagtgtcactgaaaatagctttattgtgatcatgttgacaaagaataaggttgcatctggggagggttcaactgcttcagctgcttctacaatgaaagctcctgaggcaagtaggccaccaactgcttcagcttcagcttctactggaccttgtgcaatgtcagcttcggctggacttac

SEQ ID NO: 227467 - DNA, 382 bp, Gossypium hirsutum
cattttcacagcttaaaacacaatatgactaaagatattgagaccacggcggagcaaggcggcggagcggagttctcagcgaaggactaccatgacccaccaccggcaccgttgattgacatggaagaactcaccaaatggtcgctttatagggcggcgatcgctgagttcattgccacccttcttttcttgtatgtcacggtgttgactgtgatcgggtataaagtccaaaccgacccggtaaagaatactattgacccggattgtggtggtgttggtatacttggtattgcttgggcttttggtggcatgatctttatccttgtttactgcactgctggtatctctggaggacacatcaacccggcggtgacgtttggac

SEQ ID NO: 227468 - DNA, 485 bp, Gossypium hirsutum
  unsure (1)..(485): unsure at all n locations
cagaaataaagcattgggtcgaactcttctttggtgtcaaggtaatagctatgaatagtcatcgactccccggaaagggtagaagaatgggacctattatgggacatacaatgcattacaggcgtatgatcattacgcttcaaccgggttattctattccacctcttagaacgaaaagaacttaaatcaaaatacttaatagcatggcgatacatttatacaaaacttctaccccgggcacacgcaatggagccgtagacagtcaagtgaaatccaatccacgaaataatttgatctatggacagcatcgttgtggtaaaggtcgtaatgccagaggaatcattaccgctaggcatagagggggaggtcataagcgtctataccgtaaaattgattntcgacgaaatgaaaaagacatatatggtagaatcgtaaccatagaatacgaccctaaatcgaatgcatacatttgtctcatacactat

SEQ ID NO: 227469 - DNA, 439 bp, Gossypium hirsutum
gaaacgaaagaacaaaattgaatccaaaagcattattttatattttccatatttctttcaaacttgaaaatattggttctcaatttctaaatcccatgaaatacctaactaattcatagatcaatgacacgagacaacttctggatccggtttaataagaagtcaccttgtttaatagtggcctggtaaagagcattcttcgcatcagggcggttagtttcgaggacaccagcaaccttgtcaatcttgcaatgaagcttccctgctgcgataaaacgagatagctcctgatcaatgaattctaccgtcaccccaaaagcctttgccatggcttcaatagtaacactcttgtaggattccaaaaattgagaagtaacaacagtcctgatctctctcatgtaaaaccggaaatgtagatgcaaacagcggtccattttga

SEQ ID NO: 227470 - DNA, 450 bp, Gossypium hirsutum
cttcacttcatttcccactcaatctcaggtcaatctaaaatatggcagacgaagacattcagcctcttgttgttgataatggtactggaatggttaaggctgggtttgctggagatgatgctcctagggctgtcttccctagtattgttggacggcctagacacacaggtgtcatggtggggatgggacagaaagatgcctatgtgggggatgaggctcagtctaaaagaggtattctcacattgaaataccctattgaacatggtattgttagcaactgggatgacatggaaaagatctggcatcacactttctacaatgaacttcgtgttgctcctgaagaacaccctgtgcttcttactgaagcacctctcaatcctaaggccaacacggagaaaatgacgcaaataatgcttgaaacgtttaatggtcctgccatgtatgttgcaa

SEQ ID NO: 227471 - DNA, 337 bp, Gossypium hirsutum
acatgcgcattagttcactgtcgttctcctaggtcctcgtttgcttgttctaattcttgttaatcatcatcatattcctttttgctcgtcatggctgaaaataaggaaatgtcggcccctgttgttgacgtcaatgatccggttaccggtcacatcatttccacaacgattggaggcaaaaatggagagcctaaacagaccatcagttatatggctgagcgtgtagtcggcactggatcttttgggattgttttccaggcaaaatgcttggaaacgggtgagaccgtggctataaagaaagttttacaggacaggagatacaaaaatcgtgaactgc

SEQ ID NO: 227472 - DNA, 474 bp, Gossypium hirsutum
ctcattctaatctgtgcatcaatcagttggtgaggaatggaaaccctgcccagaaagagaaatacttaccaaagctcatcagtggagagcatgtaggagcccttgctatgagtgaacccaatgctggctctgatgttgttagcatgaagtgcaaagctgatcgggttgatgggggttatcttctaaatgggaacaagatgtggtgcactaatggtcccgttgctcaaacattggttgtttatgcaaagacagatgtcacagctggctcaaaaggaattacagcatttattgttgagaagggaatacctggatataccactgttaataaattgtacaatacttggcatgctaggatagtattcatgtgtgcttgttctttgagaattgtttttatatcattatgttatcttgatttttcttatattgcttatgtttgttctcttttgttatttttactatttcttttgtttatgt

SEQ ID NO: 227473 - DNA, 459 bp, Gossypium hirsutum
  unsure (1)..(459): unsure at all n locations
agccaattgtttgagctagctagctcttactcaaatggcaaccaaaacgatgatgttgcaaatattttcacttttcttctttttgttcagtatctgcaactccattttccttggtgctaatggagatgacaatggtggttggcaaactgcccatgccaccttctacggtggtgctgatgctaccggcacaatggggggagcttgtggttatggaaacctgtacagtcaagggtatggaacgagcacagcagctttgagcactgcacttttcaacaatggcttgagctgcggtgcctgctacgagctccggtgcaacaatgatcctcaatggtgcattagtcgaaccataaccgtgacagccaccaactnttggccccctaactatgctttatctagtgacaatggcgggtggggcaatcccccacgagaacacnttgatttggccgaaccggcattttt

SEQ ID NO: 227474 - DNA, 473 bp, Gossypium hirsutum
aaaaaatgggttatcttcaacaatttatcttctttattctggttgctctgccattcatgtttatttctccaactcattcctctttagctaatggtaatgttaatatattgcctcctaccaatacaagcgataaggtcactttggctctgtactatgaaactttatgcccatattgtgccgactttatcacaaatgaccttgtaaaggtcttcctcagtgatctgtataccattgtcaatctaaaattagtcccttggggcaatgctgacattcttggcgatgaaccccattgccagcatggagaagatgaatgctacttaaatactatacatagctgtgtcatctactactggcctgatgtgaaaaagcactttgatttattctgtgcacggagcaacaaaacttaaagaaaccgctggtttagaacagagcagccatgtggaaaccatgccagtgaaagcttgtaatgagtg

SEQ ID NO: 227475 - DNA, 309 bp, Gossypium hirsutum
cccacgcgtccggataaaggtctcggcactcgttctaggaggttcgcactcttggtcgatgacctcaaggtgaaggcagcaaatgtcgaatctggaggggagtttaccgtgtcaagtgctgatgatatccttaaagctctttagatttgctttgtgcctaataaggtctatgttttcttggcctcggctattaatatagattgctttatttagcacaccttttatggtattgttaataataaaatacgtctcttggaggatgtaagatcgaacgtgtttaagagcgaatatgttccgttttgtttctgg

SEQ ID NO: 227476 - DNA, 447 bp, Gossypium hirsutum
cggacgcgtgggtttgagatttatcaatggcggagaagagtttcaagtacgtcatcctcggtggtggtgtcgctgccgggtatgcggcgagggagtttgccaaacagggagttcagcctggtgagctagccattatttccaaggaagcggttgctccatatgaacgtcctgctctgagtaaggcgtatctcttccctgagggagctgcaagacttcctggtttccatgtctgtgttggaagtggtggagagagattgcttcctgagtggtacaatgaaaaaggaattcagttgatccttagcactgaaatagtgaaagcagatctttctgccaagactctagtaagcgcagctggagaaacgttcaaatatcaaattttgatcattgcaactggttccacagttataaagttgacagatttttgccgtgaaggagctgattccaaaa

SEQ ID NO: 227477 - DNA, 480 bp, Gossypium hirsutum
aaccctagcgccaagatttagtgttgaaaatctcgagcacaatggccaccggtgaactcgcctgtacttacgccgcgttgattctccatgacgatggaatctcaatcaccgccgagaagattgctacattggtgaaggcagcgaacttgagcgttgaatcttactggccaagccttttcgccaagctcctcgagaaagtcaacgtcgatgatctcatcaccagcgttggctccggtggtggtgctgcccctgttgccgttgctgctgcttctggtgcagctggcggtggtgctgctgcggctgccccggctgttgaggagaaaaaggaagaagagaaggaagagagtgatgatgacatgggattcagcttgtttgactagacacaattcttcccagttcggatatttcttttggtttggtgtttgaaattgcggaaacttaggactcgttttaaatattaattgaatttttgtattggga

SEQ ID NO: 227478 - DNA, 468 bp, Gossypium hirsutum
ggcattatctagagaggagcacaaacttcgctgatctggtaattttaatcaggtgaaattctggaggtggtggaaatatcagaaccaagaagatttttgttggagggttgcctccgactttaactgaagatggatttcgccaatactttgaggcttatggtcatgtaactgatgtatatatgtatgaccagaatacccaaggcctcgggtttggttttatctccttcgacagtgaagaggcggtgatagggttttgcacaagagttttcatgatttgaatggcaaacaagttgaagtgaaaccggcccttcctaaagatgccaatcctggggggctagccggtctatgggtggtggtgccggtggttttggaggttaccagggatatggttcttttggtgggaattcaaagtcttatgatggtcgtatggactccaattacatgcgtgcccagggcactggagctggc

SEQ ID NO: 227479 - DNA, 483 bp, Gossypium hirsutum
cccacgcgtccggccatggcttcctcaccaaaactcttctctatgtctatcctcttcctttttgccctcttctccatgcaaatccatgctagagagtacttcagcaaattcccaagagttaacaccaatgagaaagagacaacaaccagagagcaagagcacgagaccttcgttccccagaccacccaaaagccagaagagcaagagccaaggttcatccctgaaacccaaaatggttatggcctttacggccacgagtcaggctcaggctcaggctcaggctcaagccggcccagtttcaccaccaaagaaacctatgaaccctatgtcacccctgttagattccaccctgatgaaccctataacagcatccccgaatcctccaacaataaagacacttactactacaacaagaatgcctacaagtccactaagcagcaaaacttgggcgaggccattttcaccgagaaaggatggagcacc

SEQ ID NO: 227480 - DNA, 492 bp, Gossypium hirsutum
atacgctagggttttaaaggtgaagttgcagcatacgagactcgagctttgtaaatttgtagccttttgaatatgggtttatcatcgggttccgttcataaaacagaggaagaatggcgggcgattctttccccagaacagtttcggatcctacgtcaaaaaggaaccgagttacgaggaactggagagtacgacaaagttttccaggaaggtgtttacaattgtgccggttgtggtacaccactttacaagtccacaaccaaatttaactccggctgcggttggcctgcattctacgagggtttccctggagccataaaccgaacccctgatcctgatgggagaagaaccgagattacttgtgcagcttgtgggggacacttgggtcatgtttttaaaggggaaggattttcggtgccgactgatgaacgccactgtgtcaacagcgtttcaatcaagtttgtcccagccgttgcaactccttcactatga

SEQ ID NO: 227481 - DNA, 468 bp, Gossypium hirsutum
cggacgcgtggggtggtgcaatcccccacgagaacactttgatttggccgaaccggcattcttgcagatcgcggaatatcgagctgggatcgtccctgttatgttcagaagggtgtcatgtgtgaagaaaggaggcatcaggtacaccatgaatggacattcgtacttcaacatggtgttgataaccaacgtgggaggggcaggggatataacgtcagtgtccatcaagggttccaaaacaggatggctacctatgtccagaaattggggccaaaactggcagagcaatgcttaccttaacggccaaagcctctctttcaaagtgactgccagcgatagcaggactatcacaaactacaatgtagtgcccgctggttggcaattcggacaaacttttgaaggaagccagttttaagacaatattatagtgtccgtctaatattaaaactggaattgacatattactta

SEQ ID NO: 227482 - DNA, 417 bp, Gossypium hirsutum
ccttcgtacaatgccacagggcaatttagaaacccttgtttccgcctgtgccgggggctcttgcgacaacaaaatcatttgcgagactttagcaaccagcgaaagtgattccgacgaccacctccacccggcggagaaacatattgaagaagaaatcccgtcggatttcccgccagaatcgttttgcttatccaaagacgccgagttcgactggttcgatcgtaacgctttttacgaacggaaagattcgcataaaggaaactcaggtcccaactctgcaaacctcaaccctaatcttaactcgatctccaattctcaacgcttttctctgagaaagtctaaagcttccatcattggcttaccgaaaccgcagaagtcttgctttgtcgaaacgaagaacaagaaacctgggaacac

SEQ ID NO: 227483 - DNA, 432 bp, Gossypium hirsutum
actcgctcgaggaacaagacaagcaagtccagatcgatcgaagttcttatttaacgaagtacatggttgagttaggcattcaaatcccaacaacttttgatccttttgcggaggccgaggaattcggaagaacaggaaccaaagactatgttcatatccgaatccaacagagaaatggcaggaaaagcttgacaactgttgaaggtctgaaacaagaactgagttccgataagatccttaagtctcttaaaaaggagttctgctgtaacgggaatgttgtgcacgacaaagagctgggcaaaatcattcaattacaaggtgatcagcggaagaaagtagcacacttccttgttaatgctggaatagtgaagaaagagcaaatcaagattcatggtttttgagtggttttaaggatggaatggcttttgattt

SEQ ID NO: 227484 - DNA, 443 bp, Gossypium hirsutum
cactaaaaggccgattaattaccattacaaataaaacattttcttaagccaaatcaagaactgacacgattaagcaagttttactcgcaacaaataaacaaccaaagccactactgtgtggcaaagcaactttcgattaagcaaaaacacatttaaacaagactataccagacatgagttattgtccattaacatatcagacgccccacttcatcatcacatcacattgaacctaccactaccatcatggcttaaaagatgattagaaaaaacaaaaaaccaatacatttgcctaaaaataaacaatagtttcttctaagcgactgatccacacttctggaaattaagcacgctctcccctgatcctacgagccaactggatgtccttgggcataattgtgacacgcttggcatggatcgcgcaaaggttggtgtcttcaaaa

SEQ ID NO: 227485 - DNA, 445 bp, Gossypium hirsutum
  unsure (1)..(445): unsure at all n locations
ngnncaantnnnttttcactacattactatttatattccaatttcttctcaagtactttattaactaaaggacgggggtgtgagtttggcaattcaagatcctcaaccaaccttttgatctctttttgcggaaggccgagggaattctgtgaagaacacggaacccaaaagactattgttcatatctcgaatccaaccagagaaatggcgaggaaaaggcttgacaacctgttgaaaggtctgaaactaagaactgaagttccgataatgatccttaagtcttcttaaaaaggagtntctgctgtaacgggaatgttgtgcacgacaaagagctgggcaaaatcattcaattacaaggtgatcagcggaagaaagtagcacaccttcttgttaatgctggaatagtgaagaaagagcaaatcaagattcatggtgtttgagtggt

SEQ ID NO: 227486 - DNA, 453 bp, Gossypium hirsutum
cggacgcgtgggtttaaatcaaagaataatcaataatatcaaagtatattgcctcctgcttagactgataaatccaaacgaaattgttatatcctctattcaacggggagagatgaatctggatattttgatgattcagaaggatttaactcttagagaattaatgaaaaaaggaatattgattatcgatccagttcgtctgtcggtaaaaaatgatggacaatttattctatatcaaactataagtattttgttggttcataaaaataaacaccaaattaatcaaagataccaagaaaaaaactatattgataaaaatcattttttatgaatttattgcaagacatcaaaagatgactgaaaataaagacaaaaatcattatgatttgtttgttcctgaaaatattttatcccctaaccaccggcgagaattgcgaattccgaattctttca

SEQ ID NO: 227487 - DNA, 376 bp, Gossypium hirsutum
gaaaaaccccattgtaaaacagcctcactttgaaagattttaagagcaatggtaaaatttccagtgatcaacatggagaaactcaatggtgaggagagagcagcaaccatggagttaatcaaagatgcatgcgagaattggggcttctttgaggtgctaaatcatgggattccctatgatttcatggacaaaattgaaagcttgacgaaagagcattacaagaaatgcatggagcaaaggtttaaggaattggtggcaagcaaggcccttgagggtcttcaggctgaggttactgatatggactgggaaagtaccttctatttgcgccatctccctgaattaaatatggctgaaatcccagatctaaccgatgaat

SEQ ID NO: 227488 - DNA, 430 bp, Gossypium hirsutum
cccacgcgtccgcccacgcgtccgcttttatcgaagaattgaaggttttcaataaagaaaggctgaatggatattatggagttgcggcttatacactttccaatttcttgtctgcatttccgttcctagttacgatttcacttatcacaggaaccataacattttacctggtgaaatttcgatccggattttcgcattatgccttcttttgtctcaatatcttcttcagcatcgctgtgattgagagcctcatgatggtggtagcttcgatggttcctaattaccttatgggaatcgtaaccggtgccggaattatcgggattctaatgatgacatcaggcttcttcaggttgctgcctgatcttcctaagatattctggcgttaccccatttcgtatatcaattttagctcatgggcactttagggggc

SEQ ID NO: 227489 - DNA, 339 bp, Gossypium hirsutum
aaagatgctcccaatgtagctgagaaagtttgtggggcaatctattaccttgttcaaggctatgacgatgcagggcctagtgcctctcttttgtcaccatatctcactgacatatttagttttctgattttaactgctgatcgtactgatggtgttgtctttatgtttatgtcttttgtcttattttactttattctatttcttacttttttattttttatttttattttttttttttcttttttttttattttctttgtctttttgttatttttttagttatttttatttcttgctctggtgttttttattttttcttttttttttttttctattttt

SEQ ID NO: 227490 - DNA, 488 bp, Gossypium hirsutum
  unsure (1)..(488): unsure at all n locations
ctccgccttcttcaaggaattttaactctcaattcgatagctcatcaaagaattggaattggttcctagttgaaggtggtgaaatcggatatgcagagccagcttatctgtagtgggtgtaggagcattcttctttatcctagaggtgctaccagtgtttgctgttcattatgcaatacaattactccccctgggatggaaatggctcaactcatatgtggaggttgtcgaacattgctaatgtatacacgtggagcagcaagtataagatgctcttgctgtcacaccattaatgttgcaccagcatccaaccagatttctcacatcacttgcgggcactgccgtacaactntaatgtatccatatggagctccatcagtcaaatgtgctgtctgtcaatatgttactaatgttggtatgggcaatgtaagggttccccttcccgtaaacagacctaatgggaaagctgccacagggtctatggctac

SEQ ID NO: 227491 - DNA, 476 bp, Gossypium hirsutum
gccctttctattggttcttttttgggttttcagacagtattttcttgggaggaaaatgactatccttatcgagaagcctgagctagtgtctcaatcagactgccagattcatgtggatgaaagtaaggaattggtgttggatggtggattcccagtgccgaaatctttgtcaggagaaggatttttggcaccagaggtcaattcatttggcaactcctttagggattacaatgcagaaagtgaaaggcaaaagagcgtggaggaattctacaagcagcaacatgttaaccagacatacgactttgtgcaaaagatgagggaagaatattcgaagctgaatagaatggaaatgagcatatgggaatgctgtgaattgctgaatgaggtggtggatgacagtgaccctgacctggatgaacctcaaattcagcacctcttgcagtcggctgaagctattagaaaagattatcctaatg

SEQ ID NO: 227492 - DNA, 420 bp, Gossypium hirsutum
gaatgagcctagcttatactatactgatccctctggcacattttggcaatgcaatgcaaaggctataggctcaggttcctgaaggtgcagacagctatttgcaagagcaatacaacacggacctgacttttttagaacattaaactatggataggtgcattacaaagcacgtaatgcaagagaatgtgactacaaacacaagctatattgacaaagtagtaacaacataccatatatacacccataaataggtgaaagatatgcttactcttctaaaaaaacgcgctagcatcatacgaacttaccattcaacaaccacgtgcactgtgataaagatacataacttgtgggggagaaagcagtatctcgtaattgggcaccaacccgtggaacttcattattgatgaggcactttactta

SEQ ID NO: 227493 - DNA, 358 bp, Gossypium hirsutum
aaccttctgaggggcatctatgcatatggttttgagaagccctcagcgattcagcaaagaggaattgttccattctgcaagggtctcgatgtgatacaacaggcacagtctgggactggaaagacagcgactttttgctctggaattttgcagcaacttgattacggtatagtccaatgccaggctctggttttggcacccactagggagttggctcaacagatcgagaaggtgatgcgggcacttggtgattaccttggtgtgaaggtccacgcttgtgttggtgggactagtgttcgcgaggatcagcgaattcttcaaagtggtggtcatgttgttgtcgggacctcccgtcgtg

SEQ ID NO: 227494 - DNA, 477 bp, Gossypium hirsutum
ctcacttcctcctctctttggctatggctgccgatgttagctctttacatagagttttaagcggatacaaagatgatctaatggttgggaatgaatccggtggtgcaaaaccaacggctttgatcactagggacttgcttggaggcggaggcggtggcgcaggtggtgcctccccgttcatcaatatgaaaactgatcaatcagaagaacttaacctcgaccttcaagtccctaatggatgggaaaagcgcctagacttgaaattgggtaaggtgtacttgcaaagatgcaatttcttaagttcttcacaatcatcagatggaagcaagcaccaaatcaattaaacagtgccaaagctttaagatttgaattttccagcctcttcttttaacctttgctaaaccttttcgactacactcacctagaattggaatagtcttatcatccacttctatctattatcaaagtggttgcacc

SEQ ID NO: 227495 - DNA, 415 bp, Gossypium hirsutum
  unsure (1)..(415): unsure at all n locations
cttgtctatttcaaatcatccgtttggccaagtacacaagatggtactttacaaactgtgacactaaatgtcgaggaaacaaatgatggttttgcttatgacgttttgttagactacacagcggctaactcggccatcgggaccggaaatctcatcttgataaggccgaaatataacagcacattgtcgattcttcgactcgggatcgatggaaacctgagggtttttacctactatgacaaggttgattcacaagcatgggaagagactttcactctcttctctagggactcaatatggggcaatgaatgcgaactgccggagaggtgtgggaactntggactctgtgaggagaaccaatgcgttgcttgcccgtcaccaaacggattaactcggttggagccagaattgtcag

SEQ ID NO: 227496 - DNA, 432 bp, Gossypium hirsutum
  unsure (1)..(432): unsure at all n locations
gcgctcaacgctctccttctgtttctggtcaagccaatctcaaaagactccccnttagcgggagctcctctcttgagtactataatgggtaaggagaaggttcacatcaacattgtggtcattggccatgtcgactctgggaagtctacaaccactggtcatttgatctacaagcttggtggtattgacaagcgtgtgattgagaggtttgagaaggaggctgctgagatgaacaaaaggtcatttaagtatgcatgggtgcttgacaagcttaaggccgagcgtgaacgtggtattaccatcgatattgccctctggaagttagagactaccaaatactactgtactgtcattgatgcccctggacatcgagacttcatcaagaacatgatttctggtacctcacatgctgactgcgctgtttctattatc

SEQ ID NO: 227497 - DNA, 441 bp, Gossypium hirsutum
aaaagaattggccaaaacttccattggggatcaggcttctcattgctgctcattctaggggtgtagatgcttttagccgcaacgatggcagcgcagtaaatcgacgtctcatgaatcttttcgaccctaaagcctctccatcaagaaaacctgataatggcgtagtgtcttctgacatcgtggttgacaccacccgcaaactttggttccgcctatacagcaacactaccaccgctggcaaaatgttcgttcccattgtagtctacttccatggtggaggctttgcgtatatggcggccaattcaatgagctacgatgacttatgcaagctacttgcgcgtgaaattcctgctgtagttgtttccgtcaactaccgtctgtcgcctgagcaccgatattcgtcatcagtcgaatatggttttactgtttaaagtacattga

SEQ ID NO: 227498 - DNA, 366 bp, Gossypium hirsutum
  unsure (1)..(366): unsure at all n locations
cccacgcgtccgttttcctccgcggctacatttccactctcgttcccgagatatcaaagtaaaatgaaggtggtcgccgcctacttgcttgccgtgctcggaggaaacgcttctccttccgccgatgacttgaaggttattctcggatcagttggagctgaggctgatgatgataggatagagttgctattgtctgaagttaaaggcaaagatatcaccgagctaattgcaagtggaagggagaagttggcttctgttccttctggtggtggtgctggtgcggttgccgctcctacagctggtgggtgcggcgnnactctcttatttcctaaaccatttacttccctcgatttctaaaggcagttg

SEQ ID NO: 227499 - DNA, 443 bp, Gossypium hirsutum
aaaaagtgtctcatttttagcaaagttacagtcgtcctcatcgaacaactatggcagccatcagagtccacggaagccctatgtccactgctacacagagggttcttgcatgccttcacgagaaaggtactgattttcagtttgttcccataaacatggctgccggtgaacataaatccgaaaactacctttccctcaatccattcggtcaagttccagcttttgaagacggggacttaaagctcttcgagtcaagagcaatcacccattacattgctcatgaatacagcgacaaagggacccaactcttaatccctggctctaacaaggatatggctgtcttagaattatggaaggaagtggaagcccaccagttcgattctccatcttcaaaaatagcctgggaggcgttttacaagccatttttcggcatggttaccgac

SEQ ID NO: 227500 - DNA, 249 bp, Gossypium hirsutum
ataagcgggagctctcgggcgaaattgaaataccactactaaaaacggtactttacttaggccgtgaatcggaggcggggcacggccccactttttggacccaaggccggcttcggccggccgatccgggcggaagacataggcaggtggggagtttggctcgggcgacacatctgaaaaaagataacgcaagactcctaagatgagctcaacgagaacagaaatctcgtgtggaacaaaagggtaaaa

SEQ ID NO: 227501 - DNA, 322 bp, Gossypium hirsutum
cccacgcgtccgtgtttttttagtctggttactcttctccgacacaatccgcaatcatcgaggatcttggactaacagtctcagagtctttaatgattgctgcaattcctaatataattggatggcttgctatatcttttgcaagagattcatcttttctttacatgggaaggttgttggaaggttttggtgtcggaataatctcttatacggtgcctgtatatatagctgagatagcacctcagaatttgaggggcagcttgcgttcagtgaatcagctatctgtcactctcggaataatgctggcctatctacttggact

SEQ ID NO: 227502 - DNA, 196 bp, Gossypium hirsutum
tcggttcaacagtatggacagaccatcatcgatttacttgtatctcaagcagaacccatgggggtgtggttccgaattggattgtgtgctcttgatggcagacatggggttagcatgggcattgagaatgtggctgatgagagcaaccgcaaattgtctggaattctttatagtgctatgtgccctgcttgcgaga

SEQ ID NO: 227503 - DNA, 473 bp, Gossypium hirsutum
gacccacgcgtccgttcttttgagcctttgagagagaaccctctctttggtccctcttcctccacattgaagaagttgggagctcttgaatggaccgaagttgtggttaaacatcaaggatggaggcttattacttgcatttggctgcatgccggtgttattcatcttctagccaacatgctgagcctggccttcattggtatacgccttgaacaacagtttgggtttgtgcgggttggaattatttatctcttgtcaggatttggcgcaagtgtggtttcttctctatttatccgaaacaacatctctgttggtgcctctggtgctctttttgggcttcttggtgcaatgctttctgaacttattaccaactggaccatatacacaaacaaggcagcagctttttttactcttctggtcatcattgccattaaccttgcaataggaattttgccccatgttgataactttgc

SEQ ID NO: 227504 - DNA, 426 bp, Gossypium hirsutum
acgcccgtttataagttagaagagatctgcgagctcttgagatcgtcgcatgttagtattgtcaaagaagtttctgagtttatcttgaaacgactcgatcacaaaagcccaatcgtcaagcagaaggctttgaggctgataaagtatgcagttggaaagtctggtttggagtttaggagagagatgcagaggaactcagtggctattcgtcagttaattcattacaagggacagctggatcccttgaaaggggatgcacttaataaggccgtgcgggaaacagctcgtgaggctatttctgcaatatttgcagaggacaataataccagtaagccttctccagcagacgactttaacaaaagaatagaaggatttggcaacacaaacttcgaaatgccatcaaatgagaagaaatcatttctaagt

SEQ ID NO: 227505 - DNA, 493 bp, Gossypium hirsutum
ggaaatttggctaggacgtttagagctacggaaacaaggatgattgcccctttggtcaaacttcttgacgaaagggaagccgaagtttccaaggaggctgcaattgcacttgccaagtttgcttgcacggacaactatctacaccttgatcactccaaggcaatcattaatgcaggaggtgcaaagcatttgattcagcttgtgtatttcggggaacatattgttcaacttccagcattacttctcctatgctacatttcccaccatgtacctgacagcgaggaacttgctgaagccaaggttcttaccgtcctcgaatgggcatccaggcaatccaacatgacccagaatgcaactggcaaactcttacaagaggccaaaagtagattggagctgtatcagtctagagggtcaaccggatttcattgatccaatcactttccctttgtaatttctctctttatacagtaccccatcattgagttcataattc

SEQ ID NO: 227506 - DNA, 237 bp, Gossypium hirsutum
  unsure (1)..(237): unsure at all n locations
caganncaaaaagaacaaaaggnagaagaagcaanggccacncnnacagngcccacgacagnnccggcaggggcngaaganngngaacaacnaacaaaagccnccncaggacggggaacnaacgagggccnaancaaagagagaaggggccacagaaacgcggagcaacgaaacgagaagcgaaaaacccacgcagaaaccgaaggagaggaacncaccaaggcaccagacaaggaa

SEQ ID NO: 227507 - DNA, 451 bp, Gossypium hirsutum
ctctacttagtccctccatcgaagccgccccgagaaaggaagcagagggcaagtaaaatgaagaccattctttcttcagagacaatggacatccctgatggggttgctattaaggtgaaggccaagatgatcgaggttgaaggtcccaggggtaagctcatccgtaacttcaagcacctcaacctcgattttcacctcatcaaggacgaggagagcggcaagcgcaagctcaggatcgaggcttggtttggctccagaaagactagcgccgccatccgtactgctctcagccacgttgagaatctcatcaccggcgtcaccaagggttaccgttacaagatgaggtttgtttatgctcattttccgaacaacgcctgcatcactaaacggaacaagtccatcgagatccggaatttccttggcgagatgaaggtgcgaaaggtggatatgt

SEQ ID NO: 227508 - DNA, 455 bp, Gossypium hirsutum
cccacgcgtccggcggaagggaggaagtgacattggcaatatggctttgctgcattcttacttcttaagcgctggtgagtgtgtttcagggtccatggtcttggcagtggcaatgtccattgcttcctattttctgatccctatggtgtttggtggtcgacataaaaactggaagaatgcaccaccaggccctgttggttggcctatccttggcagccttccacacctctccaatcgtctccatgaagatttctttcacatggccaagatctacggtccccttttcagtctaaacttgggaataaagccggccatagtggtgtcatcaccggaaatggcagcccaagttttgaaggaaaaggaagggatgttcttcagtcggaccataaccgagaccattcgagtcatctcttatgatgcccattccatcattttctcgccctatggtcccaggt

SEQ ID NO: 227509 - DNA, 479 bp, Gossypium hirsutum
ctactccaagcaagtattttccttacacgtttgtttttcttgtgattaatcgatatggctagctcaatgtcccttaaacttgcatgtgtggtggtgttgtgcatggtagtgggtgcacccctggctcaaggggccgtaacctgtggtcaagtcacaaactccctcgcaccctgcattaattacttgagaggcagtggtgctggtgccgttcccccaggttgctgcagcggcatcaaatctctcaactccgccgcccaaacaacaccagaccggcaagcagcttgcagatgcatcaaaagtgcggccgccggcattactggcatcaactttggccttgcaagcggactcccaggcaagtgcggggtcaacatcccttacaagatcagccctagcactgactgcaacagcgttaagtgaaagtttggcatggaaagttcaccagctagtgggagccaaaataacgatagctacagaataaa

SEQ ID NO: 227510 - DNA, 328 bp, Gossypium hirsutum
attcctcgagttcttctttcatttctgattccgttctcaaaaaacccttgttttccccattctttatatcctatggctccaaaggttggtgggaagaatcccgccgtgaaaaaaccggcggtaaatgctccggcggagaagtggccataggcggagaagaagatctcaaatgaaggcggcgcttttaataagaagatggctaagatgagcgtttagacttacaagatttacatcttcaaggtattgaaacaggttcatcctgatttcgggatctctagctaagcgatggggataatgaacaattttatcatcgagatctttgagaaaa

SEQ ID NO: 227511 - DNA, 405 bp, Gossypium hirsutum
atggaagctgcaaaaagatatatatcttctttgagtacctcagcaagcacagctcaactggcaaatcatggtttggttgttataccgtttctcagtgcatttgtcagcttgaaggtgcttaatctatctggaaatgcaatagcaaggattactgctggtgctcttcctcgaggacttcacatgttgaatctgtcaaagaataatatatccaccattgagggtttacctgagcttactcgacttcgtgtgctgaatttgagcctcaatcggatatttaaaattggtcatgggttggcttcttgttcctttcttaaagagttatacttggcttgaaacaagataagtgagggtgagggtcttcatcctctttttaaattgactgttttggatctgcgtttcaacaaa

SEQ ID NO: 227512 - DNA, 207 bp, Gossypium hirsutum
gcttttgctgggattctcttgttgggtttactttcaatggtctcagccgttcatggatatggtggtggatgtactaatgcttatgctactttctatgtgtgggagtgacgctttatgcacaataggttgtgctcatggttattgtaacccttatagccagggatatgggacaaacaccgcattttttatcacagctttgttcaacaa

SEQ ID NO: 227513 - DNA, 371 bp, Gossypium hirsutum
tatgaatctactgcgtcttcaaatggcccttcgatcgttagccaccaggaataccctaaccttggctgttaactccaccaggctggctcagtctcaagccttgcagacctttttgctccccaatctttcgtacgactatggcgcactcgagcaccgcatcagtggagagatcatgcagatccattatcagaagcattactaaactttcatcacttactataacaagtgtttggagcagctccatgcccctattcattaaggagattctttcaccgttcgtaattttgcaatgcggcattcaagttcaactggggtttggtaataatcaaaccacttcaatatttttgggaaaaatcttgggcccctatttt

SEQ ID NO: 227514 - DNA, 282 bp, Gossypium hirsutum
cccacgcgtccgggctgggcgaatttgcggtttgttagttcgtgtgtgaaagaggtaataaaaggaaaaaaacgatgggtgttttcacatttgagtgcatgagcaaaggcggtgagtggtctgccaagcatttggagggagagattgaaaggcttgttgctttcatttactagctccagcgggaactcgtccaatgtttcaccggctgcgactcctttggtggtgtcacctactttttttgtggcgatacccctaattctggcggttttcaggaggttattt

SEQ ID NO: 227515 - DNA, 370 bp, Gossypium hirsutum
caaagggatttacaggtacttatcggtggatggcacctgaaatgattaaagagaaacatcatacaaagaaagtagatgtttacagttttggcatagtcctttgggagcttttaacagctttgacaccatttgacaacatgactccagaacaggctgcatttgcagtctgccaaaaggatgcaagaccactggtaccctcctcctgtccgcttgcgtttagtcatcttatcaaccgatgctgtgtcaagcaatcccgagaagcgaccacagtttgaggagatagtttcgattttggaaagttatgcggaattcctcgaagaggatctggaattttttaagacttataaaccttttttaagttgttctattt

SEQ ID NO: 227516 - DNA, 422 bp, Gossypium hirsutum
ggagatcttataatggcagcacagttggtgacacctgaagctatggcatttatcgtgaagcatggaaccgggatagtttgtgtgagcatgaaagaggaggatctagagaggttgaatcttcctttaatggtgaaccaaagggaaaatgaagagaaactctgtactgcattcacggttacagtggatgcaaaacatggcactacaactggtgtgtcagcacatgatagagcaacgacgatattggccctagcttctaaagattccaaacccgaggatttcaaccgcccatgtcacattttcccactgaagtacagagaaagtggtgttctaaaaagagctggtcataccgaagcttcagttgatcttgcaatgctagccggactggaccctgttgcgattctctgtgagatcgtagatgatga

SEQ ID NO: 227517 - DNA, 416 bp, Gossypium hirsutum
gcctttaccctttgtttctttgatttgtttctaaggatttaatctctaaaccttcttcccatttcttcatttcattgttcaagaacaaacaaaaaaaataagaagcaaaaaaacatggccaaagttctgttgttcattgctctatgtgtgcttacagctttggttagtgctacacgcattctgaataaccaattggtggttgaaggctatgtgtactgtgatacttgccgtgctggttttgaaacccctaatactagaaggctagctgatgccatggttaagctggtatgctccgacaggaagaccggcggagttgttttcgagaaggagggatataccgacaaaaccggaaaataccagattcgtgtatccgaggatcacttggatcagatctgtgatgcagttcttgtgaagag

SEQ ID NO: 227518 - DNA, 387 bp, Gossypium hirsutum
  unsure (1)..(387): unsure at all n locations
ataaaaaggaaagaaaaaaatgaagctcttgtttctaactttgctgctttgttctcttcttctatgttcttcagtttttgcaccaacaatggctcagcctcgttcacgtaagcaaacatatttttttcataatctaagccttgggtgtgtgtgtgtgtgttttaatctttgatgtaattttttttggggggggggaatggcagctttttgtgaagggtaatgcaaagggaggtgcaataaagcggcggtttgggatcggtgcttcaaatattgcggcatatgttgcgaggagtgtcaatgcgttccgtccggtacttacgggaacaaacacgagttgncttgctacttatattaggtgaacatcatgggccaacccaaatgcccttg

SEQ ID NO: 227519 - DNA, 341 bp, Gossypium hirsutum
ccatcgcgtccgcccacgcgtccgggaaagccagccgttgttgaatatggtaacacaggggaagatgttgatccggaaactggtggtcctgcttctgtaccagttccattacctgatatggtcctgccaccttcatttgatggtgataatccagcattcatgtaccggttcttggaacctacttctcatttcttggcgaggccagttttggacactcacggttgggaccatgattgtggctatgatggtgttaatgttgaacatagtctatctatcgccagccagttttcccgctgcatttttctgttcaactttccatggataaaaatgagtttaacatc

SEQ ID NO: 227520 - DNA, 442 bp, Gossypium hirsutum
gcatgttcaagaatgatacgggaacggatgtcggatgctccggcgggtttaatgatggtcttacaaggagtactaaattagccatagtgtttggtgtgggagtacccttctcgttcatcctcggccttgtaatttacctccgtggcaaggtcgaggatcatcaaaatctgaacttgactgcatcttcggtcatggttgtcaaaggtcttgatgggcaaatcctcgaatcatatccgataacgttgttaggtgaaagtcgacgattaacacggccgagtgataatatttgctctatttgtcttagtgaatatcacgctaaagagatattacgaactattccagactgcaaccattacttccatgccgcttgtattgatgagtggttgaaattaaatgttgtgtgtcctttatgttgtagttctccgaaacttatttcgaatat

SEQ ID NO: 227521 - DNA, 484 bp, Gossypium hirsutum
  unsure (1)..(484): unsure at all n locations
gtttcctttcttttacattaagccgtctgaccacgagcatgttattaggaagtattatcctgaggagaagggtcctgtgaagaatatcgatccaattggcaattctccagtgattattagaacgtctgtgctggagaaaattgcacctacatggatgaatatttctttgaggatgaaagatgacccagtgactgacaaagcatttggatgggtgctagaaatgtatgcatatgctgtggcatctgcactgcatgacgtgcaccacatacttcataaagacttcatgctccagccaccatgggatacggaagtagggaagaagtttataatccattatacttacggatgtgactacaatttgaagggagaattaacgtatggaaagattggagaatggcgtttcgataagagatcgtaccttagtgggcctnctccaagaacctctctttgccccctccangtgttcctgaaagtgtggtgagac

SEQ ID NO: 227522 - DNA, 411 bp, Gossypium hirsutum
caaattttgaggagtacttgagcaataatccaaatgtaaatccagggatcgacttgacagtaactgttttgacaactggcttctggccaagttacaagtcttttgatctcaaccttcctgctgagatggtcaagtgtgttgaagttttcagggacttctatcagacgaaaaccaaacatagaaaacttacttggatatattctttgggtacttgtaaccttatcgggaagtttgagccaaaaactatggagttgattgttacaacatatcaggcctctgccttactgctgttcaattccttggataggctcagctattcagagatcatgacacagttgaatttaactgacgatgatgtagttagacttcttcatttcgtgtcatgtgcaaagtataaaatttttaacaagg

SEQ ID NO: 227523 - DNA, 404 bp, Gossypium hirsutum
cagacgcgtgggtgggtttttttggaagtgaatcaaaagagaacatagttccctggacttgtggttgacttaactagagaagatggataggcacacagtgaagatttttgtcaaaggtggagttgctgcttaagatgggacgaggtaagagagccatcaagaggatcgagaaccaatctacacgggtcgttaccttctcgtagcgccgagctgggctttggaagaagactcacgagctctccgttgtctgcgatgctcatatcggccttatcatgttctcaagcaccggcaagatatgccagtattgcgcttaaccttatagaatggagcagatcattgaatggtaccagaaggtcactgagactcgcattctctgagcatgacaatttgggaaacatttgtac

SEQ ID NO: 227524 - DNA, 443 bp, Gossypium hirsutum
cccacgcgtccgctccatacgccgtatgtctgatgcatttcacgcaagggaggaaatcaaggcaatgaagctgcagagacagaatagggaagatgaacctgtagaggctgtgaagattccaaaagccacatggatggctgatggaactcattggcctgggacttggttaaatccagctaatgagcactcccggggtgaccatgctggtataatacaggtgatgctgaaaccacccagtgatgaaccattacacggaactgctgatgataggctcattgatctaactggatgtgatattcgtctccctttgctagtctatgtttctcgtgagaagcgcccatgctatgaccacaacaagaaggcaggtgccatgaatgcccttgttcgggcatctgcaattattttaatggcccattcattctgaaccttgactgcgatcactt

SEQ ID NO: 227525 - DNA, 440 bp, Gossypium hirsutum
caagctttttctttccccatggctgctaaagctttttcaagaagtataactccttctttggtgcttttgttcatatttttaagctttgcacaaggtaaagaaatcatggttggtggcaaaacaggcgcttggaagataccttcttctgaatcagaatctctcaacaaatgggctgaaaaagctcgtttccaaatcggcgactctctcgtgtggaaatatgatggtggtaaagactcggtgcttcaagtgagtaaggaggattatacaagttgcaatacgtcgaacccgattgcagagtacaaagatgggaacaccaaggtcaagcttgacaagtcaggaccatatttcttcgtgagtggagcaaatggtcactgcgagcaaggccagaagatgattgtggttgtgatgtctcaaaagcatatgtacattggaatctcttc

SEQ ID NO: 227526 - DNA, 389 bp, Gossypium hirsutum
aaaaagaaaaatttacaatcatcatcagatctagtgttcttagcctgatgatgataatgacgcgttacgctcttcttctcctattagctttcgcttcgctgcaactcctctgcttcgccgctgatgatgacgtggtgttctatgattcatttgaagagtcatttgatggacgatggatcgtttctgataaagatgattataaaggtgtgtggaagcattccaagagcgaggggcatgatgactatggtcttctcgtgagtgagatggcaaagaagtatgcaatagtgaaagagcttgatgaggctgggaatctcaaagatggtaccactgtgcttcattttgagactcgcctacagggtggactgggatgtggcggtgcatatttgaaa

SEQ ID NO: 227527 - DNA, 373 bp, Gossypium hirsutum
gcgccataccagaaaacgggaaaggattcacctcaatggattccaccacagctcaacgtcgggtgaactccattcatgcccaccttgtctcagtcgttgactccgccttttctcattcccacctccgctcttccccaaccgctgctgagttcctctctgaacagaattacagtgttgtgctgccagagaaattgctgacaggaaaatggaatgtttacagatctgctcgctctccggtgtagcttggatcgggatttcccaatcattctgatattggtacattgcacgacaattttttactcgcccgtgatttctttggggaataccattattttggtaccagtattcgagtcgattggaccggtggtgtgtt

SEQ ID NO: 227528 - DNA, 419 bp, Gossypium hirsutum
gtctttcgccgcctttctctcgcagtttgattctttgttcggggcaatttaaagacaagtcaagatggtgaagtttacagctgaggagctccgtgccattatggaccggaaacacaacatccgtaacatgtctgttattgcccatgtggatcacgggaaatcaactcttaccgattctcttgttgctgctgctggtatcattgcacaagaagttgctggtgatgttcgtatgacagatacccgtgcagatgaggctgagcgtggcatcacaatcaagtctactggaatctctttgtactatgaaatgagtgaggattctttgaagagctacaatggcgattggcatgggaatgagttcctcatcaatcttattgatttccctgtgcacgttgacttttcatctgaggtcacagctgctc

SEQ ID NO: 227529 - DNA, 344 bp, Gossypium hirsutum
gtcctaatcgagtgatactaagtcagtgaatgaattaacaaacaatcaaaacattaatgaaacaaatcataattagaatttcatccactcaaaatatacataactatacgaaacagaagagccgattatcagaatgaataaaaggcattcaaactaataccggacaacatcctggaggcagtcgtaaaagtgcgcaagcttaatcttctctcggccagagaagattgcctacgctgctccaccttgttctccttgagctgccatctcaatcaacatgtaaagcttttttataggcatatcattcagcgcttcagcagcctcactgatatcttcttcagcaaata

SEQ ID NO: 227530 - DNA, 409 bp, Gossypium hirsutum
attcgactatgatgacactccctttctttgtcctaaacatcctccttttgctctccagctccgcgggtacaccaaagagcggcgcagatcacgacctggtccgttcatcatgtgttcacgccagctatccaagcctctgttttcgcaccctttcttgctactccggcccagccaacaccccacgtgagttagcccaagccgccgcaaaagtcagcctgtcccgtgcccgtaaagtgtcgtactacttgtcgacgagtgtgacggggttcaacaagagggaacgagtcgcactgagtgactgcatggagcaaatatatgagtcgttggaggagttgatcaatacattagtgggagttgaagcacttgataggggagacgttcgggtctcagatgagtaatgctcggtcat

SEQ ID NO: 227531 - DNA, 380 bp, Gossypium hirsutum
  unsure (1)..(380): unsure at all n locations
gagagatttaatcaatctgagcgatagaggaaaatcacgaattcctgataaagtgacggaaaatatatacaatgcatagatcgcgatctccattgctaatagctttatcatttctcttcacatccttcaccatctctaacgctctttacgggccgtcgtcgccagtggttcagctcactccattctaatttcaagtccaaggttttaaattctaacggagttgttttggttgagttcttcgcgccttggtgtggccattgccaaactntaacacctacatgggagaaagcctccaatgtcttgaaaggtgtcgctacagtggcagccctcgatgctgatgctcataagtctctttcccaggaatacgggattagaggatt

SEQ ID NO: 227532 - DNA, 252 bp, Gossypium hirsutum
gagagatttaatcaatctgagcgatagaggaaaatcacgaattcctgataaagtgacggaaaatatatacaatgcatagatcgcgatctccattgctaatagctttatcatttctcttcacatccttcaccatctctaacgctctttacggtccgtcgtcgccagaggttcagctcactccatctaatttcaagtccaaaggtttaaattctaacggagtttgtttggttgagtttctttgggccttgtttg

SEQ ID NO: 227533 - DNA, 374 bp, Gossypium hirsutum
tagaaggtttagttttacaaacatggctagttccggtgtccttaagttggtttccatgattctcatggtgtgcatgacgatgatgagtgcacccaaggcagccaaagccgccatcacgtgcagcgacgtggtgaaccacttgatcccgagcttgtcctacgtacaaaacggcggtacacccgctgctgcatgctgcagtggggtaaaagcactctacggcgaggtttagaccttcccggaccgcctaaacttgttcaagtgcatcaatatttgcgggaacggaatttcgtacaccatctataacctcttttttgcaggcgggctacctgctaaatggtgtcttcaactccgttactgcttcagccccttcactg

SEQ ID NO: 227534 - DNA, 376 bp, Gossypium hirsutum
aacgcaagcaaaaaatttaaagttcgataatactttattttgataaaaataaaatgccgatggctcgaatcgcagtcgggtctccggccgaagccggccaagctgatgcactcaaggctgctttagccgagttcatttcagtgcttatttttgttttcgccggtgaaggctcgggcatggctttcaacaagttgaccgacgatggctccttgacaccggcgggtttagtagctgcggcattggctcacgccttggcgttttttgtggcgggttcgatcggggctaacatttcccggggacacgtaaaccccgccgtcacgttcggggctttcgtgggtggccacattacattggtgaggagtattttgtattggat

SEQ ID NO: 227535 - DNA, 465 bp, Gossypium hirsutum
aattttcggaggtaaggaggaaaagaagaaatggcggtgccgcttctaagtaagaaaatcgtgaagaagagggtcaagaagttcaagagacctcagagcgaccgcaaaatctccgttaagacaaactggcgtagaccaaagggtattgattctcgtgtcagaagaaagttcaagggatgtactttgatgcccaatattggctatggttcagacaagaagacccgacactatcttccaaatggctttaagaagtttgtcgtgcacaatgttggagagcttgaactgttaatgatgcacaacaggacatattgtgccgagattgcccatgatgtttcaacaaagaagagaaaggagattgtggaacgggcagcccagcttgatgttgttgttacgaacaagcttgctaggctgcgcagccaagaagatgaatgagattaagcctgtcttttatgtttatctttgagc

SEQ ID NO: 227536 - DNA, 428 bp, Gossypium hirsutum
ctactccaagcaagtattttccttacacgtttgtttttcttgtgattaatcgatatggctagctcaatgtcccttaaacttgcatgtgtggtggtgttgtgcatggtagtgggtgcacccctggctcaaggggccgtaacctgtggtcaagtcacaaactccctcgcaccctgcattaattacttgagaggcagtggtgctggtgccgttcccccaggttgctgcagcggcatcaaatctctcaacttcgccgcccaaacaacaccagaccggcaagcagcttgcagatgcatcaaaagtgcggccgccggcattactggcatcaactttggccttgcaagcggactcccaggcaagtgcggtgtcaacatcccttacaagatcagccctagcactgactgcaacagcgtcaaatgaagttttggcat

SEQ ID NO: 227537 - DNA, 390 bp, Gossypium hirsutum
aaaatctcatctttccattagagcgcagctctcattcctctcgattttctttcactttgttcgcctcttcgattatcaattccgctctcagattcttgaagcaagcgaagttcaattctccaccctacatcagaagaaaactctgattccccaaaattagggtaatctcaatccctaaaagatgccggccaccgcagggagggttcgaatgcccgcgaacaaccgggtgcatagtagcgccgccttgcaaactcacgggatttggcaaagtgcaatccggtatgacccttatgctcctaataaagatgattcaaaaaattcatctagtcagatgactgcctctgcttaacctcgtggtgaaaacccctacgcttgcttttaaggggcttt

SEQ ID NO: 227538 - DNA, 420 bp, Gossypium hirsutum
gcttttcatatacatataaaagaagttcctagaaatgagctaaagtagctgagaaaaaaatggagttttggggagttttaatttctggggttttagtttcttggtgggttttgagtgtaaatggtgctaatttaccaccatgtcaattccctgctatttacaactttggtgactcaaactcagacactggtgggatttcagctgcttttgaacccattagagctccatatggtgtgccctattttcacaaaccatctggtagagactctgatggtcgcctcatcattgacttcatagctgagagacttaagttgccatatcttcatgcatatttgaattccttgggagcaaatttcaggcatggagcgaattttgctaatggtggatcaaccataagaagaccgaatgaaaccatttatg

SEQ ID NO: 227539 - DNA, 408 bp, Gossypium hirsutum
gccatttagtggtttaagggattttttcatttgtttcttcttacgctcgattacctcacgaaaagagaaaatgaccaagtgttacccaactgtgagcgaggaataccagaagtcagttgaaaaggctaagaggaagctcagaggtctcatcgctgagaagaactgtgctccactcatgctccgtctagcgtggcactcagctggaacttttgatgttaagaccaagacaggaggtccattcggaaccatgaagcatcctgctgagctcgcacatgctgctaacaacggccttgatatcgccgtcagacttctcgagccgatcaaggagcagttccctaacctcacctacgctgacttctatcagctcgctggtgtcgtcgccgttgagattactggtggacctgaaat

SEQ ID NO: 227540 - DNA, 430 bp, Gossypium hirsutum
gaaagtttcaatggcaaccctcaaagttccagttcacgttccttctccttctgaggatgctgagcaacttcggaaagcttttgaaggctggggtacgaacgagcaattgattatcgacatattggctcacaggaatgcagcacagcgcaattcaattcggaaagtttatggtgaagcttatggggaagatcttctcaagtgtttggagaaggaacttacaagtgatttcgagcgggctgtgctgctttttacgttggaccctgcagagcgagatgctcatctggctaatgaagctacaaagaagttcacatcaagcaattggattctcatggagatagcttgcagtaggtcttcgcatgaactactcaatgtgaaaaaggcgtatcatgctcgttataagaaatcccttgaaaagatgttgttaccacac

SEQ ID NO: 227541 - DNA, 432 bp, Gossypium hirsutum
  unsure (1)..(432): unsure at all n locations
caagattgcggtctctcaccttgctttgcactttggttcttcttggatctctagcttctactcaggcaaagaagtccaaggaagatctgaaagaagttactcacaaagtttactttgatgttgaaattgctggaaaacctgctggtcgaattgtcattggactcttcggaaaggcagttccaaaaacagcagaaaacttccgagcactatgcacaggtgaaaaaggtgttggaaagagtgggaaacctctccacttcaaaggaagtgctttccaccggattattccaaacttcatgattcaaggtggtgattntacacttggtgatggaagaggtggagaatcaatctatggtgagaaatttgctgatgagaatttcaagctgaagcacactggacctgggcttttgtcaatggcaaatgctggtcccgaca

SEQ ID NO: 227542 - DNA, 377 bp, Gossypium hirsutum
caaatatcaaatccctcgaaaaatcctccccatccaatcaccacccgaaaccatggccactccttccccacgcgaagaaaatgtctacatggccaaactcgccgagcaagccgagcgctacgaggagatggtcaagttcatggagaacgtcgtctccgccgtccccgctcccgacgaactctccgtcgaggaacgtaacctcctctctgtcgcctacaagaacgtcatcggcgcccgccgtgcttcctggaggatcgtctcctccatcgagcagaaggaggaaggccgtggcaacgccgaccacgtcgccgtcatccgtgactacagggccaagatcgaggccgagttgtccgagatttgcgctggaattttgaagc

SEQ ID NO: 227543 - DNA, 389 bp, Gossypium hirsutum
cggacgcgtgggcgcttcccaaaaattcaattagattttgaaattccagcgaagggggaggagacacacacacacacacacagatcttcaaatttcatcaatggatcattcaaaggttcaagagatcgtggagaagcaggtattgaccgtggcgaaggccttcgaggaccagatcgacgaagagattgcggctttagatcgactcgaccatgacgatctggaagctattagagagcggaggttgcagcagatgaagaagaaggcggagaagcgaagtcgttggatcggattaggccatggtgaatacttttgagattccagcttgagaaagaacttcttttttcattggttaaaagctaggtgaaacgagttcttttggtctacttttt

SEQ ID NO: 227544 - DNA, 463 bp, Gossypium hirsutum
atttgagatgatttgagtcgttagaggctttggtttttatatgacagccttcaatttttggggaaattcttgcaattttctgatactagtgaattttatgattggtgtttgttttcgttccaattcgatttttgtaggaatcggagtttcggaggtctaggaaaagaaatggcaagtgggtttgaggaatcagcgagccattctccccacaatccatcttgctccaccaataatgctaatggtgatgctggtaattttgagtgcaatatttgctttgacttagctcaagaccctattgtcactttatgtgggcatcttttttgctggccttgcctttacaaatggcttcatactcattcccgttctcaagaatgtcctgtttgtaaagcccttgttgaggaacaaaaattggttcctttgtttggaagggggaaatcatctactgatcctaggtccaaatcta

SEQ ID NO: 227545 - DNA, 443 bp, Gossypium hirsutum
acccagcgtccgcttaataaacgccttcgatttactttcggtttccatttacttctttatttctacgtttttgaatttttagtaagcgaaaatgagagagtgcatttcagttcacatcggtcaggctggtatccaagtcggaaatgcctgctgggagctttactgccttgaacatggaatccagcctgatggccagatgccaagtgacaagactgtcggaggaggtgatgatgcttttaacacctttttcagtgaaactggtgctggaaagcacgtccctcgtgctgtctttgtggatcttgagcctactgttattgatgaagtgaggactggtacttaccgtcagcttttccaccctgagcaactcatcagcggcaaggaagacgctgccaacaacttcgcccgtggccactacactattggcaaagagatcgttgacttgt

SEQ ID NO: 227546 - DNA, 452 bp, Gossypium hirsutum
gtctcttcctcctccactttcagatcaccaaaaccttcaacaatgggctttgttaaggctcaaaaaaccaaagcttactttaagcgttttcaggttccattcaagagaaggagagagggaaagactgattacagggctaggattcgcttaaccaatcaagacaagaacaaatacaacacgcctaaataccgatacgttgttcgatttagcaacaaagatatcaccgcacaaataatttctgccaatattactggtgatatggttcttgcttcggcttactcacatgagcttcctcgttatggacttgaagtcggtcttacaaactatgccgctgcttattgcactggattacttttgggacgccgtgtccttaagttgcttgaaatggacgatgaatatcaaggcaatgtggaggctaccggagaggatttctcagttgagccaactgagac

SEQ ID NO: 227547 - DNA, 478 bp, Gossypium hirsutum
ggatgttggtcgcagatcaccctcaaaacggggaaaacaaaggcatgacaggcagtggtgacgttaatggagaggactttagctttgctggaagagatggggaagaggagagagaaaaggaaggacccaatggtctcaataagttggggtctagttcaacggccgagttgcaccctaaagccgccggagggccggagtctggcgtaggcaaacaaatgccgccggcgagtgtaatgacccgcttaatcttgatcatggtctggcgcaagcttatacgaaaccccaacacatattccagtctcatcgggctggtttggtccctaattgctttcaggtggcatgtgagtatgccgaaaataatagagaagtctatctccatcctgtcagatgctggactaggaatggccatgtttagcttaagtctgtttatggcactgcaacccaagatcatcgcttgtgggaactctgtagctacatt

SEQ ID NO: 227548 - DNA, 460 bp, Gossypium hirsutum; identical to SEQ ID NO: 198948

SEQ ID NO: 227549 - DNA, 425 bp, Gossypium hirsutum
gtgattttgcagggtcaagttgatatagttcaatcttcaaagttccagaatacatggaaggtgaaccagttaatgttaatgagttccaagaattagctaggcaggcccttcccaaaatatactatgactattatagtggtggagctgaggatgagtacacactaaaacaaaatgtggaagcatttcaaggaattacgatccggccaagaatacttgttgatgtcagcagaatcgatttgtcaacaactgttctcggctaccaaatctcagtgcccattttgattgctccaagtgctaagcataagtgggcacaccctgaaagtgaggttggcacagccagaacaactgctgtttgtgatacaataatgaatttatcctacaggtctacctgtactattgaggaggtcgcttcaagcttgaatgct

SEQ ID NO: 227550 - DNA, 385 bp, Gossypium hirsutum
  unsure (1)..(385): unsure at all n locations
gaccacgcgtncgggacgcgtgggacagatcacagtgccggaattagtgccagcaagaaggtagcagatgctaaacttgcaaaagattttcaagcagttttgaaagagtttcagaaggctcaacgacttgcagctgaaagggaaacatcatacgctccatctgttcccaaggcagttcttccttcaagttactcggctgatgaggtagatgtaggttcagatggaggggctgtacagcaagcctttcttctggaatcaagaagacataaggttttgctgttggataatgagatcacatttaatgaggctgtcattgaagaaagagaacatggaattcaagaaattcagcagcaaattggtgaggtgaatgagatcttcaaagatc

SEQ ID NO: 227551 - DNA, 474 bp, Gossypium hirsutum
  unsure (1)..(474): unsure at all n locations
gttattttgccttttcgctatcgtctttgcctatcaactccacggcgcagatccgaggagtctctatttttcaatccaaacaacccctctaaacactctcttcttttattgctcctactcttccagtcatggcaggcttggcaccagaaggatcccaatttgatgctcgtcaatatgaccagaaaatgactgagctgctccagactgatggagatgactttttcacaagttatgatgaagtttatgacagttttgatgcaatgggacttcaagagaaccttctgaggggtatctatgcatatggttttgagaagccttctgccattcagcaaagaggaattgtaccattttgcaagggtcttgatgtgattcaacaggcacaatccggaactgggaaaacagcgactntctgctctggaattctacagcaacttgactatgctgtagtccaatgccaggctctggttttggcac

SEQ ID NO: 227552 - DNA, 471 bp, Gossypium hirsutum
ctctgagggtgtcttaataaacgccttcgatttactttcggtttccatttacttctttatttctacgtttttgaatttttagtaagcgaaaatgagagagtgcatttcagttcacatcggtcaggctggtatccaagtcggaaatgcctgctgggagctttactgccttgaacatggaatccagcctgatggccagatgccaagtgacaagactgtcggaggaggtgatgatgcttttaacacctttttcagtgaaactggtgctggaaagcacgtccctcgtgctgtctttgtggatcttgagcctactgttattgatgaagtgaggactggtacttaccgtcagcttttccaccctgagcaactcatcagcggcaaggaagacgctgccaacaacttcgcccgtggccactacactattggcaaagagatcgttgacttgtgcttggaccgtatcaggaagcttgctga

SEQ ID NO: 227553 - DNA, 444 bp, Gossypium hirsutum
tttcgccaaagaaacgcaagatttgtagattcatttctattgtctatccacctccgaatcaatggctttgccgaaccagcaaacagttgattatccaagcttcaagctcgttatcgtcggcgatggaggaactggaaaaactaccttcgtgaagaggcatctaactggagagtttgaaaagaaatacgagccaaccattggtgtggaggttcatcccttggacttcttcactaactgtggcaaaatccgtttctactgctgggatactgctggacaggagaagttcggtggtctcagagatggttactatatccatgggcaatgcgccataattatgtttgatgtaactgcccggttgacatacaagaatgttccaacatggcatcgggatctttgcagagtgtgtgagaatatttctatttgtctatgtggaaacaaggttga

SEQ ID NO: 227554 - DNA, 443 bp, Gossypium hirsutum
  unsure (1)..(443): unsure at all n locations
atggagatgggggacttcttcgtcggaggttattacggcggcggagctacaggtgatttctcgccggagaagaggatgtccatggtggaggaaaagctgggggagaatttcatcgtcgacgacctcctcgacttctctaacgaagacgccgttatcggcgacggcttgttgttcgataatgtcgcgggtaattccaccgatttgtccaccgtcacttgcaattcctcagcgtccggtggcgaaaatcacttctcttccgctaatttcactcactcctctcagttctccggcgaactcggcgtcccgtacgatgaattggcggaacttgaatggctttcaaattttgttgaagattcattntcaacagtcccgaatttacaaagcaaccaccatatttttgctttacccacacccgaatcctcatctttctcaacccgatccga

SEQ ID NO: 227555 - DNA, 461 bp, Gossypium hirsutum
agcgtttgtctcagatttttgaagatggcccgtaccaagcagacagcccgtaagtcgactggtgggaaggctccaaggaagcaacttgctaccaaggctgcccgtaaatctgccccaaccaccggtggtgtgaagaagcctcatcgctaccgtcctggaactgttgctcttcgtgaaattcgaaagtaccaaaagagtactgagcttcttatcaggaaattgcctttccagaggcttgttcgtgaaattgcccaggacttcaagactgatttgcgtttccagagccatgctgttctagctctccaggaagctgcagaggcataccttgtgggtctttttgaagacaccaacctttgtgcgatccacgccaagcgtgtcacaattatgcccaaggacatccagttggctcgtaagatcagaggagagcgtgcttaatttccatgtgtgtggatcagtcgctt

SEQ ID NO: 227556 - DNA, 404 bp, Gossypium hirsutum
ctagttctcgaggcattctctgttcaaaagaaacttcttatcgagatcaagcagactcagaaacctgatatggcgggcttggtcgaatttctcaaaccactgaatgaagtgatcttgaaggttaatgctatgacggaagggaggcgatctgatttcttcaaccacttgaagagtgctggagacagtctttcagctttagcatggattgcttacacaggcaaagattgtggtatgagcatgcctatcgcacatgtggaagaaagttggcagatggctgaattttataacaacaaggttcttgtagagtacagaaacaaagatcagatccatgttgaatgggccaaagctttgaaggaactgtatttaccgggtctgagggattatgtcaaaagccattatcctct

SEQ ID NO: 227557 - DNA, 434 bp, Gossypium hirsutum
gcttattctcaacggctgccacccacttccacggcggcgttgcttctctaaaaccccgccaaagcccacttcctcccttcctcttaatccttttccaactgccctgcccgactcctctgtcatctggaccaaatactcctgtaaatcttttgcctgtcttttacaaaacaaccccatagactttgatcttaacgcccgacgctcatcccttctaaaatacgcttccgagctcgaccttcccgtttaccggttcatgcaattggcttagtcagcttactttgtgatccgtcttggcattgacataggcggtggaactggaaccttcgctgctttgaggaaaattttctacaatgtcacgatgctgaccaccaccttgaacgtctatgcgcctttcaatgaagccgcggctgcaagagggttgatgcctttacacg

SEQ ID NO: 227558 - DNA, 412 bp, Gossypium hirsutum
ctttaaccctaaaattggagattttgggttggctaaactttttccagataacatcactcatatgagtaccaggatagcaggaacaactggttatttggccccggaatatgctttgggtggtcagttaaccatgaaggctgacgtttatagtttcggtgtacttgtgctcgaaataattagtggacgaagtagctcaaagacaaactggggaggcacgatgaggttacttttggaatgggcatggcagctccattaagaaggcaagctcatagagtttgtggatcctgagctcgaagaattcccggaggaagaagtccttaggtacatgaataaagcctttttttgcactcaagcagaatccattccaaggtctttaatgatttatgttataaaattgccgaaagaaaatttt

SEQ ID NO: 227559 - DNA, 420 bp, Gossypium hirsutum
ctcaaatgctcgagcagtcttgcattttgttttcccttttttttccccacacctttttttaaacccatttgctaaaaatgcactgggttcttccagtgttgcttgccgttatcggagttactgcactgctcgttgtaactccggtaagtgggtaccgtccatggccgtacttaaaacccaacagctccgacttaatgttcggaggctctaagaaatttgagggctcatcggagtttatccatatgagatatcatatgggtccagtccttactgctaatatcaccatccacccaatctggtacggccggtggcagaaatcccagaagaaaatcatccgtgagttcatcaactcgatctccgccgttgattccaaacacccttcggtggctgggtggtggaagaccgtacagctttacaccg

SEQ ID NO: 227560 - DNA, 379 bp, Gossypium hirsutum
ccaaaaatcgaacacgaaattcctctttttcgccagatctgggcacgtcgccggtcttagcaacctccgatccaatcatttcacctattcatttcaattcattaaacgtgtgacgcgacccactggatcgaagatgccggtggccgcttctgccatctacttcttgaatcttcgcggcgatgtcctcatcaatcgtctctaccgagacgatgtcgggggaaacatggtggatgccttccggatgcacattatgcaaacaaaagaactcggaacttgtcccgtcagacagattggaggttgctctttcttttacatgagaatcagcaacgtatacatcgtaattgttgtcagcagtaatgctaatgtagcttgtgctttc

SEQ ID NO: 227561 - DNA, 397 bp, Gossypium hirsutum
ctactactccaagcaagtattttccttacacgtttgtttttcttgtgattaatcgatatggctagctcaatgtcccttaaacttgcatgtgtggtggtgttgtgcatggtagtgggtgcacccctggctcaaggggccgtaacctgtggtcaagtcacaaactccctcgcaccctgcattaattacttgagaggcagtggtgctggtgccgttcccccaggttgctgcagcggcatcaaatctctcaacttcgccgcccaaacaacaccagaccggcaagcagcttgcagatgcatcaaaagtgcggccgccggcattactggcatcaactttggccttgcaagcggactcccaagcaagtgcggtgtcaacatcccttacaagatcagccctagca

SEQ ID NO: 227562 - DNA, 405 bp, Gossypium hirsutum
tgagattatcaatttgaagccttcttcgaatttcctcattcaagatgcaaattttcgtcaagaccctcaccggaaagaccatcacattggaggtggagagttctgatactattgacaatgtaaaggccaagattcaggacaaggaaggcatccccccagaccagcaaaggttgatcttcgctggtaagcaacttgaggatggccgcacgttggctgattacaacatccagaaggagtccacactccacttagtgcttcgcctccgtggaggaatgcaaatttttgttaagactttgactgggaagaccattacattggaggtagagagttcagataccattgataatgttaaggcaaaaattcatgacaaggagggaattccccagaccaaagaggctgattttt

SEQ ID NO: 227563 - DNA, 456 bp, Gossypium hirsutum
actgctgtgaagccgcagaggtttgaagtgaagtgaagtgcattctggctggtcgacaatggggatttcgaggtttgttttactcgtgtttacgatctcaatgctggcatccccggcactctccgatctggttctctccaaagtcgatcgacgtatttatttgacatcccacattgttcgaatttcttcaactttagaggtggagaatgcaggtccagagactgtgtctaaggttttgttggcttttcctgaccttcaagcccaaaacttggcatatttgatggcttccccgcatgaagccaaagcgaaagtcaaagtctctgttgtttctttccctattgatgtcgccaaaccagaagatatgcctcctggtgtaacattctattctgtatcattgccacagggattaaaccggggcgctagcttcacttttgatgttttggcttgtattaccca

SEQ ID NO: 227564 - DNA, 422 bp, Gossypium hirsutum
gaaaccgtaaggagaagatcggagagaaaatatggcggccggcgatcgcaccgttttgcagtttaactcaccgtcatcggcgatcctgtcagcgaaagttcaccctctcgtcatatttaacatctgcgattgctacgtcaggcgtcccgaccaagccgagcgcgtcatcggcacgctcctcggctccgtcctccctgatggcaccgtcgatatccgtaactcctatgcagttcctcacacggagtccgctgaacaggttgctttggatattgaataccatcataatatgttagtctcccaccaaaaagtgaatcctaaagaagtgattgttggatggtattctaccgggctaggagtcacagggggcagtgcattgatccaagatttttattctagagaagtacctaaccctattcatttga

SEQ ID NO: 227565 - DNA, 417 bp, Gossypium hirsutum
cttttggcgcacgcctatttaaccaatggcgagtggtggttgcctggttggttaagtcattcatatcattcggggtgtgtgtacgttgctttgggcttcaaaatttttctttctgggtctgtgtttcattgcttccttttcctttttttcttctcaaaaactatgaattatttgggtgttggtattagtcctgggaatgtccccgtataccatggcactaatccgatggtaattgaaagaagagtgagcattgcagagttgctcttaaggtgtttgatatgtgtcctcagtgtactcacagctatcctagtgggaaacgatagccaggtcaaagaaatcttttcgattcagaagaaagctcggtttacagacatgaaagctcttgtgtttttggtcgtagctaatggggtagctgct

SEQ ID NO: 227566 - DNA, 307 bp, Gossypium hirsutum
agaaaaatggcaaaatcagcagaggaagagaaccaacaaaaagcttttggttgggctgctactgataattctggaatcctctcccctttcaatttttccagaagggaaaatggtgatgatgatgtcactttaaaaattctttactgtggagtgtgccattcagacctacatactttgagaaatgactggggtttctccttttaccctgttgttcctgggcatgaaatttcaggtgttgtgaccaaagtggggaagaatgtgacaaaattcaatattggtgaccgggttggggttggggttttggttg

SEQ ID NO: 227567 - DNA, 416 bp, Gossypium hirsutum
ccacgcgtccgggttagggagccaaaggaagagactacgacccttgggcctgctgtacgagacggagagcatgttttcggtgttgcccacatttttgcatcttttaatgacactttcattcatgtgactgatttgtctggaagagagactatggttcgtattacaggtggtatgaaggtgaaagccgacagggatgaatcttcaccttatgctgcgatgcttgcagcacaagatgtttcccagagatgcaaggaacttggaatcacggccctccacatcaaattacgtgctacaggaggtaacaaaaccaagacccctggtccgggtgctcagtcagctcttagggctcttgctcgctccgggatgaaaattggccgtatcgaggatgttacacccatttcgactgatatcaccct

SEQ ID NO: 227568 - DNA, 438 bp, Gossypium hirsutum
  unsure (1)..(438): unsure at all n locations
aaagcatcaacaaccatagccatggcttcctcaccaaaactcttgtctatgtgctatcctctgacggantgcccctcctccatgcaaatccatgctggagagtacttcagcaaagtcccaagagttaacaccaatgcgaaagagacaacagccagagagcatgagcacgagaccttcgtgccccagaccacccaaaagccataagagcatgagccaaggttcatccctgaaacccaaaatggttatggcctgtacggccacgagttatgcttaagctcaagctcaggcttaagccggtccagcatgaccacctaagaaacctatgaaccctatgtcacccctgatagattccaccctgatgaaccctataacagcatccccgtatgcttcaacattaaagacacttactgctacaacaagaatgcctacaagttcact

SEQ ID NO: 227569 - DNA, 412 bp, Gossypium hirsutum
  unsure (1)..(412): unsure at all n locations
cccacgcgtccgaagagcaaaaaaagctttttcaagctcttttccttttcccttctaaagggggagaaagttggaaacaaagagcctaagcttataatttgatggacacgggagggaattcattaccgtcgggacccgacggcgtgaagaggaaagtgtcgtatttttacgatccggaggtcggcaattactattacggccaaggtcatcctatgaaacctcatagaatccgaatgacgcatgcccttttagcacactatggattgcttcaaaatatgcaagtttacaagccattacctgctcgagaaagagaccttngccgtttccatgccgatgattatgtgaattntcttcgcagtataacgccggaaacacagcaagatcagctccggcagcttaagcggtttaatgt

SEQ ID NO: 227570 - DNA, 340 bp, Gossypium hirsutum
aaagcataatcgaatcgtgaaattactttgagaggaaaatggggaaacagccggtgaagatgagggcggtggtatacgctatgtcgccgtttcaacagaagattatgagtgggctgtggaaggatctgccgggcaagatctctcacaaggtttccgagaattggatcagcgctactcttctccttactcctctcgttggaacctacgcatatgtccagaactttaaagaaaaggagaaattggaacacaggtattaaaaacctcatgaagcattccttttatcggagtaactctgagcttttatgttgtagatgcaaatttattgtggttcgatccaatg

SEQ ID NO: 227571 - DNA, 289 bp, Gossypium hirsutum
ctcctctacatcctcacatttatagcaatggacatatttgtttagatattctgtatgatagctggtccccggctatgactgtcagttccatttgtatcagcatcctctccatgttatcaagctcaactgtgaagcaacggccaactgataatgatcgatacgattagaactgtcggaatgggagatcttccaaggagacgagatggtggttccatgatgataaagagtaatattttaagaactgttatttatctcttattactgctagggtttcatcacgagagatggg

SEQ ID NO: 227572 - DNA, 405 bp, Gossypium hirsutum
acgataaccatgtgattgctggagcattattaggagttgggattgtcaattgcggtgttaagaatgattgtgaccctgcactggctctattgagtgattatattagtaaagaggattcttcagttcgtattggtgcaattatgggtttgggaattgcatatgctggtgcccagaatgagcagatccgtagcagcttgactctgatacttaatgatgcaaaggctccccttgatgtgatagcatttactgcaatttcattgggtttgatatacgtgggttcctgcaatgaggaggttgcacaggctattatatttgctttaatggaccgaagtgagtcagagttgggggagcctctcactcgtcttctgccacttgctcttggtcttttataccttgggaagcaag

SEQ ID NO: 227573 - DNA, 177 bp, Gossypium hirsutum
agcatctggaaattgtggtatctgtagttatgccggaacatttaacgagaagaaatgtggaactaattgtggaggggcctctcaaagatggtaccacgttcctcgttcatggctcaacccaacagggaatttgttggttgtgtttgaggaatggggtggagatccgcatggaattac

SEQ ID NO: 227574 - DNA, 297 bp, Gossypium hirsutum
cccacgcgtccgcaaagcgtttgtcttagatctcagaagatggcccgtaccaagcaaactgcgcgtaagtcgactggtgggaaggctccaaggaagcaacttgctaccaaggctgcccgtaaatctgccccaaccaccggtggtgtgaagaagcctcatcgctaccgtcctggaactgttgctcttcgtgaaattcgaaagtaccagaagagtactgagcttcttatcaagaaattgcctttccagaggcttgttcgtgatattgcccaggacttcaagacttgattgcgttttcag

SEQ ID NO: 227575 - DNA, 340 bp, Gossypium hirsutum
cttctttcaaccgcgcctaataaccgctcggatttttctcagacgtgaaaaaaatggggctgtctttcaccaagctattcagccggctatttgccaaaaaggagatgcgtatactgatggttgggcttgatgctgctggtaaaaccaccattctttacaagctgaagttgggagagattgtcactaccattcccaccatcggtttcaatgttgagaccgttgaatacaagaacatcagcttcactgtttggatgttggtggccaggacaagatccgaccattgtggagacactatttccaaaacatgcaagggactaattttcggggtgatagccatgat

SEQ ID NO: 227576 - DNA, 280 bp, Gossypium hirsutum
gaaaagatgcaggcgattacaaggcgattagggcaccaatctctgaggccaactgcttgaatctcttctatcaagtctatttaccctctctccggtcactactatggaggtgatcatccgcgatacggatctacactggcttcccacaagggcatgggccacctcgttcgcaagggcaccggtggccgatcttccgtcagtggcattatagctactgttttcggcgctactggattccttggtcgttatcttgtgcaacaactggctaaaatgggatctc

SEQ ID NO: 227577 - DNA, 346 bp, Gossypium hirsutum
tggatacaaagtggctgatttctgtatcgaagccgagtggcggccttgttattgctcctccgctaaagaggccatcactagcagcggcaagatcttagtctccgaacaaggggaatccaagattgtttccctgaattcaagcaagttgcaactggaggatatatcggataccctttattcacgtccttcgttagtggccgaggtctcgaaactcaccgttaacgagctgaagaagttcaagttagacggtaccgccgagacgaagaaagggtcgacgagatcgacatttaccatcaactccatcattgtagaaatgcttcaaggcaagatggtcggtagacaactg

SEQ ID NO: 227578 - DNA, 365 bp, Gossypium hirsutum
acgatgacgcgtgggtgagtgtagagatgaggaaaatcatgggtgccaaagttcttttcttgttcgctgtgctttccttttcagctgactcggcatttgcacaggatgaggaagaccaaggtcttgttatgaacttctacaaggattcttgtcctcacgctgaagacattatcaatgagcaagttaagctactgtacaagcgacacataaacactgctttttcttggctgagaaacatcttccatgactgtgctgtccagtcatgtgatgcttcactgctgctggactccacaagaaggagcttgtctgagaaggagacagacaagagcttttgcctaaagaatttcaggtacattgagaccatc

SEQ ID NO: 227579 - DNA, 371 bp, Gossypium hirsutum
cggacgcgtgggcttcactccacatttcacactctttttcaactttctcttcttctctttgtttgaaagaggggctggagttttagccaaagaaaactccatggctaaacttgttgctactttcttcttggctctcattgccatctccatggttcaaactttggttatggcatcacatggacatggtggtcaccattatgataacaaacgttatggacctggaagtctcaagccttaccaatgtccatctcagtgcacaaggaggtgtagccagacacagttccataaaccatgcatgttcttctgtcagaaatgttgcaagacatgccctttgtgttcctccagggtttattggaaaaaaccaagtttgc

SEQ ID NO: 227580 - DNA, 217 bp, Gossypium hirsutum
  unsure (1)..(217): unsure at all n locations
ggagagctacctgattgggaatttacaaccagcacatatggattttcgattcttttctctaggaaatttgtgggccgntgtgagtggtcttgcaacgattgatcagtctcatgctatattggatctcattgaagctaagtgggcagatttggtggcagaaatgccatttaagatatgttacccggctcttgaaggtcaagagtggcagatcatcact

SEQ ID NO: 227581 - DNA, 374 bp, Gossypium hirsutum
aaagaaaaccccataatcatggctcgattaacattggtctcctccatcatccttatgctatgctgcgttaccgcagcatcaactttcgaggattccaaccctattcggatggtatccgacggtctccgtggctacgagtcctctgttcttcgtgtcattggccatacacgtcacgctatctccttcgcccgctttgcttacaagcatggaaggaagtacgagacggtggaggaaatgaagcttcggtttcagattttcaaagagaatttggatttgatccgatccactaacaagaaaggcttatcttacactcttgctgttaatcggtttgctgattggagctgggacgagttccaaaacacaagcttggagct

SEQ ID NO: 227582 - DNA, 317 bp, Gossypium hirsutum
acgatttattttatgggaaaatcgctgcccggcgcatccaatcttcaacatctagcaaaggttaccggcgcggcccaccatcttaacacaactgggaaaaacccaaaacccactactctgtaccggcggattataagtgatgacaacaaacccaattccaagaagaagatggagagctccagtgccagtcaacgcctcccactttccgaagtcgtctccgattgcgttaaacgttggttcaaagatactcttaaggaagccaaatccggggacgtttacatgcatgttcttgtgggtcaaatgtattatatcggttt

SEQ ID NO: 227583 - DNA, 201 bp, Gossypium hirsutum
gcgtgcgctttctgtacatatactttgctgcaaattctcccatacttttcagaaaatctaacacaaggttttgtaaatgttagagatccttcatggtcaaggtgaacaatgcgggaaccatatctgttccaagttttgggaggttgtttgcgattagcacagcatagatccaactggtaggttcattgtttcttcggatct

SEQ ID NO: 227584 - DNA, 256 bp, Gossypium hirsutum
cgacagttcctttgattttgagagaaaagagagagagagtgaagagtagatcttggcttctgtgcgtcgttcgattccgcttaattatagcccgcgtttctctcagacgtgaaaaatggggctgtctttcacaaagctatttagccggcttttcgccaagaaggagatgcgtattctcatggttgggcttgatgctgctggttaaactaccattctttacaagcttaaggttggaggagattggtaccttccattt

SEQ ID NO: 227585 - DNA, 238 bp, Gossypium hirsutum
gcgcccacgcgttcgggatgctgaaactcggcttgagcattgttttggataaagagaaggaagaaaagaaatggatgaagattaaggaggtgtcgcactagtggtctttggtgaacaaacagaagcccatctggatgaggaagcctgaggagattaccaaggaagaatatgctgctttttacaagagccttacatatgactgtgaagagcatttggccttcatagcacttttcatttt

SEQ ID NO: 227586 - DNA, 476 bp, Gossypium hirsutum
  unsure (1)..(476): unsure at all n locations
agtactatctatctccaagcatagcnagttttccttacaaggtttagtttttcttagtgattaaatcgatataggctaagctcaatagtacccttaatgcttagcatagtgtagagcggtagttagtagcattggtaggtagggtagcaccccctaggcttcaagagggccagtaaccctagtggtcatagtcacatagctgccctcgcatccctgcattaggttaccttgacagaggaataggtgcctggtgagcagttcccccaggttagctgcgagcggcataaatatctctcaactccgccgcccaaacaacaccagaccggcaagcagcttgcaaatgcatcaaaagtgcggccgccggcatttctggcatcaactatggtattgcaagcggactcccaggcaagtgcggtgtcaacatcccttacaagatcagccctagcactgactgcaacagcgtcaagtgaagtttt

SEQ ID NO: 227587 - DNA, 288 bp, Gossypium hirsutum
cccacgcgtacgctgtgttgtttggaaaggtgcttcaaccactcctctggttacaatagcaacagacaaaattagtggctgaagttttggaaaagaataacttacctggtgcaattttcacatcattttgtggcggtgctgaaattggggaagcaattgcaaaagatcgacgcatttatctagtttcatttacagggagttcgaaggtgggtgttaaagttcaacattcaggaaatgagaggtttggttaatgcttgctttgacttaattagtacttcgctattattt

SEQ ID NO: 227588 - DNA, 279 bp, Gossypium hirsutum
  unsure (1)..(279): unsure at all n locations
cgcgnncgctcctncatatgacggtaaaaagatctcccttcccctctctttctctccggcggcgatctcaaatcacagttgaatctcaccgtaacgcccgattactcttcacctctgtgatctcctctgacacctcgtggtttcagtttattctaactcgtcgccatcatgaatcccgaatatgattatctgtttaagcttttgcttattggtgattctggtgttgggaaatcatgtctacttttgaggtttgctgatgattcatatctggatagctac

SEQ ID NO: 227589 - DNA, 303 bp, Gossypium hirsutum
atacttctactacaagctagcattttccttacaagctagtttttcttgcgattaatcgatatggctagctcaatgtcccttaagcttgcatgtgtggcggtgttgtgcatggtggtgggtgcacccctggctcaaggggccgtaacctgtggtcaagtcacaagctccctcgcaccctgcattggttacttgacagggaatggtgctggtggcgttcccccaagttgctgcagcggcattaaatctctcaacttcggcggccaaacaacaacaaaccggcaagcaggttgcgaatgcatcaaa

SEQ ID NO: 227590 - DNA, 257 bp, Gossypium hirsutum
aaatcaaatgacaatcaggctcaagctcaattagtttcaaccagacataaaacatgaaacaagttggcttccatctatgtttaatgtgcttttcatatgattgcatagaagattccagaagggatgaaaagtttgctacaactaccatgatcctatagcaccctgtgcagggttctcaaaagcagagaattcccagtacggtttcaatgaatatgggttggaaattgttacaccattttttagtatttttagctatt

SEQ ID NO: 227591 - DNA, 454 bp, Gossypium hirsutum
atcacagataactttattagttaggttagtgagtgagaaggtcttcattgcatgggtgaattcagcaatgctaaaagcttttcaatgggaaatgaacatatttgaatcaacatatacagagatctcaaacacttatgatgcagatggagcaaagggtttgtcaagaagttggattcaaaagcttccaatgcatgaaattcaagctagtcctatgtttcaatcttcttgttcaatttgcttacagggtctaaaacatggtgaaatggcaagaaatcttccgagatgtaagcatatgtttcacttaaattgcatagatgaatggctgagcaaggtaggcacctgtccaatgtgcagagaccatgttttttagatttggaaatcttcaaactttgatttatgaacagaaacatatatatatatattaatggggattgggtttttaaattgatttcat

SEQ ID NO: 227592 - DNA, 341 bp, Gossypium hirsutum
ctccgccatcttcaataatttcttccgttgatctttgttagagattagctttttaatttttcattatgggaaagatcaagatcggaatcaatggatttggaaggatcgggcgtttggttgcgagagttgctctccaaagcgatgatattgagctcgttgctgttaacgatcctttcatcaccactgaatacatgacgtacatgtttaagtacgacagtgttcacggtcaatggatgcatcatgagcttaaggtgaaggactcaaagacccttatcttaggtgaaaagcctgtcacagtttttggttttagataccgagacgaaattttatgggctgaggct

SEQ ID NO: 227593 - DNA, 438 bp, Gossypium hirsutum
ctgagagaagaaaatccaaatgcatgtagtaataataacactgctgtttggttcttttagcttgtatcctttgcatcattttatctttgctttgtgagtgttcagaaagatctgagttaaaaaaaaaaaacttattggcgaggggctgagtaaatcgttatctttcaagttgagatctgttggctgttttcgcttgctggtgttattggttacaagctttgagggacttaaaagagtttttctgactcaaatgggcacaccgtgaccagccccattgtatctcccttgcacagtcttttgggatcctttccccaagatgaaccgtccggtctgctcaacttgcctagatccaacccagtaataacatctgcagcatggccatctaagcgggctgctgttgaagttctggcatctggatctccacaatgtgttctgccc

SEQ ID NO: 227594 - DNA, 472 bp, Gossypium hirsutum
aaaatgtgataatatacaaacagctataaagtagctttcctgtctatcagctatctcgagcaacttaagaagaaatgggggaaaagagtttaattgccaaggatgtcaccgaattgatcggtaacacgccactggtatatctcaacaatgttgtagatggatgtgcggctaaaattgctgccaagttggaggcaatggaaccctgctccagtgtcaaggacaggattggatatagtatgatcgcagatgcagaggagaagggtctcattgtaccaggcgagagcgtgctgatcgagccaactagtggtaataccggaatagggttggcattcatggcagctgctaagggttacagactcataattacgatgccttcttcaatgagtttagaaagaagaatggtcctccgagcttttggagctgagctggttcttacggatccagcccggtgcatgaaaggggctgttcaaaa

SEQ ID NO: 227595 - DNA, 360 bp, Gossypium hirsutum
cccacgcgtccgaagaagagagaaaaaaatgaagtctcagatctgtttagcctttggaactctggccttgttgttagcttcagctttggccgatgacgtcgtcgtactgaccgaagcgaacttcgataaggaagttggtcaagatagaggagctctcatcgagttctatgctccttggtgtggacactgtaagaagctagctcctgagtacgagaagctcggggcaagttttaagaaggctaaatccgtcttgattggaaaggtggattgtgatgaacataagagtttatgcagcaaatatggtgttcaaggctacccaactgttcaatggtttcctaaaggctctttggaacctaaaaa

SEQ ID NO: 227596 - DNA, 390 bp, Gossypium hirsutum
cccacgcgtccgttgcattttacttctattgattttattttctcttgtttgaattggatgcattcttattcatttgcttgcttccctgtttcatttctatagttgggcttttcaaggattacaatcaattcatatttctgagattcatgtttgagatgagttaattgtttttttccctcttcgttttagcttatttgaacattttgattcttctcgtctggtggagctgcacatggaccagtacgagaaagtagagaagattggtgagggaacctatggcgttgtttataaggctcgtgatcgtgtcaccaatgaaacaattgctttgaagaagattcgcttaaagcaagaagacgagggtgtacctagcactgcaattagagaaatctc

SEQ ID NO: 227597 - DNA, 327 bp, Gossypium hirsutum
ggaatgccttctggagtagaccttactgccaaagatttaatgaatacgctgaagaaaaaacatgcagcgaaaagctacaaaagcatggttatctatgttgaggcatgtgaatcaggaagtatctttgaaggactattgccaaaaaatatgaatatatatgcaattacagcggcaaatgcaaatgaaagtagttgggggacttattgtcccggagaatttccaagtcccccttctgatttggacacttgtttgggtgatttatacagtatttgttggattgaagacagtgacattcatgatttgcggaaggaaactttggaccagcaa

SEQ ID NO: 227598 - DNA, 469 bp, Gossypium hirsutum
cccacgcgtccggcctctttggagcccatccaccaattctttatgtcatccattatctgggaaacaaaccatggctatgcttccgggactatgattgcaactggaatgtggacattttgcaggagtttgctagtgatgttgctcacaaaacatggtggaaggtacacgatgcgatgccagaaaatttacagaagtactgtctgcttaggtcgaaacagaaggcacagttagagtgggatcggaggcaagctgagaaaggtaattacacagatggccattggaaaattaagataaaagacaagcgtttaaagacgtgttttgaagaattctgcttctgggaaagtatgctgtggcattggggtgaaaagaattggacggataattcaactgctaacccatcaccacctgctataaagaaggtatctctctcttcattatgatttaattttcctttcattttctactacat

SEQ ID NO: 227599 - DNA, 465 bp, Gossypium hirsutum
aaaaaatcagagaaattctcacttgtcttgctaccaaagaaaagttcccaaaaactccgatcgacgatgtccggtatggaacgattgcacaggatgttcgccggcgctggtggtgcgttgggtcacccgccgccggattcgccgactctcgattcgtcggagcaggtctacatctcctctttggccctcctcaaaatgctcaagcacggaagagctggagttcccatggaagttatgggtttgatgttgggagagtttgtcgatgagtacaccgtacgtgttgtggatgtctttgcgatgccacagagtggtactggtgtcagtgttgaagctgtggatcatgttttccaaacaaatatgcttgatatgctcaaacaaactggaagaccagagatggtggtgggttggtaccattcacatcctggatttggctgctggctttctggtgttgacataaacacacag

SEQ ID NO: 227600 - DNA, 360 bp, Gossypium hirsutum
acaatggtggtgaaggtgtatggcccagcctttgcttctccaaagcgagtgattgcatgtcttattgaaaaggagattgaattcgagactgtccctgttgatttgcttaaaggagagcacaaagaccctgaatttctcaagctccagccttttggaacagttcctgtcactcaagatggagattatgttttatatgaatcccgtgcaatcataaggtactatgcagaaaaatacaaatcacaagggactgatctactgggaaagacagtagaggaaaggggtcaagtggaaaattggctagaaggtgaggcacacaatttcaacccatcaatttacgccttgaccctacatgtgatgttt

SEQ ID NO: 227601 - DNA, 302 bp, Gossypium hirsutum
acaatggtggtgaaggtgtatggcccaccctttgcttctccaaagcgagtgattgcatgtcttagggagggggagattgaattcgagactgtccctgtttatttgcttaaaggagagcacaaagaccctgaatttcttaagctccagccttttggaacagttcctgtcactcaagatggagattatgttttatatgaatcccgtgcaatcataaggtactatgcagtaaaatacaaatcacaagggactgatcttactgggaaagacatgtatggaaaggggtcaagtggaaaattggctaa

SEQ ID NO: 227602 - DNA, 478 bp, Gossypium hirsutum
  unsure (1)..(478): unsure at all n locations
accgaacagagctctctccttctaggccttacatttcgtttggcgttctactatttccagcgtctctttgcggctgagtggtcttttgaattctttggtggaaacttttgaacaaaatcgaagttacagagacttaacgattaaaagagaaagaatggaaacacaaaagagccaggccgagaaacaagcgacgatggcttcatgtagaaagaaaaagaatgaagaagccaccttccttgaagacttgaaggatcacatcgatgagtttgttaatgcatcaatggatgagcataaaacttgctttaagaagaccatccanaagatgtttggaatgtcaaaatttgtagctgaaaggaatgctgaatcaaaggaaacaacagtatcaaaataaagtatgttcatctttaatagcatgatatgtagtagcatgatttggtttacactatatttaaaacaaagccttcggtactttttgatc

SEQ ID NO: 227603 - DNA, 458 bp, Gossypium hirsutum
accgaacagagctatctgcttctaggccttacatttcgtttggcgttctactatttccagcgtgtctgggcggctgagtggtcttttgaattctttggtggaaacttttgaacaaaatcgaagttacagagacttaacgatttaaagagaaagaatggaaacacaaaagagccaggccgagaaacaagcgacgatggcttcatgtagaaagaaaaagaatgaagaagccacctttcttgaagacttgaaggatcacatcgatgagtttgataatgcatcaatggatgagcataaaacttgctttaagaagaccattcaaaagatgtttggaatgtcaaaatttgtagctgaaaggaatgctgaatcaaaggatacaacagtatcaaaataaagtttgtacatttttaatagcatgatatgtagtaacatgatttgtttacacttatattttaaacata

SEQ ID NO: 227604 - DNA, 485 bp, Gossypium hirsutum
atcaaattcctttctcccaatttctatttatcttcttctccttctctttagtcttttacgctgcggccagaaagcaagaagaaaccatgccgaagaacaagggaaagggaggaaagaacaggaagagaggaaagaatgaagctgacgatgagaagcgtgaacttgtgttcaaggaagacgggcaagagtatgcccaagtgcttcgtatgctaggcaatggccggtgtgaagccatgtgcatagatggtactaagcgcctttgccatatccgaggaaagatgcacaagaaggtttggattgcagctggtgatataattcttgttgggcttcgcgactatcaggatgataaggctgatgtgatccttaagtacatgcccgatgaagcaaggctcttaaaggcatacggtgagctttcagagaacactcgtcttaatgaaggtattgtcgatgaggaagatgaaggaggtgcaaatgattacattgag

SEQ ID NO: 227605 - DNA, 444 bp, Gossypium hirsutum
atagtcttctcttgattccaaatctctcccagaagatgcagatctttgtgaaaacccttactggtaagaccatcacccttgaggtagaaagttctgatactatcgataatgtcaaggctaaaatccaagacaaagaagggatccctcctgaccagcaaaggcttatctttgccggaaaacaactcgaggatggccgaactcttgccgactacaatatccaaaaggagtccaccctccacctagtccttcgtctaaggggtggcatgcagatattcgtgaaaactcttactggcaagaccatcaccctcgaggtggaaagttctgatacaattgataatgtcaaggccaagatccaagacaaggaagggatcccaccagaccaacagaggcttatctttgccggtaaacagcttgaagatggccgaacttttgcggattacaaca

SEQ ID NO: 227606 - DNA, 338 bp, Gossypium hirsutum
ggggtttatggtgaggttaaagagataagggaaacaccatacaagcgacaccataagttcattgagtgttatgatgttagagctgcagaacaagctcttaagtcactgaatagaagtgatatagccggtgaacgtattaagcttgaacctagtcacactggaggagctcgtggcaatttgatgtcgcaactgaatcaagatctcgaacatgatgactcttggggatcctgacatgaaactgggactcgccctgccaaggctcattcagggcgcggggcgcagtggaaccgcccaatataacctattcccatgccagctccttagcagccccttctttt

SEQ ID NO: 227607 - DNA, 392 bp, Gossypium hirsutum
aatatgttatatatctttatcctctttctttttgacctcttctccatgcaaatccattgtagaggggactttatcagattgccaagagtttacaccaatgagaaagagacaacaaccagagagcaagagcacgagaccttctttccccataccacccaaaagccagaagagcatgagccaaggatcatccctgaaacccaaaatggttattgtctttacagccactagtcacgctcaggctcatgctcatgctcaagccggcccagttttaccaccaaagaaacctaataaccctatgtctcccctggtagatttcaccctgatgaaccccttaacagcatccccgaattcttctacattaaagacactttcttctacaacaagaattgctt

SEQ ID NO: 227608 - DNA, 454 bp, Gossypium hirsutum
tgacaatccctttctttgtcctaaacatcctccttttcctctccagctccgcggctacaccaaagagcggtgcagatcacgacctggtccgttcatcatgtgtccacgccagctatccaagcctctgttttcgcaccctttcttcctactccggcccagccaacaccccacgtgagttagcccaagccgccgtaaaagtcagcctgtcccgtgcccgtaaagtgtcgaactacttgtcgacgagtgtgacggggtacaacaagagggaacgagtcgcactgagtgactgcgtggagcaaatagatgagtcgatggaggagttgagcaagacattaggggagttgaagcacttgagaggggagacgttcgagtttcagatgagtaatgcgcggacatgggtgagtgcggcgctgacgaatgaggacacgtgtcttgatgggttcgaaggagttga

SEQ ID NO: 227609 - DNA, 477 bp, Gossypium hirsutum
  unsure (1)..(477): unsure at all n locations
gctatgaatagtagagggaggtatccaccaccggggatcggcgttggccgggggggcggagtgagtgctaaccctagttttcagtccaggccgtcacagcaacactacgtgcagaggaatttggttcataatcagcagcactttcaacaacacaatcagcagcattttcaacaacaacagcagtggctcaggcgtaaccagttacccggcggcaatgactccagtgtcatcgatgaggtcgaaaagaccgtacaatcggaagccgttgactcgagttcacaagattggaaggccaggctaaagataccaccagcagatacccgctacaaaacagaggatgtgacagctactaaaggaaatgaatttgaggactattttctgaaacgtgaacttcttatgggaatatatgagaagnggtttgaaagaccatctcctatcaggaagagagtattcccattgctttgaccggagtgatat

SEQ ID NO: 227610 - DNA, 351 bp, Gossypium hirsutum
agaagaataaggcagtgacgtactcgtacgccttcttccacatcattttttctctggcaagtatgtactcagcaatgcttttgacgggatggtctacctcagttggggagagcgggaagttggtagatgtagggtggccatctgtgtggatacggattctaacagcctgggtaattgcagctctctatatgtggtctctccttgctcctattctcttcccagacagggacttctaagtctctctaaaacaaagttgtcggatatctttgcaataaatttgctctgtatatgtatgtttgtatgtgtgtgggtgatctgagatggattgcagtcaacaaattgatgttggat

SEQ ID NO: 227611 - DNA, 473 bp, Gossypium hirsutum
cgagtttgtagccaccttcttgttcctttacatcaccgtcttgactgtcatgggtgtgtctcagtctaaaaccaaatgtgcaaccgttggtattcaaggcattgcttgggcttttggtggcatgatctttgcccttgtttactgtactgccggcatttcaggtggtcatattaaccctgctgtgacctttggattgtttctagcaaggaaactgtcacttacaagggcattgttctatatgatcatgcagtgcctgggtgctatctgtggagctggtgtggtgaagggattccaaggagataaccgatatgagatgttgggtggtggagctaatgttgtgaaccatggctacactaagggtgatggtcttggagctgagataatcgggactattgcgcttggttacactgtcttctctgctactgatgctaaaagaaatgccagagactcccatgttcctattctggcttcac

SEQ ID NO: 227612 - DNA, 437 bp, Gossypium hirsutum
  unsure (1)..(437): unsure at all n locations
tgacgaactaatgtgtgctcttctaccagattccccttctgccacagccagcagaacaaaaagtggtcttatatggatcactaaatgggattctctacaacatcctgttgggtctgcatttttagctgttctttacagtgattacatgcgtgcatcagacaatgaaatactaagttgtggtgatgattcatttgaaccatctgatcttagaaagtttgcacaatcacaggctgattatgtgttgngtgataaccccatggacataagctacctagtgnggtatggtggtaaatacccagaatttgtacatcacagaggagcttcgatcccagttgatgcaaccactggttgctctgaagggttcaaatggcttagttcaaaaaaacctaaccctaatgtagcaataggagcccttgtagggggacctttcaaaaatg

SEQ ID NO: 227613 - DNA, 405 bp, Gossypium hirsutum
ctctctgtccagtcaggaaacaaaaagtggaccatatggatcactaacggggatcttgtacaacatcctgttgggtgtgcgcattcagctgttctccacagtgattacatgcgtgcatcatacaatgaaatactaaggagtggtgatgattcattggaaccatctgatgtgagacagttcgcacaatcacaggctgattatgtgctgggtgatcaccccatggacataagctacctagtggggtatggtggtaaatacccaccatttgtacatcacagaggtgcttcgacccgagttgatgcaaccactggttggtctgaagggttcaaatggcttagcataaagaaacctaaccctaatgtagcaattggagctcttgtagggggaccgttcaaaaatgaatta

SEQ ID NO: 227614 - DNA, 423 bp, Gossypium hirsutum
cttcaagatgcaaattttcgtcaagaccctcaccggcaagaccatcacccttgaggtggaaagctccgacaccatcgataatgtcaaggccaagatccaagataaagaaggaatcccaccagatcaacagaggcttatctttgctggtaagcagctagaggatggtcgtacacttgctgactacaacattcagaaggagtccaccctccacttggtccttcgtttgaggggtggtatgcaaatctttgttaagaccctcaccggcaagactatcaccctcgaggtggaaagctcggacaccattgataatgtcaaggccaagatccaagacaaagaagggatccctccagaccagcagagacttatctttgccggtaagcaactagaagatggccgtaccctggctgattacaacatccaaaa

SEQ ID NO: 227615 - DNA, 349 bp, Gossypium hirsutum
cccacgcgtccgaacattttgaagaaacaaagaatcaaacatgtcgaaggaagtgagtgagggaggggtgagccgaaaggactatgtggatcctccaccggcaccgctcatcgacgtggctgagatcaagctttggtctttttacagagctctcatcgccgaattcatcgctactctcctcttcctatacgtcaccatagccaccgtcatcggccacaagaaacaacacgatgcatgcgatggtgttggtcttttgggcattgcttgggcttttggtggcatgattttcattcttggttactgcaccggcgggatgttaggtgggtacattaacccggcggtgtcattt

SEQ ID NO: 227616 - DNA, 353 bp, Gossypium hirsutum
ctgcattttgctaagacaagccgagaaacaaagtgaaatattgctgagagtttgtggaggggagtgccttgagtgagggtcttacccaaattgtgatccctttaacttccttggtggtcattggagtcgcctggctttagtgatggttgtttctatcctgcgagctgttacatctggcatccaaaatcctgattgggttaagcatccactgatgttggctgacgctgttgacaaattgacagtcctagattttcagctcaagaaagatgcgtaaatagtaacagttgagaaggctacttctttgtcaactgcatctattgttgattcatcatttatcaacaaacttatcttca

SEQ ID NO: 227617 - DNA, 467 bp, Gossypium hirsutum
gccattgcagcccctgccaccgcctcactgcaagacccaaccaagtctcaccctgacgtcaagctcttcaatcgctggagcttcgaggaagttcaagtttctgatatctctttgagtgactacattggtgttcaaccttccaagcatgcaacctatgtgccacacactgctgggaggtactcagttaagcgttttagaaaggctcagtgccccattgttgagaggcttacaaactcattgatgatgcatggccgaaacaatggaaagaaacttatggcagtcaggattgtgaagcatgctatggaaattatttatctcctgactgatcagaacccaattcaagtcattgttgatgccattatcaacagtggacctcgtgaagatgctactcgtattggttctgctggtgttgtgaggcgtcaagctgttgatatttctcctcttcgtcgagtgaatcaggccatcta

SEQ ID NO: 227618 - DNA, 474 bp, Gossypium hirsutum
  unsure (1)..(474): unsure at all n locations
acagtatccttagcaaaagggttccactaccaaatggaggttccttggtgattgaacaaacagaggccttagtctcaattgatgtgaatggaggacatgggatgtttggtcatggaacatcacaggaaaaagccactttggatgtcaatcttgctgctgcaaaacaaattgctagggagttacggcttagggatattggtggcattattgtagtggattttattgatatggcagatgactcaaacaagagattagtatatgaagaagttaagaaagcagttgagagagaccgatcaatggtgaaagtctctgaattatcgaaacatgggctcatggaaataacaagaaagagggttcggcctagcgtcacatttatggttagtgaaccatgcacttgttgtcatggtacggggagggtngaagcttttgagacctccttttcaaaaattgaacaagaaattggtcgattacttg

SEQ ID NO: 227619 - DNA, 470 bp, Gossypium hirsutum
accgaatcctaagcacaagggctccactcccaaatggacgtatctcggtgatcgaacacacagaggcctcactctcaattgatgtgaatggaggacatgggatgtctgttcatggaacatcacatgaaaaagccactttggatgtcaatcttgctgctgcaaaacaaattgctagggagttacggcttaaggatattggtggcattattgtagtggattttattgatatggcagatgactcaaacaagagattagtatatgaagaagttaagaaagcagttgatagagaccgatcaatggtgaaagtctctgaattatcgaaacatgggctcatggaaataacatgaaagagggttcggcctaacgtcacatttatggttagtgaaccatgcacttgttgtcatggtacggggagggttgaagctttggagactctcctttcaaaaattgaacaagaaattggtcgatta

SEQ ID NO: 227620 - DNA, 468 bp, Gossypium hirsutum
  unsure (1)..(468): unsure at all n locations
acagtatccttagcaaaagggttccactaccaaatggaggttccttggtgattgaacaaacagaggccttagtctcaattgatgtgaatggaggacatgggatgtttggtcatggaacatcacaggaaaaagccactttggatgtcaatcttgctgctgcaaaacaaattgctagggagttacggcttagggatattggtggcattattgtagtggattttattgatatggcagatgactcaaacaagagattagtatatgaagaagttaagaaagcagttgagagagaccgatcaatggtgaaagtctctgaattatcgaaacatgggctcatggaaataacaagaaagagggttcggcctagcgtcacatttatggttagtgaaccatgcacttgttgtcatggtactgngaggggtgaagctttggaaaccttctcttcaaaaattgaacaataaattggtcgat

SEQ ID NO: 227621 - DNA, 482 bp, Gossypium hirsutum
cccacgcgtccgaaaaaggaaaaaaaaatgaagctcttgtttctaactttgctgctttgttctcttcttctatgttcttcagtttttgaaccaacaatggctcagcctcgttcacctttttgtgaagggaaatgcaaagggaggtgcaataaagcggcggtttgggatcgatgcttcaaatattgcggcatatgttgcgaggagtgtaaatgtgttccttccggtacttatgggaacaaacacgagtgtccttgctacagagacaaggtgaataacaagggcaaacccaaatgcccttgaaaatgaaatatattcgagttcgggatttcatcaagcttaaagatcgaggacgaagaggctatatatatatatatgcatgctgatggtgttattataaaataaactgttttattgctgttgttttcctttgggtttttgttttggtagtgttgaataaaatttcccttatattttcccatcac

SEQ ID NO: 227622 - DNA, 458 bp, Gossypium hirsutum
tattttgtgaatcgtgtaaagcagctgatttatacatttcccgaagatgctgcaaccagtactggggctcccttctggtctgctccaaaacgattccctcatccacttcaagtctcaacagctgatccaagccacctgcagtttgttatggctgcttctatcctgcgtgctgaaacatttggcattcaaattcctgattgggttaagcatccacagatgttggcagacgctgttgacaaagtgacagtcccagatttccagccgaagaaagatgcgaaaatagtaacagatgagaaggctactactctgtcaactgcatctattgatgatgcagcagttatcaacgaactcatcttcaagctagaactttgcacaaaaaatttgcctcaaggattcaagatgaaacctattcagtttgaaaaggatgatgatacaaactaccacatggatctaatcgc

SEQ ID NO: 227623 - DNA, 472 bp, Gossypium hirsutum
cccactcgtactcctacgcagccgctgattcatccatttaccgaagatgctgcaaccagtactggggctcccttctggtatgctccaaaacgattccctcatccacttcaagtctcaacagctgatccaagccacctgcagtttgttatggctgcttctatcctgcgtgctgaaacatttggcattcaaattcctgattgggttaagcatccacagatgttggcagacgctgttgacaaagagacagttccagatttccagcccaagaaagatgcgaaaatcgtaacagatgagaaggctactactctgtcaactgcatctattgatgatgcatcatttatcaacgaactcatcttcaagctagaactttgcacacaaaatttgcctcaaggattcaagatgaaacctattcagtttgaaaaggatgatgatacatactaccacatggatctaatcgctgggcttgcaaaca

SEQ ID NO: 227624 - DNA, 141 bp, Gossypium hirsutum
agggacgtgcactcaagaggaggtttgtgatacgctaacaactccaactacaaaaacgacaccatgatccgcaaagaggtcttcctcactccttccgttcttaaggaatgccgccgcatcatcgccgacagcgagataatg

SEQ ID NO: 227625 - DNA, 403 bp, Gossypium hirsutum
gtagaaattgtgtttcgtcgagagagaataccagagggaaggctaagccatggccgccgcggaggacagcggagagatttaccttcgctactacgtgggccacaaagggaaattcgggcacgagtttttggagttcgagttcaggccagatgggaagctccgatacgctaacaactccaactacaaaaacgacaccatgatccgcaaagaggtcttcctcactccttccgttcttaaggaatgccgccgcatcatcgccgacagcgagataatgaaggaagatgataacaattggccagaaccagaccgtgttgggcggcaagagcttgagatagtgatggggaatgagcacatctctttcacaacttcaaagattgggtcccttgttgatgttcagagcagt

SEQ ID NO: 227626 - DNA, 481 bp, Gossypium hirsutum
cacctcttcctttgttcctcatcctctgatccgtctcttcccgcattcgtcccgccggggttaacaagttttcaaacgaaaaatgagggaaatccttcacgtacaaggcgggcaatgcgggaaccagatcggatccaagttctgggaagtggtttgcgacgagcacggcattgaccctaccggacgctataccggaaactccagtctacaattggagcgcgttaacgtttactacaatgaggcttcttgtggaaggtttgtcccacgcgccgtgctcatggatcttgagcccgggaccatggatagtgtgagaaccgggccttatggtcagatctttaggcccgataactttgtcttcggccaatctggagctggtaataattgggctaaggtgcattatactgaaggagccgagcttattgattctgttcttgatgttgtcagaaaaggagctgagaattgtgattgtctccaaggtttt

SEQ ID NO: 227627 - DNA, 355 bp, Gossypium hirsutum
gtggaatctatttttcatttcttttataaataataatattaacataagtaattattttgcatgaaattttttaacttcacaaacattttatttttaaaaattttaaattatatggcaaaatatcaatcaatttataaagttaaaaatttttaataccacattaaccgtaatttatgattagagtttcaagtgcatgaacttggtgggggaatacagcctgaacaagttgaatgcggacatggtagcgatggaaaacattattaagcttgccacgaaaccccacagcaaggatcctccgatttgggtgcagaatcgagtatatttattgcaccacttgagccattggaagttctct

SEQ ID NO: 227628 - DNA, 487 bp, Gossypium hirsutum
acgggtctccatcgggatctaaaaccgcaaaatttgctgatagatcgccgtaccaatgcactaaagcttctgattttggtctggcccgagcatttggtattcctgtcagaacatttacacatgaggtcgttactttgtggtacagagcacctgaaatactgcttggatctcgccattactctactcctgttgatgtatggtcagtgggctgtatatttgctgagatggtgaatcaacggccattatttcctggggattctgagatcgatgagctgttcaagatcttcagaatcttgggtactccaaatgaggatacatggcctggagtgacttcattgcctgattttaagtcttcttttccaaagtggccagctaaggatttggcaactgttgttccaaatcttgaatctactggaattgaccttctttctaaaatgctgtgcatggatcccagcaaaagaattacagcaaggagtgctcttgagca

SEQ ID NO: 227629 - DNA, 344 bp, Gossypium hirsutum
gttctacatcgggatctaaaaccgcaaaatacgctgatagagcgccggaccaatgcactaaagcggatggttttggtctggcccgagcattctatattcctgacagaacataatacacatgacgtgtgttactttgtggtacagagcacctgaaatactgtttggatctcgccaatactctactactgaagatgtatggtcagcgggctggatatttgctgagatggtgaatcaacagccaatatttcctggggattctgagatcgatgagctggtcaagagcttaaaactcttgggcacaacaaaagaggatacatgggctggagtgacatatattgactgat

SEQ ID NO: 227630 - DNA, 448 bp, Gossypium hirsutum
gcgggtctctgtactgagcggacccccgcgatctataacgcggacgacccgaagaagggcagcatcgagtgttagactacacattggcattggttacatcgggggtgccaatatcttatccggtggtgccttcgacggtgcgtccatgaaccccgcggtctcattcatggaggtcgtggcactcattcgcgaccaaacccataacctctactggccaggcacgttcatagtgattttcaaagtgggactggcttaccaggtgaaactcatattcgcaatgggaggcctcgaccagacggccgcggataaaacaaataatttgcgggttattggcctaggtttactgaccgagacctgcatcaatagctggagattcaaattctgtgatcactcctttgtttgagaaaaagttgagtgcttgtgatgctgggcgaatttggacgtctgg

SEQ ID NO: 227631 - DNA, 456 bp, Gossypium hirsutum
  unsure (1)..(456): unsure at all n locations
attggtggctactgaactcatgtgaaccatttgttgtccaggaatcaattgcgaggaacagcataatccatgtttgactaaatttcagtcttctctaaaggaggaatctaatccacaatttggtttagctgtaccttatacatctccagatgaagcaaatggtcaaaatggagtttctggcactcatttgcgaccaaaccctcaacctccacttgccaagcaatttcatagtaatcttcaaaatgggactgactcatcaggtgaaactcagattcgaaatgggaggcctcgaccagatggccgtggaaaaaacaatttatttcctcgttattggcctaggtttactgaccaagacctgcagcaaataactggagattcaaattctgtaatcactcctttgtttgagaaaatgttgagtgctagtgatgnctggcgaattggacgtctggtgctacc

SEQ ID NO: 227632 - DNA, 456 bp, Gossypium hirsutum
ggcgatggtgcgaatgcaagctgacggacgccttcccgtatctcaacgtcgtaactataccagcgttgtcgacgccatcacacgcatgaccaaacaagaaggcgtgacctccttgtggcgcggctcgtcgctgacggtgaatcgtgcgatgttggtgacggcatcgcagcttgcctcctacgatcagatcaaagagatgattttggaaaacgggctgatgaaagatgggctggggacacacgtggcagcgagcttttcagccgggtttgttgcggcagtggcgtccaatcctgttgatgtgataaaaacaagggtgatgaacatgaaggtggaggcagggcaaaagccgccttacgccggcgctttggattgtgctatcaagacggggaagtcggaagggccgatggctttgtataaaggtttatacccacaatctcgagacaagggaccatttac

SEQ ID NO: 227633 - DNA, 419 bp, Gossypium hirsutum
ccatttgttgttcatgaatcaattgcgaggaacagcatgatccatgtttgactaaatttcagtcctaccaaaagaatcagccattatttttgtagcaatgtatttttttaaaacaaagaaaaatgggtattcttgccaaaaaactggaaaatcccaaaaaaattgaacaaggaaaagaacaccgctctttgagtgaactgcccttgaaaagaacgatgggtctccaaaaataatcaagccgccaagggtttttggcatggattcaaacccagggtttccctttcccacttcaatgcaccaaactctccggacccgtattcgaccaacagacttgaacctcttacttgtgccccaccaagtgcatgttggtcccatttatgaaaaatggtttccacattcccagcaaatcctatcggaaa

SEQ ID NO: 227634 - DNA, 448 bp, Gossypium hirsutum
  unsure (1)..(448): unsure at all n locations
cccacgcgtccgggaaagaaaaaaatgaagctcttgtttctaactttgctgctttgttctcttcttctatgttcttcagttnttgcaccaacaatggctcagcctcgttcacctttttgtgaagggaaatgcaaagggaggtgcaataaagcggcggtttgggatcggtgcttcaaatattgcggcatatgttgcgaggagtgtcaatgcgttccgtccggtacttacgggaacaaacacgagtgtccttgctacagagataaggtgaacaacaagggcaaacccaaatgcccttgaaaatgaaatatattcgagttcgggatttaatcaagcttaaagatcgagggcgaaagaggccatatatatatatatatgcatgttgatgatgatgttattataaaaataaacttgtttggttgctgttattttcctttgggtttttgtgttg

SEQ ID NO: 227635 - DNA, 305 bp, Gossypium hirsutum
gttttgcttgcgattaatcgatatggctagctcaatgtcccttaagcttgcatgtgtagccgagggctgcatggtggctggatcacccgtgcatgaaggggcccaaacctgtggaccagtcacaagctcgctcgcgcgctgcattggtctctagccagagaatatggctggtgcacccaccgcagcttgttccgtgcagatatacaatatcaacttcggcgctcatacagctccacaccccgtggcccctaagcgctacgttaaacgtgcgcacgctgacattctttgcattaaacatgagcttg

SEQ ID NO: 227636 - DNA, 466 bp, Gossypium hirsutum
acagaatctcttacaaggctagttcatgagtgtgaggcaaatctcgagcttctctttccactggaagctgaagtaattgaatctactccacaaggagaaccaaacccatcatcaaataacactgcaaagcgctcacaggaagcttcatcgtcgaatctgggagaggaaacattggatatttaccgtagcacactggctgcaatgaaagcaatacgcggtcttcaaaaggcaagttccacctgtaatccattatcgttctcggctttccttaagaaccaggatgatgacagtggtgctgtaacagctgaaaactctgcttcaaattcttcacccactttgcaaaaaggtaaggagtctgataaagaggatgcacaatctgcgcaacaacgataggttttcgattttcccggatactttttatctttgactttttctttgaacaactgacagaataataatgtgtttg

SEQ ID NO: 227637 - DNA, 481 bp, Gossypium hirsutum
aaatcgcagggcttttttaacctctccctctctctctagaaccctcactattcttttcttttggttgtttatatggcatctcaagccagcctcctccttcaaaaacagctcaaagatctttgtaagaatccggttgatgggttctcggccggattggttgatgaaaacaatatctttgaatggagtgttacaattatcggaccacctgatactctttatgaagggggatttttcaatgccatcatgagctttccgcccaattatccaaacagccctccaacagtgaaatttacatcagagatttggcatcctaatgtttatcctgatgggcgtgtttgcatatcaattcttcatcctccaggtgatgatccaaatggttacgagcttgcaagtgagcgctggatgccagtccatacagttgaaagtattgtattgagtatcatatcaatgctttcaagccctaatgatgaatctcctgcga

SEQ ID NO: 227638 - DNA, 462 bp, Gossypium hirsutum
cccgatttgtcttcttcattgccccgccatggcttgtgttagcttcgctaaactcaacgcgccggcgtcctcttggatcggcggccagcactctctccctcaacgctccggatcatccgctcggctcgccactcgcagaggctcactcccgatccgtgctggcgcttacaccgacgaactcatcaaaaccgccaaaactattgcttcacctggtcgtggaatactggcaattgatgaatcgaatgcaacatgtgggaagagattatcttctattggctcagacaatactgaacccaaccgccaggcttacagacagcttatgctcacaactcctggcctcggagaatatatttccggtgccattcttttcgaggaaacactttaccagtcaactacagatgggaagaagtttgttgatgtcttgcacgaccagaaaatcgtacctggcatcaaagtagataa

SEQ ID NO: 227639 - DNA, 263 bp, Gossypium hirsutum
atttttcctcatcaccatcgtctgctattcttcacaaaaaagaaaagaaaaattacagtgaaaatggcaacccttaaagttccagctcatgtacctgccccttctgaggatgctgagcaacttcgtaaagcttttgaaggatggggtacaaatgagcaattgattatcgacattttggctcacaggaatgcagctcagcgcaatttgattcgtaaaacttatcgtgaagcttattggggaagacttccctaagcctttggttg

SEQ ID NO: 227640 - DNA, 374 bp, Gossypium hirsutum
cccacgcgtccggcagcccagatgatgtacctaagtattggattgcatttacggtatctgtaccacctcttggcttcagcacttacaccatctctgcctctaaaaagccaggagctggatcaaccaaatcatctatatacaaatttcagaagggtgagaagccagctattgaagttggtgaaggaaatttaacgcttactatttcagctccttcagggaagatcataaattatgtcaacaacagaaacttggttgaggaatcagtggaacaatcatttagctattacactggatataatggagttaacgacaaagcaccccagaactctggggcatatatcttccgtccaaatggcacataccacataaaagct

SEQ ID NO: 227641 - DNA, 382 bp, Gossypium hirsutum
ggaacatatggatatgctgcaccagaatatgtaatgactggacatttgacatcgaagagtgacgtatatagctttggggtagttttacttgaaatgttgactggccgaagatccatggacaaaaaccgatcaaatggggaacacaatctcgtggaatgggcaagacctcatctaggagacaagagaaggttctttcgaattttagatcctcgtcttgaaggccacttttcgataaaaggtgcacaaaaagctgcccagctggctgcccaatgtcttagccgtgatcccaaagccagacctcggatgagtgaagttgttgaaatcctaaagcctctaccaaacctgaaagatatggctagctcatcttattatttgcaaacta

SEQ ID NO: 227642 - DNA, 236 bp, Gossypium hirsutum
gcgaaagcttatctcttttcgtctctgaatctgatcaatcaacacctgaaaaggaaaacttacaaacaacaactactactagtctactacccagcactagaagcagctcgtagccagccatggatgaagagtacgatgtcatagttctaggaactggtctcaaggaatgcatcctcagcggtcttctttctgttgacggactcaaggttctgcatatggataggaatgattactat

SEQ ID NO: 227643 - DNA, 344 bp, Gossypium hirsutum
gccatttccatcctgggatgtggttctgtcacagataatattctatttcatcctggaggattttgtggtgttactggggacatcgttttttacatacaaaatggctgtacaagcatgtgcacagtgttcatcatgagtatgctactccatttggactgacatccgagtatgctcaccctgccgagatattgttccttggctttgcaacaataattggtccagccatcactggcccacatcttattactctctggttatggatgactcttagagaactaaaaacaggtgaggcacattgtggttaccatttttcatggagcctcttaaactttttacctttatat

SEQ ID NO: 227644 - DNA, 258 bp, Gossypium hirsutum
agagcaccgatcgaatccgtacaatgcttcggccgcaagaagacggcggtggcggttacccactgcaagcgaggccgtgggcttatcaagattaacggttgtcctatcgagcttgttgagcccgaaatcctccgtttcaaggccgtcgagccaatttttttcctcggccgccagcgttttgccggcgtcgacatgaggatccgggttaaaggcggaggccacacttgtaagatttacgccatccgtcaaagctttgtt

SEQ ID NO: 227645 - DNA, 443 bp, Gossypium hirsutum
cttctgttacgatggcggctactaccttctctccttccttctccactccctcggtcaattcttcctccagagcccacaaaactttaaccaaccctaatctaggctttttggcctcagtttcgagatccttgaggtctctcaaagcaaccaggctgactactgataatgcttgtggctcagctatggcctctcgtatggtctccgttcctgccgtccagacacacatatctctcgattttgagacctttgtcttcaagaaggagaaagtctccctcgctggtcaggacgagtacattgtgagaggaggaagagatttgtttaagttgctgcctgacgctttcaaagggattaagcagattggtgttattggttggggttcgcaaggacccgctcaagctcaaaatttaagggattctcttgctgatgcaaaatctgatatcatt

SEQ ID NO: 227646 - DNA, 445 bp, Gossypium hirsutum
ttctgttttccttgttctcttctacattcagcgaaggggtgctctgagatcacataccaaaatggtgaaggccgttgccgtccttggcagcaatgaaggtgttagcggaactgttttcttctcccaagaaggagatggtccaactaccgtgactgggaacctttctggtcttaagccgggactccatggcttccatgttcatgcccttggggacacaactaacgggtgcatgtcaactggaccccattttaatcctgctggcaaagagcatggtgctccagaagatgagaaccgccatgctggtgatctagggaatgtcactgttggtgatgatggctgtgcaagcttctccatcaccgacaaacagattcctctcacaggcccaaactccattatcggaagagctgtagttgtccatgcagatcccgatgaccttggcaagggc

SEQ ID NO: 227647 - DNA, 464 bp, Gossypium hirsutum
ggaccacttcttcccttccattttactttgttttagttgccataacgtcaccttccaatacaacccacaatgaggcaacaatatgtcttcactactctcacgttgctcatcctgttttccctcagttgttcaacaacattagcccaagctccggcactggctccagcaccttctggtccgacaaacgtcaccaagatcctcgaaaaagccggtcaattcaccctcttcattcgtcttctaaagtccactcaagtggccaaccagctgctcggtcagctcaacaattccaacaatggtatgaccgtttttgcaccaacggacaatgctttctccagccttaaatcgggcacattgaattcactcaccgatgaacaaaaagtggagctggtgcaattccacatcgtcccaacataacctaactcgtctcagttccaaaccattagcaatcctttgagaacccaaac

SEQ ID NO: 227648 - DNA, 160 bp, Gossypium hirsutum
ggcgagagcaccgatcgaatccggacaatgcttcggccgcaagaagacggcggtggcggttacccacagcgggcgaggacgtgggcttatcaagaataacggacgacctaccgagcgggatgagccgcgaaaacgacgcatgaagggccgagagacaaaa

SEQ ID NO: 227649 - DNA, 413 bp, Gossypium hirsutum
agatttttcaggttaacctgagacgagcggcgcgtcatcagaagcttgacccttctgcgactcacggggtgactcagttctccgatttgactccaggcgagttcagaaaggcatatttgggattaaggagactgagattgcctaaagatgcaactgaggctccgattttgcctaccgataatttgcctcaagattttgactggagagaaaaaggagctgttacacccgtcaaaaatcagggttcatgcggatcatgctggtcttttagtacaacaggagccttggaaggagctaactttttggcaactgggaaacttgtgagcctcagcgagcaacagcttgtggattgggatcacgagtgtgatccaaataaaagcaggttcatgtggattctggatgcaattgggtgggtt

SEQ ID NO: 227650 - DNA, 469 bp, Gossypium hirsutum
ctgttctctctctctctctttcccatagtttcacccatcttttaatccatcgctcacaaaattatgggtttgaaggaggaattcgaggagcatgccgagaaagttaagaccctcccggccgccccttcgaatgatgacatgctcattctctatggactgtacaagcaagctactgttggaccagtgaataccagccgtcctggaatgttcaacatgagggaaaagtacaagtgggatgcatggaaggctgttgaagggaaatcaaaggaggaagcaatgggggattatatcaccaaagtaaaacaactgtttgaggctgctggaagttcttgatgtgtgtgtgtatgaccaatgaaactggtgtaatttcaagcccttgtcggttacttggggttttcattactatgaataaattatgtactctttttctattgctattatgttatttacaggaaaaactctttgattt

SEQ ID NO: 227651 - DNA, 300 bp, Gossypium hirsutum
gctttccaatacaaagcttcatattatcttttttagttccgacaaaagaaaacgaaaaaaataggggaaatacaatcgttttctttttgaagtcgggttttagtttttggggagaaaaaaatgttgggagtatttagcagtgcgatagtgtctccgccggacgagctggtggcggccggttgccgaactccatcacctaagataacggcggatgctctggtgaaacggttccttgagacgaactcctccggcgtgtccatgcagatcggagaccatgtgcaattcgcttattctcaccat

SEQ ID NO: 227652 - DNA, 320 bp, Gossypium hirsutum
  unsure (1)..(320): unsure at all n locations
cccacgcgtncgtacagattcaaaaagaaataaaggtagaagaagcaatggccactcttacagtgcccacgacagttccttcagtgtctgaagattgtgaacaactaagaaaagccttttcaggatggggaactaatgagggcttaatcatagatatattgggtcacagaaatgcggagcaacgaaacttgattcgaaaaacctacgctgaaacctatggagaggatctcctcaaggcactagacaaggaactctcgaatgactttgagaggctggttctgctttgggctcttgatcctgctgaacgtgatgcccttttg

SEQ ID NO: 227653 - DNA, 546 bp, Gossypium hirsutum
  unsure (1)..(546): unsure at all n locations
cgtcncnngaatatttcaaattggatcgtgcataaatggtgtggcccgatctgtaaacaaagacctgcgaggtgcgtcaagnnaatttaatgtcctgatgngnnaattggcncnnttgaagatgtgcttagcaagaaataagggcgaaaagaaaagaatgttgcgggttatatgtgtgtataccaatgtnnggcctgagggtgaccctnnacttcagcttccgtgcgaagagatacctctgttggcaggcgcagaccaattcaaaatgatgtactggagtcgtagcacaaagaattgaaatccatgggtatcgacaattctcatccacaagactacctaaatttctactgccttggtaatagggaagaagttcccaaaagttctgggccaagttcatcccaatgtaaccatagtgaaacggtttcagcttcacaaaagttccaacgggttatggtttacgtacatgcaaagggaatgatagtagatgacgagtatgtgatattggggtctggcaatattaatgaacgattcttggctggatcaagg

SEQ ID NO: 227654 - DNA, 240 bp, Gossypium hirsutum
  unsure (1)..(240): unsure at all n locations
nccacgcgttcgtacagattcaaaaagaaataaaggttgaagaagcaatggccactcttacagtgcccacgacagttccttcagtgtctgaagattgtgaacaactaagaaaagccttttcaggatggggaactaatgagggcttaatcatagatatattgggtcacagaaatgcggagcaacgaaacttgattcgaaaaacctacgctgaaacctatggagaggatctcctcaaggcac

SEQ ID NO: 227655 - DNA, 414 bp, Gossypium hirsutum
aacagatcagacagtcgatgagatctaaagggttattgcctttctttgacagtgcttaccagggatttgcaagtggtagcttagatgtagatgcacaacctgttcgcacgtttgttgcagatggcggggaatgctttatagctcaaagttatgcaaaaaacatgggactttatggggagcgtgttggtgctctcagcattgtctgtaaggcggctgatgttgcaagcagggttgagagccagttgaagcttgtgattaggcctatgtattccaatccaccaattcatggtgcctcaattgcaatgactatcctcaaaaatagtgatatgtataacgagtggaagattgaactgaaagccatggcagaccgaattattaagatgcggaaacaactattggatgctttaagtgcta

SEQ ID NO: 227656 - DNA, 458 bp, Gossypium hirsutum
gttctagatcgcgagcggccgctcgcgatctagaacgaaatacaagctggttttcttgggggatcaatctgtggggaagaccagtatcatcagtcgcttcatgtatgataaattcgataacaattaccaggctaccattggtatcgactttctatccaaaacaatgtacctcgaagatcgaactgttcgattgcagctttgggatactgcagggcaggaaaggttcaggagtcttataccaagctacattagggattcctcggtggcagtcattgtctatgatgtagcaagcaggcagtccttcttaaatacttcaaattggattgaagaggtgcgggctgaacggggaagtgatgttatcattatgcttgtggggaacaaaacagatcttgtggacaaaaagcaagtctcggtggaggaaggagaagccaaagctcgtgacatcaatgttatgttta

SEQ ID NO: 227657 - DNA, 476 bp, Gossypium hirsutum
ggaaaaggaaaacgaagaaaatggcgtccctctctgcccaaatccctctctgcttggccttaatgatggctgcctgtttgatgataggcatcaatggaagcatagatggagctcagagggagttcgattactttgctttgtctcttcaatggcccggcaccatctgccacaagactctccattgctgctcctccaatgcctgctgccgaggctcgaactctccaactgaatttaccattcatggattgtggccggattataatgatggaacctggccttcctgttgttaccgatctcagtttgatgtcaaagagatttcaacattgcttgatgcacttgagaagtactggccatcgttatattgtggcaaatcatcaacctgcttcagtggaaaagggttattttgggctcatgagtgggagaagcatggaacttgctcatctccggttattcgagatgaatacagctactttata

SEQ ID NO: 227658 - DNA, 480 bp, Gossypium hirsutum
gccaattgtttgagctagctagctcttactcaaatggcaaccaaaacgatgatgttgcaaatatttccacttttcttctttttgttcagtgtctgcaactccattttccttggtgctaatggagatgacaatggtggttggcaaactgcccatgccaccttctacggtggtgctgatgctaccggcacaatggggggagcttgtggttatggaaacctgtacagtcaagggtatggaacgagcacagcagctttgagcactgcacttttcaacaatggcttgagctgcggtgcctgctacgagctccggtgcaacaatgatcctcaatggtgcattagtcgaaccataaccgtgacagccaccaacttttgtccacctaactatgctttaattagtgacaatggcgggtggtgcaatcccccacgagaacactttgatttggccgaaccggcattcttgcggatagcaaaatatcgagct

SEQ ID NO: 227659 - DNA, 483 bp, Gossypium hirsutum
agaaagtggaaggaagggaagaaaacaatggtggatgatttcatggtatgtgtcgacaaaattatagcatctgcagcttgttttgagtcttcttcagtgaatgaaggacaaccaatctcaactacagctgctgggaatactaatgttgttgttcctatgacgaaagcaagtggtgatgatgatagtggaaaagaaggagaaggaaaaactgggtatagttcaaagaaggtgaaagaggtggtggagtgtaggatatgtcaagaggaagatgatttgctttctttggaagctccttgtgcttgcagtggcactctcaagtttgctcacaggaagtgcattcaaagatggtgcaacaagaaaggtgacataacttgcgaaatatgcaaacaggttttttcaccaaattattctctttctccgaccagaacaatccagatgtttttgcaattgacattaagcaaacatggagcccgcatattgatc

SEQ ID NO: 227660 - DNA, 486 bp, Gossypium hirsutum
accaaatcaaaatgtctctggtggcgaacgaagactttcagcacattttgcgtgtactgaacaccaacgttgatggaaagcagaagattatgtttgctttgacctccatcaagggtattggaaggcgtttcgctaacattgtttgcaagaaggctgatgtcgacatgaacaagagggctggtgaattgactgcacaggagctggacaatctcatgaccattgttgcaaaccccaggcagtttaagatacctgactggtttttgaataggcagaaggattacaaggatgggaagtattcccaagttgtgtctaatgctctcgacatgaagttgagagatgacttggagcgattgaagaagatcaggaaccaccgtgggctgaggcattattggggtcttcgtgtacgtggtcagcacaccaagaccactggtcgcagaggaaagactgtaggtgtctctaagaagcgttgaatgtttcatatatgtt

SEQ ID NO: 227661 - DNA, 446 bp, Gossypium hirsutum
gcagctgcaccacaactacagagaagagagtaaaggggaaaaaaagcgtcgtcgtttttgcttcttcttctacttcgctctctctccttctccgaagttcctctttcgttctttcatttattcagtattgtaaaagatggccgacggtgaggatattcaacccctcgtctgtgataatggaactggaatggtgaaggctggttttgctgtgatgatgctccaagggcagtttttcccagtattgttggtcgtccccggcacactggtgttatggttgggatgggtcagaaggatgcctatgtaggagatgaagcacaatctaaaagaggtatccttactttgaaatatcctattgagcatggtattgtgagcaactgggatgatatggaaaagatctggcatcatacattctacaatgaactccgtgttgctcctgaggagcaccc

SEQ ID NO: 227662 - DNA, 479 bp, Gossypium hirsutum
gttagtgaagcttatccaaaaggttcttgttcagtgtactgcattaatggaaaagatgtggagggacccggatatgatttcgaacttgttgcagtgatttctgctgctagacttagcccacagaatttctgtactggaagttggcggtcgatatggaacattgagtgcaaagatgatattcaagttctggaattaaaaggcaaattgcaggtgggtgcgcactattttgaagagggaaatgtgcaattagatgcaaaacatgaatgtagagattctacaatgtttcagtcccccgatgatggtgcaattgccatagccagtttaattcgccaccatgagacagagtacctggcatctcttgaggcatcctatttgaatttgccagatgccactttcaaagatcttcgaaggaaacttccaattactcgggccttatttccatggcataacacttttcaattcaacctgacaagagagat

SEQ ID NO: 227663 - DNA, 306 bp, Gossypium hirsutum
gttagatcgtgtcaagacgagtatctaagcagttcagttacagtactactaactgaaccagaaacggcgcccaccacatttttatatgataaactaactcaaaaaccctaaacactccctccctcgctccctccctctttctcacaattcatctcaagcagttactgtacaacaatggcgacgccttctttgggtgaagatactgccaaggctgttctccgccaggttgagttttacttcggtgatagcaatcttccaaaagacgactttctcaagacaaaaatcaatgagagcgaaaatgatatg

SEQ ID NO: 227664 - DNA, 487 bp, Gossypium hirsutum
accaaaacaaatattagaaaccctactcccaaatagaagtttgattgagctctctcatggcgttttctacccgtctcctctacaaatctcgccagctttatgttagtcaagctgttctgcggcaggaggttgccattcctgtccggttttactctaaagaggcttctccccctggtttaaaaggagatgagatattgaaaaatatctttgtggaggttaagaacaaattcgagacagcattgggaatatttaggaaggagaaaatcaccattgacccagatgacccagctgctgtctctcagtatgcaaatgttatgaagactgttagaaaaaagggtggcttgttttcagaatctcaacggatcaaatacaccatcgaaacacgaactcaaggcattccagatgtccgaacatatttattgacacttgaggaaataagatccaagagaggactcactgatgaacttggtgctgaggctatgatgat

SEQ ID NO: 227665 - DNA, 207 bp, Gossypium hirsutum
gcagtttcactcccttagagagggaaaaccatggcggccgcagctcaaatcagcaaaaagcgaaagttcgtcgctgacggagtcttcttcgctgaactcaatgaggtcttgactaggggactggccgcagatggatactctggtgtcgaagtcagagttactcccatgcctactgagatcattatcagagccactcgtacccaaaat

SEQ ID NO: 227666 - DNA, 394 bp, Gossypium hirsutum
atcaactcagaacagctcaaaaaagcttccaacattttgaagaaacaaagaatcaaacatgtcgaaggaagtgagtgaagaagggatgagccgaaaggactatgtggatcctccaccggcaccgctcatcgacgtggctgagatcaagctttggtctttttacagagctctcatcgccgaattcatcgctactctccttttcctatacgtcaccatagccaccgtcatcggccacaagaaacaacacgatgcatgcgatggtgttggtcttttgggtattgcttgggcttttggtggcatgattttcattcttgtttactgcaccgccggtatctcaagtggtcacattaaccccgcggtgacatttgggttgttttggctaggaaggtgtcgc

SEQ ID NO: 227667 - DNA, 464 bp, Gossypium hirsutum
ttttgttcaaggaccacttcttaccttccattttactttgttttacgtgccataacgtcaccttccaatacaacccacaatgaggcaacaatatgtcttcactactctcacgttgctcatcctgttttccctcagttgttcaacaacattagcccaagctccggcactggctccagcaccttctggtccgacaaacgtcaccaagatcctcgaaaaagccggtcaattcaccctcttcattcgtcttctaaagtgcactcaagtggccaaccagctgctcggtcagctcaacaattccaacaatggtatgaccgtttttgcaccaacggacaatgctttctccagccttaaatcgggcacattgaatttactcaccgatgaacaaaaaggggagctggtgcaattccacatcgtcccaaataccttaacctgtttgagttccaaaccattagcaatcctttgag

SEQ ID NO: 227668 - DNA, 402 bp, Gossypium hirsutum
cccacgcgtacggcgtcctgtgatggattcttgctggttttactagctggaggcccttctcgtgctttctctcgtcaggattctcaaattatagaggacgatttcaaagcccttaaagatctgttttgggccaatggtgatggtttgcctgctgacctcatagataagttttcagctacagtgagagatgtccttcccctattcagaaccgatacagagagcctaattgagcggttcaaacgtatgaccttggaggcatatggctcctccgcaaggtctaggcttccactacctccaacatcaggacagtggaatcctactgaaccaaacacgctcctgcgggtgttgtgttaccggaatgatgaggcagcttcaaggttgcttaagaagacttacaatcta

SEQ ID NO: 227669 - DNA, 458 bp, Gossypium hirsutum
aaagcattagcaaccatagccatggcttcctcaccaaaactcttctctatgtctatcctcttcctttttgccctcttctccatgcaaatccatgctagagagtacttcagcaaattcccaagagttaacaccaatgagaaagagacaacaaccagagagcaagagcacgagaccttcgttccccagaccacccaaaagccagaagagcaagagccaaggttcatccctgaaacccaaaatggttatggcctttacggccacgagtcaggctcaggctcaggctcaagctcaagccggcccagtttcaccaccaaagaaacctatgaaccctatgtcacccctgttagattccaccctgatgaaccctataacagcatccccgaatccttcaacaataaagacacttactactacaacaagaatgcctacaagtccactaagcaacaaaacttgggcga

SEQ ID NO: 227670 - DNA, 462 bp, Gossypium hirsutum
  unsure (1)..(462): unsure at all n locations
cttcgatacacttatccagtcctgttatgtatattgattttaatgcagggccgctggggatatgcagtgaaggacgaaattttccgggaaaatgaaacgaaaatttcccatcacattaaaagcgcagaggttgggttattcaccatggatgaactccttaattttcacgttggtcaaaaactccccatcttcttccccatccgaaacctctcactgtacccacctttctttttgcccccaaaataccaaaatatcatccctttcataaaacccgctgccatgttcaacctcttcaaggtcccaccgtcttccccaaaaggtaaagcctttttgggtactttatactcatgcgattccatcaatggcgaaaccaccaaaatctgcgccacctctttggactccatgctcggnttcgttaaaaaagctttcggacccgacgttgatttcaagttcatcaccacg

SEQ ID NO: 227671 - DNA, 482 bp, Gossypium hirsutum
acttgaccgtgatgcttgtgggaacttgaattccatgatatatccttgttgtgacgatttgagagacctgaaaagtggtcactaccacaagattgtagaaattacagagaatgcttcacaatgcctcgaggacgaatacatggtggacaagccatcttgttcgactccaaggaagaggtcattcaaccttgcgagtgtttcatccattgacgaactcagaactcctccattcgaggagttattgaagttgttttgggaagcaaaatctgcaaaactagcgaatggagatgtaaaacatatgctggcagcatatgaagcagcccaagccttgaaagacttcaaagttccactcactggtataaactaaaagtgagatggaaaggaacaaacatatttaaaaaaacaaaggccgagtatagtatagtgttaagaaccaaaagtgtgtacagattcagaaccatttcaatcttttttttttcttt

SEQ ID NO: 227672 - DNA, 441 bp, Gossypium hirsutum
aaacctttaggcggcgactactactcgagcttcataacacacgaagcttttaactatggcgggtgtagagacggaggttgcggcggccggtgtgcccaagaagagaacattcaagaagtttagcttccgaggtgtcgatttggatgctctccttgatatgtccactgatgagcttgtcaagctcttccctgctcgagctcgcagaaggttccagaggggtttgaagagaaagcccatggctctaattaagaagcttcgcaaggcgaaaagggaggctccacctggtgagaagccggaaccagttagaacccacctgcgtaacatgatcattgtacccgaaatgattggaagcattatcggtgtgtacaatggcaagacattcaaccaagttgaaatcaagcctgaaatgattagccattaccttgctgagttttctatttc

SEQ ID NO: 227673 - DNA, 337 bp, Gossypium hirsutum
aaacctttaggcggcgactactactcgagcttcataacacacgaagcttttaactattgcgggtgtagagactgaagttgcggcggccggtgtgcccaatattagaacattcaatatatttatgctttcgaggtgttagatttggatgctcttcttgatatgtccactgatgagcttgtgaagttctttcctgctcgagctcttagaaagttccagatgggtttgaagagaaagcccattgctctaattaagaatcttggcaaggcgaaatgggaggcttcaccttgtgatataccggaaccagttagaacccacctgtgtaacatgatcattgtac

SEQ ID NO: 227674 - DNA, 311 bp, Gossypium hirsutum
ctctgttcatagccacttatggtctatttcctgcgtcagctccaatgggaaagggaacagggcgtcttggtaaaagaaggaccatgccacacggcgactcaccccgatgctctcaacgcagctttgactgatagcatctcaaccttgatcttcgctttcgctggatcgggctcaggaatggcttttaacaagttgaccgacaactgagcaacaaccccagccggtctcgtagccgccgctctacctaatgcctaaagactttccgtcgctgaatccggtggcgccaacatatcatgtggacacgccaaccc

SEQ ID NO: 227675 - DNA, 390 bp, Gossypium hirsutum
ttcccttccattttactttgttttagttgccataacgtcaccttccaatacaacccacaatgaggcagcaatatgtcttcactacggtcacgttgctcatcctgttttccctcagttgttcaacaacattagcccaatctccggcactggccccggcaccttctggcccgacaaacgtcaccaagatcctcgaaaaagccggtcaattcaccctcttcattcgtcttctaaagtccactcaagtggccaaccagctgctcggtcagctcaacaattccaacaatggtatgaccgtttttgcaccaacggacaatgctttctccagccttaaatcgggcacattgaattcactcaccgatgaacaaaaagtgcagctggtgcaatttcaca

SEQ ID NO: 227676 - DNA, 452 bp, Gossypium hirsutum
aagaaaccgatttaccacccttttgcgtttattccattgatttctagagcttcatggctgaaaccgcctctaactccgccggttgcaccactaccaccgccgaggcgccagcgcctcaagaaaccaaaaagaccaccgaggcaccagtaagatgggccgatttggaagacgaagcttcggaagaaccgagtgctttatcggaagacaaaggtgcgccggaactcggagttgaaaacctaaaaatcgatgagagcaaaaagatcaacaagttcctcgacgaacccgaggactccaacatcaaagccgtcacagctggggagacaccatacacttcagcatttacgtttgaggaattgaatctgtcccctgaattgttaaaagggctatatgttgagatgaaatttgaaaagcctagcaaaatccaagctattagtttaccgatgattttgacg

SEQ ID NO: 227677 - DNA, 439 bp, Gossypium hirsutum
cggaccggaactgaatgcccgggtcgaggcgacgcgtccgaaaaagggtatttgctttgccaatatagttgccttcaaaattttgctcctgtttcatggaataagggttgcatatcaagttttgctctggctttaacgtggagaccgtagaatataagaacattagcttcactgtttgggatgttggtggtcaggacaagattcgacctttgtggaggcactacttccaaaacactcagggtctaatctttgttgttgatagcaatgaccgtgaccgtgtggttgaggccagggatgagcttcatcgtatgctaaatgaggacgagctgagggatgctgtgcttcttgtgtttgcaaacaagcaagatctgccgaatgctatgaatgctgctgagattactgataagcttggccttcactcccttcgtcagcgccactg

SEQ ID NO: 227678 - DNA, 309 bp, Gossypium hirsutum
gtccgatctgatcagatcgtataaaaatatcaaaacatgtttgggagagcacccatgaaaagcgataattggaggactatgagattttgggagtatcgaaaaacgcttcccaagatgatctatagaaagcttattgaaaagccgctattaagaatgatacccataaaggcggcgatcctgaaaagattaaagagttggctcaagcttatgaggtgctgagtgacccggagaagcgtgagatttatgatcagtatggtgaggacgcccttaaagaaaggatgggcagcggtggcgcgggccatgaccctt

SEQ ID NO: 227679 - DNA, 474 bp, Gossypium hirsutum
tctagatcgcgagcggctgccctatcaaattatttttgtgagagcacccattaaaatcgggaggggcaaatactatgagatttggggagtatctaaaaacgcttcccaagatgatctaaataaagcttattgaaaagccgctattaagaatcataccgataaaggcggcaatcctgaaaagtttaaagagcaggctcaagcttatgaggagctgaatgacccggagaagcgtgagattcatgatcagtatggtgaggacgcccttaaagaacggatgggcagtggtggcggtcgccatgaccctttagaaaacttccagtctttctttggtggcaatccttttggtgctggtggcagcaacctgggcagaagacaaaaaaggggggaggatggaatccatcccctcaaggtatcattggaagatctgtacaatgggacatcgaaaaagctttctctctcacgaaacgtaatctg

SEQ ID NO: 227680 - DNA, 449 bp, Gossypium hirsutum
caagaatggaaagaaaattgctgcctttgtacccaatgacggttgcttaaactacattgagggagatgatgaggtattgattgctggatttggacaaaaggggcatgctgtgggagatattccccgagttcggttcaaggttgttaaggtttcgggtgtgtctcttctaactcttttcaaagagaagaaggggaagccacggtcttaaaagaatttaacttttaatggctcacttaatctttgctatttataaaaaacctagtgtttgggattttgtgatgaaggattttagatattcaactcaaactgtgttctgattttggtttcaaatctaattctgtttggtagattattatatatggtcttatgaacccattatgtttggtgttatcatgtatgaacagaatagtacttgctgattatgataacaatggctcgatttttaaaaa

SEQ ID NO: 227681 - DNA, 478 bp, Gossypium hirsutum
cccacacattcgcttagaaaatataacagcatatataattgtaaatgttgtttgaaggggagaggtttgtagacactttgagagtggagtggcaactattaatcagtctcatgctatattggatctcattgaagctaagtgggcagatttggtggcagaagtgccatttaagatatgttacccggcttttgaaggtcaaaagtgtcagatcatcactggctgtgatccgaagaacacgcctttgtcttaccacattgctggtttctgtcctactttactttggcagctcactttctcattcattaatattaattgaccgggacttgctgcaaaatctgtttcatttgctttgaaacgcatattccaattacatattgcctctagtcttttttttcttaaatggcattgtttattttgataataatttctacctgttccaaaccttggtctattgtcagatttctttttttaaaacttt

SEQ ID NO: 227682 - DNA, 426 bp, Gossypium hirsutum
gctctgtatattgaaattttctttctcgattttctctttagccaaaaaagatgcagatcttcgtgaagactctaaccggcaagacgatcactctcgaggtcgagagctccgacacgatcgacaacgtgaagaccaaaatccaagataaggaaggcatccctccagaccagcagcgtctgatcttcgccggaaaacagcttgaggacggccggaccttggccgattacaacatccaaaaggagtcaactctccacctcgtcctccgtttgcgcggtgggatgcaaatcttcgtgaaaaccttgaccggcaagacaatcactctcgaggtccagagctccgacacgatcgacaacgttaaggcgaagatccaagacaaggaaggcatccccccagaccagcaacgtctcatcttcgccggaaaacaac

SEQ ID NO: 227683 - DNA, 431 bp, Gossypium hirsutum
  unsure (1)..(431): unsure at all n locations
cggacgcgtgggcggacgcgtgggaaacctaaggcccccgctgccgctgagaaacctcccgagggttacccggctgaggatgtcaagaagccgctccttaacaagcgcaaacctaaacccaccaaactcagagcaagcattacaccagggactgtgttgattttgttggctggaaggtttatggggaagagagttgttttcttgaagcaacttacttctgggctccttttggtcaccggaccattcaagatcaacggtgttcctttaaggcgcgttaaccaatcctatgtcattgctacttccaccaaggttgacatctcangggttaacgtagacaaagttgatgacaagtactttgccaaggaagtagagaagaggaagaaggaagactgagggagagttttttgaggcttgaaaaagagataagaaaa

SEQ ID NO: 227684 - DNA, 402 bp, Gossypium hirsutum
ttttctatttagccaaacaagatgcagatcttcgttaagactctaaccggcgggacgatcactctcgaggtcgagagctccgatacgatcgacaacgtgaaggccaaaatccaagataaggaaggcatccctccagaccagcagcgtctgatcttcgccggaaaacagctcgaagacggccggaccttggccgattacaacatccaaaaggagtcaactctccacctcgtcctccgtctgcgcggtgggatgcaaatcttcgtgaaaaccttgactggcaagacaatcactctcgaggtcgagagctccgacacgatcgacaacgttaaagcgaagatccaagacaaggaaggcattcccccaaaccagcaacgtctcatcttttgccggaaaacaactcga

SEQ ID NO: 227685 - DNA, 466 bp, Gossypium hirsutum
aaaaaagtgtctcatttttagcaaagttacagtcgtcctcatcgaacaactatggcagccatcggagtccacggaagccctatgtccactgctacacagagggttcttgcatgccttcacgagaaaggtactgattttcagtttgttcccataaacatggctgccggtgaacataaatccgaaaactacctttccctcaatccattcggtcaagttccagcttttgaagacggggacttaaagctcttcgagtcaagagcaatcacccattacattgctcatgaatacagcgacaaagggacccaactcttaatccctggctctaacaaggatatggctgtcttagaattatggaaggaagtggaagcccaccagttcgattctccatcttcaaaaatagcctgggaggcgttttacaagccatttttcggcatggttcccgactccgcggctgtggaggaaaatg

SEQ ID NO: 227686 - DNA, 248 bp, Gossypium hirsutum
atcgagaaaagtattgtacaagctcatgaaaatctccaacctggatcaattttcgtgaacaagggagagctattagatgccggagtaaaccgtagtccgagtgcctatctcaataaccctgcatcagagaggagcaaatataagtacaatgttgataaagaaatgacccttttaaagtttgtagatgaccaatggggcccaatgggtagcttcaactggtttgcaactcatggaacaataatgagtcg

SEQ ID NO: 227687 - DNA, 445 bp, Gossypium hirsutum
cagacttcttgtacttcgactgcatctttagactttgaaattgctatttctcaacttccggtgagagatttcactcatcagatttgtgcttggggttttcctcatctcttagttaaaaccatggattttagccatttaaatcgtgggcagatgactctgatgggatctgcgttttgtgtggtgctttcgttgcatttcacactgcagcttgtgtcacagcatcttttttactggaaaaaccccaaggagcagaaagctatacttattattattcttatggctcctatatatgctgctgtctcctttgtgggtttatcggatattagaggaagcaaagccttcttcatgtttctggaatctgtcaaggaatgttacgaggcttttgtgatcgctaagttcatggctttgatgtatagttacttgaatatatctattagcaaaaata

SEQ ID NO: 227688 - DNA, 283 bp, Gossypium hirsutum
aatttttacatttttttctcactctttctcttttctttttctttcatttccggcatctccgaggtgtgaagctacacccactgttaagagagacaaaaattaaaggtgacaagaggtttcgagttttattcgctgttttattagaaataaacgacgacaatgaagaacgctgaaagactcgccaatttggctttagcagggttgacaatggcaccactagttgtgaaggtagaccccaacttgaatgttgttttgactgcatgcctaacagtatatgtgggtt

SEQ ID NO: 227689 - DNA, 386 bp, Gossypium hirsutum
tccggaaggcgttagattcaggaatgatgttccggatggtggacttgcgaatgtggctgcaactgtcgggaagctccatggttatgtagctccaaatgactatgagccaacactcattgaagtagtgagcaattagaggcatatgttgcggtcgctgaatgggctaaacgagtttagaataaggatatatttggttcaaaaaaaaggtagtattttggtagacatatgtggtattgagtatttttccccaatgtgttgggaaaatttttgggcttcattgccccatttttaagaaaatgggatcgaatgttgaactgatttgcactatgaggtctttttatgattgtttgaaatttttaatgcccaaagattggattattttcatc

SEQ ID NO: 227690 - DNA, 468 bp, Gossypium hirsutum
ggaatagagctcaaatacaggcagttattgaggccaatattattcttcctcttgtacaccggctggaacttgcggagtttgacattaagaaggaggctgcatgggccatctcgaatgccacctctggaggatctcatgagcagattcaattccttgtgagccaaggttgcattaagccactctgtgacctactaatctgtccagatccacgaattgtgacggtgtgcctggaggggcttgagaacattctgaaggttggtgaggctgataaggaaatgggaatgaacggtggaatcaatctatatgcacaaatgatagatgagtgcgatgggttggataaaattgaaaacctgcaaactcatgacaaccatgagatatacgagaaggctgtgaagatcttggagagatactgggcttgagaggaagaagatgaacagaatatccaagatggtgggaatgaaaatcagc

SEQ ID NO: 227691 - DNA, 430 bp, Gossypium hirsutum
cggacgcgtgggtgatgtgttctcatctctaatgtacagtggcaagcttgatgctttcttgtcggagggcatggagtatgtcttcgttgcaaactcaaacaatctgggtgctattggtgacatgaaaattttaaaccatttggttccaaaccaggattgaatattgtatggaggttacacccaaaaccctagctgatgtcaagggtggtactcttatttcttatgaaggaaaagttcagctccttgaaattgctcaagtccctgatgaacatgtcaatgagttcaagtctatagaaaagtttaaaattttcaatacaaacaatttgtgggtcaacctgaatgctatcaagaggcttgtggaagctgatgcactcaagatggagatcattccaaacccgaaggaggtcaatggaatcaaggttcttcaact

SEQ ID NO: 227692 - DNA, 470 bp, Gossypium hirsutum
cccacgcgtccgctctctcactctttctctctcctctcttccctgatctcattagatccattcggagggcaacaaatcatcagaggaagaagtaaagcaaattaagaaaaatggcagcaacattaggagactcaagctcctggtccactgctcttgtcaagatttcaccttatactttctccgccgtcggtatcgccattgccatcggcgtttccgtcctcggcgccgcctggggaatttacataactgggagtagtttgatcggtgccgctattaaagctcctcgaatcacttccaagaatcttattagcgtgatcttctgcgaagctgttgctatctatggtgttattgtggcaattattttacaaacaaagttagagagtgttccttcatcacagatatatgaaccagagtctcttagagctggatatgcaatctttgcttcaggaattaattgtggatttgcaaac

SEQ ID NO: 227693 - DNA, 467 bp, Gossypium hirsutum
cggacgcgtgggcggacgcgtgggcaaaggttaaagaaagaaagaaaacatgtctcttgtgacaggggagataaaagcgagtgcatcagagatttaccatggagatgagatatgccaagagaaatccaagtttttgttggaggaagtaggcatgccaagggggcttttgccacttagagacatcgaagaatgtgggtacgtgaaggacacaggtttcgtgtggctcaaacaaaagaagagcatcacccacaagttcgaaaagatagggaagctggtttcctatgcaactgaagtcacggctgtcgttgagaaaggcaagatcaagaagctgactggggtgaagaccaaagagcttttggtttggatcacactgagtgatatccaagtggatgatcctcccactgggaagatcactttcaagaccccttcagggctgtttaggactttccctgtatcagcttttgaga

SEQ ID NO: 227694 - DNA, 420 bp, Gossypium hirsutum
gtcgaccccgcgtccgagcgccttcattccaatagagatgagagagaggtatgagatcttcgcttctctccgtcggtcgggtccatttgataaccgcttgcagttctctcagacgtgaaaaatggggttgtctttcacaaagctattcagccggcttttcgccaagaaggagatgcgtatactgatggttgggcttgatgctgctggtaaaaccaccattctttacaagcttaagttgggagagattgtcactaccattcctaccatcggtttcaatgttgagaccgtggaatacaagaacatcagcttcacggtttgggatgttggtggccaggacaagatccgaccattgtggaaacattacttccaaaacacacaaggacttatttttgtggttgatagcaacgatcgtgatcgtgt

SEQ ID NO: 227695 - DNA, 469 bp, Gossypium hirsutum
gaaaaacacagcaatggagagaagcaaggcgatgatgatggcagtggcagctgtcggattggctgtagtgctaatggtgcctcaggccgatgctacaaggtacattgttggagggggaggcatcggttggactactaatgtcaattacactgtctgggctcgaggaaagcacttctacaatggcgactggctttattttgtatatgatcggaaccagatgaatgtgctagaggtgaacaagactgactacgagtcatgcaatgctgatcatcctcttcacaactggacaaccggagctggaagggatgtggttccgcttaatgtgactcgccactactatttcattagtggcaaaggattctgctacggcggcatgaagctagcagtgcgtgttgagaaccctcctccgcctccaaaagctgctccattgaacgaaaagagtggctcctcaccaagttccattgtctac

SEQ ID NO: 227696 - DNA, 467 bp, Gossypium hirsutum
aaaaaaaaaaaaaacctgtatcaaaaagttgaaatcttcacaagaaaagctcttttttttccactgcaaaaggaatttttttttgggtggttgaagtttgggtccgggttgaactaaaattcggatcaagaaagcatgtcaatagaatcaaggtctgggtcagctgatcatggtatcaaaggagtagcaactcatggtggaggctatattaagtacaatgtttatggtagcctttttgaagtttccagaaaatatgttcctcctattcgccccgtcggtcgtggcgctaatggtattgtctgtgccgccgtgaattcagagacaccaaatgacgttgctatcaacaaaatcagcaatgcattcgacaacaggatcgatgccaagaggacattgcgagaaatcaagcttcttcgtcacatggatcatgagaatgtgatcgccattaaagacatcatccggcctccata

SEQ ID NO: 227697 - DNA, 475 bp, Gossypium hirsutum
  unsure (1)..(475): unsure at all n locations
ccacgcgtccccatgctggaataaccattctcccactattttcccaagccacaccaaaagccaatttgcctgaagaggagatcaaggctctaacaaagcgaacacaanatggaggcactgaagttgtggaagcaaaggctggaaagggatcagcaacattatcaatggcctatgctggtgcaattttcgctgatgcttgccttaagggactgaatggtgttcctgacgtcgtggaatgttcatttgtacagtcaactgtcactgaacttcccttctttgcttctaaggtaaggcttggaaagaatggtgtggaggaagttatgggggtgggtcctctctctgactatgagcaggcaggtttggagagccttaaaccagaacttaaagcatctatagagaagggaatcaagtttgccaaccagaattaaatttatattgtttgagatattctttcattagaacaatgaaaattttg

SEQ ID NO: 227698 - DNA, 415 bp, Gossypium hirsutum
aaaaaaataaaaaataaaaatcccattaaggcttgaactgttcttcagccaaaatggggatttctcgtgattcaatgcacaagaggcgtgccactggtggcaaaaagaaggcttggaggaagaagagaaagtatgagcttggaaggcaacctgctaacacaaagctgtcaagcaacaagacagtcaggaggattagggttcgtggtgggaatgtgaagtggcgtgctctgaggctcgacaccggaaactactcatggggaagtgaggctgtgactcgtaagaccaggattttggatgtggtgtacaatgcatccaacaatgagctggttcgcactcaaactctggtgaagagtgctattgttcaagttgatgctgctccattcaagcagtggtatctccaacactatggcattga

SEQ ID NO: 227699 - DNA, 471 bp, Gossypium hirsutum
cgatcttttgccgagaagcactatgctgacctgtctgcaaaacccttctttaatgggctcgtagagtacattatctccggtccggtcgttgctatgatttgggaaggtaagaatgttgttaccacaggtcgcaagattatcggagccacaaacccagctgaatctgctccgggaacaatccgtggtgactttgcaattgacattgggaggaatgtgatccatgggagtgattccgtcgagagtgcaaggaaggaaatcgccctttggttccctgaatgccctgttaactggcagagcagccttcacccttggatctacgagtagagatcatttggtcgaagctattggccgtcatggctctgtcctggttgtttgttgttggtggtgttgccagtcttttgatatttatattactattatagtttaaagtggtgaaagctttgtagcattttgggtgtatagggtaagttg

SEQ ID NO: 227700 - DNA, 395 bp, Gossypium hirsutum
atttctcaatctgaatctcagattttcagtcgggaaaatccaccatttttgctatccatttctcgtccagcacactaattgactaatacccagaggccagatattgtttatcggggtcgtctgattctatgatcaggctatgggaacttggtcagcaacgctgtgtgcattcatatgctatgcatacggattctgtttgggcacttgcaagcaccccaacctttagtcatgtttatagtggtggtagagatctttctttatatttgacagacttgacaactagagagtcttttgctttgcacaaaggagcatccgattttgcagctggcattgcatgatgatagtatatgggttgcaacgacagattcttcggttcatagatggtctgctgaagg

SEQ ID NO: 227701 - DNA, 466 bp, Gossypium hirsutum
cccacgcgtccggttgaaaactacaagagatatgccgagaggttggagcctttcattgctgatagggtgcacctaatgaatgaatcgattgcacagaagaagaggatattggtggaaggaggccaagctactatgctcgacattgatttcggtacttatccttttgtaacttcctccagtccatcagctggtggaatctgcactgggctcggtattgctcctagagttgtgggtgatctaattggagttgtgaaagcatataccacaagagttggctctggtcctttcccaaccgaaatccttggtcaaggtggtgatatccttaagtttgccgggcaagagtttggcaccacaactggcccgcctcgttcgtggggttggctcgatgtagttgctctcaagttcttgtgtgagattaacggcttttcttctctaaaccttaccaaattggatgttttatctgatc

SEQ ID NO: 227702 - DNA, 408 bp, Gossypium hirsutum
  unsure (1)..(408): unsure at all n locations
acttcttcccttccattttactttgttttagttgccataacgtcaccttccaatacaaccgacagtgaggcaacaatatgtcttcactactctcacgttgctcatcctgttttccctcagttgttcaacaacattagcccaatctccggcactggccccggcaccttctggcccgacaaacgtcaccaagatcctcgaaaaagccggtcaattcaccctcttcattcgtcttctaaagtccactcaagtggccaaccagctgctcggtcagctcaacaattccaacaatggtatgaccgtttttgcaccaacggacaatgctttctccagccttaaatcgggcacattgaattcactcaccgatgaacaaaaagtgcagctggtgcaatttcacatcgtnccaacata

SEQ ID NO: 227703 - DNA, 472 bp, Gossypium hirsutum
cgtccgatgacttgtatagggaaatgattgagagtggtgttattaagctaggtgaaaagcaggctggtgggaggtgtgctcttgtttatggtcaaatgaatgagccccctggtgctcgtgctcgtgttggccttactggtctgactgtggctgaacatttccgtgacgctgaagggcaggatgtgcttctcttcattgacaacattttccgttttactcaagcaaactctgaagtgtctgccttgctaggccgtattccatctgctgtcggttaccaaccaaccttggctactgatcttggaggtcttcaggaacgtattaccaccaccaagaaaggttctatcacttctgttcaagccatatatgtgcctgctgatgacttgacagatccagctcctgcaacaacctttgctcacttggatgccacaactgtgttgtcccgacagatctctgagcttggtatttatcctgc

SEQ ID NO: 227704 - DNA, 458 bp, Gossypium hirsutum
cctcatctatgatggctaagtgcgatccacgccatggaaagtacatggcttgctgtttggggtggcgtggtgatgttgttcccaaggacatcaatgctgcagtcgccaccattaagaccaagcgcaccattcagtttgtcgattggtgtcctactggattcaagtgcggtatcaactaccaaccacccactgttgtccctggtggtgatctcgccaaggtccagagagctgtttgcatgatttctaactccaccagtgttgctgaagtcttctctcgcattgaccataagtttgatcttatgtacgccaaacgtgccttcgttcactggtatgttggtgagggtatggaagaaggagaattctcagaggctcgtgaggatcttgctgcattggagaaggattatgaagaagttggtgctgagtcagctgagggtgatgagggtgaagatgatgagtac

SEQ ID NO: 227705 - DNA, 472 bp, Gossypium hirsutum
cggaaagttcattgttgaagccagtgtgaaagagggtcatcccacttttgctttcgtaagagagggttcagtttcagacccagttaagggaaaggttattaacaatttcaagaacttaggggttcatctgttgtatggggatctttacaatcatgagagtctggttaaggcaataaagcaagctgatgtggtgatatccgcggtaggttcgatgcagttagcagatcaagttaagatcattgctgccattaaagaagctgggaatgtgaagaggtttttcccatcggaattcggaaatgatgtggaccgggttcatgctgtaaagccagcaaaaacagcattcgcaaccaaggctcaaatccggcgtgctattgaggctgagggaatcccctacacctatgtgtccagtaactgctttgcaggctattttcttcctggtttgtcacagccaggagccactactcccccaaga

SEQ ID NO: 227706 - DNA, 351 bp, Gossypium hirsutum
gaatctgatcaatcaacacctgaaaggaaaactggcagcaacaactactactaggctactacccagcactagaagcagctcgtagccagccatggatgaagagtacgatgtcatagttctaggaactggtctcaaggaatgcatcctcagcggtcttctttctgttgacggactcaaggttctgcatatggataggaatgattactatggaggagagtctacatcactcaacctcattcagctcttgaagaagtttagaggaaatgataagccttctgctcatttgggctctagcagagattataatgtggacatggtccctaagtttatgatggcaaatggcactcttgt

SEQ ID NO: 227707 - DNA, 468 bp, Gossypium hirsutum
cttccgccaatacggttactggggacattgtattcgtcctgcaacagaaagatcatccggaaggttaaactaaagggtgatgacttatttgtaaagcatacattggcacttactgaggccctttgtggctttcagttcatactgactcacttagatggcagacaacttctcattaaaacccaacctggggaagtcgttaagcctgatcaattcaaagcaataaacgatgaaggaatgccgatttatcagaggccatttatgagaggtaaactgtacattcagttcactgttgacttccctgactcgttgaccccggaccagtgcaaggcactagaggctgtgcttcctcccaaggcatcggttcagctgactgacatggagctggatgagtgcgaggaaacaaccctgcatgatgttaacattgaggaagtgatgcgtaggaaacagactcaagctcaacaagaagct

SEQ ID NO: 227708 - DNA, 452 bp, Gossypium hirsutum
  unsure (1)..(452): unsure at all n locations
ttgtcgcacacaaggtggtcaggagagcaaaactgatcctccccggacactgggaaagggcaccagaaatggctgttggaggttttggcggcgtcnatggacctgtcagcagcttcaatggcaagatcacagcttcggtggtgatcacctgcattgttgctgcttcaagcggcctcatatttggttatgacattggaatttcaggaggtgtgacaactatgcaaccatttctccagaaatttttcccatcagttttaagaaaagcagcagaggctaaaaccaacatctattgcgtgtatgatagccaagttttaacatcctttacttcttcactgtacattgctggtttagctgcctcactggttgctagccgcctcagtgcggcaattggtcgacgaaacacaatggtcttaggtggtctcaccttccttgctggtgctgccatcaatggc

SEQ ID NO: 227709 - DNA, 395 bp, Gossypium hirsutum
cttctttcaaccgcgcctaataaccgctcggatttttctcagacgtggaaaaaatggggctgtgtgtcgcgcaagctattcagccggctatttgccaaaaaggagatgcgtatactgatggttgggcttgatgctgctggtaaaaccaccattctttacaagctgaagttgggagagattgtcactaccattcccaccatcggtttcaatgttgagaccgttgaatacaagaacatcagcttcactgtttgggatgttggtggccaggacaagatccgaccattgtggagacactatttccaaaacatgcaaggacttattttcgtggttgatagcaatgatcgtgaccgtgtggttgaagctagagatgagttgcacaggatgttgaatgagga

SEQ ID NO: 227710 - DNA, 434 bp, Gossypium hirsutum
  unsure (1)..(434): unsure at all n locations
cttgttccttccttcgccgtctattgctttttgttacctcgatttcaagtgaatcagaatgggggaggaaaagactcacattaacattgtggttatcggccacgtcgattctgggaaatcaaccaccactggccacctgatttacaagcttggtggtattgacaagcgtgtgattgaaaggttcgagaaagaagctgctgagatgaacaagaggtcattcaagtatgcttgggtgcttgacaagctcaaggctgagcgtgagcgtggtatcaccattgatattgccttgtggaaatttgagaccacgaaatactactgcactgtgattgatgcacctggacaccgtgactntatcaagaatatgattactggtacgtcacaggctgactgtgctgtttgattatgattcaccactgtggtttgaggctgtatct

SEQ ID NO: 227711 - DNA, 379 bp, Gossypium hirsutum
ttaagagtggagcttgggacgagaatggtgtttttatttacaccaccttaaaccatgtaaagtgtgccttcccaatggagatagtggaatcatccgaacgcttgaggttcctatatacataactaaggtttctggcaatactatattttgcctggatcgtgatgggaagaataagactatcatcattgatgttaccgaatacgtttttaagctatctctgcttcggaagagatatgatcatgttatgagtatgatacggaactcccagctttgtggtgaggccatgattgcttatcttcaacagaaggggttccctgaagtggcactccattttgtcaaagatgaaaaaacacgctttaatttggctctagagagcggg

SEQ ID NO: 227712 - DNA, 216 bp, Gossypium hirsutum
  unsure (1)..(216): unsure at all n locations
ccggaccgagccggccgaatttttttcattcgtttcttctcaccctcaattaccttacaaaaaaaaaaaataaccacatgtgaccgaactgttatcgaggaatactcaaaatcanttgaaaaggccaagaggaagctcagaggtctcatcgctgagaagaactgtgctccactcatgctccgtttagcgtggcactcagctggaacttttgatgtt

SEQ ID NO: 227713 - DNA, 475 bp, Gossypium hirsutum
gcgtccgcttgttttagcttgtgatgggatttgggactgtatgtcaagtcaacaactagtggattgggtaggagagcatttgaactctgaaactaaactttcagcaatctgtgagagagtattcgacaggtgcttggctccaacagctggtggggagggatgcgacaacatgacaatgattcttgttcagttcaaaaaacctgttggttcaggtacttctttgagcagcacccagcattgaaagatcgagcacccacgaaccaggtaaaacgtacatttggattttggaccttaagaagcattagtctcttctcccaagcaaacacgtaatgaatattacactttcttattatgtaagtgatttgcggtttatgatttgtaaatgatccaaggttttttatttcgcgactccgctatgtcgggtttttcattttgtaaatatggtggtaattggtatgtttttcctttgaaatgt

SEQ ID NO: 227714 - DNA, 364 bp, Gossypium hirsutum
gggaacttgaagatgtatttcgatgcaaccatcgagatagtgacttctaaagatgtaagggtctgtggagccctcggaccttgcatctctcttcggaaaacaaataatttggtgagcgagaatgagatcggggatggtggtacatatatatggaagctgggtacacttactagtaaaacatgtattgctttcttcttccaagtaaactatgagcataaacctcaacccggcgctgcgttcttggtacagttcataacacgctatagagatgggaacatgggaattcgaagacgggtgacaaccgctgcaagaagatgggttgcaaagcagtcaccagatattcgtgccgggtttgatcaggaag

SEQ ID NO: 227715 - DNA, 454 bp, Gossypium hirsutum
gcgtacgcaaatatggaaaactgtatgagaatcctggcaggtgtgcttttagcgattctaatttttcatttggacttgagctttcggctattatcaaggatgattcactttgtacttttaattagtcgacaagggaaagttaggttgacaaaatggtattctccttattctcagaaggaaagaacaaaggttatccgtgagctcggtggggtgattctcaatagagggccaaaactctgtaattttgtggattggagaggatttaaagttgtttataaaagatatgctagtctttacttctgcatgtgcattgatcaggatgacaacgaattagaggttctagaaatcattcatcactttgttgagatacttgatcgatactttggcagtgtctgtgaattggatttaatctttaacttccataaggcctattatatattggatgaactcttac

SEQ ID NO: 227716 - DNA, 415 bp, Gossypium hirsutum
tttcaacaactttagggtttttcatcttcttcgcccctcctctctagtttcatcgtaaagaaatgtgggtaggtatgatgaccgacgcggtggcactcgtttgtatgttggtcatttgtcttcaaggacaagatcacgtgatctagaggacatgtttagcagatatgggagagtacgtgatgtggatatgaagcgtgactatgcatttgttgaattcagtgatcctagagatgccgatgatgcaagatatgcattgaatggtcgagacatggatggaagccggatgattgttgaatttgccaaaggagtgccccgtggttcaagtggatctcgagattaccctggaagaggccccactcctgggtcaggacgctgcttcaactgtggaattgatggtcattgggctcgtgattgc

SEQ ID NO: 227717 - DNA, 388 bp, Gossypium hirsutum
cttccggaaaccttcattaatatataaattcccattctttcatgtccctcgctgagaaagagctttccgaggttgagtcacaaacgcctgcccaaccccagcccaacccacaccctgtcgccaagaaacgcacccgccaagacaaccactccccgtttcgcggggtacgtaagaggaggtgggggcgttacgtctccgagatacggtttccgggtcaaaagacacggatatggctggggtcgtttgggtcaccggagatggcagctcgggcatatgactcggcagctttcttcttgaaaggcgactctgctatcctcaacttcccggagttagtggggtcacttccccggccagggtcttgctcgaggagggatatacaatccgcggc

SEQ ID NO: 227718 - DNA, 465 bp, Gossypium hirsutum
  unsure (1)..(465): unsure at all n locations
atttcaaaaccagcaaaaacaatggaaataatcgaaacccaaacagctgtttccaatttcgagccgttttacaacatgtcttgttcctcggagaataatggtggtggatttgaaatgtcgtcgttgatcgacggtcgagattattcaggcgagaatcacgcgcacggtggtggtgacggtggggtttttcgccactcgaacgcggcggctgttaaggttcagaaagtgtataggagttaccggacacggcgtaggttagcagattccgctgttgtagctgaagaactctggtggcaggttttagattatgcaaggcttaaccacagcacaatttcgttttttgataatttaaaacctgaaactgctgcttcaaggtggaatcgtgttcttttaaatgcttctaagatccggcaagggtntggctggagatgccaaagcacaaaaattggcttttcacattggatt

SEQ ID NO: 227719 - DNA, 426 bp, Gossypium hirsutum
cccctttcatcccctacttatctcaccaccaatttaggcgtcggctacgccatcgtcgtcggcctcggcttactcctactccggggcactctcctgctcgcttcctacatttgcttccgctcttcctcaccccttccacctcgtgccatttccccaaaccccatttcaacacccaccgccgccaactccgacggtatcgtcctccccaggattggtttcatcggcgaagaagaccatgaaaacgacgaggaaaacgtcgtcgtctttgggcttgatcgtgccgtcataaactcttaccccaagttccggttcagcaaaaaggaggtgtctacggcggtggaggtgacgggttctagtgctgggaacaccatttgttcgatatgtttgtgtgagtatagagaatcagagatgttgaggatgatgcct

SEQ ID NO: 227720 - DNA, 468 bp, Gossypium hirsutum
agaaggggttccctgaagtggctctccattttgtcaaagatgagaaaactcggtttaacttggctatagagagtgggaacattcaaattgctgttgcatcagctaaggagattgatgacaaggatcactggtataggttgggtgtggaagcccttcgccaaggcaatgcaggtatagttgaatatgcctaccagaggacaaagaactttgagaggttgtcttttctttatctcataaatggtaacctggaaaagctgtccaagatgctgaagattgcagaagtcaagaacgatgttatgggccagtttcacaatgccttgtatcttggtgatatccaagaacgtgtaaagatcttggagaatgctggtcatttgcctcttgcttatgttacagcatcagtccatgggctacatgatgttgcagaaaggttagctgctgagttgagagatgattgtcctttttttccgg

SEQ ID NO: 227721 - DNA, 420 bp, Gossypium hirsutum
cctgcacgctaccggtgaaaaattggggggacgacccacgcgtgcgaaacacgaagttcaaagaactcccttttaagttaacagttcctttttggagtcctataatgggtaaggagaaggttcacatcaacattgtggtcattggccatgtcgactctgggaagtctacaaccactggtcatttgatctacaagcttggtggtattgacaagcgtgtgattgagaggtttgagaaggaggctgctgagatgaacaaaaggtcatttaagtatgcatgggtgcttgacaagcttaaggccgagcgtgaacgtggtattaccatcgatatttgccctctgaagtttgagactaccaaatactactgtactgtcattgatgcccctggacatcgtgacttcatcaagaacatgattactggta

SEQ ID NO: 227722 - DNA, 387 bp, Gossypium hirsutum
aattgtttgagctagctagctcttactcaaatggcaaccaaaacgatgatgttgcaaatatttccacttttcttctttttgttcagtgtctgcaactccattttccttggtgctaatggagatgacaatggtggttggcaaactgcccatgccaccttctacggtggtgctgatgctaccggcacaatggggggagcttgtggttatggaaacctgtacagtcaagggtatggaacgagcacagcagctttgagcactgcacttttcaacaatggcttgagctgcggtgcctgctacgagctccggtgcaacaatgatcctcaatggtgcattagtcgaaccataaccgggacagccaccaacttttgtccacctaactatgcttta

SEQ ID NO: 227723 - DNA, 447 bp, Gossypium hirsutum
cccacgcgtccgataacaataattctctttctgtttctctggtttaaacatgggtatgggtttaaggaatggatttcttttgattctatcttgtgttgttacactttccctctcagttttggggcgacctgccactttccttgaagattttagaatcacttgctctgattctcatattacgcaaatccatggagggagagccatccacctcgttctcgaccaaaattcaggctgtggatttcgcttctaaacggcagtatttgttcggacgtgtcagcatgaaaatcaagctcatccccggcgactccgcctgaacagtcaccgccttttatatgaattctggtacagatgctgtgcgagatgagctagacttcgagctcttgggaaaccgtaccggtcagtcatatacggttcaaaccaatatctatgcccatggaaagggtgaca

SEQ ID NO: 227724 - DNA, 429 bp, Gossypium hirsutum
gaaggtttagttttacaaacatggctagttccggtgtccttaagttggtttccatgattctcatggtgtgcatgacgatgatgagtgcacccaaggcagccaaagccgccatcacgtgcagcgacgtggtgaaccacttgatcccgtgcttgtcctacgtacaaaacggcggtacacccgctgctgcatgctgcagtggggtaaaagcactctacggcgaggttcagacctccccggaccgccaaaacgtgtgcaagtgcatcaaatcggcggtgaacggaattccgtacaccagcaataacctcaatctcgcagccggcctacctgctaaatgtggtctccaactcccttacagcatcagcccctccactgactgcaacaaggtgcagtgaggttgatgatgatgatatggaaggagtggaagaggtt

SEQ ID NO: 227725 - DNA, 461 bp, Gossypium hirsutum
cccacgcgtccgaaagggcgttgcaacaattatgacatcctattctagctggaatggaaaaaagatgcatgctaatcacgatcttgtgaccgacttcttgaaaaacaagcttaagttcaggggtttcgttatatcagattggcagggtcttgataggattacctctcctccacatgctaactactcatattctgtagaagctggagtcggtgccgggattgatatggtcatggttccttataacttcacagaatttattgatgacctaacctatcaggttaaaaacaatatcattccaatgagccggattgatgatgctgtaaagcgaatcttgagggttaaatttgtgatgggtctctttgagaatccaatggctgataacagcctggtcaaccaacttgggagtcaggaacatcgggagttggcaagggaagctgtgaggaaaagtcttgtcctactga

SEQ ID NO: 227726 - DNA, 429 bp, Gossypium hirsutum
ttaattctaactttgtcttctctgatttcataagaaagtaagaagatatccatggacccttcagagcttaggtattatgaggatgatgacactccaacaatgaaaacaatcaagggcgcaactacaggttttgttgctggaactatctggggaactgttgttgctacatggtatgatgtgcctcgtgttgagagaagtgttgccctacctgggcttgtaaggacactgaagatgatgggcaattatggaatgacatttgctgccattggcggagtctatattggtgttgagcagctgttgcagaattataggatgaaaagatcctttgtcaacggtgctgttggtgggtttgtggctggggcttccattcttggtttcaaaggcaggagcatctcaacagctatttctgctggaacagcactggctttc

SEQ ID NO: 227727 - DNA, 483 bp, Gossypium hirsutum
aattctctggcctccttactatcttactccttttctcctccttttcatctttttcaacaatgtcgaccagcgaaacctcgttttcgccgacgatgccctgattgaaacccaatgtcacaatgctgaagtccccgaaacctgcataaaatgcataaaatccgatcctcgaagtcaatctgccgataaagtaggcattgcagccatcatcataacttgtctaagcaacaaagccacgaccttgataaacaacatgacgactcttgcttcgggcgctcgcgacaagtacttgaaattggctctttgaggttgcgggaaagggttttactatgcaaaaaccaatctgactgttgcgacgaaccgattgaaggggaaagaatatgatcaaacgaatcttctggtgaaacaagcgctcgaagggagagttgtttgtaagaatgaatgtgcggctttacggtttaactttccaaatagtgtcacgtttgg

SEQ ID NO: 227728 - DNA, 298 bp, Gossypium hirsutum
  unsure (1)..(298): unsure at all n locations
gaaaaacccggnccgccccacccgtccgcaagaaccgtcgccttcattgcttatacaccacttatatgtaattctattgcttgcaagatggggcgccatattgtgggaattctcagagggtttatatatgatcagtgtttggcctgattccttactccttgttgcaatttatggtgttgtggaatcatcctttactgcattatttggtccaatcatagtacgatggctggataggctaacatatgtaaaggtgcttcaactatgtatggtaacccataatctctccttcatacatgct

SEQ ID NO: 227729 - DNA, 460 bp, Gossypium hirsutum
tgagggtgtcttaataaacgccttcgatttactttcggtttccatttacttctttatttctacgtttttgaatttttagtaagcgaaaatgagagagtgcatttcagttcacatcggtcaggctggtatccaagtcggaaatgcctgctgggagctttactgccttgaacatggaatccagcctgatggccagatgccaagtgacaagactgtcggaggaggtgatgatgcttttaacaccttttcagtgaaactggtgctggaaagcacgtccctcgtgctgtctttgtggatcttgagcctactgttattgatgaagtgaggactggtacttaccgtcagcttttccaccctgagcaactcatcagcggcaaggaagacgctgccaacaacttcgcccgtggccactacactattggcaaagagatcgttgacttgtgcttggaccgtatcaggaagc

SEQ ID NO: 227730 - DNA, 299 bp, Gossypium hirsutum
gaaaaatcggacacggctactactctgaagatatgtatgctggagaggatggtcagctttcatggtttaatgctggtgttagagttggggttggaattggccttgggatgtgccttggggttggaattggagttggactgctaatgcgatcatatcaagcaactacccggaactttaggagaaggtttttctaagatagatcccatcactttgcagtgtgacgatgtcctcttttaattacgaagaagttaaaaggaaaatgaaattcacgattctttgtagcattcttagtagatttt

SEQ ID NO: 227731 - DNA, 478 bp, Gossypium hirsutum
attttgggtttaaaatatctgtcctttttttttatgaacaaagaaaactcatccaccacaaggtttagggaagaaccaacatatttggatttttgagttgctgaaagtctcaggaaagaacaagtttaccttcttcagcttgtgatgagataattgcctttgatcctgatggccaaagagtacagtggatcaccaaagcatcatcatcgactcgaagtgcagaggaaccgcctcacttggattctaggggttagtttcctctgcatattgttttatatgttgggagcttggcagcgttcttctacccccaccactactcaatttagtgcatacaataaaggtggctgtgatagtcatgttactacatccgacaacggcaatgctgcagttggtcatccatcatcaaccaacttggactttgcaagccatcatcaagttgtgcttaacagttctaaaacagtcaatcagttcccatcat

SEQ ID NO: 227732 - DNA, 392 bp, Gossypium hirsutum
gccccaaagcaaaaaagttctcatcttttacaatcacagctactgcttatttattttcatggctcaaggagattctaacttccagcaagacatggctaaagaggaagaagaacagaggctgaaatacttggaattcgtgcaagtagccgccgttcacgccgctttgtgcttcaccaacctttacctttacgctaaggaaagatcggggccgttgaaacctagcgtcgagaccgttgagggaacggttaagtgcgtggttggaccggtttatgataaataccatgatgtccctgttgaattccttaaattcgttgattccaaggtgggtgaatcagtgaccaagcttgatcgtcgagtccctccagtcatcaaacaggtctcaaccgaagcca

SEQ ID NO: 227733 - DNA, 431 bp, Gossypium hirsutum
gaacaacaagcttttcttaatactaaaattttaacgctttcctttccttcgtctttcctttgctttcctctgtgtgatttttaataaaagggaaacgagaaggaaaaatgcaggcaatttctcaagtgcaaaatcttaattcgtaccttataattcgccggtcgaagcctcggtttgataagccggttcggttagctgtacctgtacgttgtgtgtatcactctgattcagttccattccccaatggagtccgttcaagccgggtggattggcaaagctcgtgtgctattttgtctagcaaagtcttctctcaggatcaagattccggtgagaaatcgaacactttctccgcctccgatcacctggcggcggcagttaacggccataaaacttccttggatctgaacttaatttcgctagataagaagaac

SEQ ID NO: 227734 - DNA, 429 bp, Gossypium hirsutum
  unsure (1)..(429): unsure at all n locations
cccacgcgtccgaagcaaagcattagcaaccatagccatggcttcctcaccaaaactcttctctatgtctatcctcttccttttggccctcttctccatgcaaatccatgctagagagtacttcagcaaattcccaagagttaacaccaatgagaaagagacaacaaccagagagcaagagcacgagaccttcgttccccagaccacccaaaagccagaagagcaagagccaaggttcatccctgaaacccaaaatggttatggcctttacggccacgagtcaggctcaggctcaggctcaggctcaagccggcccagtttcaccaccaaagaaacctatgaaccctatgtcacccctgttagattccaccctgatgaaccctataacagcattccccgatcctncaacaataaagacacttactacta

SEQ ID NO: 227735 - DNA, 418 bp, Gossypium hirsutum
aataaatcaccaaacttactataaatgagaaaccaatgtaaggtgtaacacacgtacaagcatgtaccaggacatgaattattgctttctttttatatttgtaaaatatagagaactgaaattctagaaaataaaaaatcaaaaggacaaattgtggttttctgtagtaatttgaaatcaggcagctgtcttgagtttctttgtgattccggcaatgtacttcccttggtggaaagcttgcgccaacttgagttcggatggcattcttgttccgtccccagcataggttcctgctccgtaagggcttccacccttcacttgctccatctcaaacatgccagcaccaaagctgtatccgatgggaacaaatatcatcccgtggtgaacaagctgagtgattgcagtcaacggtgtagtt

SEQ ID NO: 227736 - DNA, 461 bp, Gossypium hirsutum
cccacgcgtccgcaactttccaatctatctctttccttatgatttgattcgtggacataagcgatgaagcctgtagatctcactcttcgttccatagctaccaccaccaccaccactgcgtgaacccccatctgagcccagaacctttgaagaaggatttcaatattccctaccctttaattctcacggcggacgaaaatgagcgcctcgagattcataaagtgcgtcaccgtcggcgatggagccgtcggaaagacctgcttgctgatttcctacaccagcaacactttccctacggactatgtcccgactgttttcgacaatttcagtgcaaatgtcgtcgtcgatggcagcactgtcaacttaggtttatgggacactgctggtcaggaggattacaatagactacgaccactgagctatcgtgggctgatgtgttattctggcatttctctcatcag

SEQ ID NO: 227737 - DNA, 484 bp, Gossypium hirsutum
cgtccgtagttctaagatcgcgggcgttttttcgcgatttatttaggtgtaaaaagaaaacaaggaagacgtccctacagatctcggatcggggagccaaatcgaactaactcaaagtcagagaaaagggaagatgttaccaacggtgagcaaaacgcgttccacgccctccacatctcgacctaactccatgttcccccagtacctacgtcgaattgtcaagtggcaacaaatggatattgaatatactttctggcaaatgcttcacctatgtactgcaccaaaggttgtctatcagcacacaaaatatcacaaacaaaccaagaaccagtgggcacgtgacgaccctgcttttgttgtaatctgtagccttcttttggcagttgcaacaatagcttattgtgctgcgtatgatcacagtgctgcacatgctgtttttgtagtatttcagtattgcttttccatttttaacttactggagtat

SEQ ID NO: 227738 - DNA, 484 bp, Gossypium hirsutum
  unsure (1)..(484): unsure at all n locations
gaaaatttaataaattaataaagctctctgattttcttctttttttcgtcctcttccgcttccttcccttctttattcctttgtcctctttctttgaatgtttcagttcctgtctgtttcacctcataatccctcgtttttcctttcagtttccaagaaatttctgtagggttttccttagctgggcataaaaaagatgggtatatatctcagcacccccaaaactgaaaaattctctgaagatggcgagaatgacagggttagatatggtttatcatctatgcaaggatggcgtgctactatggaagatgctcatgctgcataccctgatcttgatgcttctacttcgttctttggtgtttatgatggtcatggaggcaacgtggttgcaaagttctgtgccaaatatcttcatcagcaggttctcaagcatgaagcatatgcagctggggacataggaacatcacttcangaagcatttttc

SEQ ID NO: 227739 - DNA, 381 bp, Gossypium hirsutum
cccagcccaacccacaccctgtcgccaagaaacgcacccgccaagacaaccactccccgtttcgcggggtacgtaagaggaggtgggggcgttacgtctccgagatacggtttccgggtcaaaagacacggatatggctggggtcgtttgggtcaccggagatggcagctcgggcatatgactcggcagctttcttcttgaaaggcgactctgctatcctcaacttcccggagttagtggggtcactttcccggccagggtcttgctcgaggagggatatacaatccgcggcggccaaagcggctttggaggaaccggtgggcagggtaaaagatgaggggggttcggaaagcatctggtggtgggatgatgaggggatgg

SEQ ID NO: 227740 - DNA, 482 bp, Gossypium hirsutum
gacaattttgggggggggtttttattggacttaaaattttctgggttcaagagcaatggcgacaacagtgtttctacagcagtctggtttattttctttctcttcatttactcacaacagccgccctttaactaaacttttcgatagtagtaccgcaacaattgtccctttctctaaccggcgtcgtttcagagttgtttctgactctgtttctgtatctgctctgcccactgttcgtggaaactcaagttcatcagttggttcaattaacgagttgattgagtgtttgattaatcgagttgatttaacggagtccgaggctgaggcatctcttgagtttttgttaaccgaagctaatgaggctttgatcagtgcttttcttgttttgttgagggctaaaggcgagactttttgagaagttgtgggattggcgagggcaatgttaaagcatgcttggaaggtagaagggttaaatgatgctg

SEQ ID NO: 227741 - DNA, 462 bp, Gossypium hirsutum
cagaaaacggttacttccttgcaactgctgctcatgatggtgttaagttgtgggatctacgcagattgaagaactttcgatcttttgaattatatgatcaagacacaccaaccaactcagtggattttgaccatagtgggagttaccttgcaattgctggctcagatataagagtttaccaagttggcagcgtaaaagctgaatggaattgcatcaaaactttacctgatctgtccggcacaggtaaagcaacttgtgtcaaatttggtacagatgcgaagtacttggcagtgggatcaatggatcgcaaccttcgcatatttggccttcccgaaggtgatgatgcttcaacagaatcataaaaagagatcccttctgttcatatatgataagttgcgactgctcggtttcgtggttaaagtagaactgtcagattttgaggtgggtttaaatcttttagtc

SEQ ID NO: 227742 - DNA, 475 bp, Gossypium hirsutum
ggttgagtgtagagatgaggaaaatcatgggtgccaaagttcttttcttctttgctttgctttccttttcagctgtctcggcatttgcacaggatgaggaagaccaaggtcttgttatgaacttctacaaggattcttgtcctcaggctgaagacattatcaaggagcaagttaagctactgtacaagcgacacaaaaacactgctttttcttggctgagaaacattttccatgactgtgctgtccagtcatgtgatgcttcactgctgctggactccacaagaaggagcttgtctgagaaggagacagacaggagctttggcctaaggaatttcaggtacattgagaccatcaaagaagctgtagaaagggaatgtcctggagttgtttcttgtgctgatatccttggtctgtctgctagggaaggcatcggttcgttgggaggcccttatattcctttcaaaactggaagaag

SEQ ID NO: 227743 - DNA, 402 bp, Gossypium hirsutum
  unsure (1)..(402): unsure at all n locations
cccacgccgtccggaacgatctgtgcttcaactttttatttattactatcagcacataacnaacgccgcgataatctataaaacgacgcaccgcgcactaataaatattattatttaccccccaccaccaccatcattaagttgctctataaccttttaaaaaaatcattttacacaacatacttatttcttaatatatttcacctatactcttcctttacacaacacacttaactctgatatttcacacaagccacatttccccctcccctcacacatattctgctgttgcccttcttggtattgcttgggccttttgtggcatgatcttcatccttgtttactgcactgctggtatttctgccggtcatattaacccagcagtgacatttgggctgtttt

SEQ ID NO: 227744 - DNA, 416 bp, Gossypium hirsutum
gtgttatccaagatatggacaacaagtactccaaggttacatgggttgaacactcggaatatgatgagagcacagtccaccatctctttcgccccttactcagttctggttttggctttggtgcacaaaggtggattgccactctccgaagacagtacagcagcttggcacaactaatgtcccctgacatccacggtgaagacattaatacagtggggaagaaaagcatgttaaagcttgcacagcgcatggcatacaacttcagtgctggaattggtgcttcaagtgtgaataaatgggacaaacttaatgttggtaatgtgggtgaagatgtaacggtgatgactcggaagaatgtaaatgatcctggtgagcctctaaggatggttttgagtgctgctacttttgtttggatg

SEQ ID NO: 227745 - DNA, 447 bp, Gossypium hirsutum
ctcttcctctctactatttccttctttaagctaatttcttagtttcttgctagctaagcatggcaaaggaaggagagaacagcactttccatgccagggattatgttgaccctccaccagcaccattgattgatgcttcagagcttaagaaatggtcattttacagagcattgatagctgagttcattgcaactatgctcttcctttacatcacagtcttgactgtgattggtcacaagagccaagttgccacctcccctgacgcatgttctggtgttggccttcttggtattgcttgggcctttggtggcatgatcttcatccttgtttactgcactgctggtatttctgggggtcatattaacccagcagtgacatttgggctgttttggctcgaaggtctcattgatccgagccattgcatacatgggggtcagtcgtgggagc

SEQ ID NO: 227746 - DNA, 434 bp, Gossypium hirsutum
  unsure (1)..(434): unsure at all n locations
cccaaatacaccaaacatgaacaacaccatctctttaactctgcttcacattgcattttgcttcactttagtttcattcactcctatttcagccctggaattgcacggaactggtgccaacatggtcgaaacaacctgccaaaagacacccttttacaatctatgcgtctcggctcttaaatccgaccctcgaagttccggtgccgacgtagcggggctagcgcaaatcggaactgataaactgaaggccaaagccaccgcaacgctgcggcagatcacagcgctgcttaaagtggccaaagatccgaagctgaaaatggccttgcgtgactgtgctgattattacaacgccattgttaaatacgatatcccggtagctgtagaagctgtcacgaaaggcgaccctaagttcgtgtcgagggggcgacngatgc

SEQ ID NO: 227747 - DNA, 464 bp, Gossypium hirsutum
cccacgcgtccgcccacgcgtccgctccaagcaagcattttccttacaagtttgtttttcttgtgattaatcgatatggctagctgaatgtcccttaagcttgcatgtgtggcggtgttgtgcatggtggtgggtgcacccctggctcaaggggccgtaacctgtggtcaagtcacaagctccctcgcaccctgcattggttacttgacagggaatggtgctggtggcgttcccccaggttgctgcggcggcataaaatctctcaactccgccgcccaaacaacaccagaccggcaagcagcttgcaaatgcatcaaaagtgcggccgccggcatttctggcatcaactatggtattgcaagcggactcccaagcaagtgcggtgtcaacatcccttacaagatcaagcctagcactgactgcaacagcgtcaagtgaagttttggcatggaaagttcaccagc

SEQ ID NO: 227748 - DNA, 401 bp, Gossypium hirsutum
atagcctctcttttggggtttgttttcttgtactgcaattccctaatcagatttaggggacagaggaagctaaacagagcagcttcaatggagtttccaaagaaaaacagtgtaaacaaaactggaagtgagggtgttggcactgcggatattatcatagtcggcgccggtgttgccggtgctgctcttgcctattctcttggaaaggatggacgtcgagtacgagcgatagaaagggacttaaatgcgcctaatagaatggcctgtgaaagtctaataccagggggctacttaaagttaattgaattaagcgttgagggtaaacaagaaaaatcatggatttaaatagtagatgtaatataatggtataatggtatttctttaataaaatacttaattta

SEQ ID NO: 227749 - DNA, 403 bp, Gossypium hirsutum
cccacgcgtccgcccacgcgtccgattctggttgctctgccattcatgtttatttctccaactcattcctctttagctaatggtaatgttaatatattgcctcctaccaatacaagcgataaggtcactttggctctgtactatgaaactttatgcccatattgtgccgactttatcacaaatgaccttgtaaaggtcttcctcagtgatctgtataccattgtcaatctaaaattagtcccttggggcaatgctgacattcttggcgatgaaccccattgccagcatggagaagatgaatgctacttaaatactatacatagctgtgtcatctactactggcctgatgtgaaaaagcaacttgattttattcgctgcacggagcaacaaaactcaaagaaac

SEQ ID NO: 227750 - DNA, 417 bp, Gossypium hirsutum
cggacgcgtgggctttgcagagaggtgaagtgagccagccagccagccagccagccaaccaagcagtcgagctcggaactccgcaaccatgggtcgtatgcacagccgagggttgtaagggtatttccgcatctgctttaccctacaagaggactccaccaagttggttgaagatctcttctcaagatgtggaggagaacatttgtaagtttgcaaagaaaggtttgaccccatcacaaattggtgtcattctccgtgattctcacgggattgctcaggtgaagagtgttacaggcagcaagattttgcggatactgaaagcccacggacttgctcctgaaatccccgaggatctgtaccacttgatcaagaaagccggtgccatcagaaaacatcttgagaggaacaggaaagaca

SEQ ID NO: 227751 - DNA, 471 bp, Gossypium hirsutum
  unsure (1)..(471): unsure at all n locations
cccacgcgtccgcccacgcgtccgcaaaattttaacaatttcagagctgatctctagcttggccgggccataacacccctaatcgctcgctctcgatcagatataaaagagctgtgaattggagttcgaaagatgcctgcacagaaaatagagacaggtcatgaggatgcactccatgatgttgccatggattattatggaaaacgattggcaactgcttcatctgatactaccattaagatcattggcataactggatctagttcacagcaacttgctgttctacatggccataaaggacctgtttgggggttgcttgggcacatcccaagtttggatcaatccttgcatcgtgttcttacgatggccaggtgataatctggaaggaaaataatcaaaacgagtggctgcaggcccatgtttntaatgatcataagtcatctgtgaactccattgcatgggcaccccatg

SEQ ID NO: 227752 - DNA, 472 bp, Gossypium hirsutum
ctatttttaataatcttttcttttcttttcaattaattttccctgctagacaatcacagcttagcgaaggccgaaaaaacgagcgatggcggcggcgacgacgagcagagcggctcggcggatgggagccgaggatgagaagctagtgttcgagacgacggaaggaatcgagccgatattgagtttcgatcagatggggttaaaagacgatctcctccgtggaatctacaattacggctttgaaaagccgtcggctattcagcagagagccgttatgccgataatcaatggccgcgatgtgattgctcaagcccaatctggtaccggtaaaacttccatgattgctctcaccgtttgtcaagtggtcgacaccgctagcagagaggttcaagcgttgatattgtcacctacaagagaactggcgtctcaaacagagaaagtgataaggacaattggcgatttcatgaatata

SEQ ID NO: 227753 - DNA, 448 bp, Gossypium hirsutum
atatttggtttttccggtacttcaccatgccatcattcgatactatcctccttccagatttgggagccatagcctgcctgtcgtgtatcacacattatttcatacgccgtcttctcattaaccccaaacgaacacttccttcgaatacaaaagggtggccgattgagggtgctcttccactcttaagttccatgccccatgtcaaactagccacgttagccaagaagtatggacctgtaatgtacctcaaaaacggaacctgcaacatggtggaggcttcaaccccagatgccgctcgagctttacttaagacccttgacttgaatttctctaatcgaccatccaatgctggggccacccacatatcctataactctcaagacatggtgtttgctgactatcgtcccaagtagaaattgctttgtaaactgagtaaccttcacatgct

SEQ ID NO: 227754 - DNA, 449 bp, Gossypium hirsutum
  unsure (1)..(449): unsure at all n locations
tgccttgaaactacagctatggtctccagttcataaatttgcaggtgaacaggggccatggaaaaatgccagaggcgtttacgaataatatgctgaagaatcttctcctcaatgacaatcaattggaaggatcactgcctcgatcattggccaactgtacttncttggaagttctaaacttggggaacaacaacttaactgatacatttccccattggttagcttcacttccaagtctccaagttcttatcctgagatccaatagattccatggttccatctccaattctatagcttcatcgaacttctccgcactgcaaatcatcgatttctctcaaaacgaactcagtggccctttgcctgcaaattttttccgtaatttgagagcaatgaaagatgcacccaaagagaaactttcagggtcatatttattcaagactgatgctcga

SEQ ID NO: 227755 - DNA, 360 bp, Gossypium hirsutum
cagaaagaaataaaggaagaagaagcaatggccactcttacagtgcccacgacagttccttcggtgtctgaagattgtgaacagctgggaaaagccttttcaggatggggaactaatgagggcttaatcatagatatattgggtcacagaaatgccgagcaacgaaacttgattcgaaaaacctacgctgaaacctatggagaggatctcctcaaggcactagacaaggagctctcgaatgactttgagaggctggttttgctttgggctcttgatcctgctgaacgtgatgcccttttggctaatgaagccaccaaaaggtggacttcaagcaatcaggtccttatggaaatagcttgc

SEQ ID NO: 227756 - DNA, 484 bp, Gossypium hirsutum
gattatcaatttgaagccttcttcgaatttcctcattcaagatgcaaattttcgtcaagaccgggaccgtaaagaccatcacattgcaggtggagagttctgatactattgacaatgtaaaggccaagattcaggacaaggaaggcatccccccagaccagcaaaggttgatcttcgctggtaagcaacttgaggatggccgcacgttggctgattacaacatccagaaggagtccacactccacttagtgcttcgcctccgtggaggaatgcaaatttttgttaagactttgactgggaagaccattacattggaggtagagagttcagataccattgataatgttaaggcaaaaattcaagacaaggagggaattcctccagaccaacagaggctgatttttgctggtaagcaactggaggatggccggaccctggctgactataacatccagaaggaggccaccctacacttggtgcttcg

SEQ ID NO: 227757 - DNA, 426 bp, Gossypium hirsutum
aaaaggttttcctctccttctctgattttctctgcatttttcttcgcccgatttcctatttctttttctttgaaatggataccaagattggatcacttgacaactgcaagcctgcttccaacgacgtttgctctccggtaaacggcaccgtttccaccattcaaggttccgtttaccccgccgttgtcaactgctctgaagccacactgggccgccacctggctaggcggcttgttcagatcggagtgaacgatgttttctctgttcccggggatttcaacttgactttgcttgaccatttgattgccgagcctgggcttaacctcatcggctgctgtaacgaactcaacgctgggtacgcggctgatggttatgctcgatcacgtggcgttggtggctgcgttgtcacattcacccgtggtgggc

SEQ ID NO: 227758 - DNA, 452 bp, Gossypium hirsutum
  unsure (1)..(452): unsure at all n locations
cggacgcgtgggcggacgcgtgggtttggattcataaaagcaatccatcaaaatgagttatataagctgagataacgaaaaatagggttttgaaatctttcccaggtttaccagcagtctgctctctttctcttttgtagctaaccagcagagagcttcaaccatggccgtcgggaagaacaagaggatttccaagggaaagaagggaggaaagaagaaggcagctgatccatttgctaagaaagattggtatgatatcaaggctccatcagtttttacttccagaaatgtggggaagactctcgttacccgtactcagggtaccaagattgcttcagaaggactcaaacaccgtgtgtttgggtttcattggctgatcttcaaagcggggatgaggatcatgcttacagaangattcgtttgagagctggagatgttcaaggaaaagaatg

SEQ ID NO: 227759 - DNA, 136 bp, Gossypium hirsutum
tcccggcacgacgcacgcgaaatcctatggccatgtgatcgagaggtactactctcgcatgacgcttgatttccacaccaacaagaagatcatcgaagaagtggctatcatcccttccaagcgtctccgcaacaag

SEQ ID NO: 227760 - DNA, 370 bp, Gossypium hirsutum
aaaaaaactgtccccccttaatttaaaggtactatttttttatgacccttgattcgcacaccagggtgaatatcatcgaggaagcggcggtgaaccctaccaagcgaatccgcaacaagatcgccatctgttacacccatgtgatgaagcggatccagaagggacaccgacgtggcatctatttcaagctccaacaagaagatcgagaacgtcggatggatttcgtactcaacgtatccaccatcaagcttgatcaaatcgaagtcgataaggaaactctcgatatgatctcagttctcgggatggctgatattgccggccttgttaaccacgatccgcttgctatcgcagttccccaaaccatgatcgg

SEQ ID NO: 227761 - DNA, 385 bp, Gossypium hirsutum
  unsure (1)..(385): unsure at all n locations
ccgtacgaaatactattcttaaggtttagttttacaaacatggctagttccggngtccttaagttggtttccatgattctcatggtgtgcatgacgatgatgagtgcacccaaggcagccaaagccgccatcacgtgcagcgacgtggtgaaccacttgatcccgtgcttgtcctacgtacaaaacggcggtacacccgctgctgcatgctgcagtggggtaaaagcactctaccgcgagggtcagaccttcccggaccggcaaaacgtgtgcaagtgcatcaaattcggggtgaacggaattccgtacaccagcaataacctcaatctcgcagccggcctacctgctaaatggggtctccaacttccttacaacatcaacccct

SEQ ID NO: 227762 - DNA, 460 bp, Gossypium hirsutum
cccacgcgtccgtttctttggaaactcggcttctttaagctattaccaataatggagttccagatatccttattccagctcctcatcagcttcctcctgtttttgtttatggtaatcacaagtgtaaggagatcaaaagctaagaatttaactcaaaagttgattccagggccatggaaattaccattgataggaaatctgcaccagctcgccgcttctggtctaccccatcgcaccttacgtgacttggctacgaaacatggtggcttcatgcatctgcaactcggtcaagtttccaccgtggtcgtttcttctccagaaatggctgaagagattatgaaaacacatgatatcgtctttgctaataggccttttcctggtgtggccaagatgacaacttatgagtgcactgatattgtctttgcaccatatggaacctattggagaaatctgcggaaaa

SEQ ID NO: 227763 - DNA, 447 bp, Gossypium hirsutum
acgcatgggcttatatttcagtttgctttgctttgctgcatctcattctcacttcaccttttttttttattgtctggatcatcggaaagaaattaaagaaccaatcatgaagcttgacaccagcggactagaatcggctgctcctgtctggggtgctcccagtgaacttgttgacgggttttcggctgctccgtcgttcgatctcccaaacactactgattttgatgggtttcaaaaagaagctatccagatggtaaaacctgctaagggtaccaccacgctagctttcatctttaaggaaggggtcatggttgccgctgattctagagctagcatgggaggctatatctcttcacaatcagtgaagaaaattattgaaatcaatccttacatgcttggaacaatggcatgaggagctgctgacttgcagttttggcacagaaattt

SEQ ID NO: 227764 - DNA, 430 bp, Gossypium hirsutum
aaagaaaacatgtctcttgtgacagaagagataaaagcgagtgcatcagagatttaccatggagatgagatatgccaggagaaatccaagtttttgttggaggaagtaggcatgccaagggggcttttgccacttagagacatcgaagaatgtgggtacgtgaaggacacaggtttcgtgtggctcaaacaaaagaagagcatcacccacaggttcgaaaagatagggaagctggtttcctatgcaactgaagtcacggctgtcgttgagaaaggcaagatcaagaagctgactggggtgaagaccaaagagcttttggtttggatcacactgagtgatatccaagtggatgatcctcccactgggaagatcactttcaagactccttcaaggctgtttaggactttccctgtatcagcttttgagaatg

SEQ ID NO: 227765 - DNA, 458 bp, Gossypium hirsutum
cggacgcgtgggttgctatcaagacttatcttggtgtatcactacctgtgcaggtgaaagatattggattcactggagttttcaggttgatatttaaacccctggtgaatgagtttccttggttttggagctgttggtattctttgagaaaaaaaaaaaaggtggatttcaaccttgaagtcattggtggtgacatatgaactattcctggcctttgtaatgctattgagagcacgatacgggatgctattggagattctatcatgttgcctgtcaagaaaattattccaattttgactggagactacagtgattttgagttaaagccggttggaatgccagaggtgaagcttatccaggcacgtgacttgacaaacaaagatattattggaaaaataaatccctatgctgtattatttgtacgccctttaccttgcaggacaaaaaaaagtaaatta

SEQ ID NO: 227766 - DNA, 405 bp, Gossypium hirsutum
ccacgcgtgcggggggaatcctattatcccaccaactacctgcttgtattaaatatccatcctgtaactgagccgagaaagttgttgagtttttacatttcagagttctcaaacaatggtgcaatcaaaccaaaagccccatcttgtattactatccgcccctgctcatctccaacctgttattgagctcgggaaacgccttgtcacttgccaggatgttaaggcaacaattatagttgcctcttttgtccaatcggctccagcggaatcgcgtatggtccaagctgcgttggctacaaaactcttcgatgtcatccacctcccaccagctgacatatgcaacctcgttgaacctggtgataagggaatcacatgactttctgcggacatgcatgtcgtcaagcc

SEQ ID NO: 227767 - DNA, 459 bp, Gossypium hirsutum
  unsure (1)..(459): unsure at all n locations
cgcttactgggaagtggtccccgatgtggccttggtgagctcattcttcctgaaaacgagccaggcagcagtataatgcctgggaaggtaaaccctacccagtgtgaggctatcactatggtctgtgcccaggtaatgggtaaccatgttgctatcacagtgggcggatccaatggccactttgaattgaatgtgttcaagccaatgattgctaatgcactcctgcattcattaagattgctgggtgacgcatctgcttcatttgagaagaactgcgtgaggggaattcaagccaatagggaaagaatttctaaattactgcatgagtctctaatgcttgtcacatctttgaaccctaaaattggttacgacaatgctngcacagttgccaagaaagcacacaaggaggggtccactttgaaggaagcagcattgagcccttgtgtgctcacaagcgaa

SEQ ID NO: 227768 - DNA, 465 bp, Gossypium hirsutum
tctctcctttgttttcccttttgtctctctctctctttttccaaccctaaccctacctcaccaaccaggattcaacatgaagggaggaaaatccaagtcagatactaagagtgccaagctatccgtgaaatccaaagctggaaagaaatcggggaaggctgccaaggatccaaacaagccaaagaggcctgctagtgccttctttgttttcatggaggagttccgtgagcaatacaagaaggatcaccctaaaaacaaatccgttgcggctgtcggcaaagctggtggagataaatggaagagcttgtctgaagctgaaaaggcaccttatgtagctaaggcagaaaagcgggaggttgagtatgaaaagaacatgaaggcctacaataagagacaggctgagggtcccaaagacgaagatgttgagtctgacaaatcaatgtctgaggggaatgatgaggatga

SEQ ID NO: 227769 - DNA, 432 bp, Gossypium hirsutum
ggcgccctgagaatgatcacatctaccactctgagctttttacactgacaaagaagatggctagagcagaatctcagaagctttcctttaccgtaccaatatttgaaccacatcctcctcagtactacattcgtgctgtttctgattcttggttgtatgctgaggctttctacactatatcattccaaaatctaagactgccagaggcttgtaccactcttacagagcttattgatttgaagcctctgcctgtaacttcactcggcaacagcacttatgaatcattgtatagcttttcacattttaatccgatacaaacgcagatctttcatgtcctgtatcacacagataacaatgttctattaggagctcctacgggtagcgggaaaactatatcggctgaacttgctatgctgcacctcttcaataccc

SEQ ID NO: 227770 - DNA, 464 bp, Gossypium hirsutum
gatttctacccagttgggcaaacatggagcttcaattgctattatgggtcgacgcaaacatgtccttcaagctgctgtttctgctcttcaatcccttgggattcatgctgttggctttgagggggatgttcgtaagcaggaagatgcaaaaagagtgattgaatcaactttcaaacattttggccatattgacattcttgtgaatgctgctgctggaaactttcttgtgcctgctgaagatttgtccactaacgggtttcgaacagttatggatattgattctgttggtaccttcacaatgtgccgcgaagcactcgagtatctcaaaaagggaggacgtggaaggaactcaccgagtggaggatcaatcttgaatatcagtgctactttacattatacagcctcttggtaccaaatacacgtctctgcagccaaggcagcagttgatagcattaccagaaact

SEQ ID NO: 227771 - DNA, 439 bp, Gossypium hirsutum
  unsure (1)..(439): unsure at all n locations
cccacgcgtccgaaaagggcggaggttactgcaggtaaacaagcaataccctcttgtttatatgggtggtaactcaagcagccctaatccaagttcattatgcttagagggaactttggatccacatgttgtttctgggaaaatcgtgatatgtgatcgaggaataaatcctagagtgcaaaagggtcaagtagtgaaagatgctggaggagtaaggatgattttgacaacactgcaccanatggggaggagcttgttgcagattgtcacctacttgcagcagttgcagtgggagagatggaagggaaagcaatcaaacattatgctttaacaaatgggaaaccaaccgcaactctagcctgtttaggtaccaaaattggtgttaggccatcaccagtggtggcagcattttcatctagaggaccaaatttgctcacac

SEQ ID NO: 227772 - DNA, 467 bp, Gossypium hirsutum
aacaaacaggcagatcagtttgcgaaaggagaaaacttcgtgaagaaggcacagaaaatgctaaatggttggcgcttgttaaggtctaaatatgaagacgccccaccatttatccgactaagatgctaattgctttaagacatgccaaatcatgaacacaaagctggatcaacttatggaaaaggaggcaaattgcacattggacatcagaccacaagcatgaaacagatcacgcttatgatgatgctgctcattgttataagaaaacagctacaaaggaggctatatcttgcttgcaacacgcagcgaacttgatttgcgatataggaaggctcaacatgggtagaaggtattataaggaaattgctggattatacaagactgaacagaacattgggcaagccatggattattgtgaaaaggctgctgatttcttccaaaatggagatgtgtcttcttctgccaat

SEQ ID NO: 227773 - DNA, 415 bp, Gossypium hirsutum
  unsure (1)..(415): unsure at all n locations
cggacgcgtgggcggacgcgtgcaaaaacaggtgaaaatatctctctcttcactttcttctcttttcaacgcacggtgaaaggcggggaggccgtagacaatctctcttgcgctcttctcgtagaatggatcagattcaacatccaactgtcatgcagaaggtagctggccagctcctttcttctagcatttcccgagattntcaagggtatgatgggtctttcaggaggcctgccctataccaaggacattgtgcatatgggaattattccaatgctggaatgcactatcctattgttccatcaacagctaccgcccattgtgttcaagcccctgcagagaaaggatttaccagctttgccattgatttcctcatggcggtgagttctgctgctgtgtcaaaaacagctgctgc

SEQ ID NO: 227774 - DNA, 461 bp, Gossypium hirsutum
gagcggccgctcgcgatctagacttgaattctactagttttcttctcttccaagcctagccatggttctcgaggcgactatgatatgcattgataactcagaatggatgcgaaacggcgattattcaccctctcgatttcaagcacaagctgacgccgttagtcttatttgtggagctaaaacccagtctaatccggagaatacggttgggattttgactatggcgggcaaaggagtacgtgtattgactactcctactagtgatctcggcaaaatcttggcttgcatgcacggtcttgaaatggggggtgagatgaacctagcagctggaattcagattgctcagctggccctcaagcatcgccaaaacaaacttcaacaccaaaagattatagttttttcctgaagtcccattaagtatgaaaagaaagtcctggagatgataggaaagaaactgaaaa

SEQ ID NO: 227775 - DNA, 443 bp, Gossypium hirsutum
aaaaaaaatctttccagtttctattttctaaaaacaaaactgaaaatgtcttgctgcggaggaaactgtggctgcagctctggttgcaagtgtggcaatggctgtggaggatgcaagatgttccctgacataatagagaagactacaactgagactattgttcttggtgtgacaactcagaaaatgcactttgagggatctgagatgggagttggggttgagaatggatgcaagtgtggagacaactgcacttgcaacccttgcaattgtaaataagagggggggaaaatgaacaacaaagagaagcagagaggcctttgtctttttaactaaataaattctattactttagtatgtatcagcaaatcttcatgaggatttggttcttaattatgtgtaatgtgggcttttctgctatgtcagaatgtattatgatatttaag

SEQ ID NO: 227776 - DNA, 438 bp, Gossypium hirsutum
  unsure (1)..(438): unsure at all n locations
agcggctacgcgagccattgttgctgctgcatgctaatctattttcctccaggaaacccaaaggctgcctcgatccggaaaatttcagagagtttaagcttgtcaagcgccagcagctgagtcataatgtngggaagttcacatttgaacttcctactcctacttcaggtttgggtcttcccatcggacagcatataagttgcacgggcaaggatagccaaagtggaagggttattaaaccatatacacctactacattggattctgatgttggtcattttgaattaggtattaagatgtatcctcaaggaaggatgtcacaccatttcaaagaggtgcgttgtggtgattatccttgctgtgagggtcccaaaggggggttcaggtatcaacctggtaagttagagcatttgggatgattggtgagtctggcattac

SEQ ID NO: 227777 - DNA, 443 bp, Gossypium hirsutum
gtgaaaaggtttaaccaggaagggttccaaggtcatagggagtggttggcggaggtgaattatctgggacagctttatcatcctcatcttgtgaaattgattggatattgcttagaggatgaacaccgtcttttggtgtatgaattcatgcctcgtggcagcttggagaatcatttattcagaagaggtacgtatttccagcctctttcatggagccttcggatgaaggttgctcttggtgcagcaaaggggctagcctttcttcacagtgctgaaacaaaagtgatctatcgagacttcaagacttccaatgtcttgcttgattcgaactacaatgcaaagctttctgatttttggttggccaaggatgggccaacaggtgatcagagccatgtttgtaccagggtcatgggaacctatggatatgctgctcctgagtattt

SEQ ID NO: 227778 - DNA, 374 bp, Gossypium hirsutum
cctacgcgtccgattgggtcttctgcaaaccaaaccatgtctgacctagacaggcaaatagagcagctaaagaagtgtgaacccttgaaagaatccgaagtgaaagctctttgtctcaaggtcatggaaatacttgtagaagagagtaatgttcaaagggtcgatgcccctgtaactatatgtggtgatatccatgggcagttttatgatatgaaagagctttttaaagtaggaggtgattgccctaagacaaattatttgtttcttggagattttgttgacagagggttttactacgtggaaacctggatgcttgtatcgccattgaaagacagatattctgatcgcataacactcattagagggaaccatga

SEQ ID NO: 227779 - DNA, 359 bp, Gossypium hirsutum
tgatcaaaatgggttttattgttttggccttgatggtggtttccgccgcgacggtggttacgggggctgacgagagtggggtagcgaatgagtgcagcaaagatttccagagcgtgatgacttgcttaagctttgctcaaggaaaagcagcgtcgccgtcgaaggagtgctgtaattcagtggcggggattaaagagaataaacccaaatgtttgtgttatattttgcaacaaacacaaacctctggtgctcaaaatctcaaaagcttaggtgttcaagaagataagctgtttcaagtaccatcggcttgtcaattgaaaaacgcttagcgtagtgattgcccaaagctttttgggtta

SEQ ID NO: 227780 - DNA, 458 bp, Gossypium hirsutum
accgattcaagctcttctcaaatcttttttcaattaactctctccaaagatgcagatcttcgtcaaaacccttaccggcaagaccatcaccctcgaggttgagagttctgacaccatcgacaatgtgaagtctaaaattcaagacaaggaaggcatcccaccagaccagcagcgtctcatcttcgccggaaaacagctcgaggacggccgtaccttggccgattacaacatccagaaggaatctaccctccaccttgtcctacgtcttcgtgggggtatgcagatcttcgtcaaaaccttaaccggcaagaccatcaccctcgaagtcgagagctccgacaccatcgataatgtgaagtctaaaattcaagacaaggaaggcatcccaccagaccagcagcgtcttatcttcgccggaaaacagctcgaggacggccgtaccttggccgattacaaca

SEQ ID NO: 227781 - DNA, 460 bp, Gossypium hirsutum; identical to SEQ ID NO: 198962

SEQ ID NO: 227782 - DNA, 463 bp, Gossypium hirsutum
agcaagtcagcagccatcatcaaggatgcactctatgtattgagtgctggaagcggtgactttctccagaactactatgtcaatcctttggttaaccatgcctatactccagaccagtatggctctttccttattgatgccttcacaagattcgtccagaacgtgtatggcttgggagcgaggaaaattggtgttacttctcttcctccgttaggttgcattcccttagcaagaacattgtttggttaccatgagaagggatgtgtgagcaggttcaataccgacgctcagcaattcaacaaaaagctcaacgcagcagcaaccaatctccagaagcaacaccctgatctcaagaatgtggtttttgacatttacaaggcccttcttgatgttgttaataccccttcaaactatggtttcgtagaagcgacgagaggctgctgtggcacaaggactgtagaga

SEQ ID NO: 227783 - DNA, 464 bp, Gossypium hirsutum
gcaactccattttccttggtgctaatggagatgacaatggtggttggcaaactgcccatgccaccttctacggtggtgctgatgctaccggcacaatggggggagcttgtggttatggaaacctgtacagtcaagggtatggaacgagcacagcagctttgagcactgcacttttcaacaatggcttgagctgcggtgcctgctacgagctccggtgcaacaatgatcctcaatggtgcattagtcgaaccataaccgtgacagccaccaacttttgtccacctaactatgctttatctagtgacaatggcgggtggtgcaatcccccacgagaacactttgatttggccgaaccggcattcttgcggatagcagaatatcgagctggaatcgtccctgttatgttcagaagggtgtcatgtgtgaagaaaggaggcatcaagtacaccatgaatggacattcg

SEQ ID NO: 227784 - DNA, 252 bp, Gossypium hirsutum
attcttcaacaaagccatgggtggaggaattgccgacaatcgaaagccttatagactctaaagacttagcgattcgctctgctcaatcccttttccataactcctctacccatctacgctctttccaggattctctaccacaagcatcctctcactataaatcctatgaagatgcttttttcagcaaacttaaagagggggtgatgattgcaaaggaaaaccctggtgcatctgttgggattactttgactg

SEQ ID NO: 227785 - DNA, 420 bp, Gossypium hirsutum
cccacgcgtacgcttgggttgagtgtagagatgaggaaaatcatgggtgccaaagttcttttcttctttgctttgctttccttttcagctgtctcggcatttgcacaggatgaggaagaccaaggtcttgttatgaacttctacaaggattcttgtcctcaggctgaagacattatcaaggagcaagttaagctactgtacaagcgacacaaaaacactgctttttcttggctgagaaacattttccatgactgtgctgtccagtcatgtgatgcttcactgctgctggactccacaagaaggagcttgtctgagaaggagacagacaggagctttggcctaaggaatttcaagtacattgagaccatcaaagaagctgtagaaagggaatgtccctggagttgtttcttgcgctgatat

SEQ ID NO: 227786 - DNA, 142 bp, Gossypium hirsutum
cggacgcgtgggtaacaatgagggaaatccttcacgtgcaaggaggccaatgcgggaaccaaatcggatccaagttttgggaagtgatctgacacgagcacggtgctgatcctaccggaaagtacagttgagatggatcatc

SEQ ID NO: 227787 - DNA, 455 bp, Gossypium hirsutum
ataaattttcttctcgttcccgttagccccccacgaacttaggcaaagcagaggctagagagatgtcggcggcggcggcggcgacaagccgagcgactcgacggatgggagccgaggatgagaagctagtgttcgaaacgacggaaggaatcgagccgatattgagttttgatcagatgggactaaaagacgatctcctccgtggaatctacaattacggcttcgaaaagccatctgctatccagcagagagccgtcatgccgataatcaatggcccggacgtcattgcccaagctcagtctggtaccggtaaaacttccatgattgccctcaccgtttgccaagtggttgacacagctagcaaagaggttcaagcattgatactgtcacccacgagggaactggcttcacaaacggagaaagtgatacggacaattggtgatttcatgaacata

SEQ ID NO: 227788 - DNA, 462 bp, Gossypium hirsutum
cccacgcgtccgcaaaaacaaccagaattcaatggggaagaaagctgtgttgattggaatcaactatccaggcacaaaggctgaactgaaaggctgcataaacgatgtgaagagaatgtacaaatgccttatagaacgctatggattctctgaagaagacatcacggtattgatagacaccgataattcttatgatcagcccacagggaagaacatcagaagggctttgaatgatcttgtgagatcggctgagcctggggattttctgtttgtgcactacagtggccatgggactaggcttcctgctgagactggggacgatgatgatactggctacgatgagtgcattgtcccctgcgatatgaatctcatcactgatgatgatttcagagagttggtggataaagtcccaaaaggtagccgcattacaatcgtatcagattcatgccacagtgggggatt

SEQ ID NO: 227789 - DNA, 464 bp, Gossypium hirsutum
  unsure (1)..(464): unsure at all n locations
caaaaaaacgcatttattttgttatcgcaagagcgaaaaagtgaataaaataaaatatattattttattaaagtttttgtttgggggaaattgagagaaaattttgaaaaaaaaaaaatccaagatgaagatcacatcgttagtagtgctgaagtgcaacccggaaggatccgatccgataatactagcgaacgctaccgatttgagccattttggttacttccaaaggtcaagcgtcaaggagttcatcgttttcgtttctcgaactgttgctaaacgtactccttctggtcagcgccaatccgttcagcacgaagagtataaggtacatgcttacaacagaaatggactttgtgccttgggatttaatgatgatcattatccaanntcgagtgctttttcgcttctcaaccagattctagatgaatatcagaaaaattttggggagtcttggagaaatgcac

SEQ ID NO: 227790 - DNA, 477 bp, Gossypium hirsutum
  unsure (1)..(477): unsure at all n locations
aaaaaaaaaaaaaaataaaaaaaaaaaaaaaaaaattaaattaaaagaaaaaaaaaaaaaaaaaaaaaaagggaaaaaaaaaaaaagggggggggggacaaaacaatgggaagaaaaaaaaaaaaaaaaaaaaaaaaaanggggggggcccttttaaagaacccaagtttacttccccgtgattgcaaagtaatagtttttttttggggccccctaaattaaattccctggccggggtttaaaaacgtggggattggaaaaaccctggggttaccaaatttaatcgctttgaaaaaaatccccttttccccagttggggaaaaaacaaaaaggccccaaccgatcgcctttccaaaaatttgcccaccctaaatggcaaatggacccccccttttaccggccatttaagcccggggggtggttggttacccccaatggaacctttacttttgccagggccttaacccccgttttttt

SEQ ID NO: 227791 - DNA, 470 bp, Gossypium hirsutum
gtaaaatcgaagggttgggtaaggggacaccaggtgttttgaaccggcaaggttttcccggggaccgtaaaggcgacggatcgaacaggagggaaaagaagttcgagccagccgaaccccctgcgaggtgggttcggaggcacgaaaacaaaaaggtccggaaggcggtgctcgactttccacaataaccccactcaggaagtgcaagctacggctgttaaaagttggagcggatcaaggattatttactaatggaagaagagttcgtagccaatcaagaaaggcttaagccccaggaagagaaagccgaggaagaccgatctaaggtcgatgatttgagaggctccccgatgagtgtgggcaatttagaggaactcatcgatgagaatcacgccattgtttccttttcggttggccctgaatactatgtgggcattttatcatttgttgataaagaccaacttgagccc

SEQ ID NO: 227792 - DNA, 458 bp, Gossypium hirsutum
  unsure (1)..(458): unsure at all n locations
ccacgcgtccgattgcttttactcttcatcgaactgttgttagacacaaaactgatgttgaagatttggaggctatctttcacttgtatgtttggggaacttcgctggttatgactgtcatacgttctattggtaatgaccacacgcatttgggagcatggtgttgggcacaaacaggtcgcactggaaaggcagttcatttcataacgttttatgtcccactatggggtgcaattctttacaatggttttacatactttcaagtgatacgcatgctgaataatgccacccgtattgcagttggcatgtcagatcgtgcataccagtttgattcaaggacagacacgaaggctttgaaccgntggggttactatccactgatcctgattggatcatgggcattcggcacaatcaatcgcatccacgattttattgagcctggccacaagatcttttgg

SEQ ID NO: 227793 - DNA, 459 bp, Gossypium hirsutum
cccacgcgtccgccgaggagtttgggaaaccctatctctctctaaatatcaaccgaaaaaagctctcaaaaaactaccctttcttgcccccccctctatctctctcactttctctcattctctttctttccagcctttctacactctttttttccccatcgctcctactgttttcatctgcttcaagtcatggcaggtttggcaccggaaggatcccaatttgatgctcgccaatatgatcagaaaatgactgagttgctccaaactgatggagatgattttttcacgagttatgatgaagtttatgacagttttgatgcaatgggacttcaagagaatcttctgaggggtatctatgcgtatggttttgagaagccttctgcaattcaacaacgaggtattgttccattttgcaagggtcttgatgttattcagcaagcacagtccggaactgggaag

SEQ ID NO: 227794 - DNA, 462 bp, Gossypium hirsutum
gtttctgctaccgtttgggccacttacgttaatcataatgctagggatgtggggttggtctaagaccttcctcttctctttctacaatcttcgttgccgtttgcaccagacatgggtcgttcctaggttcggctttcagtatttcttaccatttgcaacaaagggcatcaacaagcacatagaggaagccatattaagggcggacagattgggggtcaaggttattagcctcgccgctttaaataagaacgaggctctgaacggaggagggacactgtttgttaacaagcatccagagcttaaagtgagagtggttcatggcaataccttgacggctgcggttatccttaatgaattttccaaagatgttataagaagtgtttctaacaggagccacctcaaagctcggtagagcaaccgctctctacctctgtaggaaaagagtcgggttcttatgttgac

SEQ ID NO: 227795 - DNA, 434 bp, Gossypium hirsutum
gagaagccgacgttaccatggttaacgtaagtttttaccgcaactatgggaagacctttaagaagccacgacgtccgtatgagaaggaacgattggatgctgagttgaggcttgtaggagagtatgggctccgatgtaagagggagctgtggagggttcagtatgctttgagccgcatccgtaatgctgctagggaccttctcactcttgatgagaagaaccctcgtcgtatttttgaaggtgaagcccttcttcgtaggatgaacagatatggacttttggatgagagccagaacaagctcgattatgtgttggctttgactgttgaaaacttccttgaacgtcgtttgcaaacgctcgtgttcaagactggtatggccaagtcaattcaccatgcacgtgtgttgatcaggcaacgacacataagggtcggg

SEQ ID NO: 227796 - DNA, 471 bp, Gossypium hirsutum
cggacgcgtgggcggacgcgtgggtgcggggcttatctccattgatttagctcgggatcttctgcaagtgcacccgaattctaatgcaggtgttgtcagcacagagatcatcactcccaactactaccaggggaatgaaagagctatgctccttcccaactgtctcttccgcatgggtggcgcagcaatcctgttgtcgaaccgccgctcagagaggcggagagccaagtaccgacttgtccacgttgttcgaacccacaaaggggccgatgacaaggcctaccgatgcgtgtttgaagaagaagacaaagacggcaaagttgggatatcattatctaaagatctcatggctatagctggagaggctttaaaatccaacattaccacaatagggcctttggtgcttccagggtcggaacaactcctatttcttctcactctgatcgggcgtaaagtcttcaaccccaagtg

SEQ ID NO: 227797 - DNA, 428 bp, Gossypium hirsutum
gtgaatccattgaagagcgtgatggtaaatgatggtaagacgaggttttccaccatggatgggaaccccatctttcatttcctcaacacctccactttcagccagtacaccgttcttgattctgcctgtgtagtaaagattgacaccaaggcccccctcgagaaaatgagcctcttaagttgcggtgtctcaactggcgtgggagcagcttggaatgtagccaacgtgcaacctggctcaagcgtggcaatctttgggttgggtgccgtgggactcgctgtagctgaaggagcacgagtaagaggtgcatcgaaaataataggcgttgatatcaaccctagcaaatttttcaaaggcaaagcagtgggaattacagaattcataaacccaaaggatctagacgtaccagtgcatgagaaaatcggagc

SEQ ID NO: 227798 - DNA, 422 bp, Gossypium hirsutum
cggacgcgtgggtgttcacaaagttgaatcctttggccaaagaatttttcccatcttcttatcaacaaaatcagaccaaaaatgatggcaaatttaatcaggtgcctgttggtaacaaatcagttggaaatgagaatttctccaacagagggaggagaaataactccaaccaaggtaggagaaggcttaatggtaaagcttttcgagctcaacgagatgatagtattaggcaaacagtatatgtttctgatattgatcagaatgttactgaagagcaacttgctggcttatttagtaattgtggacaagttgttgattgccgagtttgtggtgatccacattcagttcttcggtttgcatttgtggaattcgcagatgaagaaggtgcacgagctgctttgaacctcaatgggataatgcta

SEQ ID NO: 227799 - DNA, 449 bp, Gossypium hirsutum
  unsure (1)..(449): unsure at all n locations
catgatgtttcatggaaaaatgcatggtgaccacttggtcgagctcctacgtccttttgttcagcaatggagtcaggctgattgttggatgcaattgtatgaccggtggtcttctgttgacgatctcggttccctagctgttgtacaccatatgttggctaatgaccccggaaagagccttctatggttcagacagtctctcctccttttaaggttaaattgccaaaaggctgcaatgcgtagtctacggttggctagaaaccattctacctcggatcatgaaaggctcgtctatgaaggatggatattgtacgacaccggccactgcgaagaagcactagctaaagctgaggaatcaatctccatcncgggatcatttgaagctttcttcctcaaagcatatgctttagcagatacaagtctcgatcaagagtcctcggcatatgtta

SEQ ID NO: 227800 - DNA, 391 bp, Gossypium hirsutum
gcgtacgcttttttatattactctcaattcccattgaaactttcagactttcagccataattaagcttcttcccttcagaaaacttcgactgaagctgctccaagattaaagaagcttcaatttataatactctgccccttaaactagcaagcctgatctgctgcataatcgtctaaagaaaatttgatggggataaataagttgctgtgttggtttgcagatttcttctttttgttgggtttctctgcttgcacttcgatttcggatggtgttttcgactctctcacttctactggaaggcaccttcttcaagctaagaaagcttgccctgtgaactttgagtttctgaactacacaattatcacaagccaatgcaaaggaccaaagtat

SEQ ID NO: 227801 - DNA, 456 bp, Gossypium hirsutum
  unsure (1)..(456): unsure at all n locations
ctacagcacaacaaaaaaggcaactagacttgagaaagaaaaacagtctcaaaatgcagcagaagtcaggcttcctgatcctcttgctctccctcattttccttcctctcatcttctccgacgccagaaaggaggctcccctcggaggatggagtccgatcaaagacaccaaggacccacacgtgataaagatcgcggaattcgccgtcgaggagtataacaagcagtcaaatgggagtttaaagttggttaaggtggtgaaaggcgagacccaggtggtggccgggacaaactaccggttgattttgcaggcgaaggaagggaccttcgataacacgtataanagctgtgggtgtggggagagtgtggctgaatttcaggaatctcacctcctttaacctcgtcaagggttagatttgattataatggaatttatgttcatatatggtatccttg

SEQ ID NO: 227802 - DNA, 386 bp, Gossypium hirsutum
cccacgcgtccggaacagaagcaggtcaaataattacaactgttgttggtggtcgaggcgggcatccaaaacagacaatctcgtatatggctgagcgtgtggttgggactggttcatttggtgtcgtctttcaggctaaatgtatggagagaggtgaacctgttgctataaagaaggttctgcaggataaaagatacaagaatagggagctgcagattatgcatctacttgatcatcctaatacagtccaattgaagcactatttcttttcaatcaccgaaaagaatgagctctatcttaaccttattctggaatttgtacctgaaacagttttccgagtttcaaaacactattgtagaatgaatcgccatatgccctttttttat

SEQ ID NO: 227803 - DNA, 451 bp, Gossypium hirsutum
ccctctaaaagcatgtattttcctcacacgtttgtttttcttgtgattaatcgatatggctagctcaatgtcccttaaacttgcatgtgtggtggtgttgtgcatggtagtgggtgcacccctggctcaaggggccgtaacctgtggtcaagtcacaaactccctcgcaccctgcattaattacttgagaggcagtggtgctggtgccgttcccccaggttgctgcagcggcatcaaatctctcaactccgccgcccaaacaacaccagaccggcaagcagcttgcagatgcatcaaaagtgcggccgccggcattactggcatcaactttggccttgcaagcggactcccaggcaagtgcggtgtcaacatcccttacaagatcagccctagcactgactgcaacagcgtcaagtgaagttttggcatggaaagttcaccagctagtgga

SEQ ID NO: 227804 - DNA, 435 bp, Gossypium hirsutum
cggacgcgtgggcgacgattggtttcagttctctgttgcctctccttgctgggttcatttgcttcagcttccacaattagccttccatctgattctcgtaaagtctccttgactttgtattacgaatccctttgcccatacagtgccaatttcattgtcaattacctgcccaagctcttcaatgaggatctcatctccatcgtcgatctccgcctcgttccttggggaaacgctaagctcaaaggcaacggcacctttgattgccagcatggccctactgaatgcttgttgaacactgtggaagcttgtgcaattgatgcctggcctaaactgaatgaccatttcccatttatctattgcgttgagaatttggaattggagcgcaagccccttgaatgggaatcgtgctttaagaaattgggattggaatcaaag

SEQ ID NO: 227805 - DNA, 429 bp, Gossypium hirsutum
aaagctatatactagagcacagttacatcaacatataaacacaggtgactctgaggtggacggaactgagagtgagagaggtggcttcatggggcatccaatgtgtgaattctgcaagaccccgttttatggggataatgaattatattcgcacatgtccacagagcactatacatgtcatatatgccaaaggcagcatccaggacaatatgaatattacaagaattatgatgaccttgagattcattttcgccgagatcattacctatgtgaggatgaggcttgccttgccaaaaagttcatcgtcttccagtctgaagctgaactaaagagacataataccattgaacatggaggtcgcatgtctcgagcacaacgtagtgctgctttacaaattccaacaagctttcggtattggcgaagtaatga

SEQ ID NO: 227806 - DNA, 459 bp, Gossypium hirsutum
ctttgtgccatcccttttaccttctccgagctcgttaaagagcagcctctggtgttgaagtaccacaatgggccactcttgaaggggaagatcaccgttaatctcatctggtacgggaagttctccccaacccagcgctccataatcgtcgatttcatcaactctttgagctctgccgtcaaacccaagattccgtcggcgtcgttttggtggaaaacgacggagaaatacaagtccggttcctccactttggtcgtgggcaaacaaatcctcctcgaaaattacccgctcggtaaaatccttaagaacccacacttgccagcgttggccgggaaattcaacggcgtaggtacggttagcgttatcctcacggccaaagacgtcgccgtcgatgggttctgcatgaggtgcgggactcacgggtcgaaccgggttggtcgggttcgaggtacttttatc

SEQ ID NO: 227807 - DNA, 382 bp, Gossypium hirsutum
  unsure (1)..(382): unsure at all n locations
tgaccctgcaatccagtataaagcttacacagattatgctttggacatgggggtaattaaaaagtctgactatgatcgtatcaacaagctggtcccagtttgtgaaatggcaataaagctttgcggcactgatggtacaatctcttgcatggcttcatattttgtctgcaataacatattcaatggcatcatggcacttgctggcgatacaaattactatgacgttagaaagaaatgtgaagggagcctttgctatgacttctcaaacatggagtcatttctgaacaagaaatctgttagggatgcccttggtgttgggaacatagatttcgtgtcctgcagncctactgtgtatcaagccatgctggttgactggatgagg

SEQ ID NO: 227808 - DNA, 449 bp, Gossypium hirsutum
gtggaattgggaagccgaagaagaagctactgcgattgcgattgccaactcattcttccgtcatgggcaactgtggcactagagaggaatctgacgttgttactcatgctcaagttcagcagctccacaaccacatcttatccgacaagaagcttactcaaagtcagagccagactcagaatcgtaccctctcagatctgagcgacttcgaggattccaggaaaaatgcgcttctctatacccacattattgccttcactttattcgagcttgagactattaccaagagcttccgttctgactatattctcggggaaggtggcttcggaacagtctataaaggttatattgacgagaatgtgcgggtcggtctcaaatctcttcctgtcgctgtcaaggtcctcaacaaggagggccttcagggtcaccgcgaatggcttactgaggtc

SEQ ID NO: 227809 - DNA, 458 bp, Gossypium hirsutum
  unsure (1)..(458): unsure at all n locations
aaacctgcattgggccttctttgggttttcgaaattgggcaattgacctttttttttgcctataaaaacccatcaaaaacagatcaatttttcatcatctcttcatcaactcaaagaaaaaattgagtgtcagtttgaaagtgttcttcagatatggctatgaaacaagttgctaattctgctatcaaagcaattgccaattctgggtcatcctctcttcttaccagacaacttcatgcttcttcagggagcaaaaagattgttggggtgttttacaaggccaacgagtactttacgaagaatcccaactttgttggttgtgtggagggagccctggngttgcgcccatggctggaatcacaggggcatcagtatattgttaccgacgacaaagaaagaccggactgcgaacttgaaaagcatatccctgatctccatgtgctcatatcgaccccatt

SEQ ID NO: 227810 - DNA, 452 bp, Gossypium hirsutum
gatttcctcctgaaagatctttcctccgtggtcctcctctgccacaacaacgtcctcatcctgtgttgttggaggaagaacttgaaatgcagcatgcagaaattcggaggcttttgactgataacagcaggctggtagaagatcgaatagctatacgacaagagcttggtgctgcgaaagaggaaattcatcgtttaaatcttttcattggtgacgttcgtgctgagcaagagctgtactcaaggggacttattgacaaaggcttgaagctggaagcagatctgcgtgcaactgagccaattaaaaaagaggttgtgcaacttcgtgaagaagttcagaaactgaataataataagcaggaactaactggtcaagttcaggctctcaaacaagatgttggcaggctgcaagctgataatcaacagatacctgttctgagagcagaaattgat

SEQ ID NO: 227811 - DNA, 435 bp, Gossypium hirsutum
gcagaaatggcaattccgatccccagtcggcaactgttcatcaacggcgattgggctgagcctttgctcaagaaacgcatccctattattaaccctactactgaagaaatcatcggtgatattccggcggcgactgctgaagatgtggatgttgcggtgcaggctgctcggagcgcacttactcggaacaaaggtaaagattgggcctttgcttcgggtgctgtccgtgctaagtatttgcgtgccattgctgctaagataaaggagagaaaaccagtacttgcgaaacttgaaacagttgattgtgggaaaccacttagtgaatctgaagcagatatggatgatgtcatcggatgctttgagtactatgcagaccttgctgaaggtttggatgccaagcaaaaggcttctatctctcttccgatgaagacattt

SEQ ID NO: 227812 - DNA, 439 bp, Gossypium hirsutum
cccacgcgtccgcttttccttcttccctccccattaggaagaaaatggctacagctttctcaccttccaagttcgctgcccaaccattccctctcaacaccacttctcaaaacaaccctcttacaatccccactatcgcctcacccttcctcggatccacccgcaaactcatccgcctctgttcttcttccaatttgaatctccgccgtcgatctggtaccgtcgtcgccgtctccgatgtcgtcaaggaaaacaaatccaagtctacccccaatctgttaattacaaaagaggaagggttggaattatacgaagatatggtattaggaagagcgtttgaagatatgtgtgctcagatgtattacagaggcaaaatgtttggtttcgttcatctttacaatggccaagaagcttgttcaactggtttcattaagctctt

SEQ ID NO: 227813 - DNA, 401 bp, Gossypium hirsutum
aagggggtccacccactcttccgaccacgcgtcagaaaaaaaagaatctcttgtttatatctttgctgctttgttctcttcttctatggtcttcagttttggcaccaacagtggctcagcctcgttcacctttttgtgaagggaaatgcaaagggaggtgcaataaagcggcggtttgggatcggtgcttcaaatattgcggcatatgttgcgaggagtgtcaatgcgttccgtccggtacttacgggaacaaacacgagtgtccttgctacagagataaggtgaacaacaagggcaaacccaaatgcccttgaaaatgaaatatattcgagctcgggatttaatcaagcttaaagatcgaggaccaagaggccatatatatatatatatgcatgttggtg

SEQ ID NO: 227814 - DNA, 223 bp, Gossypium hirsutum
aacttgcttctaactttagaacggtgtatggccgattcaacaccgcttctgtctcactgtgataaaccggcagaaccaaaacgggcgcctcgatctctcgatgagaccatcgagggctgtatcggagacttcgggtggtggcaattcttgcaagcaatactcgtctctcttgcttgggtctttgatgctcagcaaaccttcatcagtgtattcactgatgctg

SEQ ID NO: 227815 - DNA, 211 bp, Gossypium hirsutum
cggacgcgtgggcggacgcgtgggtaatttcgaatatatcctcaaatatcttgttcaaaaagaaaccctaaatcatgggtcagggaacaccggttggtctgaaccgacaaggctttccaggggatcggaaacaggatggttccgataagaaggagaagatattcgagccggcggctccaccggccagggtgggccgcaagcaacgaaaaca

SEQ ID NO: 227816 - DNA, 440 bp, Gossypium hirsutum
ttccatttttctccacttcgaagctttttactttctcagctgaggaaaaaaaaaaaaagatttctctcagatcttcaagagaaaacaattatctccgtcaatctgaagtagaataaggataagaagatgggaacattggggaaagcaatctacacggttggattctggatccgagaaaccggccaagccctcgatcgccttggatgtcgcctccaaggcaattactacttccaagaacagctgtcgaggcatcggacgttgatgaacgtgttcgacaaagctccaattgttgatagggatgcctttgttgcacctagcgcttctgtcatcggcgatgttaaggttggacggagttcttctatctggtatggctgtgttttgagaggtgatgtcaatagcatcagtatcgggtctggaacaaatatccaagataactccct

SEQ ID NO: 227817 - DNA, 428 bp, Gossypium hirsutum
tgcaggaaacaccactgcagctattgggaagggtttcgcaatcggatcggcagccctcgtttcacttgctttatttggtgcctatgttagcagagcaggcatcaagaccgtagatgtattgacaccaaaggctttcattggtctcatagttggagccatgctcccttactggttttccgccatgacaatgaaaagtgtcggaagcgcagctctcaaaatggtcgaagaggttcgtcggcaattcaatacaattccaggactaatggaaggcagggtaaagccagactacgcaaactgcgtcaagatatcaaccgatgcctcactccgcgaaatgatcccacccggcgcactcgttatgcttactccacttatagtaggaaccctttttggagtcgaaactctagccggtgtcctagctggtgcactag

SEQ ID NO: 227818 - DNA, 271 bp, Gossypium hirsutum
gaacagctcaaaaaagcttccaacattttgaagaatcaaataatcaaacatgtcgaaggaagtgagtgaagaaggggtgagccgaaaggactatgtggatcctccaccggcaccgctcatcgacgcggctgagagcaagcttcgggctctttacagagctcttatcgcccaattcatcgctactttcctcttgctatacgtcaccataggcaccgtcattggtcccatgaaacacccctatgcatgctattgtgttcgtcttcatagcatc

SEQ ID NO: 227819 - DNA, 411 bp, Gossypium hirsutum
ctttcactcccaaaatgtcagatcttcaagcaccccttcgcccaaagaggaagaagggcttggtggactttttggtccagtttcgttgggtttttgttatattttttgtccttcctttttcggctctgtattactttctcatatatcttggagatgtcagatccgagatgaagtcctacaagcagcgtcagaaggaacatgatgaaaatgttaagaaagtagtgaagcgtctcaaacagaggaatccaaaaaaggatggtcttgtatgcacagcccgcataccatggattgcggtggggatgcggaatgtagactataagagagctcgccattatgaagttgatttgtctgctttccgtaacattcttgaaattgattgagagagaatgattgcaagggttgagccacttt

SEQ ID NO: 227820 - DNA, 408 bp, Gossypium hirsutum
ctctctcttaccattttaacagctcattctctgcatcagcttttctttaacaatgcagacaagaactgtacaagtcaagaacctgtcagatctagctactgagagggagattcacgagttcttttctttctctggtgaaattgagcacattgatatcataagtgaagctagtcaatcaaagactgcatatgttacattcaaggatccgaaagctcttgaaatcgccttgttattatcgggggcaacaatcgttgacaagattgtgacgataatttctgttgaaaattatgtaccaaaacttgagattcatgaatcaagagcggcggacaacattgtgtctattgctcctgctgggcatagtgcattaaatgatgagcagggcagaacgagttcacctggcagtggaag

SEQ ID NO: 227821 - DNA, 367 bp, Gossypium hirsutum
ccacgcgtccgctactccgcccatcgtctgcttttgccaaaagacagctaaagacgccactttgaaaaccggaaatgtcggacgaggagcatcatttcgagtccaaggccgacgccggcgcttccaaaacctaccctcagcaggccggcaccatccgcaagaacggttacatcgtcatcaaaaatcgcccctgcaaggttgttgaagtttccacctccaagaccgggaagcatggtcatgcaaagtgtcactttgttggaatcgatatcttcactgccaagaagctcgaagatattgtcacttcttcccacaattgggatgctctgcatgccattcatactgacttccatctatttacatatctgat

SEQ ID NO: 227822 - DNA, 240 bp, Gossypium hirsutum
agattatctactccagttacagttgcactcagggctggtttctcacaccttgtgtgagtgatccaagtttaaggggactcaagagtgattttaaggatatatattaaaaaggccaggtgctcggaatgggagcaaattcccgtccctagaagtgtgagggcaattgttgctttaaatcttcataattacggaagtgggcgaaatccatgggttttgctaaaaccagagtatttttataag

SEQ ID NO: 227823 - DNA, 252 bp, Gossypium hirsutum
cggaattcttattccttttatatttttcctctccaattttccgtcactttcccgagaaaatgagagaaatccttcacatccaaggtggccaatgcggcaatcagataggagccaagttctgggaagtcgtatgtgccgaacatggcatcgattcaacgggtcgatatggtggtgactcggagctccagcttgagcgaatcaatgtttactacaacgaatccagttgtggccgttttgtttccgtgcagtatt

SEQ ID NO: 227824 - DNA, 425 bp, Gossypium hirsutum
cttgggcagaaaaattttgacatgaccatagtgttcaaggacttcaagaaagatgtactaaggattgattccatcccttcaacctcacttgatggcatcaaggaatggcttgatacaacagacatcaagtattacgagagcaggctgaatctgaactggcggcagattctgaagacaatcactgacgatccacagagcttcatagagaatgggggctgggaatttttgaacttggaagctagtgattcagattctgagcagtcagaggaatcagatcagggttacgagccatctgatgtggagcctgaatctgagtcggaggatgatgactccgatagtgagtctctggttgagtctgaggatgaagaggaggaagaatctgatgatgactccgaggaagagaaaggaaagacatgggaggagct

SEQ ID NO: 227825 - DNA, 431 bp, Gossypium hirsutum
  unsure (1)..(431): unsure at all n locations
ctgaaggtgtcttaataaacgccttcgatttaccttcgatttccatttacttctctattgctacgttcttgaatttttagtgagcgaaaatgagagagtgcatttcagtccacatcggtcaggctggtattcaagtcggaaatgcctgctgggaactttactgccttgaacatggaatccagcctgatggccagatgccaagtgacaagactgtcggaggaggtgatgatgcttttaacacctttttcagtgaaactggtgctggaaagcacgtccctcgtgctgtctttgtggatcttgagcctactgttattgatgaagtgaggactggtacttaccgtcagcttttccaccctgagcaactcatcagcggcaaggaagacgctgccaacaacttcgctcgtggccactacactattggcanagagatc

SEQ ID NO: 227826 - DNA, 399 bp, Gossypium hirsutum
aaaaaaaaaaaaaaaataaaaaataaaatttaaatttaaaaaaaaaaaaaaaaaaaaaaaaaaaaagaaaaaaataaaaaaaaaaaaaagggaaaaaaaaaaaataaaataaaaaaaaacaaaaaaaaaaaaaaaaaaaaaaaaaggggggggccgttttaagggatcaaagtttacttacggttgtttgcaacgtaatagtttttttttgggggcacctaattaaatttaatgggcgggggttttaaaacttggggattggaaaaaccctgggttacccaaattaattggctttgaagaaaatcccctttttgcaagttgggttaataaaaaaaaggcccgaacctttcgcctttccaaaaatttgccaacccttattgggaattggaaccccccttt

SEQ ID NO: 227827 - DNA, 441 bp, Gossypium hirsutum
gatttttgtggttgatagcaacgatcgtgatcgtgtggttgaagctagagatgagttgcacaggatgttgaatgaggatgagttgagggatgctgtcctgctagtatttgcaaacaagcaagatcttccaaatgctatgaatgctgctgagattactgacaagcttggccttcattctctccgccaacgccactggtacatccagagcacatgtgccacttctggtgaaggtctgtatgagggactggactggctttcgaacaacattgcaaacaaggcatagatggcatcattgagttgttagtctcaccaatgctggccccttttagagttccggatgttcatcccgttcaagtgtttttggtttttcgtgttcatttgtttcttgcaaacattgccatttgttacttgtagtttaacaataattaataaattgtttgt

SEQ ID NO: 227828 - DNA, 427 bp, Gossypium hirsutum
  unsure (1)..(427): unsure at all n locations
gaaaactcttgaggttggatggaagaagagagaattggttatctgattgaaaaatgcccagatacacgcgtcatccgtcaaatccacgcgcatgttctcactcgcctccttcctatctccgccgtatccttcctcctctcgaaaatagttgggttttgtgctctttctcgccatggagatatcaatcatgctcgcaaagttttcgctcaaacccccaaccctaacatcttcacttggaattcccttattcggggttattatcttgtcggaagcccatcgaaagtgcccctttttttatataaaaaattggtcagaaaagggtatccttctgctaatacgtttaccctggctttcgtgcttaaggcnttgctccaatattttggctttcgatgagggaaaacaggttcatgcccgtgtgtttcgatct

SEQ ID NO: 227829 - DNA, 340 bp, Gossypium hirsutum
gcaacccctcccctttcatcccctacttatctcaccaccaatttaggcgtcggctacgccatcgtcgtcgccctcggcttcctcctcctcctctccactctcctcctcgcttcctacatttgcttccgctcttcctcgccccttccacctcgtgccatttcccccaaccccatttcaacaccctaccgcttcaacttcaacggtatcgtcctccccaggattggtttcatcggcgaagaagaccatggacacgacgaagaaaacgtcgtcgtctttgggcttgatcgtgccgtcataaactcttaccccaagttccggttcagcaaagaggaggtgtcta

SEQ ID NO: 227830 - DNA, 454 bp, Gossypium hirsutum
aaaaaaaatggggagaggaagagtggagctgaagaggatagaaaacaagatcaacagacaagtgaccttctctaagagaagaaatggtttgcttaagaaagcttatgagctttctgttctttgtgatgctgaggttgctcttatcatcttctctagtcgtggcaagctctacgagtttggcagttcaggtatgagcaagacccttgagcgataccagcgttgctgctttactcctcaagacaacagccttgaacgcgaaacacagaattggtaccaagaggtaaccaagttaaaggcaaaatatgaagcactgcaacgcactcaaaggcatttgcttggagaagatcttggaccattgaatgttaaggagctgcaaaaccttgagaaacagcttgaaggagctcttgcactggctagacaaaggaagacacagatcatgatagaacaaatggaa

SEQ ID NO: 227831 - DNA, 397 bp, Gossypium hirsutum
aacagcttgggtgcatttgctacaatcaatcacctgcacttccaggcttactacttggctgtgggctttcccattgagaaagctcctaccaagaagataacctctctgaatgatggagtcatcatctcagagcttttaaagtatccggtcagaggtgttgtctttgagggtggtaacactcttcaagacttgtctgacgcagtgtctgatgcgtgcatttgccttcaagataacaacatagcatacaatgtcctcatctctgattgtggacagcggatcttcctccttcctcagtgttatgctgagaaacaagctcttggggaagtgagtgtagagcttttggacacccaagtgaacccggcttggggggaaattagtggtcatatggttgtggaaa

SEQ ID NO: 227832 - DNA, 372 bp, Gossypium hirsutum
gtttcatccattagattctcatcattctaacatcggttctcaggtgaagttcatggctccagaaggcatgatccatcatgatgcaccaccaaatcatcatttacctgcaaatatgcttcatcctctccatcatcctagcagtggactaactggatttgatcctccgattcatcatcctatgttacaacaaatgcatatacccagaaactttcctcctccaatcatgcaatgtggaattcccggtgttccactgctggcacctcattcaactaatcagatggctggtttgctacctgaattgaatccaatgcaatgttttccattggggcatggtcaccggcagccccaacccaactttgctggtcttggaat

SEQ ID NO: 227833 - DNA, 441 bp, Gossypium hirsutum
cccacgcgtccgggccactgccggagacactcacctgggaggcgaagatttcgacatccgaatggggaaccatttagtgcaagagttcaagagaaagaacatgaaagacattagtgggaaccctagagctcttaaaagggtgcgaactttttgcgagagggcaaaaagaactgtctcgttcaccggtgaaacgaccattgaaatagatacggtatacgaaagtattgactattactgaaccataacccgtgccagatttgatgagctcaacatggatctattcagaaagtgtatggaaccaagtgagaaatgcttgaaggatgccaagatggacaagagcagtgtccatgatgacagccctcgtgtgtggttccactagaattcccaaagttcaacaactatagcaagatttcttcaatggtaaagagctttgcaaaagca

SEQ ID NO: 227834 - DNA, 341 bp, Gossypium hirsutum
aaaggaaagcaagcatccgagaattctacactgttatctatccctctttgctgcaacttcagagcggtgtcactgatagtgaagagaaacaacagaaagcggcatgcgtggaaaggtatcgtagaagagaagatgaagagtataagcagcttaccgatattgatttcgaaagagaagaagaatgtggaatatgcatggaaacaaacagtaaaatgttgctgcctaactgtaatcacaccatgtgcttgaaatggtatagggataggcggtcattatcatatttttgcccttttgtgttatgattgtattaaaaagtattttaattaggtgtttttttttgt

SEQ ID NO: 227835 - DNA, 473 bp, Gossypium hirsutum
gccgtttttgctttcagaaaatctaccgcagtttgcagttgagaggatggtgagagtcagcgttttgaatgatgcactcaagagcatgtacaatgccgagaagaggggcaaacgacaggtcatgatcaggccttcctccaaagtgatcattaagtttcttttggtcatgcagaagcatggttatattggagagtttgagtatgtcgatgatcacagatctggaaaaattgtggttgaattgaacggaaggctgaacaagtgtggggtgattagccctcgtttcgatgtcggagttaaagagattgaaggttggactgctaggctacttccttccagacagttcggatacattgtgcttaccacttcagctggtatcatggaccatgaagaagcaagaagaaagaatgtcggtggaaaagtacttggtttcttctattgagacaaatctgagttctttttatttggtttatttc

SEQ ID NO: 227836 - DNA, 462 bp, Gossypium hirsutum
aagtctcaaagatatcactgcaagaaaaaaaaaaaaccagacatggcttccaacactgttgcatccgctgctcttcttcttaccttgaacttgttgttcttcactttggttagctctacctacgtgccttgcccaccaccaccaaagagccacaagcctacccacaaaagcccaccctcggcacctgaacagccaggcacttgccccagagatgcactgaaactaggcgtttgtgctgatttgttgggctcagtgcgcgttgttgttggaccgtcgaggaccaaatgctgctctctcatttcgggtttggctgatctcgatgctgctgtttgcctttgcactgctattaaagctaatgtgttggggttaaccctaacgttcctgtttcattgtctttgctcctcaattcctgcgaaaagcaaatgccttgtggttaccaatgtgcttaagctcatttccact

SEQ ID NO: 227837 - DNA, 463 bp, Gossypium hirsutum
cggacgcgtgggtttcttttcaattttcttttcctttttctctctttctctaaaagaaaggttggcttcaatggccgaccggtgctgacgtaccataggcgcttccctcctcattcctctcatctcctttcaccagatccgggtttgttttcgataaatttcttctatttccatggctgctccacctgcaagagctcgagctgattacgactacctcatcaagctccttttaatcggcgacagcggtgtgggtaagagttgcctccttttgcgtttctcagatggctcatttactactagttttatcacgacaattggaattgactttaagataaggactatagagcttgatggaaaaaggatcaaactgcaaatttgggatactgctgtgcaagagcggttttgaacaattacaaccgcttactaccgtggagccatgggtattttgctcgtgtatgatgtg

SEQ ID NO: 227838 - DNA, 454 bp, Gossypium hirsutum
ggtggtggcccgaagaagaagcccgtttcaaggtctgtcaaagccggtctccagttcccagttggtaggatcggccgttacttgaagaaaggaaggtattcacagcgggtcgggaccggagccccggtttacttggctgcagttcttgagtacttggccgctgaggttctggaattggctgggaacgctgcacgtgacaacaagaaaaacaggatcatcccaaggcacgtgctacttgccgtgaggaacgacgaagaattagggaagcttctcgccggcgtaaccatcgctcacgggggtgtgttgccgaacattaacccagttcttttgccgaagaagactgaaaaggccgccggcaaagaacccaaatcttcatcaaaggccaccaagtctcctaagaaagcttaaattgatttaacaaaactagatccacagggctttatttttcttagtt

SEQ ID NO: 227839 - DNA, 441 bp, Gossypium hirsutum
aatgaatgaataccgagaccgtgttgtattgcctactgccactgagaagtatggacggcatatcagcacttgtctgaaggttttggatatgactggcttgaagctttcagcattgaatcaaataaagatactgaccactatatcaacaatcgatgacttgaattatcctgagaagacacagacatattatattgtcaatgcgccatatatattttcggcatgttggaaggctgtaaaacctctcttgcaagaaaggacaaagaggaaaattcaagtgcttcaaggttctggaaaggatgagttgctgaaaataatggattattcatcccttccacatttttgtagaaaagaaagttctggatcaacaacgtacaacagcgatggaactggagataattggttctcggtggatcacacctaccatcaacaggtttacactta

SEQ ID NO: 227840 - DNA, 460 bp, Gossypium hirsutum
cccacgcgtccggacatttttgccaaggaatgaggatgagcgtcaaatgtgtgcgagaactatctactgtacaaacattgacaagaaggttactcaagctgatgttaaactctttttcgagacagtctgtggggaggtttaccgcctgaggttgcttggggactatcagcattcaactcgcattgcttttgtcgagtttgtaatggctgaaagtgcgattgctgctctcaactgtagtggtgtggttctgggatcattgcctataagggtcagcccatcaaagaccccagttcggccacgagctcctcgccttccctcgtactaaatcattcactccaaaccgattttagttccaagtttatatatatatatatttaaatacatacacagccatgtaaagatgtttccccatgttgctcttgctgatctacatatatatcgtccactgctgctatgtttc

SEQ ID NO: 227841 - DNA, 465 bp, Gossypium hirsutum
ctttaaacttccttcagatgctaaagtgcccatcataatgattggccctggtactggattggctcctttcaggggattccttcaggaaaggcttgcactgaaagaagctggtgctgagttgggtccatctgtattgttctttggctgcagaaaccggaaaatggatttcatatatgaagatgagctcaacaactttgtcaacagtggtgcactatctgagcttgtggttgccttttcacgtgagggacctaccaaggaatatgtgcaacataaaatgatggagaaggccaaggacatatgggacatgatttctcagaagggttacctgtatgtgtgtggtgtgccaagggcatggctagagatgtccatcgagctcttcacactattttgcaagagcagggatcactagacagctcaaaggctgagagcatggtgaaaaatctgcaaatgagcggcaggtaccta

SEQ ID NO: 227842 - DNA, 462 bp, Gossypium hirsutum
aatcgatgtatctgctccagggccagggatttgtggtggagcacttgcaggatcccaaacatcagcgctaacagcaacttgatcaccccagttaattgcagggacacccgaaattggtggctgaaccacatcagctgaccactgatcacccatttgggagggccattggtcagttcctaaagcactcattccaaaatctgcagcagggagtccataatcaggagcagcaactgcttcctcctcttcctgttgtttagcttcctcaggctccctgtagaaaaatagatccaccatcacatcccacttctgtccaggagcaattgtaccacgcatctgaagaaccatcctagctaacagccagaaaagacagccaatgctgtgctttcccttgttattagcaggaataccaatgtcaacatatcgcattggtgagtctgtgtcacaaaaagcaatggtaggaat

SEQ ID NO: 227843 - DNA, 467 bp, Gossypium hirsutum
ctgaatggagacctcaagaatcaatttgttgaaaccaatgttggttttgatactatatgcaaggtcaattcccaactcatcagtaatgtctgcactgatgctctctctgcggagaagtactattattttatccgtcttatgggaaggaaggcatcacatgttgccctggaatgcaccctccaatctcatcccaatatggtaattcttggtgaagaagtggctgcatcaaagcttacactctttgacataacaaagcaaatttgtgatgcagttcaagctagggccgagcaagacaagaaccatggggtcatcctcctgcctgaaaggcttatagagagcattcctgaagtgtatgcgctattgaaggaaattcacagtttgctcaggcaaaatgtatctgctgataaaatttcttcccagttatcaccttgggcatctgctttgtttgaatttttgccacatttcat

SEQ ID NO: 227844 - DNA, 414 bp, Gossypium hirsutum
cccacgcgtccgcccacgcgtccggaaaactaaacgccaggctctaaacgcgggtagcagttgaagaaaataacctcaaataacgtgaaatctcttaacacaaaatttttttttgaagattgtagaagatggctgagggtgaggatattcaaccccttgtctgcgataatggaactggaatggtgaaggctggatttgctggtgacgatgctcctagggcagtgtttcctagcattgtcggtcgtccacgtcatactggggtaatggttggtatgggacagaaagatgcgtatgtaggcgacgaggctcaatcgaaacgtggtattttaactttaaagtacccaatcgaacatggcattgtcaataattgggatgacatggagaaaatttggcattataccgtttacaatgaac

SEQ ID NO: 227845 - DNA, 420 bp, Gossypium hirsutum
atcgaaatggtttccacatattgcaaccgtttttacgccaataagcctgagctcgctgctcgtcggatcgaagccattgggtatcaggttggccaccagctctctgaacggtacacgatggagaggccacgttttagtgatcatttagaggcaatcaagttcatctgcaaggacttttggtctgaactctttaagaagcagatagacaacttgaagacaaatcatagaggtacctttgtattgcaagataatcgttttcgttggcttacacgcatgtcaattgatcaatcacctgaaaatggagcatctgaagagccttctatcatggctgatgagaaggctgtggaaagcatgcatctatattttccatgtggaatcatcaggggagctctttcaaacttgggaataccttgtgcaggt

SEQ ID NO: 227846 - DNA, 441 bp, Gossypium hirsutum
gtcaaacatttttctcacttatttattctttcatttatttatttgtaaaaactcacacaagtttaggaagaagaagaagatgtcgtggcaagcgtatgttgatgatcacctgttgtgtgatatcgaaggcaaccatctctctgccgctgctatcatcggccaagacggcagtgtttgggctcagagctccaatttccctcagtttaagcaagaagaaatcaatggcatcatgaatgactttgctgaacccggatcacttgccccaaccggattgtaccttggtggcactaaatacatggtgatccaaggtgaaccaggagctgttattcgagggaagaagggacccggaggtgttactgttaaaaagaccaatcaggccttgatcatcggcatctatgatgagccaatgactcccgggcagtgcaacaatggttgtggaaa

SEQ ID NO: 227847 - DNA, 466 bp, Gossypium hirsutum
gagcttcttctttgccggcaaacagaccacttccaatttgctcacttggaccgccgttcttcttgcaatgcacccacagtggcaggtgcaagcacgtgaggaggttcttagggtgtgtggattacgtgacatacccaacaaagataatttcgtaaagcttaagacgctgagtatgatattgaatgaatcgctgcgattgtatcctccaaccgtagctacaataagacgcaccaaagttgatgcagagttaggaggttacatgatcccacatgggaccgagcttttgataccaatcttagccgttcatcatgataaagccatatggggcaatgatgcaaatgagttcaaccctgcgcggttttccgggggcgtggcacgtgcggccaaacatcctattgggttcatcccattcggccttggggtccgtacctgcattggccaaaacctagccattttgcaagcaaaa

SEQ ID NO: 227848 - DNA, 411 bp, Gossypium hirsutum
  unsure (1)..(411): unsure at all n locations
gcccggaatttnngggttggaccaagccttcctaaaccacccccctccctcttccatcgtgatctccgtttttttttctaatatcgaacaaaaaaaaacccgatcccaatggttttttaaactggattttaactaaatttttcccttttttaaacttttttaaagcccaaccaggtccctaataatgggatctttaatgtcaacttacttagtctccaatttttaaaaatccgaccgggacctatgcgcctccgggttttttgtggggccaaacccgaaacggtggacaaagtttgtagcatagtgagggaagcaactagcactaccccgaagattcttctgttaccggagaaatctaagttggttgcactcggagctgattctcttgacancgtcgagattgtgatggga

SEQ ID NO: 227849 - DNA, 399 bp, Gossypium hirsutum
cgcggctttacacttcccttctctcacctcttccagaagccagaagtcagtttagtagcaatggcgtgtgctgcgatgaagcctaccaagccgggtttggaggagccccaagagcagattcacaagatccggatcactctctcctctaagaatgtgaaaaacctagaaaaagtttgtgctgatttggttcgcggggcaaaggataagagactgagggttaagggaccagtaagaatgcccaccaaggttcttcacatcactaccaggaagtctccctgtggtgaaggaacaaacacatgggatcggtttgagctccgtgttcacaagcgagctattgacctattcagctcccctgacgtggggaagcagatcacatctatcaccattgaacccggtgtt

SEQ ID NO: 227850 - DNA, 228 bp, Gossypium hirsutum
  unsure (1)..(228): unsure at all n locations
cggacgcgtgggtccggacgctttggcaacaaagtttttgaacgtgtatggcccagcctttgtggctccatttcgagtgatggcgggccttattgaaaagganattgaattccatactgttcctgntgatttgcttaaaggagagcacaaagaccctgtatttcttaagcttcattcttttggaacattttctattactcaatatggagattattttttatatgaatt

SEQ ID NO: 227851 - DNA, 209 bp, Gossypium hirsutum
acggtcagccaattgtttgagctagctagctcttacctaaatggcaaccaaaacgatgatgttgcgagatatttccacttttcttctttgtgttcagtgtctgcaactccattttccttggtgctaatggagatgacaatggtggttggcaaactgcccatgccaccttctacggtggtgctgatgctaccggcacattggggggagct

SEQ ID NO: 227852 - DNA, 467 bp, Gossypium hirsutum
caacaaatggacgttctgggaaggttgaggcatcccaatctggttagcttgaaagcttactattttgccagggaagagaagctgttggtctacgactacatgcccaatggtagcttgttctggctacttcatgggaaccgaggacctgggagaacaccattggactggactacaaggctcaaaatagcagccggagcagctcgtggcttggcttttattcactacacatgcaaggctcttaaactcacccatggtaacatcaaatccacgaatgtcctccttgataaatcaggggatgcacgcgtgtcagacttcgggctcaccatcttcgcatcacccaccaacaatgccccaagatcaaacggctaccgtgcaccggaattatcatctgatggtcggaaacccacccagaaatccgatgtgtactcctttggtgtgttgctacttgagatactgacagggaagtg

SEQ ID NO: 227853 - DNA, 470 bp, Gossypium hirsutum
aaaccccccaattctttactcactgtatatgaaatcggaggtttctgaaatgggaagcggtgttggcggcggtggaggagggaacaagtatggcagtttaaaccttactgatctaccgcaagattgcatcgctaccgtgttttcattcacttcccctcgagatgcgtgtcggttgtcactcgtttcaactactttcaaatcggcttccgaatccgacgccgtttgggagagtttcttgccgtcggatcaccaggcttcgattccttcgtcgctctctttttcttcgaagaaagaactttatcttagcctttgtgaaaatcatatcctaatcgatggtggccgaaagagccttcaattggaaagagtgagtggcaagaaagtttacatgctatctgccagggacctctttattgtatggggtgacactccaacctactggagatggatctcattacctgagtccaggtttg

SEQ ID NO: 227854 - DNA, 419 bp, Gossypium hirsutum
cggctttcgattcaaatcccttttggaactgtccttcaattgaaaacaagcagccaacatggggaagacacgaggtatgggagctggacgtaagctgaggacccaccgaaggaggcaaaggtgggccgataagtcatacaaaaaatccaaccttggtaatgaatggaagaagccatttgctggttcttcccatgccaaaggcattgtccttgaaaagataggtattgaagctaagcaacctaactctgctatccgaaagtgtgctcgagttcaattgatcaagaatggaaaaaagattgccgcgttcgttccaaacgacggttgtttaaactacatcgaagaaaatgatgaggtgttgattgctggatttggacgaaagggtcatgccgtcggtgatatttccggtgttagattcaagg

SEQ ID NO: 227855 - DNA, 271 bp, Gossypium hirsutum
gagagctcatctctctgcttcaaagctcctgtccgggtagaattctcttcttcctttgcgttgtgttctttgttgttcaatcgccatggcttcaaagcggattttgaaggaactcaaggatttgcagaaagatccacccacttcttgtagtgctggtccagtagctgaagacatgtttcattggcaagcaacaatcatgggaccctcagatagcccttatgctggaggtgtgtttttagttactatccatttccctccagattatcctttc

SEQ ID NO: 227856 - DNA, 444 bp, Gossypium hirsutum
gtccgggagaaagatctcttgttcttattataagatcgtgtgattggaatccgcagatgttgggtaaaaaaaatcttctcttttgggaataatcaaaaatggaaagtgttcaattggaacatgaaaacgtgactgaatttgtcctagttactcttcgggacagagtggaagaagggaggagattctcgaacgaggaaaaggacccaatgacttcgaaagaattgaacgaggagccgtatgaggtgaaaatctcatgtacggttctgtagagtggcagtaagggtgacttatctgtcaactttttcactatcacccccaaaaaaccaaactctgccttacgtaaagttgccagagttcgattaacctctgggtttgaaatcactgcttatatacctggtattggcataattacaagaacattttgtagtcttagtaagagggggt

SEQ ID NO: 227857 - DNA, 369 bp, Gossypium hirsutum
cccacgcgtccgcaaaaatccaagatggctcgtgtgaagaacttggaaaagcaaaaagctgccgccaaaggaagccagcttgattctaacaagaaggccatgaccatccagtgcaaggtgtgcatgcaaacattcatctgtactacaacagaagtgaaatgccgggagcatgctgaggcgaagcatcctaaatccgacctatacacatgttttcctcatcttaaaaagtagcacactggggaagtggagatggctttgtagcatgcatctatcttgtcccattggtactgtatgagtaacttcttaaaatctctgttacaaaagcccttataagcttctactttgtgatttcgatgatgcaattgtcat

SEQ ID NO: 227858 - DNA, 472 bp, Gossypium hirsutum
  unsure (1)..(472): unsure at all n locations
atctaaatgacctccatgttctagatttgagaagctggacttggtcaaaggtcgaagctaaggttgtacctaagtcagtggaatcaccatccccagtgaatatagccccgtgtgctggtcattcattgatcccttgggagaacaagcttctttcaattgctggccatacaaaagtgccttctgaaactatccaggtgaaggcatttgatctgcaaactggtacatggtcagtgttgagtacttatggcaaagcaccggtcactcgtgctggtcaatctgtgacccttgttggaacaaccctagtgatatttggtggacaggatgcaaaaagaacactcttgaatgatctacatatacttaacctagaaacgatgacctggaatgaaattgatgctgtgggggctcctncatcaccacgagctgatcatgctgctgctatacatgcagagcgttaccttcttggttttggtgg

SEQ ID NO: 227859 - DNA, 433 bp, Gossypium hirsutum
  unsure (1)..(433): unsure at all n locations
agcttttccgggacatgccttatctgttgatcattgacaatcttgagacagagcgagagtggtgggaaggaaaagacctgcatgacttgattcctaggaacactggagggactcatgtgatcatcacaactaggctaccaaaggtgatgacttttgacatgatgcagcttcctccattgcctttatccgatgctatgattttagtacgaggtagaaagaaaaaggattatccgaccaaggagttggagttcttgacaaaatttgatgagaaattgggaagattgagctttggtttgtggattattggntcattacttttcgagctgtccattttttcatctgcactctttgaagctgtgaaccaagtctctacctcacttgaagatgcctctacttcacccactgatgagcagttctttaaacacaacccttt

SEQ ID NO: 227860 - DNA, 295 bp, Gossypium hirsutum
ggcagccacaaactccgataaactgaaagaaaatggttcagacctcctgttggggctccatcaggtgcagtttgtgaaaatactacagaagggaagcagagaagaagcactcaagtatgcaagaactaacttcgttccttttgccggaaaccatatggccgagatccagaaactcatggggtgtctcttgtatttcgatagacttagtgagtccccatatgctcatttattatcaccaaccaattgggatatagtggctgttgagcttaatttacagttatgcaactcacttggt

SEQ ID NO: 227861 - DNA, 469 bp, Gossypium hirsutum
gtgcctgcttattttacattggctattttgacaatgttgtggtccttgaccagtatggtggaagctcaggtttatgttaccagtggcaccattgctcagtggtacttctccaaagatgatacgaaacctcaccggagcataaggagatctttgagaaatgcatttggtccttcttctggcaccatctgtctatctggattacttgtctttgttgttcgagtggtgcgtgctgctgttgatagtgcaagagaagaagatgttcctgggatagtgaatcttgttctgcggtgttgtgttaatgccctaatgtctgcgatagactttcttaacaagttcacaatcaactttgctgcaataactggcgaggcatattgcacctctgcgaggatgacatatgagcttctaagacgtaacctactctctgctgtttttgggagaccgtttaactcgttattatcagagttatttt

SEQ ID NO: 227862 - DNA, 249 bp, Gossypium hirsutum
cggtcgaccacgcgtccgggaaagtgaaaagcttgtctcgaaccttttcgagatgtcgcgtgatagtgctccttccatcatattgattgatgaaatagattccttgtgcggccagcgtggagagggcaatgagagtgaagctttaagacgtatcaaaactgaacttcttgtgcagatgcaaggtgttggacataatgatcaaaaagtcctagttcttgcgggaacaaatacctcccttgctcttgatca

SEQ ID NO: 227863 - DNA, 275 bp, Gossypium hirsutum
ctcttgcaaccaaagagcttgagtggtttgcggtttctgctctattggctctacctattattagggtgttcagaatattttgagcagttttctgcaaaaagacaaagaagcgtgttcgacatactaacgcaacccaccatggtcgtcgtaagggcaaaagggggcacacagacaagtagactgcgtgtatttaggttttggtctattaatgttggtaaaaattagagccttcatggacgtgtgatcttgctttctactgtacttttttgtcttta

SEQ ID NO: 227864 - DNA, 411 bp, Gossypium hirsutum
gttgtttcgatatttgtattaagaatcgccctttagtgatcagtgaggtgaagaaaaatgtcttgctgtggtggaaactgcggttgcggctccggttgcaagtgcggcagcggctgcggcggttgcaagatgtaccctgagatgaactttgctgagcaaaccacaaccgggacacttgttcttggcgtggcaccccggaaagtgcactttgatggagctgaaatggaaactggggctgaaaatggctgcaaatgtggagataactgcacttgcaacccttgcaattgtaaatgagaaaaaaaagctaagcatattattggaagctgatctaaataatatatgatgtatttgggtttttactattagaataaagcagcctatggttcattgggtgttttcttcttgtattca

SEQ ID NO: 227865 - DNA, 444 bp, Gossypium hirsutum
agagactaaatatctaatggcattgaagaatttatgtgatgttggcattgttcagccgtatcctcctctctgcgacatcaagggcagctatgtttctcagtttgaacacaccatcctactgcggccaacctgcaaagaagttatatcgagaggagatgactattaaggtggaagaccaaaaaagtttagttggtactcatctcctcagatattttgcgaataattttagttgtgtactttgtgttttttaacataaggaaggtccctaaatagcggatgatacccatgtttgtcacttgtttgtacttttgctttgccgtgtttgatgatagatggtgtgattgagacttgaatcaggcaatacatggtgataggaagactagaattttccattgcagtcaaagttatgtcttacaactacaaaacatgaatgatgttttactt

SEQ ID NO: 227866 - DNA, 317 bp, Gossypium hirsutum
tcgcccacgcgttcgggccactgccggagacactcacctcggaggcgaagatttcgacaaccgaatggtgaaccatttcgtgcaagagttcaagagaaagaacaagaaagacattagtggtaaccctagagctcttagaaggttgagaacttcttgcgagagggcgaaaagaactctttcgttcaccgctcaaaccaccattgaaatagattcgttatacgaaagtattgacttttactcaaccataacccgagccagatttgaggagctcaacatggatctattcagaaagtgtatggaaccagttgagaaatgct

SEQ ID NO: 227867 - DNA, 259 bp, Gossypium hirsutum
gatactaatttgtagataaagattatattacgtagtcgcataaagcggcatagtacacaacgcataactctggaattttaacatccatatttattctgtagctatcgttattttggcttccactagctggtgaactttccatgccaaaacttcacttgacgctgttgcagtcagtgctagggctgatcttgtaagggatgttgacaccgcacttgcctgggagtccgcttgcaaggccaaagttgatgccagtaatgcc

SEQ ID NO: 227868 - DNA, 418 bp, Gossypium hirsutum
cgagcgtccgatgagccaaaaccacatggtttctcccgcctgaaatctttcattccttttgacccatcacaaacttcaccaatttctcttgcagttcccagttcttgctcttcttttgatggggactcaactttgagtaccggttgtaactcagtgatgaaaagaatggtacgaatatgagatcagcctcgctggaatttttcactctgatggcttctcggctgcttggattctcggaaaattctgaagctaagaggtccaatgttagccagtattctatgctgtgttgtgaattcaatccacctggatatgatggaatttttgttctaatatcaagccaaacactgtttccttgtggttccagtccaacaatccgaagtggaactctggatctaaaatatacaagaaaaatttcaat

SEQ ID NO: 227869 - DNA, 401 bp, Gossypium hirsutum
aaaaaagagcagagaatcattatttccttttcttctcgttatacgaatttggttgtaccatgcaaaacctggattcatgagcttctcaattctaaagagattacctttattttctccaccatttgtcaacgtaatggcttcatcatctttctactgtggagttcaatcaaagagattcttagtgttagcccagcagctgcgtcattataagcctccaccttgttcctgggatgacaacgaggaacgaatcatcgaggaagccgccgggaaatttgtttcccaagtgggttttcaagaatccgttacccgagtggctcaaaacccagaaaagtttagatccaaaagagctgctgttttgatctgcctctttgaaagggatgcttgggactttgcgtttcatt

SEQ ID NO: 227870 - DNA, 466 bp, Gossypium hirsutum
  unsure (1)..(466): unsure at all n locations
acgcggaagaggagttctaaacaagattagtcaacaatttagagaaccttaaaaaaaaatggcaaacgcggcttcaggaatggctgtgcatgatgattgcaagctgaagtttttagaactgaaggctaaaaggacttaccgcttcatagttttcaagattgaagaaaaacaaaagcaagttgttgtggaaaaggttggtgaacctactgatagctatgaggctttcactgctagccttccagccgatgagtgtcgatacgctgtgtatgactttgattttgtgaccgatgagaactgccagaagagcagaatttttttcattgcctggtctcctgatacatcaaaagtaagaagcaagatgatctatgcgagctcaaaggacaggttcaaaagggaatgggatggcatccaggtagagttgcaagctaccgatccttccgagatggatnctgatgtcataaggagc

SEQ ID NO: 227871 - DNA, 468 bp, Gossypium hirsutum
ctctcaccatggcacaaacccttacacgtgccgccacatccaccctcacgcgccaccttactctctccgttatcctcccaaagcgcctgctttcctccaaatccatcacccatcctcctcccatcccttccctccgcttctcccgccgccctcttacccctctttcccacgccgtccgatgtctccctctcgctcccacgcgcttcacttccatccgttgccgcgtcaaccgctccgggaactccgcctactctccgctcaactcggggtcgaacttcagcgaccggccgccgactgaaatggccccgctgtttccgggttgtgattatgagcattggcttatcgttatggataagcccggtggagaaggagctactaagcaggaaatgatcgattgctatatcaaaacccttgctaaagtcgtcggcagtgaggaagaagccaagaagaagatctacaacgtttcgt

SEQ ID NO: 227872 - DNA, 465 bp, Gossypium hirsutum
gcgcggaagaggagttctcaacaagattagccaacaatttagagaaccttattctgaaagagggtccagagacgattgctgcatttattgccgagcctgttatgggagcaggaggtgttatacctcctcctgctacttattttgagaagatacaagctgttgtgaaaaagtatgacatactttttatcgccgatgaggttatttgtgcatttggaaggcttgggacgatgtttggatgtgacaagtacaatattaaaccagatcttatttcactagcaaaggctctttcttctgcatatatgcccattggagcagtcatggtgagccctgaagtttcagaagtcatttattctcaaagcaacaaacttggtagtttctctcatggattcacctactctgggcaccctgtatcctgtgctgttgcaattgaagcactcaagctctacaaggagagaaatattgttg

SEQ ID NO: 227873 - DNA, 401 bp, Gossypium hirsutum
gatgtctacaacacactagctagtattcctacttggattttttttcattttgcctgatttttcgaggtttagagttcttatataatcaactacctaatcctcttgctctctcaaccacaagcttacttgcaaacacacacacatactaacatctattgggaggtcagggcagcaaggctcctggaaattggcggatcacccaacactttcaaaggggaagacccttgctctcatcggtctcgatggctggggccgggacaaacccgatgaggacaattgcattcatgttgctcaaactcccaccatggattctctcaaacagggggccccctgaaaagtggagattaatcagagctcatggtaaggctgtagggcttcccacagaggatgacatgggaaac

SEQ ID NO: 227874 - DNA, 350 bp, Gossypium hirsutum
gttaatatattgcctcctaccaatacaagtgataaggtcactttggccctgtactatgaaactttatgcccatattgtgccgactttatcacaaatgaccttgtaaagatattcctcagcgatctgtttaccattgtcaatctaaagttagtcccttggggcaatgctgacattcttggcgatgaaccccattgccagcatggagaagatgaatgctacttaaataccatacatagctgtgtcatctaccactggcctgatgtgaaaaagcactttgatttcattcgctgcacagagcaacaaagctcaaagaaaccgctgttcaagaacatagcatcaatgttgaaaca

SEQ ID NO: 227875 - DNA, 162 bp, Gossypium hirsutum
gctgctgaaactgccattaatattttactaacactttcatagcaggtttttcagaagattgtattgtatgtaccgggaccactgatagcatagcggcctttcttgcagcacgagcaacaaaacccgggaaagcggtttgtattttttatttctgacttacac

SEQ ID NO: 227876 - DNA, 451 bp, Gossypium hirsutum
cgcgtacgcgtgcgtaaaagctgaactcactctatgagataattttggatctgaaacagagagagagagtatgaatcgccaccacgatccaaaccctgtcgatgaaaaagaagtcaatccattttcgaatggtggttctgtcgcacctgcacgaccactggcatccgaacctttgggttttgggcagaaacatgatgctactgtggatatacctctggattcaatgaatgattctaagaaaagagaaaaggagctcgcagcttgggaagctgatcttaaaagaagggaaaaggatattaagagaagagaagatgctgtttctcaagctggtgtttctgtagaatgataaaatttgccactaattgttccggttatacatcatgatatagctaatgtgataccggttaatgctcagatgctgcattatcttgcattcgcaagttggcttgtc

SEQ ID NO: 227877 - DNA, 440 bp, Gossypium hirsutum
acaaactattgtggtactgcaaacaatgctggagccatattagtcgttggtagaggactggttatcgggccgaagttaatacatcgcttaccacctcccattcagtctccagaaacatcgccggagcgtgttggagacgacacatggatgcaagaactaaacatccaaagaccaccaacaccaactcgtggtcgccctcaacccgaccacgaccggagctcacttgcatatatatgaacacggcattacaaattcaaggacttacaacctttttctaattgacaaatctctgtgtacgtattattgctcgtgtagtttctcgaagatggaagccattggttattgtatgcatagctatggagtttgaagatcaagatttaaccagtgaaattcaatatatgcctatagttttggtaggtatttaaagagggattttatag

SEQ ID NO: 227878 - DNA, 378 bp, Gossypium hirsutum
gttcatatgccggggagcatattgtagcagcagactatctagtgcctgtccctccttcggatgaccctattaccgctgcatccatcatgctgaagggtatgactgcccagtttctagtacgtcgttgcttcaaggtcgaatccggacacacggttcttgttcatgctgcagctggtggggttggatctttactatgcctatgcgcatatgcacatgtagactgtgtgccaccaccggaaccactaccagtaccggcgccaaaagatgactgatgtaggtttatttgaatggacaagaagaaagtttgatctgttttttttgctttttggatcctattgtttctcctttatcatggatttggaactcatttgttatggc

SEQ ID NO: 227879 - DNA, 457 bp, Gossypium hirsutum
tgcaatccctaaaagatcccccaaaaccttctatcttataaccttagctctcattttccctctctcttttgccattttagctcactcgcttgtcacccatcctatcttaaatcaactcgcttccgatccgctggcagacccgtcccagacccgccacgagtggactctcctcttaaccttccagttctggtacctaattttcctctttgccttctctcttttatcaacggctgcagttgtatttacggttgcatctctctacacgtcgaagccagtctctttcacttcaacgatctcagccatacccaaggtttttaagcgcctttttataaccttcacatgggtttctctcctgatgtttgtttacaatgccttggtgatcggtttcctggtcttggttgtcattgccgttgattcccggaatgcctttttttccttcttctcatttatggtgatc

SEQ ID NO: 227880 - DNA, 454 bp, Gossypium hirsutum
  unsure (1)..(454): unsure at all n locations
atcttagaaggtgtcttaataaacgccttctttcttcttcttctccctttctttgctttttcgaagtgtttcttaagcgagaatgagagagtgcatttcgattcacatcggtcaggccggtatccaggtcggaaacgcctgctgggagctttactgcctcgagcatggaatccagcctgatggtcagatgccaagtgacaaaactgtcggaggaggtgatgatgcttttaacacctttttcagtgaaactggtgctgggaagcacgtncctcgtgccgtctttgtggatcttgaacccactgttattgatgaagtgagaactggtgcttaccgccagctcttccacccagaacaactcatcagcggcaaggaagacccaactaacaactttgccccgggtcactacactattggcaaggagattgttgacctttgtttggaccggataagaaac

SEQ ID NO: 227881 - DNA, 198 bp, Gossypium hirsutum
gggatttactcactgcccattggaaaccctatcttgaacgtgcaatcagtttgaaaccatgttatgagggaggaattaatggtggtgaggtggcaacttacatcttgcaagagactgctattggcaagaattatgcttcaaacaagtttagtggtgttagaaggttacgtgattctatattttttggttatcaacttc

SEQ ID NO: 227882 - DNA, 338 bp, Gossypium hirsutum
cagatctcaaagatgtatacatcaaggaagaagatccacaaagataaggatgctgaaccaacagaatttgaggagtctgttgcgcaggcattctttgatttggagaataccaatcaagatctgaaaagtgaccttaaagatctctatattaattcagcagtccaaattgatgtttctgggagccggaaagcttgtgttgtccatgtcccatatagattgaggaaagcttttcgcaagggtcatgttaagcttgtgagggaacttgaaaagaagttcagtggcaaggatgtgattcttattgccacccggaggatattaaggccttcaaagaaagggtt

SEQ ID NO: 227883 - DNA, 281 bp, Gossypium hirsutum
  unsure (1)..(281): unsure at all n locations
acgcatggctgaactccaatccgaacccaccaccacccatatcctttaatcccacccggtttaacccaagacgagttccatgagttaaccgcggagtggaactcantaccacacctacactttaggtcaaggcaaatgctcttctttattagctcaacgtatcaactcaccaagcgacctcgtttggtcgatcgtccgccgtttctatcaaccacaaacgtataagcacttcataaaatgctgtgccgtcaaagacatttttcaaatggtcgtgggttgca

SEQ ID NO: 227884 - DNA, 339 bp, Gossypium hirsutum
ctccgattcgctctactttcgccaaagaaacgcaagatttgtagattcatttctattgtctatccacctccgaatcaatggctttgccgaaccagcaaacagttgattatccaagcttcaagctcgttatcgtcggcgatggaggaactggaaaaactaccttcgtgaagaggcatctaactggagagtttgaaaagaaatacgagccaaccattggtgtggagggtattcctcggacttcttcactcactgtggcataatcccattgtaccgatgtaatactgttggacaggagaaggttcgtgggctgaaatctgctttcgtattccttgggggacc

SEQ ID NO: 227885 - DNA, 224 bp, Gossypium hirsutum
ctccgattcgctctactttcgccaaagaaacgcatgatttgtagattcatttctattgtctatgcacctccgaatcaatggcttggccgaaccagcaaacagttgattatccaagcttcaagctcgttatcgtcggcgatggaggaactggaaaaactaccttcgtgaagaggcatctaactggagagtttgaaaagaaatacgagccaaccattggtgtggag

SEQ ID NO: 227886 - DNA, 403 bp, Gossypium hirsutum
gcgtccgaagcagtcgacgcctctttgataaagtccattgagggagtcccagacttgaaggcctacctcgccgcaaggtgttctctcaagtctggcatgaaaccgcacgagcttgtcttctagagggtattttgcattcccttatgttaaagggattttacttttgaattcttttggtttagattatctatggttttattatggggtgctattgctatatgtccagaacctaaattttggatagtatcttctgttatgcaagaacttaaagtttccttatttgtttgtgttctgtgcttatttgattgaagcttgttctattttaatgatggccgatgggaacacaagtatttctacctgaataattttcatatcagtaaataaaatctcttaaatattgaac

SEQ ID NO: 227887 - DNA, 450 bp, Gossypium hirsutum
attctcctccatctcacggtaacaagatctcccttcccctctctttctctccggcggcgatctcagatcaccggtaaatcgcaccgtagcgcccgattactcgtcacctctgtgatctccgctgacacctcgtggtttcagtttattctaactcttcgccatcatgaatcctgaatatgattatctctttaagcttttgcttattggtgattctggtgttgggaaatcatgtctacttttgaggtttgctgatgattcatatctggatagctacatcagtaccattggtgttgactttaaaatccgtactgtggaaccgggttggaaaaaccatcaaactccaaatttgggacacttgctgcccaagaacgctttaggacaatcactagtagctattatcgtggggctcacggtatcatagttgtttatgacgtgccagaccaagagagt

SEQ ID NO: 227888 - DNA, 451 bp, Gossypium hirsutum; identical to SEQ ID NO: 198973

SEQ ID NO: 227889 - DNA, 437 bp, Gossypium hirsutum
caacaacccttctcaaatctcccatggaattaacccttcttttcccccttttcttcttcttcaccttagcttttgctacatacatatccactctaaccttaaaccaaaaccatccatcatcatcatcatcatcaagctggagaagcgataatgaagtgatgggattgtacaaatcttgggtcatccaacatggcaaagcttacaatggtatcagtgaagaagagaaaaggttcgaaatctttaaggataacttgatgttcattgatgaacataactctaacaacaacactacatataagcttgggttgaacaagtttgcggatttaaccaaccaagagtaccgagccaagttcttgggcaccaggactgaccctaggcgtcgactcatgaagtccaagatccccagctcacgttacgctcaccgtgccggcgataac

SEQ ID NO: 227890 - DNA, 427 bp, Gossypium hirsutum
cattagcaaccatagccatggcttcctcaccaaaactcttctctatgtctatcctcttcctttttgcgctcttctccatgcaaatgcaggctagagagtacttcagcaaattcccaagagttaacatcaatgagaaagagacaacaaccagagagcaaaagcacgagaccttcgttccccagaccacccaaaagccagaagaacaagagccaaggttcattcctgaaacccaaaatggttatggcctttacggccacgagtcaggctcaagccggcccagtttcaccaccaaagaaacctatgaaccctatctcacccctgttagattccaccctgatgagccctataacagcatccccgaatcctccaacaataaagacacttactactacaacaggaatgcctacgagtcccctaagcagcaaaa

SEQ ID NO: 227891 - DNA, 383 bp, Gossypium hirsutum
gatataataagcacctccccgtaagcaaaccacaaaggaaagcttggagagagacccaaaaacaatgtctaaggaagttagtgaagaaggacagggtcgtaaggactatgtggaccctccaccggcacctctgattgacatggctgaactcaagtcatggtctttttacagagccctcatagctgagttcatagccactctcctcttcctctatgtcactgttgctactgtaattggtcacaagaaacaacaagatgcatgtgatggtgttggtctcttgggtattgcatgggctttcggtggcatgatctttatccttgtttactgcactgccggtatctcaggtggacacattaaccctgcggtgacttttgggttgtttt

SEQ ID NO: 227892 - DNA, 411 bp, Gossypium hirsutum
  unsure (1)..(411): unsure at all n locations
cccacgcgtccggccaattgtttgagctagctagctcttactcaaatggcaaccaaaacgatgatgttgcaaatattttcacttttcttctttttgttcagtatctgcaactccattttccttggtgctaatggagatgacaatggtggttggcaaactgcccatgccaccttctacggtggtgctgatgctaccggcacaatggggggagcttgtggttatggaaacctgtacagtcaagggtatggaacgagcacagcagctttgagcactgcactnttcaacaatggcttgagctgcggtgcctgctacaagctccggtgcaacaatgatcctcaatggtgcattagtcgaaccataaccgtgacagccaaccatcttttgttcctctaactatgctttatctagtga

SEQ ID NO: 227893 - DNA, 284 bp, Gossypium hirsutum
ttttattgttccttccttcgccgtctactgctcttgtgacctcgatttcaagtgaaacagaatgggtaaggaaaagactcacattaacattgtggtcattggccatgtcgattccggaaaatcgaccaccactggccacctgatctacaagcttggtggtattgacaagcgtgtgattgaaaaggttgagaaaaaagctgctgagatgaacacgaagtcattcaagtatgcttgggtgcttgacaagctcaaggctgaacgtgagcgtggtatcaccattgata

SEQ ID NO: 227894 - DNA, 213 bp, Gossypium hirsutum
gattttagtgttcccaaaaaagcgggggcctataaatccttcaataagagcgctgatatacgcgataatggcaaggctacaggtaccacccgagggcgttccttttcgagacgaatggcctttcgcaattcatcttctgggtcacatctacatcgatgatattaatagtgcacggtttctctggaaatcaatacctcctgcaatcaaagagag

SEQ ID NO: 227895 - DNA, 341 bp, Gossypium hirsutum
ctcaacatccgattattcctttccacctctcacctctctcctccttttcatcgaacagctctcaaaagtcccaatttttccctaagaaaaaaccctaactccatctccacatttacgcaacatgtcattcgatgaagaagagtccttcgaacacaccctcctcgtggtccgcgaagtcactgtctacaaaatcccggctcgttccacctccggtggttacaaatgcggtgagtggctccaatccgacaagatctggtcgggtcggctccgggtcgtctcttgcaaggaccgatgcgagatccgattggaggatcccaacttggctgagctattcgccgctt

SEQ ID NO: 227896 - DNA, 380 bp, Gossypium hirsutum
gtttagtgctcaaatgggtctcagtgaccagcacattgttgctctttctggtggccacactctgggaaggtgccacaaggagaggtccgggtttgagggaccatggactaccaaccctctcatctttgacaactcttacttcaaggagcttttgtcgggagagaaggaaggccttcttcaactaccaactgacaaagatctcctgtcagatcctgttttacgttcattggttgaaaaatatgctggcgatgaggatgccttctttgctgactacaccgaagctcacctgaagctctctgagctaagatttgctgatgcataaactgatggttgccgaatagaatggaagcaacaacatctgccttcacaaaatgaatgta

SEQ ID NO: 227897 - DNA, 172 bp, Gossypium hirsutum
gggatgttaaagagttgcttctgctcgatgtaactcttttgtcacttgatattgacacactaggtgggatattcactacgctaagtaaccggaacacaaccatttcaacaaagaaaagctatgtgttctatactgcaactgataaccagacttaagtaggtatcaaggtgct

SEQ ID NO: 227898 - DNA, 446 bp, Gossypium hirsutum
ggagaaaccaggaaaccaaaccaaactagtgagccgcagcttctcttcttctgtatcccaaaatgggtgcttttaggtttcatcaataccaagtggtgggcagaggtcttcctacagacgcagatgagcatcccaagatttaccgtatgaagctttgggccactaacgaagtgcgtgccaaattcaagttttgggattttttgaggaagctgaagaaggtgaagaaaagcactggacaaggtttggccatgaatgagatctttgagaaaaaccctaccaagatcaagaactatggcatttggctgcgatatcaaagtcaaactggttatcacaatatgtgcaaggaataccgagacacaaccctcaatggtgctgtagaacagatgtacactgagatggcgtgtcgtcaacgggtgaggtttccttgtattcaaattatcaagaca

SEQ ID NO: 227899 - DNA, 455 bp, Gossypium hirsutum
catcaatttgctctgaagatcatgttggctatttttcacaaggcatttgctaatccaccagaggagctgaatagtccagcttctcataaatctaccaagaagcctaaacagcctgaagaaaccctaaatgatttcctatctcatcaccctcacaacactttctccatgagctttggcaacgctgctgttttggcttatgtccgccatgaacgtgctgcttcagttcatcagaggttgttttgtgggtttgatgacatatactgcctcttcttagggagcttgaacaatctatttatgctgaatagacaatatggtctttccaaagggagcaatgaggcgatgtttgtgattgaagcatataggacgctgagggattagggtccataccctgctgatcaggttgttaaggatcttgaaggaagctttgcctttgtgatctatgacagcaagactgg

SEQ ID NO: 227900 - DNA, 403 bp, Gossypium hirsutum
cggacgcgtgggcggacgcgtgggtccaaatacccaaaagtcaagagtagattaaactaatggccggaatcggacctttgactcaagattgggagcccgtcgttattcgtaaaaaagcccctaccgccgccgccaagaaggatgagaaagtcgttaacgccgcccgccgtgccggtgccgagatcgagtccatcaaaaaatcaaatgctgggacgaatagggcggcttcaagtagtacttctttgaacacaaggaagctcgatgaagacactgagaatcttgctcatgaccgagtgccaactgagctaaagaaagccatcatgcaagctcgaatggataagaaacttacccaggctcaacttgctcagatgatcaatgagaagccccagattatacaggagta

SEQ ID NO: 227901 - DNA, 464 bp, Gossypium hirsutum
gaagttaaaaaaatagagagagtaactaatcatgatgtaaaagcagtcgagtacttcttgaaacagaaatgccaatcacagccagaaattgccaaggtccttgaatttttccattttgcttgcacatccgaggacataaacaaccttgcccatgcattgatgttgaaagaagcaatgaccaaagtcatgtttccaaccatggataaattggtcgaggcaatatgtaagctggctaaggctaatgcaagcgtttctatgctttctcgcacgcatggccagccagcttcacctacaaccttgggaaaggagatggccattttttctgttaggctaagcagagaaaggcaagaaatttctcaagtcgagatgatgggaaaatttgctggtgcagttggaaactacaatgcccatattgttgcatatcctactgttaattggcctcaaatcgcaaaacagtttgtgac

SEQ ID NO: 227902 - DNA, 414 bp, Gossypium hirsutum
gggatgttaaagagttgcttctgctcgatgtaactcctttgtcacttggtattgagacactaggtggaatattcactaggctaatcaaccggaacacaaccattccaacaaagaaaagttatgtgttttttactgcagctgataaccagactcaagtaagtatcaaggtgctctaaggcgagcgtgaaatggctgctgacaacaagctcttgtgtgagtacgacttgcaaggaattccaaaatgctactagagggattgttgagaatgaggacacatttgacattgatgccgatagtattgacactgcttgagtcaatgttactgtcgctggctaagaaactactatccatgcggacctctggtggaatgaggatggaagagatctgaaacgataaaagtgtaccattttaaag

SEQ ID NO: 227903 - DNA, 456 bp, Gossypium hirsutum
attacccttttctacttaatctctcattgcttacttatattgtaagtgtgaccaagtaaaccaagtacagaagctcaatgcccaagatggaggccagcagcagcacctcccatgacccagcattgttccatgctcccttgctataccaccctcggagaaggagcagcagacccttaaagggtttcgcagtgataattgggtccgtcgttttcctactctcactggtcacattaatcgttaaccaaagcccggagccattagcaagtaaccccagtagtgtaacggaggcagggtcgtattcaatggcggcgcagccaagagggatagctgaaggtgtttcagccaagtcaaacccatcactttttgacaaagttgggtttaattggacaaacgctatgttttactggcaaagaactgcctaccactttcagcctcaaaagaattggatgaatgatc

SEQ ID NO: 227904 - DNA, 317 bp, Gossypium hirsutum
tgcagtcccatttggcgggttcaagatgagtggtcaaggaagagagaaagggatttatggcctttcaagttacttgcaagtcaaggcagttgtcactcctttgaagaacccagcatggttgtaatgtttgtttgtttgttttcttacaaattgccatgaatctaaacttgaactaataagctgccagttttttaaattttgaatgatcagcgtatggtaggatcattcctgaactgataatttgctcatatttggatgagtatggggcataatgttttaaatatatgaataagaaaaaaggcttaaaataatatttt

SEQ ID NO: 227905 - DNA, 253 bp, Gossypium hirsutum
gtctgcttaggctcccagcgttgctcttacactataggactccctagatatttcgctaatttccatggtcttcaccattccctttggctgcaaagagggtgggaaatttaaaaagccttttacgcctgcaaagggggtgcctgttcagatcacccactccatgccggcttacaagattgagatctttaaatctttggggggctgggctgagaaccacattctgactcaccttaaaccagttgagaaatgttgg

SEQ ID NO: 227906 - DNA, 463 bp, Gossypium hirsutum
cccacgcgtacggttttatttgcaacagtaaaatcccaattgaaaactttaaagaatccacgcgccactatctctgatctcactctccgcccatggcgaccattccgatgacaaactctcaatccaccgccggaagtggaccccaatcacaacccccaataaccaaccctgctttccgtacattcctctcacgactgacgtcgtcgatccgtcagggattctcccagcgtcggccatggttcgaactcatcgatcggactgccatggcccgtcccgacaatttaacggatgcctattctcggatccgtagaaacttttcctatttcaaagtcaattacattactctacttgcacttgttctcgctttctcgcttttatctcatcctttttccctcctcgtcctcctcggcctccttgccgcttggctcttcttatacttgttccgaccgtcggatcaacctct

SEQ ID NO: 227907 - DNA, 473 bp, Gossypium hirsutum
ggagtagtgaagcacatattgttggcaaagttcaaagatgaaatccaacctgagaagattgaggaactcatcaaaggctatgccaatcttgttaatctcattcaccccatgaaagctttccactgggggaaggatgttagtattgagaacctgcatcaagggttcactcatgtgtttgaatccacatttgaaagcacagaggggattgctgagtatatagctcatcctgctcacgtggagtttgcaaatctgtttctccccagcttggacaaggtcattgtatttgactacaaacccaccgttgtacgttgctaagttacaagcatagttctgtctcaatgtagcttttgtcctgttcatgtctgttgttattttgaataaagtttgacgtcttgtactatgaaatgcatccatccctagtgatcaaggcaaaagttggttggttttatcttctttaggttttacatacaata

SEQ ID NO: 227908 - DNA, 405 bp, Gossypium hirsutum
cccacgcgtccgaattgtttgagctagctagctcttactcaaatggcaaccaaaacgatgatgttgcgaaagattttcacttttcttctggggggtcagtatctgcaactccattttccttggtgctaatggagatgacaatggtggttggcaaactgcccatgccaccttctacggtggtgctgatgctaccggcacaatggggggagcttgtggttatggaaacctgtacagtcaagggtatggaacgagcacagcagctttgagcactgcacttttcaacaatggcttgagctgcggtgcctgctacgagctccggtgcaacaatgatcctcaatggtgcattagtcgaaccataaccgtgacagccaccaacttttgtccccctaactatgctttatctag

SEQ ID NO: 227909 - DNA, 474 bp, Gossypium hirsutum
ggaccacttcttcccttccattttactttgttttagttgccataacgtcaccttccaatacaacccacggtgaggcaacaatatgtcttcactactctcacgttgctcatcctgttttccctcagttgttcaacaacattagcccaatctccggcactggccccggcaccttctggcccgacaaacgtcaccaagatcctcgaaaaagccggtcaattcaccctcttcattcgtcttctaaagtccactcaagtggccaaccagctgctcggtcagctcaacaattccaacaatggtatgaccgtttttgcaccaacggacaatgctttctccagccttaaatcgggcacattgaattcactcaccgatgaacaaaaagtgcagctggtgcaattccacatcgtcccaacatacctcacctcgtctcagttccaaaccattagcaaccctttgagaacccaagctggtgatagt

SEQ ID NO: 227910 - DNA, 383 bp, Gossypium hirsutum
ctccattttgcccatttcactgctctcccctagatcgtctccaagagagagatctccttacagctacgcgtacacattcacacacacattggctgaatgggtcgagtcatccgagctcaacgtaagggtgctggttccgtcttcaaggcccacacccaccaccgcaagggtcctgctcgtttccgcagcctcgacttcggtgaacgaaatggctacctcaagggtgttgattacgatgttatacacgactctggccgtcaagcttcttgtggcgctgcttaacaattccaacattgtgttgaccggttttgcaccaacggtcaatgctttcttcaggcttaattctgtcacattgtattcattcaccgatgataaaatagtgc

SEQ ID NO: 227911 - DNA, 228 bp, Gossypium hirsutum
gattattggaaggttacgccaatggttaagtctactggtctgtgtgcttgctgttatactactcaaatctgaaggcgctagtgtagggagtacttatctgcaggatgccgtagcgaaaggagctgtttgtttggatgggagtccaccagcttaccattttgacaagggctctggcgctggacttgataattggattgctcacatggagggtggaggagtggggtgaaa

SEQ ID NO: 227912 - DNA, 303 bp, Gossypium hirsutum
aaagaactcaaatctttatcatccaccatgggaggaggaaatgcccaaaaatccaagatggctcgtgagaagaacttggaaaggcagaaagctgccgccaaaggaagccagcttgattctaacaagaaggccatgaccatccagtgcaaggtgtgcatgcaaacattcatctgtactacaacagaagtgaaatgccgggagcatgctgaggcgaagcatcctaaatccgacctatacacatgttttcctcatcttaaaaagtagcacactggggaagtggagatggctttgatcattcatcta

SEQ ID NO: 227913 - DNA, 287 bp, Gossypium hirsutum
gccaattgtttgagctagctagctcttactcaaatggcaaccaaaacgatgatgttgcaaatatttcgacgttttcttctttttggtcagtggcgtgcaactccattttccttggtgctaatggagatgacaatggtggttggcaaactgcccatgccaccttctacggtggtgctgatgctaccggcacaatggggggagcttgtggttatggaaacctgtacagtcaagggtatggaacgagcacagcagctttgagcactgcacttttcaacaatggcttgagc

SEQ ID NO: 227914 - DNA, 371 bp, Gossypium hirsutum
  unsure (1)..(371): unsure at all n locations
gcgctcacatcccattcgatcaaaagaactcaaatctttatcatccaccatgggaggaggaaatgcccaaaaagccaagatggctcgtgagaggagcttgnaaaagcaaaaagctgccgccaaaggaagccagcttgattctaacaagaaggccatgaccatccagtgcaaggtgtgcatgcaaacattcatctgtactacaacagaagtgaaatgccgggagcatgctgaggcgaagcatcctaaatccgacctatacacatgttttcctcaccttaaaaagtagcacactggggaagtggagatggcttgtagcatgcatctatcttgtnccattggtactgtatgagttacttctttaaaatctctct

SEQ ID NO: 227915 - DNA, 410 bp, Gossypium hirsutum
cccacgcgtccgctaatcttcagtttttgccttcccaccggcttaacaccgcctttcagttttcattgggtctaagaaaaggattaaaagggcgaagaatatgatgcgagccgttcaatacagtaaatataacggaggcgccgctgatctcaagcatgttgaagttccggttcccagtccaaaaaaggatgaagttttgatcaaagtagaggcagctagtattaacccaatcgactggaaaatacaggagggggtagcgcgcccatttttaccttgcaaattcccccacattcctggtaccgatgtagcaggagaaatcgtacaagttggatcaggtgttcagagtttcaaagtcggtgatacagttgttgccgtacttggtaatggaggtgcactagctgaatatgctg

SEQ ID NO: 227916 - DNA, 426 bp, Gossypium hirsutum
tcttaataaacgccttctttcttcttcttcttattcctttattgctttttagaatttttcttaatggaaaatgagagagtgcatttggagccacatcggtcaggccggtatccaggtcggaaacgcttgctgggagctttactgtctcgagcatggaatccagcctgatggtcagatgccaagtgacaaaactgtcggaggaggtgatgatgcttttaacacctttttcagtgaaactggtgctgggaagcacgtccctcgtgccgtcttcgtggatcttgaacccactgttattgatgaagtgagaactggtgcttaccgccagctcttccacccagaacaactcatcagcggcaaggaagacgcaactaacaactttgcccgtggtcactacaccattggcaaggagattgtcgacccttgttt

SEQ ID NO: 227917 - DNA, 463 bp, Gossypium hirsutum
ctggaacagtgttgcataggccatcagggccagatcctacatcagagttcgagcattcctccattgcagcaacacttaagaagattttgaatctcaaagaatttctaacaaagcgtgatgcgtgggctggttcctttgatattgttgtcaatcgaagcaccccaagaacagactgtccagaaaaactggcagagccagtgaaaatgagagacagtgatgcaaaagaaacagcaaaactaagcgattttcaagaagagctagtgcaagcagcagcagcattgaaaggagatccattcaatcttgtcgaaaacatgacagtttcatctggtctcaagtacgttgaagatgccttcaaaaaattctatgatgacggccagaaagctaaggaaatcaatgaagttgaagatactgtttcagctgatgcatcaactaggaggacaacagcttccaaaactttcatgca

SEQ ID NO: 227918 - DNA, 475 bp, Gossypium hirsutum
gcgtttgtctgtcgattatggcaagaaatccaagttgggtttcactgtctacccatctcctcaggtctggacttctgttgtgtgagcctgacaacagtgttctctcaactcactcccttttggagcacactgatgtggctgttctccttgacaatgaagctatctacgacatttgcaggcgttctcttgacattgagcggcccacctacaccaatcttaaccgtcttgtctcccaggtcatttcctccttgactgcctcactgaggtttgatggtgccttgaatgtcgatgtgactgaattccaaaccaacttggttccctacccaagaatccacttcatgctttcctcgtatgctccagtcatctctgctgagaaggcttaccacgagcagctctcagttgctgaaatcaccaatagtgcctttgagccctcatctatgatggctaagtgcgatccacgccatggaaagtacat

SEQ ID NO: 227919 - DNA, 389 bp, Gossypium hirsutum
gtaagatccagactccaactgatgaagtggttgttccttatgacaccttgtctccctctcctgaggatcctgctgaaaccaagaaaggtgttggacaaacttgttgtcttaaagcttaatggaggtcttggaaccactatgggatgtactggtcccaaatccgtcattgaagttcgcaatggcttgacttttcttgacctaattgttattcagatcgagaatcttaattctaaatacggatgtaatgttccgttggttctgatgaactcattcaacacccatgatgacacattgaagattgtcgacaagtactcaaattcaaacattgagatttatactttcaatcagagccaatatcctcgtctggttgttgaaaattttacttcatt

SEQ ID NO: 227920 - DNA, 438 bp, Gossypium hirsutum
tttctcctttcttcctgttggagagattagtaaaaaccaaaaatggggagagaagtatcagaaaggtgcattgatagcctactaatcggaatggtttccacatattgcaaccgtttttacgccaataagcctgagctcgctgctcgtcggatcgaagccattgggtatcaggttggccaccagctctctgaacggtacacgatggagaggccacgttttagtgatcatttagaggcaatcaagttcatctgcaaggacttttggtctgaactctttaagaagcagatagacaacttgaagacaaatcatagaggtacctttgtattgcaagataatcgttttcgttggcttacacgcatgtcaatttgatcaatcacctgaaaatggagcatctttagagccttctatcattgctgatgagaaggctgtggaaagcat

SEQ ID NO: 227921 - DNA, 242 bp, Gossypium hirsutum
tgaagtttgtaatagagaggataaacgaacaatagcacctgagcatgtactcaaggctttagagtggttgggtttggaaagtacatgggagagctctatgctgcatatgaacaacacaagaatgagacactgcaagactctttgaaaggtgggaaatggagcaatggggccgagatgaccgaagaagaaacagtagcttagcagcaaaaaatgtttgccgaggcacgagcaaaaatgaatgg

SEQ ID NO: 227922 - DNA, 430 bp, Gossypium hirsutum
cctaaatgattccccaatggctaagatcaccaagcagggcagcaacaacaaaccccacaaagtcaccttcgcgatttctctttctcttcattcagagacattgatgctatcctcaaagaagaagaacaacaacaagtcctctatcctcaatcccctaaaagaccctccattttccaccgtgtcaagctctccaccaccgtcttacgcgcctggtccttcttcaaccgccgtccacttactctccccaacgctgaccaacgcgtcgttgtttacctcaccagcctccgtgtcgttcgaaaaacctttgaagattgcaagaccgttcgatcaatccttagaggactcaatgttcccatcgacgaacgagatgtgtcattggattctagtttcttagacgagttacaagggaccattgggcgtaacaaaagtt

SEQ ID NO: 227923 - DNA, 335 bp, Gossypium hirsutum
aaaaaaaaaaaaacagtgagatctgctacgagctgattcgaaaatggagtatcgcaaaatcaaagatgaggataatgatggaggaacagggagtaatgacattgagaatctacgaggcatagggttttcgggggttgcttctgtaagtaatgttcctccaagggaacaggccaagtggaaacgcaagacagttgttacagttgcattgacttttcttacaagttcacaagcaatacttattgtctggtcaaagagagctgggaagtacgagtacagtgttaccacagccaactttttggtggagactttgaaatgtgctttgtctcttgcaaccc

SEQ ID NO: 227924 - DNA, 469 bp, Gossypium hirsutum
cttatctctccaatttccctggaagataattaaacttaagagcaatccccatggctatctcctttttcggcttcctctctctgctttggaggcctttctcctccccctcatcagacggtccagaaaacttcatcatccacgtgtccaaatcacacaagccgccccttttctcctctcaccatcactggtactcttctatcctcgcttccctccctccttcccctcaccccatcaagctcctctacacctacgaacgtgtaatcaatggcttctccgctcgccttacggccgctcaggcagataagctcaggggacttcccggaatcctttcagtgattccggaccaggttcgtcagatccacactactcgaacccctcactttttaggcctttccgatggtgttggtctttggcaaaactcctattatggcgacggtgttataatcggagttttagataccggaatatg

SEQ ID NO: 227925 - DNA, 395 bp, Gossypium hirsutum
cgaagtctagcaacaaggaagccgagaatgggacagggaaaggagaagaccctcaagacggaaggaggtcaaagaagaaaaccggagagcgacaagacgaggaatgcatggaaaacggtctctcagatacggatttcgagcattacgtgaaggtaatcagatggttagaatgcaaaggacatatcgaaaagaacttcagacagaaattcctcacctggtacagcttaagagcaaccccgcaagaagtaaggatcgtgaaagtattcgttgatatcttcatttccgatccagcatctcttgcggagcagctcgtggacacattctccgattgtatcttcagcaaaggatcatccgtcgtaccggctggcttttgcatgaagcttttgcattgacat

SEQ ID NO: 227926 - DNA, 420 bp, Gossypium hirsutum
cccacgcgtccgcgatgctgaggatattcaacccctcgtctgtgacaatggaactggaatggtgaaggctggttttgctggtgatgatgctcccagggctgtttttcccagtattgttggtcgaccccgacacactggtgtcatggttgggatgggtcagaaggatgcctatgtaggagatgaagcacaatccaaaagaggtattcttactttgaaatatcccattgagcatgggatcgtcagcaactgggatgatatggaaaagatctggcatcatacattctacaatgagctccgtgttgctcctgaggagcaccctgttcttctcacggaagcacctttcaaccccaaggccaacagagaaaagatgactcagatcatgtttgagaccttcaatgtacctgccatgtatgttgccat

SEQ ID NO: 227927 - DNA, 422 bp, Gossypium hirsutum
ggaacacaacttgcagcattcaacccatttctctcttcatctaaaccaccccttcctccatgtgggaggtatctttgagaacgcctatgtgaggttcacgcggtttatcctcaaaggacaacgctttcctcaggggccaatttaacaacagccggtttatgaatttttatgctagccgtgctcccagaaagcaaagaggtctcgttgtttcaccaagttgtgtccttccactaacggaggagaatgttgagaaggttttggatgaggtacgtcctggcttgatggccgatggagggaatgtgggtttgcatgaaatagatgggtttgccgtggtcttgaagttgcatggagcatgtggttcatgttccaactcatccatgacccctaagatggggattgatacttgggttcgaggtaaaatt

SEQ ID NO: 227928 - DNA, 377 bp, Gossypium hirsutum
ataagccactcgaattgcctgtttttcctttagtcatgggtcggaagcttattggaggaagtgatgtgtgagggatgaaagaaactcaggagatgctagacttctgtgccaagcacaatatcactgcagatatcgagctgattcggatagaggaaatcaatacggccatggaaaggcttgctaaatctgatgtcagataccgatttgtgattgatgtggcaaattccttgtcacagtagggttcattgtgaaagaactagtccagtaagtttaaagattatgatcttaatggagaagagaaaacagatgaactttgatggcttgggacttgtaatgctatataataataatttatatgaaatgattttgtggtgttc

SEQ ID NO: 227929 - DNA, 464 bp, Gossypium hirsutum
attttgcttcagaccactacaaggctagctcctaccctctctcttatttgatcattcactttacagagaggaacaataagtcctggggagagcgacatcaagaagatcgagaacgcttcaaacaggcaagtcacttattcaaaacgaaggaacggtttattcaagaaagcccaagagctcactgttctttgtgacgccaaggtttcattgatcatgttctccagcactggcaaattccatgagttccttagccccaacatctcgacaaaagggtttttcgatctttaccaaaagaccacagggattgatctatggaactcccattatgagagaatggaagaaaattacaggagcttgaaggagataaacaagaagctgagaagggagattaagcaaagaatgggtggagacttgaatgaacttaacattaaagaactgcaagctcttgaagctaaaatggtttc

SEQ ID NO: 227930 - DNA, 454 bp, Gossypium hirsutum
cccacgcgtccgtttcgtttgttttttttcaatcaatattttctttcagctctcaagctttcttgggagtgaataagcatgtctcatcgcgaagtttgagcatccgaggcacggttcattgggctttctcccgaggaaaagagcctcccgacatcgaggaaaagtaaaggctttccctaaagatgatccgactaagccatgcagattaactgcattcttgggttataaggctggaatgacccatattgtgagggaagttgaaaagcctggatcaaagcttcacaagaaggaaacttgcgaagcagttaccattgttgagaccccgcctatggttgttgttggagtagtcggatatgtcaaaactccgcgtggtcttcgtactttaggcaccgtgtgggctcaccatttgagtgaggagggtaaacgaaagttctattatgcactgttgcatgtc

SEQ ID NO: 227931 - DNA, 474 bp, Gossypium hirsutum
gtaactgccgctgcacgattgcctcttctgctacggtagccattttcattataatataccttatttgcatgtcctcaaaacccacgtctgccccggtttttattctacaaaccacaaccaagtttcggctttaccttcaaagccaaatccccaccgtctacataacacacttgttccggttctgggttcttttgcttttctgctgttttttctactctgaaaatggaggaagcgtcgaaacagcagatttacctacacggtgacttggatttaaccattgttgaagccaggagattgcccaacatggattttatggtcaatcatctccgcagttgcttaacctgtgagccttgcaagtctcccgcacagactgctgctaaagaaggggactccaaaatccgcggccaccgtaagatcatcaccagcgatccctacgtcaccgtttgcctcccccaagccaccgtggctcgcaca

SEQ ID NO: 227932 - DNA, 361 bp, Gossypium hirsutum
gcaaccaaaagcttcccactttaacagggcagcaataaaacttggttggctttataaacaaaggacttaaaagcaaataactcaaaacaccattttcaagcaaaatggaaaactgcaactttgatcattagtctttcatgctatcgtcaccatcttcctcttcgctcaactcgagatcagcaagcagctcttccaacggaactgaaggcacatcatcgccatctgacacagatgccatttctgatggttggtaatctttgttgcggtacagcgataagtttaaccgtaattcagggttctcttctaaatctttcaagaactcttcatacttcgtggtcatcttttctttgtaacctctacc

SEQ ID NO: 227933 - DNA, 408 bp, Gossypium hirsutum
gcgcccacgcgttcgatcgtttttactcccacgggaaatccatcacgcgcttatcgatacagtccgttatgaaagagcgctgtaacatcccgtgcgaaaccgttaccgatcaatcccaaaagcgggttgtacctcttgctcacctccgacgatgtgtacgtcgaagatttttgcggccaagtttgtgggttccattacttcacgttcccgtcaatcgtggggtacacgctcccgtatgcatgggtgggtaactccgcgaagctttgcccaagagtatgcgcttaccctttcgccgtacctcaatacatgccggggttgaagccgttaaagtcacccaacagtgacgttggagttgacgggatgataagtgtgatcggacacgaagtcgtcgaattagcaaccaaccca

SEQ ID NO: 227934 - DNA, 417 bp, Gossypium hirsutum
ctttctcccaatttctatttatcttcttctccttctctttagtcttttacgctgcggccagaaaggaggaagaaaccatgccgaagaacaagggaaagggaggaaagaacaggaagagaggaaagaatgaagctgacgatgagaagcgtgaacttgtgttcaaggaagacgggcaagagtatgcccaagtgcttcgtatgctaggcaatggccggggtgaagccatgtgcatagatggtactaagcgcctttgccatatccgaggaaagatgcacaagaaggtttggattgcagctggtgatataattcttggtgggcttcgcgactatcaggatgataaggctgatgtgatccttaatacatgcctcttgaaagaagggtcttaaaggcatacggtgaggttccagagaacactct

SEQ ID NO: 227935 - DNA, 470 bp, Gossypium hirsutum
ttcaaatggcaaccaaaacgatgatgttgcaaatatttccacttttcttctttttgttcagtgtctggaactccattttccttggtgctaatggagatgacaatggtggttggcaaactgcccatgccaccttctacggtggtgctgatgctaccggcacaatggggggagcttgtggttatggaaacctgtacagtcaagggtatggaacgagcacagcagctttgagcactgcacttttcaacaatggcttgagctgcggtgcctgctacgagctccggtgcaacaatgatcctcaatggtgcattagtcgaaccataaccgtgacagccaccaacttttgtccacctaactatgctttatctagtgacaatggcgggtggtgcaatcccccacgagaacactttgatttggccgaaccggcattcttgcggatagcagaatatcgagctggaatcgtccctgttatg

SEQ ID NO: 227936 - DNA, 327 bp, Gossypium hirsutum
gtgttattaagctaggtgaaaagcaggctgatagcaagtgtgctcttgtttatggtcaaatgaatgagccccctggtgctcgtgctcgtgttggccttactggtctgactgtggctgaacatttccgtgacgctgaagggcaggatgtgcttctcttcattgacaacattttccgttttactcaagcaaactctgaagtgtctgccttgctaggccgtattccatctgctgtcggttaccaaccaaccttggctactgatcttggaggtcttcacgaacctattaccaccaccaagaaaagtactatcacttcttgtcaagccatat

SEQ ID NO: 227937 - DNA, 174 bp, Gossypium hirsutum
gacttgagaggtgtaggataagtgggagctctcggtcgaaattgaaataccactacttttaacatgattttacttattccgggaatgagaggcggttcactgcccctctttttggacccaatgcccttttcttcctaccgctccttgcgcttcacattttgggcgggcagtttt

SEQ ID NO: 227938 - DNA, 320 bp, Gossypium hirsutum
cggacgcgtgggagaacgtctggaaagggaggccgccgaagctgagcagaaacggaaggaagaaggggaagctcatgaaagagcaggaggggaagctgctgaaaaagaggctgcccgggctagaatgcgagaacaaaaagccttatcacttggtgatgaacctgagaaaggaccaagtgttacacaggtattggtacggtttcccacgggtgaacgcaaagaaaggagatttcacagcacggcaacaatccaatcagtttatgactatgttgattcattgggttgcttagaagttgaggactacatccttttgttcaact

SEQ ID NO: 227939 - DNA, 424 bp, Gossypium hirsutum
gttagctgccttcgatgaggacaatttaattccttgctttggattcggtgatgcatcaacacatgatgcaagatgtcttcagtttctacgcggatgacagattttgtaatggatttgaggaagtcttaagccgctatagagaaattgtgccacatcttcgacttgcaggacctacatcgtttgctccaatcattgaaatggcaatgaccatagttgagcagagcagtggccagtaccacgtgttagtgataatcgcagatggccaggtaaccagaagtgttgatacccagcatggccagctaagtccgcaagagcagaaaactgttgatgccatagttcaagcaagcaagcttcctctgtcgattatattggttggtggtggagacggaccatgggatatgatgaaggagtttgatgattacat

SEQ ID NO: 227940 - DNA, 254 bp, Gossypium hirsutum
  unsure (1)..(254): unsure at all n locations
agaaaacatgtctcttgtgacagaagagataaaagcgagtgcatcagagatttaccatggagatgaggtatgccaggagaaatccaagtgtttgttggaggaagtaggcatgccaagggggcttttgccacttagagacatcgaagaatgtgggtacgtgaaggacacaggtttcgtgtttctcaaacatnngatgagcattacccacaggttcgtaaagatatggaagctggtttcctatgcaactgaagtca

SEQ ID NO: 227941 - DNA, 374 bp, Gossypium hirsutum
  unsure (1)..(374): unsure at all n locations
ccgcaaagaagcttgctgttctcttctcttctattcccaatagtgttcatcccgtgcttttaaatccatacgctcacaaagagtatgggntttgaaggaggaaggggcgaggagcatgccccagaaagttaatgaccccttccggctcgacccttttgaacgcatgacatagctcattctctatggactgtacaagcaagccactgttggaccagtgaataccggccgccctggaatgttcaacatgagggaaaggtacaagtgggatgcatggaacgctgttgaagggaaatcaaaggaggaagcaatggcggattatatcaccaaagtcaaacaaccgtttgaggctgctgcaagttcttgatgtgtatcag

SEQ ID NO: 227942 - DNA, 313 bp, Gossypium hirsutum
agatcttctttcaaccgcgcctaataaccgctcggatttttctcagacgtgaaaaaaatggggctagctttcaccaagctattcagccgtgtatttgccaaaaaggagatgcgtatactgatggttgggcttgatgctgctggtaaaaccaccattctttacaagctgaagttgggagagattgtcactaccattcccaccatcggtttcaatgttgagaccgttgaatacaagaacatcagctttactgtttgggatgtctgtggccaggacaagatccaaccattttggatacactattttcaaaacattg

SEQ ID NO: 227943 - DNA, 477 bp, Gossypium hirsutum
  unsure (1)..(477): unsure at all n locations
gcgcccacgcgtncgcggacctctcagttttcttccgatgtgcaatcaagggataccaagactcgctctacacggacacnatgcgtcaattgtgccgggaatgtaagatcaccggcactgtagacttcatattcggcgacggcgccgttttgttccaaaattgccaaatcttagccaagcaaggcttaccaaaccagaaaaataccatcaccgcgcaaggtcgcaaagacccgaaccaaccaactggcttctccatccagttctgcaacatctcggccgatacagacttattaccttcagttaactccactcctacatacttgggaagaccatggaaactatattcaaggaccattatcatgcaatcctacattagtgatgccataaggccacaagggtggcttgaatggaaccaagattttgccttggatacattatactatgccgagtacatgaatatatggccaggggctagcc

SEQ ID NO: 227944 - DNA, 449 bp, Gossypium hirsutum
agcaatgtggcggttgaagatgacagagatggaaacgagtttgttatctctaagtcggagtggattcgggcaagtagaacggattcctcggagattccgttggatgctctacttatacaggagaaacctgcgccttcttctagattcggtcaccggaaacctgttaaagccaatcccgaaggtgggcgagcgttgaaagcggcgaagccaaaacggcatgagacgcttgaaaacacttggaaaatgataacggaagggaaatcaatgcccgtgtccagacacttgaagaagtcagacacgtgggagaatcacggccgtgatatcaacatggaggcgttgaccagctcccctctgatgaaaaaatcggaaacgttcagagaccggaccaattaccagcttgcacccgaacaaagtagctctttccccggtttaggaaagctgagaaaaga

SEQ ID NO: 227945 - DNA, 285 bp, Gossypium hirsutum
gcaactttgacgcagctgctatttcttttttgtggttttcaccagcaacttgtacttgcaataatgcgcgagctccatcgctaatagcggtagcatctctatccacatccttcaccatctctaacgctctctacaggccatcatccccccttgctcaaatcactccatctaatttcaagtccaaggttttaaattctaacggagttgttttggttgagttcttcgcgccttggtgtggccattgccaaactttaacacctacatgggagaaagcctccaatgtct

SEQ ID NO: 227946 - DNA, 259 bp, Gossypium hirsutum
  unsure (1)..(259): unsure at all n locations
cccacgcatccttaaactggcgncatttttgctttcagcagcttgcatttgaaaagatggtgagggtcagtgttttaaacgatggactggaagagcatgtacaatgcggagaagaggggcaaacgacaggtcatgattaggccttcctcgaaagtgatcatcaagttccttttggttatgcagaagcacggttacatcggagaatttgagtatgttgatgaccacaggtctggcaaaaatgttgttgaacttaacagta

SEQ ID NO: 227947 - DNA, 358 bp, Gossypium hirsutum
tcacgcgaaaataataagtttattaagccttaactggacatatgattaagttctgaaaaaggctctgcacatactgaatgaacggtgtggagaggggatcaaaacttctttgggggaagacctaccctacattctacttattgacgaacttgatctttttgtcaccagaaaccaatctgatctatacaacattattgactactctactaagccccattccaagataattgtgacaggaatagcaaatacaatggatcttccagagaagttacttcctctcatttcaagccgtatgggtattcaaagactctgttttggtccctacaattatcagcatctacatgaaattatatcaaag

SEQ ID NO: 227948 - DNA, 237 bp, Gossypium hirsutum
  unsure (1)..(237): unsure at all n locations
gcccgtccgaccaatgtggcggttgaagatgacagagatggaaactagtttgttatctttaactcggattgaattcctgcaagtagaacggattcctcggagattccgtttnatnctctacttatacaggagaaacctgcgccttcttctagattcggtcaccggaaacctgttaaagccaatcccgaaggtgggcgagcgttgaaagcggcgaagccaaaacggcatgagacgctg

SEQ ID NO: 227949 - DNA, 262 bp, Gossypium hirsutum
gagcgatagaggaaaatcacgaattcctgataaagtgacggaaaatatatacaatgcatagatcgcgagctccattgctaatagctttgaggatttctcttcacatccttcaccatctctaacgctctttacgggccgtcgtcgccagtggttcagctcactccatctaatttcaagtccaaagttttaaattctaacggaagttgttttggtgagttcttcgcgcctttgtgtggccattgccaaaactttaacacctaca

SEQ ID NO: 227950 - DNA, 340 bp, Gossypium hirsutum
cttggtttttcttcttcattttcccctttcctcgatcaaaatcctcagctctcttaccgccaaaggaggatcatgttttcaggttttacgatggcatcgaagcggatcttgaaggaattgaaggatttacagaaggatcctcctacatcttgcagcgctggtcctgttgctgaagacatgttccattggcaggcaacaatcatgggtccaccagacagtccttatgcgtgggggttttcctggtgaccatccattttcctccagattatcccttcaagcctcccaaggtggcatttagaacgaaagtattccaccctaatattaacagcaatgggagcat

SEQ ID NO: 227951 - DNA, 477 bp, Gossypium hirsutum
ctcgttccccatcgacgcctctgcttatcgcatcatcagccatgtcgaggagaaaggttagggagccaaaggaagagactacagcgccttgggcctgctgtacgagacggagagcatgttttcggtgttgcccacatttttgcatcttttaatgacactttcattcatgtgactgatttgtctggaagagagactatggttcgtattacaggtggtatgaaggtgaaagccgacagggatgaatcttcaccttatgctgctatgcttgcagcacaagatgtttcccagagatgcaaggaacttggaatcacggccctccacatcaaattacgtgccacaggaggtaacaaaaccaagacccctggtccgggtgctcagtcagctctcaaggctcttgctcgctctgggatgaaaattggccgtatcgaggatgttacacccattccgacagatagcacccgaagaaagggtggtaga

SEQ ID NO: 227952 - DNA, 239 bp, Gossypium hirsutum
tctggtataatggaactgagtgagtcaccgggacgatttaacgaacgaaagaaagttcacgatggggtcgatccccgatccgggtgagttaaccgagttaactcatcctaatttcgatgagttccaacatcaaacatctcttatgacgggctgcactcttatgtggaaagaactcttcgatcacataagttcactttgggcaaatctgattagacaatcggaggccttggaacgcaaaa

SEQ ID NO: 227953 - DNA, 423 bp, Gossypium hirsutum
  unsure (1)..(423): unsure at all n locations
ggccagatctatgatgtttctcaaagcagaatgttttatggacctggtggaccttatgcgttgttcgcgcggaaaagatgcaagcagagctcttgcaaagatgtctttcgaagaaaaagatctgacaggtgatatttcagatctcggtccattcgaattggacgcattgcaggattgggagtacaagttcatgagcaagtacgtgaaggttggatccatcaagaagacaatggttccagtaaccgaaggggatgccagtggtgaagcctcangagctgcagaaactgatactaagcaaactgaagatggtccatcacaaactccagttactgagtcagaggaaaaatcttctcctganatactaangaggagaacatgttnagctttagctgttctgttcaacagtgacactcgtgactggca

SEQ ID NO: 227954 - DNA, 467 bp, Gossypium hirsutum
gagagagagagaaacacagagagggagaaatggttgctgtgaagctacagaatcggctctccgcgagcgttctaaagtgtggaaaaggaaaggtttggctcgatcctaatgaagtcaacgagatctctatggccaactcccggcagaacataaggaagttggttaaagatggttttatcatcaggaagccaaccaagattcactctcgatctcgtgctcgtcgcatgaaggaagccaagagaaagggacgtcactctggatatggtaagcgcaagggtacaagggaggcaagggtgcccacaaagatcttatggatgagaaggatgcgtgtacttagacgcctactccgcatgtacagggaatcaaagaagattgacaagcacatgtaccatgacatgtacatgaaagtcaagggtaatgtgtttaagaacaagagagtgctcatggagagcatccacaaatccaag

SEQ ID NO: 227955 - DNA, 463 bp, Gossypium hirsutum
  unsure (1)..(463): unsure at all n locations
accttctgcttagcttaaaaaatcttgaatctgcactctcctacttccctcgttatcgtcaatggcttcggacaagaagattaagatcgggattaacggatttggaagaatcggacgtttagttgccagagttgctcttcaaaggaacgatgttgaactcgtcgccggtaacgatcccttcatttccaccgattacatgacatacatgttcaaatacgacagcgttcacggtcaatggaagcaccatgatcttaaagtcaaagactctaaaaccctcctcttcggcgaaaaacccgtcactgttttcggaatcaggaaccctgaggagattccatgggctgaagccggggctgagtntcgtgttgagtcaacttgggtgttcactgacaaagacaaggctgctgctcacttgaagggggtgctaagaaagttggatctctgccctacaaagatcacccatgtt

SEQ ID NO: 227956 - DNA, 385 bp, Gossypium hirsutum
ggttaaaaacccattagctaaaggggcactgggttctttctgtgttgcttgcagttatcggagttactgcactgctcgttgtaactccggtaagggggtaccgtccatggccgtacgtaaaacccaacagctccgacttaatgttcggaggctctaagaaatttgagggctcatcggagtttgtacatatgagatatcatatgggtccaggccttactggtcatatcaccatccacccaatctggtacggccggtggcagaaatcacagaagaaaatcatccgggagttcatcaactcgatctccgccgttgattccaaacacccttcggtggctgggtggtggaagaccgtacaggtttacaccgaccaaacgggagccaacat

SEQ ID NO: 227957 - DNA, 397 bp, Gossypium hirsutum
gttctagatcgcgggcggccgctcgcgatctagacggtcgcgtgggtgaaggtgtcttaataaacgccggcgatttaccttcgattgccatggactggtctattgctacgtttttgaatttttagtgagcgaaaatgagagagtgcatttcagtccacattggggaggctggtattcaagttttaaatgcctgctgggaactttactgtcttgaacatggaattcatccttatgtcctaattccaagtgacaatactgtcacattaagtgattatactttttacacctttttttattcaaacttttactttaaatctacaattccttgatgtagtattttttatttcacgattcctaatctctaatctatctaattacttaactatatttctctata

SEQ ID NO: 227958 - DNA, 410 bp, Gossypium hirsutum
cggacgcgtgggttttttcgcaaaattttctaagttttagccatttagaaaaaaactttttgttgttgaaggccatgactatgagtaacaatattgggcaatttggtgacacaactttaaccaaagttttcgttggagggttagcttgggaaactcccagagaagccatgagagagcactttgagaagtatggtgagatccttgaagctgtgattatttttgataaaggtaatggcagatacaagggttatggattcagtacgtttaatgaagctagagctggtaaacaaggttgggaactttctctctctataataaacggacggcgtggttacttaaatcttgactcacttgaagcgtataacccgatgtccactctcactgtttattaacaacaaggaccacacgca

SEQ ID NO: 227959 - DNA, 479 bp, Gossypium hirsutum
gttactctcccttcttctccttgtaaacttcatttttatctatcaatctcattcttctccagataacagtgtcaccaaagctcaatctcagatcaaaccaaagaaggttcatttgtctctgtattatgagtctctatgtccatattgccggagtttcattgtaagtcaacttgtgaaggtcttcaacactgatcttctcaatattatcaatctcaggctagttccatggggcaatgctcaatatgtaaaacctaagaagaccatcatttgccagcacggtgaagatgaatgttacctcaacactatacatgcctgcgccatcagcatctggcctgatccgagaaagcatttcaactttatctactgtattgaaaatcaaggccttcccatcaaggataatcagcactctgacggtatggaagcagtgtggaaagcctgctctgccagatccggtatggatcagaaactcatcaaggact

SEQ ID NO: 227960 - DNA, 478 bp, Gossypium hirsutum
caagcagcgatacttcagaattcggattcccggaataaattatctagggtttgcaaaagaggtgaaagccgcaaatggaagggtgggaccggaatacgaagtcgacgctaacacagatcccgctactgacgacgaaggcgggtcccagagacggagcggcatggactcagcggctgaaggaggagtataaggctttgatcgcctacacgcagatgaataagtccaacgacaacgattggttccggatatccgccgccaatccggaagggacgcgttggaccggcaagtgttggtacgtccataaccttctcaagtacgaattcgatctccaggttgatatccccgttacttatccggccactgctcccgagctcgagttgcccgaacttgatggcaagactcagaagatgtacagaggagggaagatttgtctgaccgtgcatttcaagccactttgggcaaaaaattgtgctaggtt

SEQ ID NO: 227961 - DNA, 310 bp, Gossypium hirsutum
ccaagaccaaaacctttttttattacgttttccctgacaaggtttagatccatctcttgggagcaaagagaaatggccaacaacgacaatgtagaggaatccagccctcttttgagcaaacaagttagtgttgaagaagatgagaagaagaatctaaatggtaacaactccaccgacgtggcagcttcgccggcagctaggaccggagctgggttcgggtggaccgccaatggtctgcccttggtccacgggagttgtcgtggaaaacctatgggccggtctcagtgggatttctccctcctcgcttgtc

SEQ ID NO: 227962 - DNA, 455 bp, Gossypium hirsutum
  unsure (1)..(455): unsure at all n locations
tcaaacctctcaaatctttttcagttttcatttccccatccaaacgacgccctaaaccaaaagtcatgggcaccccttccgcacgtgacgaaaacgtttacctggcgaaactcgccgagcaagccgagcgctacgaggagatggtcaagttcatggagaacgtcgtctccgccgtccctgcccccgacgaactcaccgtcgaggaacggaacctcctctctgtcgcctacaagaacgtgatcggcgctcgccgtgcctcttggcggatcgtttcctccatcgagcagaaagaggaaggacgtggcaacgccgaccacgtctctgtcatccgtgagtacagggccaagatcgaggccgaattgtccgagatttgcgccggaattntgaagcttctcgacgagaaactcgttccggccgccgggaccggtgattccaaggtcttttacctgaagatg

SEQ ID NO: 227963 - DNA, 415 bp, Gossypium hirsutum
gaaacaccatacagacaaataaaatatgaagaggtcattgctagtatctgttgtaatcagcttggtaatagttgcttcagccgccaactttaaccaagacatcgacgttacttggggagatgggaggggcaagattctcgaaaacggaaaccttctcactctcaccctcgacaaattctccgggtctggttttcaatccaagaaccaatatctgtttgggaagatcgatatgaacattaagctggttccaggcaactctgctggcactgttaccacttactatcttcgttcggaagggtcgacatgggatgaaattgacttcgaattcttggggaacctaagcggagacccatacatagtccacaccaatgtatatacacaaggcaaaagtgacaaagaacagcagttctacctt

SEQ ID NO: 227964 - DNA, 235 bp, Gossypium hirsutum
gcgcccacgcgtccgcccacgcgtccgcccacgcgtccggtggatcaataagtgatgagcagagaaagaatggtatggttaactcatgccctggagcaggagcctgtggggggatgtatactgcaaacaccatggcttctgcaattgaagctatgggaatgtcacttgcttacgggtgttcaatacctgctgaagacccattgaaattggatgaatgcctgttggctgagaagta

SEQ ID NO: 227965 - DNA, 405 bp, Gossypium hirsutum
atgggttatcttcaacaatttatcttctttattctggttgctctgccattcatgtttatttgtccaactcattcctctttagctggtggtgatgttaatatattgcctcctaccaatacaagcgataaggtcactttggctctgtactatgaaactttatgcccatattgtgccgactttatcacaaatgaccttgtaaaggtcttcctcagtgatctgtataccattgtcaatctaaaattagtcccttggggcaatgctgacattcttggcgatgaaccccattgccagcatggagaagatgaatgctacttaaatactatacatagctgtgtcatctactaactgcctgatgtgaaaaagcactttcattttatccactccacgcagcaacaacacctcaaa

SEQ ID NO: 227966 - DNA, 258 bp, Gossypium hirsutum
gcgcccacgcgtacgcccacgcgtccggacaagcaaagattttaatttttattgaaaataatattttcttgggaagttaatttactggggtcgtgatgacattaaacctgaggatattaatgctttgcatctgattcccaaagaactttcacttaaaattgttagcaagattgaagcaagaaagaggtttaccgtttatgttggttgccctatgtggcccgaaggaatcccagagagtgcctcagttcaagcaatatt

SEQ ID NO: 227967 - DNA, 483 bp, Gossypium hirsutum
cacatactaacatctatggggaggtcagggcagcaagtctcctggaaattggcggatcacgcaacacgggcaaaggggaagaccgttggtgtcatcgttctcgatggctggggcgaggacaaacccgatgagtacaattgcattcatgttgctcaaactcccaccatggattctctcaaacagggtgcccctgaaaagtggagattaatcagagctcatggtaaggctgtagggctccccacagaggatgacatgggaaacagggaagttggtcacaatgctctcggtgcaggtcgcattttcgctcaaggggctaagcttggtgatattgctcttgcctctggaaaaatctatgaaggagaaggattcaagtacataagcgaatgctttgaaaagggaactttgcacctgattggattacttagtgatgggggcggccattcacgacttgatcaattgcagttgttgctgaagggagctagg

SEQ ID NO: 227968 - DNA, 307 bp, Gossypium hirsutum
ttcccggtcgacgacgcgtccgtgtagattagaaaactagagatcaaaagataggcaactaggaaaaaaaaaaagataagtgaaagatgtcaactggttcttcattgtgttcatcaactgagattaatggctttggagggggacttggggttctaagaacccatgtttctcaacccaagacactttctttcacaagaaggagaatttctacggtagtgaaggcaacatctcgaggtgataaattctcaaaaagcgatatcattggttctccatctattctctctgctaaattcgcaaaggtggggga

SEQ ID NO: 227969 - DNA, 293 bp, Gossypium hirsutum
acgcttactatgaaaccaaataaattattgttcttgatcttgctccttataccctaaacattaaaacttttgactgggtaataaccaagttggtgcctggggacacttatatcccaaccaaaaattcacaagttttcaccacttatcaggaccagcatactaccctcttcattcaggtcttttaaggtgaaatgattctcacaaaagattttatattattactaaaatcaattcttattcgaatcactacaacctcaatactaattccttaaattctaaaaacatttaaaatt

SEQ ID NO: 227970 - DNA, 433 bp, Gossypium hirsutum
atgaaacgaaagatattcttctccttgatgtggctccacttacccttggcattgagactgtgtggtggagtaatgaccaagttgattcctagaaacactgttatcccaaccaagaagtcacaagttttcaccacttatcaggaccagcagactaccgtctccattcaggtctttgaaggtgaaaggagtctcacaaaagattgtaggttattgggaaaatttgatcttactggaattcctccagccccaagaggaacccctcaaattgaagtcacatttgaagttgatgcaaatggcatcttaaacgtcaaggcagaagataagggcactggaaaatctgagaagatcactatcacaaacgataagggtcgtctgagccaggaagagattgagagaatggttcgtgaggcagaagaattcgcagaggatgaca

SEQ ID NO: 227971 - DNA, 440 bp, Gossypium hirsutum
cacgccccttcttacttttatcattcaataattttcatcaacgaagaaaaatgagagagtgtatttcgattcacattggccaggccggaattcaggtcggaaatgcttgttgggaactttactgtctcgagcatggcattcagcctgatggacaaatgcctagtgacaagactgttggtggaggagacgatgctttcaacacctttttcagcgaaaccggtgccggaaaacacgtgcctcgagctatatttgttgatctggagcctactggtatcgatgaagtgaggactggaacataccggcaactgttccaccctgagcaactcatcagcggtaaagaagacgctgcaaacaattttgctcgtggccattatacaattggaaaagagattgttgacctctgcttggatcgtatccgaaagcttgctgataattgtact

SEQ ID NO: 227972 - DNA, 325 bp, Gossypium hirsutum
  unsure (1)..(325): unsure at all n locations
gcgcccacgcgtccgcggcaagcaaaaaatttaaaggttgatagtactttattttgataaaaataaaatgccgatttctcgaattgcagtcgggtctgcggccgaagccggccaagcagatgcactcaaggcggctttagccgagttcatttcagtccttatttttgttttcgccggtgaaggctcgggcatggctttcaacaagttgaccgacgatgactcgtcgacaccagcgggtttagtagctgcggcattggctcacgcctttggcgttgttgtggcggtttcngtcggagctaacatttccggcgggcacgtaaacccc

SEQ ID NO: 227973 - DNA, 420 bp, Gossypium hirsutum; identical to SEQ ID NO: 190114

SEQ ID NO: 227974 - DNA, 435 bp, Gossypium hirsutum
  unsure (1)..(435): unsure at all n locations
gcgcccacgcgtccggcaatagtactactactccaagcaagcattttccttacaagtttgtttttcttgtgattaatcgatatggctagctcaatgtcccttaagcttgcatgtgtggcggcgttgtccatggngcgctgctccattccaaccctaacgccctccttcctgctggtacgctttacccttcatgtctctcgatatgggttccgccacatcggcgtcggcatccttaggcggttcaatctgctcctccgcagcaaccggatccgattcattcgaagacgaagagccccttctcgatgaactctgcatccacccggatcaaatctgcgcaataccagattcatcctcaaccctctccgggtgaactcgaccgcccataaagactccgacttatcaggccctatcttctcttcttatccctctgcttat

SEQ ID NO: 227975 - DNA, 408 bp, Gossypium hirsutum
cccacgcgtccgcccacgcgtccgctgatttgagcagtagcagctaaagcagatcccaaaatgaaggtgaatatcgcaaatccgactactggttgccagaagaagctcgagatcgatgacgaccagaagcttcgggcatttttcgacaagcggatctcgcaggagggtgctggagatgctttaggcgaggaattcaagggctatgttttcaagatcatgggagggtgcgacaagcaaggattcccgatgaagcagggtgttctgactcctggtcgtgttcggctcttgcttcatagaggtaccccatgctttccgggatatggaagacgtaatggtgagcgtaaaaagaaagtctgttcgtggatgcattgttaagccaagacctttcctggtttgaaactgggttat

SEQ ID NO: 227976 - DNA, 485 bp, Gossypium hirsutum
agtagttctaacaaaataaggtatcaggataaaatattagaatcatcaaaaaaattttggcaaatagtaaaaagaagaaatattcgattaatccggaaattctatttttttataaattttttcattgaaaagatatacatggatattcttctatatatcattaatattccaagaaccaatacccaactttttcttgaatcaacaaaaaaaatgattgagaacttcattcacaataatgaagcaaatcaagaaagaattaataaaacaactaaaaatacaactcattttatttcaactataaaaacctcactttcttcactttctaatattagtattagaaataaaaatgaaaaagctttttgtgacttatcctccctctcacaagcatatgtattttacaaattatcacaaacccaagttattagtttttataaattcaaacctatccttcaatatcatggaacatctctttttcttaaaaatga

SEQ ID NO: 227977 - DNA, 256 bp, Gossypium hirsutum
  unsure (1)..(256): unsure at all n locations
ggcgcccacgcgtccgggaaaaaaaaatgaagctcttgtttctaactttgctgctttgttctcttcttctatgttcttgagtttttgaaccaacagtgggtgaacctcnttcacctttttgtgaagggaaatgcaaagggaggtgcaataaagcggcggtttgggatcgatgcttcaaatattgcggcatatgttgcgaggagtgtaaatgtgttccttccggtacttatgggaacaaacaccagtgtgcttgcta

SEQ ID NO: 227978 - DNA, 221 bp, Gossypium hirsutum
cgtggagagccttttttgtgtagcgattctcagttagtcttttctttaagcttacagcttctctccagagttttataatgggtaaggagaaggttcacatcaaccttgttgtcattggccatgtcgactctggcaagtcgaccactaccggtcattcgatctacaagcttggtggtacctacatgcttgtgactccgaggttaaataaggagtcttgctta

SEQ ID NO: 227979 - DNA, 458 bp, Gossypium hirsutum
catcattaaagaagtcaaacaactctggaccactgaatagacatggagatcctgtaaagaaatcatcgggtccacaatccggtggagtgagggcgagtggacctcaaaattctggtcctattcctcctgttctccctgcaacaggccttattacgtctggaccaatctcttcaggcccattgaattcctctggggttcctcggaaagtatctggtcccctggaatctttgggatcaatgaaagtacaagggtctgccgttcataatcaggctgtcaatgttcttagccaagatgatgacttttctttcaggaggaacttcccgaaaccaatattttgggcactgatactgcttttcgtaatgggtttcattgctggtgggtttatttttgcggcaggtcacaacgtcattctccttcttggtggtgggggtcttttcagtgctggcactgcattatat

SEQ ID NO: 227980 - DNA, 401 bp, Gossypium hirsutum
aaatatccagattaaaacgaaactaaatgaagatcttcttcctttttctcttgttttgattctttactgcgttggtgaactcttggttcgctggcagtgtaacctatgaccgccgctctctcatcattgatggccaacgcaagcttctcatttccgctgccattcattacccccgcagcgttccggcgatgtggccagggctggttcaaacagcaaaggaaggaggggttgatgtcattgaatcttacgtattttggaatggacatgagctttctccaggaaaatacaattttgaagggcgatacgatctagtcaaatttgtaaagattgttcagcaagccgggatgtatatgattcttcgaattggcccctttgtagctgctgaatggaattttgggggg

SEQ ID NO: 227981 - DNA, 168 bp, Gossypium hirsutum
ccagctggtcacgggtgacgttctcgaacaagggatttggtcgccaaaccctttaaaaagaaagggtacattcccttggctacttaccttaagacctacaagatcggcgactacgtcgaacgtaaggtaaaccgggccggtcacaaagggatgccccacaagatctac

SEQ ID NO: 227982 - DNA, 405 bp, Gossypium hirsutum
cccacgcgtccggtttgctctgtatattgaaattttctttctcgattttctctttagccaaaaaagatgcagatcttcgtcaagactctggccggcaagacgatcactctcgaggtcgagagctccgacacgatcgacaacgtgaagaccaaaatccaagataaggaaggcatccctccagaccagcagcgtctgatcttcgccggaaaacagcttgaggacggccggaccttggccgattacaacatccaaaaggaggcaactctccacctcgtcctccgtttgcgcggtgggatgcaaatcttcgtgaaaaccttgaccggcaagacaatcactctcgaggtctaaagctccgacacgatcgacaacgttaaggctaagatccaagactaggaatgcatcccc

SEQ ID NO: 227983 - DNA, 447 bp, Gossypium hirsutum
aatatctactatatcattggtaattgctgctgtagtagagatgcggaggcttaaaattgcggaagaacatggattgatagacaagccaattgtggtggttccaatgagtatatcgtggctggtccctcaatacgcattgtatggattagctgatgtcttcaccatggttggtcttcaagaattcttttatgaccagatgccaaatgaattaaggagtgtcggtcttgcactctaccttagcatcttcggtgttggaagcttcttaagtagttttctcatctccgccatcgagaacttgaccagcagggatggccgagatagctggtttgcaaataatctgaatagagcacatcttgattacttttatttgctgcttgctgcgcttagtgctgtgggattgactctctatgtatgttgtacaaaatattacatttatgctagatgggg

SEQ ID NO: 227984 - DNA, 340 bp, Gossypium hirsutum
aagaaaatggagcagtggtggtggtatctttggtttacaatcatctctttgtttggtgcaagtttggggaactggattcacaggtggaggaaccctaaatgcaacggcaaactccctccaggttccatggtactcccacttataggagagacccttagtttttttgtcacttccaactccattgacatacatccttttgtcgctcaaagaatgaaaaggtatggttcattgttcaagacgagtttagcagggagaccagctgtggaatcattagatccagatttcaactattacctgctgcaacaagaggacaaacttgtcgcactatattacatggatt

SEQ ID NO: 227985 - DNA, 462 bp, Gossypium hirsutum
cggacgcgtgggtgacaatggactatcacagaggggctcggagttgaggttaggatagccagaattttcaatacttacggacctcgtatgtgcatcgatgatggtcgtgttgttagcaactttgttgctcaggctttaaggaaggagcctttgactgtgtatggtgatgggaagcagacaaggagtttccaatatgtttctgatctggtggagggtctcatgcgtttaatggaaggagaacatgttggaccttttaatcttggaaacccgggcgaattcaccatgcttgagcttgctgaggtggtacaagaaacaatagacccgaatgcgaagatagaggtcaggccaaacacagaagatgaccccgacaagaggaagcctgatatctcaagagccaaagagttacttggttggcaacccaaggtcttcctcccaaagggtctccctctaatggtttcagac

SEQ ID NO: 227986 - DNA, 246 bp, Gossypium hirsutum
accgaatcgcagtttcgacccacgcgtacgaacgtttccagatccacaatggcttctacattcagcggcgatgaaacggctccgttcttcggctttctcggcgccgccgccgctcttgtcttctcttgtatgggagctgcatatgggaccgctaagagcggtgtcggtgtggcatctatgggtgtgatgaggccagaattggtgatgaaattgattgtacccgttgttatggctggtgtcttgggt

SEQ ID NO: 227987 - DNA, 294 bp, Gossypium hirsutum
gtgtccagacactagagaaaaggatcggatctcatgggctgggcacgggggaaccagtcccgaactggttgggtgtctgcgcactgctagagctgctcccgcggcgagagcgggtcgccgcgtgccggccggtggacggactgggaacggctccctcggtggccttccccgggcgacgaacagtcgactcagaactggtacggacaaggggaatacgactgtctaattaaaacaatgcatcgcgatggtccctgcggaggctcacgcaatgagatgttctgtccagtccgccat

SEQ ID NO: 227988 - DNA, 489 bp, Gossypium hirsutum
gatcccggtcgaccacgcgtccgcggacgcgtgggtgacaatggactatcacagaggggtcgggtttgaggttaccgactcagtcacttgctcggtcggttacttacctcgtgctttcaacggtgttattcggaaatcctagccgacgatgtcgcttcgagtgttgaaccctaatgccgaagttctcaacaaatcggcggcactgcacatgaacatcaacgccgccaaaggtttacaagatgttctcaaaacaaatctgggacctaaaggcactatcaaaatgcttgttggtggcgccggtgatattaagctcactaaagatggaaacactctcttgaaagaaatgcaaattcaaaatccgacggctattatgatagcaaggacagctgttgcacaagatgacattagcggtgacggaactacatctactgtactcttcattggcgagctaatgaagcaatctgagcgctacattgacgaaggtatgca

SEQ ID NO: 227989 - DNA, 461 bp, Gossypium hirsutum
atgagaaggcaataatttcagtgttgggtcacagatatgcagttcaaaggaagcaaatcaggcttgcttatgaagacctttaccaggaagatctcatcaagcgtcttgaatcagagctttctggtgatttcgagaaagcagtgtatcgttggatattggatccagcagaccgagatgccgtgttagctaatgttgccataaagaaattaagccctgatcaccatgtgatcgttgaaatttcatgcaccagatcccctgaagagctcttggctgtgaggagagcttatcaggctcgatacaagcattccctggaagaagatgtggctgctcataccaagggagacactcgaaagctcttggttgccttagtgagtgcatttagataccgatgggaagaaataaatacgagagtagcaaattctgaagccaaaattctccatgaagctgtcaaagacatggaa

SEQ ID NO: 227990 - DNA, 441 bp, Gossypium hirsutum
gaaaaaaaaagtgaaaagggtaatggtgttgctcctgctacaaggtctccaatggctttaatggggtcatctagaaatgaaaaccaagaagtgaataccagcatgagaactgccgagaccatgctgcggttggtgcctatggctttaggggttgctgcacttgttgtcatgctcaaaaactcacagtccaatgactttggctccgtttcatactcagatcttggtgctttcaggtacttggtgcatgctaatggtatttgtgcaggctattcccttctttcagctattatagcagctgtgcctagtccttctactatgcctagagcttggactttcttcctactcgatcagattctaacatacgtaatcttgggagctgctgctgtttcaaccgaggtgccttacttagcaaacaaaggagactcagccatcacttggagt

SEQ ID NO: 227991 - DNA, 406 bp, Gossypium hirsutum
gtgaatttgcaaccgaaaaccgaatcaaaatcttcgcaatctcatccagctacaaaaaagaaaaatggatctcagaatcatgggtttcgattctccgctcttgaatactctccaacatatgatggatctttctgacgatacggagaagatcccgaacgcaccatcaaaggtttacatgcgggatgccaaggccatggctgcaacaccagcggacattaaggagtaccccaagtcttatgtgttcatcgtcgacatgccggggctgaaatcaggggacatcaaggtccaagtggaggacgacaatatgctcttgatcagcggagaaaggaagcgagaggaagagaaagaaggagccaagtacgtaagaatggagaggcgggtcggcaagcttatgaagaaatttgcg

SEQ ID NO: 227992 - DNA, 206 bp, Gossypium hirsutum
aggagacagggttcgtgtggcttaaacagaagaagagctaacctcacaagtttgaaaagattgggaagcctggttcctatgcaactgaagtcactgcaccgattgagaaaaacaggataaagaagctgaatggggttaagagcactgatcggagagacccttagacaccttggcacttccaactccattgacatccatccttttgt

SEQ ID NO: 227993 - DNA, 454 bp, Gossypium hirsutum
ctgccattttcacaaaaaacaaatcagatccctaatgttagggcttcaacttggagacaccgctgaaccgtcttgtctcccaggtcatttcctccttgactgcctcactgaggtttgatggtgccttgaatgtcgatgtgactgaattccaaaccaacttggttccctacccaagaatccacttcatgctttcctcgtatgctccagtcatctctgctgagaaggcttaccacgagcagctctcagttgctgaaatcaccaatagtgcctttgagccctcatctatgatggctaagtgcgatccacgccatggaaagtacatggcttgctgtttgatgtaccgtggtgatgttggtcccaaggacgtcaatgctgcagtcggctccattaaaaccaagcgcaccattcagtttgtcgattggtgtcctactggattcaagtgccggatcaacta

SEQ ID NO: 227994 - DNA, 166 bp, Gossypium hirsutum
cccacgcgtccgaattgctgaagtttagtatttaatcctcggcttcgctgttaaacaagctcatgggtgcggatccatttttcttgttagcgggtcccaatgtgattgaatctgaagatcacattctaaggatgggttgttacattaagaatattacttacaaact

SEQ ID NO: 227995 - DNA, 447 bp, Gossypium hirsutum
cccacgcgtccggtttttttcttcttttcccatatttaaaggttaaatacagaaaaaaaaaaacccatagagccccctttcctttctttctctctctttcattagaaagaaaaccaaagatcatcaaaggagaagaggaggagaggagaggggcaaccttaaataccgtacctcagcaactctctccatcgcaaacaaatctctctttttcaatctaccatggcggataagggtcgcccattgccaaaatttggtgaatgggatgtcaatgacccatcatcagctgagggctttacagttatcttcaacaaggctcgaaatgagaaaaagacgggtggaaagattgagtcggcaggggccaatgaccctgcatgcaagcaagaggctgtcggttgaaaaccccaaaaaaaatgggtatgctgcgtacaagctacttatgcagactaa

SEQ ID NO: 227996 - DNA, 454 bp, Gossypium hirsutum
atgctttgaatctcctcctcctttttgggtttcaaacgatcctttatttgggcgattaacagcagtttaccatggctgttatctcactgaattcactgccaatcggaatcagattccgaccaacggacgaggagttaatcgatttttacttgcgagctaaagtgaacgggaaaaggaaagatgagatcggggttatacgggaagttgatttttgtaaatgtgaaccgtgggatttgcctcatttgtctgctgtaaaggctcgtgacccggaatggtttttcttttgcccactggaccggaagtatccgaatggaaaccggcttaatagggctaccgaggcgggttattggaaggctacgggtaaggatagaaagataaagtctgggtcttgcttgattggcatgaagaaaactttggtgttttatacgggtcgggctcctaaaggggagcgaac

SEQ ID NO: 227997 - DNA, 436 bp, Gossypium hirsutum
ccgcaccaaaaaagaaacgcgcatttacgttgagagtagttcagcgaaaatggcaggcgaagcagcagcggcggcgaatttctggggtgatacgccggaggaagactattacaggtcgcagggtgtacgcaacaccaagtcttacttcgacactcccaacggaacgctcttcacccagagcttcttacccttggataaaaaagtgaaggcctccgtctacatgacccacggctatggatccgacactggttggctcttccagaagatctgcatcaacttttccaattggggttacgctgttttcgccgctgatcttctcggccatggcagatccgagggtctccgctgctacttaggtgacatggagaaagttgctgcaacatccttatcattcttcaagcacgtccggaacagcgatgaatacaaagacttacct

SEQ ID NO: 227998 - DNA, 286 bp, Gossypium hirsutum
ggaattcttattccttttatatttttcctcttcaattttccgtcactttcccgagaaaatgagagaaatccttcacatccaaggtggccaatgcggcaatcagataggagccaagttctgggaagtcgtatgtgccgaacatggcatcgattcaacgggtcgatatggtggtgactcggagctccagcttgagcgaatcaatgtttactacaacgaagccagctgtggccgttttgttccccgctcagttttaatggatctggaacccgtaaccattggttagcgt

SEQ ID NO: 227999 - DNA, 450 bp, Gossypium hirsutum
  unsure (1)..(450): unsure at all n locations
acaccattttgactaacctcaaaccagttgagaaatgttggcaacccgccgactttcttccagatcctaattctgatggatttcatgagcaagtcaaagagcttagggaaagggcaaaggagatcccagatgattactttgtagttttggttggtgatatgatcaccgaggaagccctttcaacttatcaaacaatgcttaataccttggatggaactcgtgatgagacaggtgctagccttaccccttgggccatttggaccagggcttggactgctgaagaaaacaggcatggggatctgcttaataagtatctctacttgtcctggagagtggacatgaggcanattgagaggacaatccagtacttgattggatcgggaatgatcctcatacagaagatagtccttaccgaggattcatatatacctcgttccaagaaagggcaac

SEQ ID NO: 228000 - DNA, 453 bp, Gossypium hirsutum
cccacgcgtccgcacaaattatacatgctagtatttctggtgatatagttcttgcagcagcttatgctcatgaacttccccgctatggacttgaagtgggccttaccaattatgctgcagcttattgtgttggactcctcttggctcgccgaacactgaagcaactggagatggatgctgagtatgagggaaatgttgaggcaactggggaggacttcactgttgaaccagcagagaccaggaggcctttccgtgcgctccttgatgttggtcttatcagaactactactggtaaccgtgtttttggtgttctcaagggtgctctggatgggggaattgatattcctcacggtgacaagaggtttgctggatttaacaaggacagtaagcaacttgatcctgaagttcaccgtaaattcatttacggtggccatgttgctgcatacatgagga

SEQ ID NO: 228001 - DNA, 239 bp, Gossypium hirsutum
gcgaaaccctagccactctctgctcaactcgctcaatgggggcttataagtacgtgtcggagctatggaggaagaagcagtcggatgtgatgaggtttttacagagggtgaggtgctgggaataccgccagcatccatcaattgttagggtcaaccattctactcgccctgacaaggcacgccgcttgtgttataaggccaaacaaggttatgtggtataccgtgttcgtgtttatgag

SEQ ID NO: 228002 - DNA, 360 bp, Gossypium hirsutum
tgaaagaaagaaaaatggttctgctagagaaacttgggatgatgtagtggccggtcctcaaccggaacgtggccttggccggctgaggaagatcaccaccaccccacccttgtccaccaaagatgaggcttcatcaatggcgatgccgacgagtccgacgacacctgggacaccatcgacgccggtgtcggctcgtagggacaacgtgtggaggagcgtgttcaatccaggtagcaaccttgcaaccaaaggtattggcgctgaagttttcgacaagcctcaacctaactctcctactgtttatgactggctttacagcggggagacccggagcaagcatcaccgttgatttaggcggtg

SEQ ID NO: 228003 - DNA, 414 bp, Gossypium hirsutum
cggacgcgtgggatttttcctctccaatttttcgtactttcccgagaaaatgagagaaatccttgacatccaaggtggccaatgcggcaatcagataggagccaagttctgggaagtcgtatgtgccgaacatggcatcgattcaacgggtcgatatggtggtgactcggagctccagcttgagcgaatcaatgtttactacaacgaagccagttgtggccgttttgttccccgcgcagttttaatggatctggaacccggaaccatggatagcgtaagatccggtccttacggacaaattttccgacccgataactacgttttcggacagtccggtgcgggaaacaattgggctaagggacattacactgaatgagcggggcttatcgattccgttctcgacgtggtttgaaa

SEQ ID NO: 228004 - DNA, 258 bp, Gossypium hirsutum
ctctgctcgaaatcttcttcattctcattcttgctcactgaactcttgctaaacggtatcgttttagtcagtctttcatcaatggcgaaagaaccagttcgcgtcctcgttactggagctgcaggacaaatcgggtatgctcttgtacccatgattgctaggggagtcatgttgggtgctgaccagcccgtgatccttcacatgcttgatatcccacctgctgcggaggctttgaatggtgtcaaaatggatttggtg

SEQ ID NO: 228005 - DNA, 427 bp, Gossypium hirsutum
cggacgcgtgggggcagaactagggtttcggccgcttaatacagttgtatataaactccttaaactctcactctcgcataagcattaagcaccgaggcacacactaggaggcgacgaactctgaggcggaaaagttacacaaagatggagcaaacattcatcatgatcaagcctgatggcgtccagaggggtttggttggtgaaatcattggcagatttgagaagaaaggtttctatttgaagggtttgaaactcatcaccgtggatcaatcttttgctgagaagcactatgcagacctctctgcaaaacccttctttaatgggctcgtaaagtacattatctctggtcctgttgttgctatgatttgggagggtaagaatggtgtcaccactggtcgcaagaatattggaggcacaaaccctgctg

SEQ ID NO: 228006 - DNA, 390 bp, Gossypium hirsutum
  unsure (1)..(390): unsure at all n locations
gtcgtagaccccctcaaaaccaacatcacaatttttggttctctcgncctcccatcctccgggcagcgtcttcttcttcgccaccctaattcgccgccatttctttggcggagataaatccaaaacctccctatcaccgtcgtcgaagccatacatccccgactacaagctcgccttcgaacacttctgcgtccacgccgcaagcaagacggtgctagacgagctgcaaaagaacttggaactcagcgaaaacaacatggaagcatcgaggatgaccttacaccggttcggcaacacatctagcagcagcatatggtacgaattggcttaattggaagctaaagaaagggctaatagaggggataggatctggcaaatagcattccgttc

SEQ ID NO: 228007 - DNA, 289 bp, Gossypium hirsutum
accgaattgaagttccgagcagagccgcacccgccacgcatacgaaaaaagttagaaactctctgcagtggggaaaagaggggctccagcaccttccaccagagttacatttgaaaaggcttacgcacctcacgcgccaccacagaccgggttttacactaagaacccttgctttcacaaaagcctttccactgttctaaaagatctgaaatatgcggattctcatgagtgggtgaaggttgagggtgactctgccactattgggattactgatcatgctcaagatcat

SEQ ID NO: 228008 - DNA, 208 bp, Gossypium hirsutum
  unsure (1)..(208): unsure at all n locations
attcagaaagaaataaaggaagaagaagcaatggccactccnacagtgcccacgacagttccttcggtgtctgaagattgtgaacagctaagaaaagccttttcaggatggggaactaatgagggcttaatcatagatatattgggtcacagaaatgccgagcaactaaacttgattcgaaaaacctaccctgaaacctatgcgagag

SEQ ID NO: 228009 - DNA, 254 bp, Gossypium hirsutum
gcaaagcatacgagatgctgagacaaaatgcagcatgggtttgctggatgatatctacagaaatcctggacccctccagtttgatggtccaggtgctgatgctaaggctgtgacattatgtgttgaagaccaggattacatgggccgcatcaagaaactgcaggaataccttgacaaggtccgtaccattgtgaagcccgggtgttctcaagaagttctgaaagcttgtttaagtgtaatgggttctgtgacag

SEQ ID NO: 228010 - DNA, 302 bp, Gossypium hirsutum
acagaagcaagcagctagcagtttcctttgaattatactactataactccaccactttccaccagatttacattgcagatggcttcatcaatgctgggggcttcaagggcggcttcttacctcaggatctctgtcttccacagaggcttttccactgttctaaaggatctgaaatatgcggattctcatgagtgggtgaagggtgagggtgactctgccactattggtattactgatcatgctcaagatcatttaggtgatgttgtgtatgttgaattacccgaaaggggagctgctgtaaa

SEQ ID NO: 228011 - DNA, 308 bp, Gossypium hirsutum
acggttcactttcctccgtctcctttacctgctctgtctctttctttgcttatggatccctacaagcaccgtgcttcttagtgctttcaattccccattctggacaaccaattctggtgctccaatttggaacaacaactcgtcacttactgttggacccagaggtccaatcctccttgaggactatcatttggtggtaaagctcgccaactttgacagatagaggattcctaatcttgttgaccattctaggttagcctgctccctatgttttctcttgatggtcatccatgaacattttttcatat

SEQ ID NO: 228012 - DNA, 423 bp, Gossypium hirsutum
gaacaacttatcaggaatctttatccacctattgttctcttatagcacaggttttctcaaggtttctgatgttcacacaatctactgggagcagtcaggaaacccagatggccatccagtcgtgtttcttcatgggggacctggaggaggaacatcacctagtaaccgaaggttctttgatcctgaattttataggatcattttatttgatcagcgtggtgctggaaagagtactccccatgcttgcttggaaaataacaccacttgggatcttattgatgacattgaaaagctaagagaacacttgaaaattccagaatggcaggtctttggtggctctcggggaagtacactcgctcttgcttacagtgtatcacattctgacatggttactggtttgttcctaatagggatttttctttt

SEQ ID NO: 228013 - DNA, 442 bp, Gossypium hirsutum
gaaattttcattttcttcttcctacattgctttctgttctctgctgccttctcttcttctcgacttctggagatttctcacatatctcttggcttctgattagaggatcaaaatcatgttgtttttttcgtatttcaaggacttagtgggaagagaagtgacagtggagctgaagaatgatttagcaattagaggaactcttcactccgttgatcaatatctcaacatcaagctcgagaatactagggttgtcgatcaagacaagtaccctcacatgctttcagtgaggaactgtttcatcaggggttcggttgtgaggtacgttcagctacctcccgaggaagtcgacattgaattgcttcatgatgccacaagaagagaagctcggtgaggctgaaatactttttaatgaacatctgatttgagatacttatagtttctg

SEQ ID NO: 228014 - DNA, 420 bp, Gossypium hirsutum
cgagcggccgctcgcgatctagccaaatttttttttctaaaaacaatgtttggaattcaaccgttggtttcggttttgctttgttgcttcaccttttggttccacatttcatttgggtacttgataacgtgctcggggatagttccgatgaggtaccggaacgataaggtatcgataacggatttcggcggcgtcggtgacggaaagacactcaatacaaaggctttccgggaagctatataccggattcaacatctgagaaggagaggtgggaccttgctttatgtgcctcctggggtgtacttaacggagagctttaatcttactagtcatatgactctttatttggctagaggcgccgtcatcaaagccactcaggacacatggaaatggccaattgttgctcctttaccatcttat

SEQ ID NO: 228015 - DNA, 448 bp, Gossypium hirsutum
accggaccggcagttccgagcgcacgcgtccgctttcctctcctctcctctcctctacaaggaaatggcaatttcatcaacagcggcagccactgccgcttgttctaagcttagataccgacacgcctcccctttcccaactcactcctcaaccaccacctctgcctttttctcctcaattccctctaaactaacccctacccacctctcctcttccttcctccctcctttcctcactaccgtcgccaccacttccgtattccctcgccgtcgcggttctttcaccgtcaaagctgcccgtggcaaattcgaacgcaaaaagccccacgtcaacatcggcaccatcggccatgtcgaccacggcaaaaccaccttaactgccgctctaactatggccttagcctccatgggtaacagggccccaaaaaggtccgacgaaatttgatgc

SEQ ID NO: 228016 - DNA, 448 bp, Gossypium hirsutum
caaagctcggctgctaacccctgtgctcaaagctatgccttacgtgaaagctcaaaagtcaaaggcgtacttcaaaagatatcaagttaagttcaagagaagacgagagggcaagactgactaccgggctaggaaccgtcttatcaatcaggataagaacaagtacaataccccaaaatatcgtttggttgcaagatttaccaataaggatatagttgcacaaattatacatgctagtatttctggtgatatagttcttgcagcagcttatgctcatgaacttccccgctatggacttggaggtgggccttaccaattatgctgcagcttattgtgttggactcctcttggctcgccgaacactgaaagcactggagatggatgctgagtatgagggacatgttgaggcaactggagaggacttcacttgttgaccagcagagacaag

SEQ ID NO: 228017 - DNA, 378 bp, Gossypium hirsutum
atccgcctctctcatcttccgttgtttatacgtttggttgttgttgaagaagtgctactaccatggctacaaagaagagcgttggggacttgaaggaagctgatttgaagggaaagaaagtgtttgttagagtcgatctgaacgttccattggatgataacttcaacataactgatgacacaaggatccgtgccgctgttcccaccatcaagtatttgatgggtcatggctctaaagtcatcctctctagtcatttgggacgcccaaagggtgtcactcccaagtacagtttgaagcctcttgtgccaaggttatctgaactccttggagtcgaggttaaaatggcaaatgactgtattggtgaagaagttgagaaat

SEQ ID NO: 228018 - DNA, 355 bp, Gossypium hirsutum
tatttccccctcatggccgccgctgatgtcgagttccggtgcttcgtcggagggctcgcatgggccaccgacgaccgggccctcgaagaagccttcagtgcgtttggtgaaatcgtcgaatcgaagatcattaatgatcgtgagactggaagatcccgaggctttggattcgttactttccgtgacgagaaagctatgagggacgcgatcgaaggaatgaacggtcaaaatcttgatggaaggaacatcaccgtcaacgaagcccaatcgcgcagaagtggaggcggtggcggaggatttggaggaggaaacggtggttacagccgcggtggaggcggcggcggatatggtggtc

SEQ ID NO: 228019 - DNA, 419 bp, Gossypium hirsutum
gtcctttcttttactctttgcccctcaaatccttcctctcgggaaacaccggcaagttccgatctctgcccaggatgaactcgacgatctccatctcttccgtgaagctatcacggcggcatcatctcgtggtggctcttccaaggtttcccatctgggtactattaaccccaagcccaaaatcgctttccttttcctcacgaactcggatctcgtgttcgcccctttatgggaacgtttctttgaatcgaacgatggtctcttcaatgtctacatccatgccgatccatctaccaagctaaaccccctacagtggtcaataaaagccaacttcatcgctttcagaagaacagcacgcgcctccccgacgctaatcttcgccgcccggagactcctcgctaacgccatcatcgacgatc

SEQ ID NO: 228020 - DNA, 230 bp, Gossypium hirsutum
tggaggataggtacagagcatgaaaagtttggttttgagataaaaactctgcggcctatgaaatagtgaacaaatagcagaattgcttaatggtatttcagagagatttgattgggagaaagtaatgggaggtgataaaattataggacttaaacaggggaagcaaagtatttgccggagctccaggaggggaaccagatgtcggagaggcaaatgaagcggagcctgct

SEQ ID NO: 228021 - DNA, 444 bp, Gossypium hirsutum
gcaacctggatatgacattatagcccagttcataattggttatatcttgcccggaaagcccattgcgaacctgcttttcaagatatatgggcggatcagcaccatccatgctctttctttcttgtctgatctcaaacttgggcactacatgaaaatcccaccacgttgcatgtacactgctcagcttgtgggaactgtagttgcaggtatcgtcaaccttggagttgcatggtggatgttagatgacattgacaacatctgtgatgttgaaggaaatcatcctgatagcccatggacttgccctaaatacagggtcaccttcgacgcatctgttatctggggcctaatcggaccaaggagacttttcggaccaagagggatgtaccgtaacttagtgtggttgttcctcattggagcgttcttgcctgttcctgtttgggtttt

SEQ ID NO: 228022 - DNA, 230 bp, Gossypium hirsutum
agaaagcttatagaaaagccgctattaagaatcatcccgataaaggcggcgatcctgaaaagtttagagaaagttggctcaagcttatgaggtgctgagtgacccggagaagcgtgagatttatgatcagtatggtgaggacgcccttaaagaaaggatgggcagcggtggcggtggccatgacccttttgatatattccagtgtttctttgttggacaatccttttggt

SEQ ID NO: 228023 - DNA, 428 bp, Gossypium hirsutum
cttagctcttagcccagttcttcattttcattttcttgttccttccttcgccgtctattgctttttgttacctcgatttcaagtgaatcagaatgggtaaggaaaagactcacattaacattgtggttatcggccacgtcgattctgggaaatcaaccaccactggccacctgatttacaagcttggtggtattgacaagcgtgtgattgaaaggttcgagaaagaagctgctgagatgaacaagaggtcattcaagtatgcttgggtgcttgacaagctcaaggctgagcgtgagcgtggtatcaccattgatattgccttgtggaaatttgagaccacgaaatactactgcactgtgattgatgcacctggacaccgtgactttatcaagaatatgattactggtacgtcacaggctgactgtgct

SEQ ID NO: 228024 - DNA, 372 bp, Gossypium hirsutum
cttcaacaatttatcttctttattctggttgctcagccattcatgtttatttctctaactgattgctctttagctaatggtaaggttaatatattgcctcctaccaatacaagtgataaggtcactttggccctgtactatgaaactttatgcccatattgtgccgactttatcacaaatgaccttgtaaaggtattcctcagcgatctgtttaccattgtcaatctaaagttagtcccttggggcaatgctgacattcttggcgatgaaccccattgccagcatggagaagatgaatgctacttaaataccatacatagctgggttatctaccactggcctgatgtgaaaaagcactttgatttcattcgc

SEQ ID NO: 228025 - DNA, 444 bp, Gossypium hirsutum
gggaattctcttgcctccttactatcttactccttttctcctccttttcatctttttcaacaatggcgaccagcgaaacctcgttttcgccgacgatgccctgattgaaacccaatgtcacaatgctgaagtccccgaaacctgcataaaatgcataaaatccgatcctcgaagtcaatctgccgataaagtaggcattgcagccatcatcataacttctctaagcaacaaagccacgaccttgataaacaacatgacgactcttgcttcgggcgctcgcgacaagtacttgaaattggctcttcgaggttgcgggaaagggttttactatgcaaaaaccaatctgactgttgcgacgaaccgattgaaggggaaagaatttgatcaaacgaatcttctggtgaaacaagcgctcgagggagaagttgtttgtaagatgaatgt

SEQ ID NO: 228026 - DNA, 442 bp, Gossypium hirsutum
ctcctctccataaatctctctctcaacgcagagcgaataggcggagacttccaagaatctatcggatcagctaatcacgctccaaagaatggatcaggttcaacacccatctgtcatgcagaaggtagcaggccagctccttcgttctagccattctcaagattttcaaggttataatgggtctttcaggagtcctgctctataccaaaggcgtgctgcatatggcaattactccaatgctgcactgcagtatcctgtccgggcttgtggagacctgtctatggttccatcaacagcttcagctatttgcgttcaagcccctgctgagaaaggatttgccagctttgccattgatttcctcatgggtggagtttctgctgctgtatcaaaaacagctgctgcaccaattgagcgtgttaagcttttgattcagaaccaagat

SEQ ID NO: 228027 - DNA, 448 bp, Gossypium hirsutum
gttttcgtaaggtaaagggagaggattgttaagcgacacgcctctctcactcaaaccctattcttggtcccaatttctcgaatctagggttttacattctccttttcctctccaaatcaaccttatttcattttttttcttctcttagaaataatatcgtcaatgagcaacgaattagttaacttcaacatgtccggtcttggcgatgctcttaatgccgaagcacgagctggtctcgttaacgctctcaagaataaacttcaaagtcttgctggggatcactccgatgtgctggagagcctatcaccgattgtcaggaagcgtgtcgaggttcttagggagatccagagccaacatgatgaattggaggctaggttttttgaggagagggctggacttgaagctaaatttcaaaaactatatcaacccttgtatgcaaagcgatatg

SEQ ID NO: 228028 - DNA, 451 bp, Gossypium hirsutum
  unsure (1)..(451): unsure at all n locations
gcattttatttcttctttttttttttcccacactttttttaaaacccattagctaaaaatgcactggggggtttctgtgttgcttgcagttatcggagttactgcactgctcgttgtaactccggtaagtgggtaccgtccatggccgtacgtaaaacccaacagctccgacttaatgttcggaggctctaagaaatttgagggctcatcggagtttgtacatatgagatatcatatgggtccagtccttactgctcatatcaccatccacccaatctggtacggccggtggcagaaatcacagaagaaaatcatncgtgagctgatcaactagtcttccgccgtgattccaaacaccctttggtggctgggtgggggaagaccgacagatttacaccgaccaaacgggaggcaacatttcccgtacggtgctattaggtgaagagaaaaa

SEQ ID NO: 228029 - DNA, 437 bp, Gossypium hirsutum
cccacgcgtccgcctgactccgccatcttcaataatttcttccgttgatctttgttagagattagctttgtaatttttcattatgggaaagatcaagatcggaatcaatggatttggaaggatcgggcgtttggttgcgagagttgctctccaaagcgatgatattgagctcgctgctgttaacgatcctttcatcaccactgaatacatgacctacatgtttaagcacgagctggttcacggacaatggaagcattatgagcttaaggtgaaggactcaaagacccttctgtctggtgaaaagtctgtcacagttttcggtatcagaaacccttgggaaatcccatgggcttgggctggagctgagtatgttgttgagtctactggggtttttactgacaaggacaaggcttttgctcacttgaagggtggtgcga

SEQ ID NO: 228030 - DNA, 419 bp, Gossypium hirsutum
atttgttctctcgattcaaacactagggtttgatcgataattttatttataatttcctttacttcaattgcaattattcagatattcaaaatccaagctattttctttcatttaatctgaaattgattggattttccttttaattttgtttaatttaatctaagaaagaagggggaaaaatgccggcagtttacggatccagattgacgactttcgaggattcagaaaaagagagcgaatacggttatgttcgtaaggtgtctggaccagtcgtcgttgctgatggaatggctggtgctgccatgtatgaattagtccgtgttggacatgataatctaattggtgaaattattcggttggaaggagactctgcttcaatccaagtttatgaagaaacaactggcctgatggttaatgat

SEQ ID NO: 228031 - DNA, 448 bp, Gossypium hirsutum
atctttcccagcaagcacctttcttcttaactataaatttcaaatctctcctcccttaatcatggcgtactatttaccaccttgccactctcatgctcttctgctttatccaactcagcttctccgagttggttcaagagcaacccttggttttaaagtaccacaacggtccactcttgaaaggcaagatcaccgttaatcttatctggtatggcaagtttacacccatccaacgctccataatcgttgatttcatcaactctttgaattccgataaggccacaatggttccttccacgtcgtcgtggtggaaaattactaaaaagtacaagggtggttcttctaccttagctgtaggcaaacaaatccttcttgaaaattacccgctcggtaaattccttaaaaacccacatttacgggcattggccagtaaggtcaatggcgttga

SEQ ID NO: 228032 - DNA, 364 bp, Gossypium hirsutum
cgagagtggcaggtttaatgcatgtattggagaaaatggtttcagtatgtggggaaccactccaacgattgggcgcttatgttcttgaagggcttagagcgaggttggaatcatcggggagtaatatctacaaagccttaaaatgtcaagaacctacaagctcggaactaatgtcttacatgcatattctctttcgaatctgcccgtactacaagtttgcatacacatcagctaatgctgtcatcaaggaagtcatggaatacgagcagagaattcatatcattgatttccaaatagcacagggtacccaatggatgtaccctaatgcagctctttcaaaacggccctggtgggcccccattta

SEQ ID NO: 228033 - DNA, 215 bp, Gossypium hirsutum
ggaattcttattccttttatatttttcctctccaattttccgtcactttcccgagaaaatgagagagatccttcacatccaaggtgggcaatgcggcaatcagataggagccaagttctgggaagtcgtatgtgccgaacatggcatcgattcaacgggtcgatatggtggtgactcggagctccagcttgagcgaatcaatgtttactacaacg

SEQ ID NO: 228034 - DNA, 414 bp, Gossypium hirsutum
gttcgctaaggtagttaagggaaggttaaaggaagattcagccaggaaatactttcaccaactagtcagctcggtcgacttttgtcacagtcgaggcgtctaccatcgtgatctgaagcctgagaatctgctactggacgagaatgacaacttgaaagtctcagattttggactctccgctttgcctgaacagctaagaaacgatgggttgcttcacacacaatgtgggactccgtcttatgttgcccccgaggttttgaggaagaacgggtatgacggagccaaagctgacatttggtcgtgtggggttgttttgtttgttctcctgacagggtttttgcctttccaagccggaaatgttatgcacatgtataggaaaatttttaaggcagaatatgagttccccccctggga

SEQ ID NO: 228035 - DNA, 429 bp, Gossypium hirsutum
ggagtggccgcctcctaatttacagttctcaggttctctcgattcagccgtagccatggtgaacgggccgaagaccaagaagacttattgcaagagcaaggagtgcaggaagcacacattgcacaaggttacacagtataagaagggtaaggatagtttggctgctcaagggaaacgccgttatgatcgcaaacaatccggttacggtggtcagaccaaaccagtgttccacaagaaggcaaaaaccaccaagaagattgtgctgaggctgcaatgccagggttgcaagcatgtgtcgcagcatccaatcaagaggtgcaagcactttgagattggtggagacaagaaagggaagggaacatctcttttctaaatgtggtgttcttgctctttttgtttttggtggttttgaggtcaatgctagtatgg

SEQ ID NO: 228036 - DNA, 212 bp, Gossypium hirsutum
gtcaccatagccaccgtcatcggccacaagaaacaacacgatgcatgcgatggtgttggtctttttggtattgcttgggcttttggtggcatgattttcattcttggttactgcaccgccggtatctcaggtggtcacattaacccggcggtgacatttgggttgtttttggcttggaaggtgttgcttataagggcggaagagcttacatg

SEQ ID NO: 228037 - DNA, 416 bp, Gossypium hirsutum
gctttattgcccagctgaacgagggccgccaccttaagaagaggccaactgagttccgtgtagatgggggtctccagcccttcgatgggaacaaattcaacttcaccaaagtcggacaagaagaggtgctcttccagtttgaagcaagtgaagatggcgaagttcagttcttcccaaatgctcccattgatgttgagaatcacccaagtgttgttgccataaacgttagtcctattgaatacggacatgtgctgttgatccctcgaattcttgaatgcttgcctcagaggatcgaccgtgagagctttttgcttgcgctctatatggcagctgaagctgggaatccgtactttagattgggttacaacagcttgggtgcatttgctacaatcaatcacctgcactttcaggcttac

SEQ ID NO: 228038 - DNA, 439 bp, Gossypium hirsutum
  unsure (1)..(439): unsure at all n locations
gggaggtgaagaaggagagaatacggaaagcttcaatatatggaaagttacctggttgggacctacgttgctgttattgtaaagagtggggatgattgtaggcaagagcaccttgctgtgcagcttatctctcatttttatgatatatttcaagaagctggtcttccgctgtggttgcgcccttatgaagttttagttacatcttcttacacagctcttattgaaacaattccagatacggcctcacttcattctatcaaaagcagatatcccaatttatctagcttacgcgaattctttgctgctaagtatcaggaaaattctccaagttttaaactggcacagagaaattntgttgaaagtatggctgggtattcccttgtgtgctatcttctgcaggtgaaagataggcattatggaaatctgctactggatgaag

SEQ ID NO: 228039 - DNA, 445 bp, Gossypium hirsutum
ggaaaaacaaataaccatgtctaccgctcaatcttgtccacttcccacagtttctctctctaaatggctggaagaagagggccagaataaaaatgcagaaagccagctcctcaaatcctcattaccagctgaaaatgattgccatactcaagctgaagattcagtttctgatgttcccaaatacctgctagaattgggtctcaccccagaatgcaagcagcttatatcctcactgccagccgagaaaggttgggttgccaatctcctccatcaatatcaggggttttggcacaccactcgccagttacaagcagtgcttacttgccaaaaccactttcaagctcaggagacagatatcctccttgttaccactccaaaatcaggaacaacatggttaaaggctattgtttttgccttgatgaaccgagtcaagtatcccaacact

SEQ ID NO: 228040 - DNA, 449 bp, Gossypium hirsutum
ctttcttccacttttacccttcctccccctcgattcccccattcctccctcgtttcctcgagggtgtgcgcgtcttttcgcacccaagcttcagccgccaccgcgaccatgggtgacgctccccacgttggtatggacgctgtccaaagacgcctcatgtttgaggatgaatgtattttagtggacgagagtgataatgttgttggccatgaatcgaagtacaactgtcatttgtgggaaaagattctaactggaaagatgctgcatagagcattcagtgtatttttgtttaacacaaaatatgagttgctccttcagcaacgatctgcaacaaaggtaacattccctcttgtctggacaaacacctgttgcagccatcctttatatcgtgaatctgagcttatttctgagaatcatctttgggtgaggaatgctgcccaaggaaggtt

SEQ ID NO: 228041 - DNA, 436 bp, Gossypium hirsutum
gcgaagccaatgcaattagatcatgtaaaaggtgatgaagaatttactatgccaactaaagttgtttctgaagagacatagcaccagaaggagtgggtcaagatattccggagacaacggtccatcctgtgccgccagtgccaagcaagacggtaagattttcgactgtgaatattgaagagatgggtgcaatgaatgagaaatatcagtcgcctaggattcctgaaatagagatctcaacttcaccttcaaatgatggaatggacaaggaaccaatgcatagcaggaagaaatggaacaatgaggagagccctcctaaagcagccaaagggtttagaaagcttcttttctttggaagaaaaggcaaaaactatgctactgcttagtgtatgcttgtcttttcatattgcttatgcttcgggttttcaaatttttt

SEQ ID NO: 228042 - DNA, 438 bp, Gossypium hirsutum
gttatctctgagggtgtcttaataaacgccttcgatttactttcggtttccatttacttctttattgctacgtttttgaatttttagtaagcgaaaatgagagagtgcatttcagttcacatcggtcaggctggtatccaagtcggaaatgcctgctgggagctttactgccttgaacatggaatccagcctgatggccagatgccaagtgacaagactgtcggaggaggtgatgatgcttttaacacttttttcagtgaaactggtgctggaaagcacgtccctcgtgctgtctttgtggatcttgagcctactgttattgatgaagtgaggactggtacttaccgtcagcttttccaccctgagcaactcatcagcggcaaggaagacgctgccaacaacttcgcccgtgccactacactattgggcaagagatcg

SEQ ID NO: 228043 - DNA, 444 bp, Gossypium hirsutum; identical to SEQ ID NO: 196063
  unsure (1)..(444): unsure at all n locations

SEQ ID NO: 228044 - DNA, 285 bp, Gossypium hirsutum
cccacgcgtccgattagtggttatcaagggtttttcctctctgggttaagaccagcttggtttatggggtttaggcaacgccttggcggtcatccacagatatgtgatggatctattgtagctttcactgttcttcataatgtaaactgtaatcatgggttcatatatgttacatcacagggtattctgaagatctgccaaaagccatctacatcgaactatgacaactattggcctgtgcaaaagaattcactgaggtgcactccacatcaagttacttacttt

SEQ ID NO: 228045 - DNA, 449 bp, Gossypium hirsutum
  unsure (1)..(449): unsure at all n locations
ggggcacaacacctgttgatatccatgggaagcctattgcagatctttcaaagactgggggatggagtgccgccttatttatgtttggaaatgagatggccgaacgaatggcttattttggcctatcggtgaacatggtggcctttatgttctatgttatgcatagacccttttcaagttcttcaaatgcagttaacaatttcctggggatatctcaagtatcctctgtccttggtggttttctagccgatgcttatctcggtcgatattggacaatagccattttcactactatttatcttgctggtttgatagggataactttatgtgcatccatgaaaatttttgtgccaaatcaagatcaatgcgatcaactgtccctgcttttgggtagttgcgagcctgcaaaaccatggcagatgctttacctgtatgttgncctttattta

SEQ ID NO: 228046 - DNA, 446 bp, Gossypium hirsutum
  unsure (1)..(446): unsure at all n locations
ctcttagctttcaccgacaaaaaaatggcagcgaagcaaacgacgatcctcgttgccgccatcctggtaactgctttttacggcggcgcggtgacatcggcgcaggcaccggcagctggtccagcgatggccatgtcgccgtccgccatggcaccgacgccggactgtatgacgaacttgttcaacttatcggattgtttgacgtacgtggaggccggaagcaacttgacgaagccggacaagccttgctgtccggaattggctgggctagtggaaagtagccctcaatgcttgtgttatttgctggataagaacgcgacggcgaactatgggttcaacattgacatggatagagctcttaagcttnctgatgtttgccatgttaaaactcctcctgttagtctttgttcaactattgtcggggctccaatcggagttccaactca

SEQ ID NO: 228047 - DNA, 295 bp, Gossypium hirsutum
gcgaaaatatctcaaatctcctcctcctcctcagaaatcttagtatcatcaccatggcctcaaatcccgagagtgcgtctttgacatgactatgggtggtcagcccgctggtcggattgtgatggagcttttcgcagattgcactcctcgcactgctgagaacttccgtgccctctgtaccggcgagaaaggcgtcggccgcagcggtaagcccctccactacaaaggctcctctttccatcgtgggatccctaactttatgtgccaaggaggtgacttcacggccggaaacggt

SEQ ID NO: 228048 - DNA, 449 bp, Gossypium hirsutum
  unsure (1)..(449): unsure at all n locations
cccgttgaaaaaatatgggtttccaaagaaacatattgggtttccttttcttgatattggcttcactaacaagcctctcttctagccttcctagtgaatactccatagtggaacatgagattgacgcatttctttcggaggaaagggtgttggagatcttccaacagtggaaagaaaagaatcagaaagtgtaccggcacgccgaggaggctgagaaaaggtttgaaaatttcaaggggaatttgaagtatatcctagagaggaatgcaatgagaaaagcaaacaaatgggaacaccatgtgggattgaacaagtttgctgatatgagcaatgaggagttcagaaaagcttacttgtcaaaggtgaaaaagcccatcaacaaagggataaccctgtcaaggaacatgaggagaaaggtgcagtcttgtgatgcaccctcctncttggat

SEQ ID NO: 228049 - DNA, 379 bp, Gossypium hirsutum
gacgaagcggtcacctttgctttatatggtgatggggctgctaatcaagggcagttgtttgaggcgttgaacatctctgcactttgggatctgcctgcaattttggtctgcgagaataatcattatggtatggggacggctgagtggagagccgcaaagagtcctgcttactacaaacgtggggattatgctcctggtttgaaggtggatggaatggatgcttttgctgtgaagcaagcttgcacgtttgccaaagaacatgctttgaagaatggaccaattattcttgaaatggacacttataggtatcatggtcattccatgtctgatcctggaagcacctatcgaacccgtgatgagattactggtgttagacagg

SEQ ID NO: 228050 - DNA, 192 bp, Gossypium hirsutum
tgaggttgagaatgctacatggatgctaacggttttcagttgctttggtcagtacttttgccttcattttgaagcattccatatcggagtagctcctgtttatatagcattcttgcggtttatgggtgacaataatgaggcaaagaactatagctacagcctcgagggtgggtgggaacgggaggaagctgc

SEQ ID NO: 228051 - DNA, 296 bp, Gossypium hirsutum
ccccccccccttttttttttttttaattttttttttttttattaatttgtagataaagttaatattgcggagtcgcataaagcggcagaggacacaacccacaactctggaattttaacatccatatttattctgtagctatcgttattttggcttccactagctggtgaactttccatgccaaaacttcacttgacgctgttgcagtcagtgctagggctgatcttgtaagggatgttgacaccgcacttgcctgggagtccggttgcaataccatagttgatgccagaaatgcc

SEQ ID NO: 228052 - DNA, 442 bp, Gossypium hirsutum
tctctatttacaaatacgccgccgtctatcggagctcagagaggaacggttcgattgccgacggttttgatttatcttggtccgatattaattgaaggtgtttggagccggttgttttccttatgcagtaacacctatgctaattttgatcgagttcatttgccgggcaatgtgaatggtggttgtttgaatacttttagagaattagtttgtgttggggtggatcatgggggctgcatgttgtgttgctgctagagacaaaactatcgtaaatggatcaggtagtgaggttttacataggaatataaggtattctccaacttggagttttcgttgggataaccgagggcgtgtagctggtgaagacacttctataagttggttttcggatgcagttagtcggaatgatggatcagagatcaaatatgaatctgcatgtgca

SEQ ID NO: 228053 - DNA, 450 bp, Gossypium hirsutum
gcgtgccaatgttctcagatacttccccacacaggctttgaactttgccttcaaggattatttcaagaggatggtcaacttcaagaaggacagagatggctactggaaatggtttgcaggaaacttggcatctggtggtgctgctggtgcttcatcacttctttttgtttactctctggattatgctcgtacacgtttggctaatgataacaaggctgctaaaaagggtggtcagaggcagtttaatggtttagttgatgtctacaggaagaccatccaatctgatggcattgctggtctttaccgagggttcaatatctcatgtgttggaattattgtttaccgtggactttactttggaatgtatgattctttgaagcctgttgttttgggtggtggattgcaggatagtttcttggcaagtttcttgctgggttgggtatcacaata

SEQ ID NO: 228054 - DNA, 441 bp, Gossypium hirsutum
cccacgcgtccgaagaagctgctgttctctctctctttcccatagtttcacccgtcttttaatccatcgctcacaaaattatgggtttgaaggaggaattcgaggagcatgccgagaaagttaagaccctcccggccgccccttcgaacgatgacatgctcattctctatggactgtacaagcaagccactgttggaccagtgaataccggccgtcctggaatgttcaacatgagggaaaggtacaagtgggatgcatggaaggctgttgaagggaaatcaaaggaggaagcaatgggggattatatcaccaaagtaaaacaactgtttgaggctgctggaagttcttgatgtgtgtgtgtatggccaatgaaaatggtgtaatttcaagccctttgttgttactttggggttttcattactatgaataaattatgtactc

SEQ ID NO: 228055 - DNA, 421 bp, Gossypium hirsutum
aaaaaacatctttctgttcaattcaatcctcctttttctattcaaccataatgtcttgcttcattagcaaatacgccgatgagttgggtaaaaacgctgcttacattggcacccctggaaagggtatccttgctgctgatgaatccaccggcaccatcggcaagcgtctttcaagcattaatgtagtaaatattgaagaaaacaggcgtgctctccgtgagctcctcttcactgctccaggagctcttcagtacctcagtggtgttattctcttcgaggaaaccctttatcaaaaaaccgcttcgggcaagcccttcgttgatgttttgaaggaaggtggtgtcctccctggcatcaaggtcgacaagggtaccgttgagcttaacggaaccaaccgcgagactttcacccagggtctgga

SEQ ID NO: 228056 - DNA, 364 bp, Gossypium hirsutum
gcaacgatacttcaaatactgatacatttatcaccaaaccattgtgatacagaaagtaatatcattttatccattaccaagaacatgattcatggatagatttcacataactaaactcgtgggtatattattatagaacaaactggatattgctttaagctgttttaatgcacactatgatgaaacttatagtgtatgaatctactcttcaggatttttacttagggacccaaacaatgtgatcccgaggaaggaaatggcagacaggaatggttcctggttcaacttttaggacttgaaaagccaaatgcttagggttccatgctgatgtatctgtgtggcagactgctactgctttggcttt

SEQ ID NO: 228057 - DNA, 414 bp, Gossypium hirsutum
catggatgttgcctttggaatggagtatctgcatggaaagaatatagtgcactttgatttgaagagtgacaatttacttgtcaatcttcgagatcctcaccgtccaatatgcaaggttggagatttgggcctatctaaggtgaaatgtcaaacccttatctcaggtggtgtccgtggaacccttccatggatggcaccagagcttctgaacggcagtagcagtcttgtctcggagaaggttgatgtcttctcattcggtattgttatgtgggagcttctcactggagaagaaccatatgcagacttgcattacggggctattattggtggtatcggaagtaatacactacgaccaccggttccagtaagctgtgacccaaaatggatatcattaattggagagatgctggtcat

SEQ ID NO: 228058 - DNA, 450 bp, Gossypium hirsutum
gtaactcagaaatagcccgtgtattcttcccttcatatcccatgttccaactttacaaagacggacgcgccgagagactccggaaaacggtaacggtcccagcgtccgacgaccccaaaaccggcgttcggtctaaagacgcaccggtgcctcccctatcgtcagctcgtattttcctccccaaaacctcagaccccaccgccaaactcccgctcctcatctacatccacggcggcgcgttttgcatcgagtcccctttctcccccacttaccacaactacctcacttccctcgtcgccaaagccaaggtaatagccgtttccgtacagtacaggaaagcttcggagcacaacctccccgccgcgtacgacgacgcctgggatgcaatcaactggatcgcttcccacattgaaaggaacggtcccgagccatggctcaacgaaaacgccg

SEQ ID NO: 228059 - DNA, 413 bp, Gossypium hirsutum
ggagccctgaatgtggatgtgactgagttccagactaacctggtcccatatcccaggatccactttatgctttcttcttatgcccctgtcatttcagctgagaaggcttaccatgagcagctatcggtggctgagataaccaacagtgcttttgaaccctcttcaatgatggccaaatgtgacccacgacacgggaagtacatggcttgctgccttatgtaccgaggagatgttgtgcccaaagatgtgaatgcggctgtggccaccattaagaccaaacgcacaatccaatttgtggattggtgccctactggattcaagtgcggtatcaactaccagccaccaactgttgttccaggaggggaccttgccaaggttcagagagctgtctgcatgatctccaactcaaccag

SEQ ID NO: 228060 - DNA, 433 bp, Gossypium hirsutum
taataaagcgtttgtctcagatctcagaagatggcccgtaccaagcaaaccgcccgtaagtctactggtgggaaggctccaaggaagcaacttgctaccaaggctgcccgtaaatctgccccaaccaccggtggtgtgaagaagcctcatcgataccgtcctggaactgttgctcttcgtgaaattcgtaaataccagaagagtactgagcttcttatcaggaaattgcctttccagaggcttgttcgtgaaattgcccaggacttcaagactgatttgcgtttccagagccatgctgttctagctctccaggaagctgcagaggcataccttgtgggtctttttgaagacaccaacctttgcgcgatccatgccaagcgtgtcacaattatgcccaaggacattcagttggctcgtaggatcaggggagagc

SEQ ID NO: 228061 - DNA, 368 bp, Gossypium hirsutum
gtttgagcggctaccattgccgtcatcgttagtatcatcaaaaccactatcaatatgtcgttatcatgttccgatcgcttcacggacttactctgcgccgaggattcagacgaggtgttatccggcgagtcgccggcatgctcgtcggagctggactctcaagcgtcctgcatcgaggagtccagcatcgatggctttattgaagatgagacaaacttcgtccccggatttgattaccttgctcggtttcagtgtcaatctcttgacgcgtcggctcgagaagcatcggttgcatggattctaaaggtacaagcatattacaatttgcagcctttaacggcttatctttccgtcaactacttggatcg

SEQ ID NO: 228062 - DNA, 436 bp, Gossypium hirsutum
ctaactctccaactgttgcttccacttcctctcttccagatctgaatcgcaaaagggaattttcagatgggtcgcggagttagcagtggtggtgggcagagctcattaggttatttgtttggtagcggagaagctcctaaagcagggacaaacaactcccaagctgctcccgctgaagcaccagctgtcttcaaacctgcccctgctcctgaaccagtagatatttccaagcaaattccggctggtattaacagtatttccgcaaacaattacatgcgtgctgatggtcagaatactggcaatttccttacggatcgaccttccaccaaggttcattctgcccctggaggcggatcttctctggactacctatttggtggacctggaggtagtaaatgagattgtgccttaataacatctttgataagggagagta

SEQ ID NO: 228063 - DNA, 455 bp, Gossypium hirsutum
gaggaagaagagaaagtatgagcttggaaggcaacctgcaaacacaaagctatccagcaacaagacggtcaggaggattagggtccgaggtggcaatgtgaagtggcgtgccttgaggcttgacacaggaaactactcctggggaagtgaggctgtgactcgtaagaccagaattttggatgtggtgtacaatgcgtctaacaatgagttggttcgtacacaaactctggtgaagagtgctattgttcaagtcgatgctgctccattcaagcaatggtatctccagcactatggtgttgacattggtcgcaagaagaaagcagcagcaggagccaagaaagaaggagaggaaggtaaaactgctactgaggaagtgaagaagagcagccatgtcttgaggaagctggagaaacgtcagcagagtcgcacacttgacccccatatcgaggagcaat

SEQ ID NO: 228064 - DNA, 380 bp, Gossypium hirsutum
gcttgatcagcaatatgctgccattagaagaacgcgaggagatggaaactgctttttccggagttttatgttttcataccttgaacatattttggaatctcaagaccgtgctgaggttgatcgtatcaaaggcaatgttgaagaatgtagaaagacgcttcagagcttaggccacacagattttacatttgaggactttttttcgttattccttgagcagctggaatgcgttcttcaaggaaaagaagattccataagtcaggatgagttaatactaaggagtcgagatcagtcaatttccgactatgttgtaatgttcttcaggtttgttacttctggtgaaatacgaaagcgatcagatgtttttggcaccctttatt

SEQ ID NO: 228065 - DNA, 463 bp, Gossypium hirsutum
  unsure (1)..(463): unsure at all n locations
cccacgcgtncgcaaaaacctggtccgctctttctcttcttcttcttcttttatataaccaaagtaaggccgattttaaaccggctatttccttttgatggtagtatttcttgtttcatttaatcagattatcaagtgagaaaacgggagaatgaaaagggaagatacagttaggaatgggcatttcctcgccgataggagatggtttttccccatcgttatcaccggccttatagctggtgcgattgttacttccagcttcataaaagccgccgattactcgctgctatgctccgtcgccaacaccagatcaccccagggcgttggtaaagggtcggccacgccgatccaactccaagctatcatccactacgccacatcacgcatcacaccgcaacaaaacttcagggagatctccgttacctttgatgtcctcaagaaaacgtctccttgtaatttcctc

SEQ ID NO: 228066 - DNA, 385 bp, Gossypium hirsutum
cccacgcgtccgaaagaaagtagttacgtggtttcagatactaaccattgtgatcaaaatggctgaggagaggaattatataataaaggtagaggaagggaaggccgccaccgatgaaagaccgtcgatcggccccgtttatcgcagttgttttgccgagaatggtttccctgctccgattcctggaatggagagttgttgggacatcttccgaatgtcagttgagaaatatcctaaccaccatatgctcggtcaccggcagattgtggatgggaaagctggaaaatatgtgtggcaaacttacaaacaagtttacgacattgtaatgaaagtaggaaattccattcggagttgtggtgttgaggagggaggaaaatgtggtata

SEQ ID NO: 228067 - DNA, 454 bp, Gossypium hirsutum
ttccacaaatctcccatttttcttctccctaagacgcttcgccccataacccatctaacaatggtggcctcaaaattctgttttgctttttctcttgctattctttcaatcttggccgttgatgctgcccaacaccatgctctggcgccctctccttcttcccccgtggactgctcctctctgattctcaacatggcggattgtttgtcctttgtgtcgagcgggagcaaaacgtcgaagccggaaggaacctgttgttctggcttgaaaactgtgttgaaagctggaccccaatgcttgtgtgaggcttttaagagcagtgcttctctgggtgtcactttgaatgtcaccaaggccatgactttgcctgctgcttgcaaagtctctgctccttctgccactcaatgtgcattgtctcttagtcctactggtgcaccaggatggcaccgtcagc

SEQ ID NO: 228068 - DNA, 402 bp, Gossypium hirsutum
ctaacaatcgctgttgtgaacaaacaaacgcagacttgagcttcaatggcggtgaaaatcttgatagcggcaatcttagtaattgcagcatctctttgctgggtatcgtcggctgattcgtctgaagctgctttcgtcaaaaagaccatctctgcccacaagatcgtcatcttctcaaagtcctattgcccgtactgcaggaaggcaaaatctgtgttcaaggagttgaaacaagttccattcgttgcggagcttgatgagcgagatgatggatggaatattcaggatgccttgagtgagattgttagtaggcgtactgtaccacaggttctcattaatgggaaacacatcggggggtcagacgatactgttgaagcatatcagagtcggaaattggctaag

SEQ ID NO: 228069 - DNA, 472 bp, Gossypium hirsutum
aaaacacttgaaaatatctctcttcactttcttctcttttcaacgcagagtgaaaggcggggaggccgtagacaatctctcttgcgctcttctcgtagaatggatcagattcaacatccatctgtcatgcagaaggtagctggccagctcctttcttctagcatttcccgagattttcaagggtatgatgggtctttcaggaggcctgctctataccaaggacattttgcatatgggaattattccaatgctggaatgcactatcctattgttccatcaacagctaccgccatttgtgttcaagcccctgcagagaaaggatttaccagctttgccattgatttcctcatgggtggagtttctgctgctgtgtcaaaaacagctgctgctccgattgagcgtgttaagcttttgatacagaaccaggatgaaatgatcaaaactggtaggctctctgagccctacaagggta

SEQ ID NO: 228070 - DNA, 472 bp, Gossypium hirsutum
  unsure (1)..(472): unsure at all n locations
atcgactttcgttctttccgttcatcttgtcaccgtcagcggcggaaccgttgtaatccaagctagcaattagcaatctgtgctcttgcaaagagaatggaattagcggatcgagcagttgggtttctcttatctattaccagtctatcaatattcacgtattatacgttttgggtcatcatcctgccatttgtggacagtgataacttcatccacaattattttctaccccaggaatatgccatactgatccctgtgtgtgccggtgtggtgctcctttgcctcctctgtatttttattgggttcgtgctgctcaaatccaagaagaagaaggcttgaagcttgatgctactttatcatctctgcttaaaacattgcctgggtatagctttgcttggtttcttccatatattttttgcttcgagtttaagntttgagatgagaatttgtgtttaggccatcataatttgtt

SEQ ID NO: 228071 - DNA, 441 bp, Gossypium hirsutum
cttccttaaactgatctacgcaaatcccaggaaaaccccacgtgtcaaaagagtaggagatggagatacggagattgcatattcggcttcttcttcaagggtttatgttgttctctgtgattgggaattgttacgcgagatttgtggtggaaaagaacagcttgagggtgacttcacccgagaagattaagggtacctatgacagtgcaattggcaactttgggatacctcaatatgggggaagcatggctggtgccgtggtttaccctaaggagaatcaaaagggttgtaaaagttttgatgactttgggatttcctttaaatccaagcctggggctcttcctacttttgtcttggtcgatcgtggagattgcttctttgctttaaaggtctggaatgtacagtacgcttgtgcttcttctgtgcttagttgcttgtgat

SEQ ID NO: 228072 - DNA, 376 bp, Gossypium hirsutum
  unsure (1)..(376): unsure at all n locations
aagaaagaaaacatgtctcttgtgacagaagagataaaagcgagtgcatcagagatttaccatggagatgagatatgccaggagaaatgcaagtttttgttggaggaagtaggcatgccaagggggcttttgccacttagagacatcgaagaatgtgggtacgtgaaggacacaggtttcgtgtggctcaaacaaaagaagagcatcacccacaggttcgaaaagatagggaagctggtttcctatgcaactgaagtcacggctgtcgttgagaaaggcaagatcaagaagctgactggggtgaagaccaaagagcttttggtttggatcacactgagtgatatccaagtggatgatcctnccactgggaagatca

SEQ ID NO: 228073 - DNA, 466 bp, Gossypium hirsutum
atcagcttgtggaaaatgctgatgagtgtatggttcttgataacgaagctctctacgatatctgtttccgtaccctcaagctcaccactccaagttttggagatctcaaccatctaatttctgccaccatgagtggtgtaacatgctgccttcgcttccctggtcagcttaactcggatctccgcaaacttgccgtaaaccttattccattcccccgactacatttcttcatggtgggatttgcacctctcacctcacgcggttcccaacagtacagagccctcactgtccctgaacttacacagcaaatgtgggatgccaagaacatgatgtgtgcagctgatcctcgacacggccgatacctcacagcatcagcggtcttccgtgggaagatgagcacgaaagaggttgatgagcagatgatcaatgtgcaaaacaagaactcatcttactttgttgaatggat

SEQ ID NO: 228074 - DNA, 465 bp, Gossypium hirsutum
ggaaaatcatgggtgccaaagttcttttcttctttgctttgctttccttttcagctgtctcggcatttgcacaggatgaggaagaccaaggtcttgttatgaacttctacaaggattcttgtcctcaggctgaagacattatcaaggagcaagttaagctactgtacaagcgacacaaaaacactgctttttcttggctgagaaacattttccatgactgtgctgtccagtcatgtgatgcttcactgctgctggactccacaagaaggagcttgtctgagaaggagacagacaggagctttggcctaaggaatttcaggtacattgagaccatcaaagaagctgtagaaagggaatgtcctggagttgtttcttgtgctgatatccttgttctgtctgctagggaaggcatcgtttcgttgggaggcccctatattcctctcaaaactggaagaagagacggtt

SEQ ID NO: 228075 - DNA, 260 bp, Gossypium hirsutum
  unsure (1)..(260): unsure at all n locations
ctccgcttcctcaacaaggacgcccgctgcatcgtttccctcaaatccaaacctactctggtagatggtgtcagccgcgtggcggaagatgaggaggaactagatccgtgttctgcacgcgcttgcgtggaggacccggcaaggttggggaagatcgagtcgaggattttgaagagggttaaagaggaatttggggttggggaagaagtgggatttgtttgtttaggtgggtttgngnattaacgagagggttttaattg

SEQ ID NO: 228076 - DNA, 373 bp, Gossypium hirsutum
cggacgcgtgggtttgaatccagcttatgcgggtgcttatggtgcaacaccttctctatcacaattaccctacctgtgtgctagaccaattgttccagatgctcctgcaccaccaaataacatcctgtttgttcagaatcttcctcatgatgcaaccacaatgatgctgcaaatgctcttcaatcaataccccggtttaaaggatgtcagaacggtggaaacaaaaccaggtatagcctttgtcgagtatgaaaatgagatgcaatcaaccgtcgctatgcaggcactgcaaggtttcaagatacagcaaaaccagatgttgattacttacgcgaagaagtagatgaataaagacccaaatggtccttttatg

SEQ ID NO: 228077 - DNA, 338 bp, Gossypium hirsutum
gcaatagcaacgatttaacaccaatccacaatttaattaagattgatttaatccctcttcttgctttccttcttaacttaagccgaaagcctaaggggttaatattttattaatctattaaatagaaaaagaagtaattcagaatcatctggttaggatcgatctaaaccagtctattatgtatataattcagtatgccaactattaaacaacttattagaaatgcaagacagccaattagaaatgtcacgaaatcccctgctcttgggggatgtccttagcgccgaggaacatgtactagggtgtattctatcacccccaaaataccatactctggc

SEQ ID NO: 228078 - DNA, 471 bp, Gossypium hirsutum
cccacgcgtccgtctcaggctatgatgaatttgttcccatggttgataaagctgttgattctagttggaagaaacaaacctccctcttgaggccttctgcttccaaaggtacattagcagctcctgaaactcccaaggcccaggaaggaattcgagcttggattttgctgatgctcatggcttttttcatgacactttatactctcttccactcagtggcactgaatataaccagaaagctacctaactcagtttctggtcattgtcaaaatgttactgaacctaaacctaatgcaactcaaaaggaagaatgtcgcgccccttctccaacagctcttcagactcaggcagatcttctatcttctgttattgagaggttgggtgagcttgaagagaaagttggtacactacaagcgaagccatctaagatgccttatgagaaagaggagttgttggaatctgctgtatgtc

SEQ ID NO: 228079 - DNA, 466 bp, Gossypium hirsutum
  unsure (1)..(466): unsure at all n locations
cggacgcgtggggccgcttgtttgttttgcttgcactctcaagttttgtggtcgaaagtcgacatctcaaaggaaattcatacgaattatccaacttccatccttccggcaccaatgccaccattgaacccaaaatatgggcagttttagttgctggctccaatggttttgtaaattataggcaccaggcagatatatgccatgcatatcaaatcttgaaaaatggtggactagaagacgaaaatattatcgtttttatgtatgatgatattgcattcgacgtagaaaatttgagacctggtgtcattatcaataaaccagatggagacaatgtttataaaggagttcccaaggattacacaggggaagatgtaaatgtggacaatttacttgctgcaatacttggaaacaaaactggtgttaggggttgaagtgggaaagttgtggagagcggtccanatgatca

SEQ ID NO: 228080 - DNA, 467 bp, Gossypium hirsutum
cccacgcgtccggaagaaccctgagcagccgaaccccccaaaagaccaactaaactcaccaaaaataatggtggccagcaagaaaacgaagaagacccatgagagcatcaacaacaggttggctctcgttatgaagagtgggaaatacactcttggttataaaacagtgcttaagtccctcaggagctccaaagggaaattgattatcatttcgaacaattgtccaccgctgaggaaatctgagattgaatactatgcaatgctctgtaaagttggagttcaccattacaatggaaacaataatgatctaggaactgcttgtgggaaatacttccgtgcatcctgcttgagtattgtcgaccccggtgattctgacatcatcaagtctctttcaggtgaccactaagtcaatgaaggtctggttctctatcacaccagaatgatgatgtttctttactttctcacga

SEQ ID NO: 228081 - DNA, 449 bp, Gossypium hirsutum
cagattttccgtgaaaatcaagaagaaaaaaaaacccttaaaatcaaaaccctaatcctatttttttttcctttttgattgtagaaaacaaagcaagccctcaactggacaacatggggtctgaacagaatcaaggaaccagctttcccccgtcggagccgaagctttgcgctaacggttgcgggtttttcggaacggcggcgaacatgaacctctgctccaagtgttaccgggacctccgtgctggggaggagcaagcggcgaaggcgaaagctgccatggagaaatcccttagcgtcaaaccgaaagaagatgttgttgtggagacgtttaagcccgttgagaagctgcctcatgcgggttcatcatcagcggcggttgagcaaccgggggtggctctctccggtgatgaacagtccgtgccaaaattggtcgagcaggtgctttat

SEQ ID NO: 228082 - DNA, 467 bp, Gossypium hirsutum
cccacgcgtccggttgaaagcagaaagtacagtgcttcattgacagactttggaggggttggtgatggagtaacatcaaatacgaaggcttttcaagctgccatttttaacctcagccaatatgcatcagatggtgggtctttactctttgttccaccaggaaaatggctaactggtagttttagccttaccagccatttcactttgcatatccacaaggatgctactcttcttgcttcgcaggatgagagtgaatgggctgtcattgatcctttaccatcctatggtcgaggaagggatgccgatggtggaagatatatcagtcttattttcggaaccaacctcactgatgtcgtgataacaggtgataatggcactattgatggtcagggtgttacctggtggaacaaattccataagggagagttgaaatacaccaggccttaccttattgagatcatgtattc

SEQ ID NO: 228083 - DNA, 473 bp, Gossypium hirsutum
gcggatcagcaccatccatgctctttctttcttgtctgatctcaaacttgggcactacatgaaaatcccaccacgttgcatgtacactgctcagcttgtgggaactgtagttgcaggtatcgtcaaccttggagttgcatggtggatgttagatgacattgacaacatctgtgatgttgaaggaaatcatcctgatagcccatggacttgccctaaatacagggtcaccttcgacgcatctgttatctggggcctaatcggaccaaggagacttttcggaccaggagggatgtaccgtaacttagtgtggttgttcctcattggagcgttcttgcccttcctgtttgggttttgagcaaaattttcccagaaaagaaatggattcccttgattaacataccggtcttatcttatggttttgccggaatgccacccgcaactcccaccaacattgcaagttggctcatcactgg

SEQ ID NO: 228084 - DNA, 440 bp, Gossypium hirsutum
cactcgaagcaaaagtaaaagggaaagtaaaaggagggttttgaggagggtgaaagatggctggttacagggcagaggatgactacgacttccttttcaaggtggtgctgatcggtgattcgggagtaggcaagtctaaccttctctcaaggttcaccaggaacgagtttagcctcgagtccaagtccactattggcgttgagttcgctactcgtagcttgaatgtcgatggtaaggtcatcaaggctcagattcgggacactgctgggcaagaaaggtaccgtgccatcacaagtgcctattaccgaggtgctgactgtgcgctactagtgcttgatggcacccgactctagacgtgtgaaaatggggagaggtggcttaattaaagtttctttcatgtgaccactatattaattgaatgtctgtttttttatcacacc

SEQ ID NO: 228085 - DNA, 470 bp, Gossypium hirsutum
ctcacctctctcctccttttcatcgaacagctctcaaaattcccaatttttccctaagaaaaaaccgtaactccatctccacatttacgcaacatgtcattcgatgaagaagagtccttcgaacacaccctcctcgtggtccgcgaagtcactgtctacaaaatcccgcctcgttccacctccggtggttacaaatgcggtgagtggctccaatccgacaagatctggtcgggtcggctccgggtcgtctcttgcaaggaccgatgcgagatccgattggaggatcccaactcggctgagctattcgccgcttgttttatctaccctggccagcgcgagagttccgtagagcccgcgctcgattcttcccggtacttcgtgctcaagattgaggacgggaatgggaaacacgccttcattgggctcgggtttaatgagcggtacgaggcgtttgatttcaacggggcctt

SEQ ID NO: 228086 - DNA, 398 bp, Gossypium hirsutum
ctaattcttacattcttcagcaatttgaaaaccctgccaacccaaagatccattatctgacaaccggaccggagatatggaaaggcagtggaggaaaggtagatgtccttgtctctggtatcgggactggaggtactgtaacaggagccgggaagtatctgaaagagcagaatcctggcattaagctcgttggcgtggaaccagttgagagtgcagtgctttctggagggaaacctggtccacataagatccaaggaattggtgctggcttcatccctggggttttagacgtcaatttaatcgatgaagtcgttcaaatatcaagtgaagtagctattgaaactgcaaaacaacttgctctgaaagaaggattgttggtaggtatatcatccggtgct

SEQ ID NO: 228087 - DNA, 439 bp, Gossypium hirsutum
gctcaacatagagaaaactcagaaacacgcaggaaacccaaagtttttctcttttttttccctcttttttttatacacaaaggtaataattttcgaaaatggcatttgctgttacctcctctccggctgcaatttctggttccagcttttctcgttcaagtgcctcatctgatctcagaattccgcaaattggttcatttcggctagcggatcgccatgcaacggtgaatctatctcaaaagcgttgcgcagtgaagcccgtgaatgcggagccaaagaggaacgattccatgctttctcatgctgcaaccacctctgctcctgaagtgtcggaaaaagttgaggtggaggattttgaccaattggccaaagaacttaacaatgcttctccactcgaaatcatggataaggctctggagaaaattggaaacgacatcgc

SEQ ID NO: 228088 - DNA, 463 bp, Gossypium hirsutum
gtatcatcactctcccaccccgaccgcttgattttgatcagacggtaatcatgccgatcagaaacatagccgttggccggcctgaagaagctactcatccagatgctcttaaagcagctttagctgagttcatatcaacgttaatcttcgtttttgctggatctggttcaggcatggcttttaataagctgaccgacggcggtgcaacaactccggctggtctcgttgccgcctctctagctcacggatttgcgcttttcgtcgctgtctcagtcggtgctaacatctccggtggccatgtgaatcccgccgttacattcggtgctttcgttggcgggaacattactcttttacgtgggatcctttattggattgctcaactccttggctcaaccgtcggttgcctgttacttagttcgccactagtggcctggtaaaaattatcatagctgcctttccctcc

SEQ ID NO: 228089 - DNA, 407 bp, Gossypium hirsutum
ccagtccgtgtaggtcaagctgttgatgttgtcggtcaggctggtcgacccaagactatcactggggtccagacccattccactccgggtcttcttgctgccggtgatagagcagaactggctaccgaaaagtatattcccctttcacccatcctggaggggcatgttattttgaaagaaaacccagactacagagaggatagttaagttaaaaagcaagaactcggccgctacttccatggttggtgattgtaatgtgacactgttttcaaacaaattttcgaactttattattatttttttcatgataaagtttttcaagtcaaaacgactagatatgaaaatgttatgtaaacctggcaagctttcttttcgggttcatttaattcttattatatatttataat

SEQ ID NO: 228090 - DNA, 473 bp, Gossypium hirsutum
cggacgcgtgggcgaggaaccaaaaggaaatgggttccagaagaaaatgctgtgttggttgcttgtatggtcgacttgcacaatgctggaacctttaatacggatacgggattcaaagctggctatttaaatgagttagcaaaaatgttagaaaaagttttacccaatgccatgttgaaggctaaacctaatcttgaatcgatgattaagacattgaaaagggattggtcaatagtttatgacatgcttagtggaaaaaacaatagcggctttggttgggatgagcataggcagcttgttgttgctgaagatgcggtgtggtactcatatataaatagtcataaagaagcagctcaattcagatatcggagtttaccttattatgaacaacttactgccatctacgcaaaagatcgagccactggaaaagatgctcaaacagctgctgatattattgaagaaataaatgctga

SEQ ID NO: 228091 - DNA, 464 bp, Gossypium hirsutum
gtccgggatgatgagttgtcatggttccgcaaagcatccctgcttggagcgtgtaatggctttatactgaatagcattccagttgtggtgactgtgatttcatttggcttgtttactttgcttggaggcgacttaacacctgcaagggcatttacatctctttctctcttttccgttcttcgtttccccttattcatgcttccaaacgttattactcaggtggtaaatgcaaatgtatcactaaaacgtctggaggagctgttcttaactgaagagagagttcttctgccaaatcctcctcttgatcctgaacttccagcaatccaaataagagatggttttttttcatgggattttaaggcagagaggcccacattgtctaatattaatttagatataccatgttggtagcctggttgcagtagttcgtattactggtgaatgtaatacctcgcttatttttg

SEQ ID NO: 228092 - DNA, 474 bp, Gossypium hirsutum
ctcttctctatgtctatcctcttcctttttgccctcttcttcatgcaaatccatgctagagagtacttgagcaaattcccaagagttaacagcaatgagaaagagacaacaaccagagagcaagagcacgagaccttcgttccccagaccacccaaaagccagaagagcaagagccaaggttcatccctgaaacccaaaatggttatggcctttacggccacgagtcaggctcaggctcaggctcaggctcaagccggcccagtttcaccaccaaagaaacctatgaaccctatgtcacccctgttagattccaccctgatgaaccctataacagcatccccgaatcctccaacaataaagacacttactactacaacaagaatgcctacaagtccactaagcagcaaaacttgggcgaggccattttcaccgagaaaggatggagcaccaaggaaaaccagaacaacaactac

SEQ ID NO: 228093 - DNA, 471 bp, Gossypium hirsutum
gtaaagcattagcaaccatagccatggcttcctcaccaaaactcttctctatgtctatcctcttcctttttgccctcttctccatgcaaatccatgctagagagtacttcagcaaattcccaagagttaacatcaatgagaaagagacaacaaccagagagcaaaagcacgagaccttcgttccccagaccacccaaaagccagaagaacaagagccaaggttcattcctgaaacccaaaatggttatggcctttacggccacgagtcaggctcaagccggcccagtttcaccaccaaagaaacctatgaaccctatgtcacccctgttagattccaccctgatgagccctataacagcatccccgaatcctccaacaataaagacacttactactacaacaagaatgcctacgagtccactaagcagcaaaacttgggcgaggccattttcaccgagataggatggagca

SEQ ID NO: 228094 - DNA, 416 bp, Gossypium hirsutum
ctgtgaagaagcttggattatggggtctgtttacccgtggtcttcccctccgtattgtgatgattggaactctaactggagctcagtggggtatctatgatgctttcaaagtgtttgtggggctgccaactactggtggtgttgctcctgctcctgcggctgtggagcttgccaaggcatagaatgttggaaatcctgttgtcatgggggacaagtaaacataggattgctggaatggtttgtcaagctggtggaaggatattcttttttgcgttgagaacatttttatcaagtcgctctgttttgaaaaaaactgttggttctaggagaggatggttttgatctcatcctccaaactacggagactaattatttttgtaatagttagatcataaatgaaatttcatttgaagatc

SEQ ID NO: 228095 - DNA, 473 bp, Gossypium hirsutum
gtccccaaatggattctccctttcccttcaaatggcaacccctcccctttcatcccctacttatctgaccaccaatttaggcgtcggctacgccatcgtcgtcgccctcggcttcctcctcctcctctccactctcctcctcgcttcctacatttgcttccgctcttcctcgccccttccacctcgtgccatttcccccaaccccatttcaacacccaccgcctccaactccaacggtatcgtcctccccaggattgttttcatcggcgaagaagaccatgaacacgacgaagaaaacgtcgtcgtctttgggcttgatcgtgccgtcataaactcttaccccaagttccggttcagcaaagaggaggtgtctacggcggtggaggtgacgggttctagtgctgggaacaccatttgttcgatatgtttgtgtgagtatagagaatcagagatgttgaggatgatgcctggat

SEQ ID NO: 228096 - DNA, 469 bp, Gossypium hirsutum
gttgaaaagaaattctttgttaagtttgagttgatgttaatggcgattttgatgatggtttcgatggaatcttccatggcggcattacatcgtgttggaggcaagctaggttggaaccctaacgttaattattcagaatggtccgaccatgagcgattttatgtcggcgattggcttctcttcaacttcgacaagcgctacttcaatgttctggaagtgaacgagacaagttacgacaactgcaatgatcaaggtttcataaagaacatcactcgcggtggccgtgatgtggttgagctgacacagttgagaccctattacttcctcagcagcggtggctactgctaccatggaatgaaagttgctgttaacgttgaaatgcttccacctgctccggagccggctccggtcaaaaatggctcgctaacatccgatgctgttcgccttaagattttccactatatgattt

SEQ ID NO: 228097 - DNA, 450 bp, Gossypium hirsutum
gccatttttagatccatcacttctctttgtaactgaaaaacaaaacccaatttgaaaccctaacgagagaaccagggaacaccgaaggaagaatctcgagaaccatggacagagactggggctccaaacccggttctggaggtgctgcctccgcccaaactgaagccatggaccgccgcgagcggctccgtcggcttgctcttgaaaccatcgatctcgccaaagatccctatttcatgcgcaaccacctcggcagttatgagtgtaagctttgtctgacgctacacaacaatgaagggaactatttggcacatacgcaagggaagcggcaccagaccaacttagctaagagagcggcgcgtgaggctaaggaggctccggctcagcctcagcctcacaagcgtaaagtttctgttcgtaaaacagtcaaaattggtaggccaggatatc

SEQ ID NO: 228098 - DNA, 469 bp, Gossypium hirsutum
ctttcctcgtatgccccagtcatctctgctgagaaggcttaccacgagcagctctcagttgctgaaatcaccaatagtgcctttgagccctcatctatgatggctaagtgcgatccacgccatggaaagtacatggcttgctgtttgatgtaccgtggtgatgttgttcccaaggacgtcaatgctgcagtcgccaccattaagaccaagcgcaccattcagtttgtcgattggtgtcctactggattcaagtgcggtatcaactaccaaccacccactgttgtccctggtggtgatctcgccaaggtccagagagctgtttgcatgatttctaactccaccagtgttgctgaagtcttctctcgcattgaccataagtttgatcttatgtacgccaaacgtgccttcgttcactggtatgttggtgagggtatggaaagaggagaattctcagaggctcgtgaggatc

SEQ ID NO: 228099 - DNA, 370 bp, Gossypium hirsutum
agaagtagcagcctccatgggacttcttcgatacggtagctaaatagcatttctcatggcaggaatgtcaagtcctccttttacgattcttccaagcacccatttgccagagccatcccttcactaagtttcaaatcttgtcatttctgtgttcgttgcgctgtcagttttcgaccttgcattgatattcacaaggggaaagtgaaacaaattgttgggtcaactcttagagattccaaggaggatggatcaacccttgtaaccaattttgaatcggataagtcggcagctgagtttgctaacttgtacaaaaaagatgggctaaagggaggtcatgtaatcatgcttggagctgatcctctaagccaag

SEQ ID NO: 228100 - DNA, 430 bp, Gossypium hirsutum
cggacgcgtgggctgaattggagctcagaaattccaaaaaagagatggagataaaatccttatttgatcgaattactatactgaggatggggctttatcaaatgctgaaggctcttgaaattgatgtccatggttatgatgataagatcaaacaagaccaattagtccttgactgtatatttggagggatccaaaagatgaagaactcacatttaaagtctctggatgataatcagcaattcataattgagaattcagttcttattggattgcttgggcaactgaaacttgaggcagaaaatcttgccacagagaagaactcactgcaccaggagttgaaggttcagttcgagaagttctcagaattggagacttccctttttaatacaaatgctgaacttgaaatatcaagaacgaaacttaagagctt

SEQ ID NO: 228101 - DNA, 423 bp, Gossypium hirsutum
agaactttcaggaattttctctctctagaactcgcctttctgtgtttgtttccctagaaaaaaacaccccggaatttcccccaattcaagattggtgttttcttcttcaaattgaatccgaatcttttataaaatttctcttttgggttttcaagtgatgtctttattgccaaagagcgattcaattcatatccgtgaggtatgggatgataacgttgaggaagaatttgctttgattcgtgaaatagttgatgattatccttatgttgccatggatactgaattcccaggcattgtattacgtcccgtaggatatttcaaaagcagttatgattatcactatcaaactttgaaagacaatgttggtatgtaatactttgtcaattaggtcttactttttcaaatagaatgggagctttcctt

SEQ ID NO: 228102 - DNA, 395 bp, Gossypium hirsutum
  unsure (1)..(395): unsure at all n locations
cccacgcgtncggtcttgagacctatcctggtgttgaacgcatcaccattaagcctcaaaccgataggtgggtcttccctgaaaccaaaactggcatcattgtgttggctgaaggacgtctgatgaacttgggatgtgccactggacacccaagttttgtcatgtcctgctcgttcactaaccaggtgattgcccagctcgagctatggaaggagaaggcaactgtgaattctgagacgatggttgacgtattgccaaagcacctcgacgagaaagttgatgcacttcacctccgcaagctcggagctaagctcactaatctcactaaagatcaagctgagtacattagtgtgcctgttgaaggtgcttacaagcgtactcattacaggtactga

SEQ ID NO: 228103 - DNA, 280 bp, Gossypium hirsutum
tgataagcttataatggactccattaacaagaactacgttgacatggatgaataccctgtcaccactgagcttcagaatcgttgtgtgaacattatagcacatttttttcaacgcaccattgggagagtcaaaggcagcagttgggggggaaccagttgggtcatcggaggcattaatgttggctggccttgctttcaagagaaaatggcaaaccaggcgtagggctgaaggcaaaccatttgacaggcccattttcggaactgaagccaaggttaaggt

SEQ ID NO: 228104 - DNA, 434 bp, Gossypium hirsutum
gcttctgaaaaccctaatccccccgaaaataaaatccctcaaagagtcgaatccaaagaacaaagaaaaggaattcacagtttgaataagatgccgaaccttgaatgtcgtatgtacgaagcgaagtaccctgaggtggacatggcggtgatgatacaagtgaagaacatcgccgacatgggtgcctacgtttcgctccttgaatacaacaacatcgaaggcatgatcttgttctcggagctttcccgccgccgtattcgtagcgtcagcagtctgatcaaggtgggccgaaccgagcctgtgatggtccttcgtgtcgataaggaaaagggttacattgatttgagtaagaggagaagtagcgaggaagatattcaggcttgtgaagaaaggtataataagagtaagcttgttcactccattatgcgacacgt

SEQ ID NO: 228105 - DNA, 479 bp, Gossypium hirsutum
ggcttcctcaccaaaactcttctctatgtctatcctcttcctttttgccctcttctccatgcaaatccatgctagagagtacttcagcaaattcccaagagttaacaccaatgagaaagagacaacaaccagagagcaagagcacgagaccttcgttccccagaccacccaaaagccagaagagcaagagccaaggttcatccctgaaacccaatggttatggcctttacggccacgagtcaggctcaggctcaggctcaggctcaagccggcccagtttcaccaccaaagaaacctatgaaccctatgtcacccctgttagattccaccctgatgaaccctataacagcatccccgaatcctccaacaataaagacacttactactacaacaagaatgcctacaagtccactaagcagcaaaacttgtgcgaggccattttcaccgagaaaggatggagcaccaaggaaaaccagaac

SEQ ID NO: 228106 - DNA, 450 bp, Gossypium hirsutum
ctcaaccactcaaatcactgaaaaaacaacccagcaaaatgtacggattcgaagctatgacgttcaacatgcacggcggttacctggaagcgatcgtgagaggtcaccgggccggtctcttaaccgccgccgattacaacaatctctgccaatgcgagacccttgacgatatcaagatgcacctctccgccaccgaatacggtccttacctccaaaatgaaccttcaccattgcatacgactactattgtggagaaatgcactcttaagctcgttgatgagtataagcatatgctatgccaggctaccgagccattgtccaccttcttagagtatatcacatatggtcacatgatagacaatgttgtcttgattgttactggaaccttgcatgagagagatgttcaagagcttttggagaaatgccatcctttgtgcatgtttgatagca

SEQ ID NO: 228107 - DNA, 341 bp, Gossypium hirsutum
gaacaatttcacaagtggtgaacctgcttggggatgaaacttcggcagcaaattatttaagcaaatgcatttactcgatcggactcggcagcaacgattaccttaacaactatttcatgcccctttattactccaccagcaggcagtatacccccgagcaatttgctgatgttcttattcaacaatacactgagcagcttcaggctttgtataactatggggcaaggaagtttgcgttgattggggtgggtcagatcggttgcagtcccaatgaattagctcaatacagtggagatggtaaaacatgtgtggagagaatcaatgctgcaaaccggattttc

SEQ ID NO: 228108 - DNA, 448 bp, Gossypium hirsutum
ccctaatatcataccgtgatttggttggtgttgcgtatacggaagaggagacgaaggctatggcagctgagattgaggtggttgacggtcctaatgatgagggtgagatgtttactcgtccgggtaaacttagtgaccgctttcctcagccatatgcaaacgaacaagcagctaggtttgcaaatggaggagcttatcctccagatctaagtctcatcaccaaagctcgtcataatggccagaactatgtgtttgcgcttctaactggttaccgtgaccctcctgctggtgttatgattcgtgaggggctacactataacccatactttccaggaggagcaattgccatgcctaaaatgcttattgatggtgctgtagagtatgaagatggcacccctgcaactgaagctcagatggggaaagatgtggtgacatttttgtcatgggc

SEQ ID NO: 228109 - DNA, 449 bp, Gossypium hirsutum
cccacgcgtccgggactttggccttgctgtgactactgaatctcagaacaaaaacgttaagttgtggggaacattgtgctatgtaggtgcagagtacctcttagagggtaaattgaccgataaaagtgatgtatatgctttcggagttgtacttttggagctgctaatcggaaagaaaccgatagagaaaatgtcaccaactcagcaccaatctattgttacatgggtcatgccccagcttaccgacagattgaaacttccgaagttagttgatccagtaataaaagacacaatggatttaaagcacttatatcaggtcgctgctgttgcggtgctgtgcatacagcccgaaccaagttataggccactcataactgatgtgctgcattgtctcattcgtcttgtaccgatagaactcggtggttcgttaagacttacatagccggtcg

SEQ ID NO: 228110 - DNA, 415 bp, Gossypium hirsutum
tttaaactgagctttgctgaattttcgtgatcgtcgagaaagaaaattatgggaaggaaattctgcggtggcggcaattggaaatgcggtggaaccactgaggaagtgaataagattgtgagtactttgaatgctggagaggtgccttctcaggatgttgttgaggttgtggttagccctccatttgtgttccttcctttggtcaaaacttcactgagacccgatttccatgtcgctgcacaaaattgttgggtcaagaaaggaggtgctttcactggtgaagttagtgcaaagatgcttgtcaatttgagcattccttgggttattattggtcattctgagaggagacttattttgaaggagtcaaatgagttcgttgcggataaggttgtttatgcacttgctcaaggtttga

SEQ ID NO: 228111 - DNA, 488 bp, Gossypium hirsutum
  unsure (1)..(488): unsure at all n locations
aaaggatgcaactggcaaggattatgatgggtggtgctggccaggctcctcctcctacccagatgtgtgaaatcccgagattaggtgcatggtgggctgagaagttctcctatgataattatgtcggttcaactccttcattgtacatttggaatgacatgaacgagccttctgtgtttaatggacctgaggtgacaatgcccagagatgctttacatcttggtggagtggaacatcgggagttacataatgcctatggatattacttccacatggcaacagctgaaggccttctaaagcgtggagatggtaaggacagaccttttgtcttgtccagagcattctttgcttgaagtcaaaggtatggagcagtctggactggtgataattcggcagattgggatcatctcagggtttcagtcccaatggttttgacgcttggtcttactggaatgacattctctgnggctgatgttgggggatttttt

SEQ ID NO: 228112 - DNA, 440 bp, Gossypium hirsutum
  unsure (1)..(440): unsure at all n locations
ggttgttgtactctggactgcaaacactgagaggtacagcaatgtcattgtggggctaaatggcggggtggaaagccttatgggttggttggagaanaatgaatcanagatttctccttccactttgtatgctattgcttgtgttcttgaaaatgttcctttcatcaatggcagcccacaaaacacctttgttccagggttgattgatttggctattcaaaggaactgtctgattggaggagatgacttcaagagtggccagaccaagatgaaatctgtcctcggggatttccttgttggggctggtatcaagccaacatcgatagtgagttacaaccatctgggaaataatgatggcatgaatctgtcagcaccccaaacctttcgttccaaggagatctcaaagagccatggtggtgatgacatgggttcaagcaatg

SEQ ID NO: 228113 - DNA, 487 bp, Gossypium hirsutum
gcggtcagccaattgtttgagctagctagctcttactcaaatggcaaccaaaacgatgatgttgcaaagattgccacttttcttctttttggtcagtgtctgcaactccattttccttggtgctaatggagatgacaatggtggttggcaaactgcccatgccaccttctacggtggtgctgatgctaccggcacaatggggggagcttgtggttatggaaacctgtacattcaagggtatggaacgagcacagcagctttgagcactgcacttttcaacaatggcttgagctgcggtgcctgctacgagctccggtgcaacaatgatcctcaatggtgcattagtcgaaccataaccgtgacagccaccaacttttgtccacctaactatgctttatctagtgacaatggcgggtggtgcaatcccccacgagaacactttgatttggccgaaccggcattcttgcggatagcagaatatcgagct

SEQ ID NO: 228114 - DNA, 282 bp, Gossypium hirsutum
  unsure (1)..(282): unsure at all n locations
gccagccgtgcgctcttttttgtgtactctttactacaaacacttttatttacactaacatcattgttataactaaatgacggcgtttaaagccttatgggttggttgganaacaatgaatcatagatttctccttccactttgtatgctattgcttgtgttcttgaaaatgttcctttcatcaatggcagcccacaaaacacctttgttccagggttgattgatttggctattcaaaggaactgtctgattggaggagatgactttaagagtggccagacc

SEQ ID NO: 228115 - DNA, 489 bp, Gossypium hirsutum
aagacatggcttcatcatctcctctttctcccattctcctctctctgtttctagtattcatgggtggggtgtcagctcaaacgggtgccgcccctgccccctctggccccttgaatttcactggaatccttgacaaaaatggccaatacacctacttccttcagcttttggcacagactcaagttgggagccaagtacaaactcaactgaaaaccaccactgaaggctttaccgtctttgctcccacagataatgccttcaacaacctcaaacctggtaccgtcaataacctggacccacaacagaaagtacaactagttctataccacgttattcccaaatactactccttgaacgatctccaatttgttagcaaccccgttagaacccaagctggtcaggatttcggcctcaacgtcactggcctgaacaaccaggttaacgtctcaaggcgggttgtcgagactcagattaacaacgcattatatc

SEQ ID NO: 228116 - DNA, 493 bp, Gossypium hirsutum
  unsure (1)..(493): unsure at all n locations
gaaataaacggggagactctgaggagaaataatatcagatcctccttctaaactctccacaggggaacctaattaaaagtcctttttctccttttttccccccctgaaatctaagttcttttatcgagaccaaagcagaaaagggaaaaaaaaagagggagatggggttgtcttttacaaagcttttcagccggcttttcgccaagaaggagatgcgtattttaatggtgggtcttgatgcagctggtaaaactactattttatacaagctcaagctcggtgaaatagtcaccactatcccaaccatcgggttcaatgtcgagacagtggaatacaagaacatcagcttcactgtttgggatgtcggtggccaagacaagatccgtcctttgtggaggcactatttccaaaacactcaaggtctcattntcgtggtggatagcaatgacagggaccgtgttgttgaacaagggatgaactgcacaggatgttg

SEQ ID NO: 228117 - DNA, 487 bp, Gossypium hirsutum
cttttgcctctctcgttacgttaccgactttacattttcttttttatttcattttgccgctggggaagaaaccgccgtgaaaaatggaatctccagctcaacgccgcctcaacgctatccaatctcacctcctcccctccgccgtatccgccgccgaggatgaatccttgatcggacgtaatgttacctcctcctcttcatctccaccgttctttgttgatcaacagtacagtgtgattcttcctgagaaattgcaaactggaaaatggaatgtttacagatcagctcggtctccgatgaagcttttgagtcggtttgacgatcatcctgaaatcgggacgctgcatgaaaactttgtacatgctgtggagacatttagagattacaagtacttgggaacgcggattcgggtggatgtgacagttggggagtataagtggatgacatttggagaagcggctacagctcgggaggctataggttctgg

SEQ ID NO: 228118 - DNA, 392 bp, Gossypium hirsutum
gaaaaaaccaaagggccaaaaccttgtcttgttccattgcagtttctcttacacattatcatgaggttgcccgttttctggtggtctagggtttttcaatctatacctcttctcactaatcatgagtcgtaatccagaggtaaagtgggctgaaagagctgacaaggtttacattacggtgctattaccggattcgaagaatgcgaaggtcaatcttgaacccgagggagtgtttacactttcggctaatgccggagctgacaacaacctttatgaattgaagttggatctttatgataaggtcaatgtggaggaaagcaaaattagtataggagtccggaacatagtttgtgtgttggagaaagccgagaaagtgaggtggaaaattcttt

SEQ ID NO: 228119 - DNA, 217 bp, Gossypium hirsutum
gccttcaggcaacttgcccttcagtatcatccggacgtttgcagaggaagcaattgtggggttcaggtggaaacgatcaatgaagctggatgatatattgatgagtagattgagaggagaaacaaaggcagcagaagtgtatgaggaagagatagatgagccaatgagaggaatggatgattcagattgggatttgtgggaagaatggatgggatgg

SEQ ID NO: 228120 - DNA, 488 bp, Gossypium hirsutum
cggacgcgtggggcaatttcagttgattctatgtgctgcttcttctccttcttcctcttcaacaactccaattttcctttcgaaaaggaataatcaataacaaaaagacaaatccaatcaatcagagcaaaatccaaatgggtaatcttttctgttgtgtacaagttgaccagtctacagtagccattaaggagagatttggcaggttttgagatgttcttgaacctggatgccattgcctaccttggtttctttgaagtcaacttgctggccacctgtcgctaagattgcagcagttggatgttcgttgtgaaaccaagactaaggacaatgtatttgttaatgttgttgcatctattcaataccgggcactggcagacaaggcaagtgatgccttttacaagctgacaaacacaaggacacaaattcaagcctatgtgtttgatgttataagagcatgagtttcgaagctaaatctggatgatgtt

SEQ ID NO: 228121 - DNA, 291 bp, Gossypium hirsutum
ctctgagggaggtttgaaacgtatcgaagagaagtacacatggaaaatttactctgagagacgtgtgaaccttgaccggtgtctacgggttctggaagcatgtgtccaacctcgaccgcctcgagagccgtcgttaccttgagatgttttacgctcttaagtaccgtaagctggccgaatcggtacctttggcagttgaagagtaaattgaagttgccggggaaagaattgggagggatttccgagttcttgagaataatctttgtttgtttgcattttgatccaactttt

SEQ ID NO: 228122 - DNA, 311 bp, Gossypium hirsutum
aaaccttgttcttctattttagcttctcttcacattgagaagctagctttttggtgcgttgggtgagcttcaacccacattgggtttgttgcgaagatggttgcacacaaatttaccgttgatttgaataaaccccttgtcttccaggttggtcaccttggagaaagttatcaggagtgggttcatcagcctattgtgagcaaggaaggtcctaggttctttgatagtgatttttgggagttcttgactcgcactgcctggggggcaattccaaccatatggctgcctgttgtttgctggggcattttaat

SEQ ID NO: 228123 - DNA, 485 bp, Gossypium hirsutum
atttgtttgctctgtatattgaaattttctttctctattttctctttagccaaaaaagatgcagagcttcgtcaagactctaaccggcaagacgatcactctcgaggtcgagagctccgacacgatcgacaacgtgaagaccaaaatccaagataaggaaggcatccctccagaccagcagcgtctgatcttcgccggaaaacagcttgaggacggccggaccttggccgattacaacatccaaaaggagtcaactctccacctcgtcctccgtttgcgcggtgggatgcaaatcttcgtgaaaaccttgaccggcaagacaatcactcttgaggtcgagagctccgacacgatcgacaacgttaaggcgaagatccaagacaaggaaggcatccccccagaccagcaacgtctcatcttcgccggaaaacaacttgaagacggccgtaccttggccgactacaacatccaagaggagtcaacgc

SEQ ID NO: 228124 - DNA, 497 bp, Gossypium hirsutum
  unsure (1)..(497): unsure at all n locations
cccacgcgtccggtttgccatgacgttggatgatttttctactaatgatgatatcgttctgagggtagagagagcagatctcggagaacaagtctcgtctaagcaacggtcaattattagatgtgcgctcagctgtacatgttctaaattcaattgttcaagacgccatggaagctctccgactggtgattcaaaagattcgaggaactgttcgatatgttaaaagttcccaatcaatacaagggaagttcaaggagatggtcttgcaaactggaatcaatagccagaagaacttggttcttgattgtcctatccaatggaattcaacatacctaatgctcgagactgctatagaatacaggnaatgcttctgtcagttgccggagcttgatcttgaccttgctttaagcgatgaagagtgggaatgggcaagttccattaccggctatttgaaactatntatcgaaatcatcaatgtcttctccagcaacaaatgt

SEQ ID NO: 228125 - DNA, 426 bp, Gossypium hirsutum
  unsure (1)..(426): unsure at all n locations
gaaaacaagaaaagcagagccgcatcactttttgctagctaagctactgtgggagttattgttctggaggacagcttctgcaggagctaataataacgttatatattatataaattttatacatcctttttaccctacgactccatatataagcaagtaaaaataaatatggctcgctctgtttcttcctttaagttccttggtgcttctgtttttgatgctctttatgtctccatatcaaggagaggttactcaggtgcaccgccggcggcagtgacggctagctttggtaggcctggagcgatggggaaagtggaacgaagatatgcgatgaaagagtcntcgtcgtcggagacaagggcttattcttcagcttgggcgcctgaccctgttacggggtattacccgggcggaaaactgtggggc

SEQ ID NO: 228126 - DNA, 439 bp, Gossypium hirsutum
aggcgtgcgcccacgcgtccgcggacgcgtgggtaaatttctacttcactctctccacttaactcttccatctgtaggggatcgttttgtgtggtctgcggtctccatcaatggcgaaagaaccagttcgcgtcctcgttactggagctgcaggacaaattgggtatgcccttgtacccatgattgctaggggagtcatgttgggtgctgatcagcctgtaatccttcacatgcttgatatcccacctgctgcagaggctttgaatggagtcaagatggagttggtggatgctgcttttccccttctaaaaggtgttgttgctactactgatgttgttgaggcgtgcactggagtcaacattgcagtcatggttggtggtttcccaaggaaggaaggaatggaaaggaaggatgttatttcaaagaatgtgtttattta

SEQ ID NO: 228127 - DNA, 273 bp, Gossypium hirsutum
gcgcaagtttgtttttcttgtgattaatcgatatggctagctcaatgtcccttaagcttgcatgtgtggcggtgttgtgcatggtggtgggtgcgacccctggctcaaggggccgtaacctgtggtcaagtcacaagctccctcgcaccctgcattggttacttgacagggaatggtgctggtggcgttcccccaggttgctgcggcggcataaaatctctcaactccgccgcccaaacaacaccagaccggcaagcagcttgcaaatgcatc

SEQ ID NO: 228128 - DNA, 445 bp, Gossypium hirsutum
attgttttctaagcgcattttttttataatcaagaactggctaacacaaaggatagcattctggaggaggccaacaagaaccaacaagtgggtctcgtcctctatgaggccataaacactcgagacgtccaaaccgttcatcaaatccttgcccctgaccttgaatggtggttccatggtcctccagcccaccagtttatgatgcgcctcctcacgggagcttcatcggaccaaactttcattttcgacgttgaccctctttcggtcaccacttttgggtccaccgtcatcgttgaaggctgtgatcataaacgttcaatctcttgggttcatgcttggactgtaagtactgatgggataataacagaagtgagagagtatttcaatacttctctcactgttactcgtcttgtgaactctagccaaacaccaccattcaactaca

SEQ ID NO: 228129 - DNA, 322 bp, Gossypium hirsutum
aaaaccagtgccataaacatgtttctcccaatctttttcattttctctttcctattttcctgcacgaacgcatccgacttctgtgttggggacttgaatggccctgtaggccctgcaggctattcttgcaagaagacagccaccgaagatgacttctctttctccggcctccttcgtaccgcaggcaacacttcgaacctcgtaaaagctgcaataacaccagccttttcgactcaattcccgggtgttaacggacttcgcatttaaatagctcgtttggatttagctgttggatgaagtttttcctattcattcacaccct

SEQ ID NO: 228130 - DNA, 486 bp, Gossypium hirsutum
  unsure (1)..(486): unsure at all n locations
caacaatttatcttctttattctggttgctcagccattcatgtttatttctctaactcattgctggttagctaatggtaagggtaagagtattgcctcctaccaatacaagtgataaggtcactttggccctgtactatgaaactttatgcccatattgtgccgactttatcacaaatgaccttgtaaaggtattcctcagcgatctgtttaccattgtcaatctaaagttagtcccttggggcaatgctgacattcttggcgatgaaccccattgccagcatggagaagatgaatgctacttaaataccatacatagctgggtcatctaccactggcctgatgtgaaaaagcactttgatttcattcgctgcacagagcaacaaaactcaaagaaaccgctggtcaagaacagagcagcaatgtggaaacaatgcatngaaaagctgggaatgagtgcttacagaatcaacaaatgctatacttt

SEQ ID NO: 228131 - DNA, 353 bp, Gossypium hirsutum
cccacgcgtccggatactcaagacaaagttgttggagaattgtgtctcaaattctgttaaatttagtgggctaaggtttggcaggtggaacatgaggaattcgagtctaccattcagtgcgatgatggcagtgagcttaaggcgagcttaatcgtagatgctagcggtttcagtagcagtttcgtagagtatgataaacctaggaactacgggtatcaaattgctcatggtatttttgctgagggtgatagtcatccttttgacttggataagatggttctcatggattggggagattcccatttaggaaacgaaccttatttacggggtaacaactccaagttagcaacgtt

SEQ ID NO: 228132 - DNA, 349 bp, Gossypium hirsutum
aatagtgcctttgagccctcatctatgatggctaagtgcgatccacgccatggaaagtacatggcttggtgtttgatgtaccgtggtgatgttgttcccaaggacgtcaatgctgcagtcgccaccattaagaccaagcgcaccattcagtttgtcgattggtgtcctactggattcaagtgcggtatcaactaccaaccacccactgttgtccctggtggtgatctcgccaaggtccagagagctgtttgcatgatttctaactccaccagtgttgctgaagtcttctctcgcattgaccataagtttgatcttatgtactccaaacgtgccttcgttcactggtatg

SEQ ID NO: 228133 - DNA, 307 bp, Gossypium hirsutum
ctgagatcacatagaaaaatggtgaaagcagtggctgttcttagcagcagtgaaggtgttagtgtgacggttttcttcactcaagagggagatggcccaactacagtgacgggcaacatttctggtcttaagcctggccttcatgggttccatgttcatgccctaggggacacaacaaatggttgcatgtcaacaggacctcactttaatcctgctggaaaagagcattgggctcctgaagatgttaatcgtcatcctgtttgatcttatgaaatgttacttttggttcttatggcttttcttagtt

SEQ ID NO: 228134 - DNA, 490 bp, Gossypium hirsutum
  unsure (1)..(490): unsure at all n locations
gttttagttgccataacgtcaccttccaatacaacccacaatgaggcaacaatatgtcttcgctgctctcacgttgctcatcctggtgtccctcagttgttcaacaacattagcccaatctccggcactggccccggcaccttctggcccgacaaacgtcaccaagatcctcgaaaaagccggtcaattcaccctcttcattcgtcttctaaagtccactcaagtggccaaccagctgctcggtcagctcaacaattccaacaatggtatgaccgtttttgcaccaacggacaatgctttctccagccttaaatcgggcacattgaattcactcaccgatgaacaaaaagtgcagctggtgcaattccacatcgtcccaacatacctcacctcgtctcagttccaaaccattagcaaccctttgagaacccaagctggtgatagtggcgatggcaagttccctctcaatgtcaccacttcggngaactct

SEQ ID NO: 228135 - DNA, 333 bp, Gossypium hirsutum
cgaccgcttgattttgatcagacggtaatcatgcctatcagaaacatagccgttggccgggcttgagaagctactcatccagaggctgttaaagcagctttagctgagttcatatcaacgttaatcttcgtttttgctggatctggttcaggcatggcttttaataagctgaccgacggcggtgcaacaactccggctggtctcgttgccgcctctctagctcacggatttgcgcttttcgtcgctgtctcagtcggtgctaacatctccggtggccatgtgaatcccgccgttacattcggagcttttgtgggggggaacattgctctttta

SEQ ID NO: 228136 - DNA, 268 bp, Gossypium hirsutum
  unsure (1)..(268): unsure at all n locations
cggacgcgtgggtttagatctttcttctcgcttcttattcaaatcagatcttaaggaaacggttgaccgcaccgatctgattggcaggattnctaannatttcntcnntcanaaaatataaacaaaagaagaaatggcggtggcagcatctgcactatttcttctagatataaagggcctggttctggtgtggcgtgactaccgttgcgacgtttccgctgctcaagcttaacgcttcttcaccaaactcatcgaaaaaaagggagat

SEQ ID NO: 228137 - DNA, 489 bp, Gossypium hirsutum
  unsure (1)..(489): unsure at all n locations
ttttgttttctttagggagtttgccagaactttcagatttcataaattaatataaaataaaaattggacaaaggacagaaatggaaattaaaagactgccttaagttgacaagtgtgtgtaaaatttcctaatttttcgtattggccacatcaacagagatatcaatcaatcaaagaaagatcaaaccaaattaccattttttgttgttttgtttctctgatagttttggaaagaatatgttagcagtttttgagaaatcgattgccaagagccccgatgctcttaaagtttctggtgattctgaagcagcttcagccctcaacaagggcttcttggctacccattttgccactctccatcctggttcagtcactgtcaatcttggttcttctggnttcatggcttactctcttgataaacaaaacccacttctccccaggctctttgcagttgtggatgacattttctgcttgtttcaaggccacatt

SEQ ID NO: 228138 - DNA, 154 bp, Gossypium hirsutum
  unsure (1)..(154): unsure at all n locations
tggatccgtaacctcgggaaaaggattggctctgagggctgggcacgggggtcccagtcccggacccgtctgctggcggcgcaggggtcnaactnctcccgcggcgagagcgggtcgccgcgtgccggccgggggacggactgggaacggctcc

SEQ ID NO: 228139 - DNA, 438 bp, Gossypium hirsutum
  unsure (1)..(438): unsure at all n locations
gaagggatatgtctgtctcaatccctcaaactgcttttttctctcaaactaacgttaatgggaggagaagagccaacggggtggtaaggaaaccgctgatgcttaggagtttgacggtgagagctggtccaaagaggatctctttcgggggtgattgcagagaggcgttgcangctgggattgataagttagctgatgccgtttctgtcaccttgggtcctagaggacgaaatgttgttctttttgagtctgagaaacttaaagtagttaatgatggtgtcaccattgctcgggctatagaactatccgattctattgagaatgcgggagcaatgctaatacaagaggttgcaagttaaatgaatgatttggctggtgatggtactaccactgctattattttagttcgagccatgatcaagtttggattgttggtag

SEQ ID NO: 228140 - DNA, 488 bp, Gossypium hirsutum
ctcacttctttctttttatatctttgtctctctctacctctgtctgaattctaaggtctgtgttgtgtcctcccctgtgagagagggggttaaacaaaaaaatggagaataataacaaccaggtcacgggagagttgaagtctgggaataagaagcaagttcgattgttttactgtatggagtgtgaagagcttgcccgtaaagttgctgctcactcccaactcattacccttcaatctatcaactggaggagctttgatgatggatttccaaatcttttcataaacaatgcacatgatatccgaggtcagcatgttgcttttctcgcatccttcagctccccagctgttatctttgaacagctttccgtcatatataatcttccacgattgtttgttgcttccttcactttggttttgccattctttccaactggctcctttgagagaatggaagaagaaggtgatgttgcaactgcatttaccatg

SEQ ID NO: 228141 - DNA, 279 bp, Gossypium hirsutum
  unsure (1)..(279): unsure at all n locations
gcgaatatctgctttttcttagttttcctttttggcccttgtttatttgatatttccccctcatgggcggcggtgatgtcgagttccggtgcttcgtcngagggctcgcatgggccaccgacgaccgggccctcgaagaagccttcagtgcgtttggtgaaatcgtcgaatcgaagatcattaatgatcgtgagactggaagatcccgaggctttggattcgttactttccgtgacgagaaagctatgagggacgcgatcgaaggaatgaacggtcaaa

SEQ ID NO: 228142 - DNA, 492 bp, Gossypium hirsutum
  unsure (1)..(492): unsure at all n locations
cccacgcgtccgcccacgcgtccgcatttttattccgctattttctctctccccaaacaccctttgaaggcaaaaagaagacaatggccgatcagctcaccgatgatcagatctctgagttcaaggaggcctttagcctattcgacaaggacggcgatggctgcattactaccaaggagctcgggactgtgatgcgatcacttgggcagaaccctactgaggcagaacttcaagatatgattaatgaagttgatgctgatggaaatgggaccatcgattttcctgaattccttaacctgatggcgaggaagatgaaggatactgattctgaggaggaacttaaagaggctttcagggtttttgacaaggatcagaatggtttcatatcagctgctgagctgcgccatgtcatgacaaatctcggtgagaagcttacagatgnagaggttgatgaaatgatccgtgaagcccatgttgatggtgactggcaga

SEQ ID NO: 228143 - DNA, 482 bp, Gossypium hirsutum
tccaaatatactcactggtgaggcgagaggtgggaactttgcaagagataaaaaaaaattgagaatggtccaaaaatgaataaaggttcatcatcaatggcgaaagatcagtcaatctcagtttcagaagcagtacacaagattcaactccatctccttgacggaatccgagacgacaaacaactaatctcctctggttccttaatttctcgaagcgactatgaggatgtcataaccgagaggtcgatttccaacacttgcggttaccctctctgccgaaaccctttaccttccgaaccccgtcgaagaggccgttatcgaatctctttgaaagagcaccgagtttacgatttacaagaaaccagccgcttttgctccgccgattgcctgattaatagccgagctttcgctggagtttacaagaagagaggtgtccgttttgaatcatgcgaaacttaatgcgattttgagtttatttgatg

SEQ ID NO: 228144 - DNA, 353 bp, Gossypium hirsutum
cccacgcgtccgcggacgcgtgggattgcgagtttccttttttttttttgacaaacaatatgtctttttttcttcgggctggggtacagtgaaaaaagagatttcaaaaatgattcaacctcagacccatttgaatgtaacagataacagcggggcccgagaattgatgtgtattctagtcataggagctacgaatccccgatatgctcatattggtgacgttattcttgctgcgatcaaggcagccataccaaatacacctctagaaagatcagaagcgctcagagctgcaattgtacatactcgttaagtactcacacacaataacttgatgataatactatataattaca

SEQ ID NO: 228145 - DNA, 490 bp, Gossypium hirsutum
  unsure (1)..(490): unsure at all n locations
gcgacgaaacaggggcgagctctctgtctctattatttttacattgcaccaatcaaagaacacctcttgctgtgttaaaaccacgggctcgagcgcaggcttcttctttaattagtcttcgaaaatgcctctcagactcgaaattaagagaaaacttgctcaaagatcagagagagtgaaatccgtagatctccatccaacagaaccatggattctagcaagtttgtattctggaactgtgtgcatctggaactaccagtcacagaccatggctaagtcatttgaagtcactgagttgccagttaggtcagccaagttcgttgcacgcaaacaatgggttgttgctggagctgatgacatggttattcgagtatacaattacaacacaatggataaggtcaaagtatttgaggcacataccgattacattagatgtggcggtgtccatcctactcttncttatgtggtggcttcatctgatgatatgctc

SEQ ID NO: 228146 - DNA, 434 bp, Gossypium hirsutum
  unsure (1)..(434): unsure at all n locations
gcaaagcccatagctgttaataaacacaacaaaaatctcagctagctagcttttcccctccattagaatccattgcttgcaccggtaggatgaanatnaccttggctatccttgctctctcattattctcctcttgcttacaagccacactaggggaaattatatgtgaacacctttaccaagacacctgtgcttacgcggtggcgtccacaggcaaacgctgtgtgctcgagaagcacgtcaagaggagcggtgaagaagaatacacttgccgtacctccgagatcgaagccgataagataaacaactggatcgaaaccgatcagtgcgttaaatcgttcggcctcgaccggaaatcattcggtatctcctccgattcccttcttgagtctcgcttcaccgaaatgctttgctctcctcaatgttacaatggt

SEQ ID NO: 228147 - DNA, 495 bp, Gossypium hirsutum
  unsure (1)..(495): unsure at all n locations
agattagaaagctctttaacctttcaaaggaagatgatgtccggaagtatgtcaacacttacaggaggagtttcaccacaaaatctggcaagaaggtgagcaaagccccaaaaatccagaggctggtaacaccattgacactgcagaggaagcgggctagaattgctgacaagaagaaaagaattgccaaggccaagtcagaggcagctgagtaccagaaactgcttgccacaaggttgaaggagcagcgggagcgccgtagcgagagtttagcgaagaggaggtccaagctctctgctgcttctaagccttctgtttcagcttagataagttttgataaaccaaaagggatcttggtcagtacccagttttttgcagtgccatatgctgtcataatttattgcttagtatccaatttnggaatgttatttttccatctactatgttaggtcatctttttgacaattatcattaactaaattgcttcatctaatg

SEQ ID NO: 228148 - DNA, 400 bp, Gossypium hirsutum
gatctgtctcaaggatttacaagaagatttcatgggtggtgctgagattattaaatcagaccctgttgtgtcattccgtgagactgtgcttgagaggtcttgcaggacagtgatgagcaaatctcttaacaagcacaatcgtttgtccatggaagctcgacctttggagaaggtcttgcttaggccattgaccatggacgcattggtccaagagaagatcctaagggtcgttccaagatacttgctgaggagtttgggtgggacaaagatatctctatgaagatatggtgttttgggcctgagaccactggccctaacatggtggttgatatgtgtaagggagttcaatatctgaatgaaattaaggattcagttgttgctgggttccagtgggcatcaa

SEQ ID NO: 228149 - DNA, 382 bp, Gossypium hirsutum
cccacgcgtccgagcagctgacggtagacaaattgtggctcgtgctaaatctgaagctaccaattaccaaagtgtgtatggtgaacccatccctgtcaaagaacttgctgaacgtgtagcaagttatgtgcatttatgtaccctttactggtggctccggccttttggctgtggcataattctcggtggttatgatagagatggtcctcaattatacatggttgaaccatctggcatctcttatagatactttggtgctgcaattgggaagggaaaacaagctgccaaaacagaaattgaaaagttgaatctgtccgaaatgacatgcaaagaaggggttattgaagtagccaaaatcatctacaaggtacatgatgaagca

SEQ ID NO: 228150 - DNA, 375 bp, Gossypium hirsutum
cgaaaataaggggtaaaagaacttcaataatttgagtttaggttttttagatcgaagattatggggcgttttgctcttctcctgttactagctttcgcttcatttcaagccctttgcttcgccgctgatgatgatacggccttttatgactcatttgatgagccatttgatggacgatggatcgtgtccgataaagatgattacaaaggtgtatggaaacattcaaagagcgaaggacatgatgactacgggcttcttgtgagcgagaaggcacggaagtatgcgatagtgaatgagctcaatgagcctgtgagtctcaaggatggaagcactgtgcttcaggttgagactcgcttttagaatgggcttgaatgt

SEQ ID NO: 228151 - DNA, 385 bp, Gossypium hirsutum
cccacgcgtccgctctcatcattttccttctgctaccttctctcaacccaaacacatatttgccaggaaaaagaaaaagcttgagcgaacaagaaaatggccgatcagcttaccgacgatcagatctctgaattcaaggaggcctttagcctgttcgacaaggatggagatggttgcattactaccaaggagttgggaactgtgatgcgatcacttgggcagaaccccactgaggcagaactgcaagatatgattaatgaagtcgatgctgatggaaatgggaccattgattttcctgaattccttaacctgatggcaagaaaaatgaaggatacagactctgaggaggagcttaaagaggcattcagggtgtttgacaaggatc

SEQ ID NO: 228152 - DNA, 424 bp, Gossypium hirsutum
tttatctttaaaacacgcacccaaaaaataaaaccctttgaaaaccaaagaaggaagaagaagatgtcgtggcaagcttatgtagatgatcacttgatgtgtgaaatcgaaggaaaccatctctctgccgccgctatcatcggccaggacggcagcgtttgggcccaaagcgccagtttccctcagctcaagcctgaagaaattagtgccatcatgaatgactttaatgaaccgggttcactcgctccgaccgggttgcacctcggtggcacaaaatacatggtgatccaaggcgaaccgggagctgttatccgagggaagaagggacccggaggtgttactgttaagaagaccaatatggccttgattatcggaatctatgatgaaccaatgacaccccggcaatgcaacatgatcgtcgaga

SEQ ID NO: 228153 - DNA, 374 bp, Gossypium hirsutum
ggaagacaatcttccacctcaacccatctggccgctttgtcattggtggtcctcacggtgatgcaggtcttaccggtcgtaagatcatcattgacacttacggtggctggggagcccatggtggcggtgctttctctggaaaggacccaaccaaggtggacaggagtggagcttacatcgttaggcaagctgccaagagcattgtagctaatgggcttgcacgcaggtgcctcgtgcaggtctcctatgctattggtgtgcccgagcccttgtctgtcttcgtaaacagctacggaacaggaaagattcctgacaaggaaatcctccaaattgtgaaggagaactttgatttcaggcctggaatgatcaccatc

SEQ ID NO: 228154 - DNA, 344 bp, Gossypium hirsutum
gacggcgccaatcagctgtccgccttgactgaccgtccggcatcgtcttggccctcgattttgccgttttgtaaaccttttttttcaccaattcccgaaatggcagtgaaaccctccaaggccgataagaaaatcgcgtacgacgcgaaactgtgccagctcttagatgagtacacgcagatcttgatcgccgcagccgacaatgttggctcgaagcagctccagaacattcggaaaggtctccgaggtgactcagttgttttaatgggtaagaacactatgatgaaaaggtctgttaggatgcatgctgagaagactgggaacgaagctttccttaaccttat

SEQ ID NO: 228155 - DNA, 410 bp, Gossypium hirsutum
cggacgcgtgggtttccagcgactactaaacaaaataaaaattagcccaggacaggaggatctctgagctactttttctctcaaaatttctccaattagctctggtttaggcgatggcttcaaagcggatcttgaaggagctcaaggatctacagaaagatcctcctacctcttgcagtgcaggccctgttgctgaagacatgtttcattggcaagcgactattatgggtccacctgacagtccatatgccggtggagtgtttctagtcaccattcatttccctccggactatccatttaagccacccaaggttgcattcaggacaaaggtctttcaccctaatattaacagcaatggcagcatttgcctcgatattttgaaggagcagtggagccctgccctcaccata

SEQ ID NO: 228156 - DNA, 368 bp, Gossypium hirsutum
ctttgattgctgaagaagtgtgctttcttgatgtgattccagctataagaaagttcttgaaggatacaattgagccatggctggatgggacttttaatgggaacggtttcctgtatgaatcgaaatggggtggaattgtgactaaacaagggtcaacggattcaggggcagatttcgggtttggagtttacaatgaccaccattatcatattggttacttcctttatggaatagctgtcttgaccaagattgaccctgcatggggaaggaggtataagccccaagcttattcacttgtggctgattttatgaacttcggcaggagatcgaattcaaattattcaagagtgagggtgtttcgattttta

SEQ ID NO: 228157 - DNA, 390 bp, Gossypium hirsutum
gcgaaattcattcttcgatcttcgaacgccggcggcgaaacaccgctttgtttaccggtgacgtcgttgtcttcagatatctgaaagatgtccggtcaatcccagcgcttgaatgtggttccaactgttacaatgcttggaatcatgaaagctaggcttgtgggtgctacaagaggtcatgcacttctcaagaaaaagagtgatgcccttactgtacaatttcgtcagattcttaagaagatagtatctacaaaagaatcaatgggagagattatgaaaacctcttcattttccctaactgaggccaagtatgttgctggtgagaacatcaagcatgttgtccttgagaatgttcaaaatgcttctcttaaagttcgatcccgacaagag

SEQ ID NO: 228158 - DNA, 367 bp, Gossypium hirsutum
gcgtacaatctgtcaaggctgagaaagctgctaaatcggttggcattacgaaggagagttattccgtgatgcatttggaccttgcgtcgcttgaaagtgtgcggcaatttgcggataccttccgtcgctcgggcaggccgcttgatgctttggtttgcaatgctgctgtgtacttgccaactgctaaggaaccgacttatactgccgaagggttcgaactcaccgtcggaacaaaccatctcggtcatttcctcctagcaaggctactcctagatgacctcaagcagtcagattatccttataagcgtctcattattgtcggttcaattacaggaaacacaaacacattggccgggaatgtgccacc

SEQ ID NO: 228159 - DNA, 331 bp, Gossypium hirsutum
ctagagaaatggctgcaaggatacaacttggcaactatgctgtgtacatgttggatagaaagttgggtaaaggtggttttggacaagtttatgttggaagaaggatcactagtgccataggatgcactggtgctgatgcctttgaggttgctttgaaatttgagcatcgaaatggtaagggatgtagatctggtcctccttatgagtggcaagtatacagctctcttaatggctgctatggacttccatcggttcattacaagggtcaactaggggattactacatactcgtcatggatatgcttggaccaaggttatgggatggttggaa

SEQ ID NO: 228160 - DNA, 463 bp, Gossypium hirsutum
cattagcaaccatagccatggcttcctcaccaaaactcttctctatgtctatcctcttcctttttgccctcttctccatgcaaatccatgctagagagtacttcagcaaattcccaagagttaacatcaatgagaaagagacaacaaccagagagcaaaagcacgagaccttcgttccccagaccacccaaaagccagaagaacaagagccaaggttcattcctgaaacccaaaatggttatggcctttacggccacgagtcaggctcaagccggcccagtttcaccaccaaagaaacctatgaaccctatgtcacccctgttagattccaccctgatgagccctataacagcatccccgaattcttcaacaataaagacacttactactacaacaagaatgcctacgagtccactaagcaggaaaacttgggcgaggccaatttcaccgagaaaggatggag

SEQ ID NO: 228161 - DNA, 363 bp, Gossypium hirsutum
cggacgcgtgggtgataccctacaatggtgttctgaacttggagggccttcacagacctctcttgtctgtgcaggtaaccaagttgaaagacggagtggcaatggggtgcgcattcaaccacgccatccttgatggaacttccacttggcatttcatgagctcatgggcccaaatctgtagcgggtccaactccgtctcagtctcgccgtttctcgagcggaccaaagtccgaaacacccgcgtgaagctggatctctcgctcccacctaaccctgtcaacggtgacgccaaccaaggcccccagctgagggagaaacttttcaggttttctgaagctgccatcgacaagatcaaagtaaaag

SEQ ID NO: 228162 - DNA, 461 bp, Gossypium hirsutum
cccacgcgtccgcggacgcgtgggttgggtcgtgaaaaggatgagagtgaagctcttccagcagatgaactcattgagaaggcagatggctttgctggcgtattccctgaacacaagtatgaaatcgtaaagattttacaagaaaagaagcatgttgtgggaatgaccggagatggggtgaacgatgcacctgctttgaagaaagcagacattggaatagcagtggcagatgctacagatgctgcaaggagtgctgcagatatagtcttaactgagcctggcttaagtgtgataatcagtgctgtgttgacaagcagagctatattccaaaggatgaaaaactatacgatatatgctgtttccataaccattcgtattgttcttggttttgtgcttctagctctgatatgggaatatgatttcccacctttcatggttttgataattgcaatccttaatga

SEQ ID NO: 228163 - DNA, 389 bp, Gossypium hirsutum
tgcattttcaaccaaaaaattcaaaaaaaaaattctaaataagtgatggggtttccggcaaatgggtcatcggacaaaccattgaaggtcctgatctacggtcgaaccggttggatcggtggtttgttaggcaaactctgcgaatcccagggaatcgattacgagtacggctccggccgtttggagaaccggatttcacttgagtccgacatagccaacgtgaaaccgacccatgtattcaatgccgccggtgtcaccggtcgtccgaacgtcgattggtgcgaatcccataagggctagaccatcagaaccaatgtggtcgggacccttacccttgctgacgtttgaagagacaaaggcctcatattgattaattatgctacaggttg

SEQ ID NO: 228164 - DNA, 469 bp, Gossypium hirsutum
cggacgcgtgggcggacgcgtgggttaagaggagtggaataaccaaagaagaggaggagaaaagagagaaaaaggatttttttttaaagaaaatgaactataaaacctccacttctgtttccactatcatcatttctcatctcagatcttaatttccttcccattttctcatctgggtcatttccaatatggaattctgggttgtcttctgattagtgtataaagtattttttcagatgatcctatattggatttgacagatccccattttttctttgctaggattctatctgttcacaataaaaagataaagatggaatctgatcttggtaaactcttcattggtgggatatcgtgggacaccgatgaggaacgtcttaaggagtatttcggaaagtacggggaagtggtggaggcaatgatcatgagagatcgtgtaacttggcgtgcccgtggctttgggttcgtt

SEQ ID NO: 228165 - DNA, 431 bp, Gossypium hirsutum
aattttcagtcgtcttctcttttagtcctctcgatcccaaagcaagctctcgattccgaatctctcccagaagatgcagatctttgtgaaaacccttactggtaaaaccatcacccttgaggtggaaagctccgatactattgataatgtcaaggccaaaatccaagacaaagaaggcattcctccagaccaacagaggcttatttttgccggaaaacaactcgaggatggccgaactcttgccgactacaacatccaaaaggagtccaccctccacctagtccttcgtctaaggggtggcatgcagatatttgtgaaaacccttacgggcaagaccatcaccctcgaggtggaaagttctgatacgattgataatgtcaaggccaagatccaagacagggaagggatccctccagaccaacagaggctta

SEQ ID NO: 228166 - DNA, 437 bp, Gossypium hirsutum
gcccttgaaactgtggggtttgggaaattccagggctttgttcttggatacgctggtcttggttggtttgctgaagccatggagattatgattctttcctttataggacaagctgttaagtctgagtggcaactttcctctggtcaggagagccttttaagtaccatcgtttttgctgggatgcttctcggagccaatacatggggccttttatcagataactacgggaggaggaaaggttttcttactatatctatggtaacttttggagctggattactgagcacattctctccaaactatttaacgcttgttgttcttcgaggtttggttggttttggccttgggggctcaactgtattcttatcctggtttctagagtttatttcagtttttaatagaggcatgtggatggtagtgtttataattttggacat

SEQ ID NO: 228167 - DNA, 427 bp, Gossypium hirsutum
caaaaacatagcagccatggcagtccgtatgcttcttgggttaggtgtcctgctactctgccttgcaaaggtttcatctgatctgaaggcagaagaagttataaccaatgtcggtgaggtgggttctttggttaccagaggcggaaacagaagactgatgctagagattgattgtggaggattatgcaagaaaagatgcagtcaacactcgaggccaaacagatgcaacagggcgtgtgggacttgctgcttgaggtgcaagtgcgtgccaccggggacttcagggaacagggaggtctgcgggacctgctatactggcatgaccacccatggaaacgttgccaagtgcccttaacctttacgtcgcccaatatgtgttgcagccatcaaggggaaaaatgaaatgtttggttggggaatatgaatg

SEQ ID NO: 228168 - DNA, 313 bp, Gossypium hirsutum
ggaaaatcaacaggattaggaggacactcttttgtcttaaagatggcttccgtgggcatggtgcggacttctggtttaagagaatctagtactgccggtgttgagaagttacctgaggagatgaacgacatggaaaatcgagatggcaaaaaaatgggaggcaccagaaggggccggaaccggacctgaaccagggcatttattggggccacctatggggggtggaaatgggcagccaaaccagccaataagtaccatggttgaccgtggggtgggccatggatcattggaggtggttttccaggcaaagggc

SEQ ID NO: 228169 - DNA, 416 bp, Gossypium hirsutum
aatatctctcttcactttcttctcttttcaacgcagagtgaaaggcggggaggccgtagacaatgggtcttgcgctcttctcgtagaggggatcagattcaacatccatctgtcatgcagaaggtagctggccagctcctttcttctagcatttcccgagattttcaagggtatgatgggtctttcaggaggcctgctctataccaaggacattttgcatatgggaattattccaatgctggaatgcactatcctattgttccatcaacagctaccgccatttgtgttcaagcccctgcagagaaaggatttaccagctttgccattgatttcctcatgggtggagtttctgctgctgtgtcaaaaacagctgctgctccgattgagcgtgttaagcttttgatacagaaccagga

SEQ ID NO: 228170 - DNA, 340 bp, Gossypium hirsutum
cggacgcgtgggttgcaaaactgcatttccatgaagatggaggtgaagttatttctgagtattgggggtctacggtggctgcactgcgaaaaccatggaaattcgatagtattttttttgcaaaaaagcaatcataccttgttcttatatgtggatgtgtatgtgaacttgtaaaaattgcatattagcaggcaaaatagcacaaatgactaaacttttgttgtggttagatgacaatgcccagagatgctttacatcttggtggagtggaacatcgggagttatataatgcctatggatattacttccacatggcaacagctggaggccttctaaagca

SEQ ID NO: 228171 - DNA, 335 bp, Gossypium hirsutum
cgatccaatcaatcgcttcaactatctcaccaaacacatatccaatggctccgatcgctgtcggcgaggtgttaccggacggtactctctgctacttcgacgccgatgataagctccagcaggtgtccgtacattccctggctgccggtaaaaaggttatcatctttggcgttcccggtgcctttacccctacttgcagcttgaagcatgttcctggattcatcgagaaagcaggggagctgaaatccaagggcgttgatgaaattatttgcattagcgtgaatgatccctttgtgatgaaggcatggaccaaaacttaccctgagaacaaagat

SEQ ID NO: 228172 - DNA, 360 bp, Gossypium hirsutum
cttagctttcaccgacaaaaaaatggcagcgaagcaaacgacgatcctagttgccgccatcctggggcggctttttacggcggcgcggggacatcggcgcaggcaccggcagctgatccagcgatggccatgtcgccgtccgccatggcaccgacgccggactgtatgacgaacttgctcaacttatcggattggttgacgtacgtggaggccggaagcaacttgacgaagccggacaagccttgctgtccggaattggctgggctagtggaaagtaagcctcaatgcttgtgctatttgatggataagaatgcgacggcgtactatgggatcaacattgtcatggaaagagctgttaag

SEQ ID NO: 228173 - DNA, 418 bp, Gossypium hirsutum
ccgggccaagtttttaccgacgtggttggcagtccatattacgttgctccggaagtacttctgaaacagtatggaccagaagcagatgtatggactgcaggagttatactctatatattgctaagtggtgtgccaccattttgggcagaaacacagcaaggaatatttgatgcagtgttaaaaggacatattgactttgattcagacccttggcccctaatatctgatagtgcaaaggacctaattcgaaagatgttatgctctcgaccttcagagcgactgactgctcatgaagtattatgtcatccttggatttgtgaaaatggggttgctcctgatagggctctggatccagctgtactttttcgccttaaaacattctctggaatgaataaactaaaggagatggtttacgggt

SEQ ID NO: 228174 - DNA, 433 bp, Gossypium hirsutum
cttttataatgagcttcgtgttgccccggaagagcacccagttctccttactgaggctccacttaggccaaaagctaatcgggagaaaatgacccaaattatgttcgagaccttcaatgcccctgctatgtatgtagctatccaggccgtgctctcactttatgccagtggtcgtacaaccggtattgtgatggactcgggtgatggtgtcagccacacagtgcctatttacgagggttatgccctcccacatgccattcttcgtcttgacttggctggtcgagacctcactgattacttgatgaaaattctgactgagcgtggatattccttcaccaccatagccgaacgggaaattgtgagagatgtttagggaaagctgacttacattggccttgactatgaacaggagctagagacctcaaaaacaagg

SEQ ID NO: 228175 - DNA, 407 bp, Gossypium hirsutum
tacaacgccaaattcaagtttaccaaccttattgtttatttgttcgagacttggcgagttttttggaatccccatggcttcaaagcggattaataaggagttgaaagatctgcagaaggaccctcctgcatcttgcagtgctggccctgttggtgacgatatgttccactggcaagcaacaattatgggcccagcagacagtccttttgctggaggactatttcttgtttccattcacttccccccagactatccattcaagcctcccaaggtttctttccgaacaaaggttttccatccaaacatcaacagcaatggaagcatctgtcttgacattctcaaggagcagtggagccctgcccttaccatattcaaggtgctgctttcaatatgctcacttcttacag

SEQ ID NO: 228176 - DNA, 379 bp, Gossypium hirsutum
gagattcttcatattcagggagggcagtgcggcaaccagatcggtgccaagttttgggaggtggtttgcgccgagcacggcatagattcaacgggacgctatcaaggagacaatgatttgcagctggagcgcgttaacgtttactacaatgaagcgagttgcgggaggttcgttccacgagccgtccttatggacttggagcctggcactatggatagtgttagatccgggccgtacgggcagattttcaggcctgacaacttcgttttcggccagtccggtgcagggaataactgggccaagggtcattacacggaaggggctgagttgatcgactcagtgctagatgtggtgaggaaagaagccgaaaactgtgact

SEQ ID NO: 228177 - DNA, 470 bp, Gossypium hirsutum
acacccttctgaactgactgccggcttctataacacggcctcaagaaatggctatgaagcagttgcagagatgtttgcaaggaattcatgcaaaatcaacttgcctggaatggacctgtcagatgagcaccagccacacgatgctctttctagccctgaatcattacttgcacaaatccgaacaacgtgcaacaagcaccgggttgaggttgccgggcagaacctggcccctggagctcctggtggtatagagcagattaagaaaaatatgttgggtgagaataaaatagacttgttcacttatcagaggatgggagctcatttcttctcgccggagcattttccttcattcactgagtttgtccgaagcctgagtcaacctgaattacatccagacgatttaccctcggatgaggcagaagctactgaatctgtacaaacgagttcggatccaaacattcacttgcaga

SEQ ID NO: 228178 - DNA, 393 bp, Gossypium hirsutum
aaatttcttcctttaacgtcccaactttatcgctaatggctgagcaacaacaagatcaactgcaacacagatccgccggaaaggttctctggttcaatgaccaaaaaggcttcggatttattcgaactggcgatggaggcgaggatctcttcgtccatcattcttcaatcaaatccataggctatcgtagccttgctgagggcgaatccgttgagttcactatctcccaaggcaacggtggcaagactcaggctgttgatgtcatcgccgtaggtggctctgccatcaataagaaggaccgtcgcagtggtggcggttggagaggcggaaacgatcggaggaatggcaccggcggttgctataactggggggatttgaatcatcttgccagag

SEQ ID NO: 228179 - DNA, 248 bp, Gossypium hirsutum
gtagataaagttaatattacgtagtcgcataaagcggcataggacacaacccacaactctggaattttaacatccatatttattctgtagctatcgttattttggcttccactagctggtgaactttccatgccaaaacttcacttgacgctgttgcagtcagtgctagggctgatcttgtaagggatgttgacaccgcacttgcctgggagtccgcttgcaataccatagttgatgccagaaatgcc

SEQ ID NO: 228180 - DNA, 396 bp, Gossypium hirsutum
ctaaatttcctcgcccatataaaaaccaataaaataaaagagatatatttcacatttatttttctggatttgggcctataaaaccactgaaaagatagtaacaaaatccaaaaatggcggctccggcagtggagggagtagccgtgacggccctccgatcggtcctactccgagtccgacaggcagctgaacgggcggctactcaacccgaacgggtccgggtcgtggccgtttcgaagactaaacccgtgtcactcatccgccaaatttacgacgccggtcaccactggttcggtgaaaattatgtccaagaatttggtcaaaaagcccttcaactgcctgaggatattgagtgggattttattggacatttacagagcaacaaaggttaaaacc

SEQ ID NO: 228181 - DNA, 451 bp, Gossypium hirsutum
caaaaagatccctctccaacaatggcttctaatcccaaggtcttcttcgacatgaccgtcggtggccaaccagctggtcggattgtgatggagctctttgccgattgcactccccggactgctgagaacttccgtgctctctgcaccggcgagaaaggggtaggccgtagcggcaaacctctccactacaaaggctcatccttccaccgggtgatccccaatttcatgtgtcaaggaggcgactttaccgccggaaacggtaccggaggtgaatccatctatggagccaagttcgcggacgagaacttcatcaagaagcacacgggacctggcatcctttccatggcgaacgctggacccggaacaaacggatctcaattcttcatctgcacgaccaagacggagtggctggacggaaagcacgtggtgttcggacaggtagttgaaggca

SEQ ID NO: 228182 - DNA, 446 bp, Gossypium hirsutum
aaatcaccaaataaaatcaacccaaaaaatagagaaaaaatctttctccgagtttcgcctttctcggtcgtcttgttttcgtaagcttgtttacctctcaatttcatagctatgactgttatggcccctgcccctatcgatcaacaagaagatgaggaaatgctcgtcccacagtctgatttgaccgacaatcaccagcccatggaagttgtagcgcaacccgaagctgcaaatactgtggaaaatcaaccagttgaggatcctccttcatcaagattcacttggaggattgaaaacttctctaggttaaacgctaagaagcattattctgaagtcttcgttgtcggtggttataaatggcgaatactgctatttccaaagggaaacaatgtggatcatttgtctatgtatttggatggtgctgactcagcaagcttaccctatgg

SEQ ID NO: 228183 - DNA, 383 bp, Gossypium hirsutum
ctgaattgggataatactttgatttcaaaacacgagccatcaatgaatttgggtaattaacaaggtgcgatccttgtttcgctaataaaggaatattaaacttcataaaatatcgaaatccaagaccactattttcttttaataagcacagattttcccaggtacaccaatgaacactttttttattccatctattccgccaccagaaattagcaacaattcttttcaggtctgaccatagagtcttgggtagtagaaaacatgccattgaatacgttgttatagcttgttagaccgatttaattaaaactttatttgactctttggtattgataccttgaccttcaattattaatatctttggttgtgtattgttatttaaa

SEQ ID NO: 228184 - DNA, 261 bp, Gossypium hirsutum
attccggaaggcgtcttgatacacgcccccatttattttatttttcaaacaaattttcccttgaagtttcgtataatttcctaggaaaagaaatatgagagagtgcatttcagttcacatcggtcaggccggtattcaggtcggaaatgcttgctgggaactttactgtcttgagcatggcattcagcctgatggccaaatgccaagtgataagactgttggtggaggagacgatgcttttaacaccttttttagcggaac

SEQ ID NO: 228185 - DNA, 436 bp, Gossypium hirsutum
gtttgtttttcttgtgattaatcgatatggctagctcaatgtcccttaagcttgcatgtgtggcggtgttgtgcatggtggtgggtgcacccctggctcaaggggccgtaacctgtggtcaagtcacaagctccctcgcaccctgcattggttacttgacagggaatggtgctggtggcgttcccccaggttgctgcggcggcataaaatctctcaactccgccgcccaaacaacaccagaccggcaagcagcttgcaaatgcatcaaaagtgcggccgccggcatttctggcatcaactatggtattgcaagcggactcccaggcaagtgcggtgtcaacatcccttacaagatcagccctagcactgactgcaacagcgtcaagtgaagttttggatgggaagttaccagctagtggaagccaaaataacgata

SEQ ID NO: 228186 - DNA, 332 bp, Gossypium hirsutum
ccaatacacagatacacttgcttctcactttagaacggtgtatggccgattcaacaccgcttctgtctcactgtgataaaccggcagaaccaaaacggccgcctcgatctctcgatgagaccatcgagggctgtatcggagacttcgggtggtggcaattcttgcaagcaatactcgtctctcttgcttgggtctttgatgctcagcaaaccttcatcagtgtattcactgatgctgagccatcctggcactgcacccaaggcggagacgagtctgtttgtaactctttgtccaacatttgcgagctccccaagaattcatggtcttgggat

SEQ ID NO: 228187 - DNA, 430 bp, Gossypium hirsutum
tgcaatagatcccggaaacaaggagggacttaggcaagaggtgattgttgatttggtggagcagtgccggacttacaaacaaagagttggacaccttgttaattcaacatcggatgagtcacttttatgtcaaggtttagcattgaatgatgatttgcaacgcgtactagcaaggcatgaagcaatagcttcaggaactccttctcaagcaaacaaacctaagcctgaacctgcaaaagaacttgtgaatgtcggtagtccactaattgatactggagacagtagcaagcagtctgaggggagatccacttcaagcactgttacaagttcaccatttaatcagttactggcttctgctccttctgcaactaatggttcaacttctccaccagctgccaattccaaaatggacttgcttaggggggatgac

SEQ ID NO: 228188 - DNA, 354 bp, Gossypium hirsutum
cccacgcgtccggcgagatcaaaagccagcagcgcagcatctaaaagagcagtcttttgacaattgttcgccatgggtaaggttcacggatctctagctcgtgccgggaaggtgagaggccaaactcctaaagtggccaagcaagacaagaagaagaagccccgtggccgcgcttacaagcggatgcaatacaaccgacgcttcgtcacagcagtggttggatttggcaaaaagaggggacctaactcatctgagaagtaagagatctatgtaggtgaagaaggcaagaagccttgttgaaagctttgatggattttaagtctttgttttcttttgataatgtttttatgatat

SEQ ID NO: 228189 - DNA, 258 bp, Gossypium hirsutum
cttgatctctccttcaatgggttgtcaaggaatattcctaaagagattggaaattgttcaagtttggagggtctcaatctcaatgacggtgggtttgaagctcaaatccctaaagaactaggcaccctttcttttttgacaactctgaacatatacaacaacagattatcagggcctttccctgatgagattgggaacctttcttctttgtcacaattgcttgcatatagcaacaatatcagtggatccttgccaagc

SEQ ID NO: 228190 - DNA, 308 bp, Gossypium hirsutum
  unsure (1)..(308): unsure at all n locations
ggaaggttaagaatgcaaagccatattcttttactcttgaggaggataccacccagttcggtacgtataggaaaggtggtattggtacacgagtgaaacancccaaggtattaaatttcaaaccactaagagatgctatcaaagaccctggtgattttctgctgagtgatttttcaaaatttgatcgtccacctctgttacacttagcattccaagcattggataagtttgactccgattagggacgctttcctgttgctggttcagaaggggatgctaataagcttatttctattgctgggaacatg

SEQ ID NO: 228191 - DNA, 237 bp, Gossypium hirsutum
  unsure (1)..(237): unsure at all n locations
nggntctctgnaccatngaagagnccggagagcacattgttgctggtgctggtgaactccaggtggggatctgtctcaaggattggggggaanatttcatgggtggtgctgagattattaaatcagaccctgttgtgtcattccgtgagactgtccttgagaggtcttgcaggacagtgatgagcaaatcttctaacaagcacaaccgtttgtacatggaggctcgacccttggagg

SEQ ID NO: 228192 - DNA, 304 bp, Gossypium hirsutum
  unsure (1)..(304): unsure at all n locations
cccacgcgtccgaccctaaccaaaggcaaaaggaaaaaaaatggcagaaagaggcggaggtgaacgcggcgctttcaggcgtggcttgggtggtggtagaggtgaccgnggtccaagaggcaggcgccgcggccgcaaggacgaagaggaaaaangggnacccgtcacgaaactcggtcgcttagncaaagccggcaagatcacatcccttgagcaaatctacctccattctctccctatcaaggaggaccaaatcatcgaccaactcgncggcccttcactgaaagacgaggtcatgtaaatc

SEQ ID NO: 228193 - DNA, 301 bp, Gossypium hirsutum
ataagctctacctgcagcctggggccctgctggagcagccagtgtccatcccagacgatgacttggtccaggccaccttacagcagctgcagaagccaccgagtactgcccggccacgccttcttcaggacacagtgcagcagctgatgctgcaccatgggaggctgagcctggtgacagggcagtcaggacagggcaagacagccttcctggcatctcttgtgtcagccctgcaagctcctgatggggccaaggtggcaccattagtcttcttccacttttccggggctcgtcctgacca

SEQ ID NO: 228194 - DNA, 382 bp, Gossypium hirsutum
atgtcgcaatcagctgggtgattcccgtgattgcgttacaagctttgtctccttcgactgggagtgtttgtccaggacgatgagacactcaaagagaacttactgtcctgattgggatgacaaggattgggattatggaaaatggaggagcagcagctagcatcaacggagggagagttcacataacattgcctgggagaacaagcgcttcaaatacactcactctaaaatgtgtgatagccattatttggaaagcaggtgtataaatgagaaagattatcatagtcgacgctacattgatgagtacagaaatgactacaatcaagatgtgaacctgggcatcgccatagagaccatgaaaagccgtattcagaaccatagt

SEQ ID NO: 228195 - DNA, 402 bp, Gossypium hirsutum
attgcggctgccagcaggcagatcatgagccatcagctcctctggggccagctataggacaacagaactctcaccaaaggaccagacgcagcgggtaccatgggacagtgtcggtcagccaacgcagaggatgctcaggaattcagtgacgtggagagggccattaagaccctcatcaagaacttccaccagtactccgtggagggtgggaaggagacgctgaccccctctgagctacgggacctggtcacccagcagctgccccacctcatgccgagcaactgtggcctggaagagaaaattgccaacctgggcagctgcaatgactctaaactggagttcgggagtttctgggagctgattagagaagcggctaagagtgtgaagccagagaggcctgtc

SEQ ID NO: 228196 - DNA, 395 bp, Gossypium hirsutum
atgacctttacctcaccacctcagcttcaacagcagcaggtgaaacaacccagccagcctgcacctcaggaaccatttgttcccataaccaaggagccatgccacccaaaggttccacaacctggaaacacaaagattccagagccagattgcaccaaggtccctaagccaggctacaccaaggaccctgagccaggcagcaccaaggtccctgacataggctgcaccaaggtccctgagccaggcagtaccaaggtccctgacaaaggctgcaccaaggtccctgagccaggcagcaccaaggtccctgacaaaagctgcatcaacttttctgagccaggcgccattaaaatccttgagcgaggctacaccaaagttcctgagccaggctacac

SEQ ID NO: 228197 - DNA, 416 bp, Gossypium hirsutum
atccgggaggaaagatggtgctggatctggatttgtttcgggtggataaaggaggggacccagccctcattcgagagacgcaggagaagcgcttcaaggacccgggactagtggaccagctggtgaaggcagacagcgagtggcgacgatgtagatttcgggcagacaacttgaacaagctgaagaacctatgcagcaagacgatcggagagaaaatgaagaaaaaagagccagtggaagatgatgagtctgtcccagagaacgtgttgaatttcgatgaccttactgcagacgctttagctaacctgaaagtctcacaaatcaaaaaagtccgactcctcattgacgaagccatcctgaagtgtgacgcagagcggataaagctggaagcagagcgatttgagaaccttcgagag

SEQ ID NO: 228198 - DNA, 348 bp, Gossypium hirsutum
atctcggacagcagtgcagagggggcttcggtccctgagcggccggaccaaggcattgacaggcacacatgtgagagcatcagagaaaatgactgattcttgtaccacctcaagtcatatatgaccaactactttggtgcagctgagcgattggcctgtcaggagaaagaccatatgctggcttggagggtcacacctgagggcaaggctcagaacctggaggagtgggaagggaccacctcttactgactagcccccacgggtgccaggggtactgaaaaccaaaggtggagcagaccaagccatatgcttcccagctatatgcaagctggggtgggagacggtagc

SEQ ID NO: 228199 - DNA, 419 bp, Gossypium hirsutum
atgaagaatttccccttagttctttgcaagaaggtagagataaagacactttttcaaaaatggcagtggtatcagaattcctcaagcaggcctggtttattgaaaatgaagagcaggaatatgttcaaactgtgaaatcatccaaaggtggtcctggatcagcagtgagcccctatcctaccttcaatccatcctcggatgtcgctgccttgcacaaggccataatggttaaaggtgtggatgaagcaaccatcattgacattctaactaagcgaaacaatgcacagcgtcaacagatcaaagcagcatatctccaggaaacaagaaagcccctggatgaaacactgaagaaagcccttatgggtcaccttgaggaggttgttttagctctgctaaaaacttcaacgcaatttgatgct

SEQ ID NO: 228200 - DNA, 313 bp, Gossypium hirsutum
attcttctggacagactctaacctggatcgaatagaagtggcgaagctggatggcacgcagcgccgggtactctttgagaccgacctggtgaatcccagaggcattgtaacggattccgtgagagggaacctttactggacagactggaacagagataaccccaagattgaaacttcctacatggatggcacgaaccggaggatcctggtgcaggatgacctgggcttgcccaatggactgacctttgacgcgttctcatctcagctctgctgggtggatgcaagcaccaatcgggcggaatgcctgaaccct

SEQ ID NO: 228201 - DNA, 400 bp, Gossypium hirsutum
ccctgttccacaagagggtaatatcaagccacgcatctttagactgcggcaagaaggtgctattatcaatcgctgtgggttcaatagtgaaggaattgttgctgttgcaaagagattaggtgctcagcatggtaagaggaagttagagacttcgagttcctcgtcaccctcgaatgaagaagccaaacatgggggcaaagctggtcctggaattctgggagtcaatcttgggaagaataagacaagtgaagatgctgctgctgactatgtacaaggagttcacacgttatcccagtatgctgattacttggttattaatgtttcatcaccaaacactcctggattacgtatgcttcaaggaaggaaacagttgaaggatcttgttaagagggttcaagct

SEQ ID NO: 228202 - DNA, 420 bp, Gossypium hirsutum
ataacagaataaggtcctggagaccaaatggaagctgctccagcagcagacgaccagcacctccagcaaaaaccttgagcccctctttgagacctacctcagtgtcctgaggaagcaactagataccttggtcaatgacaaagggcgcctgcagtctgagctgaagaccatgcaggacagcgtggaggacttcaagaccaaatatgaagaggagatcaacaaacgcacagcagctgagaatgactttgtggtcctcaagaaggacgtggatgctgcctatatgaacaaggtggagctggaggccaaggtggacagtcttaatgatgagatcaacttcctgaaggtcctctatgatgcggagctgtcccagatgcagacccacgtcagcgacatgtccgtggtcctctccatggacaacaa

SEQ ID NO: 228203 - DNA, 391 bp, Gossypium hirsutum
atggtttttcggatcatgtctggtggctccgcggattataacagagaacatggcggcccagagggaatggaccccgatggtgtcatcgagagcaactggaatgagattgttgataactttgatgatatgaatttaaaggagtctcttcttcgtggcatctatgcttacggttttgagaagccttccgctattcagcagagagctattattccctgtattaaagggtatgatgtgattgctcaagctcagtcaggtactggcaagacagccacatttgctatttccatcctgcaacagttggagattgagttcaaggagacccaagcactagtattggcccccaccagagaactggctcaacagatccaaaaggtaattctggcacttggag

SEQ ID NO: 228204 - DNA, 370 bp, Gossypium hirsutum
atcggagccggagacgagaccagaggccgaactcgggttctgacaagatgggcgggctgccccgcaggagcgtcaaggaaacccagcgtttgctggcagaaccagttcctggcatcaaagcagaaccagatgagagcaacgcccgttattttcatgtggtcattgctggccctcaagattccccctttgagggagggacttttaaacttgaactattccttcctgaagaatacccaatggcagcccctaaagtacgtttcatgaccaaaatttatcatcctaatgtagacaagttgggaagaatatgtttagatattttgaaagataagtggtccccaacactgcaaatccgcacagttctgctatcgat

SEQ ID NO: 228205 - DNA, 325 bp, Gossypium hirsutum
cggacgcgtggggttgaagttggggcgcttttgtatcaatggctgaagtccatgaccgcaacctgcctaaccaagttcaagttcacccacagtaccgtttcgacaatacaacccgaggcggttacggtgcaaagaactatcacagcggaccatcaacaagccaagttctagccgttcctacacttcttcccattggtggtacactgcttgcattaaccggcttaacactggccggcaccggcattgggcttatgctagtcacaccgctgctcatcatcttcagcccagttcttgtcccagctgccattgccattgccatggcagt

SEQ ID NO: 228206 - DNA, 381 bp, Gossypium hirsutum
atccgccatggaggccgccaggggcagataatctacaactggcagggtgcccagtctacccaggatgaggtcgctgcatctgccatcctgactgctcagctggatgaggagctgggaggtacccctgttcagagcctggtggtccaaggcaaggagcccgcacacctcatgagcctgtttggtgggaagcccatgatcatctacaagggcggcacccttccgcgagggtgggcagacagcccctgccagcacccgactcttgcaggtccgtgccaacagtgctggagccactcaggctgttgaggtattgcctaaggctggtgcactgaactccaacgatgcctttgtactgaaaacacgctgagctgcctacctgtgggt

SEQ ID NO: 228207 - DNA, 379 bp, Gossypium hirsutum
atccatcccgctgcgctcctcctgggtcatgacctgtgcctatgcgcccggagggaactttgtggcctgtggggggcttgacaacatctgctccatctacagccctaaaacccgcgagggcaacgtcagggtcagccgggagctgcctggccacactgggtacctgtcgtgctgccgctttctggatgacaaccaaatcatcaccagctctggggataccacctgtgccctgtgggacattgagacaggccagcagacagtgggttttgctggacacagtggggatgtgatgtccctgtccctggctcccgatggccgcacgtttgtgtcaggcgcctgtgatgcttctatcaagctgtgggacgtacgggatttcatg

SEQ ID NO: 228208 - DNA, 317 bp, Gossypium hirsutum
tttgaggcatattgggcgccttgtcaccaaggctgcttttaactcttgtaaagtggatattgttgccatcaatgaccccttcattgacctcaactacatggtttacatgtttcagtatgattccacccatggcaagttccatggcaccgtgaaagcttagaacgggaaactcgtcatcaatggaagccccatcaccatcttccaagagcgagatccctccaaaatcaagttgggcgatgcttgcgcttagtacgtcgtggagtccacttgcgtcttcaccaccaccgagaaagcttgggcttatttgcaagggggag

SEQ ID NO: 228209 - DNA, 402 bp, Gossypium hirsutum
tgctctggatgcagttcctgtgaatggtgataggaatggaaactctgaagctgctgctgaaaatatgtcagcaagcagcttagtatctgggtacagtatggttgaactggaatccgaagaataccagtttctgtggggctttgctttgcttggtatatttcagggacaacatccagccctttgtaaacaagttataccgttagcctcagctaaagcgaaacatgatggagatactcctgctgaggatacaacttctccaggcttgaagttttatgaaattgttttgccagtgttccagtttcttttaacacagaagtttttctcagctggttttcttaccgtaaacatctgtgaagaactgctcctggtcttctcttattccatctacatggataattcatg

SEQ ID NO: 228210 - DNA, 362 bp, Gossypium hirsutum
tcgtttactcgtccggtggtttaagggatttttggtattcgtttcttctgacgcgcgattaccttacaaaaagagaaaatgaccaagtgttacccaactgtgagcgaggaataccagaagtcagttgaaaaggccaagaggaagctcagaggtctcatcgctgagaagaactgtgctccactcatgctccgtttagcgtggcactcagctggaacttttgatgttaagaccaagaccggaggtccattcggaaccatgaagcatcctgctgagctcgcacatgctgctaacaacggcctaaatatcgtcgtcagacttctcgagccgatcaaagagcagttccctaaccttaactacgctga

SEQ ID NO: 228211 - DNA, 197 bp, Gossypium hirsutum
atggcgtttgtatgatcttcggagattgctgcatcggaccttggccagtcataaaagatgacaacagcagccaggccaacctttgaacctgcaagaggtggaaggggaaaaggagaaggtgatttgagccaactttcaaagcagtatttaaggagagacctaccctctcacacaaaggttaaattccgaccaacttc

SEQ ID NO: 228212 - DNA, 397 bp, Gossypium hirsutum
tcgcatccttctgaagtagcttcgccatgggtgtggctatcatcgagaagcccttaacgaatcatcgatagtacccagtgagtcccaaaaagctccgaactttagaaacattcctcggaggtttccaatcaagaatggctgaaattttattcgaatcaactctaataccagaagcggatacaacatgtcccagaaagctgacctcccttaaccagaattcacatttactgaattttgcatacaactgattatctggcaaaatctgaagtacaagcctcaagtgttcggcgtgttcagactcgttgtgagaagtaatcagaatatcatctatgaacaccactacaaattgatctaaatactgtctgaatacccgattcatcagatccatgaaaactgc

SEQ ID NO: 228213 - DNA, 403 bp, Gossypium hirsutum
atgtcgtttctgtcgccgtccccgtctcctgccaggcgcggagccctgcgggccgctggtgggccccaggcgcgcaaacatgggcggccccaccaaagcgcgctgggctgccgcggcgctgggcgtcgcggggctgctgtgcgcggtgctgggcgctgtcatgatcgtgatggtgccctcgctcatcaagcagcaggtcctcaagaacgtgcgcatcgaccccagcagcctgtcctttaacatgtggaaggagatcccaatccccttctatctctccgtctacttctttaacgtgatgaaccccagcgagatcctgaagggcgagaagccgcatgtgcaagagcgcgggccctacgtgtacagggagttcaggcacaagaccaacattacctttaacaacaat

SEQ ID NO: 228214 - DNA, 422 bp, Gossypium hirsutum
attgcgctctcacagtctggccaagaaggcacaggatgagggacgcctttctgatgtcgtaccctgcagagtaccaggaaaagatacagttaccaaagataatgggattcgtccttcctcactggagcagatggccaaactaaaacctgcattcatcaagccctatggcacagtgacagctgcaaattcttctttcttgactgatggcgcatctgcaatgttgattatggcagaagaaaaggctttggccatgggttataagccgaaggcatatttgagggattttatgtatgtgtctcaagatccaaaagatcaactgttactcgggccaacatatgctactccaaaagttctagaaaaggcaggattaaccatgaatgatattgatgcttttgaatttcatgaagctttctcgggtcaga

SEQ ID NO: 228215 - DNA, 402 bp, Gossypium hirsutum
  unsure (1)..(402): unsure at all n locations
atgcccgagtttgccaaagaaccgccgcagagagacaggtaccggctggacgatggccgccgcgtgcgggacctggaccgagtgctcatgggctaccagacctacccacaggccctcaccctcgtctttgatgatgtgcaaggtcatgacctcatgggcagtgtcaccctggaccactttggggaggtgccaggtggcccagctagagccggccagggccgtgaagtccagtggcaggtgtttgtccccagtgccgagagccgagagaagctcatctcgctgctggctcgccagtgggaggccctgtgtggccgtgagctgcctgtcgagctcaccggctagcccaagccacaggcagccatcaccgnctgccgtgtctagcctggtgcctactggggcagg

SEQ ID NO: 228216 - DNA, 367 bp, Gossypium hirsutum
  unsure (1)..(367): unsure at all n locations
ccccaatcctgtttctcttttgcatcctttgtttctctcttcatctcctgcactacttgcaaaataacgagctgaagccgtgctacaataacactagtgttttcaacaataaattaatcatagccgcagcttgtttcttttaaactctaaatataaaggaggccaaacatgccgcctcgtagataccaatttgngagggctgatgaggccactcatcccgactccatgagagccaccttggctgaattcctctccactatcattttcgtctttgccggcgaaggctcaattcttgctcttgacaagatgtacaaggatacgagtgcgacgcctgcaagactggtgatgatagcacttgcccatgggt

SEQ ID NO: 228217 - DNA, 400 bp, Gossypium hirsutum
atccccgactcaacgtgagactcaccgcccggactcaccatgcgtgaatggatctcagtccacgtggggcgggcaggtgtccagatgggcaatgcctgctgggagctctattgcttggaacatgggattcagcctgatgggcagatgcccagtgacaagaccattggtggaggggacgactccttcaccaccttcttctgtgaaactggtgctggaaaacacgtgccacgggcagtttttgtggatctggagcctacagacattgatgagatcctaaatggcccataccgacagctctttcacccagagcagcttatcactgggaaagaggatgctgccaacaactaatcccgtggtcactataccattggcaaggagatcattgacccagtgctggatc

SEQ ID NO: 228218 - DNA, 411 bp, Gossypium hirsutum
  unsure (1)..(411): unsure at all n locations
tcgcctacgcgtccgttcccctccgcaaggagccagccgtttcacacactgaagaagagagagagctcgtaaatcatggcggaacagaccgaaaaagcttttttgaagcaacccaaagtgtttttgagctcgaagaaaggtgggaaagggaagagaccaggaaagggtgggaatcgcttctggaaaagcattggattgggcttcaagactccccgtgaagctattgaaggaacctacatcgataagaaatgcccgttcactggcatggtttcaatccggggtcgtatcttagccggtacttgccatagtgccaagatggtcaggacaatcattgttcgacggaactaccttcattatatcaagaaataccaaaggtacgagaagcgccattcaaacatccntgcacatatt

SEQ ID NO: 228219 - DNA, 142 bp, Gossypium hirsutum
attgactcgaccaaggcttatgttacagttctgggagacatcatgggcacagccctgcagaaccgagatggtctggtgcaaatgcccagtggctgtggcgagcagaacatggtgttgtgtgctcctatcatctatgtgttgc

SEQ ID NO: 228220 - DNA, 373 bp, Gossypium hirsutum
atgggccctcttgcttctctgatagctcccagcttactctctgcggccatgattgccagacagcggggtgtccaaagcggctctcggggcttcagctgtggctcacccatcgtaggcagtggcaagagaggtgccttcagctcagtctgcgtgtctggaggcgctcgccgatgctcttctgggggctttggcagcaggagcctatacaacctgagcgggaacaagagcatctccatgagcgtggctgcgtcacgacaaggcgcctgctttggaagggctcgaggcttcggcactggtggctttcgcggaggattagggggctccttcagcggtaggatggccctggcttacctgtctgccctgctgggggaat

SEQ ID NO: 228221 - DNA, 261 bp, Gossypium hirsutum
  unsure (1)..(261): unsure at all n locations
atcccggcccgaccttgccctctccttcgccaccgcctcggaccggagaggtcgccttttccccacgctgggggtattttcaaatccaagagcggccctgagtatgcttcgtttttcgccgtcatgggcccctcggccgccattgtcttcaacgccctgggcgcttcctatggcacaaccaaaaacggcaccggcattgcggccatttctgtcatgccgccagagctgatcatgaaagccatcattccagtggncatggct

SEQ ID NO: 228222 - DNA, 291 bp, Gossypium hirsutum
atggagcaagcgagtaggtctgcgcgcagtctgagcggcgcgcgtacagtcccgaggtccacgccagcacgccctcatggcccccgcagcggcgtcggggggcagcaccctgcccaggggcttgtcggtcttcaccaccttccccgacttgctcttgatgtttgagtttatcttcaggggcctgctgtggatcctggtggcctactacctggtgccgtggcccttgagagatggctcagggatgttcgtgtatctgttgtgctttgtgagcgccagtacctagatcatact

SEQ ID NO: 228223 - DNA, 391 bp, Gossypium hirsutum
  unsure (1)..(391): unsure at all n locations
tcggtgctgtcgtgtgacttggctactcgggctctacctggtcggcgtgtggctactcatcgtcctcggcatagtcttcaccatcttcgctttcgtagtgacgaacaaaggtgcgggacacgtattatccgggaaaggttataaagaataccgacttggagattactcaaactggttgcagaaaagagttactgataacaagaattggaataagattaaaagctgtttggctgatagtaaaaggngnaccgatttccatgataaatatctcaatgctgctctcccagagatttaccagcctcacttatctgccgcacagacgggttgctgtaaaccatcaaacgattgccagctcaattacgttgggccaactaactggacaagggggagt

SEQ ID NO: 228224 - DNA, 347 bp, Gossypium hirsutum
atcagcctctcacgctctccatagccctctcatctcctggaaccatggccgccacattcaccaccatgagcggccacaacatcatccgcaggggcttcagtgccggctcagccaggctccctggggtcagccgctctggcttcagcagcgtctccgtgtcccgctccaggggcagtggtggcctgggtggcgcatgtggaggagctggctttggcagccccaacctgtatggcctgtggggctccaagaggatctccattggagggggcagctgtgccatcggtggcggctatggcagcagagccttaggcagctatggctttcgtggccccgggagtggatttggt

SEQ ID NO: 228225 - DNA, 404 bp, Gossypium hirsutum
atggcagtcctattttgtgttgcatcgccagcgcattcctgagacaccatggggaaggtgaaggtgggagtcaacggatttggtcgaattgggcgcctggtcaccagggctgcttttaactctggtaaagcggatattgttgccatcaatgacccgttcattgacctcaactacatggtttacatgttccagtatgattccacccatggcaagttccatggcaccgtgaaggctgagaacgggaagctcgtcatcaatggaagccccatcaccatcttccaggagcgagatccctccaaaatcaagtggggcgatgctggcgctgagtacgtcgaggagtccactggcgtcttcaccaccacggaaaaagctggggctcatttgcaagggggagccaaaagggt

SEQ ID NO: 228226 - DNA, 430 bp, Gossypium hirsutum
atcgggtttgccgccagaactcaggtgtcgtgaaaactacccctaaaagccaaaatgggaaaggaaaagactcatatcaacattgtcgtcattggacacgtagattcgggcaagtccaccactactggccatctgatctacaaatgcggtggcatcgacaaaagaaccattgaaaaatttgagaaggaggctgctgagatgggaaagggctccttcaagtatgcctgggtcttggataaactgaaagctgagcgggaacgtggtatcaccattgatatctccttgtggaaatttgagaccagcaagtattatgtgactatcattgatgccccaggacacagagacttcatcaaaaacatgattacagggacatctcaagctgactgtgctgtcctgattgttgctgctggtgttggtgaaattgaagctg

SEQ ID NO: 228227 - DNA, 414 bp, Gossypium hirsutum
atctgccaacaaggatccttaccccacaggggcccttctcccaggctgtgctgggcatattcaccgtgccgcttcacttctgcccagatttttaacttcacccggggtctctgcttgcacaaggactatgtggctgacagagagtttgtggcctggaaagacagacacccagacgcctcccccaaccatctcacccccatgcgggactgcctgtacctggtggacggaggctttgccatcaactctccgttcccactggctctgcggcctcagagagccgtggacctcattctgtccttcgactattccttggaagctccttttgaggtgtggagcgacaaacagctgaggagaaggcctttggggactttgtcatcaacaggccagacaccccctatggcatgatgaacttca

SEQ ID NO: 228228 - DNA, 242 bp, Gossypium hirsutum
attgctgtgcgtcgtagcgaccatccgctttctggtgccggctgcgatcttcgcccacctggagggggcctggagcttcctagatgccttctacttctgctttatctctctgtccaccattggcctgggcgactacatgcccggggaagcccctggccagccctaccgggccctttacaaggtgctggtcacagactacctcttcctgggcctgatggccatggtgctggtgctacagacct

SEQ ID NO: 228229 - DNA, 233 bp, Gossypium hirsutum
atgcagagaagacgggggcccaggagctgctcagggtgctacgggcccaacctgtgcaggtgggagaaggcatcgagccacatggcttctgggaggccctgggcggggaggcttgctaccgcacatgcctactgcttgaggccgagaagatcgatgcccctacttctcgcctctttgactgctataacaagattggacgttttgtgatcaaagcggtttctggtgagctcatg

SEQ ID NO: 228230 - DNA, 417 bp, Gossypium hirsutum
ataccgctgaacgtgtcccagtggctgatggtgctgaaaatctcgtggcgcgtgattctcatggacgagaggctcaagtttgtggcccgcaactacctggaacctggtaaagagtgtgtgcagcctgccaccaaatcctgctcgttctcggcatgcaccgatgggatttcctggccgtttgtgctgctcataatgcccctggtgatctgggtctatagcacagacactaactttagtgatatgttctggtcttgactgacagttttccataaagaagatgtttaacttaatcaattttttttattgtttaaagcaactgtctatttctgctgaattttcacatgaacatactggctggtgatggaggtttcatactctagattttgttttgctttttctgactccagtggggcaaga

SEQ ID NO: 228231 - DNA, 386 bp, Gossypium hirsutum
tctaccaactggtaccaacacagcggcaggggccattgtgaagtagtgaagggaaccggacaaccctactaaatcttgcaaagctaggggttctgaccttcgtgttcattttaagaatacacgagaaactgcctttgcaatccgaaagctacctttgacgaaggcaaaaaggtacttcgaagatgttattgcccacaagcaagcaattccattcaggcgcttctgtggtggagttgggcgaaccgcacaggctaagaatcgccattctaatggacaaggccgttggcctgtgaaatcagcaaaattcattctcgatttgctcaagaatgccgagagcaatgctgaggtgaaaggcttggatgtagattcacttatcgtatctcaca

SEQ ID NO: 228232 - DNA, 468 bp, Gossypium hirsutum
gggaacgctgaagcgccttcatgcaccgccccaatattcccgatctgacccacgcgttcgctagtagctgacattttgcatctaaggatggcaaacaacaatgtgggctgagcggatcccattctcttccaatgttgctcatgcatgtaagctatgcacgcatgaacattacatcaaagctggccctggaatctgggatgtaacctcttattcttgttgctcaccggcaaatctttgccactactagccattggtgcttctgactttttcttagagcggaaaacaaggcctacgctgaccatgccaattcttttccagattttcttatgctcactgacaggggcaacagcaaaccaggttttttattttgtagggctgcaaaatactactgcaacgattgcatgtgcattgaacaatgtactgccagcagccacatttcttctcgcagccatttgcaggcaagaagct

SEQ ID NO: 228233 - DNA, 406 bp, Gossypium hirsutum
tcggaaaaaaatgggagatcagttagcgaaaggagaagaattcgtgaagaaagcagagaaaaagctaaatggttggggcttgtttagttctaaatacgaagacgccgccgatttatttgataaagctgctaattgcttcaagcttgccaaatcatgggacaaagctggatcaacttatgtaaagttggcgaattgccatttgaaatcagacagcaagcatgaaacagctcaagcttatgttgatgctgctcattgttataagaaaacagctacaaaggaggctatatcttgcttgcagcaagcagtgaacttgttttgtgatattggaaggctaagcatggctgcaaggtattataaggaaattgctgaattatacgagtctgaacagaacattgagcaggccatg

SEQ ID NO: 228234 - DNA, 423 bp, Gossypium hirsutum
atggctgaacaactcaaccttctctgcacagtgggtccagcatcctttgaagcatgagttcttaccaggagaagcagacctttaccccaccacctcagcttcaacagcagcaggtgaaacaacccagccagcctccacctcaggaaccatttgttcccataaccaaggagccatgccacccaaaggttccacaacctggaaacacaaagattccagagccagattgcaccaaggtccctaagccaggctacaccaaggaccctgagccaggcagcaccaaggtccctgacaaaggctgcaccaaggtccctgagccaggtagcaccaaggtccctgacaaaggctgcaccaaggtccctgagccaggcagcaccaaggtccctgagccaggcagcaccaaggtccctgacaaaggctgcatca

SEQ ID NO: 228235 - DNA, 422 bp, Gossypium hirsutum
attcctgaagtaaagcaagacacagtgtcagaaccagtcacacgtgcatctcttgctgccttacagagtgatgtgcagccagtgggccatgattatgtggaggaggtacgaaacgatgaaggaaaagtaattcgcttccattgtaaattatgtgagtgcagctttaatgatcccaatgctaaggagatgcacttaaaagggcgaagacacagacttcaatataaaaaaaaagtaaatccagatttgcaagtagaagtaaagcctagtattcgagcaagaaagattcaagaagagaaaatgaggaagcaaatgcagaaggaggagtactggcgaaggcgagaagaagaggagcgttggagaatggaaatgagacgttatgaagaggacatgtactggagaagaatggaggaagaacagcatca

SEQ ID NO: 228236 - DNA, 399 bp, Gossypium hirsutum
atgagtttgaaaaacaagatgaattaaagcgatctgccatgagagcgagagcagcactgctgaccagtccaaaagcaaaaaagagtccactgatgagtgaatttcagtcacagatcagttctaaccctgagctggcggctatctttgaaagtattcagaaagattcatcatctactaacttagaatcaatggacactagttagatggttgatcaccatggggaccattacagatgaccatacaatgcactgaattgacaggttaatcataagacatggaaagagaagtgtctaaaagcttcaaaatgttccacttttttttccttcgtggagacttgatgcttggctttcttccattgaagtactgtagcatttatgtcagaaatgtgtattttcataa

SEQ ID NO: 228237 - DNA, 524 bp, Gossypium hirsutum
  unsure (1)..(524): unsure at all n locations
cgacactatagtaacaagctttgtacaaacaaagcaggcttggtacccggtcacggaatgtcccgggtatcagcgtatccgtcctcgcagagcaccagagctctcgctctttgcccggtctcgccgccctgttcacaccgcgcgcgccaggctcgctcatgttnnatgattgatatcgctcgcgccttcgttgtcgacagacggcttccggcattgtgccaaggggccggcttcgctgggccgacgagtgccccccgggcccgtcttccctctccatcgtggggnncgccccaggcaccagggcgtgatggntgggcatcggtgtcagaaggattcatattgtgtggcgacgaggctccagagcaaggagaggcanttctcaaccctgaagtactcccatcgagcacggctatcgtcaccaactgggacgacatggagaagatctggcaccacaccttctacaatgagctgcgtgtggcttctgaggagcaccccgtgctgctgaccgaggccctcctgaaccc

SEQ ID NO: 228238 - DNA, 411 bp, Gossypium hirsutum
atgtgagaggaacgtggttttctcctctctccgccatggcgtgtggtcgcccactgatatcggtgtgctccgaaaagggggagtcatctggcaaaaatgtcactttgcctgctgtattcaaggctcctattcgaccagatattgtgaactttgttcacaccaacctgcgcaaaaacaacagacagccctacgctgtcagtgaattagcaggtcatcagaccagtgctgagtcttggggtactggcagagctgtggctcgaattcccagagttcgaggtggtgggactcaccggtctggccagggtgcttttggaaacatgtgtcgtggaggccgaatgtgtttaccaaccaaaacctggcgccgttgcatcgtatagtgaacacaacccaaaaacgatatgccctctgttc

SEQ ID NO: 228239 - DNA, 418 bp, Gossypium hirsutum
atgtgaaactggtcgatccaagggatatggatttattacattttctgattcagaatgtgccaaaaaggctttggaacaacttaatggatttgaactagcaggaaggccaatgaaagttggtcatgttactgaacgtactgatgcttcgagtgctagttcatttttggacagtgatgaactggaaaggactggaattgatttgggaacaactggtcgtcttcagttaatggcaagacttgcagagggtacaggtttgcagattccaccagcagcacagcaagctctacagatgagtggctctttggcatttggtgctgtggcagaattctcttttgttatagatttgcaaacaagactttcccagcagactgaagcttcagctttagctgcagctgcctctgttcagccacttgcaaca

SEQ ID NO: 228240 - DNA, 414 bp, Gossypium hirsutum
atcgtcaacagatcaaagcagcatatctccaggaaacaggaaagcccctggatgaaacactgaagaaagcccttatgggtcaccttgaggaggttgttttagctctgctaaaaactccagcgcaatttgatgctgatgaacttcgggctgccatgaagggccttggaactgatgaagacactctgattgagattttggcatcaagaactaacaaagaaatcagagacatttacagggtctacagagaggaactgaagagagatctggccaaagacataacctcagacacatctggagattttcggaacgctttgctttctcttgctaagggtgaccgatctgaggactttggtgtgaatgaagacttggctgattcagatgccagggccttgtatgaagcgggagaaaggagaa

SEQ ID NO: 228241 - DNA, 366 bp, Gossypium hirsutum
  unsure (1)..(366): unsure at all n locations
tcgcccacgcgtccgggcagttaaaggaagtgttgggtaccttgaccctgggtgtttcanaanacaacaactgacagagaaatctgatgtgtattcatttggtgtggtcttgtttgaagttctttgtgcaagaccagtgatcgatcccactcttccaagggaaatggtaaatctagctgaatgggcaatgaaatggcagaagaaaggacagctggagcaaataattgatcctagtctcaaaggaaacatcatgcctaattctttaaggaagtttggagaaacttcctataaatgtttagcttattttggtgtctacaggcccttcatgggagaagttttatggaacctgtagtatgctctttaact

SEQ ID NO: 228242 - DNA, 328 bp, Gossypium hirsutum
atgcttaatccagacaactctccaatcccaaatgaagttgtccaggtgcatctgaaggacaaagtggtgggcaactacaccacagatgcaaatggcatcgctcagtttttcttggacacatctacgtttacatacccaaatatcactttgaaagcagcctataaggccaatgaaaattgcgaggctcatggctgggtgttgcctcaataccctcagcccgagtactttgcataccgattttactccaagactaacagcttcctaaagattgtccaagagatggaagaactgagatgcaaccagcaaaagaaggtgctagtgcactaca

SEQ ID NO: 228243 - DNA, 406 bp, Gossypium hirsutum
atctcaaagcctccatccggacctcggctctgctctccggcttcgccatggtggcaatggtggaggtgcagctggacgctgaccacgactacccgccagggctgctcatcgccttcagtgcctgcaccacggtgctggtggctgtgcacctgtttgcactcatgatcagcacctgcatcctgcccaacatcgaggcggtgagcaacgtgcacaacctcaactcggtcaaggagtccccccacgagcgcatgcaccgccacatcgagctggcctgggccttctccaccgtcatcggcacgctgcttttcctggccgaggtcgtgctgctctgctgggtcaagttcttgcccctcaagaagcagccaggccagccgaggcccaccagcaagccccccgccagtggtgc

SEQ ID NO: 228244 - DNA, 336 bp, Gossypium hirsutum
atgaactgatctgctcacactcgctggcttgtgcatcaggactggctttttctcctgactcacagggcaaaggagctctctgtgaacgttaagtccgtccccagcgcttggaatcctacggcctcctcagccggatcccctcagccttccaggtcctcaacctccgcggacgctgagcgatggcctccatggggctacaggtgacgggcatcgcgctggccgtcctgggctggctggccgacatgctgtgctgcgcgctgcccatgtggcgcgtgacggccttcatcggcagcaacatcttcacctcgcagaccatctgggacggcctgtgtatga

SEQ ID NO: 228245 - DNA, 385 bp, Gossypium hirsutum
tatccggaaagaagacatggctgtgcatgtccgtcgtgaccatgtggttgaagactcctatcgggaggtgcatcgcaaatcccctgaagaaatgaagaatcgattgtatatagtgtttgaaggagaagaagggcaggatgctggcgggctcctgcgggagtggtacatgatcatctctcgggagatgtttaaccctatgtatgccttgttccgtacctcacctggtgatcgagttacctacaccatcaatccatctttccactgcaaccccaaccaccttagctacttcaaggtttgtctgacgcatttgtggccaaagcttgtatatgacaaccctacttctaggagttgctactttactttgatccttttacaaacacaattt

SEQ ID NO: 228246 - DNA, 402 bp, Gossypium hirsutum
tcggagcaaaacgaaccaagatggaaggcttaggggtaaagctcccttcttttccatttctaagccctaatatttcatcatcatcttcttcttcgacttttcggcttggtttccgccgcttatccgcttcgacttcagccgccgttaaagaaggttccggctcattaggccaattaacccgacccgacttccccatactccatcaggaagtaaaccggtcgaagcttgtttattcagataatgcggcaacctcccagaaaccaacggcagtgtctaaatctctgcagaattattatgtagcttacaattcaaatgctcatagaggaatccactacttgagtgccaaggcaacttattaatattagttggcacgcaagaatgtggcagcttttattaatgcat

SEQ ID NO: 228247 - DNA, 250 bp, Gossypium hirsutum
atggaaacccaaggttgtggtatgccgctttactgtctttcacaagcgccttttatatcctgtcaggcatctgtattgggctgctctatacatactacaccaaaccagatggctgcacacaaaacaagttcttcatcactattaacctgatcctctgcgttgacgcttctattatatcgaaccacccacaaaatcaggtacaccagccctgcttccgcctattgcaaccctatcttatcaccctttacac

SEQ ID NO: 228248 - DNA, 392 bp, Gossypium hirsutum
tcgcccacgcgtccggttttgttcggactgcaagcggaacacagaggtcgttttcgaccattccgccggcgacaccgtctgttcggagtgcggcttggtcttagagtcgcattctatcgacgagacatcggagtggagaaccttcgccaacgagtccggcgataatgatcccgtccgtgtcggcggtcccaccaatccgcttttggcggatggcggtttatccaccgttatcgctaagcctaatggtgcttccggggagttcctctcgtcctcgctgggtcggtggcagaatcgcgggtcgaattcggatcgggggttgattctcgcttttaagactattgctacaatgtctgataggttgggtcttgtcgcgaccattaaggatcgagcca

SEQ ID NO: 228249 - DNA, 418 bp, Gossypium hirsutum
atatcgagttcaccatgaattcactcagtgaagccaacaccaaggtcatgttcgatctgttgcaacagttcagaaaatcacaaaagaacaacaccttctattcccctatcagcatcacaacagcattagggatggtcctcttaggggccaaagacaacactgcacaacaaattaacaaggttcttcacttcgatcaagtcccagagaacaccacagaaaaagctgcaacatatcacgttgataggtcaggaaatggtcatcaccagcttcaaaagcttctgactgaattaaacaaatccactgatgcatatgagctgaagatcgccaacaagctcttcggagaaatgacgtttcaatttttacaggaatatttagatgccatcaagaaattttaccagaccagtgtggaatctgttga

SEQ ID NO: 228250 - DNA, 402 bp, Gossypium hirsutum
  unsure (1)..(402): unsure at all n locations
tcggtttggaacctggtatgtggtggcgcttaccggttgtttctccgatggcggttcaagaattatgatatgagaaaggttattagaaaaataacanccattcttcatatccttattctatnaacaaacatgtcatctgccttgcttgcaattagaacgttggttttatggagtcccaattatttcaatttcaacttgcttgtgcttacctccaattatctgcttttatgctgctgctaatcacatccgtcgaggtgaggctgaattgatgattgctggtggaactgaggctgcaatcattcctattgggctgggaaggtttgatgcctgtagggcattgtctcaaagaaatgatgatcctcgaactgcttcaagaccatgggacaaagatcgagatggctt

SEQ ID NO: 228251 - DNA, 418 bp, Gossypium hirsutum
atgccgcatcctgaatgagatgcgcgaccagtacgagcagatgggagagaaaaaccgcagagatggggaggcctggttcctgagcaagaccgaggagctaaacaaagaagtggcctccaacagcgaactggtacagagcagccgcactgaggtgacggagctccggagggtgttccagggcctggagattgagctgcagtcccagctcagcatggtatgaaggacccggtacagcagcagcccccaagccaccagtaatggccaccaccccctcaacaagccacaatctagttgcacctttcttttctcaggatgggaccagatgactcatgggacccattatatagacagagaaattaagccctagaatagtgggctagcttttttccatattgtctggcccgtcagtaccccaact

SEQ ID NO: 228252 - DNA, 249 bp, Gossypium hirsutum
tcgatttgtttctcgtcctcttaaccataggctctgtttgcagttaagaggggcaggtcatggctactaccacggtcccagccgccgcatggcagctatctcctaaagacgccgatatccagatgatgttggctgcccagggccatctctgtaccaaaaactgacattgctcataacagcgttacgtcttcaagcgtcgcaatgacggaattttcatctttaaccttggcaagacctgggagaagcttc

SEQ ID NO: 228253 - DNA, 168 bp, Gossypium hirsutum
atgcggggcatgaagctgacgctggcctgcccgggccccctggcggacagctcggtcacactgtcgcccgtggactcgctggactccccgcggcctttccgtgggccccctgcttcccctggtggctttccccttgaggggccctatgcagctgccactgccactgca

SEQ ID NO: 228254 - DNA, 394 bp, Gossypium hirsutum
atgagaaaggcatcatgcagaaggtggctggtgagcgttacgtgtgcaagtttgtgtgcgagcccggggccctcttctctttggccttcccggacaatcagcgtccagctctcaaggccgagtttgaccggcctgtcagtgaggaggacacagtccctttgtctcacttggacgagagccccgcctacctcccagagctggctggccctgcccagccgtttggccccaagggtggctactcttactagcccccagcggctgttccccctgccgcaagtgggtgctgccctgtgtacatatagatgaatttggtgttggggaaaccttcatctgaaacccacagatgtctctgggtcagatctccactgtcctaccagttggcctagcccagact

SEQ ID NO: 228255 - DNA, 392 bp, Gossypium hirsutum
  unsure (1)..(392): unsure at all n locations
atggacgctctcagctctcggcgcacggcccagcttccttcaaagtgtctactgttcatgaaatcgggtgcaagctcagcttggagggtgatcactctacacccccaagtgcatatgggtcagtcaaagcctacaccaactttgatgctgagcgcgatgctttgaacattgaaacagccatcaagaccaaaggtgtggatgaggtcaccattgtcaacattttgaccaaccgcagcaatgcacagagacaggatattgccttcgcctaccanagaaggaccaaaaaggaacttgcatcatcactgaagtcagccttatctggccacctggagacggtgattttgggcctattgaagacacctgctcagtatgacgcttctgagctaaaagct

SEQ ID NO: 228256 - DNA, 184 bp, Gossypium hirsutum
atagatcaacattcaaaaccttaacgaccggcttgctttctaacttgagaaagggcccccccttgaggagggcaacccccaccttgaggggaaaatcccgtacttgcacctgaaacagaacccaacttggccttagcgggactaccagccctaacacaagaacatttaaaagcttcgggacaag

SEQ ID NO: 228257 - DNA, 310 bp, Gossypium hirsutum
atggcgggggtagcggctgtgctgctcgtttctctgagccatccagtgccatcctcgtcggtgcagggacacacgcgctagacgtctacatgactgagcagatgacccttcatggcaccctcaagggccacaacggctgcagaacacagatcgctactaccccgcaactaccggacatgagcccactcggctctctagataagaccattatcacgtggaaactgaccagggatgagaccaactatggaatttcacagcaagctctacagggtcactcccactttggtagtgatgcacatatcttctcaga

SEQ ID NO: 228258 - DNA, 357 bp, Gossypium hirsutum
atggacgagcggcgtttccgggtggccgaccaggatggggactggatggccactcgggaggagctggcgggcttcctgcaccccgaggagttccctcacatgagggacatcgtgattgctgaaaccctggaggacctggacagaaacaaagatggctatgtccaggtggaggagtacattgcggatctgtactccgccgagcctggggaggaggagccggcatgggtgcagacggagaggcagcatttcccggactttcgggatctaaacaaggactggcacctggacgggagtgaaagtggccactgggtgctttcctcgtaccaagaccagcccctggtggaaggcaactcacct

SEQ ID NO: 228259 - DNA, 366 bp, Gossypium hirsutum
atgccattcctagagtagaggcgatgggcccatttgtttggtgctggcaccaactcgggaactggccgaacaggtgcagcaagtagctgctgaatattgtagagcatgtcgcttgaagtctacttgtatctatggtggtgctcccaagggaccacaaatacgtgatttggagagaggtgtggaaatctgtattgcaactcctggaagactgattgactttttagagtgtgggaaaaccaatctgagaagaacaacctatcttgtccttgatgaagcagacagaatgcttgatatgggttttgaaccccaaataaggaagattgtggatcaaataagacctgataggcaaactctaatgtggagtgc

SEQ ID NO: 228260 - DNA, 404 bp, Gossypium hirsutum
atgggatgaccccaatgttaaccccttttcttccacctcaaaaatgcacgagtctcccaaactgcggcaacaatcatacagactttgacccagacacctgtgatgagtccgctgacccctttaagacatactgtaggacccccagctcaccttctaaattctcagactcctttgagatcccagccagagctatcgaagccaatggagtggacggggatgggctaaacaagcccgacaagaagaagaagacgcccctaaagacggtgaaaaagtcgcacaaaacggtctcctgtctctgatccacctttccaggaccccaccgcagctgctacaccagaaacaccaccagtgatctctgcagtggtccacgccacagatgaggaaaagctggcggtcaccaacca

SEQ ID NO: 228261 - DNA, 241 bp, Gossypium hirsutum
atgccggatttttgtgtgtggcggacatggcacaataggctgggggctagagaccattggcaaagggaacttgccggaacagcctcctgttgctgtgtagcccctgcgtactgagaaattatcttgctcgatgcctaaaatggggaggccgatatgaacgacagaatctggcacagatcctcaaggctttagaggcacgtacagtggttcatattgatcgatgctcccttgagggcattcc

SEQ ID NO: 228262 - DNA, 376 bp, Gossypium hirsutum
atcggccttctcgctctgggtctccaggccttcaaccgggcgtgagtcttctcgagaatgttgggggcaccaaaccgttagcggatctaaccaaaacgttctcttacttctgcctcccacccagcggctcttcaccttcaccattagcctggacatacagtgtgagcagctgaatgacgctaggtgggccgagctccttcccctgctccagcagtgccaagtggtcaggcttgacgactgtggcctaacagaggcacggtgcggcgacatcagctcggcactccgagtcaaccctgcactgacagaactcagcctgcgcaccaatgagctgggtgatgccggcgtgcactgcatgctccagggcctgcagagcccc

SEQ ID NO: 228263 - DNA, 419 bp, Gossypium hirsutum
atcggcacgcgaggatcccacaacacaatttgctttcacgtgtgcgtacaaagagctgaagcggctactgaactagtcactagccatactgtcacggtcccaccatgcctatctgagaccccccaagcagaagtggggcccacaggctgcccccacctctcagggccacattcggcacaggggagcctggagaaggggctcccacgggataaggaagccaaggagcccctgtggatccggcccgatgccccgagcaggtgcacctggcagctgggccggcctgcctctgagtccacgcatcaccacactgtcccggaaaaatctccaaaaatcttgccagatattctgaagaaaattggggacacccctatgatcagaatcaacaagattgggaagatgttcggtctgaagtgtgagct

SEQ ID NO: 228264 - DNA, 421 bp, Gossypium hirsutum
atgccaggtaggggaacgcagcggccagacacctcagcgctacctggcagaactggatttctctccgaccggcggcttaagtctgactgccagcctgcctgccacagccggactccaccactccggtagcctcatggctgcaacctgtgagattagcaacatttttagcaactacgtcagtgcgatgtacagctcagaggactccgccctggcccctgttccccctgctgccgcctttggggccgatgacttggtgctgaccctgagcaacccccagatgtcattggagggtacagagaagaccagctggtcgggagaacagccccagttctggtcgaagacacaggttctggactggatcagctaccaagtggagaagaacaagtacgacgcaagcgccattgacttctcacggtgtgac

SEQ ID NO: 228265 - DNA, 458 bp, Gossypium hirsutum
cacatggaacaacaaagacacaaactgcatgccggtaccgaattcccgggattgaacgcaacatgaaggtgctccttgccgccgccctcatcgcggggtgcgtcttcttcctgctggtgccgggaccttctgcggccgatgagaagaagaaggggcccaaagtcaccgtcaaggtgtattttgacctgcgaattggagatgaagatgtaggccgggtgatctttggtctcttcggaaagactgttccaaaaacagtggataattttgtggccttagctacaggagagaaaggatttggctacaaaaacagcaaattccatcgtgtaatcaaggacttcatgatccagggcggatacttcaccaggggagatggcacacgaggaaagagcatctatggtgagcgctttcccgattgagaactttaagctgaagcactactggcccggctgggtgagcat

SEQ ID NO: 228266 - DNA, 412 bp, Gossypium hirsutum
atgacgtgagcaacagggaggaggccacagagaagccgtggctgaagtccctggtgagccggaaggatcacgtcctggacatcatgctggaggccgtgaacaaccttagagattcaatgcccaagctccaaatcagggctccagaagcccagccgactctgttctccataaaccagtcctgcctccctgggttctataccccagctgaactaaagcccttctgggaacggccaccacaggatcccaatgcccctggggcagatggaaaagcatttcagaagagcaagtggacccccctagagacccaggaaaaggaagaaggctataagaagcactgctttaatgcctttgccagcgaccggatcttcctgcagaggtccctagggccagacacccgaccacctgagttagt

SEQ ID NO: 228267 - DNA, 339 bp, Gossypium hirsutum
atcccacttctctcatgctgcagtgcccgccctaccactatgtcggaacaattcatttacggggccacacactttttatccacacgcataatcatctacatctacaacacagtctgtgcttcgaaccagcgtgtcaagctactgctgcagatccaccacgccagcaagcagatcaacagctacacgcactacaaggtcatcactgactgcatcgttcgtatccacaatgagcagggcttgctgtctttctggagaggcaacctggccaactttattcgctacttgctcactcaagccctcaacttcgccttcaaagataagtacaagcatatctttctt

SEQ ID NO: 228268 - DNA, 326 bp, Gossypium hirsutum
atgcggcggttaccggccacactgccgcacaggacaactggacgtgtcccaccaacaagatgaccgtgtgcagccccgacggccccggtggccgctgccagtgccgtgcgctgggctcaagcgtggcggtcgactgctccacgctgacctccaagtgtctgctgctcaaggcgcgcatgagcgctcccaagaacgcccgcacgctggtgcggtcgaatgagcaccctctcgtggacaacgatggtctctacaacccctactgtcacccatacggccgcttcaaggcgcgccagtgcaaccagacgtcggtgttctggtgcgtgaac

SEQ ID NO: 228269 - DNA, 349 bp, Gossypium hirsutum
atgcattgtgtgcccttttgtggacatagaggtggctggagctgagtttgacagcaccaagcataatacagtgattgtggcggacaatggactcaaccctgtttggcctgtcaagccctttcacttacatatcagtgaccctgcatttgcctttgtgcgctatgtggtgtctgatgaatacatgtttagtgaccagaatattctggctaaagctacttttccggttaaaggtctgcatacaggatacagagcagtgcctttgaatatcaactacagagtggatctgacgttggcctccctgcttgtcaagattgacattttacctgacaagcaggaaaatggtgacctt

SEQ ID NO: 228270 - DNA, 370 bp, Gossypium hirsutum
cttcgacagccattagcatctctccctgaagaagttttaacgcgatagatcaagaagcgttacgtcagaaaacccaagaagaaaccatgagtggtaactcggaggcgaagtctttgtttgatgaattgcgcttcgataagggagatttcttcgacctgggacaccctcttctcaactggtctgctcagagctttgtcaaaactgctggtattggagcacttcaagctatcgccagggaggcttgtcatatagcttttgaaggaactggacccattaaatcgactgatatcactggtgtcaagaataagaagcaaggcttccctggcctcagaggggaaaccagtcgaaattctcttgaagcaatggtgaa

SEQ ID NO: 228271 - DNA, 381 bp, Gossypium hirsutum
atcagccaggcgcgcactgcacagctctcttctctcgccgccgcccgagcgcacccttcagcccgcgcgccggccgtgagtccttggtgctcgcccgccggccagacaaacagcccgcccgaccccgtcccgaccctgcccgtcctccggaccctggccgccccgagcggagcctggagcaaaatgatgcttcaacacccaggccaggtctctgcctcggaagtgagtgcttctgccatcgtcccctgcctgtcccctcctgggtcactggtgtttgaggattttgccaacctgacgccctttgtcaaggaagagctgaggtttgccatccagaacaagcacctctgccaccggatgtcctctgcgctggagtcagtcacg

SEQ ID NO: 228272 - DNA, 385 bp, Gossypium hirsutum
atgcaactgcctaagaggcgcggcgtcgcaccgcccaaagctgaggaagtcggcgccagttcgtgaggctccgggccgccagtcagagccatgagctacggtcgcccccctcccgatgtggagggtatgacctccctcaaggtggacaacctgacctaccgcacctcgcccgacacgctgaggcgcgtcttcgagaagtacgggcgcgttggcgacgtgtacatcccgcgggaccgctacaccaaggagtcccgcggcttcgccttcgtccgcttccacgacaagcgggacgccgaggacgctatggatgccatggacggagccgtgctggacggccgcgagctgcgggtgcaaatggcgcgctacggccgccccccggactcac

SEQ ID NO: 228273 - DNA, 382 bp, Gossypium hirsutum
atggaacttgggaagaagacagatggttattcaggggcagatataagtatcatcgtacgtgatgcacttatgcagcctgttaggaaagtacagtcagctactcattttaaaaaggttcgcggaccttcccgagctgatcctaaccatcttgtagatgatctgctaacaccttgctctccaggtgaccctggtgccattgaaatgacatggatggatgtccctggagataaacttttggagccagttgtttccatgtcggatatgttgcggtcactatctaacacaaaacctacagtcaatgaacatgacttgttgaaattaaagaagtttacagaagattttggtcaagaaggctaaaccaaagacaaggaagatgcttacc

SEQ ID NO: 228274 - DNA, 388 bp, Gossypium hirsutum
atgggcgggccgtcatcatgtttggcgtcccctacgtctacacacagagtcgcattctcaaggcacggctggaatacctgcgggaccagttccagattcgtgagaatgactttctcaccttcgatgccatgcgccatgcggcccagtgtgtgggtcgggccatccggggcaagacggactacggcctcatggtctttgccgacaagcggtttgcccgtggggacaagcgggggaaactgccccgctggatccaggagcacctcacagatgccaacctcaacctgactgtggatgagggtgtccaggtggccaagtacttcctgcggcagatggcacagcccttccaccgggaggatcagctgggcctgtccttgctcagcctggagca

SEQ ID NO: 228275 - DNA, 362 bp, Gossypium hirsutum
taacactagtgttttcaacaataaattaatcatagctgcagcttgtttcttttaaactctaaatataaaggaggccaaacatgccgcctcgtagataccaatttgggagggctgatgaggccactcatcccgactccatgagagccaccttggctgaattcctctccactatcattttcgtctttgccggcgaaggctcaattcttgctcttgacaagatgtacaaggatacgagtgcgacgcctgcaagactggtgatgatagcacttgcgcatgggttgtctctgtttgcagctgtggcatctagtgtaaacgtatctggtggccatgtgaatccagcagtcactttcggtgccttgctc

SEQ ID NO: 228276 - DNA, 388 bp, Gossypium hirsutum
atggagattgacaatgccaggctggctgcggatgacttcaggctcaagtatgagaacgagctggccctgcgccagagcgtggaggctgacatcaacggcctgcgccgggtgctggatgagctcaccctgtctaagactgacctggagatgcagatcgagagcctgaatgaggagctggcctacatgaagaagaaccacgaggaggagatgaaggaattcagcaaccaggtggtcggccaggtcaatgtggagatggacgccaccccgggcattgacctgacccgcgtgctggcggagatgcgggagcagtacgaggccatggcagagaggaaccgccgggatgctgaggaatggttccacgccaagagtgcagagctgaacaaggagg

SEQ ID NO: 228277 - DNA, 387 bp, Gossypium hirsutum
atggcgtcgcccttcagtggagcgctgcagctgacggacctggatgacttcatcgggccgtctcaggaatgcatcaagcctgtcaaagtggaaaaaagaccgggaagtggcgtggccaagattcgcatagaagatgacgggagctacttccaagttaaccaagatggcgggacccggaggctggagaaggccaaggtctccctaaacgactgcctggcgtgcagcggctgcatcacctctgcagagaccgtgcttatcacccagcagagccacgaagagctgaagaaggttctagatgctaacaaaatggcggcgcccagtcagcagaggctggttgtagtctcagtctcgccacagtctagagcatcgctggctgcacggtttcag

SEQ ID NO: 228278 - DNA, 383 bp, Gossypium hirsutum
atgccgagagtcggagccattactgcaggaaaaggtcccgcagagctgagcagtcaagatgtgtgacttcaccgaagaccagaccgcagagttcaaggaggccttccagctgtttgaccgaacaggtgatggcaagatcctgtacagccagtgtggggacgtgatgagggccctgggccagaaccctaccaacgccgaggtgctcaaggtcctggggaaccccaagagtgatgagatgaacgtgaaggtgctggactttgagcactttctgcccatgctgcagacagtggccaagaacaaggaccagggcacctatgaggattatgtcgaaagacttcgggtgtttgacaaggaaggaaatggcactgtcatgggtgctgaaa

SEQ ID NO: 228279 - DNA, 379 bp, Gossypium hirsutum
attctgcacagcctggtgaaccacacaggcccgcgctctgacatgcagaaggtgaccctgggcctgcttgtgttcctggtaggcttgcctgtcctggacgccaatgacccagaagataaaaacagtcctttctactatgactggcacagcctccaggttggcgggctcatctgcgctggggttctgtgcgccatgggcatcatcattgtcatgagtggaaaatgcaaatgtaagttcggccagaagcccagtcaccatccaggggagactccacctctcatcaccccaggctcagctcataactgatgaagacggaccagctgaaagtgggtggaggaccgttctctgtccccaggtcctgtctctgcacagaaacttg

SEQ ID NO: 228280 - DNA, 387 bp, Gossypium hirsutum
atcgcgcgtcctgcccgtctgtccccgcaggtagtcgcccgccacagccgcgccatgaccacccagcagatcgtcctccagggcccggggccgtggggcttccgcctcgtgggcggcaaggacttcgagcagcctctcgccatttcccgggtcactcctggaagcaaggcggctctagctaatttatgtatcggagatgtaatcacagccattgatggggaaagtactagcaatatgacgcacttggaagctcagaacagaatcaaaggctgcacagacaacatgactctcactgtcgccagatctgaacataaagtctggtctcctctggtgacggaggaaggggggaagcgtcatccatacaagatgaatttagcctctgaaccc

SEQ ID NO: 228281 - DNA, 367 bp, Gossypium hirsutum
ggaagaggaacgcttacgttcttgacacatgaaaacaaagagtcctacaatatagtaccgggagttgtagtcaaagtcccagcaggaagcactgtgtacttggctaaccaagacaacaaggaaaagctaatcatagcagtgcttcaccgccctgttaataaccctggacaattcgaggaattcttcccagctggaagccaacgccctcagtcatatctccgagcctttagtcgtgaaattcttgagcctgccttcaatacacgaagtgagcagctagacgagctgtttggtgggaggcaaagccgtcgaaagcagcagggacagggaatgttccgtaaagccagccaggaacaaataaaggcattga

SEQ ID NO: 228282 - DNA, 384 bp, Gossypium hirsutum
atgggattttatctgtcccgatttttatgaagctgtttgtggcacagatgggaaaacatatggcaacagatgtgaactgtgtgctgagaatgcgaaaaccgggtcccaaattggtgtaaagagtgaaggggaatgtaagagcagtaatccagagcaggatgtatgcagtgcttttcggccctttgttaaagatggaagacttggatgcacaagggaaaatgatcctgttcttggtcctgatgggaagacacatggcaataaatgtgcgatgtgtgctgagctgtttttaaaagaaactgaaaatgccaagcgacagggtgaaactagaattcgacgaaatgctgaaaaggatttttgcaaggaatatgaaaaacaagtgagaaa

SEQ ID NO: 228283 - DNA, 368 bp, Gossypium hirsutum
cgaggcttgccctcgtaatttccagcagcaactccgagaagtggattcctccgttgttgccttcgaaataaacaaaggatcgatcttcgtaccgcactacaattcaaaggctacattcgtggtcctcgtcaccgaaggaaacggccacgtcgaaatggtctgccctcacctttctaggcagagctcacactggtcctcccgagaggaagaagaacaagaagaacaagaagttgaaaggagaagtggacaatacaagagagtgagagcccagttatcaaccggtgacctatttgtagtcccagcaggccatccagtcacattcgttgcctcccaaaacgaggacctaggattgctcgggttcggactct

SEQ ID NO: 228284 - DNA, 366 bp, Gossypium hirsutum
gcgaaccttcttctccactcctccatctatatatatagttagaggcggaagggaggaagtgacattggcaatatggctttgctgcattcttacttcttaagcgctggtgagtgtgtttcagggtccatggtcttggcagtggcaatgtccattgcttcctattttctgatccctatggtgtttggtggtcgacataaaaactggaagaatgcaccaccaggccctgttggttggcctatccttggcagccttccacacctctccaatcgtctccatgaagatttctttcacatggccaagatctacggtccccttttcagtctaaacttgggaataaagccggccatagtggtgtcatcaccggaa

SEQ ID NO: 228285 - DNA, 382 bp, Gossypium hirsutum
atccgcactaatagcggccaccccggcagcggcggcagcagcagcgacgcagcggcgacagctcagagcagggaggccgcgccacctgcgggccggccggagcgggcagccccaggccccctccccgggcacccgcgttcatgcaacgcctggtggcctgggacccagcatgtctccccctgccgccgccgcctgcctttaaatccatggaagtggccaacttctactacgaggcggactgcttggctgctgcgtacggcggcaaggcggcccccgcggcgccccccgcggccagacccgggccgcgccccccagccggcgagctgggcagcatcggcgaccacgagcgcgccatcgacttcagcccgtacctggagccgct

SEQ ID NO: 228286 - DNA, 363 bp, Gossypium hirsutum
gcgagagattcgccttcaacttattgagccaaacccctcgctactccaaccaaaacggccgcttcttcgaggcttgcccacgtgaattccggcaactcagggacatcaatgtcaccgtttcagccttgcaattaaaccaaggatcaatctttgtgccgcactacaattcaaaggctacattcgtgatccttgttaccgaaggaaatggatacgctgaaatggtttctcctcatcttcctaggcaaagctcatatgaagaagaagaagaagaagacgaagaagaagaacaagaacaagaagaggaaaggagaagtggacaatacaggaaaataaggtcccggttgtcgcgtggagacatatttg

SEQ ID NO: 228287 - DNA, 364 bp, Gossypium hirsutum
ggaattttgcagcaacttgattacggtatagtccaatgccaggctctggttttggcacccactagggagttggctcaacagatcgagaaggtgatgcgggcacttggtgattaccttggtgtgaaggtccacgcttgtgttggtgggactagtgttcgcgaggatcagcgaattcttcaaagtggtgttcatgttgttgtcggtactcccggtcgtgtcttcgatatgttgagaaggcaatcactccgtccagattatattaagatgtttgtcttggatgaggctgatgaaatgctctcccgtggttttaaggatcagatctatgacatcttccagcttcttccgggcaagattcaggttgggg

SEQ ID NO: 228288 - DNA, 361 bp, Gossypium hirsutum
ctcactcaacattcccatttccaatctccagctcccaaggtaaatatgccgatcagaaacatagcggttggccggcccgaagaggctactcaccccgatgctctcaaggctgctttggctgagttcatctcaaccttgatcttcgttttcgctggatcgggctcaggaatggcctttaacaagttgactgacaacggagcaaccaccccggctggtctcgtagccgccgctctagctcatggcttcggtcttttcgtcgctgtctccgttggcgccaacatctcaggtggccacgtcaaccctgccgtcaccttcggtgcttttgttggcgggaacatcactctcttgcgcggcattcttt

SEQ ID NO: 228289 - DNA, 381 bp, Gossypium hirsutum
atggattcgaaacatcagtgtgtgaagctgaatgatggtcacttcatgcctgtcctgggatttggcacctatgcgcctgcagaggttcctaaaaataaagctatagaggccaccaaattggcaatagaagctgggttccgccatattgattctgctcatttataataatgaggagtacgttggactggccattcgcagcaagattgtacatggctctgtgcagagagaagacatattttacacttcaaagctttggtgcaattcccatcggccagagttcgttcgaccagccttggaaaggtcactgaaaaatcttcaattagactatgttgacctttatcttattcattttccagtgtctctaaagccaggtgaggaact

SEQ ID NO: 228290 - DNA, 369 bp, Gossypium hirsutum
acccttcctcgaagcttccaaagaacaaatcgaggccatgagtagccatgaggaaggcagcaaaggcggtggtttgtggccatttggaagtgagtcaaaatcagagagtgcattcaacctcttcagaaagcgtcagccttcacattgtaacagatatggtcagctctttgaagttgaagaagaagaattcaagggccttaaagacttcgatctcagggtctcctatgtcaacatcaccaagggatgtatgtcagccccattctacaactcaagggcaataaagatagccattgttgtgaaaggtgaaggatactttgaaatggtatcacctcctgtttcccccaagtccagtcaggaggattcagcagg

SEQ ID NO: 228291 - DNA, 365 bp, Gossypium hirsutum
cttgtttcaggtaagaatacttcgatatttgttgcgaacttgcctatgagcgcaactgaggaaatgctgaaggaggttttccaaaaatttggaccaattaaacccaatggcatccaagtcagaagctttaaggacaacaaaaactgctttgggtttgtagagttcgagtctgctacttctgtgcaaagtgctgttatggcttctcctattaaaatcggcaacaggcaggccaatatcgaagaaaagcgaggacccagcagtggtgggaaaccagggtatggtggttatagagatgaaaatggctaccgaaatgacaacttcagaggccgtgggaacttcaatggcagccgtaactttagaagaaa

SEQ ID NO: 228292 - DNA, 380 bp, Gossypium hirsutum
atggcctctcccgcccccctggtgctgagcttcagcgggaaccccctgcactgcaactgtgagctgctgtggctgcggcggctggcgcggccggacgacctggagacctgcgcctccccgcccggcctggccggccgctacttctgggcagtgcctgagggcgagttctcctgcgagccgcccctcattgcccgccacacgcagcgcctctgggtgctggaaggccagcgggccacactgcggtgccgggccctgggtgaccccgcgcccaccatgcactgggttggtcctgatgaccggttggttggcaactcctcccgagcccgggctttccccaacgggaccttagagattggggtgactggcgctggggatgctgg

SEQ ID NO: 228293 - DNA, 364 bp, Gossypium hirsutum
gccgcgaaggcctacaagctcaacaattcgctgcttctcttcactcctctaatgtcgaaaagaagctggagagtcttccttcgatggttgctggcgtttggtccgataacggtgctgcacagctggaggcgactactcagtttcgaaaattgctttcgattgagcgaagtcctccaattgaggaagttatacagtcaggcgtcgttccccgttttgttgagttccttggtagggaagattttccacagcttcagtttgaggctgcttgggcgcttacgaatattgcttctggaacctcagacaatacaaaggtagtaattgatcttggtgctgttccgatttttgtaaagcttcttgcttcacc

SEQ ID NO: 228294 - DNA, 363 bp, Gossypium hirsutum
tcttggtatccctaaatggagatcattatccattcactagtaaattggattttgattgtacgaataacatggtggaatacgaagcgtgcatcatgggtatccgcgcagccatagatcgcaagattaaagtgctagaggtgtttagggattctgcgctagtgatttatcaactcaagggagaatgggagaccagagacctcaagttaatcgattatcagaagctggtccttgaattggttaaagagtttgatgacattaccttctactacctttcacgagacgaatatcagatggctgatgctttggctaccttagcctccatgatcaaggtgaacaaacaagatgtcaaacccatctggttga

SEQ ID NO: 228295 - DNA, 381 bp, Gossypium hirsutum
atgcctcccgaacctcctcagccgcccggagccgcgcccggagcccggctatagaggctgcagtcgcagccgggagcccgcagcccgcgccccgagcccgccgccgcccttcgagggcgtcccaggccgcgccatggtgaaagtgacgttcaactccgctctggcccagaaggaagccaagaaggatgagcccaagagcggcgaggaggcgcttatcatcccccccgacgccgtcgctgtggactgcaaggacccagatgatgtggtaccagttggccaaagaagagcctggtgttggtgcatgtgctttggactggcatttatgcttgcaggtgttattctaggaggagcatacttgtacaaatattttgcactttaacc

SEQ ID NO: 228296 - DNA, 361 bp, Gossypium hirsutum
aagatggcttacattaattccctactcatcatcttctttgttttctgttttccttcaatggttctttccgaatcgttccgatcgattcaattgccaccgaatgtcacgggtcccgaatccattgcctttgagctggcaactggacgtttttacgtcggtgtaactgatggtagaattttgcaatataacggaccgactgttggatttgtggagtttggttctaccggtcgaaataggactaagacgatgtgcgatggcattactgatccggatttgggtccgatgtgtggaagaccattcggtttagggttccattacgctacgaatcagttgtatgtttgtgatgcataccttggtctca

SEQ ID NO: 228297 - DNA, 362 bp, Gossypium hirsutum
atatcaccacccgcgagctgggcacggtcatgcggtccctgggccagaaccccacggaggccgagctgcgggacatgatgagcgagatcgaccgtgacggcaacggcaccgtggactttcccgagttcctgggcatgatggccaggaagatgaaggacacggacaacgaggaggagatccgcgaggcctttcgcgtgttcgacaaggacggcgaccgcttcgtcagcgccgcggagctgcgacacgtcatgacccggctgggggagaagctgagtgaccaggaggtggacgagatgatccgggccgcggacacagatggagacggacaggtgaactactaggagttcgtccgtgtgctggtg

SEQ ID NO: 228298 - DNA, 378 bp, Gossypium hirsutum
atgccgggcaaatgccaacatggcagcggttggggctggtggttccaccgcggcggccgggccaggggcgctttccgcgggtgcattagagccggggactgctagtgcggctcacaggcgcctgaagtacatatccctagctgtgctggtggtccagaatgcctccctcatcctcagcatccgctacgcccgcacgttgccaggggaccgcttctttgccaccactgctgtggtcatggcggaagtgctcaaaggtctcacctgcctgctgctgctcttcgcacagaagaggggtaacgtgaagcacctggttctcttccttcatgaggctgtcctggtgcagtatgtggacacactcaagctcgcagtgccctctct

SEQ ID NO: 228299 - DNA, 363 bp, Gossypium hirsutum
gtacgaactctcgatttaacgcaaaataaattagttgaaattcctatggagatcagcgaactagtcaacatgcagcgactgattttagcctctaatcatattgagcaattaccaagtactatggggaatcttcagtctctgaaagctatgatacttgatgggaaccgaattacttctttgccagatgaattgggcgagctggtaaaactcgagaagttatcaatttctggaaatatgttaatgtccttgcccaatactattggcagtttgcgcaatttgtctctgcttaatgtgtctaataataaattgaagtatcttcctgaatcaattgggatctgctcttctttggaagaactgcaagca

SEQ ID NO: 228300 - DNA, 365 bp, Gossypium hirsutum
atggcgattaacccttctttgctctttctttcccttctttttctcttcaatggctgcctagctcgccagaccttttcgtcacagcagtcccaaaatgagtgtcaaatcaataggctccgcgcctctgcaccccagacccgaattcgctccgaagccggcaccaccgagtggtggaaccccaactgtcaacagctcaggtgtgctggtgtatctgtaatgaggcagactattgaacctaatggccttgttttgccttccttcaccaatgctcctcagcttctctacattgtccaaggaagaggtattcaaggtattgtgatgcctggatgtgccgaaacattccaggattcacagcaatggcagca

SEQ ID NO: 228301 - DNA, 382 bp, Gossypium hirsutum
atgccccagccagagaggaggtttttccgtcgtggctgggtgaccttcgaccgcagtgttaacattaaagagatctgttggaacctgcagaacatccgtctccgggagtgtgagctgagccctggtgtgaacagggacctgacccggcgcgttcgcaatatcaatggcatcacccagcacaagcagattgtgcgcaacgacatcaagctggcagccaagctgatccacacgctggacgacaggacccagctttgggcctcggaaccagggacgcctcccctgccaacgagcctgccctcacaaaacccgatcttgaagaatatcaccgactacctgatcgaggaagtgagcgctgaggaggaggagctgctggggagcagcg

SEQ ID NO: 228302 - DNA, 385 bp, Gossypium hirsutum
atacttaacagccacttgtttcatcccacctgggcattaggttgacttcaaagatgcctcagttactgagaaacattaatgggatcatcgaggccttcaggcgctacgcaaggacggagggcagctgcacagcgctcacccgaggggagctgaaaagactcttggagcaagagtttgccgatgtgattgtgaaaccccacgatccagccactgtggacgaggtcctgcgtctgctggatgaagaccacacagggactgtggaattcaaggaattcctggtcttggtgtttaaagtcgcccaggcctgtttcaagacactgagcgagagtcctgagggagcctgcagctctcaagagtctggaagcctccattctggggcctggca

SEQ ID NO: 228303 - DNA, 386 bp, Gossypium hirsutum
atggacaagatgcagctgctggagattatcacgactgagaaaacttccagagacaccagtgcttcagctgtagcagtcggtctcaagcaggggaaggtcatcattgtggttaaggatggacctggcttctatactaccaggtgccttgcgcccatgatgtctgaagtcatccgaatcctccaggaaggagttgacccgaagaagctggattccctgaccacaagttttggctttcctgtgggtgccgccacactggtggatgaagttggcgtggatgtagcaaaacatgtggcggaagatctgggcaaagtctttggggagcggtttggaggcggaaacccagaactgctgacacagatggtgtccaagggcttcctaggtcgcaa

SEQ ID NO: 228304 - DNA, 361 bp, Gossypium hirsutum
cccacgcgtccgcccacgcgtccgcggacgcgtggggtttttctccaatggcgaccgtctctccaactcctctgttgaaagatgagctcgacatcgtgattcccacgattaggaacttggactttttggagatgtggagaccctttttccagccttaccatctcatcattgttcaagatggtgatcctaccaagactatcaaggtccctgaaggcttcgattatgagctttacaataggaacgacatcaacaggattttgggtcctaaggcttcttgtatctctttcaaggattctgcttgtaggtgctttgggtacatggtttccaagaagaaatacatctataccattgatgatgactg

SEQ ID NO: 228305 - DNA, 361 bp, Gossypium hirsutum
ggcgattcggattccaggagggtgtcttcggcctcggattgctcggtggaggtgcgggctccaagtggagctaatgaactcaagctgcatttggccaaagttgagaaagattgtagaatttgccatttgggtttagagagcaacagccatgaatctggtgcccctattgaattgggttgttcttgcaaggatgaccttgctgctgctcataaacactgtgctgaagcatggtttaagatcagaggaaataagacctgtgaaatttgtcattctattgcacgcaacgtagttggagtgaacgaggtcgagtcgacagagcaaccaaacgagacaaacagttccactgcaaccactgcagtct

SEQ ID NO: 228306 - DNA, 351 bp, Gossypium hirsutum
atgatcaatagcaatgatgacaacggtgtgcttgctgggaattggagcggcacttacacgggtggtcgtgacccaaggaactggaacggcagcgtggagatcctcaaggactggaaaaaatctggcttcagcccagtccgatatggccagtgctgggtctttgctgggaccctcaacacagcgctgcggtctttggggattccttcccgggtgatcaccaacttcagctcaactaatgacacagaccgaaatctcagtgtggatgtgtactacgaccgcatgggaaaccccctggacaagggtagtgatagtgtatggaatttccatgtctggaatgaaggctggtttgtt

SEQ ID NO: 228307 - DNA, 384 bp, Gossypium hirsutum
atggccgatgctcttctgggggctttggcagcaggagcctctacaacctcggggggaacaagagcatctccatgagtgtggctgggtcacgacaaggcgcctgctttggaggtgctggaggcttcggcactggtggctttggcggtggatttgggggctccttcagcggtaagggtggccctggcttccctgtctgccctgctgggggaattcaggaggtaactatcaaccagagcttgctgactcccctccacgtggagattgaccctgagatccaaaaagtccggacagaggagcgagaacagatcaagctcctcaacaacaagtttgcctccttcatcgacaaggtgcggttcttagagcaacagaataaggtcctggaga

SEQ ID NO: 228308 - DNA, 369 bp, Gossypium hirsutum
gccgccgcctgcgtctctctcttcatctctctgaaccaaaaagtctttagcttttcgcttcgagagagaccatgttggtttaccaggatctcatctccggtgacgagcttctttctgactcattcccctacaaggaaatcgagaatgggatgctgtgggaagttgagggaaagtgggttgtgcaaggagctgtcgatgttgacattggtgccaatccttcagccgaaggtgctgatgaggatgaaggtgttgatgaccaagctgtgaaggttgttgacattgttgacactttcaggcttcaggagcaaccccctttcgacaagaagcagtttgtcgtgttcatcaagaagttcatcaagaacttgacac

SEQ ID NO: 228309 - DNA, 369 bp, Gossypium hirsutum
gagaaagctcttactgagcatcgcaatcctgacacgttgaagaaactaaatgatgctgaaaaagccaagaaagaactagagcagcatgaatattttgatccaaagatagctgatgaggaccgtgagaaagggaatgaaagtttcaaacagcacaagtatccagaggctgtgaagtattataccgagtcattgagacgattcctcaaatatgcaaaagctatacatctctttagcagcatgctacacgaaattgggcgctttgcctgagggattgaaagatgctgagaagtgcattgagctagatccaacattttcaaagggttacacaagaaagggagctgcttagttcttcatgaaagagtatgacaa

SEQ ID NO: 228310 - DNA, 371 bp, Gossypium hirsutum
gttcggtgaggctactaggagaagagatgtcaaagctattgttttgactggcaagggtggaaggttttcagggggttttgacatcaatgcttttcagaatcccagcggtgatacttcggatcgaacaattgaatcaattgatcttgttctcaacactatagaggattgcaagaagccagttgttgcggctattgaaggattggctcttggtggtggcttagaattggcaatgggttgccatgctcgtattgctgctccaaaaactcaattagggttgccagagttgacacttggggtgattcctggactcggaggtactcaaagtcttccaaggcttgttggggtatcaaaggctattgaaatgatgctga

SEQ ID NO: 228311 - DNA, 342 bp, Gossypium hirsutum
cgatatggggaagatcaagatcggaatcaacggatttggaaggatcgggcgtttggttgccagagttgctctccaaagtgaagatgttgagctcgttgctgttaacgatcctttcatcaccaccgattacatgacctacatgtttaagtatgacagtgttcacggtcaatggaagcaccatgagcttaaggtgaaggactcaaaaacccttctctttggtgaaaagcctgtcactgttttcggcatcagaaaccctgaagaaatcccttggggtgagactggagctgattatgtcgttgagtctactggtgttttcactgacaaggacaaagctgctgccca

SEQ ID NO: 228312 - DNA, 381 bp, Gossypium hirsutum
atgttggggaacggggccgcctggactcagagctgagaaacatgcaggacctggtggaggacttcaagaacaagtatgaggatgaaatcaacaagcgcaccactgccgagaatgagtttgtgatgctgaagaaggatgtagatgctgcctacatgaacaaggtggagctagaggccagggtcgatgcgctgatggatgagattaacttcatgaagatgttctttgatgcggagctgtcccagatgcagacgcacgtctctgacacctccgtggtcctctccatggacaacaaccgcaacctggacctggacagcatcatcgccgaggtcaaggcccagtatgaggagatcgccaaccgcagccggaccgaagctgagtctt

SEQ ID NO: 228313 - DNA, 387 bp, Gossypium hirsutum
atagcaggaggagctgtcaggaagatcagaagccagtcatggatgaccagcgcgacctgatctccaacaatgagcaactgcccatgctgggccggcgccctggaaccccggagagcaagtgcagccgcggagccctgtacacaggcttttccatcctggtgactctgcttctggctggccaggccaccactgcctacttcctgtaccagcagcagggccggctggacaaactgacagtcaccacccagagcctgcagctggagaacctgcgcatgaagcttcccaagcctcccaagcctgtgagcaagatgcgcatggcaaccccgctgctgatgcaggcgctacccatgggagcccaggggcccatgcagaatgccaccaagtatg

SEQ ID NO: 228314 - DNA, 383 bp, Gossypium hirsutum
atctcaggcctggaactcattaccttgcctcacggacaccagctgcgcctggacatcattgaaagacacagcacgatggccatcggcattgcagtgtacattctgggctgcacgggcactttggaggaccgagcagccactctgagtaaggtcatccaggtggcagtggaactgaaggattccatgggggacctctattccttctcagctctcatgaaagccctggaaatgccacagatcacaaggttagaaaagacgtggactgctctgcggcaccagtacacccaaactgccattctctatgagaaacagctgaagcccttcagcaaaatcctgcatgaaggcagagagtccacatgtgttcccccaaataatgtatcagt

SEQ ID NO: 228315 - DNA, 387 bp, Gossypium hirsutum
atcagccaccgccgccgccgccgccagtggcgagaccccgacctggcgggtcagcgctgggcgtgcgtgcgggcaggcgggggcgctgacgaggagcaggaagaggctgcagtgccggcgtgggcggctggccgaggcggaggcgcaggaactgggcggcgagtcgtgagaggctgcccgcctcactcagcattatggatccaagcctgttgagagaaagggagctgttcaaaaaacgagctctttccactcctgtagtagaaaaacgttcagcatcttctgagtcatcatcgtcatcgtcgaagaagaagaaaacaaaggtagaacatggaggatcgtcaggctctaaacaaaaatctgatcatagcaatggatcatttaacttgg

SEQ ID NO: 228316 - DNA, 366 bp, Gossypium hirsutum
acagtctccgcctagcttcttccgctcattcccagtctctcttcacaatgtccgccgcctccgcttcccttgctctcccttctcccctttcttcgtttcgctccaatggacctcttccttctagatgcttcctccgcctcaacaacccctcaagatctagggttttcatgagtgtctccgttggatcccaaactgtcgtcgatgatgccttgttcgctgattacaagcccacatccgccttcctctttcccggtcagggcgctcaagccgttggaatgggaaaagaagctcaggctgtgcctgctgctgcagaattgtataagaaggcaaataatatattaggttttgatcttctagatctttgca

SEQ ID NO: 228317 - DNA, 391 bp, Gossypium hirsutum
atcgcagccggaccgaagctgagtcttggtaccagaccaagtatgaggagctgcagcagacagctggccggcatggcgatgacctccgcaacaccaagcatgagatctctgagatgaaccggatgatccagaggctgagagctgagattgacaatgtcaagaaacagtgtgccaacctgcagaacgccattgcggatgccgagcagcgtggggagctggcgctcaaggacgccagaaacaagctggccgagctggaggaggccctgcagaaggccaagcaggacatggcccggctgctgcgtgagtaccaggagctcatgaacaccaagctggccctggacgtggagatcgccacttaccgcaagctgctggagggcgaggagtgcagact

SEQ ID NO: 228318 - DNA, 384 bp, Gossypium hirsutum
atctccacccgcgcttggtcccagcgcccgcggcgccgcgtccccggcccagccatggcgtcctccgcggccggctgcgtggtgatcgtcggcagtggagtcattgggcgaagctgggccatgctgtttgccagtggaggcttccaggtgaaactctatgacattgagcaacagcagataaggaatgccctggagaacatcagaaaggagatgaagttgctggagcaggcaggtgctctgaaaggctccctgagtgccgaagagcaactgtccctcatcagtggctgccccaatatccaagaagcagtagagggcgccatgcacattcaggtgaatccgccgtactacatcccgctggttgagctggtcccccacccggagacg

SEQ ID NO: 228319 - DNA, 378 bp, Gossypium hirsutum
atctgaggaacaagattctcacggccacagtggacaatgccaacgtccttctgcagattgacaatgcccgtctggccgcggatgacttccgcaccaagtatgagacagagctgaacctgcgcatgagtgtggaggccgacatcaatggcctgcgcagggtgctggatgaactgaccctggccagagctgacctggagatgcagattgagagcctgaaggaggagctggcctacctgaaaaagaaccacgaggaggagatgaatgccctgagaggccaggtgggtggagatgtcaacgtggagatggacgctgcacctggcgtggacctgagccgcattctgaacgagatgcgtgaccagtatgagaagatggcagaga

SEQ ID NO: 228320 - DNA, 363 bp, Gossypium hirsutum
ttccgcttccatctcctctctcttttccttccttttctcttcacccacagagaaaaggggtctcactcaaatgctctgctactaaaaacccattttttgcaatcatctttccttccttctctctctctctctctctcaaacaaaaccagttctcttccaaagaatcagtctgggttatggacggcggtgcttcctataacccacgtacagtcgaagaagtctttcgagatttcaagggtcgtcgagctgccatgattaaagccctcaccactgatgtggaagagttctacaagcagtgcgatccagaaaaggagaatctttgcctttatggatatcccagtgagcagtgggaggtgaatttac

SEQ ID NO: 228321 - DNA, 381 bp, Gossypium hirsutum
atccaggaaacaggaaagcccctggatgaaacactgaagaaagcccttatgggtcaccttgaggaggttgttttagctctgctaaaaactccagcgcaatttgatgctgatgaacttcgggctgccatgaagggccttggaactgatgaagacactctgattgagattttggcatcaagaactaacaaagaaatcagagacattaacagggtctacagagaggaactgaagagagatctggccaaagacataacttcagacacatctggagattttcggaacgctttgctttctcttgctaagggtgaccgatctgaggactttggtgtgaatgaagacttggctgattcagatgccagggccttgtatgaacgggagaaa

SEQ ID NO: 228322 - DNA, 360 bp, Gossypium hirsutum
  unsure (1)..(360): unsure at all n locations
cagcaataggacgtggatggtgcctgatgctaagggcattccgtggacatccagaactgggggtaaacaatttgtggattatgatcgaaacattgttgtgaagaatgaaggcaatagctcaggagacatttcagcgtcccaacactctattctgactatggataaagccatttcagatttggagataaaattgatggcttctagggccgaacatgagacaattcagaaagaccctacgatgtctgaaggtgtgaagaatatagaatcgattttaaaaaggaaatattttatggttataggaatcaatacggcttttagtagtcgnaagcggagagattcagtacgtgcgacttggatgct

SEQ ID NO: 228323 - DNA, 378 bp, Gossypium hirsutum
atggagctggaagggacaacggagaacattgcagcccaggctctggagcacattcactccaatgaggtgatcatgaccattggcttctcccgaacagtagaggccttcctccaagaggctgcccgaaagaggaaattccatgtcattgtagcagagtgcgctcctttctgccagaatcagcctttccctcccattgcagggtcatgaaatggctgtgaatttgtccaaagcaggtattgagacaactgtcatgactgatgctgccatttttgctgttatgtcaagagtcaacaaggtaatcattggcacgaagaccatcctggccaatggtgccctgagagctgtgacaggaactcacactctggcactgcagcaaaa

SEQ ID NO: 228324 - DNA, 385 bp, Gossypium hirsutum
atcacggaacgaacggcactcttaccaggtttaccggcagccaatcccagtccaggagctggtcctagaagacctgcaggatggagatgtgagaatgggaggctcttttcgaggggctttcagcaactcagagaaagctaaaaatatctttagaattcgcttccacgacccatctccaggccagtctcacactctgcaagccaatgacgtattccacaagcagcagtggttcaactgtattcgggcggccattgcccccttccggtcggcaggcagtccgcctgagctgcagggcctgccagagctgcacgaagagtgtgaggggaaccacccctctgcgaggaagctcccagcccagaggagggcatctacagtttcagtgtta

SEQ ID NO: 228325 - DNA, 362 bp, Gossypium hirsutum
atggctgctgaggacgagttactgctgccgcggctccccgagctgttcgaaacgggcaaacagttactggacgaagtagaagtagcgactgaacctgccggttcccggatagtccaggagaaggtgttcaagggcctggaccttcttgagaaggctgccgaaatgttatcgcagctcgacttgttcagccgaaatgaagatttggaagagattgcttccaccgacctgaagtacctgttggtgccagcgtttcaaggagccctcaccatgaaacaagtcaaccccagcaagcgtctagatcatttgcagcgggctcgagaacactttatgaactacttaactcagtgccattgctatcatgt

SEQ ID NO: 228326 - DNA, 382 bp, Gossypium hirsutum
ataggtgaccatgcagaacctcaacgaccgcctggcctcctacctggacaaggtgcgtgctctggaggaggccaacgctgacctggaggtgaagatccgtgactggtaccagaggcagcggcccagtgagatcaaagactacagtccctacttcaagaccattgaggacctgaggaacaagattctcacggccacagtggacaatgccaacgtccttctgcagattgacaatgcccgtctggccgcggatgacttccgcaccaagtatgagacagagctgaacctgcgcatgagtgtggaggccgacatcaatggcctgcgcagggtgctggatgaactgaccctggccagagctgacctggagatgcagattgaagcctga

SEQ ID NO: 228327 - DNA, 377 bp, Gossypium hirsutum
atgtcttaatgatgagatcaacttcctgaaggtcctctatgatgcggagctgtcccagatgcagacccacgtcagcgacatgtccgtggtcctctccatggacaacaaccgcaacctggacctggacagcattattgctgaggtccgtgcccagtacgaggagattgcccagaggagcaagggtgaagccgaggccctgtaccagacccaaggtccagcagctccagatctcagctgaccaacatggtgacaacctgaagaacaccaagagtgaaatcgcagagctcaacaggatgatccagaggctgcgggcagagatcgagaacatcaagaagcagtgccagactcttcaggcatccgtggctgatgcagagcac

SEQ ID NO: 228328 - DNA, 403 bp, Gossypium hirsutum
  unsure (1)..(403): unsure at all n locations
aaaaagcannnnnnnttgaattcccgggatcccaggcagcagttagcccgccgcccgcctgtgtgtccccagagccatggagagagccagtctgatccagaaggccaagctggcagagcaggccgaacgttatgaggacatggcagccttcatgaagggcgccgtggagaaaggtgaggagctcttctgcgaagagcgaaacctgctctcagtagcctacaagaatgtggtgggcggccagagggctgcctggagggtcctgtccagtattgagcagaaaagcaacgaggagggctcggaggagaagggccccgaggtgcgtgagtaccgggagaaggtggagactgagctccggggcgtgtgcgacaccgtgctgggcctgctggacagccatctcatcaag

SEQ ID NO: 228329 - DNA, 349 bp, Gossypium hirsutum
aattgagggaaagaaagatttaaaaaggatacaacaatggtgccttaaactttttatagatctgtgttttatctaacattttgcaaaaacaagaattcctgttttttcctgtttttctttttgtatcctaaagtaagtaaacgaagtcaacaaaatgggagacagcaagcttatcctttgttgcttcattgcttgcattttgttcctcggcgttaatggagaaaacccttatcgttatatcacttggaaagtcacctacggtgatatttaccctcttggagttaagcaacaggaacggtgtgcagcaaaggaggaactcatggcaggatggagtttctggcacaaactg

SEQ ID NO: 228330 - DNA, 372 bp, Gossypium hirsutum
atgtcaaccagagtctcctgactcccctcaacctgcaaatcgaccccaccatccagcgagtgcgggccgaggagcgtgaacagatcaagaccctcaacaacaagttcgcctccttcatcgacaaggtgcggttcctggagcagcagaacaaggttctggaaaccaagtggaccctgctgcaggagcagggcaccaagaccgtgaggcagaacctggagccattgttcgagcagtacatcaacaacctcaggaggcagctggacagcatcgttggggaacggggccgcctggactcggagctcagaggcatgcaagacctggtggaggacttcaagaacaaatatgaggatgaaatcaacaagcgcacagcag

SEQ ID NO: 228331 - DNA, 301 bp, Gossypium hirsutum
aattttcttggttttttttcaatccaaatcctatctgttaaccgtcagttaacccctatggttggtcccaagcaaccagcagggaaatcaacgggggttaaggttcacgttaggaacttgcttccaaggccgcttggtagtccgcttcggcaaccggaggagtgaagaagcctcatcgttttaggcccggaactgttgctctgagagaaatcaagaagttccagaagagcaccgagcttttgatcaggaaacttccattccaaaggttggtgagagaaatagctcaagatttcaagactga

SEQ ID NO: 228332 - DNA, 378 bp, Gossypium hirsutum
ataccgacgacaccttctgcgaggcctgcaagtccaccgtgggtgttgacttcaaaatcaaaactgtagagctaagaggaaagaaaattagattacagatctgggatacagcaggtcaggagagattcaacagcattacctcagcttattacagaagtgccaaggggatcatattagtttatgatatcactaagaaggagacgtttgatgatttgccaaaatggatgaagatgattgataagtatgcttcagaagatgcagagcttctcttagttggaaataagctggactgtgaaacggacagagaaatcaccaggcagcagggggaaaagtttgcacagcaaataactgggatgcggttctgtgaagcaagtgcaa

SEQ ID NO: 228333 - DNA, 327 bp, Gossypium hirsutum
  unsure (1)..(327): unsure at all n locations
gtcaaccagagcttcctgactcccctcagccggcaaatcgaccccaccatccatcgagtgcgggccgaggagcgtgaacagatcaagaccctcaacaacaagttcgcctccttcattgtcatggttcggttcatggatctgtataacaaggttttggtgactatgtggaccttgttgtgtttgcanttcaccattaccgtgaagcagaacctggagccattgttcgngctttacttcaacatccttaggaggcaatttgacagcatcgttggggaacggggccgtctggactcggagcttaaaagcatgcangacctggtggaggac

SEQ ID NO: 228334 - DNA, 375 bp, Gossypium hirsutum
  unsure (1)..(375): unsure at all n locations
atcttggatgaaactggcgaagaaagggaaaggggagtaaccatggatgttggtatgacaaagtttgaaaccacaaccaaagttattacattaatggatgcaccaggccataaggacttcattgcaaatatgattacaggagcagtccaggcggatgtagctgttttagttgtagatgccagcaggggagagtttgaagctggatttgagactggaggacaaacacgagagcatggactcttggtccgttctctgggagtgacncancttgctgttgcagttaataaaatggatcaggttaattggcaacaagaaagatttcaagagattactggaaaactnnggcactttcttaagcaagcaggttttaaggag

SEQ ID NO: 228335 - DNA, 417 bp, Gossypium hirsutum
  unsure (1)..(417): unsure at all n locations
gctggnncncctgcnnnnntccggcaattcccgggatggaagaggtcctgttactacagctataattcaaagaggaactttaagaaaaggctgtgttctggttgctggaaattgttgggcaaaagtacgcttaatgtttgatgaaaatggaaaaacaatccatgaggcccatcccagcatgccagtgggaattacaggctggagagaccttccttctgcaggagaagaaattcttgaagtagaatctgagccaagggcacgtgaagttgttgactggaggaagtatgaacaagaacaggagaaaggtaaagaggatgtgaaaataatagaagaaaagcgaaaggaacaccaagaagcatatcagaaagcccgngagaagtatagcaatgtgcagtggaagaagagatcactctacag

SEQ ID NO: 228336 - DNA, 375 bp, Gossypium hirsutum
atcaagattctcacggccacagtggacaatgccaacgtccttctgcagattgacaatgcccgtctggccgcggatgacttccgcaccaagtatgagacagagctgaacctgcgcatgagtgtggaggccgacatcaatggcctgcgcagggtgctggatgaactgaccctggccagagctgacctggagatgcagattgagagcctgaaggaggagctggcctacctgaaaaagaaccacgaggaggagatgaatgccctgagaggccaggtgggtggagatgtcaacgtggagatggacgctgcacctggcgtggacctgagccgcattctgaacgagatgcgtgaccagtatgagaagatggcagagaagaac

SEQ ID NO: 228337 - DNA, 374 bp, Gossypium hirsutum
  unsure (1)..(374): unsure at all n locations
atcctcaatctcagacctacagatggtgaacatctccctgcgagtgctgtctcgacccaatgctcaggagcttcctagcatgtaccagcgcctagggctggactacgaggaacgagtgttgccgtccattgtcaacgaggtgctcaagagtgtggtggccaagttcaatgcctcacagctgatcacccagcgggcccaggtatccctgttgatccgccgggagctgacagagagggccaaggacttcagcctcatcctggatgacgtggccatcacagagctgagctttagccgagagtacacagctgctgtagaagccaaacaagtggcccancatgaggcccagcgggcccaattcttggtagaaaaagcga

SEQ ID NO: 228338 - DNA, 363 bp, Gossypium hirsutum
gttaaatgtatcattagagccattgtgggaagaattgagtaattgtattggcatgactgaggcacagctggctcagagctcactctgtccaactgtatctaatataaatgttggggagcatcttcaaggagcatcctcgtcatcaccacttcctcctgggactcagagacttcttcctttcattgaggccttcttcgttttgtgtgaaaagctacatgccaatcattctatcatgcaacaagatcatgtaaatgtgactgcacaagaagtaaaagagtctgctgagtgttctgttaccttaccctctaaatgcggtggggattatcagaagaagcttgatggttctgtcacattcgcaggttt

SEQ ID NO: 228339 - DNA, 366 bp, Gossypium hirsutum
aaagacgatcactctcgaggtcgagagctctgacacgatcgacaacgtgaaagccaaaatccaagacaaggaaggcatcccgccagaccagcaacgtctcatcttcgccggaaagcaactcgaggacgggcggactttagccgattacaatatccagaaggaatcgactcttcatctggttctacgtcttcgaggtgggatgcagatcttcgtcaagactttgaccggtaagaccattactttagaagtggagagctcggatacgattgataacgtgaaagcgaagattcaggacaaagaaggaattccaccagatcagcaaaggttgatttttgctgggaaacagctggaagatggaggactttg

SEQ ID NO: 228340 - DNA, 381 bp, Gossypium hirsutum
atgtttgcaagacataacaaaatctatacttactctataatcccaaatagatgcttcggcagcagtgactctccaaaaccactgaggcctagacctcctcactgctgagaaaggaggactttgcaccttcttaggggaagagtgttgtttttacactaaccagtcagggatagtatgtgatgccacccagtgtttacaggaaaaggcttctgaaatcagacaaaagctttcaaactcttataccaacctctggagttgggcgacatggcttctcccctttttaggtcccatgacagatatcttgctattactcgccttcgggacctatatttttaacctccttgtcaaatttgtctcttccagtatccaggcctaaagcta

SEQ ID NO: 228341 - DNA, 367 bp, Gossypium hirsutum
cggacgcgtgggccataccagcataaatcaacaatggcaaagctcgcagtttacttagccaccctggctctcattttgttccttgccaatgcttcaatcacatctgtgacggtcgaaagcgaggaaaaccgggatagctgtgaacagcagataaggaagcaagcccacctgaagcactgccagaagtacatggaggaagagtggggtggcgaaggcagcgacaatatagccggcgggtacattgactcatgttgccagcagctagagaagatggatacgcaatgcagatgtcaaggtctaagacatgcaacgatgcaacagatgcaacagatgcaagaacaaatggggagcaaacagagcgagagat

SEQ ID NO: 228342 - DNA, 377 bp, Gossypium hirsutum
atccatggatgaagcggaccggcggctcctgcggcggtgccggctgcggctggtggaggagctgcaggtggatcagctctgggacgccctgctgagccgcgagctgttcaagccccacatgatcgaggacatccagcgggcaggctctggatctcggcgggatcaggccaggcaactgatcacagatctagagactcgagggagtcaagctcttccttcgttcatctcctgcttagtggacacaggccaggacatgttggcttcgttcctgcgaactaacaggcaagcagtaaagttgtcgaagccaaccctagaaaaccttaccccggtggtgctcagaccagagattcgcaaaccagaggttctcaaccggaaac

SEQ ID NO: 228343 - DNA, 357 bp, Gossypium hirsutum
cggacgcgtgggtgatgagatgctttcccgtggttttaaggatcagatctatgatatcttccagctgcttccagccaagattcaggttggagtgttttctgccacaatgccgccggaggccctcgagattactaggaaatttatgaataagcctgtgagaattttggtaaagcgtgatgagctaaccctggagggtatcaagcagttttatgtgaatgttgaaaaggaagagtggaagcttgaaactctgtgtgatctttacgagaccctagccattacccagagtgtcatttttgtgaataccaggcgtaaggttgactggttaactgacaagatgcgaagccgtgaccacacagt

SEQ ID NO: 228344 - DNA, 379 bp, Gossypium hirsutum
atcagagcttgctgacccccctccacgtggagattgaccctgagatccagaaagtccggacagaggagcgagaacagatcaagctcctcaacaacaagtttgcctccttcatcgacaaggtgcggttcttagagcaacagaataaggtcctggagaccaaatggaagctgctccagcagcagacgaccagcacctccagcaaaaaccttgagcccctctttgagacctacctcagtgtcctgaggaagcaactagataccttggtcaatgacaaagggcgcctgcagtctgagctgaagaccatgcaagacagcgtggaggacttcaagaccaaatatgaagaggagatcaacaaacgcacagcagctgagaatgactt

SEQ ID NO: 228345 - DNA, 356 bp, Gossypium hirsutum
  unsure (1)..(356): unsure at all n locations
tgcagagctcacactggtcctcccgagaggaagaagaacaagaagaacaagaagttgaaaggagaagtggacaatacaagagagtgagagcccagttatcaaccggggacctatttatagtaccagcaggccatccagtcacattcgttgcctcccaaaacgaggacctaggattgctcgggttcggactctacaacggccaagacaacaagaggatcttcgtggctgggaaaaccaacaatgngagacaatgggatcgccaggccaaggagctggcgtttggggtggagtcaaggttggtggatgaggtattcaacaacancccggaagaatcttacttcgtgtctggacagagt

SEQ ID NO: 228346 - DNA, 367 bp, Gossypium hirsutum
gttgtcccaccactgtcacaaatgtggagacagtggctgtttcacccacaatactgagacgtggtcctgagtggtttgccagttttgggaggaagaataattccgggacaaaattgttttgtgtctcaggtcatgtcaacaagccttgcacagttgaggaggagatgagtataccacttaaggagttgatagagaggcactgtggaggtgtcagaggtggatgggacaatttacttgcagtaatacctggaggttcatctgttccacttttacccaagcacatatgtgatgatgtcttgatggattacgatgcactcaaggctgtccagtcaggactgggaactgctgcagtaattgtgtggataaa

SEQ ID NO: 228347 - DNA, 399 bp, Gossypium hirsutum
atgcggcagcggctgcagcaggcatcatggcggagctgcaggaggtgcagatcacagaggagaagccactgctgccaggacagacgcctgaggcggccaagattcactctgtggagacaccgtatggctctgtcactttcactgtctatggcacccccaaacccaaacgcccagcgatccttacctaccacgatgtgggactcaactataaatcttgcttccagccactgtttcaattcggggacatgcaggaaatcattcagaacttcgtgcgggttcatgtggatgcccctggaatggaagagggagcccctgtgttccctttgggatatcagtacccatctctggaccagcttgcagacatgatcccttgcgtgctacagtacctaaatttttcta

SEQ ID NO: 228348 - DNA, 385 bp, Gossypium hirsutum
atctctgatagctcccagcttactctctgcagccatgattgccagacagcagtgtgtccgaggcgggcctcggggcttcagctgtggctcagccatcgtaggcagtggcaagagaggtgccttcagctcagtctccgtgtctgaaggtgctggccgatgctcttctgggggctttggcagcaggagcctctacaacctcggggggaacaagagcatctccatgagtgtggctgggtcacgacaaggcgcctgctttggaggtgctggaggcttcggcactggtggctttggcggtggatttgggggctccttcagcggtaagggtggccctggcttccctgtctgccctgctgggggaattcaggaggtcactatcaaccagagc

SEQ ID NO: 228349 - DNA, 369 bp, Gossypium hirsutum
cggacgcgtggggtcgattgattcttcgaaaaccataaacgaaaccaaatatggcggagaaagcaatcgagtcggttcaatgctttggccggaagaagacggcggtagccgtaacacactgcaagagaggccgtggtttgatcaagatcaatggttgtcccattgagcttgtcgagcccgagatcctccgtttcaaggccgtcgagccaatccttctcctcggccgtcagcgttttgccggcgttgacatgaggatccgagtcaaaggtggaggtcacacttctcagatctacgctatccgtcaaagcatcgctaaagcccttgtcgctttttaccagaagtacgttgatgagcagagcaagaaggaga

SEQ ID NO: 228350 - DNA, 401 bp, Gossypium hirsutum
tatacaacagactgagcaaaaggcgggctgctccggtcccgaatcgccgggatcccggcgcccctcgcgtgccaagcccagcgcaagtcagctaagctcagccgagcgagcgcggcgcgatggacgggtctttgcttgtgcagaacgcactcctgttccgcacggtatacccccatgtgcgttgctggttgaacgcaggtctttttacatcgacgattgatggcgataccgaccggctcccggagttcatcgtgcagacgggctcctacatgttcgtggacgagaacacgttctccaacgacgccctgaaggtgacgttcctcatcacccgcctcacggggcccgccctgcagtgggtgatcccctacatcaagaaggacagtcccctcctcagtgactac

SEQ ID NO: 228351 - DNA, 396 bp, Gossypium hirsutum
atcgaatagactcatacggggctcaggcctctctgcggggctgactctgcacttcaccatggctttcattgccaagtccttctatgacctcagtgccatcagcctggatggggagaaggtagatttcaatacgttccggggcagggccgtgctgattgaaaatgtggcttcactctgaggcacaaccactcgggacttcacccagctcaacgagctgcaatgccgctttcccaggcgcctggtggtccttggcttcccttgcaaccaatttggacatcatgagaactgtcagaatgaggagatcctgaacagtctcaagtatgtgcgtcctgggggtggataccagtctactatcacccttgtccaaaaatgtgaggtgaatgggcagaatgagca

SEQ ID NO: 228352 - DNA, 391 bp, Gossypium hirsutum
tgaaggaggagcagcagcgtgacggagaagatcctcagaggagataccaggattgccgacaacactgccaacaggaagaaagaaggctgcgtccacattgcgaacaaagctgcagggaacaatacgagaaacagcagcagcagcagcctgacaagcaattcaaggagtgtcaacagcgttgccaatggcaagagcaaaggcccgaacggaagcaacaatgtgtgaaggaatgcagggaacagtaccaagaggatccatggaagggagagagagaaaacaagtggagagaagaagaagaagaggaaagtgacgaaggagagcaacaacaaaggaacaacccttactacttgcatcgcagatcgttccaagaacgattcaaggaagaacatgg

SEQ ID NO: 228353 - DNA, 303 bp, Gossypium hirsutum
aggacgcgtggggccagctttggtagagaaagcgagttctgagtctggtttcttagaacgccaccttccacatcaaccagttgaagtgggtgaattcaggatcccgagattcaagatctcatttggacttaaagcttctgaggttctgaaaagattaggacttgtgttacctttctctggtgaaggaggtttgacagagatggtggattcgcctcaaggtcgggacctatttgtttcaaacatattccataagtgttttatcgaagttaatgaagaagggactgtagctggtgctgctacttc

SEQ ID NO: 228354 - DNA, 405 bp, Gossypium hirsutum
atgcggtgttgtgctgtggggaagggagacggatttgtaaatcccggagcgaggttctgcctacccgaggccgctgctgtgcggagacccccgggtgaagccaccgtcatcatgtctgaccaggaggcaaaaccttcaactgaggacttgggggataagaaggaaggtgaatatattaaactcaaagtcattggacaggatagcagtgagattcacttcaaagtgaaaatgacaacacatctcaagaaactcaaagaatcatactgtcaaagacagggcgttccaatgaattcactcaggtttctctttgagggtcagagaattgctgataatcatactccaaaagaactgggaatggaggaagaagatgtgattgaagtttatcaggaacaaacggggggtcat

SEQ ID NO: 228355 - DNA, 386 bp, Gossypium hirsutum
gtggatttttgtctcattgcgggtggaattcaagtctggagagtatcgtcaacggtgttccgatgatcgtgtggccattatacgccgaacaaaagatgaatgctacggtactagctgagcacattggggtggcaaccagatcgaagttattagcgccaaagggtgtggttgggagagatgcgatagcggcaatgatccaaaagattatggtcgataaagaaggtgaagcaattagagccaaagtgaaaatgctaaaatcatgcgctgtaaaggctgttagcaatggcggctcctcttataatgctctggctatagtcgccgaagagtgcaagattggaatgcaacgccggaatgcaaaaacaggctgatcttcatctctagtttga

SEQ ID NO: 228356 - DNA, 453 bp, Gossypium hirsutum
cactatataacaagagggaacgaagaagcacgctgatgccccgccgcaatatccccgatgcgtacccaaacgcttgcgggatgggttcttcgcgacgggactgaccgaacacttgttacatgcatgatgactgcatcattgcattgggtccctagagcccgctcgcgaagccacaggtggccaaggactcataggaagaagaaccaagacaagacgcaccccatacccaagtccgccatggagctcctgattgagaaactaaaccagatgaggaagaaggcttagcgcctacatcaaactaccgtgaggctgaacaagctccacgctgatctgaagatacatgctagggatgaacatcgccgcaagaaactaaagatcgacactggcacaaagattgggagaaggaagcaagactcatacgcaaccttaaaggcatcttggccaaaaatggac

SEQ ID NO: 228357 - DNA, 349 bp, Gossypium hirsutum
cttaaaccaagtaagaagactgttgatctagttggtaatgagaagatgaaggctagtaccaatgttaggcatattgttttgccctgttctaaatctgcaaggtcacagttgatcccagatattatacgttgttatagcagtggtggacgaactattatatttactgagacaaaagattctgcctctgagcttgctggcttattgcctggatcccgggctttgcatggtgacatacagcaggcccaacgtgaggtcactcttaatgggttccgctcagggaagttcatgacattagtggctaccaatgtggcagctaggggattagatatcaatgatgtgcagttaatca

SEQ ID NO: 228358 - DNA, 390 bp, Gossypium hirsutum
  unsure (1)..(390): unsure at all n locations
gcgtccacgcgtccggatcgaagcattaagctctggaacacccttggagagtgcaaatacacgatccaagatggtgatgctcataccgattgggtcagctgtgttcgtttcagcccaaatactcttcagcctaccattgtttcagcttcttgggataagaccgtgaaggtttggaacttgactaactgtaagattcgcaacacactggccggtcactccggttatgtgaacactgttgcggtttcacctgatggttcattgtgtgctagtggcggaaaagatggtgttattttgttgtgggatttggctgaaggaaagaagctntacagacttgatgctggttctgttattcattcgctatgctttagccccaacaggtactggctttgt

SEQ ID NO: 228359 - DNA, 408 bp, Gossypium hirsutum
atgcggatgacttccgcaccaagtatgagacagagctgaacctgcgcatgagtgtggaggccgacatcaatggcctgcgcagggtgctggatgaactgaccctggccagagctgacctggagatgcagattgagagcctgaaggaggagctggcctacctgaaaaagaaccacgaggaggagatgaatgccctgagaggccaggtgggtggagatgtcaacgtggagatggacgctgcacctggcgtggacctgagccgcattctgaacgagatgcgtgaccagtatgagaagatggcagagaagaaccgcaaggatgccgaggaatggttcttcaccaagacagaggagctgaaccgcgaggtggccaccaacagcgagctggtgcaaagtggcataagcgagatct

SEQ ID NO: 228360 - DNA, 366 bp, Gossypium hirsutum
gttggaggcaccattttcgaccgatttggccgtcgtcatacggcggctgagcttcttgcttctgctaacccgaaaatgcttactgttttagtgtatgccactgtccaaaaagtcttattcgataaatcagcagggaagaggccaaagtcaatgggagtgatgttcaaagatgaaaatgggaaccaacatcaggcatttttgactaataatcgaaggagtgaagtgattttatcatgtggtgcaattgggactcctcaattgctaatgcttagtggcattggacccaaagctgaactccagaggttgaacatttccatggtgttgcataatgagtttgttggaaagggcatggctgataacccgatg

SEQ ID NO: 228361 - DNA, 354 bp, Gossypium hirsutum
gccaaccaagacaacagggaaaagctaaccatagcagtgctccaccgccctgtcaataaccctggacaattccagaaattcttcccttctggacaggaaaatcctcagtcatatttacgaatcttcagccgtgaaattcttgaggctgtcttcaatacacgaagtgagcagctagacgagctgtttggtgggaggcaaagccatcgaaggcagcagggacagggaatgttccgtaaagccagccaagaacaaataagggcattgagccaagaagctacttcaccaaggggaaaaggtagcgagggatacgccttcaacttattgagccaaacccctcgctactgcaaccaaaac

SEQ ID NO: 228362 - DNA, 401 bp, Gossypium hirsutum
atcacaggtgtcgtgaaaactacccctaaaagccaaaatgggaaaggaaaagactcatatcaacattgtcgtcattggacacgtagattcgggcaagtccaccactactggccatctgatctacaaatgcggtggcatcgacaaaagaaccattgaaaaatttgagaaggaggctgctgagatgggaaagggctccttcaagtatgcctgggtcttggataaactgaaagctgagcgggaacgtggtatcaccattgatatctccttgaggaaatttgagaccagcaagtattatgtgactatcattgatgccccaggacacagagacttcatcaaaaacatgattacagggacatctcaggctgactgtgctggcctgattggtgctgctggtgttggtg

SEQ ID NO: 228363 - DNA, 341 bp, Gossypium hirsutum
cggacgcgtgggcaaagagtcatacaatgtagctcctggagttgtagtaagaattccagcaggaagcactgtgtacttggccaaccaagacaacagggaaaagctaaccatagcagtgctccaccgccctgtcaataaccctggacaattccagaaattcttcccttctggacaggaaaatcctcagtcatatttacgaatcttcagccgtgaaattcttgaggctgtcttcaatacacgaagtgagcagctagacgagctgtttggtgggaggcaaagccatcgaaggcagcagggacagggaatgttccgtaaagccagccaaagacaaataagggcat

SEQ ID NO: 228364 - DNA, 343 bp, Gossypium hirsutum
attgaaaccccacgatccagccactgtggacgaggtcctgcgtctgctggatgaagaccacacagggactgtggaattcaaggaattcctggtcttggtgtttaaagtcgcccaggcctgtttcaagacactgagcgagagtcctgagggagcctgcagctctcaagggtctggaagcctccattctggggcctggcaggagctgagtgaaggacagagaagtggcactgaagtgggaagggcagggaaagggcagcattatgaggggagcagccatggacagagcaagcagccttccagagggcagagcaagcctggggctcagacccagggtcaggccact

SEQ ID NO: 228365 - DNA, 388 bp, Gossypium hirsutum
ctaggccagcaccagaggcagctccaaaatggttcagcggctcacttaccgcacgcgtcacagctacgccaccaagtccaaccagcaccgcgtcgtcaaaaccccaggagggaagcttgtttatcaaacgacaaagaaaagagctagtggacctaaatgtcctgttaccggcaagaggattcaaggaattcctcatttgaggcctgctgagtataaaaggtctaggttgcctagaaaccgtaggactgtgaaccgtgcttatggtggagttctatctggaagtgctgttcgagataagatcataagggccttcttggtggaagagcaaaagattgtgaagaaggtactgaagattcagaagacaaaggaaaagcaatcatccaagtga

SEQ ID NO: 228366 - DNA, 382 bp, Gossypium hirsutum
cccacgcgtccgctcaaaaccctaatttctctgctttcccttttgcttaatcaatcgatccttgtcaatggccaacagtaatctccctcgaagaatcatcaaggaaactcagcgtctcctcagtgaacctgcacctggaattagtgcttcaccatcagaggataacatgcgatatttcaatgtgatgatccttggtccaacacagtcaccatatgaaggtggggttttcaagttggaactatttttgcctgaagaatatcccatggctgctcccaaggttcgatttcttacaaagatatatcatcctaacattgacaagcttggaagaatatgccttgatattctcaaagacaaatggagtccagctctccagatacgaact

SEQ ID NO: 228367 - DNA, 397 bp, Gossypium hirsutum
ataaataacctgcgtgtgaatgttgaaaatcaaatcaagataaagatatacatcaatcaagtctgtgaggatgtcttctctggtcctctgaactctgctgtgcagctggccggactgagattgttgacaaacatgactgttaccaatgaccaccagcacatgcttcacaattacattacagacctgttccaggtattacttactggaaatggaaacacgaaggtgcaagttttgaaactgcttttgaatttgtctgaaaatccagccatgacagaaggacttcttcatgcccaagtggattcatcattcctttccctttatgacagccacgtagcaaaggagattcttcttcgagtacttacactatttcagaatataaataactgcctcaaaatag

SEQ ID NO: 228368 - DNA, 391 bp, Gossypium hirsutum
tgaagacactgagaatcttgctcatgaccgagtgccaactgagctaaagaaagccatcatgcaagctcgaatggataagaaacttacccaggctcaacttgctcagatgatcaatgagaagcctcagattatacaggagtatgaatccggaaaagccatccctaaccaacaaataattggtaaactggagagggctcttggtgcgaagctgcgagggaagaagtgagtgagtaagagtctcgtagaaagaacaaacagaacttgaatatcgcccagaatcttgagtcctaaaacttggtgatgtaaatgaatgttttatgccgttatgggtcgcttgtaagaacactgtttttgactttgtgtgatgacttatgtctgcgactgcttatga

SEQ ID NO: 228369 - DNA, 383 bp, Gossypium hirsutum
gatcctttctcttttttttcactaaattgacgttaacccaatcttcccaacacaatcaggccatcgaattctctggtgtttgaattgaatatctcatatatggcttacatccctccacacaagcgacattcgaaggatgcggagagtccaacgccaacgccaacaccaactccagagtcctttattcccaaatttaaaagaaatgtacagttaagagcttcaaacaccaaagctgataggagtggaagaatcgtatattcaaactatgccatctctagatggtttgctgttggtttggatgatggaaatggggacacatcttccgttcatcttaagccagtttcagttgaatctattgagaggaaaacaggtgagaaacctgc

SEQ ID NO: 228370 - DNA, 366 bp, Gossypium hirsutum
aatttggaaaaacgcaagcgcaaacagggatcgcattaggttatcttcttcttctttttttctttttctttttgcaattccttcaactgaaaggggaaaataaccctaattttgtctctggattggtctcccaagtgaggaaagggagaaaaagaaagaaactttgaagaataaaaatggtgttttacttcaaagcccgaccagaggttggcgattacacaattttcatgggtctcgacaagtacgagaacgaggaactcattaaatacggctttcccgaagacatttggttccatgttgataaaatgtcttctgctcatgtttatgtaagacttcataaaggtcaaaccattgatgatataagcg

SEQ ID NO: 228371 - DNA, 384 bp, Gossypium hirsutum
atgtcccaggcagcagttagcccgccgcccgcctgtgtgtccgcagagccatggagagagccagtctgatccagaaggccaagctggcagagcaggccgaacgttatgaggacatggcagccttcatgaagggcgccgtggagaaaggtgaggagctctcctgcgaagagcgaaacctgctctcagtagcctacaagaatgtggtgggcggccagaagggctgcctggagggtcctgtccagtattgagcagaaaagcaatgaggagggctcggaggagaagggccccgaggtgcgtgagtaccgggagaaggtggagactgagctccggggcgtgtgcgacaccgtgctgggcctgctggacagccatctcatcaaggaggct

SEQ ID NO: 228372 - DNA, 407 bp, Gossypium hirsutum
atgtcagtgccagccttgccagatcattttgaaccaggtatgctattgcggcagcacctgccgagatgtgttatgtggaaccgatgtaggaaagtctgatggatttggggatttcagctgtttaaagatatgtggcaaggacttgaaatgcggtaaccatacatgttcacaagtatgccaccctcagccctgccagccatgcccacggctccccccactggtgcgctgttgcccctgtggccaaactcctctcagccaattgctagaacttggaagtagtggtcggaaaacatgcatggatcctgtgccttcatgtggaaaagtgtgcggcaagcctctgccttgtggctccttagatttcattcatacctgtgaaaagctctgccatgaaggagactgtggaccat

SEQ ID NO: 228373 - DNA, 363 bp, Gossypium hirsutum
atgttgctatggggattgctggctcagatgtgtccaagcaagctgctgacatgattcttttggatgacaactttgcctcaattgtgactggagtagaggaaggtcgtctgatctttgataacttgaagaaatccattgcttataccttaaccagtaacattcccgagatcaccctcttcctgatatttattattgcaaacattccactaccactggggactgtcaccatcctctgcattgacttgggtactgacatggttcctgccatctccctggcttatgagcaggctgagagtgacatcatgaagagacagcccagaaatcccaaaacagacaaacttgtgaatgagaggctgatcagca

SEQ ID NO: 228374 - DNA, 407 bp, Gossypium hirsutum
atgcaagtacgaggagctgcaggtcacagcgggcagacatggggacgacctgcgcaacaccaagcaggagattgctgagatcaaccgcatgatccagaggctaagatctgagatcgaccacgtcaagaagcagtgtgccagcctgcaggccgccattgctgatgctgagcagcgtggggaaatggcactcaaggatgccaagaacaagctggaagggctggaggatgccctgcagaaggccaagcaggacctggcccggctgctgaaggagtaccaggagttgatgaacgtgaagctggccctggacgtggagattgccacctaccgcaagctgctggagggcgaggagtgcaggctgaatggcgaaggcgttggacaagtcaacatctctgtggtacaatccaccg

SEQ ID NO: 228375 - DNA, 407 bp, Gossypium hirsutum
atcgccgcggagcctgccgaacctcctcagccgcccggagccgcgcccggagcccggctatagaggctgcagtcgcagccgggagcccgcagcccgcgccccgagcccgccgccgcccttcgagggcgtaccaggccgcgccatggtgaaagtgacgttcaactccgctctggcccagaaggaagccaagaaggatgagcccaagagcggcgaggaggcgcttatcatcctccccgacgccgtcgctgtggactgcaaggacccagatgatgtggtaccagttggccaaagaagagcctggtgttggtgcatgtgctttggactggcatttatgcttgcaggtgttattctaggaggagcatacttgtacaaatattttgcacttcaaccagatgacgtgtactact

SEQ ID NO: 228376 - DNA, 389 bp, Gossypium hirsutum
atgccccagttaccaggagaggctgtgtcaaaggcaccatgagcaagatcagcgaggccgtgaagcgcgcccgcgccgccttcagctcggggaggacccgaccgctgcagttccggatccagcagctggaggcgctgcggcgcctgatccaggagcgcgagcaggagctggtgggcgcgctggccgcagacctgcacaagaacgaatggaatgcctactacgaggaggtggtgtacgtcctggaggagatagagtacatgatccagaagctccccgagtgggctgcggatgagcccgtggagaagacgccccagactcagcaggatgagctctacatccactcggagcctctgggcgtggtccttgtcatcggcacctggaactacccc

SEQ ID NO: 228377 - DNA, 331 bp, Gossypium hirsutum
tttgcatttactagcaattgcttcaagttcttttctttgtctttttagtcaatggctgaccaccacctccaaaacactcaaccaatgactcaccaaatggtgaaagccggtactgccgcaacagccggtggttccctcctcattctctccggtttaatcctagctggcaccgttattgcactcactatagccactccactcttcggtattttcagtccagttcttgtccctgctctcattgcaacagctctgctagcaacgggtttcgtcggcttcggcggtttcggtgttgcagtcgtcacagttctgtcctggatttacaggtatgtga

SEQ ID NO: 228378 - DNA, 387 bp, Gossypium hirsutum
cagcctccatttcccatatcatggcatcggagaagaagctgtcgaacccaatgagggagattaaagttcaaaaacttgtcctcaacatctccgtcggtgaaagtggcgatcgtctcacccgtgccgccaaggtcttggaacaactcagtggtcaaacccccgtcttctccaaagctaggtacactgtgagatctttcggaattcggcgtaatgagaagattgcttgctacgtgactgtgaggggagagaaagctatgcagcttcttgagagtgggttgaaggttaaggagtatgaacttttgaggaggaacttcagtgataccggctgcttcggattcggtatccaggaacacattgatcttggcatcaagtacgatccttcaactg

SEQ ID NO: 228379 - DNA, 380 bp, Gossypium hirsutum
gtctacatgtttttgatgattttagagaggcttatgcatggttgagccataatacagatgtcaatgataaagttgcatcatggtgggactatggttaccaaaccactgccatggctaatcgcactgttattgtcgacaataatacctggaacaatactcatatcgcaactgtcggtactgccatgtcttctcctgaaagggcagcttgggaaattttccactccttggatgtcaaatatgttcttgtagtctttggaggtctcattggttaccccagtgatgatattaataagttcctgtggatggttcgaatcggaagtggtgtctttcctcatatcaaggaaccagattatcttagagacggacaatatcgaattgac

SEQ ID NO: 228380 - DNA, 404 bp, Gossypium hirsutum
atatatcgacatgatttaccactattatggcgatgcttggtgcggtgtatcatattatacagctgaagctactaaacacaaaccactaccaaccaccccttacaaaaaaccacactctttaactaaacaacatccactgtcaaccaacatgaactaaaaccaatataccccttaatcaacactaacatattaaaatcaaccacttacaatccttattatgcaatgccatatcctactaatcttcactccttagatctccaatattaacttactatctatcaaggaataattccttactccagtcatcatattactaagaatctcatcatacatcgcttaaggacaaagcctatttccttatatcacagaaccagattattttataaacgcaccatatcgaattg

SEQ ID NO: 228381 - DNA, 358 bp, Gossypium hirsutum
caaagaactagaagaaaaatactccaaggagagtttaattccaaagcctaaatactggggaggatatagacttaaaccagaacgtttcgagttttggcaaggacagccatcccgtttacatgacaggttggaatattcccctcaagagactgacggaaaacgagtttggaaaattgttcggttggccccctgagttcatattttcagcttcttcactgtcaagttagcctgtggttttcacaaaccttctaacttgcaagtatgtattttctgtggcattgaggggcgggggggtgtgcatgacattttactataaaaattttacatccttgactcttaaataccgaaaaggatcaaa

SEQ ID NO: 228382 - DNA, 369 bp, Gossypium hirsutum
cccacacgtgcgtggatatacgtttgaaccaactattgggtttactgtgggcacgttgttttaagaattacactacgactgattataattaagatgggtctaatattttatattgtgaaaaagaaattctcaagttttggaagggtgttaaggatggacttgcattgccattgttgatagatctttcttttaagatcggattgcctattgcaggttgtgacatgcgtctctcagctgacttaaagctccagattctggactcattgttctgcactgatgttgcatggatggcgatgcgtttcagctgagatgcgatatgtggcttttgataatgatctatggatgaagaaagttcaagagtgagtttga

SEQ ID NO: 228383 - DNA, 386 bp, Gossypium hirsutum
atggggacgctctcagctctcggcgcacggcccagcttgcttcaaaatgtctactgttcatgaaatcctgtgcaagctcagcttggagggtgatcactctacacccccaagtgcatatgggtcagtcaaagcctacaccaactttgatgctgagcgcgatgctttgaacattgaaacagccatcaagaccaaaggtgtggatgaggtcaccattgtcaacattttgaccaaccgcagcaatgcacagagacaggatattgccttcgcctaccagagaaggaccaaaaaggaacttgcatcagcactgaagtcagccttatctggccacctggagacggtgattttgggcctattgaagacacctgctcagtatgacgcttctgagc

SEQ ID NO: 228384 - DNA, 387 bp, Gossypium hirsutum
caatggatgaaggtcgaagttgctttaagagatctgatactttccgactatgccaaaaagaacaatgtgaacacatcagccctgacacagtctgagattcgtgacatcatccttggagctgagattactccaccctctcaacagaggcagcagatagcagagattgagaaacaggcgaaggaggcaagccagctaacagctgtgacaactaggactacaaacgtgcatggagatgagctcattgtcaccaccacaagtccctatgaacaagcagcatttgggtccaagacggattggcgtgttagagcaatatcagctactaatctttatcttcgagtgaatcatatatatgtgaactcagaggacataaaggaaactgggtacaca

SEQ ID NO: 228385 - DNA, 450 bp, Gossypium hirsutum
caacaggaaagctcatacgcgtgcacttacaccgccccggtattcccgtcgtggcattcgctgcgattagacccttctgtcgctctgctcggggccatataaactctctatcaatggctagactactctcgccacactctttacatcacagacatactgaaagtctgtgtcaaatcaataggctccgcgcctctgcaccccagacccgaattcgctccgaagccggcaccaccgagtggtggaaccccaactgtcaacagctcacgtgtgctggtgtatctgtaatgaggcagactattgaacctaatggccttgttttgccttccttcaccaatgctcctcagcttctctacattgtacacggaagaggtattcaaggtattgtgatgcctggatgtgccgaaacattccaagattcacagcaatggcagcatcaaagccgtggcaggt

SEQ ID NO: 228386 - DNA, 393 bp, Gossypium hirsutum
tcggctacaaaacgaaagagataacaggggagccattgttagaatggagcatggatttgagtggcccgaggaagggcagaggcgacaaggacgtgaagaggagggagaagaagaaagagaaccgaaatggcagaggcgacaagaaagtcaagaagagggatctgaggaagaagaaagagaagaacgaggaagaggaaggagaaggtcaggaaacggcttagaagaaacattctgctcaatgagactgaaacacaggacccctgcttcctctgctgatgttttcaacccacgaggtggtcgcatcaccacagttaacagtttcaatcttcccattctccaatacctccaactcagcgccgagaggggagtcctttacaataatgctatctacgc

SEQ ID NO: 228387 - DNA, 370 bp, Gossypium hirsutum
ccgagaagtaaacagaaaagggaagaattttggtgaccggtgattcgtgagtattgtaaacagcagcagcagcaatggagctgttctacttcgtggagttcagggcattgggagcggtggtggcagcattagagctaagcaagaacagcaaagatcgaatcaacacatcctctgctttcaattccttcaagaacaattatcttgtcggttattctctcatgatggctggagactggcttgacggtccgtatgttgactatctttacagtacatatgggttcggaaaaggtgaaattggacaactttttattgccggttttgggtcctctatgttgttcgggacaattgtcggatctttatcagacaaaca

SEQ ID NO: 228388 - DNA, 359 bp, Gossypium hirsutum
gcgagacctttgcctcttgtgtggtttgtcgtcgtctttttttccaggaaaattcgaatcctaaaccctagctctgggaaaacaaaatctgataactaaagtaaaaaaaaatggctttgttgagaggtcgtacagcttctttgaacctcttcaataggcttctccatcaatcgtttcgtgctccaaatcgcaatctctcttctgttgcggccgatgttcataatcaatcaacgattgagaatatgaaaagagatttacttaatcttgacattaattcacacattgggagttgtatgccaattgcttcaatgcgaatcgggacctttatccacaacattgaggtgaacccgggtcaaggc

SEQ ID NO: 228389 - DNA, 391 bp, Gossypium hirsutum
gtcctacgacttgtctaaagtcacttaatgacatcactaaactagcctgataatcattaccatgaggatcattttgagtataatgatatctcattcataatggataaatatgttgatcaaatcggctacattggcttgccttgaccaaaagctggccatggctaaacgctgttctcatgagggtgtggttgctggagctaaggccgccgttgttgctaccattgccaccgcaattccaactctagctagtgtaaggatgttgccttgggcaagagccaatcttaatcacactgcacaagctctcatcatctgcactgcggacggagctgcttattttatagttgcagacaagaccgttttggctactgcacggaagaactccttcaagcag

SEQ ID NO: 228390 - DNA, 392 bp, Gossypium hirsutum
atgtccccagcctctcactcggagccgatatggggagtaaagtggcggacttgctgtactggaaggacacgaggacgtcaggagtggtcttcacaggcctcatggtctccctcctctgcctcctgcactttagcatcgtgtccgtggccgcgcacgtggctctgttgctgctctgcggcaccatctctctcagggtttaccgcaaagtgctgcaggccgtgcaccggggggacggagccaaccctttccaggcctacctggatgtggacctcaccctgactcgggagcagacggaacgtttgtcccagcagatcgcctcccgcgtggtctcggcggccacgcagctgcggcatttcttcctggtagaagacctcgtggattccctcaagctg

SEQ ID NO: 228391 - DNA, 399 bp, Gossypium hirsutum
atgcggagctgtcccagatgcagacccacgtcagcgacatgtccgtggtcctctccatggacaacaaccgcaacctggacctggacagcattattgctgaggtccgtgcccagtacgaggagattgcccagaggagcaaggctgaggccgaggccctgtaccagaccaaggtccagcagctccagatctcagttgaccaacatggtgacaacctgaagaacaccaagagtgaaatcgcagagctcaacaggatgatccagaggctgcgggcagagatcgagaacatcaagaagcagtgccagactcttcaggcatccgtggctgatgcagagcagcgtggtgagaatgcccttaaagatgcccacagcaagcgcatagagctggagactgccctgcagc

SEQ ID NO: 228392 - DNA, 390 bp, Gossypium hirsutum
  unsure (1)..(390): unsure at all n locations
acgtntagccaaaagacacccaaagacaccactttgaaacccggaaatgtcggacgaggagcatcatttcgagtccaaggccgacgccggcgcttccaaaacctaccctcagcaggccggcaccatccgcaagaacggttacatcgtcataaaaaatcgcccctgcaaggttgttgaagtttccacctccaagaccgggaagcatggtcatgcgaagtgtcactttgttggaatcgatatcttcactgccaagaagctcgaagatattgctccttcttcccacaattgtgatgttccgcatgtcaatcgtactgactaccagttgattgacatttctgaggatggatttgtgagtttgctgactgagagtggagacactaaggatgatct

SEQ ID NO: 228393 - DNA, 354 bp, Gossypium hirsutum
cgaaaatgaagactatactttcctccgagacaatggacatccccgacggggttagcattaaggtcaaggctaaggtgatcgaggttgaaggtccaaggggtaagcttacccgcaacttcaagcacgtcaaccttgatttccatctcatcaaggacgaagagaccggcaagcgtaagctcaggatcgaggcttggtttggctccaggaagaccagcgccgccatccgtacagctcttagccacgttgagaacctcatcaccggtgtcactaaaggataccgttacaagatgaggttcgtctacgctcactttccgattaatgccttcatcacttatggcaacaagtcgatcgaga

SEQ ID NO: 228394 - DNA, 343 bp, Gossypium hirsutum
atgttcgagaccagtctggccaacatggcgaaaccctgtctctactaaaaacccaaaaaaattaactgggcatggtggcgtgcacctggagtcccagctatttgggaggctgacgcatgagaattgctcgaacccaggaggtggaggactgcagtgagccactatcgtgccactgactccgacctgccttggaagaaagaaaaaactgcctgagactggtgatgtataatgaatagaggttgaattgactcacagattctcatggctgtggtggcttcacgaaacttcctatcatggttgaaggcgaaccgaaagcatgctccttcacattgcaacatacaga

SEQ ID NO: 228395 - DNA, 352 bp, Gossypium hirsutum
atgcagagtggagcggggttgggagcaaagcgctgagggagctcggtacgccgccacctcgcacccgcagcctcgcgcccgccgccgcccgtccccagagaaccatggagtctggcagtactgccgccagtgaggaggcacgcagccttcgagaatgtgaactctacgtccagaagcataacattcaagcactgcttaaagattctattgtgcagttgtgcactgctcgacctgagagacccatggcattcctcagggaatactttgagaggttggagaaggaggaggcaaaacagattcagaatctgcagaaagcaagcactcgtacagactcaagggaggatgaaatctc

SEQ ID NO: 228396 - DNA, 302 bp, Gossypium hirsutum
caagtgtgaacgaagaagcacgctggtgccgggccggaatttccgggatgcagcacagccggaggcagatatggctttggtggcgccgtgagtggatttggtttcggtggtggaaccgccattggctgttggactgggtggaggagccggccttgctgatggctttgggggccctggcttccctgtgtgccccactggaggcattcaagaggtcaccgtgaaccagagtcttctgactcccctcaacctgcaaattgaccccaccatccagctgagttgcgtgccgtggagcgtgaacagat

SEQ ID NO: 228397 - DNA, 376 bp, Gossypium hirsutum
aaacaacactgatccagagccaggaaggtgtcgcagaactgatggaaagaaatggcggtgctcgagagatgctgttgctggccagaagtactgcgagcggcacatgaacagaggtcgccatcgttcaagaaagcctgtggaaggccaacctggccattccgtcacagccactgccgccactacttccaagctgatgcctaatgtctcatcctcttcagcatcagcggtagggccagttggtggtagtggtgagcccaacagcctcaccagtgctcggcagaagtacgagaatttgcagcttggtggcacatctaatctttctgctgcagcttcactgaacaggtcgattctgaataaagacactgtaggtgaaaaa

SEQ ID NO: 228398 - DNA, 379 bp, Gossypium hirsutum
cccacgcgtccgattccagcaggaagcactgtgtacttggccaaccaagacaacagggaaaagctaaccatagcagtgctccaccgacctgtcaataaccctggacaattccagaaattcttccctgctggacaggaaaatcctcagtcatacttacgaatcttcagccgtgaaattcttgaggctgtcttcaatacacgaagtgagcagctagacgagctgtttggtgggaggcaaagccatcgaaggcagcagggacagggaatgttccgtaaagccagccaagaacaaataagggcattgagccaaggagctacttcaccaagggggaaaggtagcgagggatacgccttcaacttattgagccaaacccctcgct

SEQ ID NO: 228399 - DNA, 282 bp, Gossypium hirsutum
aaattcgcaggctgggtccggtcccggatccccattatcccgatgacgaccaagttatgctgaagaaggatgtagatgctgagtacatgaacaagtgtggagctttaggccaaaatcaatgcgctgatagatgagattaacttcatgaagatgtaatacgatgcaatgctggcccagatgcagactcacgtctctgacacatcttaggtcctttttatagtcaacaaccgcaaactggacctggtcagtattatacacgatgttaaggcctattattgagga

SEQ ID NO: 228400 - DNA, 376 bp, Gossypium hirsutum
gaagattctacagagaattgcctatgtaaatgttggaatctaccccttcacctccattttcttgattgtctactgttttctcccggcactttcgttgttctctggccagttcattgtccagactctcaacgtaacattccttacttacctcctcatcataacagttactctttgtttactagctgtgcttgaaattaagtggtctggcattgagttagaagagtggtggagaaacgagcagttttggttgatcggggggacaagtgctcatcttgctgccgtgcttcagggtctgttgaaagtgattgctgggattgagatttctttcaccttgacatcaaaatcagcaggagatgacttggatgatgagtttgct

SEQ ID NO: 228401 - DNA, 400 bp, Gossypium hirsutum
atcggcagcagcgggagcctctccacgtcctcgtcgtccagcccgcccggcacgccgagccccgccgacgccaaggcgcccccggccgcctgctacgcgggggccgcgccgccgccctcgcaggtcaagagcaaggccaagaagacagtggacaagcacagcgacgagtacaagatccggcgcgagcgcaacaacatcgccgtgcgcaagagccgcgacaaggccaagatgcgcaacctggagacgcagcacaaggtcctggagctcacggccgagaacgagcggctgcagaagaaggtggagcagctgtcgcgcgagctcagcaccctgcggaacttgttcaagcagctgcccgagcccctgctcgccttctccggccactgctagcgcggcccccgcg

SEQ ID NO: 228402 - DNA, 380 bp, Gossypium hirsutum
ggaagatgcattttggatgcttgctgtcctccttgaaaatgttttagttaatgactgctatacaactaacttatccggatgccatgtcgaacaaagggtttttaaggatttgcttgctaaaaagtgcccaaggattgctgctcatttggaagcattggagtttgatgtctcccttgttgctactgaatggttcctgtgcctcttctctaaaagcttgccttcagagacaactctgcgggtatgggatgtccttttctatgagggggcaaaggttctttttcatgtagctttggctatatttaagatgaaagaacatgaattgcttctaacgcatcaggttggtgacattattaacatattacagagaactacccatcacc

SEQ ID NO: 228403 - DNA, 369 bp, Gossypium hirsutum
atgccgcccaagatgccgaaaggaaagaaggccaagggaaagaaggtggctccggcccctgctgtcgtgaaaaagcaggaggccaagaaagtggtgaatcccctgtttgagaaaagacctaagaattttggcattggacaggacatccagcccaaaagagacctcacccgctttgtgaaatggcctcgctatatcaggttgcagcggcagagagccatcctctataagcggctgaaagtgcctcctgctattaaccagttcacccaggccctggaccgccaaacagctactcagctgcttaagctggcccacaagtacagaccagagacaaaacaagagaagaagcagaggctgttggcccgggccgag

SEQ ID NO: 228404 - DNA, 402 bp, Gossypium hirsutum
atggaggtgtctaccaacactgccatgattcagaccagcaagacagagatcacggagctcaggcgcacgctccagggcctggagattgagttgcagtcccagctgagcatgaaagccgggctggagaacacggtggcggagacggagtgccgctacgccctgcagctgcagcagatccaggggctcatcagcagcatcgaggcccagctgagcgagctccgcagcgagatggagtgccagaaccaggagtacaagatgctgctggacatcaagacgcggctggagcaggagatcgccacctaccgcagcctgctcgagggccaggacgccaagatgactggtgttccttcctcagcaggaagcgtcagcccccgaagcacctctgttaccacaactttcagt

SEQ ID NO: 228405 - DNA, 393 bp, Gossypium hirsutum
atcccaccctgcagaacgtggcccaggcctcgcctggcgccagcacaattgtgacagtgcccacaggggctgcccccgggcccgaggagcacacggccaccattgaggtggctgccgtggcagaggaccacgagcggaagtagccgacgggagggcgaggcccctgggacggacggggctggctgcctctcagctgcggcagcagggaacgggcagaggccgcagggctggctcgggcaggtgcgtcacgtgggctgcagaaccaaagagaggaatcgccaaaacaaatcacgagaagagagaaggggacagaacagcgagagcaacctggaaatcggtcttcaggtcccacgtttcccccccttttttcttgggaaatatatttttccatct

SEQ ID NO: 228406 - DNA, 387 bp, Gossypium hirsutum
atggccaggaccgacctggagatgcagatcgaaggcctgaaggaggagctggcctacctgaggaagaaccatgaggaggtgcggttgctgctggcttccggggtgggaggctggtttggtggggttgccagatgcacccagggccaggagaggagtctgctgagctgactgcctcctgccatcccttcccaggagatgcttgctcttcgaggtcagagcggtggagatgtgaacgtggagatggatgccgcacctggcgtggacctgagccgcatcctgaatgagatgcgcgaccagtacgagcagatggcagagaaaaaccgcagagatgctgaggcctggttcctgagcaaggtggggctcgggccctcagtgagcctgtagcac

SEQ ID NO: 228407 - DNA, 343 bp, Gossypium hirsutum
gaaattgtgaaggaagtctcctcatatcttaagaaagttggttacaaccctgacaagatcccatttgtcccaatctctggatttgagggtgataacatgattgagaggtctaccaaccttgactggtacaagggtcccactctccttgaggctcttgaccagatcaatgagcccaagaggccttcagacaagccacttcggctcccacttcaggatgtctacaagattggtggcattggaactgtccctgttggtcgtgttgagactggtgtccttaagcctggaatggttgtgaccttttgcccctctggtctgaccactgaagttaagtcttgtgagatgc

SEQ ID NO: 228408 - DNA, 372 bp, Gossypium hirsutum
cggacgcgtgggcttcaaagaacgctggtaccatcaaaaccagctagctaaatcaaccgcatttcaccaggatggctagagggttgaagaaacacttgaagaggctcaatgcccctaggcattggatgcttgacaagcttggtggtgcttttgcacccaagccatcatctggaccccacaaatccagggaatgcttgccattaattctcattctgcgaaacagattgaagtatgctctcacgtacagagaagttattgctattctcatgcagaggcatgtcatggttgatgggaaggttcggaccgacaagacttatcctgctggtttcatggatgttgtgtcaattcctaaaaccaatgaggacttccgtc

SEQ ID NO: 228409 - DNA, 379 bp, Gossypium hirsutum
ctttcccaaccaagaagagcagccgccgcagagcaaagggttcagagaggaaatggcagcaaaaaggaagacccctgttaagacccgaaacccagatcttatacgtggcgtaggcaagtattccaggtctaagatgtaccacaagcgcggcctttgggctatcaaggccaaacacggtggcgtcttcccccgccatgaccccaagcctaaagcacccgtcgcccccgagaaggctcccaaattttaccccgctgaagatgtcaagaagccgctacttaataagcgcaagcctaaacccaccaagctcagagcaagcattactccagggacagtcttgattttgttggctggaagatttatggggaagagaattgttttc

SEQ ID NO: 228410 - DNA, 377 bp, Gossypium hirsutum
cccacgcgtccgatttcccttcttcaccacatgatcaaaacccaaccttcgttttcacccgaccgatcaactcaccacgtcttgctctcacaatcttgcaaagcacccgattcctccctctccgccgttaaccaaatcctcaacctaatgatcaataacgggctaaaacctaatcaggtcaccaccgatattgctatccggtcgctttgtgaagttgggcgtattgatcatgctgttgaattggtaaaagaactttctttaaaacaatctccgcctgataattatacgttcaatttgcttgttaagaatttatgcaagtgtagaactttaagtacggtttacagttttattgatcatatgaagagttcttttggcat

SEQ ID NO: 228411 - DNA, 301 bp, Gossypium hirsutum
gttttgtatttcatactcatttagcccctttcattagcatcgaaatcactccagttttctttatcactgaaaaatgtcttgctgtggtggaaactgtggctgcggttctggctgcaagtgtggcagtggctgtggaggatgcaagatgtacccagacctgaacgttgccgtgatgaccacaactgagactctggttcttggtgtagcaccccagaaagcacactttgagggagctgagatggaattcggggctgagaacggctgcaagtgtggagacaactgcacctgcaacccttgcaat

SEQ ID NO: 228412 - DNA, 361 bp, Gossypium hirsutum
atgggttttccactggatatggggctgctgttaaaactggcaaggtcaaacctggttccacttgcgtcgtctttggcctgggaggagttggcctgtcagtcatcatgggctgtaagtcagctggtgcatctaggatcattgggattgacctcaacaaagacaaatttgagaaggccatggctgtaggtgccactgagtgtatcagccccaaggactctaccaaacccatcagtgaagtgctgtcagaaatgacaggcaacaatgtggggtacacctttgaagttattgggcgtcttgaaaccatgattgatgctctggcatcctgccatatgaactatgggaccagcgtggtagtaggagc

SEQ ID NO: 228413 - DNA, 382 bp, Gossypium hirsutum
cggacgcgtgggcgcattctttcacgggataaactgaaattgagtcgaacggcgggattgaaggggaagaagaagggagttaccttcactatcgattgttcgaagccagtggaggataaaatcatggacattgcccctctggaaaagttccttcaagagagaatcaaggttggaggcaaggctggtgcacttggtgaaaccgtagccctcactcgcgagaagagcaaaattaccgtcacttccgatggcgacttctctaagaggtatctgaagtacttaacaaaaaaatacttgaagaaacacaatgtacgggattggctccgagtaattgcttccaacaaagatcaaactgtttacgagttaaggtacttcaacattgctg

SEQ ID NO: 228414 - DNA, 395 bp, Gossypium hirsutum
ataaaaataaagtctctagtaattgaaaactatatctaggggttataaccactcactgaaaaaaaaatacattttaaattaaaatttctttttttagatagctgacattaatttgtatcattttctttcaaatacagatatgtaatgggaaataatccagctgaccttctagctgtcgatccaagaacaggcataatcactttgaaaaataaagttaccagggaacagtataatatgctcggaggaaaataccaaggaacgattctctctagatgatgctcttcaaagaacttgcactggtacaattaatattgacattcaaaatgttgatggagatgacaggactaatacacaggcgagcactgaagttaccaatactggcagagaagaaagta

SEQ ID NO: 228415 - DNA, 381 bp, Gossypium hirsutum
cagaaagtccgacggttccgccagggtgacatcattgctttgccgcagggtgtggttcactggagctacaatgatggcaatgagcgtgttgttactatcaatctacttgacactggcaacagtgctaatcagctcgacaacatccctagaagattccatcttgctggtaacccagaagaggaacagaggcaactgaggaggctagcacagcagatgcagggaagaagtgagaggggggaggagtctgaggaagaagaaggagaaggagaagaagaagaagaagaagacaaccccagccgccgcagccgccaccaggaggaggaggagcaggggcgggaaagctcatcatgcaacaaccttctctgtgccttcgacagaaac

SEQ ID NO: 228416 - DNA, 386 bp, Gossypium hirsutum
atgtcagccgcattttctcttgcatcgccagcgcatccctgagacaccatggggaaggtgaaggtcggagtcaacggatttggtcgtattgggcgcctggtcaccagggctgcttttaactctggtaaagtggatattgttgccatcaatgaccccttcattgacctcaactacatggtttacatgttccagtatgattccacccatggcaagttccatggcaccgtgaaggctgagaacgggaagctcgtcatcaatggaagccccatcaccatctttcaggagcgagatccctccaaaatcaagtggggcgatgctggcgctgagtacgtcgtggagtccactggcgtcttcaccaccacggagaaagctggtgctcatttgca

SEQ ID NO: 228417 - DNA, 380 bp, Gossypium hirsutum
accatgtcgccccaaaatgaatggtagagtggagaaaaaaaacaaaaaacaaaaaacaaaaacaaaaacaaaaaaacaagaaaataaaaaacaaaaaaaacctctaccggggcaactcatttctcattggtatatggaatagagacaattttacccgtcgaagttgatattccttcccttcgagtcttgttagagctaaagttggatgaagcagaatggatccaagcccgatatgatcagttaaatttgattgaagagaaaaggttgaaagctatccgtcatggtcaaatataccaaaaacaaatgatgcgagctcaccaaaaaggttcaccccagtgaattccatgaggtggacctgatatcgaagaagatccttccca

SEQ ID NO: 228418 - DNA, 374 bp, Gossypium hirsutum
aacacgtagatatggcgattaacccttctttgctctttctttcccttctttttctcttcaatggctgcctagctcgccagaccttttcgtcacagcagtcccaaaatgagtgtcaaatcaataggctccgcgcctctgcaccccagacccgaattcgctccgaagccggcaccaccgagtggtggaaccccaactgtcaacagctcaggtgtgctggtgtatctgtaatgaggcagactattgaacctaatggccttgttttgccttccttcaccaatgctcctcagcttctctacattgtccaaggaagaggtattcaaggtattgtgatgcctggatgtgccgaaacattccaggattcacagcaatggcag

SEQ ID NO: 228419 - DNA, 343 bp, Gossypium hirsutum
ataaaaacaggggagcttgtgactttatccgaacaagagctggttgattgtgataaggagaaccaaggttgtgagggaggattgatggaacaagcatttcagttcatcaagcaaagtgatggaataacaactgagaattattatccctacagagccaaagatgagtcttgtgactcatccaagttgaatggtcctgtagtgatcattgatggctatgaaatggttcccgaaaaggatgaaaaagctctaatgaaagctgttgcaaaccaacctgtgtctattgctatagatgctggtggtacggatttccagttctactcggagggagttttcattggagact

SEQ ID NO: 228420 - DNA, 390 bp, Gossypium hirsutum
atgtttgctgtgatgtttggggatgtgggccacgggctgctcatgttcctcttcgccctggccatggtgcttgcggagaaccagccggcagtgaaggccgcgcagaatgagatctggcagactttcttcaggggccgctacctgctcctgctcatgggcctgttctccatctacaccggcttcatctacaacgagtgcttcagtcgcgccaccagcatcttcccctcgggctggagtgtggccgccatggccaaccagtctggctggagtgatgcattcctggcccagcacgcgatgcttaccctggatcccaacgtcaccggtgtcttcctgggaccctacccctttggcatcgaccctgtctggagcctggctgccaaccacttgagc

SEQ ID NO: 228421 - DNA, 399 bp, Gossypium hirsutum
atgccggcgcggcgctcccctgctctctggctccgggctgcggcgccgcggctggagcgagcccctgtcccggcgcggggcggcggcgggcggccggcaggcactgccttgcgtgtgagtgcacctcactcacatgtgctggagaatctggtaaaagcaccattgtgaagcagatgaggatcctgcatgttaatgggtttaatggagacagtgagaaggcaaccaaagtgcaggacatcaaaaacaacctgaaagaggcaatcgaaaccattgtggccgccatgagcaacctggtgccccccgtggagctggccaaccctgagaaccagttcagagtggactacattctgagtgtgatgaacgtgcctgactttgacttccctcccgaattctacgagc

SEQ ID NO: 228422 - DNA, 382 bp, Gossypium hirsutum
agccataaccctttccacttgcatcgcagatcattccaatctcgattcagggaagaacatggcaatttcagggtcctccaaaggtttgcttcaaggcatcctattcttaggggcatcaatgagttccgcttatctatcttagaagcaaaccccaacactttcgttctcccacaccattgtgacgctgagaaaatttaccttgtcaccaacggaagaggaacgcttacgttcttgacacatgaaaacaaagagtcttacaatgtagtaccgggagttgtagtcagagtcccagcaggaagcactgtgtacttggctaaccaagacaacaaggaaaagctaatcatagcagtgcttcaccgccctgttaataaccctggacaat

SEQ ID NO: 228423 - DNA, 391 bp, Gossypium hirsutum
atgcagatgaaataaatacttcatcctgctctggaaacgactgcaatgacattattcccagtgctgttgttcctggttgctgggctgcttccatccttcccagcaaatgaagacaaggatcccgcttttactgctttgttaaccacccaaacacaagtgcaaagggagattgtaaataaacacaatgaactgaggagagcagtctctccacctgccagcaacatgctaaagatggaatggaacaaagaggctgcagcaaatgcccaaaagtgggcaaaccagtgcaattacagacacagtaacccaagggatcgaaagactagtctaaaatgtggtgagaatctctacatgtcaagtgcccccaattcatggtcacaagcaatccaaagct

SEQ ID NO: 228424 - DNA, 377 bp, Gossypium hirsutum
ctcccctcgttgttcatcaatcccttcatctaaatctaacccctagttaagttctctgactattgaagaaatttgaattccttaattatcattcaatttatcagttcatattaaatattcttccggataaaaaaaaaagaacaacacttgctatggcttctttgcaaaggtcagcgagttcatccgattcggatccgcagtacgcaaacatcgatgagaggaaaaggaagagaatgctatcaaaccgtgaatcggcaaggcgatcaagaatgaggaagcagaagcggctccaagatttggttcaggaagtgaacgcattacagaaagataacagtcagatctctgaaaagatcggcgtcgccacccaatactacatc

SEQ ID NO: 228425 - DNA, 377 bp, Gossypium hirsutum
ctagatttcaccccttaggtttctctttcctcacagagacagagagagaatcagaggagcttaatcgagatttgatattcctcaccacagatggatcagatattgaacaaggtgggctcctattggctcggccagaaggccaacaaggagatcgattccgtcggcgacgacctcaactcattatccaccagtattgaagggggagccaaatggttggttaataaaatcaaaggaaaaatgcaaaagccgttgccagagctgttaagagagtataacctgccaataggaatcttccctcgtgatgccacaaattatgaattcaatgaagagactgggaagctcactgtttttattccagcaatatgtgaagtgggata

SEQ ID NO: 228426 - DNA, 398 bp, Gossypium hirsutum
atcaacaatcggactcatagcaaagagtgttgaaatcccaactactaaccttcactcaaatgtaattccaagttgtgaacctcagagtttggtggaaaatctaacacagaagttaaataatgttaacaatcagttatttatgactgatgtaaaagagaatttcaaaaccagtattgagtcccatacagtgttagcccctttaacattaaaaactgaaaatggtgattcccaaatgatggctttgaattcatgcacaacttcaataaattctgatttgcagatttctgaagacaatgttatacaaaactttgagaagactcttgaaattattaaaactgctatgaattctcaaatacttgaggtaaaaagtggatctcagggtgctggtgaaacatcac

SEQ ID NO: 228427 - DNA, 380 bp, Gossypium hirsutum
gttccaagagtccaatcagaacagacgttgctctcctttggttagagtcgagaaaatgtttgaggatatccaatctaaacttcctggagctccacagtttcttctttgtcttttacctgataggaaaaattctgatctttatggtccatggaagaagaagaatctttctgagtttggcatagtcactcagtgcatggctccaactagggtcaatgatcagtaccttacaaacctgcttctaaaaatcaatgcaaagcttggaggactgaattccatgctagcaattgagcaaacaccttcaattccagttgtttcaaaggttccaaccatcatccttggcatggatgtgtctcatggctctcctgggcagtctgatattc

SEQ ID NO: 228428 - DNA, 398 bp, Gossypium hirsutum
atggctgaaggggacctcaccccagacgaggtggtggccctagtggcccagggcctgcaggagggggagcgagacttcggggtcaaggcccggtccatcctgtgctgcatgcgccaccagcccaactggtccctcgaggtggtggagctgtgtaagaagtaccagcagcagactgtggtagccattgacctggctggagatgagaccatcccaggaagcagcctctttcctggacatgtcgaggcctaccaggaggctgtgaagagcggcattcaccgtactgtccacgctggggaggtgggctcggccgaagtagtaaaagaggctgtggatatactcaagacagagcggctgggacacggctaccacaccctggaagaccaggccctttatgacag

SEQ ID NO: 228429 - DNA, 384 bp, Gossypium hirsutum
atgtttgagacagagcaggccctgcgcctgagcgtggaggccgacatcaatggcctgcgcagggtgctggatgagctgaccctggccagagccgacctggagatgcagattgagaacctcaaggaggagctggcctacctgaagaagaaccacgaggaggagatgaatgccctgcgaggccaggtgggcggtgagatcaatgtagagatggacgctgccccaggtgtggacctgagccgcatcctgaacgagatgcgtgaccagtatgagaagatggcagagaagaaccgcaaggatgccgaggattggttcttcagcaagacagaggagctgaaccgcgaggtggccaccaacagcgagctagtgcaaagccgcaagagcgag

SEQ ID NO: 228430 - DNA, 377 bp, Gossypium hirsutum
gtagttcctggagttgtagtaagaattccagcaggaagcactgtgtacttggccaaccaagacaacagggaaaagctaaccatagcagtgctccaccgacctgtcaataaccctggacaattccagaaattcttccctgctggacaggaaaatcctcagtcatacttacgaatcttcagccgtgaaattcttgaggctgtcttcaatacacgaagtgagcagctagacgagctgtttggtgggaggcaaagccatcgaaggcagcagggacagggaatgttccgtaaagccagccaagaacaaataagggcattgagccaaggagctacttcaccaagggggaaaggtagcgagggatacgccttcaacttattgag

SEQ ID NO: 228431 - DNA, 395 bp, Gossypium hirsutum
atccagtacgaggagattgcccagaggagcaaggctgaggccgaggccctgtaccagaccaaggtccagcagctccagatctcagttgaccaacatggtgacaacctgaagaacaccaagagtgaaatcgcagagctcaacaggatgatccagaggctgcgggcagagatcgagaacatcaagaagcagtgccagactcttcaggcatccgtggctgatgcagagcagcgtggtgagaatgcccttaaagatgcccacagcaagcgcatagagctggagactgccctgcagcaggccaaggaggagctggcacgaatgctgcgtgagtaccaggagctcatgagtgtgaagctggccctggacatcgagatcgccacctaccgcaaactcctgga

SEQ ID NO: 228432 - DNA, 386 bp, Gossypium hirsutum
attcccgcttctcctctgggggagcctatgggctggggggcggctatggcggtggcttcagcagcagcagcagctttggtagtggcttcgggggaggatatggtggtggcttgggtagtggcttgggtggtggctttggtggtggctttgctggtggtgatgggcttctggtgggcagtgagaaggtgaccatgcagaacctcaacgaccgcctggcctcctacctggacaaggtgcgtgctctggaggaggccaacgccgacctggaggtgaagatccgtgactggtaccagaggcagcggcccgctgagatcaaagactacagtccctacttcaagaccattgaggacctgaggaacaagattctcacggccacagtggacaat

SEQ ID NO: 228433 - DNA, 372 bp, Gossypium hirsutum
atgaaatcaacaagcgcacagcagcagagaatgaatttgtgactctgaagaaggacgtggatgctgcctacatgaacaaggttgaactgcaagccaaggcagacactctcacagacgagatcaatttcctgagagccttgtatgaagcagagctgtcccagatgcagacccacatctcagacacatccgtggtgctgtccatggacaacaaccgcaacctggacctggacagcatcattgctgaggtcaaggcccaatacgaggagattgctcagaggagccgggctgaggccgagtcctggtaccagaccaagtacgaggagctgcagatcacagcgggcagacatggggacgacctgcgcaacaccaagc

SEQ ID NO: 228434 - DNA, 325 bp, Gossypium hirsutum
atgccaaagtggcctccaagaatgtcatccctgccttggaactggtggagcccattaagaagcacgaggtcccagcaaagtctgatgtttactgtgaggtgtgtgaattcctggtgaaggaggtgaccaagctgattgacaacaacaagactgagaaagaaatactcgacacttttgacaaaatgtgctcgaagctgccgaagtccctgtcggaagagtgccaggaggtggtggacacgtacggcagctcaatcctgtccatcctgctgcaggaggtcagccctgagctggtgtgcagcatgctgcgcctctgctcttgcacgcg

SEQ ID NO: 228435 - DNA, 379 bp, Gossypium hirsutum
cattcgagtaacccaaaatttcgtagctggatccgcctccgcctccgaacagttgtcaccggaatcggaaattcagataagtgaagatgaatggagaagtccccaacataaagaaatgggttgttttctatcctgtttatattaattcgaagaaaacagtagctgagggaaggcgaatcagtttggctaaagcctgtgaaaatcccacttgtgttgaaattgctgattgctgcaaccatctcaaagtccctaatgccattgagattgataaggcgtaccctcgtgatttcatgcaaagagggagagtgagggtccagttgaaaaaggaagatgggactttatggaatccagccatttcttcaaggaagcagctgatgct

SEQ ID NO: 228436 - DNA, 377 bp, Gossypium hirsutum
agaacttatgcctatatggacttccaaatgaaacctgggaagttaacttgcctgttgaggaggtgcctcctgagcttccagagccagcattgggcataaactttgctagagatggaatgcaggagaaggactggctatcattggttgcagttcacagtgattcgtggttgcttgctgttgctttctattttggtgcacgatttgggtttggaaagaatgagaggaaaagactcttccagatgataaatgaccttccgaccatatttgaagttgtcacaggaaatgtcaagcaactgaaagaccaatctgcgaatcacaatggcagcagcaaaagcaaatcaagtgctaagtctcgccaatctgaaccccagagtaaa

SEQ ID NO: 228437 - DNA, 403 bp, Gossypium hirsutum
attgcaaactctcttacttgagctgaatatttagtgtaattacatctcagctttgagggctcctgtggcaaattcccggattaaaaggttccctggttgtgaaaatacatgagataagtcatgaaggtcactatcatcctccttctgcttgcacaagtttcctgggccggaccgtttcaacagagaggcttatttgactttatgctaaaagatgaggcttctgggataggcccagaacttcctgatgaccgcgactatgagccccctttaggcccaatgtgccccttccgctgtcaatgccatcttcgagtggtccaatgttctgacttgggtctggacaaagtgccaaaggatctttccccttgacacaactctgctagacctgcaaaacaacataataact

SEQ ID NO: 228438 - DNA, 325 bp, Gossypium hirsutum
atggacaatgccaacgtccttctgcagattgacaatgcccgtctggccgcggatgacttccgcaccaagtatgagacagagctgaacctgcgcatgagtgtggaggccgacatcaatggcctgcgcagggtgctggatgaactgaccctggccagagctgacctggagatgcagattgagagcctgaaggaggagctggcctacctgaaaaagaaccacgaggaggagatgaatgccctgagaggccaggtgggtggagatgtcaacgtggagatggacgctgcacctggcgtggacctgagccgcattctgaacgagatgcgtg

SEQ ID NO: 228439 - DNA, 405 bp, Gossypium hirsutum
  unsure (1)..(405): unsure at all n locations
atcctgtcctgtatttagaaaaagcagctagaatatttctccattaactcttgagattcacaggactgtctagctctgagtcctagcaatagactccttagaggagtagtaaatttatctagactttctctagataatgcaggcggaagacctgggttcccggggtggggcgctgcagctcttcctgtgtttggcttccaggaattacatgaacgacagccttcgtaccgacgtcttcgtgcggttccagcctgagagcatcgcctgtgcctgcatttatcttgctgcccggacactggagatccctttgcccaatcgtccccattggtttcttttgtttggagcaactgaagaagaaattcaggaaatctgcttgaagatcttgcangcttatgctcggaaaaa

SEQ ID NO: 228440 - DNA, 374 bp, Gossypium hirsutum
ggtttaatcagtattatagattgttcatccagagatctaagcttattagcttaagctataaaaatggtgaaaagatcgttgggctttttctttcttctcctcattgtcttagcctcgcaatggggggtgcagccaactgaggcaagggtttgccagtcacagagccataagttccacggtgcatgtttgagtagccacaactgtgcgatggtgtgcaggaacgaaggtttctccggcggcagatgtcgaggattccgtcgccgctgcttctgcactaagctttgctaatgcaagcttgcccttagctcatattttaaggatcatttcatgaagtaaagacctttatgtttttcgtgcatgcatgtcaatgtttc

SEQ ID NO: 228441 - DNA, 455 bp, Gossypium hirsutum
  unsure (1)..(455): unsure at all n locations
gccaagctcctaatacgnnactcactatatgggataatgctggtacccgcctgcatggtacccgtgtccgtgatattcccgggtcagaccccacgtccgtccggagaaaccttcccatcttgtgagaacctagataagcttttagcatttagagcaattcaatatttccgcgaagtttaaatttaaagcgaagatatcttntgctaagtagattcaatcgagttacctgcgccaagtgtgggattgatttcaaagaagaataaccgagaaaggtatcgatgtgaagcggttcggtgagcttttgatgtcgtctggggtcgtgttgaatgatgatgtccattgggtcacctttcatagtggatacgacttcgggtacttgcttaagcttttgacttgcaagagtttgcctgatagtcaagctgggttttttgatttgatccaaatatatttcccca

SEQ ID NO: 228442 - DNA, 258 bp, Gossypium hirsutum
gacgtcgaggcagctgcggtagcagtaccggtggctgcttctccggcgaagccagatcctgtggctcctgggattgaattgggaacagtggttccttttaccacaatgcagggtgctgtgagtaggaatatggtcgagagcttgtcagtgcctacgttccgagttgggtacaccatcaccacaaatgcacttgatgccttgtacaaaaagatcaagtccaagggtgtaacaatgacagcattgcttgcaaaggcaact

SEQ ID NO: 228443 - DNA, 393 bp, Gossypium hirsutum
ccatatcttagggtttctcctcctctctacctccaatgggaaagggaactgggagttttggtaaacgaaggaacaagacccacacgctctgcgtcagatgtggccgccgcagcttccacctccagaagagccgttgctctgcctgtgctttccccgctgcccgtaagaggacatataactggagtgtgaaggctatccgaagaaagacaactggcactggtaggatgaggtatcttcgccacgttccacgcaggttcaagacgggtttcagggaaggtactgaagcagcaccaaggaagaaagttgcagcagcttttgcttaaaaggcaaattgtaatggtatgaggttttgttttggatgaagccatgtttatgaggaaacatttagtgatg

SEQ ID NO: 228444 - DNA, 381 bp, Gossypium hirsutum
  unsure (1)..(381): unsure at all n locations
gcttcaagtccaaggaatatgtccgcgagacttttgcttggatgcactactactggtaccttactaatgatggaattgagtttctcagaacttaccttaatcttccatccgaaattgttcctgctactttaaagaaatctgcaaggcccccgggtaggctaggcggcccacctggtgatcgccctcggggtcctcctcgctttgaaggagaccgaccaaggtttggtgacagagatgggtaccgtggaggtcctcgtgggggtgactttggtggtgataagggaggtgccccagcagatttgcaaccatcattcangggtcctggtggaaggcctgcctttggtcgtggaggtggagggtacagtgcagctncatctggtt

SEQ ID NO: 228445 - DNA, 389 bp, Gossypium hirsutum
acgatatgaggaaaatgatggttgccaaagttactgtcttgtttgctgtgctttcctttccagctgtcttgccatttgcgcaggatgaggaagaccaaggtcttgttatgaactcatacaaagattcttgtactgaagctgaagacattatcaaggagccagtttagctactgtacacgcgacacacaaacactgctttttcttggctgagaaacattttccatgactgtgctgtccaggcatgtgatgcttcactgctgctggactccacaagaaggagctcgtctgatatggagacagacaggagctttggcctaaggaatttcaggtacattgagaccatcaaagaagctgtagaaagggaatgtcctggagttgtttcttgtgct

SEQ ID NO: 228446 - DNA, 413 bp, Gossypium hirsutum
  unsure (1)..(413): unsure at all n locations
atggcggagcaagagcaaagaaaaatccctttggttccagaaaatctgctgaaaaagaggaaggcttatcaagccctcaaagccacccaggcaaagcaggcacttttggcaaagaaggagcagaggaaaggaaaagggctcaggtttaagcgactggaatcattcctacatgattcctggcggcagaaacgtgacaaggtgcgtctcagacgactagaagtgaaacctcatgccttggaattgccagacaaacattccttggcctttgttgtacgcatcgaaaggattgatggcgtgagtttattggtgcagagaaccattgcaagacttcgcctaaagaaaatttttagtggtgtctttgtaaaagtcacccnccagaacctaaaaatgctgcgtatagtggaaccttatgt

SEQ ID NO: 228447 - DNA, 387 bp, Gossypium hirsutum
atctggagatgcagattgagaacctcaaggaggagctggcctacctgaagaagaaccacgaggaggagatgaatgccctgcgaggccaggtgggcggtgagatcaatgtggagatggacgctgccccaggtgtggacctgagccgcatcctgaacgagatgcgtgaccagtatgagaagatggcagagaagaaccgcaaggatgccgaggattggttcttcagcaagacagaggagctgaaccgcgaggtggccaccaacagcgagctagtgcagagcggcaagagcgagatctcggagctccggcgcaccatgcaggccttggagatcgagctgcagtcccagctcagcatgaaagcatccctggagggcagcctggcagagacag

SEQ ID NO: 228448 - DNA, 402 bp, Gossypium hirsutum
  unsure (1)..(402): unsure at all n locations
atgctcccccctccccccgagcgccgctccggctgcaccgcgctcgctccgagtttcgggctcctgctaagctagcgccgccgtcgtctcccttcagtcgccgtcatgattatctaccgggacctcatcagccacgatgagatgttctccgacatctacaagatccgggagatcgcggacgggctgtgcctggaggtggaggggaagatggtcagtaggacagaaggtaacattgatgactcgctcattggtggaaatgcctccgctgaaggcccagagggcgaaggtaccgaaagcacagtaatcactggtgtcgatattgtcatgaaccatcacctgcaggaaacaagtttcacgaaagaagcctacaagaagtacatcanagattacatgaaatcaatc

SEQ ID NO: 228449 - DNA, 358 bp, Gossypium hirsutum
ggacaattcgaggaattcttcccagctggaagccaacgccctcagtcatatctccgagcctttagtcgtgaaattcttgagcctgccttcaatacacgaagtgagcagctagacgagctgtttggtgggaggcaaagccgtcgaaggcagcagggacagggaatgttccgtaaagccagccaggaacaaataagggcattgagccaagaagctacttcaccaagggagaaaagtggcgagagattcgccttcaacttattgagccaaacccctcgctactccaaccaaaacggccgcttcttcgaggcttgcccacgtgaattccggcaactcagggacatcaatgtcaccgtttcag

SEQ ID NO: 228450 - DNA, 407 bp, Gossypium hirsutum
atctttcctgtgcgccacctagcgtttctatcgcgccagttcctcagcctgagtgctgtgaaggtgacagcctgaggtgacccagctggccccccgcgatgctggcagcacggcggctgctcggcgggtcgctcccctctcgggtatctgtgcgtttcagcggcgacacgacagcacccaagaaaacctcatttggctcgctgaaggatgaagaccggatcttcaccaacctgtacggccgccatgactggaggctgaaaggtgccctgagtcgaggtgactggtacaagacaaaagagatcctgctgaaggggcccgattggatcctgggtgagatcaagacatcgggtttgcggggccgtggaggcgctggcttccccactggcctcaagtggagcttcatgaat

SEQ ID NO: 228451 - DNA, 389 bp, Gossypium hirsutum
gattcccaaacgaaaccctattttcctgtctgtaatctttgtttcgctcctcgcaatcgcctccgctaaagtattcttcgaagaacgttttgatgagggatgggaaagtcggtgggtaaaatctgactggaaaaaggatgagaacatggctggggagtggaattacacttctggaaaatggaatggagatcctaatgacaaaggtattcaaactagtgaagactacaggttctatgctatttcagctgagttcccagaagtcaacaacaaagataagactctagtcttccaattttctgtcaagcatgagcaaaagcttgattgtggtggtggctacatgaagttgctcagcggtgacattgaccagaaaaaaattggtggtgaaaccc

SEQ ID NO: 228452 - DNA, 385 bp, Gossypium hirsutum
ctttccatctctccaaacacaattcactaaagcaaaaacagctagaagaagaaggaatggccgcctcggataaagttcaagaactgcatgtatatgagatgaatgaaagagatcgtggtagtccagcttaccttcgtttaagtcagaaacctgttaactcacttggtgatattgtcccttttagcaacaaaatatataggggagatatggagaaacggataggaataactgcagggatgtgtatattgatagagcataaacccgaactgaaaggtgaccgctacgaagccatcttcagcttttacttcggagactacggtcacatagcggtgcatggaccttacttgacttaccaggactcgtatctcgctattactggtggatc

SEQ ID NO: 228453 - DNA, 359 bp, Gossypium hirsutum
  unsure (1)..(359): unsure at all n locations
aatggctgactctgctttcaagaaagttcagattcagagagatgacactgcatttgatgcatatgtggttggcaaagaagatgcacccggaattgttgttcttcaggagtggtggggtgtggattttgagataaaaaaccatgccttgaagatctctcaactgggcccaggattcaaagctcttattccagatttgtatcgaggaaaggttggtcttgatgttgcagaggcacaacacctaatggatggtcttgactggcaaggtgctgtaaaggatatctgtgcttcggttgattggcttaaagctaatgggtcaaaaaaggttggagtgaccggattttgcatggngggtgctctct

SEQ ID NO: 228454 - DNA, 381 bp, Gossypium hirsutum
aggcctgcaattttctgctgtccaaacagctcccctcaggtggctggggagaaagttatctttcatgtcaaaacaaggtttactcaaatgttgagggcaacaaaccacatatggtaaacactggctgggctatgttggctctaattgatgctgggcaggccgagagagatccaacaccactccacaaaggagctaaatatttgataaattcccaaatggaggacggtgatttcccgcaacaggaaattatgggagtgttcaacaggaattgtatgatcagttactccgcgtatcgcagcattttccctatttgggcattaggcgaatatcggactcgagtgttgcagctgcggacaacgtcgtagaacaatggtaataact

SEQ ID NO: 228455 - DNA, 364 bp, Gossypium hirsutum
attcctcgtggaagtgacatcgtctttaaaccctgcgtggcaatccctgacgcaccgccgtgatgcccagggaagacagggcgacctggaagtccaactacttccttaagatcatccaactattggatgattatccgaaatgtttcatcgtgggagcggacaatgtgggctccaagcagatgcagcagatccgcatgtcccttcgagggaaggccgtggtgctgatgggcaagaacaccatgatgcgcaaggccatccgagggcacctggaaaacaacccagctctggagaaactgctgcctcatatccgggggaatgtgggctttgtgttcaccaaggaggatctcactgagatcagggacat

SEQ ID NO: 228456 - DNA, 212 bp, Gossypium hirsutum
gttcctcgcggacgtgacatagtgtttaaggggggcgtggcaatccctgacacaccggcgtgatgcccaacgtagacagtgcgacctgaaagtgcaactactttcttaagagcatccaactcttggatgattatccgaaatgtttcatcttgggagcagtcaatgtgggctccacgcagatgcatcagatccacttgtcacttggagggaag

SEQ ID NO: 228457 - DNA, 313 bp, Gossypium hirsutum
gctttgtattctagacaaaatggagccaaattaatggagctttagatactccaattctttttattattcgaatacgtcaaggcgtggtgaatcacgatctgatctgtctctatgaggaggatatgaagaaattgacggatacgaggatttcacggcacagttcgtatgtccattgagcgctgaggatactgacattgttggactttgacgccatatcgctcaataacatgctgctgaaaccaaatacggggcgtgcaccggttgcgcgaatagggacagcatggatatcgtcagtcgcattaccatgcgacat

SEQ ID NO: 228458 - DNA, 373 bp, Gossypium hirsutum
atcgagtggccaacgagccggcagagacccaccgagcgtcggcggagggagcagcgccggggcgcacgcggccaccatgacccagacgcccgccttcgacaagcccaaagtagaactgcacgtccacctagacggagccatcaagcctgaaaccatcttatactatggcaggaggagagggatcgccctcccagctaacacagcagaggggctgctgaacgtcattggcatggacaagccgctcaccctgccggaattcctggccaagtttgactactacatgcctgctattgcgggctgccgggaggctatcaaaaggatcgcctacgagtttatagagatgaaggccaaagagggcgtggtgtatgtggag

SEQ ID NO: 228459 - DNA, 354 bp, Gossypium hirsutum
gccacacttgcgggtgatcgcactcgtcaacttgattgatcccatgttgaatatttacggcgagttgatcatgctcttgacatagaggggagcaatgagatgtaccctaatgaactagccaggctcattgaaatgacatatcctcagaacaagccaacctgaataacacatcattgtgatgatgggagctgagaatatgcgtgagtaacttccgcatttgctcacagcacatcgtggcgctccataagctgaaactcgtgttagctaccccattcatgcatgcacgactatagcttcgtgtagactgagaactgcgctctttggtgccattaaggccgaagggtgagcattttt

SEQ ID NO: 228460 - DNA, 404 bp, Gossypium hirsutum
atgtcgttcggcttgggtacgagcctcagcgccatggacaccagcgacttgttcgccagctgcaggaagggggatgtgggccgagtgcggtacctgctggagcagcgagacgtggaggtgaatgtgcgggacaagtgggacagcacccccttgtactatgcctgcttgtgtgggcacgaggagctggtactctaccttctggccaatggagcccgctgtgaggccaacaccttcgatggtgagcgctgcctctatggggcactgagtgaccccatccgccgggctctacgcgattacaagcaggtcacagcttcctgcaggaggcgggattactatgatgacttcttgcagcggcttctagagcagggcatccacagtgatgtggtctttgtagtacacggaaa

SEQ ID NO: 228461 - DNA, 356 bp, Gossypium hirsutum
gtttatctgtttgccctttttaatgaaaacaacaaagtcgggcctacatccgaacgaaattacggcctcttttacccgaccgaggaaaaagtttacgatatccctttcactgtagaagggttgaagaattaccatgacaggcggtcgccggtggccgggaatcaacccgtcaacagaggaaaagggggtgtgtcgaagagtacgacggggaacacgtggtgcgttgcgaacggtgaagctggaaaagagaagctgcaggcagctctagatttcgcctgcggtgaaggaggtgcagattgccatccgatccaaccaagtgccacgtgttacgatcccacaccctggaagcccacgct

SEQ ID NO: 228462 - DNA, 404 bp, Gossypium hirsutum
atgtccgcctgacctacctcaggaaccagctggcagagaaggacgagttcgacatcccggacctcaccgacaacagccggcgccagctgttccgcaccaagagcaagcgccgcttctttttccgcgtgtcggaggagcagcagaagcagcagcgcagggagatgctaaaggacccctttgtgcgctccaagctcatctcaccgcctaccaacttcaaccacctggtacacgtgggccctgccaacgggcggcccggcgccagggacacgtcccgggctctggaagagaagggccgagtttctcgcggctcctctggcccacagcggccccacagcttctccgaggcgttgcggcgcccagcctccatgggcagcgaaggcctcggtggagacgcagaccccatg

SEQ ID NO: 228463 - DNA, 388 bp, Gossypium hirsutum
atttcaacctcgcagctcgcacgctctcatcattttcctccgggaccgtcagtctccccaaacaccttctttccgagaaaaagaaaagctcaagagagaagaccatggccgatcaacttacggacgatcagatctctgagttcaaggaggctttcagcctttttgacaaggatggcgatggttgcattactaccaaggagctggggactgtgatgcgatcacttggtcagaaccctactgaggcagaactccaagatatgatcaatgaagttgatgctgatggaaatgggaccattgattttcctgaattccttaacctaatggcaaggaagatgaaggatactgattccgaggaagaacttaaagagggctttcaggtgtttgacaa

SEQ ID NO: 228464 - DNA, 385 bp, Gossypium hirsutum
  unsure (1)..(385): unsure at all n locations
cccacgcgtccgtttctttgtctactgttttgccatgaagaacaaattttttatcctcgtaatcttattccaaaccgtcgacttagctttatcgacccccaaaaaatatgagtcaattttcaacttcggtgactccctaagcgacactggcaatttacttctctccggtgcccttgtatttccagtcatcgggcagctaccttacggtgaaaccttctttcaacacgcaacggggcggtgctctgacggacgtcttattatcgacttcattgctgaggcattcagtttgccttatttgcaaccttacctagcagtaaaacaaggccagagttctcaacatggagtcaacttcgcattctccggagctactgcactngatgctgag

SEQ ID NO: 228465 - DNA, 392 bp, Gossypium hirsutum
tctcaagttaactactcctagctttggtgatttgaaccatctaatctctgcaaccatgagcggtgtgacatgctgccttaggttccctggccagctcaactctgacctccggaaacttgctgtcaacctcattcctttccctcggctccacttttttatggttggatttgctcctctcacctcacggggatcacagcagtatcgttctttaaccgtcccagaactcactcagcagatgtgggatgctaagaacatgatgtgtgctgcagaccctcgacatggttgttacctcacagcctcagccatgttcaggggtaagatgagcaccaaagaggttgatgagcaaatgattaacgttcaaaacaagaactcatcctacttcgttgagtgga

SEQ ID NO: 228466 - DNA, 400 bp, Gossypium hirsutum
cccacgcgtccgcgaaaaagggccatgatggagaaggtcaatgtgaggaagatgatgtttgtatttctgaactgccttcaaatgagaaacaacaagaagatccttctcagttgtctgatattcattcacatgggaatcctgcaagttccaatccaattcttataggagaggagcattctaatgagaaagagtgtgggcagaaaaaagggagaaacaggggccggggtaaaggacgtgggcggactcaataccataataaccatcatagtagtcacggaaatcatgtaggcactcccccttcagcttcaagtaattgggtcagcaatgagcaagctactggagcaaagcagccccctggtcctcgtatgccagatggcacaagaggatttgctatgggtcg

SEQ ID NO: 228467 - DNA, 392 bp, Gossypium hirsutum
gcttccagagcgttgggctgatcattggagtcaccggcatagtcggcaatagcttggctgaaatcctcccgttatccgacacccccggcggcccatggaaagtatacggggtggctcgtcggcccagacccaactggaacgccgaccatccaatcgagtacattcagtgcgacatatccgacccgaatgataccgaatcgaagctctctcaacttaccgacgtcacccatatcttctacgtcagctggatcaaccgaacatccgaagccgagaattgcgaaatcaacggttccatgctccgcaatgttttgcattccgtgatcccaaacgcacccaatctccgccacatctgtctacaaacaggagccaaacattatcttggaccgttcgag

SEQ ID NO: 228468 - DNA, 415 bp, Gossypium hirsutum
atcatgatcctggggtactgggacatccgcgggctggcccacgccatccgcctgctcctggaatacacagactcaaactacgaggaaaagaagtaccggatggggcacgctcctgactatgacagaagccagtggctgaatgaaaaattcaagctgggcctggactttcccaatctgccctacttgattgatgggactcacaagatcacccagagcaacgccatcctgcgctacattgcccgcaagcacaacctgtgtggggagacagaagaggagaagattcttgtggacattttggagaaccagcttatggacagccgcatggagatggtcagactctgctttgacccaaattttgagaaactgaagccaaaatacttggaggaactccctgaaaagctaaagctctactcac

SEQ ID NO: 228469 - DNA, 393 bp, Gossypium hirsutum
atgcaagcttctgtctgcacctgctctcaatcctgctctcaccatgagcctccgcctgcagagctcctccgccagctatggaggtggttttgggggtggctcttgccagctgggaggaggccgcggtgtctctagctgttcaactcggtttgtctctgggggatcagctggaggctacggaggcggcgtgacctgtggctttggtggaggggctggtagtggctttggaggtggctacggaggtggccttggaggtggctttggtgggggttatgctggtggctttgttgattttggtgcttgtgatggtggcctcctcactggcaatgagaagatcaccatgcagaacctcaacgaccgcctggcttcctacctggagaaggtgcgcgccct

SEQ ID NO: 228470 - DNA, 385 bp, Gossypium hirsutum
aacacactggccggtcactccggttatgtgaacactgttgcggtttcacctgatggttcattgtgtgctagtggcggaaaagatggtgttattttgttgtgggatttggctgaaggaaagaagctttacagtcttgatgctggttctgttattcattcgctttgctttagccccaacaggtactggctttgtgctgccactgagcagagcatcaagatctgggatctggaaagtaagagtattgtggaagacttgaaggttgatctcaaagctgaggctgagaaatctgatgtcaccgacaatgcaaacaagaagaaggtgatatactgcacaagcttgaactggagtgcagatggaagcaccttatttagtggttatacagatg

SEQ ID NO: 228471 - DNA, 390 bp, Gossypium hirsutum
ctttttgctcagatctcctcatctccactttttttccttcttcaaatacccaatggccgtcactttctcaaatctccacaccgagtctggtcttaaagctcttaatgacttcctctctggaaaatcttacatctctgggaataagctgaccaaggatgacataaaagtttatgccgctgttctgaagaaccctggtgattctttccccaatgttagccagtggtataattctgtttcttctcaacttgccgccagcttccctggtaaagctgttggcgttgggtttggtggcaaagctgctccagctgagtctgctaaagctgaggctgctgatgatgaggacgacttggatctatttggtgatgagacggaggaggataagaaggctgc

SEQ ID NO: 228472 - DNA, 417 bp, Gossypium hirsutum
atacacagcccattctgctccatataccagaaaaaaaacacatttgaagcatgaattcccagcaacagaagcagccctgcaccctaccccctcagcctcagcagcagcagcaggtgaaacagccttgccagcctccaccccaggaaccatgcatccccaaaaccaaggagccctgcctccccaaggtgcctgagccctgccaccccaagtttccagagccctgccaccccaaggtgcctgagccctgccaccccaaggtgcctgagccctgcccttcaacagtcacaccagcaccagcccagcagaagaccaagcagaagtaatgtggtccacagccatgcccttgaggagccagccactggatactgaacaccttaccccattctgcttatgaataccatttgcctattgaccctg

SEQ ID NO: 228473 - DNA, 394 bp, Gossypium hirsutum
atggaagagcctcgtcctgggcagcggtggtgcggcggtcgccgttatggccacgggactaggcggctgaccgccgggctaggagagggctaagagccccgaatctgggtggccgctgctcgagcgcgtcctgcgccatggccgcctccgccgccttctcggagcatttcgagaagctgcacgagatcttccgcggcctccatgaagacctacaaggggtgcccgagcggctgctggggactgctgggaccgaagagaagaagaagttgatcagggattttgatgaaaagcaacaggaagcaaatgaaacgctggcagagatggaggaggaactacgttacgcacccctggctttccgtaaccccatgatgtctaagcttcgaaactaccggaa

SEQ ID NO: 228474 - DNA, 412 bp, Gossypium hirsutum
attgcgctttcagaccgtaaggagcgtgctgggagcccggaagggaaactacgcagcgaaggtgaccggggaccaagcatttcagatctgcttggtagacctggtgcaccaccaccatgttggctgcaaggcttgtgtgtctccggacactaccttctagggttttccacccagctttcaccaaggcctcccctgttgtgaagaattccatcacgaagaatcaatggctgttaacacccagcagggaatatgccaccaaaacaagaattgggatgcggcgtgggagaactggtcaagaactcaaagaggcagcatttgaaccatcgatggaaaaaatatttaaaattgatcagatgggaagatggtttgttgctggaggggctgctgttggtcttggagcattgtgctacta

SEQ ID NO: 228475 - DNA, 392 bp, Gossypium hirsutum
atatcaagctggaggaagaccttgtgccggagccagctactggagatgacagtgatgccgccacctttaagccaactctccccgatctgtcccctgacgagccttcagaagcactcggcttccctatgttagagaaggaggaggaagcccagagacccccaagccccactgaggcccctactgaggccagccccgagccagccccagacccagccccggtggctgaagaggctgccccctcagctgccgaggagggggccgtcgcggaccctggcagcgatgggtctccaggcaagtccccgtccaaaaagaagaagaagtttcgtaccccggcctttctgaagatgagcaagaagaagagtgactcctgaaggccccacgctaacactgtc

SEQ ID NO: 228476 - DNA, 403 bp, Gossypium hirsutum
agccactggaatccagcagtgcagagcttgactctgaatgtccgcaagattttctcggataccgaccctgagctctttgaggagtgcttgcataagtttgaggaagaccaagcacaagagaacgaggtcaaatcgaaacgcgaaaccacatggaaacgattagaagagattgctgcaatgaaagctgcaagtaatgaacccgtgctcgtctccccgaaagcaactactcgcaacccatcttgctaggacaagagattgccgttttagctacctgacattttcatgtcaagaacggttcggggaaccataggtcggtggacatgatggtttcaagaacaaaaatgaagatgaagcggagttttccatcatatcaagtgttcactcacaccttctgaaaatctgg

SEQ ID NO: 228477 - DNA, 370 bp, Gossypium hirsutum
acgagccacttggaattcagctgtgcaccagcttgtactcttaatgtgtcgcaagattctctcgaataccgaccctgagctctttgaggagtgcttgcataagtttgaggaagaccaagcacaagagaacgaggtcaaatcgaaacgcgaaaccacatggaaacgattagaagagattgctgcaatgaaagctgcaagtaatgaacccgtgctcgtctccccgaaagcaactactcgcaacccatcttgctaggacaagagattgccgttttagctacctgacattttcattgtaagaacggctcggggaaccataaggcggtggacatgatggtttcaagaacaaaaatgaagatgaagcggtgctttc

SEQ ID NO: 228478 - DNA, 401 bp, Gossypium hirsutum
atcctggggcatggtccgtgtgggcggccccgggcggccttggctacactgcttctgggggaagagctgcagccccagtttcctccaccctggatgggccctgggcctgcctgctaaccaggacccactcaggtggctgccgagaacctgcgctcttgcttctatctctcaagtgaagctcatccacgatcagacttctccaaaccccaagtacagaggattcttccacggggttagggagattgtgcgggaacaagggctgaagggtgcgtaccaaggcctcacaggcaccgtcctgaagcatggctcgaaccaggccatccgctctttggtcatgacctacctgcgcaactggtaccgaggggacaaccccaacaagcccatgaaccctctgatcactg

SEQ ID NO: 228479 - DNA, 192 bp, Gossypium hirsutum
gtcagctgcaaatggagtaagacgcgtatgggttggtcaaaatggattgcttcaactcctgctgtatcagctgtaatacgtgaaagagttggtgtcgatggatccaaagcaactggtgcctttattttgacagctagtcataaccctggcggtcctcatgaggattttggaattaaatacaacatggaaaat

SEQ ID NO: 228480 - DNA, 374 bp, Gossypium hirsutum
acgggggaaaaaaatcactaaagctctttatgtttttgtcatctcacttggtcctctcaacactgccatcaggtgcgggggttccctctgtacccgtgaagctcagtggggtgtgtggttcagggaagcccggtggttggcctagcatggcatgacatcgtcccaggacagtaaccccccaaatattcttttccagtgccctgtcctgtccctccaggacgtggtgaagggcctgttcgtgtgctgcctgttcctggagtatgtggctttgtcccaaaggtttatacctgagcttattaattttcttcttgggattctttacatagcaacttcaaacaaagccagccaagagcacttgggaagcactcggaact

SEQ ID NO: 228481 - DNA, 357 bp, Gossypium hirsutum
atcgaaatcactccagttttctttatcactgaaaaatgtcttgctgtggtggaaactgtggctgcggttctggctgcaagtgtggcagtggctgtggaggatgcaagatgtacccagacctgaacgttgccgagatgaccacaactgagactctggttcttggtgtagcaccccagaaagcacactttgagggagctgagatggaattcggggctgagaacggctgcaagtgtggagacaactgcacctgcaacccttgcaattgtaaatgattagagaccaaagccaaagctccctggaagcagagacgcctttgtctttaagaaataatatggtttggtggttatgtgtttttag

SEQ ID NO: 228482 - DNA, 388 bp, Gossypium hirsutum
  unsure (1)..(388): unsure at all n locations
atccgcaaagcatcaaacgaggctaagcgctacaccaggcgccccctggtggttgtctactacagtgtggacttcagctttgattacagagctgcaactcagttttggcggagcaaagtcctagaggtggccaaggacttccctgagtacacctttgccattgcggacgaggaggactatgctggggaggtgaaggacctggggctcagcgagagcggngaggatgtcaacgccgccatcctggacgagagcgggaagaagttcgccatggagccggaggagtttgactccgacaccctccgcgagtttgtcactgctttcaaaaaaggaaaactgaagccagtcatcaaatcccagccagtgcccaagaacaacaagggacccgtca

SEQ ID NO: 228483 - DNA, 314 bp, Gossypium hirsutum
atcggggatcttccaagtctggaaagttgaaaggagatgaccttcaggccattaagaaggagttgacccagataaaacaaaaagtggattctctcctggaaaacctggaaaaaattgaaaaggaacagagcaaacaagcagtagagatgaagaacgataagtcagaagaggagcagagcagcagctccgtgaagaaagatgagactaatgtgaagatggagtctgaggggggtgcagatgactctgctgaggagggggacctactggatgatgatgataatgaagatcggggggatgaccaacttgagttgatc

SEQ ID NO: 228484 - DNA, 279 bp, Gossypium hirsutum
atccacaagaccattgaagagctgcgggacaagatcctgaccgccactattgaaaacaaccgggtcatcctggagattgacaatgccaggctggctgcggatgacttcaggctcaagtatgagaacgagctggccctgcgccagagcgtggaggctgacatcaacggcctgcgccgggtgctggatgagctcaccctgtctaagactgacctggagatgcagatcgagagcctgaatgaggagctggcctacatgaagaagaaccacgaggaggagatg

SEQ ID NO: 228485 - DNA, 325 bp, Gossypium hirsutum
  unsure (1)..(325): unsure at all n locations
atgatcaaccgcatgatccagaggctgagatctgagatcgaccacgtcaagaagcagtgtgccagcctgcaggccgccattgctgatgctgagcagcgtggggaaatggcactcaaggatgccaagaacaagctggaagggctggaggatgccctgcagaaggccaagcaggacctggcccggctgctgaaggagtaccaggagttgatgaacgtgaagctggccctggacgtggagattgccacctaccgcaagctgctggagggcgaggagtgcangctgaatggcgaaggcgttggacaagtcaacatctctgtggtacaat

SEQ ID NO: 228486 - DNA, 213 bp, Gossypium hirsutum
gataccttgtaatgtgtcaataaaccattccacagaggttgtttgctaagaactttggggtttccaagaattacaataccatatcgagcacgtgttaaggcaacattaagcctgcggggatcatctagaaatccaataccctaaaaagtttatagaacagtttaaaaagtagcatgttagtttggtccataattaaagcatatatagagagag

SEQ ID NO: 228487 - DNA, 399 bp, Gossypium hirsutum
atgggccctcttgcttctctgatagctcccagcgtactctctgcagccatgattgccagacagcagtgtgtccgaggcgggtctcggggcttcagctgtggctcagccatcgtaggcagtggcaagagaggtgccttcagctcagtctccgtgtctggaggtgctggccgatgctcttctgggggctttggcagcaggagcctctacaacctcggggggaacaagagcatctccatgagcgtggctgggtcacgacaaggcgcctgctttggaggtgctggaggcttcggcactggtggctttggcggtggatttgggggctccttcagcggtaagggtggccctggcttccctgtctgccctgctgggggaattcacgaggtcactatcaaccagagc

SEQ ID NO: 228488 - DNA, 379 bp, Gossypium hirsutum
aagagagtgagagcccagttatcaaccggtgacctatttgtagtcccagcaggccatccagtcacattcgttgcctcccaaaacgaggacctaggattgctcgggttcggactctacaacggccaagacaacaagaggatcttcgtggctgggaaaaccaacaatgtgagacaatgggatcgccaggccaaggagctggcgtttggggtggagtcaaggttggtggatgaggtattcaacaacaacccgcaagaatcttacttcgtgtctggacagagtcggcgtggatttgatgagaggaggggaagtaataaccccttatcgccgttcctggactttgcacgcttgttctaagtagtagttttgtaaggcatgtaat

SEQ ID NO: 228489 - DNA, 240 bp, Gossypium hirsutum
atgaatttatctcactaatatcttgaaaacagaagaaggcaaccctgaggtcctaaaaagacatggaaaagagcttataaactttagcaaaaggaggaaagtagcaaaaataaccagggagaacccacaagtcccaaattaagcctaactgtttccgagtggaatcagatttcaaaagattctttgaaaacttgaatccgatgggaaacagcttggaaaaagaatttacagataattttt

SEQ ID NO: 228490 - DNA, 262 bp, Gossypium hirsutum
acgcagactctcccgctccttctgactgcgatttcgttttcaagatctcagttctcaaatcgtagcgctcttttctatcaagccatggctctgatcttgcatgcaggaaaaacaaacaaaaatgcctttaaggcactcattgctgcagaatatagtggtgtgcacgtcaaaatggttgagaattttgagatgggtgtgtcaaataagactcctgagttcatcaagatgaacccttttgggaaagttcctgtgttggaaacac

SEQ ID NO: 228491 - DNA, 344 bp, Gossypium hirsutum
cccacgcgtccgcttctacactcttctctggtaagttcatcgaaagatcaaatcaagatccctgccaaaatgaacgacgctgatgtatccaagcagatccagcagatggtgagattcatccgccaggaagcggaggaaaaggctaacgagatctctgtttccgctgaagaggagttcaacatcgagaagcttcaattggtggaagcggagaagaagaagattaggcaggagtacgagaagaaggagaagcaagttgaaatccgaaagaaaattgagtattcgatgcagcttaatgcatctaggatcaaagtccttcaggctcaagatgatgtggttaatgcaat

SEQ ID NO: 228492 - DNA, 351 bp, Gossypium hirsutum
atctacccttgggactccctgagcctcccttgggctgtcagatcacccccaggttcagtgtgttagaacatacaaggcactgcagccagatgagctgaccttggagaagactgacatcctggcagtgaggacctggaccagtgacggctggctggaaggggtccgcctggcagatggtgagaaggggtgggtgccccaggcctacgtggaagagatcagcagcctcagcgcccgcctccgaaacctccgggagaataagcgagtcacgagtgccaccagcaaactgggggaggcccctgtgtgaggggcagccgtggcctgggacagcacctccatgcctggttcccggat

SEQ ID NO: 228493 - DNA, 359 bp, Gossypium hirsutum
tctccacaaaacacttgaaaagatctctcttcactttcttctcttttcaacgcagagtgaaaggcggggaggccgtagacaatctctcttgcgctcttctcgtagaatggatcagattcaacatccatctgtcatgcagaaggtagctggccagctcctttcttctagcatttcccgagattttcaagggtatgatgggtctttcaggaggcctgctctataccaaggacattttgcatatgggaattattccaatgctggaatgcactatcctattgttccatcaacagctaccgccatttgtgttcaagcccctgcagagaaaggatttaccagctttgccattgatttcctcatgg

SEQ ID NO: 228494 - DNA, 338 bp, Gossypium hirsutum
atgttcatatatttgccattctcaattgactctaaaaaggtatgagcagcagcgggacaatctcgcccaacagtcattcaacatggaacaagccaattataccatccagtcattgaaggacaccaagaccacggttgatgctatgaaactgggagtaaaggaaatgaagaaggcatacaagcaagtgaagatcgaccagattgaggatttacaagaccagctagaggatatgatggaagatgcaaatgaaatccaagaagcactgagtcgcagttatggcaccccagaactggatgaagatgatttagaagcagagttggatgcactgggtgatgagc

SEQ ID NO: 228495 - DNA, 383 bp, Gossypium hirsutum
atgcgtgtggctcctgaggagcaccccgtgctgctgaccgaggcccccctgaaccccaaggccaaccgcgagaagatgacccagatcatgtttgagaccttcaacaccccagccatgtacgtggccatccaggctgtgctgtccctgtacgcctctggccgtaccactggcatcgtgatggactccggtgacggggtcacccacactgtgcccatctacgaggggtatgccctcccccatgccatcctgcgtctggacctggctggccgggacctgactgactacctcatgaagatcctcactgagcgcggctacagcttcaccaccacggccgagcgggaaatcgtgcgtgacattaaggagaagctgtgctatgtcgccct

SEQ ID NO: 228496 - DNA, 268 bp, Gossypium hirsutum
atcgatgtcaaatcatgcgcaagttccaggcgagcccactgaaaccaccacttccctcgtcgagaccgccaccggtgccatccaaggcttccgccccatcaaacaaatccatgaacatctctgcgcatttcatttctacggctacgacatgacccgtcaagtcgaagcgcaccatttctgcgcacatcaaaacgaagaaatgcgacaatgtctcatatatgacacccccgaagccgatgcaaagctcatcgggttggagtacatgata

SEQ ID NO: 228497 - DNA, 376 bp, Gossypium hirsutum
gatgctgcaagcccacagcagtttgaaaacaatcaagaaaaaactcatcaggaaagcccttgatatgattcgtaaaattgccgaggaggatcctgatgagtcgagtggcaaagatgagaaagaagtggaaacatctggtgatgatgatgagaaaaagggacaatacaccaagttctggaatgaatttggaaaatccattaaactcggcatcattgaggatgcaaccaatagaaatcgcttggcaaaactccttcgatttgagagcaccaagtcggatggtaaattgacatcacttgatcagtacatctcaaggatgaaattcggacagaaagatatattctacattacaggaaccagcaaggaacaattagaaaaa

SEQ ID NO: 228498 - DNA, 338 bp, Gossypium hirsutum
cccacgcgtccgatggcgaaagaattcacggtgccgccggtggtcttcccctccggcagcggagtcaacccttccgttggaaacatcaaccaacgccgcgtacccactgctccattccaaccctcacgccctccttcctcctcttccgctttacccttcatgtctttcgatatgggttcggccacatcgtcgtcggtatccttaggcggttcaatctcctcctccgcagcaaccggatccgcttcattcgaagacgaagagccccttctcgatgaactcggtatccacccggatcaaatctggtacaaaaccagatccatcctcaaccctcttcgggt

SEQ ID NO: 228499 - DNA, 358 bp, Gossypium hirsutum
aaggattttctagaccgagtttctcacctttgggtgctcatgttctatttgtaaaaaagaaaggcgacacgatgagaatgtgtatagattattgtcagttgaataaagtggctatcatgaataagtatcctctgcccccaattgatgatttgtttgattagttgaaaggagctgctgtgtttttgaaaatagatttgagattaagctattatcagttacgagtaaaagactcaaacattttgaaaactactttcagaacaaggtatggccaccatgaattcttagttatgcctttcggattaactaatgcacctgctatctttatggatttgatgaatagaattttcatactgtatct

SEQ ID NO: 228500 - DNA, 388 bp, Gossypium hirsutum
atgcggctgggaccctgcgtacatatcctgagaacggcgagggccttcaaggctatcatcgctgcacaatactatatggataaggtgcgcgtgctctccaaaccaccccactttcatgatgagcacaccaacctgaccgctgtatatgttcccaaattttctgacatgcaggctccagcatttgacggggacgatggattctgcgtgtacgagagccacgccattgactactataggagcaatgatgagctgcggggacatactccagaggcagcacaccaggtcgtgcattgggtcagctttgctgattacaacatagtgcccccagtccggacctgagtattccccaccttgggcatcatgcaccacaacaaacatgccactgaga

SEQ ID NO: 228501 - DNA, 236 bp, Gossypium hirsutum
gccaattcttgtgtcaacttctcggcacgatcatcatgtccgccggcaaatgtgtaaacctggaaagcgaattggaaaaccctccatagcagcttaacgccgccatttttgttttgcccatcaccttctcttctctcctgaaataagtcccaaaaaaatagaatggaaaatccaattatgataagctcgacatatacacacacgagtataattgagtctagctaagctcaagttgt

SEQ ID NO: 228502 - DNA, 377 bp, Gossypium hirsutum
atccctgatgtagcgcgtgtattctgccggaaggtcgcaggcctgccttgttcgcctctggttctgagtacctctcctccttactgcagcgtgccctgatggtgcactctggctgcttcccacacactggtgcctgcttgcctgatgctagttctcctgtgtctcacacacgcagggcaggaggttcgtctatgctggctctaactcgggcgtggtccaggcccctctggccttctgtgggaagcacggcacctgcgaggactgtgtgctggctcgggacccctactgcgcctggagcccacccacagcgacgtgtgtggctctgtaccagactgagagccccagcaggggtttgattcaagagatgagcggcgatg

SEQ ID NO: 228503 - DNA, 308 bp, Gossypium hirsutum
gagatgaggaaaatcatgggtgccaaagttcttttcttctttgctttgctttccttttcagctgtctcggcatttgcacaggatgaggaagaccaaggtcttgttatgaacttctacaaggattcttgtcctcaggctgaagacattatcaaggagcaagttaagctactgtacaagcgacacaaaaacactgctttttcttggctgagaaacattttccatgactgtgctgtccagtcatgtgatgcttcactgctgctggactccacaagaaagagcttgtctgaaaaagagacagacaggagctt

SEQ ID NO: 228504 - DNA, 251 bp, Gossypium hirsutum
atgctctcagctctcggcgcacggcccagcttccttcaaaatgtctactgttcatgaaatcctgtgcaagctcagcttggagggtgatcactctacacccccaagtgcatatgggtcagtcaaagcctacaccaactttgatgctgagcgcgatgctttgaacattgaaacagccatcaagaccaaaggtgtggatgaggtcaccattgtcaacattttgaccaaccgcagcaatgcacaaagacaggata

SEQ ID NO: 228505 - DNA, 336 bp, Gossypium hirsutum
ctctacttcgttatctccaatcccccctctcgaggtggatggaaacttcctggacagagcattgacttccaaacagagaaatggtcacgtttccgtgctcctttatgcttcttggtgcccattttcacgaagattgcgtccgaattttgacattatcggttccatgtttcctcagttggagcatctggcagttgaggagtcttcagcttcaccaagtatattttcaagatacggaattcatagtttgccatcaattctaattgtcaaccagacatcaagggtacaatatcgtggtccaaaagatctcccttcaatagaacaattttatgagaaaat

SEQ ID NO: 228506 - DNA, 276 bp, Gossypium hirsutum
attcgctcagttgttgctcaagtgcgctcgctggcggagcttgtctgccctgttttcctgcaaggcctttcccagcgtgcccacgcggaaagcaactgcctaagaggcgcggcgtcgcaccgcccagagctgaggaagtcggcgccagttcgtggggctccgggccgccagtcagagccatgagctacgggcgcccccctcccgatgtggagggtatgacctccctcaaggtggacaacctgaactaaccaacctcgtccgacacgctgaggcgcg

SEQ ID NO: 228507 - DNA, 325 bp, Gossypium hirsutum
agaagatgcagatattcgtcaaaaccctaacagggaagactatcactctcgaggttgaaagcagcgataccatcgacaatgtcaaggccaagattcaggataaagaaggcatccctcctgatcagcagaggttgatttttgctggtaagcaactggaagatggccgaaccctcgctgattataacatccaaaaggagtccactcttcacctagttttaaggcttaggggaagaaccatgatcaaggtgaagactctcaccgggaaagaaattgaaattgacattgaaccaactgataccattgatcgtatcaaggaacgggtcga

SEQ ID NO: 228508 - DNA, 273 bp, Gossypium hirsutum
ggcaaagccatcgaaggcagcagggacagggaatgttccgtaaagccagccaagaacaaataagggcattgagccaaggagctacttcaccaagggggaaaggtagcgagggatacgccttcgacttattgagccaaacccctcgctactccaaccaaaacggccgcttttacgaggcttgccctcgtaatttccagcagcaactccgagaagtggattcctccgttgttgccttcgaaataaacaaaagatcgatcttcgtaccgcactaca

SEQ ID NO: 228509 - DNA, 355 bp, Gossypium hirsutum
gaaaggaccaaaagggtttaatctgctgtgcacgttgtagctcaccacccaaactttaacaatggccgtcggtaagaacaagaggatttccaagggaaagaagggaggaaagaagaaagcagctgatccatttgcgaagaaggattggtatgatatcaaggctccatcagtttttacgagcagaaatgttgggaagactcttgttacccgtactcagggtaccaagattgcttcagaaggactcaaacacagagtgtttgaggtttcactgggtgatcttcaaagaagtgatgaagatcatgcttacagaaagattcgtttgagagctgaagatgttcaaagaaaaaatgttttg

SEQ ID NO: 228510 - DNA, 359 bp, Gossypium hirsutum
caacaaataagaaatgttaagggatacaaggaactagtcatgattggtgatggtgctactgatcttgaggatttcgcccggcattgaagaattagtcaagaagctaaaggcaaggaataccgatgtttatctaatttccgggggctttcgccaaatgatcaatggagtatgttggaattcacagttcgggatttagagactttctgctgaaaccggagctgcttcgatctattgtggattctggttttgaacatccttccgagggcaaagttttaaactcatgtctgatgttaacattcgtgaattcaatgaattaagtcatttgtttttcttgcttttagtgacttataatggggggc

SEQ ID NO: 228511 - DNA, 315 bp, Gossypium hirsutum
atggcatccaccacgatgctgtcatcttcctggccgagcagcttcctggagcccagcgttgccagcactataagttccgttaccaccagcagggagagggccaggaggagccgcccctgaatccccatggggctgctcgggcagaggtctatctccggaagtgcacctttgacatgttcaacttcctggcctcccagcaccgggtgctccctgagggggccacctgtgacgaggaagaagatgaggtgcagctcaagtcaaccagacgtgccaccagcctggagctgcccatggccatgcgctttcgtcacctta

SEQ ID NO: 228512 - DNA, 344 bp, Gossypium hirsutum
acactatagaacaagatggaacaaaaaagcacgctggtgcccgtccgcaatttccgggatgggcccaactcagcacgttgagccatgtggcgcgtctgacagtatggctcctatacagactgatcatgaaactgatcatgatctacacaccagccatcaccctcgaaagatccaacatcaagtactccatgcggttcatcgaccggaagatcataatgcatgacacccgacgcttgcgctgtgccctgacagcatctgaacatatcctgggcctgcctgtcgaacagcacatgtacctctcgagtcgaattgacagaaacctggtcataccgccctatacacct

SEQ ID NO: 228513 - DNA, 381 bp, Gossypium hirsutum
ggctgcatcaaagcttacactctttgacataacaaagcaaatttgtgatgcagttcaagctagggccgagcaagacaagaaccatggggtcatcctcctgcctgaagggcttatagagagcattcctgaagtgtatgcgctattgaaggaaattcacagtttgctcaggcaaaatgtatctgctgataaaatttcttcccagttatcaccttgggcatctgctttgtttgaatttttgccacatttcataaggaaacagcttcttctccaacctgagtcagacgattctgcacagctatcacagattgagacggagaaactactggcgcaccttgtagagaatgaaattaataagcgcctgaaagcaggcacttacaaggg

SEQ ID NO: 228514 - DNA, 312 bp, Gossypium hirsutum
cccacgcgtccggccaaacatcatttacttaggggcatcaacgagttccgcattgccattttagaagcaaaccccaacactttcgttctcccacaccattgtgacgcggagaaaatttacgttgtcactaacggaagaggaacaattacgttcgtgacacatgaaaacaaagagtcatacaatgtagctcctggagttgtagtaagaattccagcaggaagcactgtgtacttggccaaccaagacaacagggaaaagctaaccatagcagtgctccaccgccctgtcaataaccctggacaattccagaaa

SEQ ID NO: 228515 - DNA, 389 bp, Gossypium hirsutum
atcgggcacggtcgtggcgtgacgtcgggaggagggcagacacgccgctttttggatgcctcctgtgcctggcgagagtcttgtctgagccggcaccaccacacggcccacaacatcttctcagggaagcctgtggaccctctgccaggcactgcaagaggtcaggacaggacagtgtgttcacaaggccagtttctgattgtccgccctgagggtgaggaccagtaggcagttcccaagatgggtgaaaggaaaggggtcaacaagtactatcctccggacttcaaccctgagaagcatggctctctcaaccgataccacaacagccacccgcttcgggagcgggctcggaagctgtcacagggcatcctcatcatccgattcgaaat

SEQ ID NO: 228516 - DNA, 402 bp, Gossypium hirsutum
ataaaaaccttgaaaaaagattagacgaatgactaactagaataaacaacgtagagaagactttaaatgacctgatggagctgaaaaccatggcacgagaactatgcgacgcatgcacaagctttagtagccaattcgatcaagtggaagaaagggtatcagtgattgaagatcaaatgaatgaaatgaagcgagaagttcagagaaaaaagagttaaaagaaacgaataaagcctccaagaaatataggactatgtgaaaagaccaaatctatgtctgataggtgtacctgaaaatgacgaggagaatggaaccaagctggaaaacactcttcaagatattattcaagggaactttcccaacttagcaaggcaggccaatgttcaaattcaggaaatacag

SEQ ID NO: 228517 - DNA, 433 bp, Gossypium hirsutum
  unsure (1)..(433): unsure at all n locations
aagantgaacaaaaaagcaggctggtcccgggccggacttcccgcgatctttatattagtaaagctgaaaagaaagcacccttcacttatcttagcctggcaaccctcctccttgttgacccccatgctttcttcctcttagtacctttgcgttggatgaatttaagcgcaagtactccaatgaggacacactctctgtggcactgccatatttctgggaacactttgataaggacggctggtccctgtggtactcagagtatcgcttccctgaagaactcactcagaccttcatgagctgcaatctcatcactggtaagagagcgggtctgagacgaggaaggagaacaaagagtagcaagtgctgtgattccaaaagctgaatgttcttgctagccccttcacgaatgttccagcgactggacaagctgag

SEQ ID NO: 228518 - DNA, 373 bp, Gossypium hirsutum
acgatcttcgctttgagattagatccaaaattctcctttcctcttatttccgattccgcaatttttcctgacaccctaatcctaatcccagattcctgctgtctacatcggttagcaaatggcaaccgaggacccggcagtcgtggcagaccccgcaccccagacggaggaggacacgactggtgagaccaaagctacttcaaaatccggcagagcaaagaaagccaaagaacccaaaaccaagaaagctgcagcttctaagaaaccacgggctgctcctacttatcctccttacgaagagatgatcaaagatgcgatcgttactttggaagagaggacagggtcaagtcagtacgccattgctaagttcatt

SEQ ID NO: 228519 - DNA, 329 bp, Gossypium hirsutum
atccttctgacctctatgctgaggggtgtgaggctctagttgtgaagaagctacaagaaatcatgatgcatgtgatctgggctggactggcatttgcagatattcagctgctgggcatgctgtgtgcctgcatcgggttgcgcagaacgagtagagatcctgcttatgagctcctcatcactggtgggacctatgcatagttgacaactcaagcctgagctttttggtattgttctgagttggaaggcgaattgaccaagtgtgctgctgttgagctactgagttcatgtaagtaaagcacatgtacactggagatggacagagcagct

SEQ ID NO: 228520 - DNA, 341 bp, Gossypium hirsutum
gtaagaattccagcaggaagcactgtgtacttggccaaccaagacaacagggaaaagctaaccatagcagtgctccaccgacctgtcaataaccctggacaattccagaaattcttccctgctggacaggaaaatcctcagtcatacttacgaatcttcagccgtgaaattcttgaggctgtcttcaatacacgaagtgagcagctagacgagctgtttggtgggaggcaaagccatcgaaagcagcagggacagggaatgttccgtaaagccagccaagaacaaataaaggcattgagccaaggagctacttcaccaagggggaaaggtagcgagggata

SEQ ID NO: 228521 - DNA, 354 bp, Gossypium hirsutum
cacatgctttgatgctacagcagaagctgaggcacctttaataacattacatttcgaagccttgtcgatgccattgccaatggaaaacagcttcttacacaccagtgccgggtctcgggcatgcttggccatagcaccggtccccaacaatgtgaacgccgccatgaatgtgatagccaatttgcagcagcagaatcataggattctctttgatgtcatcaattctcgcttgggaattgctcgtgaagcttgcaattagtttcttattggctttatttttttttgtttgttctttgtttgctttcttgtctttatgcgtaagctcttttttttagtggttttatatgatgaaaa

SEQ ID NO: 228522 - DNA, 298 bp, Gossypium hirsutum
tcacggccgcgtggggaaaatgatgctcagccacaaaagaagccgttcaagatattgcggtatttttcgctgataccaaggctttaaaggcttttcatgtattcgaagacagtggagtcaatgacgtggcaccatgaaagacgaaccgatgatggactattaaggcataccgcagattctttagcttggaaatcatttgacaatatatttacaagctttgcaagcgatcccaggagtgtgaggcttggactagcatctgatggatttaatccttacaagatcatgagtactgcataca

SEQ ID NO: 228523 - DNA, 312 bp, Gossypium hirsutum
atgcctaggcatcccttaactcagcacctctgacatttccacagagccatgagggtatgtgcccccaagagagtgtctactgtgagaataagtgtggtgcccgcatgatgcggcggctgctggcccagcatgccacctctgagtgccccaagcgcactcagccctgcacctactgcaccaaggagttcgtctttgacaccatccaggtgaggcccttcctgagctgtggttgcagggcaggtgacagggagtcaggatattgactcctgcctctctgcctctgtggccccagagccaccagtaccagtgccc

SEQ ID NO: 228524 - DNA, 402 bp, Gossypium hirsutum
  unsure (1)..(402): unsure at all n locations
atgccaagagaacctttgtcaccgagtaactcgcgcacaccgagtcccaaaagccttccgtcttacctcaatggggtcatgcccccaacacagagctttgcccctgatcccaagtatgtcagcagcaaagcactgcaaagacagaacagcgaaggatctgccaataaggttccttgcattctgcccattattgaaaatgggaagaaggttagttcaacccattattacctactacctgaacgaccaccatacctggacaaatatgaaaaattttttagggaagcggaagaaacaactgcaagcgcccaaatccagccattacctgctgactgcggcatatcttcagccacagaaaagccagactcaaaaacanaagtggatctgggtggncacgtgaagcgt

SEQ ID NO: 228525 - DNA, 374 bp, Gossypium hirsutum
ataaattctctaagagccggggtgtgggagtgtttggggacatggcccaggacacggggatccctgccgacatctggcgcttctatctgctgtacattcggcctgagggccaggacagtgctttctcctggacggacctgctgctgaagaataattctgagctgcttaacaacctgggcaacttcatcaacaggtgggaattggtaaggggtcagagttagcagtgagctggggtggggctcattttccctcaggagatgggaatgtggagagaactagaaaatgggcaggaggctgtgaggacagtgtggaaagttgatttctattaattgggatctgttcctagcacatatgaggctatgtatgcttgatgg

SEQ ID NO: 228526 - DNA, 356 bp, Gossypium hirsutum
atgcctcaggaagaacttcaaagagagtctgggcctctccagggtaaggggaagcctcgggcttgggctcgggcctgggcagctgccttggagaattctagccctaagaacttggagagaagtgctggacaacgtagtcctgctaaagaaggccctctagacctctaccccaagttgactgacactatccaagccaaccctgtaccaacccatctctcattggtcaactctgcccaagccagccccatgccagttgactctgttgaagctgatcccactgcagtaggctctgttctagctggccctgtacctgttgaccctgggttggttgaccttgcttcaaccagctcagaact

SEQ ID NO: 228527 - DNA, 352 bp, Gossypium hirsutum
cccacgcgtccggacccacgcgtccgtcctgattatatcaagatgtttgtcttggatgaggctgatgagatgctttcccgtggttttaaggatcagatctatgatatcttccagctgcttccagccaagattcaggttggagtgttttctgccacaatgccgccggaggccctcgagattactaggaaatttatgaataagcctgtgagaattttggtaaagcgtgatgagctaaccctggagggtatcaagcagttttatgtgaatgttgaaaaggaagagtggaagcttgaaactctgtgtgatctttacgagaccctagccattacccagagtgtcatttttgtgaata

SEQ ID NO: 228528 - DNA, 342 bp, Gossypium hirsutum
atgcgcgggccttccccggtggcctggccgaggacatcaattaaggccaggtgtctgcccggcaggagctcaagcagctggcacgctacctgaccttaaagtaccagtgggacgtggcctgggcccgcaagatctgatgctttgggcctgactgcaccggccccaacatcctgaccgacattaccaagggcgtgcattacgctaacgagatcaaggacagtgtggtggccggcttacagtaggcctccaaggagggtgcgctctgttaggtgaacatgcggaatgtgctcttcgacctacaccacgtgactctgcatgctgacgccatacaccctgggggcg

SEQ ID NO: 228529 - DNA, 298 bp, Gossypium hirsutum
atcagggccctgccggtcccccaggtccccctggactctcagggcccactttatttacagggcctcacaggcagactatcagcgttccccgccctccgggcctcactgggcccactgggcctcctgagaccatggtcaccttctcaggggtgaggctctggtccacgccccaggtcatgctggggcaggggcacgaggttcctgagggctctctcatgttacaagaccatcaggatgagctttacttccgtgtgccaaaccggctcctgaaggggcacttgaagctcccgacctcact

SEQ ID NO: 228530 - DNA, 392 bp, Gossypium hirsutum
attgcgacgaagacgagaccaccgccctcgtgtgcgacaatggctccggcctggtgaaagccggcttcgccggggatgacgcccctagggccgtgttcccgtccatcgtgggccgcccccgacaccagggcgtcatggtcggtatgggtcagaaagattcctacgtgggcgacgaggctcagagcaagagaggtatcctgaccctgaagtaccctatcgagcatggcatcatcaccaactgggacgacatggagaagatctggcaccacaccttctacaacgagctccgcgtggctcccgaggagcaccccaccctgctcaccgaggcccccctcaatcccaaggccaaccgcgagaagatgacccagatcatgtttgagacctttaacgtg

SEQ ID NO: 228531 - DNA, 375 bp, Gossypium hirsutum
accaaaccatggatcttattcacaagttcctcaacctcgtagctcctacattcaccttcttttcatttgtctttttattgccacccttttatttcttcaacttcttcctttccatcttacgctccgttttcagtgagaatgttgctaggaaagtcatcgtcatcacaggcgcttcttccggtataggagagcatttggcatacgaatatggtagaagaggagcaaggttagctctgacagcaagaagagagaaatcactgcaagaaattgctgatagagctcgtgatttggggtctcccgatgttattgtaattcgtgctgatgtttctaaagttgatgactgtagacgacttgttgaggaaaccgtgaatcatt

SEQ ID NO: 228532 - DNA, 402 bp, Gossypium hirsutum
atcggccggggacggtgtgagagcagtaagatggcggcggcggcagtggtggagttccagagagcccagtctctgctcagcaccgaccgggaggcctccatcgacatcctccactccatcgtgaagcgtgacattcaggaaaacgatgaggaggcagtgcaagtcaaagagcagagcatcctggaactgggatctctcctggcaaagactggacaagctgcagagcttgggggactcctgaagtatgtacgacccttcttgaattccatcagcaaggctaaagcagctcgcctggtccgatctcttcttgatctgtttcttgatatggaagcagctacagggcaggaggttgagctgtgtttagagtgcatcgaatgggccaaatcagagaaaagaactttc

SEQ ID NO: 228533 - DNA, 391 bp, Gossypium hirsutum
atgacaatctgtctgtccgtctgcagctgcgtgactgtctgtctctgccatgtctctctccccatgccgggcccagaggggcttcagctctcgctcagcctgttctgctcgctcaaggggctgcagcaggggaggcttcagcagcaggagccttaattcctttggggggtgcctgggaggctctcgtgggagtacctgggggtcagggggaaggctgggggtgcagtttggggagtggagtgctgggcctgggctctccctgtgccctccggggggcatccaagaagtgaccattaaccagaatctgctgaccccactgaagattgagatcgacccccagttccaggtggtgcggacgcaggagacccaggagatcaggaccctcaacaac

SEQ ID NO: 228534 - DNA, 396 bp, Gossypium hirsutum
atcgcctatgatgtccttgacatgaggcgtatagttgagcccggctgcctggatgccttcccaaacctgaaggacttcatctcccgctttgagggtttgaagaagatctctgcctacatgaagtccagccgattccaccgaggtcttttgtttggaacgacagccacgtggaacagcacatagggccccgtgatgccagaagatggaagggaagagccgacccttctgcctgtgacccgggagaacagcctgactccctggacccgccttctttctttctccttctttctgctctcttctcttccccaaggcctcattggcttcctttcttctaacatcatccctccctgcatcaaggctctttaaagcttcagctccccaccgtcttccatcaca

SEQ ID NO: 228535 - DNA, 377 bp, Gossypium hirsutum
attgattttgcagatcggttctctaatccttttttcgggtgtagcgttgtttatacgtttggttgttgttgaagaagtgctactaccatggctacaaagaagagcgttggggacttgaaggaagctgatttgaagggaaagaaagtgtttgttagagtcgatctgaacgttccattggatgataacttcaacataactgatgacacaaggatccgtgccgctgttcccaccatcaagtatttgatgggtcatggctctaaagtcatcctctctagtcatttgggacgcccaaagggtgtcactcccaagtacagtttgaagcctcttgtgccaaggttatctgaactccttggagtcgaggttaaaatggcaaatga

SEQ ID NO: 228536 - DNA, 389 bp, Gossypium hirsutum
atggccctcttgcttctctgatagctcccagcttactctctgcagccatgattgccagacagcagtgtgtccgaggcgggtctcggggcttcagctgtggctcagccatcgtaggcagtggcaagagaggtgccttcagctcagtctccgtgtctggaggtgctggccgatgctcttctgggggctttggcagcaggagcctctacaacctcggggggaacaagagcatctccatgagcgtggctgggtcacgacaaggcgcctgctttggaggtgctggaggcttctgcactggtggctttggcggtggatttgggggctccttcagcggtaagggtggccctggcttccctgtctgccctgctgggggaattcaggaggtcactatc

SEQ ID NO: 228537 - DNA, 351 bp, Gossypium hirsutum
tgttcatccagagatctaagcttattagcttaagctataaaaatggtgaaaagatcgttgggctttttctttcttctcctcattgtcttagcctcccaatggggggtgcagccaactgaggcacgggtttgccagtcacaaagccataagttccacggtgcatgtgtgagtagccacaactgtgcgatggtgtgcatggacaaaggtttctccggcggcagatgtcgaggattccgtcgccgctgcttctgcactaagctttgctaatgcaagcttggccttagctcatattttaaggatttttcttgagtaaaagacctttatgtttttcgtgcatgcatgttaatggtt

SEQ ID NO: 228538 - DNA, 345 bp, Gossypium hirsutum
  unsure (1)..(345): unsure at all n locations
ccaaaaggtcgngagaagggtgaagaggttgttagagatggaagtaacagccagagggtggaggaggagaaggcggaggaagaagaagcagctgctgctgccgccgcctttgcagctaaagcaagagcgaaaaggaagtcttcacggccaaatccacggctgagtaacccacccaggcacgtccacggcgaacaagtcgccgccggctggccatcttggctgtcgaacgtcgccggtgaagccatcagcggctggactcctcgccgtgctgattcttttgagaagattgataagattggtcaaggaacatacagtaatgtgtacaaagctagggatactttgact

SEQ ID NO: 228539 - DNA, 364 bp, Gossypium hirsutum
atagccagttctggagcttgaagtccgacggcaggatttatagcaagttgaagccaaatttagttttagatgtcaaagggggcacacagtatgatcaaaatcacattatcctcaacactgtcagcaaagagaagtttacacaagtgtgggaagccatggtcctataaacctgaacaaagaaggaagaagaatcttctggaggtccttccagtcaccttattttttaaaaaggacaatgctgatggaagatccaactggaaagtggatcaactcctccttcattgattctaaattcaaccttaaatcatgctgccatgactcagagaacttactcatcgtttcaaaagactatcatagctttaag

SEQ ID NO: 228540 - DNA, 303 bp, Gossypium hirsutum
gctcgtattgcttgcaacaagtatatggccaagtatgctgggaaggatgccttccacctgcgagtccgtgttcacccattccatgtcttgcgtatcaacaaaatgctttcatgtgctggagctgataggctccaaactggtatgcgaggtgcttttggcaagcctcagggaacatgtgctagagtagccattggtcaggtcctcctttcagttcgttgcaaggacagcaacagtcatcatgctcaagaggccctccgacgtgctaagttcaagttccctggtcgccaaaagattattgtcagc

SEQ ID NO: 228541 - DNA, 375 bp, Gossypium hirsutum
  unsure (1)..(375): unsure at all n locations
gagaaatcttcgaattctgtaccggtagttgacatgaagtctaaagctgcattgccaaaggaagatgataaatctactggcaatacaataccggatgttgcagcaatctcggctttcatgacacaagtatcggaccttgttaagcttgttgattcgagagatattacagagttgcaactgaagcaatcggattgtgaacttataataagaaaaaaggaagctttgcagccaccggaacaagcacccccagttttcatgccacagtacatgcctcatcatgccatgtttcaaaccccatttccggcagcagccccaacagcatcaccggcaccttcaaacccagcccctncaccactagcactgccctcagctgca

SEQ ID NO: 228542 - DNA, 396 bp, Gossypium hirsutum
  unsure (1)..(396): unsure at all n locations
atgaagccctcacacactgaagattttattgaggatattgtaaagctcattaatgggagatacaaagggcaatcaggaatcatatattgtttttctcagaaagactctgaacaagttacggttagtttgcagaatctgggaattcatgcaggtgcttaccatgccaatttggagccagaagataagaccacagttcatagaaaatggtcagccaatgaaattcaagtagtagtggcaactgttgcatttggtatgggaattgataagccagatgtgaggcttgtcatccatcattcaatgagtaaatccatggaaaattattaccaaaagagtggacagtcangtcgagatgacatgaaagcagactgtatttcgtactatggctatggagatata

SEQ ID NO: 228543 - DNA, 381 bp, Gossypium hirsutum
atgaaggagctcttgcaggagcagctggagcagctgcagagggagtacagcaaactgaaggccagctgtcaggagtcggccaggatcgaggacatgaggaagcggcatgttgaggtctcccaggcccccttgccccccgcccccggtgagtgagtgagcattgggcctgtgggaggaggtgggtggggagggcaggtgctgcgccgcgggaggtcacagttcgaccttcctgtcgctctccggagacttgacggcgggagctcgtataggccaccccatcggtagcccacccccttccctgaggctaagggaggcgtgccgtggtatcggcggctcctggttttacatgagtggcctgtgagaccaggcctgccattgaca

SEQ ID NO: 228544 - DNA, 373 bp, Gossypium hirsutum
atctgggagagcggtccgcggggtacgttcgtcgtattgccggagagaaccggagtcttctaggtggtgtccatcatgttctctatcaacatgttcgaccacccgaataccaacgtcttccaaaaccgcttctccacacagtaccgctgcttttctgtgtccatgctggcagggcctaatgacatgtcacatgtggagaaaggagggaagataattatgcctgcctaagacctggaccaactcaccagacttaatattacctatcccatgctgtacaaactgaccaataagaattcggaccgcatgacgcattgtggcgtgctggagtatgcggctgatgagggcatctgctaccttccacactggatgatgc

SEQ ID NO: 228545 - DNA, 393 bp, Gossypium hirsutum
atgcggtagcggctgtgttgctcgtttctctgagccatccagtgccatcctcgtcgctgcagcgacacacgcgctcgccgccgccatgactgagcagatgacccttcgtggcaccctcaagggccacaacggctgggtaacccagatcgctactaccccgcagttcccggacatgatcctgtccgcctctcgagataagaccatcatcatgtggaaactgaccagggatgagaccaactatggaattccacagcgtgctctgcggggtcactcccactttgttagtgatgtggttatctcctcagatggccaggttggcctctcaggctcctgggatggaaccctgcgcctctgggatctcacaacgggcaccaccacgaggcgatttgtggg

SEQ ID NO: 228546 - DNA, 381 bp, Gossypium hirsutum
ctcactccgccatcttcaataatttcttccgttgatctttgttagagattagctttttaatttttcattatgggaaagatcaagatcggaatcaatggatttggaaggatcgggcgtttggttgcgagagttgctctccaaagcgatgatattgagctcgttgctgttaacgatcctttcatcaccactgaatacatgacgtacatgtttaagtacgacagtgttcacggtcaatggaagcatcatgagcttaaggtgaaggactcaaagacccttctctttggtgaaaagcctgtcacagttttcggtatcagaaaccctgaggaaatcccatgggctgaagctggagctgagtatgttgttgagtctactggtgttttt

SEQ ID NO: 228547 - DNA, 361 bp, Gossypium hirsutum
  unsure (1)..(361): unsure at all n locations
cccacgcgtccggctttttcttagttttcctttttgtcccttgtttatttgatatttccccctcatggccgccgctgatgtcgagttccggtgcttcgtcggagggctcgcatgggccaccgacgaccgggccctcgaagaagccttcagtgcgtttggtgaaatcgtcgaatcgaaggtccgtttgttgcagggatcggactccagatctgacttgatccgacccgatctgggcgcccctgtcatatgatctgtgatccttgttctgttcttttgtgttacttgttacttgatactactctcttgntactattctctnttaaaactctcaccgatcattaatgatcgtgagactggaaga

SEQ ID NO: 228548 - DNA, 401 bp, Gossypium hirsutum; identical to SEQ ID NO: 199110

SEQ ID NO: 228549 - DNA, 385 bp, Gossypium hirsutum
ataacgcagcggccggccatggtgcagacggaggatgagtaccagttctgttaccaggcggcactggagtacctcggaagctttgaccactatgcaacctaaagccatggtcccccccggcctgacaccaccggccccggatgcctctgcccttcccgggtggacctcctgaggcctggacccccagtgggcagggcaggaggcggcagcagctgcgtttctgcaccgtttccggggaccatcagcccctcaggccccccactggccccggccgccccagcgacctccctggcaccggccgccgccttcaaatacttggcacattcctcctttccttccaattccaaaaccagattccggggtggggggtggggggaacggtgag

SEQ ID NO: 228550 - DNA, 328 bp, Gossypium hirsutum
tgaccttgggttgagtgtagagatgaggaaaatcatgggtgccaaagttcttttcttctttgctttgctttccttttcagctgtctcggcatttgcacaggatgaggaagaccaaggtcttgttatgaacttctacaaggattcttgtcctcaggctgaagacattatcaaggagcaagttaagctactgtacaagcgacacaaaaacactgctttttcttggctgagaaacattttccatgactgtgctgtccagtcatgtgatgcttcactgctgctggactccacaagaaggagcttgtctgagaaggagacagacaggagcttt

SEQ ID NO: 228551 - DNA, 381 bp, Gossypium hirsutum
cggacgcgtgggcggtttctcgtttccgacgcaaagtcgagttccaatgattttttatagcgttatcagtacgtccaggcaacaacctagcaattgtagcccatttattcccatgaaccgcatgcgcttgtataataacagcatcctccgcagccgtgaaaggacggtgttgcacggcgggactgagttgattgcaccaccgcagcctgcaagacttgccggatcttccagggattgaggagcttatcatggaccagttcctgggaccatgctgttccactagcttgatcaggttagcgtcctcttgtgggctccatgaacctttcacacgatcaccaccattgatcatcttcaacgataaaaagaaaaaagaaaacccca

SEQ ID NO: 228552 - DNA, 300 bp, Gossypium hirsutum
caacacgtagatatggcgattaacccttctttgctctttctttcccttctttttctcttcaatggctgcctagctcgccagaccttttcgtcacagcagtcccaaaatgagtgtcaaatcaataggctccgcgcctctgcaccccagacccgaattcgctccgaagccggcaccaccgagtggtggaaccccaactgtcaacagctcaggtgtgctggtgtatctgtaatgaggcagactattgaacctaatggccttgttttgccttccttcaccaatgctcctcagcttctctacatt

SEQ ID NO: 228553 - DNA, 322 bp, Gossypium hirsutum
gggatcacagggcgtgcccgctgtgtgtggctggagtgccccatccctgatgcccccgttgtcaccaacgtgactgtgaaggcacgagtgtggaacagcaccttcattgaggattacagagactttgaccgagtccgggtaaatggctgggctaccctgttcctccgaaccagtatccccaccatcaacatggagaacaagaccacgtggttctccgtggacattgactcggagctggtggaggagctgccggctgagatcgagctgtggctggtgctggtggccgtgggtgcggggctgctgcttctggggctgatcattc

SEQ ID NO: 228554 - DNA, 361 bp, Gossypium hirsutum
ttttgtctccgacaataccaaagacatgcaaacccttgctctaaacgaaccaccgccatcagctgctgacatcgatcattgggaaagagctaaatgcaaggccgagataatggggcaccctatgtacgaccagttgctggaagctcatgtcgcctgtctacgtgttgctacgcctgttgaccagctcgctcagatcgatgctcagttagctaggtcccaagatgtgttggctaagtactcctcggccgctgctgccgccggttctgctgaagaagaactcgatcacttcatggcaaattatgttctattgcttggtttcttcaaagaccaattgcaacaacatgttcgtgttcatgcaatg

SEQ ID NO: 228555 - DNA, 238 bp, Gossypium hirsutum
atccagtggcttctacactgtggaagacacgcgctacgtcaccaggatgtatcgtgtgtatgggaaaaagaacatcaagttggaacctgtgcccctcaagggagcctctctggacccaaggtttggtttccttctggaccgggggctagacatctacgtgtggcggggggcccaagccacactgagcagcaccaccaaagccaggctctttgcagagaaaattaacaagaatgagcgg

SEQ ID NO: 228556 - DNA, 343 bp, Gossypium hirsutum
gtcgaaaatgtcgaagcgagggcgtggaggttcagctggtaacaagtttaggatgtcactgggtctgccagtggcagctacagtgaactgtgctgataacactggcgctaagaacttatacatcatttcggtgaagggaatcaagggccgtcttaaccgattgccatcagcttgtgttggagatatggtaatggctactgtcaagaaagggaagcctgatcttaagaagaaggtcttgcctgctgtcattgtgagacagcgcaagccctggcgcacaaaggatggtgtttacatgtactttgaagataatgcttgtgtcattgcgaacccaaagggagaaatg

SEQ ID NO: 228557 - DNA, 247 bp, Gossypium hirsutum
tacaacgcgtgggaaaaacggttccttaacaaatggttttttttttcagaggcctaaatcaggaattttcatcttcccaaatggacattcttagatgtccatctttgagaaacattaactagccaactaacttttccttctactttgccttgcctttccccatgccggctcgcggagccaacggatcaatattcgaagatggacccattttcaacatggcattcaggcttttccatgaacttaccct

SEQ ID NO: 228558 - DNA, 353 bp, Gossypium hirsutum
gtgcagagagcgtttacatgagctggtgaaagaagagttagccagtgaggaggaatggaaaggtgctatggagcgtagcttcacgcgcatggataaggaagtgataaagtggaacgagagcgtggatggtgctaattgccgatgcgagttacagtcacccgagtgtgatgcggttggatctacagctgttgtcgctatcgtaacgcctgataaagttgttgttgctaactgtggtgattcgagagctgttttgtgtcgtaacggcaggcctgttgctttatcgtccgatcataagccggatcgtccggatgagctgaaccggatccaagaagcgggagggtcgggtatttttt

SEQ ID NO: 228559 - DNA, 313 bp, Gossypium hirsutum
atttacttaggggcatcaacgagttccgcattgccattttagaagcaaaccccaacactttcgttctcccacaccattgtgacgcggagaaaatttacgttgtcactaacggaagaggaacagttacgttcgtgacacatgaaaacaaagagtcatacaatgtagttcctggagttgtagtaagaattccagcaggaagcactgtgtacttggccaaccaagacaacagggaaaagctaaccatagcagtgctccaccgacctgtcaataaccctggacaattccagaaattcttccctgctggacaggaaaa

SEQ ID NO: 228560 - DNA, 328 bp, Gossypium hirsutum
gtttgtaccggagaggtttatgggtgttgaaggggagaaattgttgaaacatgtgttttggtcgaacggaccggaaacggagcatccgacggtcgagaataaacagtgtgccggtaaggaatccgtggcgttgatttctaggatgctagtggtggcacttttgcgacgtttcgatacgtttgggattgaagttgcgacatcatcgttgtgagccgccaattccataaaatgcgctgatagaacaagcttataagtacactctatatatgcccaatgcagggcctactgaatatagtggatgtatttccattgaatgaattatgtttta

SEQ ID NO: 228561 - DNA, 381 bp, Gossypium hirsutum
gctggcaccgttattgcactcactatagccactccactcttcgttattttcagtccagttcttgtccctgctctcattgcaacagctctcctagcaacgggtttcgtcgcctccggcggtttcggtgttgcagccgccacggttctgtcctggatttacaggtatgtgacggggaggcacccaccggcggcggatcagttggatagtgcggggatgaaattggctagcaaggcacgggagatgaaagatagggcggcacagctcaccggtgcggcggcttcttaaattagttctctactgcatgcttttgtaatggagctgtgcaaaagttcaggatcaagtggccattaaaccgatccttaatgatgttgttgttatgtt

SEQ ID NO: 228562 - DNA, 379 bp, Gossypium hirsutum
  unsure (1)..(379): unsure at all n locations
atccagaacacaggtgtcgtgaaaactacccctaaaagccaaaatgggaaaggaaaagactcatatcaacattgtcgtcattggacacgtagattcgggcaagtccaccactactggccatctgatctacaaatgcggtggcatcgacaaaagaaccattgaaaaatttgagaaggaggctgctgagatgggaaagggctccttcaagtatgcctgggtcttggataaactgaaagctgagcgggaacgtggtatcaccattgatatctccttgtggaaatttgagaccagcaagtattatgtgactatcattgatgccccaggacacagagacttcatcaaaaacatgattacagggacatctcangctgactgtgct

SEQ ID NO: 228563 - DNA, 388 bp, Gossypium hirsutum
tttatttttctgaaggtgggagaaaagataaaacttattattaatttaatccaaattagagtttgaaactcatgtaattaaccccttttggttaacccgagacaaatcaatagatctatgagaaatctcattcaattggatatatggtagggtaaaaaaatgggataccaaaagaattgactgccgagccgtatgaggtaggaaactctcaagtacggttctaagggaaggaattgaaccgcctatttcgaccggggagaacaggccattcgacagggggattctgaaatagcggaggcttggttcgatcaagccgctgagtattggaaacaggctatagcgcttactcctggtaattatattgaagcgcaaaatttgttaaagatca

SEQ ID NO: 228564 - DNA, 248 bp, Gossypium hirsutum
caaaatacagagctatcgtaatcatggtgaggaataagtcagcttgcgtagttttgctcttttctcttttcctttcctttggcttgctttgttctgccaaagactttcccggcagaagaggcgacgatgatccttcgaagaggtacgaggactgccggaggcgatgcgaatgggatacacgtggacaaaaggagcaacagcagtgtggaaaaaagttgtaaaagtcagtatggggagaaaggtcaaca

SEQ ID NO: 228565 - DNA, 383 bp, Gossypium hirsutum
gtcatgctgaaaatgaacatttcatttatgacatttcttctaaagtgaaaaccaaatttttgggaaactcaatagatatctatccacttggaaggacccgtgtgactctcaaaagagatggcacagtttttgatttggttcctcctctcacgaaagttaacaacttaatttttggacgaacctgggttgactcatcaggggagatgatcatgacaaacttgacaacaggcgacaaagccgtgctatattttcaaccgtgtggttggtttggagctggccggtatgagattgatggatacgtgtataattccgctgaggagccaaagatattgatgactgggaaatggaatgagtcaatgagttatcaaccttgtgatagtgaa

SEQ ID NO: 228566 - DNA, 385 bp, Gossypium hirsutum
ggtttacgggattttattgattgggttcttctcacgctcgattaccttacaaaaagagaaaatgaccaagtgttacccaactgtgagcgaggaataccagaagtcagttgaaaaggccaagaggaagctcagaggtctcatcgctgagaagaactgtgctccactcatgctccgtttagcgtgggactcagctggaacttttgatgttaagaccaagaccggaggtccattcggaaccatgaagcatcctgctgagctcgcacatgctgctaacaacggcctagatatcgccgtcagacttctcgagccgatcaaggagcagttccctaacctcacctacgctgacttctatcagcttgctggtgtcgatgccgttgagattact

SEQ ID NO: 228567 - DNA, 330 bp, Gossypium hirsutum
atatttcattggcgtttgagtcagcaaagaagtcaagatggccaaagttccggacatgtttgaagacctgaagaactgttacagtgaaaatgaagaagacagttcctccattgaccatctgtctctgaatcagaaatccttctatgatgtaagctatggcccactccatgaaggctgcatggatcagtctgtgtccctgagtatctctgaaatctctaaaacatccaagctgaccttcaagcagagcatggtggtagtatcaaccaatgggaaggttctgaagaagagacggttgagttaaagccagtccatcactgataataacctggg

SEQ ID NO: 228568 - DNA, 319 bp, Gossypium hirsutum
atgggccctcttgcttctctgatagctcccagcttactctctgcagccatgattgccagacagcagtgtgtccgaggcgggcctcggggcttcagctgtggctcagccatcgtaggcagtggcaagagaggtgccttcagctcagtctccgtgtctggaggtgctggccgatgctcttttgggggctttggcaggaggagcctctacaacctcggggggaacaagagcatctccatgagtgtggctgggtcacgacaaggcgcctgctttggaggtgctggaggcttcggcactggtggctttggcgggggatttgggg

SEQ ID NO: 228569 - DNA, 389 bp, Gossypium hirsutum
cccacgcgtccgggtatttacaacaccgatgctgtttaccagaaaaataacagccacaacattgggaacctgtctgccaacaaatatagcggcaacaaccatagcaacaaagatattaataataacagcaacaccaactccaacaacaacgagaacagcaatgcaaacaatgctgtcgataaaaggttcaagactttgcctgccaccgagacactccctagaaatgaggtgcttggtggatacatctttgtttgcaataatgacacaatgcaagaagatcttaagcgtcagctatttggtttaccgccaagatacagggactctgttcgggcaatcacacctggcctgccattgattctctataactacaccactcatcaattgcatgg

SEQ ID NO: 228570 - DNA, 457 bp, Gossypium hirsutum
gggcgcactataacacagttgcacaaaaagcaggctggccgggcccggacttcccggcatccggctccagccttctcagatccctggggagggtcacctgccaaacccagcaccaatggcaccacagccaccgggggattcgacacggagcctgacgagttctctgactataaccgactatctacagaactgccgtcctacgctagcatcgctggagagccgtaactgatgccatgagaggtgccggcccgaagccctggggcgtttgacatgagtggggtcaggggatctctggctgaggctgtgggcagccccccacctgcagccacgccaactcccacgccccccacccggaagacgccggagtcattcctggggcccaatgcagccctcgtcgacctggactcgctggtgagccggccgggccccacgccgtctggagccaaggcctccaacc

SEQ ID NO: 228571 - DNA, 371 bp, Gossypium hirsutum
atcggacctcaccgacaacagccggcgccagctgttccgcaccaagagcaagcgccgcttctttttccgcgtgtcggaggagcagcagaagcagcagcgcagggagatgctaaaggacccctttgtgcgctccaagctcatctcaccgcctaccaacttcaaccacctggtacacgtgggccctgccaacgggcggcccggcgccagggacacgtcccgggctctggaagagaagggccgagtttctcgcggcttctctggcccacagcggccccacagctttttcgaggcgttgcggtgcccaaccttcatgggcagggaaagcctttgtggaaacgcaaaccctcagaaaaggaaaccttggacaatcc

SEQ ID NO: 228572 - DNA, 401 bp, Gossypium hirsutum
atggccccgccatgggcctcaccgtgtccgcgctcttttcgcggatcttcgggaagaagcagatgcggattctcatggttggcttggatgcggctggcaagaccacaatcctgtacaaactgaagttgggggagattgtcaccaccatcccaaccataggcttcaatgtagaaacagtggaatataagaacatctgtttcacagtctgggacgtgggaggccaggacaagattcggcctctgtggcggcactacttccagaacactcagggcctcatctttgtggtggacagtaatgaccgggagcgggtccaagaatctgctgatgaactccagaagatgctgcaggaggacgagctgcgggatgcagtgctgctggtatttgccaacaagcaagacatg

SEQ ID NO: 228573 - DNA, 346 bp, Gossypium hirsutum
attgaaggtgcagctggagcacgtgcagactcggctgcgggagatccagccctgcctggcagagagccgggctgctcgtgagaaagagagtttcaacctcaagagggctcaggaggacatctcacggctgcggcgcaagctggaaaagcagaggaaggtggaggtctatgcggatgctgacgaaatcctccaggaggagatcaaggagtataaggcgcggttgacctgcccctgctgtaatacccgcaagaaggatgcagtccttaccaagtgctttcacgttttctgcttcgagtgcgtgcggggccgctttgaggcccgccagaggaagtgccccaagtgcaac

SEQ ID NO: 228574 - DNA, 371 bp, Gossypium hirsutum
cccacgcgtccggatggaagtgatgcgattcttcttggtgctgagaccttgcgtggattataccccgttgaaaccatttctactgttggcaaaatttgtgctgaggcagagaaggtattcaaccaggacatgtatttcaagaagactgtcaaatatgttggagagccaatgacccacttggaatccattgcttcctctgcggtacgagcagcaattaaggtgaaggcatcagttattatatgtttcacatcctcaggaagagctgctagattgattgcaaagtacaggccaacgatgccagttctctcagttgtcatccctcgccttaagacgaatcaattaaagtggagtttcagtggggcctttgaggc

SEQ ID NO: 228575 - DNA, 381 bp, Gossypium hirsutum
caagaacaaataagggcattgagccaagaagctacttcaccaaggggaaaaggtagcgagggatacgccttcaacttattgagccaaacccctcgctactccaaccaaaacggccgcttctatgaggcttgccctcgtaatttccagcagcaactccaagaagtggattcctccgttgttgccttcgaaataaacaaaggatcgatcttcgtaccgcactacaattcaaaggctacattcgtggtcctcgtcaccgacggaaacggccacgtcgaaatggtctgccctcacctttctaggcagagctcacactggtcctcccgagaacaagaagaacaagaagaacaagaagaacaagaagatgaaaggagaagtggacaa

SEQ ID NO: 228576 - DNA, 377 bp, Gossypium hirsutum
ctctaattcatgctttttaaaggatgtcttaaaactcccaccaatatgtcgcacatcggaaggatcaacatggtaaaagatgggaagaacaatatgtttgtcagtggactcgcgcttgcgatccatgatgctagaaagttcaaccaagcacgatatcgaagaagcatagtctttagataaaatgaggattgagagatttgaggccgaaattgctcgagaatatattggtggaagtttctctccttttcctagtgtttcgttatgagggaagacattaattcctacgttttccaaataattgactaggtgattggagaagttgaggcgtgtgtcttcacctaagcttaaagaaaatttgatgctttcataaaattttg

SEQ ID NO: 228577 - DNA, 386 bp, Gossypium hirsutum
gacaacctttgcaggccagtgaccgatttgctgccactgattgcaagtggggttagaggtgtaactagcaacccagcgattttccagaaagctatatcttcatcaaatgcttacaatgatcaattcagggaacttgtgcaatcaggaaaagatatcgaaagtgcttattgggagttagtggtgaaggacatccaagatgcctgcaaactttttgagccaatctatgaccaaacagatggaggtgatggttatgtttctgttgaggtttctcccagacttgctgatgatactaatgggaccattgaggcagccaaatatcttcataaagtggttgatcgtcccaatgtgtacattaagatccctgcaacagcaccatgcattccttc

SEQ ID NO: 228578 - DNA, 388 bp, Gossypium hirsutum
cggacgcgtgggggaggtcaaagcagagaccgaaaccaaaggcaaagcaaaacccaaagaggggaaccggaggaggaaaaattccaaggaaaccgccgaaaccattgtgttaattgcttttggcaccattttcttgccccaggttttggaattgataccaggctagcaaggaagctacaaaacgaaagagataacaggggagccattgttagaatggagcatggatttgagtggcccgaggaagggcagaggcgacaaggacgtgaagaggagggagaagaagaaagagaaccgaaatggcagaggcgacaagaaagtcaagaagagggatctgaggaagaagaaagagaagaacgaggaagatgaaggagaaggtcatgaaacggtt

SEQ ID NO: 228579 - DNA, 407 bp, Gossypium hirsutum
atgttttcccaaaaaccgtgttattggaagtggttgcaatctggattcagccagattccgttacctgatgggggaaagactgggagttcacccattaagctgtcatgggtgggtccttggggaacatggagattccagtgtgcctgtatggagtggaatgaatgttgctggtgtctccctgaagactctgcacccagatttagggactgataaagataaggaacagtggaaagaggttcacaagcaggtggttgagagtgcttatgaggtgatcaaactcaaaggctacacatcctgggccattggactctctgtagcagatttggcagagagtataatgaagaatcttaggcgagtgcacccagtttccaccatgattaagggtctctatggaataaaggatgatg

SEQ ID NO: 228580 - DNA, 403 bp, Gossypium hirsutum
atcagcggcggccgtccgagcgccgagaggtgagggttcccccggcctcacctgcggaggggccgttccgggctcgaacccggcaccttccggaaaatggcggctgccaggcccatcctgggccgagtccttccaggatcctctatcctgttcctatgtgacatgcaggagaagttccgccacaacatcgcctacttcccacagatcgtctcagtggcagcccgcatgctcagggtggcccggctgctggaggtgccagtcttgctgacagaacagtacccacaaggcctgggccccacggtgcctgagctgggggctgagggccttcagccgctgaccaagacctgcttcagcatggtgcccgccctgcagcaggagctggacagccggccccagctgcgtt

SEQ ID NO: 228581 - DNA, 358 bp, Gossypium hirsutum
gattcatacgtttatcgctaccagtggtatccatttggagtataagttaaggaagagtaaagaggaggttttggatatcatgcgtgtgaagcaaggatcacccgcgatcgggcttcgatctaagacccatgtagttttaggttgcgtcaacaaggctaactccgagttatctttttattacaaaaagattttctaagtttgacgaccacatctgcgttgccattcgccggtttcaccgcttacggccgcgtactttctcggtatatgagaaatgagtgtattaactacaacttcacgtatgaatcgccactttctgttggcagacttgtcgtccaacttgccgataaaaagcaggtct

SEQ ID NO: 228582 - DNA, 311 bp, Gossypium hirsutum
caagagggaacgcagagcgcccgggacccggccggacaacagggagggataccttataaccgtgttattggaagtggtcgcaatcgggattcagccagatttcgttacctgatgggggaaagactgggagttcatccattaagctgtcatgggtgggttcttgtcgaacatggagattccagtgcgcctgtaatgagtgaaatgaatgtagctgccgtattctagatgactttgaatccataattgattgactgtattatatgatgaacagtggatagatggttatacgcatgtgattttgagtgcttaat

SEQ ID NO: 228583 - DNA, 388 bp, Gossypium hirsutum
ggaaaatgttcaggaaccagtacgatacagacgttaccacatggagtcctgcggggcggttgttccaagtggaatacgcgatggaagctgtgaagcaaggttcagccgcgatcgggcttcgatctaagacccatgtagttttaggttgcgtcaacaaggctaactccgagttgtcttctcaccagaaaaagattttcaaagtcgacgaccacatcggcgttgccatcgccggtctcaccgctgacggccgcgtcctttctcggtatatgagaaatgagtgtattaactacaacttcacgtatgaatcgccacttcctgttggcagacttgtcgtccaacttgccgataaagagcaggtctttcatttcttgaaatcctaaatctttga

SEQ ID NO: 228584 - DNA, 389 bp, Gossypium hirsutum
  unsure (1)..(389): unsure at all n locations
atgcggctcagtatactccagaaccgcctcctattcaacagcatttcaccaatgtggaggcctcagaaagtgaggaagttaggcgatttcggcaacaatttacacagctggctggaccagatatggaggtgggtgccactgacctgatgaatattctcaacaaagtcctttctaagcacaaggatctgaagaccgacggttttagtcttgacacctgccggagcattgtatctgtcatggacagtgacacgactgggaagctgggctttgaagaatttaaatatctatggaacaacatcaagaaatggcagtgtgtttataagcagtatgacagggaccattctgggtgtcttggaagttctcagctgcggngagctctgcaggctgca

SEQ ID NO: 228585 - DNA, 385 bp, Gossypium hirsutum
gcttatagtaatcatggtgaggaacaagtcagttttcgtagttttgctcttttctcttttcctttcctttggcttgctttgctttgccaaagacttccccggcagaagaagcgaggatgatcctcaacagaggtacgaggactgccggaagcgatgccaattggagacacgtggacaaacggagcaagacaagtgtgaagacaggtgtgaaacgcagttgaaggaggagcagcatcgtgacggagaagatcctcagaggagataccaggattgccgacaacactgccaacaggaagaaagaaggctgcgtccacattgcgaacaaagctgcatggaacaatacgagaaacagcagcagtagcagcctgacagctattcatggagt

SEQ ID NO: 228586 - DNA, 402 bp, Gossypium hirsutum
  unsure (1)..(402): unsure at all n locations
atccaaggtggacagtcttaatgatgagatcaacttcctgaaggtcctctatgatgcggagctgtcccagatgcagacccacgtcagcgacatgtccgtggtcctctccatggacaacaaccgcaacctggacctggacagcattattgctgaggtccgtgcccagtacgaggagattgcccagaggagcaaggctgaggccgaggccctgtaccagaccaaggtccagcagctccagatctcagttgaccaacatggtgacaacctgaagaacaccaagagtgaaatcgcagagctcaacaggatgatccagaggctgcgggcagagatcgagaacatcaagaagcagtgccagactttttangcatccgtggctgatgcagagcagcgtggtgagaatgc

SEQ ID NO: 228587 - DNA, 388 bp, Gossypium hirsutum
cttctgcatctttattgggactcttgtgaacatttgcgaactcaggcgacattacggcttgtccagacaagcaacagaagccatgcttgtggttgaagcttacaaggttcttcgagaccgagctccatatccacccgaccaagtcattaaagatcttgaaggaaaatttgctttcattattttcgatgctaaatctggtaccctctttgtggccagagaccgtgaaggaagcattcaacttaaatggggaatggctggagatggctccctggtattatcagatgatccaaacaccatagaaaaggcttgtggaaaatcctctgcttcgtttcctccaggctgcattttcatgaatggcaatggccttataagcattgatcatccactc

SEQ ID NO: 228588 - DNA, 387 bp, Gossypium hirsutum
cccacgcgtccgtcccattttcttattgattttgcagatcggttctctaatccttttttcgggtgtagcgttgtttatacgtttgttgttgttgaagaagtgctactaccatggctacaaagaagagcgttggggacttgaaggaagctgatttgaagggaaagaaagtgtttgttagagtcgatctgaacgttccattggatgataacttcaacataactgatgacacaaggatccgtgccgctgttcccaccatcaagtatttgatgggtcatggctctaaagtcatcctctctagtcatttgggacgcccaaagggtgtcactcccaagtacagtttgaagcctcttgtgccaaggttatctgaactccttggagtcgaggtta

SEQ ID NO: 228589 - DNA, 187 bp, Gossypium hirsutum
acacgccttacctgcaggtgacgatccgcgactggcacctgatgcagagccacagctagccctgagcggtactacagcctctaccacaagaccattgaagagctgcgggacaagatcctgaccggcactattgaaaacaaccgggtcatcctggagattgacaatgccaggctggctgcggatgact

SEQ ID NO: 228590 - DNA, 386 bp, Gossypium hirsutum
atcgagagtttctcatccgagtttcctacatggaaatttacaatgaagaaattaacgacctttttgctgtagagaatcagaaattgcagattcatgagaatttagagcgtgggattttcgttgcgggtcttagggaggaaattgtgaacaatgctgaacaagtgatgaagctcctggagtctggagaagttaataggcattttggtgagacaaatatgaatgcacgaagtagtaggtctcatacaatattcagagtggtgatagaaagcaagggaaaggatacgggctcttttggtgattattcaatcagtgatgccatacgcgtctcagttttgaatttggttgatttggctggttctgagcggattgctaagactggaactggt

SEQ ID NO: 228591 - DNA, 349 bp, Gossypium hirsutum
atgggagtttgagaccagcctgaccgacatggagaaaccccgtttataccaaaaatacaaatgttagcctggcgtggtggcgcatgcctatgatttcagcctctcaagttgctggaattgcaggggcccactaccacacccagctaatttttttgggttattagtagcgacgctgatcaaccatgttggctagtctggtcaggagctgttgacctgagatgagctgcgactcttgtgcgtgctcacagtattctgggatatccgacattgaccgctgcgctcggacgacagggaaaggattcatactatattggagcttatttaatgagtgatgccatacgcgtgttaa

SEQ ID NO: 228592 - DNA, 385 bp, Gossypium hirsutum
aagggacccagatgtttgggtggacccactcaagttcatgcctgagagattcgtgtccaaggacagtggtgacgtggaagtagtgtcagtgttggggtctgacctcaggctggcgccattcggctcaggccgtagggcttgccctggaaagactttgggtctggcaaccgtgaccttttgggtggcctctttgttgcatcagtacgtgtgggtgcaatcagatgagaaccctgtcgttgatctctctgaaatgcttaggctctcatgcgaaatggctaacccacttaaggtcaaagtgcacccgaggctcagataaaaaagaacaggaccaaatcaataagtgaagagataatcataatatggtcgagataaaaatgtaaattta

SEQ ID NO: 228593 - DNA, 228 bp, Gossypium hirsutum
atgtttaccctcagaacacaggtgtcgtgaaaactacccctaaaagccaaaatgggaaaggaaaagactcatatcaacattgtcgtcattggacacgtagattctggcaagttcaccactactggccatttgatttaaaaatccgggggatttccaaaaaaccatttaaaattttgaaggaggctgctgataatggaaagggtccttcaaaattcctgggtcttggat

SEQ ID NO: 228594 - DNA, 387 bp, Gossypium hirsutum
gaaagaaaagaaaaatggttctgctagagaaactttgggatgatgtagtggccggtcctcaaccggaacgtggccttggccggctgaggaagatcaccaccaccccacccttgtccaccaaaggtaaaaacaattagcttttgcattacatcatttgtattgtggacatttaagtttcactctgaaattgaatcttttcattagatgaggcttcatcaatggcgatgccgacgagtccgacgacacctgggacaccatcgacgccggtgtaggttcgtagggacaacgtgtggaggagcgtgttcaatccaggtagcaaccttgcaaccaaaggtattggcgctgaagttttcgacaagccttaacctaactatactactgattatg

SEQ ID NO: 228595 - DNA, 362 bp, Gossypium hirsutum
ggcaaaggacccttcctcgaagcttccaaagaacaaatcgaggccatgagtagccatgaggaaggcagcaaaggcggtggtttgtggccatttggaagtgagtcaaaatcagagagtgcattcaacctcttcagaaagcgtcagccttcacattgtaacagatatggtcagctctttgaagttgaagaagaagaattcaagggccttaaagacttcgatctcagggtctcctatgtcaacatcaccaagggatgtatgtcagccccattctacaactcaagggcaataaaaataggcattggtgggaaagggggaagatacttttgaatgggattaccttctggtttccccaagtccagtca

SEQ ID NO: 228596 - DNA, 379 bp, Gossypium hirsutum
gagcacacttcattgcgaaagctatggtacatgcagacaaagcaacaactgtatcacacacgtattcgaaggaagttgctggaaatcctgcaatagctcctcatcttcacaagttccatggaatattaaacggaattgatttagatatttgggatccttttaacgataagttcattcctgtatcttacaattcggaaaatgtcatcgaaggcaaacaagctgctaagaaagccttacaacaaaggcttggtttgagaaaatctgatcttcctttggtcggaattatttctcgtttaactcatcagaaaggaatccatctcatcaagcatgcaatttcacgtgccttggaactcaatggacaggttgtattgcttggctc

SEQ ID NO: 228597 - DNA, 329 bp, Gossypium hirsutum
gtagcttccttgctagcctggtatcaattccgaaagcctgcgccaggagattgtcgcgaaagccactgagcacattgtttccgccgctctcttgcgactcttcctcctcccgttcccctctctgggttctgctttgcctttggtttcggtctctgctttgacctcctcttaccacacctccttgtggactaccagcaaggaagaatttcctgaagttctcatcgagctggttggcatcattgccaacatcaacaagtgcgaccaacacaagttgagaccgcccattgttgaaaatccagtgagctactccagcaggcaaggcaaccaca

SEQ ID NO: 228598 - DNA, 384 bp, Gossypium hirsutum
atggagattgacaatgccccggaggagcgagctcggggtatcaccatcaatgcggcccatgtggagtatagcactgccgcccgccactacgcccacacagactgcccgggtcatgcagattatgttaagaatatgatcacaggcactgcacccctcgacggctgcatcctggttgtagcagccaatgatggccccatgccccagacccgagagcacttattactggccagacagattggggtggagcatgtggtggtgtatgtgaacaaagctgacgctgtccaagactctgagatggtggagctggtggagctggagatccgggagctgctcaccgagtttggctataaaggggaggagaccccagtcattgtaggctctgct

SEQ ID NO: 228599 - DNA, 360 bp, Gossypium hirsutum
gggaactccggaatagtgccgaaaccacggcagacaggcaagcagcttgcaactgtgttaaacaagccgccgctcgtatccccactatcaaagaagatgacgccgcaactcttcctgcaaagtgccatgtccaagttgatttcccaatctccaagaacaccaactgcgaggacattcactaagatggaagccatcaagacgcaaatataatgccagtaggcgttgccgccatctattcaagtattattagccatatgtcgtacttgtgtcagaatagtaatgaagcacgcacatgtaagagtttttacaagcctttgtattagtaataaaaaggaatttgatgaaaaattcctgcacttt

SEQ ID NO: 228600 - DNA, 376 bp, Gossypium hirsutum
catacatggaaccttatacatgatcgttctgataattcgttctgcaacgctgttttgctgtgaagtatgacgaactgtaaagtgtattatgaccccttctaacttgtacaatctattaaactcattataacagaattctaagccattgtctgtgcggaggtattttatctggtttcccatctgtttttcaatcataattttacaagacttaaatgcggaaaacacatcatttttctgcttcaggaagaacgcccaaacttttgtagaaaaattattaataaaagttgcatataattagctccacctttcgaaggcactctggatggccctcacagatcagaatgaatatactccaacgtttccttccgggtatgga

SEQ ID NO: 228601 - DNA, 363 bp, Gossypium hirsutum
gattgaagctgaaggtaagcttactggtattcttagcttacgagcattacagcctggggaatctcgaaaatatgggacacatgattgccccgggtttatatgcacctgttcatcaacacttatttgttgctcgtatggacatggctatcgattgcaaaccaggcgaagcttttaatcaggttgttgaggttaatgctaaagttgaggaacctggggaaaataacattcataataatgcattctatgcggaagaaaccctgcttaaaacagaactccaagcaatgcgtgattgtaatcccttaacagctcgccactggattgggaggaatacaaggacagtaaacaggagtggtcaactgactg

SEQ ID NO: 228602 - DNA, 385 bp, Gossypium hirsutum
atggagctgcggctgctcaagcacctgaagcacgagaacgtcatcgggcttctggacgtcttcacgccggccacgtccatcgaggacttcagcgaagtgtacttggtgaccaccctcatgggtgccgacctgaacaacatcgtcaagtgccaggcgctgagcgacgagcacgttcagttcctggtttaccaactgctgcgcgggctaaagtacatccactcggccgggatcatccaccgggacctgaagcccagcaacgtggctgtgaacgaggactgtgagctcaagatcctggacttcgggctggcgcgccaggcagatgaggagatgaccggctacgtggccacgcgctggtaccgggcacctgagataatgctaaactggg

SEQ ID NO: 228603 - DNA, 367 bp, Gossypium hirsutum
gaggaaactgaggaaaaaagaacaaactagttaagagcaatggaagatgatgcaatggcaaccgaggctcctttagcaccagtcacttgtggaaggagagtccgaaatgacttggaagataaacttcctaaaccttatatggcgagagctttggtggctccggatgtcgatcacccgaacggaacgccgggccattaccataacggaatgagtgttcttcaacaacatgcggcatatttcgaccaggacgacaatggaatcatttatcctttggagacttacgccggttgtcgagccatgggatttaatccgattgcctctctttttttaccattcttattaatggatctatgagctatcctacact

SEQ ID NO: 228604 - DNA, 372 bp, Gossypium hirsutum
cttcacatcatctgcagcattgatccctcagagagtttgaatttggatactttccagtctttcttcattggcggaggaacccatccaacatctgtccttgctggttttggtcctgaaactctttctaccgccttcaatgtgtcgatgtcgaaattggaggaaataatgagagggcaacaagagggtccaattgtgcatgtgaccaagtctcatgcaccaagcatttggacaaagttgtctcaacttcaagagcaagataggctaaagcaggtgaagagaatggtccacggagaagctgatgaagaagagaaagagtggtcatggtggaaactgtttggtattttttctggaaatgaaagaagaattttcggg

SEQ ID NO: 228605 - DNA, 372 bp, Gossypium hirsutum
ctcctttttatctttaaaacacgcacccaaaaaaaaataaaaccctttgaaaaccaaagaaggaagaagaagatgtcgtggcaagcttacgtagatgatcacttgatgtgtgaaatcgaaggaaaccatctctctgccgccgctatcatcgcccacgacggcagcgtttgggcccaaagcgccaatttccctcagttcaagcccgaagaaattaatgccatcatgaatgactttaatgaaccgggtacgctcgctcccaccgggttgcacctcggtggcacgaaatacatggtgatccaaggcgaaccgggagctgttatccgagggaagaagggacccggaggtgttactgttaagaagaccaatatggcc

SEQ ID NO: 228606 - DNA, 382 bp, Gossypium hirsutum
atctggaactcagaccccagggcagttgagggttttttaggcggcttccccactctgtgttttggccactcacacctcttttctcctccctgtttctccctgtccatctgtccccacgtccaccatgcagggtttccaggcctgaggtgcccgccttggccccaggagaatgaaccagccgcaaaggatggcgcctgtgggcacagacaaggagctcagtgacctcctggacttcagcatgatgttcccgctgcctgtcaccaacgggaagggccggcccgcctccttggccggggcgcagttcggaggttcaggttttgaggaccgccccagctcaggttcctggggcagcggagaccagaacagctcctcctttgacccc

SEQ ID NO: 228607 - DNA, 368 bp, Gossypium hirsutum
gaggaagaagaaggagaaggagaagaagaagaagaagaagacaaccccagccgccgcagccgccaccaggaggaggaggagcaggggcgggaaagctcatcatgcaacaaccttctctgtgccttcgacagaaacttcctcgctcaagctttcaacgttgaccacgacatcattaggaaaatccaacgtgtacgaggaaatagaggcaccatcatcagagtcagggacagactccaagtcgtaacaccacccagaatggaggaagaagaacgtgaggagcgccagcaggagcagcgatcccgccatacgagaggagggtctcaagataatggcctcgaggaaactttctgctccatgaggatcaagga

SEQ ID NO: 228608 - DNA, 362 bp, Gossypium hirsutum
ggggacggggaccgttgatggtgaagacagtggcggcaacgatagcggtagtgatgatatcgagcgtttacagcatgatgatgatccagaagcgatggatcgatgatggatcggctaatccgacggaacagatccttatggtcaaacaccttctcgaagctactctaatggggggagtactattcctagcactgatgatagacagattgcaccattatatccgagaactttggattcgaaggaagagcatggaagctatcaagaaacagggtcctgaggatggaaagtcgggtggctccgacaaagttaaggccttggagggagaagtaactatcctgcaggcaaaattgaagcagctagaa

SEQ ID NO: 228609 - DNA, 372 bp, Gossypium hirsutum
aagacatttgccgctggaatcattgtaccaaagtgttatatatggcctgtagatggagctctttacttgcaaccttctacctctattgtcttggatgctcacaaagaagggctagaagtttttgcgtcagacttttataatgatgttccattcagcttcaattactcatatgacccagtagctgagtaccttcagtttgttgacaatggtaaattctctgttgatggggttttaaccgacttcccaataactccagcagcagctatagattgttttgctcacataggaaaaaatgcttcaaaacaagcggaccttttggtcatatcaaataatggagcaagtggagactatcctggttgtactaacatggca

SEQ ID NO: 228610 - DNA, 361 bp, Gossypium hirsutum
cccacgcgtccggggtgttgaaacatacgagagtggaatcgctgttggtgtgaccgaagaagtggtcgcgttcgcgagggatctcgcgatgcatccagagacttggcttgattttccggtgcccgatgatgatggttttgatgattttgacatgtctgatgagcaacaagaacatgctttagctgttgaacgtcttgcaccaagattggctgctcttaggattgaactttgcccaggatatatgagtgagggttgcttttggaagatctattttgtacttcttcatcctcggcttaataaacaagatgcagaacttctgtctacttcccaaatagatgaagcaagagcaatgttaatgcaa

SEQ ID NO: 228611 - DNA, 369 bp, Gossypium hirsutum
gcttatcgtaatcatggtgaggaataagtcagcttgcgtagttttgctcttttctcttttcctttcctttggctttctgccaaagactttcccggaagaagaggcgacgatgatcctccgaagaggtacgaggactgccggaggcgatgcgaatgggatacacgtggacaaaaggagcaacagcagtgtgaagaaagttgtaaaagtcagtatggggagaaagatcaacagcagcgccaccgccctgaagatccccagaggagatacgaggagtgtcagcaagaatgccgacaacaagaagaaaggcaacgaccacaatgccaacaaaggtgcttggaacgattcgagcaagaacaacaacaatcccag

SEQ ID NO: 228612 - DNA, 387 bp, Gossypium hirsutum
attgtgcttattcaggtctatgaaggagagcgtgccatgaccaaggataacaacctgcttggcaagtttgaactcacgggcatacctcctgcaccccgaggtgttcctcagattgaagtcacttttgacattgatgccaatggtatcctgaatgtctctgctgtggacaagagtacaggaaaagagaataagattactatcactaatgacaagggccgtttgagcaaggaagacattgaacgtatggtccaggaagctgagaagtacaaagctgaagatgagaagcagagggacaaggtatcatccaagaattcacttgagtcctatgcattcaacatgaaagcaactgtcgaagacgagaaacttcaaagcaagattaacgatgag

SEQ ID NO: 228613 - DNA, 364 bp, Gossypium hirsutum
gacacgcgtacggtactaattggtgctgccgctgatggctctaaagttaatgctgatgatgctgcctatggtgaagatgcaaatgtattttgaaagccagaaacagacacagaatgcatgccatacaatgggtgatggatttaagctgtagataccatcgaaatggaacccaagcaaagaggtggagttcccaggtcaagtgctgaggtatgaggacaacttcgacaccaccagcaatttgagcgtcatgatcactcccaccgacaagaagtccataaccgactacggttcccctgaggaggtcctctcttcggtggattatcttcttggaaaacaagcttactttggtaaaaccgattctgag

SEQ ID NO: 228614 - DNA, 371 bp, Gossypium hirsutum
aaaaaatttcattttttttcctttctctttataagctatcattctctctctctctctctctctctctcattacgagaaggggtttctctttcaagaattcatgtcggaaaagggtcggcctttgccaaaatttggtgaatgggatgtcaatgatcctgcatcagctgagggatttactgtgatctttaacaaggcgagggacgagaagaaaacaggtggcaaacccgaatcaccatcaggaggtgatcctcatcttaagcctggagcggatcccagcaaaacccagcctaaaaaatggctttgctgcatgcacgccccgcctgcggaatcttgaagtgatcctgcccgtataagagcttttccacaagtat

SEQ ID NO: 228615 - DNA, 383 bp, Gossypium hirsutum
atccgggctgggcagagtgatgcggactcttctgctgctactgtggttggcgacgcgcggaagcgcgctctactttcacatcggagagacggagaagaagtgctttattgaggagatcccggacgagaccatggtcataggaaactaccggacgcagctgtatgacaagcagcgggaggagtaccagccggccaccccggggcttggcatgtttgtggaggtgaaggacccagaggacaaggtcatcctggcccggcagtatggctccgagggcaggttcactttcacctcccatacccctggcgagcaccagatctgtcttcactccaattccaccaagttctccctgtttgctggaggcatgctgagagttcacctggaca

SEQ ID NO: 228616 - DNA, 362 bp, Gossypium hirsutum
cgaagactacattcagaacgagatatggtcactatgaatacttagctatgccttttggacttacgaatgcacgtgctacctttatggacttaatgaaccaaatttttagactgtacctagatcaatttgttgtagtgttcatagatgatattttgatatattcacgagatgaaactgagcatgccgagcatttgagaagtgtattacagattctacgtgataagcagttatatgcaaagtttagtaaatgtgaattctggttgcgcgaggttggttttttggggcatattgtgtcagcatcgggtattcgagttgatctaagcaagatttcagctattctggattggaagcctccgagaaat

SEQ ID NO: 228617 - DNA, 364 bp, Gossypium hirsutum
cttcctggtttcaagcctgcaaaacatatggtgttttctggtctctatcctgcagatggatccgattttgatgcgcttaaccatgctatagagagactaacatgcaatgatgccagtgtttctattactaaggagagtagcacagcacttggactgggttttaggtgtgggtttttaggcttacttcacatggatgtttttcatcaaagacttgaacaggagcatgaagctcatgtcatttccactgttccaactgttccttatatttttgagtattctgatggaagtaaggtagaagttcagaatcctgctgcattgtcctcagatcccaagaaacgagttacagcttgttgggaacctactg

SEQ ID NO: 228618 - DNA, 448 bp, Gossypium hirsutum
cgacactatagaacacgtttgtacaaaaaagcacgactgcgtaccggagccgtttggcacagggaagcgggtatctacaatgaccctcttctttctgtttagctctgcttattccaggggcttggttcgacgagaagcatataagagtgagattgctcatcggcacaatgatttgggagaagaacatttcataggcctggtgctggttgccttttctcaatatctccagcagtgtccatttgaggatcatgtgaaactagccaaggaagtgactgagtttgcaaaagcctgtgctgatgaagagtcaggggccaactgtgacaaatccattcacaccctgttcggtgacaagctgtgcacgacggactccctccgtgacacgaacagggacatggccgactgctgtgagaagccagagcccgacaggaacgagtgctttctgatgcac

SEQ ID NO: 228619 - DNA, 367 bp, Gossypium hirsutum
gggaattgaagatgggatcttatctcggagttgctgcagcatctgcaaatcctcctcattttattcatttatgctacaaaccaccaagcggacctgttaaaaccaagttagcattagttggaaaaggattgactttcgacagtggtggctacaatatcaagactggacctggttgctcgatcgaaaccatgaaagcagacatgggaggttcggcagctgtttttggtgcggcaaaagcccttggacaaatcaaaccttctggagtagaggttcattttattgttgcatcttgtgaaaacatgataagtggaaagggtatgaggcctggagatattgtcacagcttcaaatggaaagacaattgaggt

SEQ ID NO: 228620 - DNA, 391 bp, Gossypium hirsutum
atagcgaaggtgaccggggaccaagcatttcagatctgcttggtagacctggtgcaccaccaccatgttggctgcaaggcttgtgtgtctccggacactaccttctagggttttccacccagctttcaccaaggcctcccctgttgtgaagaattccatcacgaagaatcaatggctgttaacacccagcagggaatatgccaccaaaacaagaattgggatgcggcgtgggagaactggtcaagaactcaaagaggcagcatttgaaccatcgatggaaaaaatatttaaaattgatcagatgggaagatggtttgttgctggaggggctgctgttggtcttggagcattgtgctactatgggttgggactgtctaatgagattggagct

SEQ ID NO: 228621 - DNA, 391 bp, Gossypium hirsutum
atgcaaacatggagagaatcatgaaagctcaagccctaagagacaactcaacaatgggttacatggcagcaaagaaacacctggagataaaccctgaccattccattattgagaccttaaggcaaaaggcagaggctgataagaacgacaagtctgtgaaggatctggtcatcttgctttacgaaactgcactcctgtcttctggcttcagtctggaagatccccagacacatgccaacaggatctacaggatgatcaaacttggtctgggtatcgatgaagatgatcctactgctgatgataccagtgcagctgtaactgaagaaatgccgcccctcgaaggagatgacgacacatcacgcatggaagaagtagactaacctccggctga

SEQ ID NO: 228622 - DNA, 384 bp, Gossypium hirsutum
atgcaaacatggagagaatcatgaaagctcaagccctaagagacaactcaacaatgggttacatggcagcaaagaaacacctggagataaaccctgaccattccattattgagaccttaaggcaaaaggcagaggctgataagaacgacaagtctgtgaaggatctggtcatcttgctttacaaaactgcactcctgtattctggcttcagactggaagatccccagacacatgccaacaggatctacaggatgatcaaacttggtctggctatcgatgaagatgatcctactgctgatgataccagtgcagctgtgactgaagaaatgccgcccctcgaaggagatgactacacatctcgcatggaagaaggagactaaccta

SEQ ID NO: 228623 - DNA, 281 bp, Gossypium hirsutum
atggatttgtgtataccactcttattaccgtcgagagagctgatctacttctctgcatgttctatcgaaggtcattggacggaggacggcttccactaccttacgatactctgtttctcactgacatgtacattacacactatggcagcgtgttaaaaccccatatggaggtcagagagaaaatatacatggatttgatcattgaactacgatccaagcttgagacaatgagagttgcggcgacattccagaaaatatgcatggactagatgaatgaactt

SEQ ID NO: 228624 - DNA, 230 bp, Gossypium hirsutum
cccacgcgtgcgactaaggtcaagcaaagtgcctccagagcttccacaaaacgatgcaatggaatgttacttgttgtctagcaatcgactggtaatactgggttttaacacaacattaaccgaaccagtggatactccggggagtagaggtgatcaaataaaagaaatggaacttaaattgcatccggcgttgagagaacccttaacagccctctgtaatgatccgaaga

SEQ ID NO: 228625 - DNA, 367 bp, Gossypium hirsutum
cccacgcgtccgatgaggatgagctgtaatggctgcagggtcctgcgtaagggctgcaccgaaaactgcaccattagaccttgtcttcaatggatcaagtcctctgattctcaagccaatgctactctcttccttgccaaattctatggccgagctggtctcctcaacctaattgaagccggccccgaaaaccttcgccctgctatttttaggtcacttttatacgaggcctgtgggcgtgtggtaaatccagtttatgggtcaattgggatgctttggtccgggaactggggtgagtgccaagcagccgttgatgctgtgctaaaaggctcccccataacccaaacttcatcatctttggaatcag

SEQ ID NO: 228626 - DNA, 178 bp, Gossypium hirsutum
gccacgcgttacatcaggatgagctggaatgacttcaaggtcctgcgtaagggctgcaccgaaaactgcaccattagaccttgtcttcaatggatcaaatcctctgattctcaaaccaatgcttctctctttcttgccaaattctattgacgaactggtatccttaacctaatatgaa

SEQ ID NO: 228627 - DNA, 332 bp, Gossypium hirsutum
atcctgcattaatcagccccagttccgggctgtcttgggggaagtgaagctgtgtgagaagatggcccagtttgatgctaaaaagtttgcagagacccagcctaaaaaagatacaccacggaaagagaagggttcacgggaagagaagcagaagccccaggctgagcggaaggaggagaaaaaggcggctgcccctgctcctgaggaggagatggatgaatgtgagcaggcgctggctgctgagcccaaagccaaggaccccttcgctcacttgcccaagagtacctttgtgttggatgaatttaagcgcaagtactccaatgaggacacac

SEQ ID NO: 228628 - DNA, 336 bp, Gossypium hirsutum
ggtgctgggaagcacgtccctcgtgccgtcttcgtggatcttgaacccactgttattgatgaagtgagaactggtgcttaccgccagctcttccacccagaacaactcatcagcggcaaggaagacgcagctaacaactttgcccgtggtcactacaccattggcaaggagattgtcgacctctgtttggaccgcatcaggaaacttgctgataactgcactggtcttcaaggattccttgttttcaacgctgttggtggaggtaccggatcaggtcttggttctctccttttggagcgtttgtctgtcgattatggcaagaaatccaagttgggt

SEQ ID NO: 228629 - DNA, 368 bp, Gossypium hirsutum
gtatcgaaggaagaaaaggttccatcacccaaattcctattttgaccatgcctaatgatgatataacgcatcctacaccagatcttactggctatattactgaaggacagatatacattgatagacaactccacaaccgacagatatacccaccaattaatgttctcccttcactctctcgattaatgaagagtgctattggtgaggggatgactcgtagagatcatgctgacgtgtccaaccagctatatgcaaattatgctattggaaaagatgttcaagcaatgaaagctgtggttggcgaggaagcactttcttctgaggatctgctttatctggagttcctagataaatttgagagaaaattc

SEQ ID NO: 228630 - DNA, 365 bp, Gossypium hirsutum
  unsure (1)..(365): unsure at all n locations
caatctttgtaccatcaactgagggtcaatgagactgatgtttacaagacagtgtttaggactcgttatagtcattacgagttcctagtgatgtcgtttggactgacgaatgcaccaacgacttttatggatttgatgaaccgagtgttctagccctacttggatcagttcatagtggtgtttatagatgaaattctagtgtattcgagaactaatgatgaacatgatgcacatctccaagtggttctgcaacttctgaaagaaaaaaactgtatgctaattcagcgagtgtgaattttggttacaagaggtaactattctgngtcatgtggtatctgctgagggaaattaggttgatcatcgaa

SEQ ID NO: 228631 - DNA, 336 bp, Gossypium hirsutum
tccgggacgcgtgggcaacatctaatctcgggcatcttaataagcctctattcaagcattaatacatgggctaaacagacattactactccattagccattaactaccggaagaatgaactcgaggaaaagatgctgttgaatcttcacaagaagaagtggacagatggactgacacttatacgtttcgatactcattccaaaacttatgagcagactgttcaggaaatgctgaatttagctataaaatacaataaggcagtgcatgaggaaagatgaattacctcccgagaagctggcgatcgcaaatgtcggcagacaagatgccaagaagcac

SEQ ID NO: 228632 - DNA, 282 bp, Gossypium hirsutum
gagattatcaatttgaagccttcttcgaatttcctcattcagatgcaaattttcgtcaagaccctcaccggaaagaccatcacattggaggtggagagttctgatactattgacaatgtaaaggccaagattcaggacaaggaaggcatccccccagaccagcaaaggttgatcttcgctggtaagcaacttgaggatggccgcacgttggctgattacaacatccagaaggagtccacactccacttagtgcttcgcctccgtggaggaatgcaaaatttt

SEQ ID NO: 228633 - DNA, 278 bp, Gossypium hirsutum
gctctcttctgcacctggaatacaaaaacaaatcgaaaggcctccacgtgcttttgctcccttacttggcagccatgattattccagagaagaaccgcagagaaatctgcaaatacctatttcaagagggagtttgctatgcaaagaaggattacaatcttgcgaagcaccccgagatcgatgttcccaatttgcaggtcatttaactgatgcagagcttcaagttcatggtatatgtacgcgagacttttgcttggatgcactactactggtacctt

SEQ ID NO: 228634 - DNA, 342 bp, Gossypium hirsutum
ggacagtaatgcaaaatcctatctttgttacatcatggacactctgggcatgagaacttttctgatgaaatgaccgctgctcttaagcttgctgacagagctgtgttagattgttgatgctgctgaaggagtgatggtaaacactgagagggctatacgccatgcaatacaagagcgcctacctattgtagttgttataaacaaggttgaccggctgataacagaacttaagttttcccccaaaagatgcttattatatattaaggcatacactggaagttttcatataaccacatatctgtccgctctacaactgctggtaaatggttctgttatttgatc

SEQ ID NO: 228635 - DNA, 316 bp, Gossypium hirsutum
tcgtccacgcgttcgattaccaccaaggccaatgtagactacgagaagattgtccgtgacacatgccgctccattggatttgcttctgatgatgtgggtctcgaaggtcatatctggacggtccttgttaatattgagcatcagagttctgatattgcccatggtgtccatggccactttacaaagcgccccgaagagataggagccggtgaccagggccacatgtttggttatgctactaatgagacccctgtacttatgcccctaagccatgttcttgcaactaagcttggggctcgtctttactgaggttagg

SEQ ID NO: 228636 - DNA, 442 bp, Gossypium hirsutum
  unsure (1)..(442): unsure at all n locations
tatttaggtagacacctatatgaacaaggttagtacaataaaagccaggctaggtaccaggtcccggaanttcccgggatcttaggtaagtctgttagtagggagataccttgtcagcccttcgncctccttcaacagccgcaatccccttcaagttctagtcatgcgtgagtgcatctccatccatgttggccaggctggtgtccagattggcaatgcctgctgggagctctactgcctggaacatggcatccagcctgatggccagatgccaagtgacaagaccattgggggaggagatgattccttcaacacctttttcagtgagacaggcgctggcaagcatgtgccccgggccgtgtttgtagacctaaaacctactgtcattgatgaagttcgtactggcccctaccgttagttctttcccccctgagcaactcat

SEQ ID NO: 228637 - DNA, 392 bp, Gossypium hirsutum
gcccttacattcctctcaaaactggaagaagagacggtaaaggagcagagcagatgttgtggaggagtatcttccggaccacaatgagaccatctctggcgttctcgacaggtttgccgccatgggtattgacacccctggagtcgttgccctcctaggagctcacagtgtcggcagaactcactgtgtgaagctggtgcatcggttgtacccagaggttgaccctgccctcagccccgaccatgttccacacatgctccataaatgccctgatcaaattccagaccccaaggccgtccagtatgtgagaaacgatcgtgggacacccatggttttggacaacaactactacaggaacattctggacaacaagggtttgttgattgtggatc

SEQ ID NO: 228638 - DNA, 382 bp, Gossypium hirsutum
cggacgcgtgggcttcgttcacacgctatcgtttttgggtttatcagaaacctaatcctgtcactttttaattacctcggactctccgatttcctcgaaaccgacaccgtttggccggaaaacccgacccgaaccacaccttttaaaccgccggtatccgctctcttgatccgtgaaatcctacccgtcgtaaagttcgaggaactcgcgttggtcggtggtggagatccgccggagagttgcgccgtttgcttgtgcgagttcgaaggaaaggaagagatcaggtggttgaagaatcgtaagcatgtttttcatagaacgtgtttagaccgctggatggatcacgatcaggtgacgtgtccgctttgtaggacatctgttg

SEQ ID NO: 228639 - DNA, 270 bp, Gossypium hirsutum
cccacgcgtccgcggacgcgtgggtgcgcatgccataagttgttgactgctgggagtgaccatgcagaaatgcttttacatgaagagcgttagaacttggggggaataagcatagaggagcttcatcgacttgtttatgctcaagtcctatcttcatttccattaacttggcaaattgctccaatttatcttatttcatgcatgaagcacgggatgattctgtttcagatattattgtccaagctacctggtcaagataaattagttatt

SEQ ID NO: 228640 - DNA, 329 bp, Gossypium hirsutum
cccacgcgtccgatttgtttgaggagttgagcaagtacgtcaaattgagagtttgaacatatgtgataacttggctgaccatatggtaggcaatgtgtatgttcagtttagagaggaagaacacgctgcaaatgcagtaaagaatcttagcggaagattttatgctgcccgtcctatcattgttgacttctcacctgtgacggacttccgagaggccacctgtaggcagtatgatgagaatacttgcagtcgtgggggatactgcaattttatgcaccttaaaagaataagcagggagttgaggcgccaggtatttggaaggtcaaaaa

SEQ ID NO: 228641 - DNA, 355 bp, Gossypium hirsutum
atgtactaaggaaggcgcacagccagccgcgctcgcctcgccgccccgcgttcagctgcccagcgtccgccgcgcctcggccaaggcttcaacagaccacaccaaaatgccgtctcaaatggagcatgccatggaaaccatgatgtttacatttcacaaattcgcgggggataaaggctacttaacaaaggaggacctgagagtactcatggaaaaggagtttcctggatttttggaaaatcaaaaagaccctctggccgtggtcaaaataatgaaggacctggaccagtgcagagatggcatagtgggcttccagagcttcttttccctaattgcgggccttaccattgcatgc

SEQ ID NO: 228642 - DNA, 355 bp, Gossypium hirsutum
gctccaccgacctgtaataaccctggacaattccagaaatttttcctgctggacaggaaaatcctcagtcatacttacgaatcttcagccgtgaaattcttgaggctgtcttcaatacacgaagagagcagctagacgagctgtttggtgggaggcaaagtcatcgaaggcagcagggacagggaatgttccgtatagccagccaagaacaaataagggcattgagccaaggagctacttcaccaagggagaaaggtagcgagggatacgccttcaacttattgagccaaacccctcgctacttcaaccaaaacggccgttttacgaggcttgccctcgtattttcagcaacaac

SEQ ID NO: 228643 - DNA, 402 bp, Gossypium hirsutum
atgcgactgacatgatgtttccacaaagcaagcattcgggctcttcgcacctaccccagcactcaaattcaccacctcggactcctgcgaccgcatcaaagacgaatttcagctactgcaagctcagtatcacagcctcaagctcgaatgtgacaagttggccagtgagaagtcggagatgcagcgtcactatgtgatgtactatgagatgtcctacggtttgaacatcgagatgcacaaacaggcggagattgtcaaaaggctgaacgggatttgtgcccaggtcctgccctacctctcccaagagcaccagcagcaggtcttgggagccatcgagagggccaagcaagtcaccgctcctggattgaactctttcattcgacagcagcgtcaagtccacca

SEQ ID NO: 228644 - DNA, 386 bp, Gossypium hirsutum
ggcgacaaggacgtgaagaggagggagaagaagaaagagaaccaaatggcagaggcgacaagaaagtcaagaagagggatctgaggaagaagaaagagaagaatgaggaagaggaaggagaaggtcaggaaacggcttataagaaacattctgctcaatgagactgaaacacaggacccctgcttcctctgctgatgttttcaacccacgaggtggtcgcatcaccacagttaacagtttcaatcttcccattcttcaatacctccaactcagcgccgagaggggagtcctttacaataatgctatctacgctcctcactggaacatgaatgcccacagcattgtttacatcacaaggggaaatggaaggattcaaattgtgtcgg

SEQ ID NO: 228645 - DNA, 312 bp, Gossypium hirsutum
cccacgcgtccgcccacgcgtccgcttgtcgtccggggattcgggttgacggggctgtcctcgctctcctacgtatttaaccgcttcagacaggcgactggcaccgagcagctcgacgcggaccgggccaagaggggcatgcaagatatggtggggtatgtgggacaaaagactaaggaaactgggcagactatcgaaaacaaggctcatgagggtggtaggacatgaatgtgaaccatggaagggtactttgcttgcttgtaaaatgtacttttaagtggttttaattttcgagaagtccttttggctttg

SEQ ID NO: 228646 - DNA, 352 bp, Gossypium hirsutum
atggcccagtgagatcaaagactacagtccctacttcaagaccatcgaggacctgagaacaagatcattgcagccaccattgagaatgcgcagcccattttgcagattgacaatgccaggctggcagccgatgacttcaggacaaagtacgagcatgaactggccctgcggcagaccgtggaggccgatgtcaatggcctgcgccgggtgttggatgagctgaccctggccaggaccgacctggagatgcagatcgaaggcctgaaggaggagctggcctacctgaggaagaaccatgaggaggagatgcttagcttttgagggcagagcgggggagatgtgaacgtggaga

SEQ ID NO: 228647 - DNA, 363 bp, Gossypium hirsutum
attctctctctctctctcttcctctccccttctctgcctaaaccaaattaaaacaattgtctccaaccgacaccaatgtccaccgcagttccacccgttattcctgtctcctccgtgcaatccgtcgaatcccaaccgcccgttgccagccccgcctttctctctttcgtttcccgtctcaatgaattccttcgcaacggcctcttccagcgccgtccttgggctgagctcgttgaccgttccgccttctccaagcccgagtcattctctgatgctctcgttcgcgtccgcaagaactactcgtatttccgagtcaattacctgttggggatcggtctcatccttgccttttgccttttttcc

SEQ ID NO: 228648 - DNA, 376 bp, Gossypium hirsutum
actgaaagagaaaaattttgctcagttaactgtgtcgggaagtcgttcagatgggaagcgtgtccaccttttaagattgtgattctggatgaagcagattctatgacctcagctgctcaggcagctttaagacgtaccatggagaaggagtctaaaaccacccgattctgtcttatctgtaactatgtcagtcgaataattgaacctctgacctctagatgttcaaaattccgcttcaagcctctgtcagataaaattcaacagcagcgattactagacattgctgagaaggaaaatgtcaaaattagtgatgaggtaataccagctgagaaaattgatggagtatttgctgcctgtcagagtggctcttttgaca

SEQ ID NO: 228649 - DNA, 329 bp, Gossypium hirsutum
attctgcgtcctgctgagctctgttctctccagcacctcccaacccactagtgcccggtcttttgctccaccaggaacaagccatcatgtctcgccagtcaagtgtgtccttccggagtgggggcagtcgtagcttcagcaccgcctctgccatcaccccgtctgtcacccgcaccagcttcacctctgtagtccggtctgggggtggcggaggtggctctggcagggtcagccttgggggtgcttgtggagtgggtggctatggcagcccgagcctctacaatctggggggctcccaaaggatatccatcagctctaagtggtggcag

SEQ ID NO: 228650 - DNA, 278 bp, Gossypium hirsutum
gagaaaagtgagaaaaaaaaagaacaaactagttaagagccatgaagatgaatcaatgacaaccgaggctcctgtagcaccagtcacttctggaaggagagtcagaaatgacttggaagataagcttactaaacattatatggtgagagctttggtaggctcagatgttgatcacccgaacggaacgccgggccattacgcataacggattgagtgatcttcaacaacatgcggcatatttcgaccaggacgactgaggaatcatttattcctgggag

SEQ ID NO: 228651 - DNA, 408 bp, Gossypium hirsutum
atggcttctggaaaaaataattaaacaagcaaagcatatttttctaaggagtagagctgctcaaccattgacagcttagcaagccgaattgaggatcctcagatacaagctcattggtcaaatatcaatgatgtttatgaatctagtgtgaaagttttaatcacatcacaaggctatgagcaaatatgcaagtccattcaactgcaattgaatattggagttgagcagattcgagctgcacatttagatggaagagtaatcacactatcgtatcaagagcaggagcttcaggattttcttctgtctcagatgtcacagcaccaggtacatgcggttcagcaactcgccaaggttatgggctggctagtactgagcttcagtaatcatgtgggacttgggcccatagag

SEQ ID NO: 228652 - DNA, 231 bp, Gossypium hirsutum
cccacgcgtgcggccgccgcctgcgtgtctctcttcattttctgaacccaaaagtctttagcttttcgcttcgagagagaccatgttggtttaccaggatctcatctccaatgacgagcttctttctgactcattcccctacaaggaaatcgagaatgggttgctgtgggaagttgagggaaagtgggttgggcaaggagctgtctattgtgacattggtgccaattcttc

SEQ ID NO: 228653 - DNA, 381 bp, Gossypium hirsutum
cccacgcgtccgcggacgcgtgggttggtctggaagtgagaatggatatggtttaacagaaacatccccttgcattgctggtcgacgaccttattataatgttcttggttctgttgggcatccaactccactcacagaattcaaagttgtagattccgaaactggtgaaatcctcccacctggctccaagggcattataaaggtcaggggaccgccagtgatgaaaggttactataagaatccattggctacgaggcaagccctatacgaagatggttggctaaatactggtgatataggttggattgctcctcatcattcagtaaggcgaagtcgtcgatgtggaggtgtgatagttttcggaggacgtgccaaggacac

SEQ ID NO: 228654 - DNA, 369 bp, Gossypium hirsutum
atgaagattcttatagaaagcaagttgaagtagatgcacaacagtgtatgcttgaaatctggatactgcaggaacggaacaatttacagcaatgagggatttgtacatgaaaaatggacaaggatttgcattagtttattccatcacagcacagtccacatttaacgatttacaagacctgagagaacagattcttcgagttaaagacactgatgatgttccgatgattcttgttggtaataagtgtgacttggaagatgaaagagttgtaggaaaggaacaaggtcaaaatctagcaagacaatggaacaactgtgcattcttagaatcttctgcaaaatcaaaaataaatgttaatgagatctttta

SEQ ID NO: 228655 - DNA, 332 bp, Gossypium hirsutum
atgccggcgccttcaaccactcggacctggacgcggagctgaggcggctctttcgcgagcgctacggctgcaccccaagtttgtggcggccgtgcactacgagcagcccaccatccagatcgagctgcggctgaacacgtcgcataaggccgcaggtgacgtggacatcggtgatgcagcctactacttcgagagggacgtcaagggcgagtctctattccagggccgtgggggcctggacttgtgcgtgcgctgtgagcccctgcatgtggagctgcacgctcatctattacctggacgagatttcccctaagttcttcatgatgcgcctt

SEQ ID NO: 228656 - DNA, 362 bp, Gossypium hirsutum
cagcaattgcgccgaactgatgacatgaagaatttcttcatgaaaatggaccctcaacatcaaaagttcttatggttgccaccctccttcctgttggtggcatcctcctcttgcttgctggtttgagccttattggatccctcataggtcttgctattgccgccccacttttccttattttcagccctgttttggtacctgctgcttttctcattgcgggttccatagccggattcttgacctccggagcatttgggatcactggactgtcatcgctgtcgtggattgctacttatattcgtggaagcaggggctctatgtctcaagggctagacccagtgaagtggcccttgccggacacg

SEQ ID NO: 228657 - DNA, 379 bp, Gossypium hirsutum
atgtggcccacattggggcatggcatcctgctcgtgtggccttctctgtggcacgtgctgggcaaaaaggctaccatcaccgcactgagatcaataagaagatctataagattggccagggctaccttatcaaggatggcaagctgatcaagaacaatgcctccactgactatgacctgtctgacaagagcatcaaccctctgggtggctttgtccactatggtgaagtgaccaatgactttgtcatgctgaaaggctgtgtggtgggaaccaagaagcgggtgctcaccctccgcaagtccttgctggtgcaaacgaaacggcgggctctggaaaaaattgaccttaagttcattgacaccaccttcaagtttggcca

SEQ ID NO: 228658 - DNA, 360 bp, Gossypium hirsutum
atccggacgccagctcctgcaagcgttgctgtccacagggagctccagcccttataacactcaacccgcagaaaccacccacctttaccatgtatgacagaggaagttgaacaggtggaggagcagcccgaagaaaaagaggaagcccaggaggaagctgcataagtccatgaggaagcccatgaggttcatgaaccatatgagaagccaagacccaaactcactgctcctaagatgccagaaggggagaaagtggacttcgatgacattcagaagaagcgccactatcaatgatctaatggagctccaggccctcatggactgccacttttgaagcccggatgaaggatgaggaggtgc

SEQ ID NO: 228659 - DNA, 348 bp, Gossypium hirsutum
aataaaaacagcgctttcgttctaggttttggactctggaaacctcaattccttccaactttactgttctaattacaattcttacctctcttgctttctgctcaagcgctttgaggatttgggcatgcgagtgccggacgctgatctttttaatccacaatcgattatggactccgacttctctcccggcggagcttccgcctctgcttccgtcgacccggactttggttttgcttttgacgacagtaatttcttcgatcggaccctgaggatcgagatcatgcctgatttgcccgagactaaattcgacggtggcggatgctgctctatcgctgattgggcccggaa

SEQ ID NO: 228660 - DNA, 362 bp, Gossypium hirsutum
ctaatgtctgacatgcaggtgactcagatgaagtctgatgggacacttgaggaaagtggtgaagcacgaaggcttcgaatatctttagaggaaatggcagatgaagtcaagagctctggccttttgaaggaatgtggacttcctgaggatgctctattggtaactccagaaaattttaaagagaacagatggtcctggtcagacgtaaaatctctctctggcagccttcttctggcccttgatgctagtctggagcatgcactgttgggctctgtaatgtccatggatagatatgcagcagcagaaagcttttacaagcttgcaatggcatttgccccttgtccagatcttcacataatgtg

SEQ ID NO: 228661 - DNA, 338 bp, Gossypium hirsutum
gtcaggaaagctggctcggaccggtccgcgagttcccgggatggagcctctacaacctcggggggaacaagagcatctccatgagcgtggctgggtcacgacaaggcgcctgctttggaggtgctggaggcttcggcactggtggctttggcggtggatttgggggctccttcagcggtaagggtggccctggcttccctgtctgccctgctgggggaattcaggaggtcactatcaaccagagcttgctgacccccctccacgtggagattgaccctgagatccagaaagtccggacagaggagcgagaacagatcaagctcctcaacaacaagttt

SEQ ID NO: 228662 - DNA, 333 bp, Gossypium hirsutum
accaacccctaatacacactcactatcgggaaagctggctcgcccccatgtcccgttcccgaattgccgcctccacccacgcgttcagaaaatttttgcgttctgcaaaacggacccgtacaactacttgcacagagtatgtaatctctatggatgcagataacatatccagatctagcagcacattcatcggaaaactaatgtgcaacttttttgttaccaaatccataatttatgacactctccctctatacaacattgcttagcttttaccactctggcctgatccaacttgttgctatttctaaaaacgtctatcttataagtacccac

SEQ ID NO: 228663 - DNA, 349 bp, Gossypium hirsutum
gatgtggttgccttgcctggtggagtagctcactggattttcaacaatctgcgggctcaacttgtgctgggcgcacttgttgatgttggcaatgatgccaaccagctcgatgagaacttcaggaaaatcttccttgctggtagcccacaaggaggtgtggtaagaggaggtcaaagcagagaccgaaaccaaaggcaaagcagaacccatagaggggaacgggaggaggaagagtctcaagagagcggcggaaacaatgtgctcagtggctttcgcgacaatctcctggcgcaggctttcggaattgataccaagctagcaaggaagctacaaaacgaaagagataaca

SEQ ID NO: 228664 - DNA, 320 bp, Gossypium hirsutum
atgccacctacagttcgcactacagttggtctctgcaggacctgtcatgccccggcccccaatggcatctgtggttcggctgccctcaggctcagtgatcgctcccatgccgcccatcatccacccgcccagacatcaacgtggtgcccatgcctccctcggaccctcctatcatggccccccgcccaccccctatgattgtgccaacagcctttgagcctgctccacctgtggcacctgtcccagctccagcgccaatgcccactgttcatgcgccaccttccatggaagatgagcctacctgcaaaaaactgaagaca

SEQ ID NO: 228665 - DNA, 360 bp, Gossypium hirsutum
gtagccgccgcctgcgtctctctcttcatctctctgaaccaaaaagtctttagcttttcgcttcgagagaggaccatgttggtttaccaggatctcatctccggtgacgagcttctttctgactcattcccctacaaggaaatcgagaatgggatgctgtgggaagttgagggaaagtgggttgtgcaaggagctgtcgatgttgacattggtgccaatccttcagccgaaggtgctgatgaggatgaaggtgttgatgaccaagctgtgaaggttgttgacattgttgacactttcaggcttcaggagcaaccctctttcgacaagaagcagtttgtcgtgttcatcaagaagttcatc

SEQ ID NO: 228666 - DNA, 357 bp, Gossypium hirsutum
atagaatctcacttttttgttttctggacttctttgacgaaaataggaactcttagaaatggcgatgaaaagcttcagcgttttcttcttcgttctactcctcctcgcttctcctattctccaagaagctgttgaagaaggtgaacttgggattgttggtgaggaagctcaggatttcggttctgggaattttgactcggctccaggagttgaaactctctgtcttttccctaaaaacagtgccaaatttatatcagccggagaagagactgaactccttgttggggtggaaaatgttggtgagtcacctgtgaatgtcattgcaatcacagccagtgttcatcttccttttgatca

SEQ ID NO: 228667 - DNA, 354 bp, Gossypium hirsutum
gaagaaagggcttaacgcaatttgaagaagagcagagtttggattagaatttagggttttacggaaggaacggacgaagacaaacaagaaccagatggatctggaaatgaacttgaacgccccccactccatgggcacaaccatcatcggtgtcacctacaacggcggtgtcgtcctcggcgccgattctcgtaccagcactgggatgtatgttgctaaccgggcatctgacaaaattacacagctcactgataacgtctacgtttgccgctctggatccgctgctgattctcagattgtttccgattatgtccgctatttccttcaccaacatacgattcagcttggccaatc

SEQ ID NO: 228668 - DNA, 194 bp, Gossypium hirsutum
cggacgcgtgggcggacgcgtgcggtgtaggataagtgggagctctcgggcgaaattgaaataccactacttttaacgttattttacttattccgtgaatcggaggcggggcacggcccctctttttggacccaaggccggcttcggtctgtcgatccattcggaagacattgtcagggggggagtttttctgg

SEQ ID NO: 228669 - DNA, 377 bp, Gossypium hirsutum
atcgtggaagtgacatcgtctttaaaccctgcgtggcaatccctgacgcaccgccgtgatgcccagggaagacagggcgacctggaagtccaactacttccttaagatcatccaactattggatgattatccgaaatgtttcatcgtgggagcggacaatgtgggctccaagcagatgcagcagatccgcatgtcccttcgagggaaggccgtggtgctgatgggcaagaacaccatgatgcgcaaggccatccgagggcacctggaaaacaacccagctctggagaaactgctgcctcatatccgggggaatgtgggctttgtgttcaccaaggaggatctcactgagatcagggacatgttgctggccaataagg

SEQ ID NO: 228670 - DNA, 385 bp, Gossypium hirsutum
atgtggagctggtggtggctttgggctcggtgcggcggagctggctttggaggtggcttcggtggccctggctttcctgtctgcccccctggaggcatccaagaggtcaccgtcaaccagagtctcctgactcccctcaacctgcaaatcgaccccagcatccagagggtgaggaccgaggagcgtgagcagatcaagaccctcaacaacaagtttgcctccttcatcgacaaggtgcggttcctggagcagcagaacaaggttctggacaccaagtggaccctgctgcaggagcagggcaccaagaccgtgaggcagaacctggagccgttgtttgagcagtacatcaacaacctcaggaggcagctggacagtatcgttgggg

SEQ ID NO: 228671 - DNA, 367 bp, Gossypium hirsutum
gcatcttgctcccgagtatgagaaagcagcatccattttgagtaaacatgatcctccaatctttctagctaaagttgatgccgatgatgaagcaaacaaagatttagcaagccaatatgatgtcaagggctaccctacgcttcaaattttgagaaatggaggaaagaatgttcaagaatacaaaggtccacgtgaagctgatggtattgtagagtatttaaagaaacaaagtggccttgcttctgttgaaataaaattaacagaagatgccagtaaccttattgatgacaagaagatagtaattgttggggtgttcccaaaattttctggggaagagtttgagagctatatggcactcgctgagaaa

SEQ ID NO: 228672 - DNA, 372 bp, Gossypium hirsutum
atgggtagaaaagcacctggggctggtgcagactgcggagcgggccgcaccctgtgtgcagaaagaggaggcgctcttgtgggaaatcctgaagatggccaaagacgactccactgttcgttgcttccagggcctgctgatttttggaaatgtgattattggttgttgcggcattgccctgaccgcggagtgcattttctttgtatctgaccaacacagcctctacccactgcttgaagccactgacaatgatgacatctatggggctgcctggatcggcatatttgtgggcatctgcctcttctgcctgtccgttcttggcatcgtaggcatcatgaagtccagcaggaaaattcttctggcgtatttcat

SEQ ID NO: 228673 - DNA, 377 bp, Gossypium hirsutum
atagaaggacgtggatgctgcctacatgaacaaggttgaactgcaagccaaggcagacactctcacagatgagatcaatttcctgagagccttgtatgaagcagagctgtcccagatgcagacccacatctcagacacatccgtggtgctgtccatggacaacaaccgcaacctggacctggacagcatcattgctgaggtcaaggcccaatacgaggagattgctcagaggagccgggctgaggccgagtcctggtaccagaccaagtacgaggagctgcagatcacagcgggcagacatggggacgacctgcgcaacaccaagcaggagattgctgagatcaaccgcatgatccagaggctgagatctgagatcg

SEQ ID NO: 228674 - DNA, 357 bp, Gossypium hirsutum
gaaatcgatgccccatacatcaaagatttcgcatacatgaatcggggaaaggggcatttgattttgtttagtgatgttacctgcatgttggcacctatcgcaagacttacagaagttatatgcgtctcgaaaaattgtgggccaatatagcccacattctaacaccttatgagcggtccgcttagggccaaagtgacctccgcaagcttcagcatgacaaaaattaaagatagaagttacctcagtttctggaacacatcttcgtattatctggtctgaacagtgtttccacaagtatgggtcatcccaaatgtaatatcgagcgttgcctctaagcttgtccctcacggaacgtgc

SEQ ID NO: 228675 - DNA, 309 bp, Gossypium hirsutum
atgccggagtcaaagccggttcccggcccagtgccgtcccgcagcagcctgccgcctctttcctttcaacatgacagatgccgctgtgtccttcgccaaggacttcctggcaggtggagtggccgcagccatctccaagacggcggtagcgcctatcgagcgggtcaagcttctgctgcaggtgcagcatgccagcaagcagatcactgcagataagcaatacaaaggcattatagactgcgtggtccgtatttccaaggagcagggagttttgtccttttggcgcgggaacctgggcaatgtcatcag

SEQ ID NO: 228676 - DNA, 373 bp, Gossypium hirsutum
atggtggcttgggtggtggcttgggtggtggctttggtggtggctttgctagtggtgatgggcttctggtgggcagtgagaaggtgaccatgcagaacctcaacgaccgcctggcctcctacctggacaaggtgcgtgctctggaggaggccaacgccgacctggaggtgaagatccgtgactggtaccagaggcagtggcccgctgagatcaaagactacagaccctacttcaagaccattgaggacctgaggaacaagattctcacggccacagtggacaatgccaacgttcttctgcagattgacaatgcccgtctggccgcggatgacttccgcaccaagtatgagacagagctgaacctgcgcatgag

SEQ ID NO: 228677 - DNA, 382 bp, Gossypium hirsutum
atcagcctcctacaagagtttgatgtccaggagcaggacatcgagactttacatggctccgttcacgtcacgctgtgtgggactcccaagggaaaccggcctgtcatcctcacctaccatgacatcggcatgaaccacaaaacctgctacaatcccctcttcaactacgaggacatgcaggagatcacccagcacttcgctgtctgccacgtggacgcccctggccagcaggacggcgcagcctccttccccgcagggtacatgtacccctccatggatcagctggctgaaatgcttcctggagtccttcaacagtttgggctgaaaagcattattggcatgggaacaggagcaggcgcctacatcctaactcgatttgctc

SEQ ID NO: 228678 - DNA, 364 bp, Gossypium hirsutum
ggacaaagaaggaatcccaccagaccaacaaagattgatttttgctggaaaacaacttgaagatggaagaactcttgccgattataatatccagaaggagtctactctccatttggttctccgccttcggggtggtatgcagatctttgtaaagactcttaccggaaagaccatcactttggaggttgaaagttccgataccattgacaatgtgaaggcaaagatccaagacaaggagggtatccccccagaccagcaaaggctcatctttgctggcaagcagctcgaagatggtaggacattggccgactacaatatccaaaaggagtctacccttcatttggtgttgcggctgcgtggtggg

SEQ ID NO: 228679 - DNA, 371 bp, Gossypium hirsutum
ataaattttatgaatgtaagcagtgtgggaaagcattatcctctcttacaagttttcaaacacacataagaatgcactctggagaaagaccttatgaatgtaagatatgtgggaaaggcttttgttctgcaaattcatttcaaagacatgaaaaaattcacagtggagataaaccctataaatgcacgcaatgtggtaaagccttccctcattccagttcccttcgatatcatgaaaggactcacactggagagaaaccctatgagtgtaggcaatgtgggaaagccttcagatctgcctcacaccttcgagtgcatagtagaactcacactggagagaaaccctatgaatgtaaggaatgtgggaaagcc

SEQ ID NO: 228680 - DNA, 375 bp, Gossypium hirsutum
atcccgcctcgtccaactgctggtcaaggcccaccaggatgcccagcgccacgtagctgcaggcacacagcagccctacacggatggtgtgaggatggaggagattgtggagggctgcaccggagccctgcacatcctcgcccgggaccccatgaaccgcatggagatcttccggctcaacaccatccctctgtttgtgcagctcctgtactcatcggtggagaacatccagcgtgtggccgccggggtgctgtgtgagctggcccaggacaaggaggcggctgacgccattgatgcagagggggccttggtcccactcatggagttgctgcactcccgcaacgagggcactgccccctaccctgctgctgtcct

SEQ ID NO: 228681 - DNA, 369 bp, Gossypium hirsutum
atttgagagacctgaaaagtggtcactaccacaagattgtagaaattacagagaatgcttcacaatgcctcgaggacgaatacatggtggacaagccatcttgttcgactccaaggaagaggtcattcaaccttccgagtgtttcatccattgacgaactcagaactcctccattcgaggagttattgaagttgttttgggaagcaaaatctgcaaaactagcgaatggagatgtaaaacatatgctggcagcatatgaagcagcccaagccttgaaagactccagagttccactcactgctataaactaaaagtgagatggaaaggaacaaacatatttaagaaaacaaaggccgagtatagtatagt

SEQ ID NO: 228682 - DNA, 369 bp, Gossypium hirsutum
atcgtcaacttccgcctctaccagttgctcaacctgcactaccccccgaagctcgaggggcaggcccaagcagaggcaaaggccagtgagggcacctacgcgttggactccgagagctctatggagaaactggcggccctcagtgccagcctggcccgcgtggtggtgcctgccacagaggaggaggccgaggtggatgagtttcccaccgatggggaggaagaccgcaggaaggagctggaggcacaggagaagcacaagaagctttttgaaggcctgaagttcttcctgaaccgagaggtgccccgtgaggccctggccttcatcatcaggagttttgggggggaaagtgtctgggacaagtctttg

SEQ ID NO: 228683 - DNA, 333 bp, Gossypium hirsutum
gcctttcctctccacaaaacacttgaaaatatctctcttcactttcttctcttttcaacgcagagtgaaaggcggggaggccgtagacaatctctcttgcgctcttctcgtagaatggatcagattcaacatccatctgtcatgcagaaggtagctggccagctcctttcttctagcatttcccgagattttcaagggtatgatgggtctttcaggaggcctgctctataccaaggacattttgcatatgggaattattccaatgctggaatgcactatcctattgttccatcaacagctaccgccatttgtgttcaagcccctgcagagaaa

SEQ ID NO: 228684 - DNA, 218 bp, Gossypium hirsutum
acgcacctgttcccaagggtatcgatgtattgccttgtctacaaaccatggtgtcacccaaccgaagttccagcgcagcaaacggtctgttgctgaggagcgagctggcctaaagttgggaggtctcacagttgttacctcgtactggatcaatgtggattctacttacaagtactttcaggtaattctgatggatgtcatactcaattctatacctc

SEQ ID NO: 228685 - DNA, 377 bp, Gossypium hirsutum
atctgggaggtacccctgttcagagccgtgtggtccaaggcaaggagcccgcacacctcatgagcctgtttggtgggaagcccatgatcatctacaagggcggcacctcccgcgagggcgggcagacagcccctgccagcacccgcctcttccaggtccgcgccaacagcgctggagccacccgggctgttgaggtactgcctaaggctggtgcactgaactccaacgatgcctttgtcctgaaaaccccctcagctgcctacctgtgggtgggtacaggagccagtgaggcagagaagacggtggcccaggagctactcagggtgctacgggcccaacctgtgcaggtggcaaaaggcagcgagccagatggcttc

SEQ ID NO: 228686 - DNA, 361 bp, Gossypium hirsutum
atccaggtttccacagctgtagttgagccctacaactccatcctcaccacccacaccaccctggagcactctgattgtgccttcatggtagacaatgaggccatctatgacatctgtcgtagaaacctagatattgagcgtccaacctatactaacctgaataggttaataggtcaaattgtgtcctccatcactgcttccctgagatttgatggagccctgaatgttgacctgacagaattccagaccaacctggggccctacccccgcattcactttcctctggccacatacgcccctggcatctttgctgaaaaagcctaccatgaacagctttctgttgcaaaaatcaacaatgctt

SEQ ID NO: 228687 - DNA, 379 bp, Gossypium hirsutum
tttctgaattcgtatctatatgtttaatatgtcagcaagttaaggctaaacatcaagtaccttcgggtttgctacagccagtgacgatatcagaatggaaatgggaaagagttattatgggctttgtatcaaggtttccctgtctctgaaaaagaaagatgccatttgggtaattgttgaccgtttgacaaagtttgcacactttattccagtacgtatggatttttccctaaatagattagcagagttatatgtttctgagattgttagactgcatgaagtgccagtctccactattttagataaagatccacggttcacgtcctgattctggaacaagttgcaaaaaactttgggtacgaaattacatttcagtact

SEQ ID NO: 228688 - DNA, 400 bp, Gossypium hirsutum
atctcctggttcttagaccaggctgagggtcaggaaggcacgtcctcatggagatggagagcagccacagcagcagtgccccggggacctcaggcaatagcgctgtctccgctcttcctggaattctgctgtccctgcccgtgtgttgttaggtcacattccatgccacacacagacacaagcatgatggctttgtctggaggagtgggcccagtgcgacatagaaggactgaggcctgcccccaaggtccctgactcgctttcctgtctccctgccagagccgtgtggtccaaggcaaggagcccgcacacctcatgagcctgtttggtgggaagcccatgatcatctacaagggcggcacctcccgcgagggcgggcagacagcccctgccagcaccc

SEQ ID NO: 228689 - DNA, 382 bp, Gossypium hirsutum
aaacagctgaaaatatctctctcttcactttcttctcttttcaacgcagggtgaaaggcggggaggccgtagacaatctctcttgcgctcttctcgtagaatggatcagattcaacatccaactgtcatgcagaaggtagctggccagctcctttcttctagcatttcccgagattttcaagggtatgatgggtctttcaggaggcctgccctataccaaggacattttgcatatgggaattattccaatgctggaatgcactatcctattgttccatcaacagctaccgccatttgtgttcaagcccctgcagagaaaggatttaccagctttgccattgatttcctcatgggtggagtttctgctgctgtgtcaaaaaca

SEQ ID NO: 228690 - DNA, 341 bp, Gossypium hirsutum
atagctggcctacctgaaaaagaaccacgaggaggagatgaatgccctgagaggccaggtgggtggagatgtcaacgtggagatggacgctgcacctggcgtggacctgagccgcattctgaacgagatgcgtgaccagtatgagaagatggcagagaagaaccgcaaggatgccgaggaatggttcttcaccaagacagaggagctgaaccgcgaggtggccaccaacagcgagctggtgcagagtggcaaaagcgagatctcggagctccggcgcaccatgcagaacctggagattgagctgcagtcccagctcagcatgaaagcatctctggagaaca

SEQ ID NO: 228691 - DNA, 387 bp, Gossypium hirsutum
cccacgcgtccggggtattgacgactcagaggaccttcctttgaacatctcaagagaaatgttgcagcaaaacaagatcttgaaggttatccgcaagaacttggtaaagaagtgcattgagctcttctctgaaatagcagagaacaaggaagattacaacaagctttatgaggcattctcgaagaacctcaagcttggtatccatgaagattctcagaacaggactaaaattgccgaattgctccggtaccactccaccaagagaggtgatgagatgaccagcttgaaggactatgtcaccagaatgaaggagggtcagaatgatatctactacattactggggagagtaaaaaggccgttgagaactctcccttccttgagaagct

SEQ ID NO: 228692 - DNA, 283 bp, Gossypium hirsutum
cttgaaggcatggagtgctcagaaagctagagctgctgctattcttgaagctgacagcaaggatgagcccttgattaccatggatacccctgaagaagaaaatgctaatgctgtatacctgcagaacatcaccattctatcagcccttatcagtaaataactaggggacagcctaaagaaggcccttaacggtggggagatggttaatatgaatcttgactggagggaagtacttacttatcccgatgaacggggcgaagattatatttttacaaaaaacaac

SEQ ID NO: 228693 - DNA, 384 bp, Gossypium hirsutum
gcaagaagaaaggcaacaaccacaatgccaacaaaggtgcttgaaacgattcgagcaagaacaacaacaatcccagaggcaattccaggagtgtcagcaacattgccaccagcaagaacaaaggccggaaaagaagcaacaatgtgtgagggaatgcagggaaaagtaccaggagaatccatggaggggagagagagaagaagaagcagaagaggaggaaactgaagaaggagagcaagaacaaagccataaccctttccacttccatcgcagatcattccaatctcgattcagggaagaacatggcaatttcagggtcctccaaaggtttgcttcaaggcatcctattcttaggggcatcaatgagttccgcttatctatctt

SEQ ID NO: 228694 - DNA, 283 bp, Gossypium hirsutum
tcaagaagaaaggcatcaactacattgccaacaaatgtgcttgtaacgattcaagcaagaacaacaacattgccatcaggcactttccaggagtgtgagcaacatttccaccagcaagaacataggccggaaaagaagcaacactgcgtgacggaatgcatagaaaaggaccaggagaatccatggagggtagagagagaaaaagaatctcaaaaggtagaaactgacaatggagagcacgatcaaagacatatcccttttcattaacatagcagattatccc

SEQ ID NO: 228695 - DNA, 330 bp, Gossypium hirsutum
atgccgcccgttcagcccatcaccccagctccccctcagccccgcgcagcccagctgaccccaccgactggggagggcagacctccccccgccgcactggcttctccttctccacccaggagcctagaccccagacccagaatcttggcacccctggtccagctctgtcccaccctcgaggtcccagccatcccctggacctggggacctcttctcctaacgcctctcagatacactggaccccgtaccgggcgatgtaccagtacaggccccagaacgaagactagctggagctgcgcgagggggacagggtggatgtcttgcagcagt

SEQ ID NO: 228696 - DNA, 286 bp, Gossypium hirsutum
cggacgcgtgggctcgtgacaggtgtaggaccataccagaacctgttggatcacttggctgaccctttcaacaacaatgtcttgactaacctcaagttccattagatgaaagtgcctatatttgttccatggaactatccccccggctaaaagctccattgccaaatccctttctgctcctttcttgatctcagtaaaacatgtgtaaatttattctgtaatctgcgagaaagaactgaaatagactttgttaatgccactgtaatatcatgagcttctctttcaa

SEQ ID NO: 228697 - DNA, 377 bp, Gossypium hirsutum
acaagaacaaagaagggtttggttttgatttgagagagaatcgaagaaggaatggagaagccaaggcaaatctcagcaatggaggcattcgagaaattggagaaggtgggagagggaacctacggaaaggtatacagagcaagagagagagcgacggggaagatcgtagccttaaagaagactcgtctccatgaggacgatgaaggcgttcctcccaccactctccgcgaggtctccatcttgcgcatgctctctcgggatcctcatgtcgtcagatagatggatgttaaacaaggacaaaacaaagaaggaaagacggttctatacttggtttttgagtacatggatactgatctcaagaaatacatccgctcatt

SEQ ID NO: 228698 - DNA, 277 bp, Gossypium hirsutum
caagtttgtacagaacagcaggctaggaccggcccggaactccagggattggtgagagaccatgccacgctgtagcagacctcctgacagtgagtgagactgccaatgagccccctcaagatgaaggtaattgcttcaattcaccccgcaacctggccatggaggcaacctacatcaaccacaatttctcccagcagtgcttgagaatggggaaggaaagatacaacttccccaacccaaacccggttggagaggtcgacataaagatgaatgaaat

SEQ ID NO: 228699 - DNA, 385 bp, Gossypium hirsutum
tcgcccacgcgtgcgaaaaaattatttatttatttttctttacttcccattttaaatgttttccttttcccaacgaagtaaagcgacggaagaagtgacaccatctacgatgtctcagggtggcggcgccggtgccggaggaggaggtgccggtggagggggcatggagtttgatctgtcggaagagattctggcggtgataccgacggatccttacgagcaattggatctggcacgtaagataacgtcgatggctatcgcctcgagagtatcgaagatggaaacggagattgggaggatgagagcaaagattttcgaaaaggatcgtatggtttacgaattggaagataaagtatcaagattgcagcaagcgaatcatgaggcc

SEQ ID NO: 228700 - DNA, 380 bp, Gossypium hirsutum
cccacgcgtccgatggctctatgttttcagatgggcagcacaggcccgtctcaagccctgcaatgaactctttggtttcaaaagcaaatggttttccatcttcaaggaatcaaaacttcagatcgaattctaattacatgggactgcaccaccctgggacaatgtccggcatgggcacagctcatggttatgtcaatagaatgtacccaaacaaaccatatggccagtatgggaccacattcagatctggaatgggctttggatctaatggttatgatttgcgaacaaatgaaaggggttggttggcagacaacaagtacagaccaaggggacggggcaatggttattttggttcaggcaatgatatcatggacggtttt

SEQ ID NO: 228701 - DNA, 386 bp, Gossypium hirsutum
atgcctgctgctgctgggtgctgtagaatctggtaaaagcaccattgtgaagcagatgacgatcctgcatgctaatgggtctaatggagagggcggcgaacaggacccgcaggctgcaaggagcaacagcgatggtgcgaaggcaaccaaagtgcaggacatcaaaaacaacctgatagaggcaatggaaaccattgtggccggcatgagcaacctggtgccccccgtggagctgtccaaccctgataaccagttcagagtggactacattctgagtgtgatgaacgcgcctgactctgactttcctcccgaattctacgagcatgccaaggctttgtgggaggaccattgagtacgcgcctgctatgaacgcttcaacgagttcc

SEQ ID NO: 228702 - DNA, 311 bp, Gossypium hirsutum
ggaagatttgggagaaaaggtgttgccatcaactttgtaaccacagatgatgagaggatgctatatgacatccagaggttttataatgttgtaattgaggagctgccatcaaatgttgctgatctaatttgattctggttcaagctggctaggtaaatggctctctgggaatgacaaagcttaagaggtccagttacaactgggagggatttcgttcctgcacatttagttgagcttccattaccatataaaaaacccaatgttcaaaatttgatttggtgtgtgtctaagcaagaaatatctgtagtatt

SEQ ID NO: 228703 - DNA, 386 bp, Gossypium hirsutum
gaagaagagagaaaaaaaaatgaagtctcagatctgtttagcctttggaactctggccttgttgttagcttcagctttggccgatgacgtcgtcgtactgaccgaagcgaacttcgataaggaagttggtcaagatagaggagctctcatcgagttctatgctccttggtgtggacactgtaagaagctagctcctgagtacgagaagctcggggcaagttttaagaaggctaaatccgtcttgattggaaaggtggattgtgatgaacataagagtttatgcagcaaatatggtgttcaaggctacccaactgttcaatggtttcctaaaggctctttggaacctaaaaagtatgaaggaccacgcacggctgaggcacttgctg

SEQ ID NO: 228704 - DNA, 389 bp, Gossypium hirsutum
atactgcaagaatgtagaccattctcagcaatcagactgtcgacattccagaaattgtcgacattaccctgaagggacgctcagttattgtgtagggtccgagaggaaccctgttgaggctctccaatcacatctatgtttaggttattgttcatgaaaagggagcttttagcgagttctatgctccttggggtggacactgtaagaagctagctcctgagtacgagaagctcggggcaagtttttaattggcaaaatccttcttgattgtaagggtggtttgtgttgaacataataattttatgcagcaaatatggtgttcaaggctacccaactgttcaatggtttcctaaaggctctttggatcctaaaaagtttgaaggaccacg

SEQ ID NO: 228705 - DNA, 327 bp, Gossypium hirsutum
atggcaactacaagtcctttggtgacaccaagtttgttcccaacttgcccaaggaaaagctggaacaggtgatcctagggagtgaggctgctcagcagcaccccgaagaagtcaggggcctctggcagacctgtggggagcttatgttctctctggagccaaggcttcgacacctcggactggggaaagagggaatcaccacctatttctctgggaattgtaccatggaagatgccaaattggcccaggactttctggactcacagaacctcagtgcctataacacccggctcttcaaaagaggtcgatggagaagggaagccccac

SEQ ID NO: 228706 - DNA, 411 bp, Gossypium hirsutum
ataagaaatcgtactcaccttcgaaaagatcaataaaagccgcaatgccagagcccagtgtgttggctggcactccaagaaaaggagatgggatgagaaagcatgccaaatgatatcggatatcaagaacgaagtgaaatgccgctgtaactacaccagtacagtgatgtctttttccattctaatgtcccccaaatcaatgacggacaaagttctggactacatcacctgcattgggctcagcgtctcaatcctaagcttggttctttgcctgatcattgaagccacggtgtggtcccgggtggtggtgacggagatatcatacatgcgtcacgtgtgcatcgtgaatatagcagtgtcccttctgactgccaatgtgtgagttatcataggctctaactttaaccctaa

SEQ ID NO: 228707 - DNA, 323 bp, Gossypium hirsutum
atggatgctccccacacaagatgacaacggtgaaccgcgcgccggacgcgaacatatgaaccgatgcagacgatgcgggggagaccatacacggacatttgtcgatgggagtgcaccaatgcggtatgggtccccccggacagaatgaccttgatcggtatcttaacgggcttttgacgttcatccagctgcaagagagcactcatgaccgctactacgacaagcttaaccttacctcgcggtcgctcgtcccgggctgtagatgcgagtgcctacccaaccaacggcatggagagacacagacttgtgggcctgaaccgcga

SEQ ID NO: 228708 - DNA, 292 bp, Gossypium hirsutum
atctggagtgcagcacgatctcagatcactgtaacctgtacctcctggggtcaagccatcctcctacctcgccctccttaggagctggggctacaggctcaagccaccataccacgtagcggttgggacattagagaaagacaggattttgccatgttggccaggcgggcctagaactcctggtctcaagtgaaccacctgcctgagcctgccaaagtgctgccattacacgcgtgagtcaccaccccagcctgcttgagatattctttccttataggataatctacatggg

SEQ ID NO: 228709 - DNA, 261 bp, Gossypium hirsutum
aggtattgccgggagtggaatcgcagttcttgtttgagtgtcggtgtcatcgacactggacaatgcaaatcttcacaaagcaccgtaagtggcaagaccatcaccttggaggttgagcccagtgacaccattgagaatgacaaggcaaacatccaatataaggaaggtatttctcctgaccagcagagttttctctttgccggaaagcatctgaaagatgggcgcaccctatttgactacaacattcaaaatgagatcacc

SEQ ID NO: 228710 - DNA, 381 bp, Gossypium hirsutum
gcccccacagctagaggaccagtggttcttcaaggtatcaattatgcttctgggggaggtgggattctcaaccacactggaaacatctttggtggtcgaatcaactttgatgcacagttggacaattttgaaaatacgaggcaagatataatctccaccattggtgtttctgcaactctagagctgcttcaaagctctcttttctcggttacgatgggatccaatgatttcatcaataactactttacacccattgtctcagctgaagagcaaaaattagtccctccacaagtgtttgtggcctccatgattgcaagattcaagctacagcttactaaactttacacttcgagtgctagaaagatttttgtggtaaatgta

SEQ ID NO: 228711 - DNA, 349 bp, Gossypium hirsutum
gtttgtgcagctgagattgatacagaaaacatatatggctgcctttgcaactgccgaggcctgcgattcaaacacagcgcttttggcaagcggtgaactgcgtgctctagaaccgattttcaagatatacgggcaacgtcgttcattctcaggacccattgtaacactcaaggtgtttgaggacaatgtcctggtgaggcagcttcttgaaacccggggtgaaggaagagttctagtcatagatggcgggggaagcaaaaggcgtgctttgatcggaggaaacttggcgcaagcggctcaaaacataggttggcctggtattgtagtgaacggatgcattcgagatgtg

SEQ ID NO: 228712 - DNA, 385 bp, Gossypium hirsutum
ctctaaagaagaggccaagaagaaggggaataaaattaacaatgtaggttggtggtttaaaccctggttctaccaacatgcgcaaacggccttaaagaagggagagtttgtagagtacattcctacaagagaatattaccacaggcacacaagatgtttgtattgggaggggaagcttatacttccattcggagatcaatggtggtttaggtttcttttgggctggttgatgccacccaaggtttccttgctcaaggctactcaaggtgaatctataagaaactattaccatgagatgcatgtcattcaagacatgcttgttcctctttacaaggttggggatgcccttgagtgggtccaccatgagatggagatctattccatt

SEQ ID NO: 228713 - DNA, 391 bp, Gossypium hirsutum
atttaccttgtcaccaacggaagaggaacgcttacgttcttgacacatgaaaacaaagagtcttacaatgtagtaccgggagttgtagtcagagtcccagcaggaaacactggggtactgggcaacccaggccaccagggaaaggttattattagaagggtttaacggcctggtaattaccctggacaattcgaggaattcttcccagctggaagccaacgccctcagtcatatctccgagcctttagtcgtgaaattcttgagcctgccttcaatacacgaagtgagcagctagaccagctgtttggtgggaggcaaagccaccgaaggcagcagggacagggaatgttccgttaagccagccaagaacaaataagggcattgagccaag

SEQ ID NO: 228714 - DNA, 292 bp, Gossypium hirsutum
tttctggatcggcccacgagaggtgctgcagcagctggagactcacaagtcacatatatagctgcctttgctgctgaacgcagaccgtggctcaaacacagagctgtttgcaagcgaacaactgcgttctgtagaaccgattctcacgatactcgctgctaggccgcctgcctgaacccaactgggcccgatagctggagctctgtgcccgcttcctggaagggaatgagctgaaccccgactggtaggactatctccagtttttgatcacacaggcagccataccccctgc

SEQ ID NO: 228715 - DNA, 392 bp, Gossypium hirsutum
atctgtcactctgggcatcctgattgctggccaggtctctggtcccatgtcccctctgcccagaggcccacctgaaccctgccgtgacctttggcatgtgcttcctgattcgtgagccctggatcaagctgaccgcctataccctggcacagacactgggagccttcttgggtgctggaatcgtttctgggatgcattatgatgcaatctggcgctttgtcgacaaccagatctgtgtttagggccccaatggcacaactggcatctatgctacctacccctttggacacttggatataatcaatggcttctttgaccagttcataagcacaggctccctcatagagtgtgagctggccattgttgacccctacaacaacccagttccccga

SEQ ID NO: 228716 - DNA, 383 bp, Gossypium hirsutum
atcggacactctgggcatgctcattgctgggcgggtctatggtgccatgttcactctgcccaggggcccacctgaaccctgctcctacggtgcgccatgagcttactggctcgggtgccgcggatcaagctgcccgagtcttccctggcacagacgctgggagccttcttgcctgctggaatcgcccttgggtcgcatcatgatgcaatctggggctttgccgacaaccaactttttgactctggccccaatggcacagctggcatctttgctacctacccctctggacacttgaatatgatcaatggcttctttgaccagttcataggcacagcctccctcatcgtgagaccgctggccattgttgacccctacaacaaccc

SEQ ID NO: 228717 - DNA, 396 bp, Gossypium hirsutum
ctcaacatctcgatgggccgaagcattgcgtgaaatttctggacggctggcagaaatgcctgctgatagtggatatcccgcgtatctggctgctagattagcctcattttatgaacgtgctggtaaagttaaatgccttggtgggccagaacgtacaggtagtgtgacaattgttggtgctgtttctcctcctggaggagatttctctgaccctgtgacatctgcgaccctcagtattgtccaggttttctggggtcttgacaagaaacttgctcagaggaagcatttcccttctgtcaactggcttatttcatactcaaagtactcaggggcactggaatctttctatgacaaatttgatcccgactttattagcattaggactaaggcccgaga

SEQ ID NO: 228718 - DNA, 485 bp, Gossypium hirsutum
aggtgacactatagaacagtttgagcaaagaacgcaagctggtgccggtccgggaccgcagggacggggaagtgctgaagtggctgtccatagccctggtgtcaaagaactagaacttaatacgacatttagggggccagcatgactgatcctcttagagttttgaagctatgctcacagcttctgagctccctcagtcaccaaagatgtgaagtatgattgctctctctctcctgaagcttaggaaactagatgatgcaatagaagactgcacaaatgcagtgaagcttgatgacacttacataaaagcctacttgagaagagcccagtgttacatggacacagaacagtatgaagaagcagtacgagactatgaaaaagtgtatcagacggagaaaacaaaagaacacaaacagctcctaaaaaatgcacagctggaactgaagaagagtaagaggaaagattactacaagattctgggagtg

SEQ ID NO: 228719 - DNA, 373 bp, Gossypium hirsutum
gtagatatggcgattaacccttctttgctctttctttcccttctttttctcttcaatggctgcctagctcgccagaccttttcgtcacagcagtcccaaaatgagtgtcaaatcaataggctccgcgcctctgcaccccagacccgaattcgctccgaagccggcaccaccgagtggtggaaccccaactgtcaacagctcaggtgtgctggtgtatctgtaatgaggcagactattgaacctaatggccttgttttgccttccttcaccaatgctcctcagcttctctacattgtccaaggaagaggtattcaaggtattgggatgcctggatgtgccgaaacattccaggattcacagcaatggcagcatc

SEQ ID NO: 228720 - DNA, 384 bp, Gossypium hirsutum
tcgtctctctctctctctctctctctctctttataaaaaaacctccggctattggggtttttggcttcgtagattcggtccgcttcatttttgtctcgttttcaaacagtaatttccttttttttttcattgttatttttcttggaattttttgaagtgtttaatccaaaaaaatggcgttagtttcattcgtcgggagggttcttttcgcttcaatgttcatcctctctgcttggcaagagttcaatgaatttggtgttgatggagggcctgcagctaaggcactcaaaccaaaattcaatgtcttctcaaagactgtgacagctcatacaggggtggaagtgccagaatttaatattaaagttctagttgctgctgctgtag

SEQ ID NO: 228721 - DNA, 280 bp, Gossypium hirsutum
attgccggcagggttggaaacaggcaggtacggaagctgagccgcagagttagctggcatctgacagaaaaacgtttgtctacagattttgagcatccgaagttgatccctgactaagtatactttgctgctccctcagcctttgaagaaatgtctgtcacgtatgatgattccgttggagtagaagtatccagcgacagcttctgggaggtcgggaactacaagcgtactgtgaagcggattgacgatggccaccgcctgtgcagcgacctaatgtact

SEQ ID NO: 228722 - DNA, 398 bp, Gossypium hirsutum
atgacacctccgtggtcctctccatggacaacaaccgcaacctggacctggacagcatcatcgccgaggtcaaggcccagtatgaggagatcgccaaccgcagccggaccgaagctgagtcttggtaccagaccaagtatgaggagctgcagcagacagctggccggcatggcgatgacctccgcaacaccaagcatgagatctctgagatgaaccggatgatccagaggctgagagctgaaattgacaatgtcaagaaacagtgtgccaacctgcagaacgccattgcggatgccgagcagcgtggggagctggcgctcaaggacgccagaaacaagctggccgtgctggaggaggccctgcagaaggccatgcaggacatgttccggctgctgcgt

SEQ ID NO: 228723 - DNA, 428 bp, Gossypium hirsutum
atgaggaagtgctgacgtgaatatatagactaccgttgtacattatcgacctggtgatgctgcctgacactgcgtgcgaactctgggaagcatacacacgtatcaacagccaaatggatcaatcacttgaaaggatatcatagattgcagatcaacttactgaaaaaagccttagtgtcatagattagtgaaaaaagagttaaatggaacgaacacaagccttccaaaaatatgtgactgtgctaaaaaaccacacctacatttgattggtgtacctgaaagtgacggacacaaaggaaccaagctgaaaacactctttagggtattatccatgaccaacctaacaagacaggtcaatatgtaaattcatgaactacagactccaccacatagatccttctgatgaagagcaaccccaagacacataa

SEQ ID NO: 228724 - DNA, 352 bp, Gossypium hirsutum
cggacgcgtgggtttagagcaaacacaactacagccaattccaaatcatgagtaggataattattctcgtgtggcttaagttttcgagaaacataggcaatcacctttccatcttgcatcaatacacaacccagaccattcaatgaggcatcattgaaaacaaaaaattctttcccagatttagtttgagtcaaaactagagcttctgttaacattgctttcaactattcaaaactctactagcatttatttgaccaaaaaaaaagtgacattcttctgtagcaattcagtcaatgggagagctatcaacaaatttcctttaacaaaccactgataatatccaaccagccct

SEQ ID NO: 228725 - DNA, 361 bp, Gossypium hirsutum
cccacgcgtacgcccacgcgtacgcattgattggaaaggacccaaccgagcagactgcaattgacaatttcatggttcaacaactggatggaacccaaaatgagtggggttggtgcaaacaaaagctcggtgcaaatgccattcttgccgtgtcccttgctgtttgcaaagctggagctgaagtcaagaaacttcccctttacaagcacattgctaaccttgctggtaacagcaaagaggttcttcctgtccctgctttcaatgtcatcaacggtggttcacatgcaggaaacaaattggctatgcatgagttcatgattcttgctgtaggagcatcatcctttaaggaggccatgaaaat

SEQ ID NO: 228726 - DNA, 364 bp, Gossypium hirsutum
caacgttcctggacttggaacaagcatgagcttgccccaagcactttcaaacacacgtactgatggacttggggcgctttaccgagaaggaacagcctcatttctcaactccatggtgaataataggttcccattctcgactaagcaagttagggagacttttgttgcagcacttggttcaaacagcgctgcagcagctcaggctcgtctcttcaagcttgccaatgaaggccacctcaagcaaaggacctaagcaaacaccttttggtttgtcagtttcttgaagcattttatccactagtgtgtgctacttagattttatgttcctagtattcgacatctataatgctacagctttcatttg

SEQ ID NO: 228727 - DNA, 383 bp, Gossypium hirsutum
atccgtgaggcagaacctggagccgttgtttgagcagtacatcaacaacctcaggaggcagctggacagtatcgttggggaacggggccgcctggactcagagctgagaaacatgcaggacctggtggaagacttcaagaacaagtatgaggatgaaatcaacaagcgcaccactgccgagaatgagtttgtgatgctgaagaaggatgtagatgctgcctacatgaacaaggtggagctagaggccagggtcgatgcactgatggatgagattaacttcatgaagatgttctttgatgcggagctgtcccagatgcagacgcacgtctctgacacctccgtggtcctctccatggacaacaaccggaacctggacctggaca

SEQ ID NO: 228728 - DNA, 357 bp, Gossypium hirsutum
attcggggcatgccaaaaccagaacctgacgatgactgggttcggtctttacaaccagaacatttacccagaccatatccagaggatcttcgtggctgggaaaatcaaccatgtgagacaatgggatggccaagccaaggagttggactctggagtgtcatagaggttgttggatgagatattcaacagctacccacaagagtcttacttcgtgtctcgacagacgcagcgagcatatgaataaagagttaaaggcaataataactacatagtctcgtgcatatgcgactaatgtgaaatattctagctttaagcaagcactgaatgaaataaaaatggtgagctatgtaaaggagg

SEQ ID NO: 228729 - DNA, 331 bp, Gossypium hirsutum
caaaaatcaatggtactcagcttgctgctattctgccacttgctgtggtgcataccttgggcaacctctttacgaatatgagtcttggaaaagtggctgtttcgttcactcacacgattaaagctatggagccatttttctcagttgtgctttctgcaatgtttctaggagagttgccaactctttgggtagttgcttcccttgtaccaattgttggaggagttgcacttgcatccgtcactgaggcctctttcaattgggctggattctggactgcaatggctttcgaatttgacaaaccagtctcgtaatgttctcagcaaaaaagtca

SEQ ID NO: 228730 - DNA, 330 bp, Gossypium hirsutum
atatccccactggggaggctgtgtgtgtctacactgcaaaagaccctgacaaggagaatcaaaagatcagctaccgcatcctgagagacccagcagggtggctagccatggacccagacagtgggcaggtcactgttgcgggcaccctagaccgtgaggatgagcggtttgtgagaaacaacatctatgaagtcatggtcttggctgtggacaatggaagccctcccaccactggcacgggaaccctcctgctaacactgattgatgtcaacgaccatggcccagtccctgagccccgtgagatcaccattttgcaaccaaagccctgag

SEQ ID NO: 228731 - DNA, 371 bp, Gossypium hirsutum
agaagctttccagtgcatagcaaagaacgccctgaagagcggtgaagaggaagaaatatacttgcctgacaccattgacgtcgccagcagtagccaaccaaggtcaactggatgtgactgttgaagcatatgatgtgataatttttttcctgtcggtaagcattatgaatgatttggccaaaccaaccattgttatggattcacgtgggagatatactgtacattagtgtatgtgtgaggaacaaaatagtctgttaattctcttttggtgcccttgtatttgtaacgtcttaatttgtttagttttcttgttttttagtcagcagcacccaaagtatggttatttcaaaatatcaatccagggagcaact

SEQ ID NO: 228732 - DNA, 368 bp, Gossypium hirsutum
tttttcttcttttctcttaccatcatcataatcatgccgatcaacgatcaaaacagacccatggctcaaaagctctacgactcagctccgtcgtctcgccaggtggctaagttcttgaccgcctcgacgttgggcgcaacgctgcttttcttgtctgggttaaccttgaccgggacggtcattgccttgataatagctacgccgttgatggttatcttcagtccggttctagtcccggccgggataaccatattcttggtgacgacggggttcttgttttcgggcgggtgtggggtggcggcattaacggcgttgtcgtggatatacaattacgtgcaagggaaacacccaccaggagctgatcagct

SEQ ID NO: 228733 - DNA, 247 bp, Gossypium hirsutum
atgcagaatcagttgtctgggaacctgctgaggaaattcaaaaacagcaatgggtggcagaagctgtgggtggtgttcacaaacttctgcctgttcttctacaagtcacaccaggacaatcatcccctcgccagcctgcctctgctcggctactcgctcaccatcccctccgagtccgagaacatccacaaagactacgtgttcaagctgcacttcaagtcccatgtctactacttcagggcggaaa

SEQ ID NO: 228734 - DNA, 248 bp, Gossypium hirsutum
atgaaagaaaaaagaaagatgaagagaaatcaagtagcaagccctcaaataatgcaaaggatgagtgcagtgaatttcgaaactatataaggaacaatgagctcatctgccctagagagaatgacccagtgcgcggtgctgatggaaagttctatacaaacaagtgctacatgtgcagagctgtctttctaacagaagctttggaaagggcaaaacttcaagaaaagccatcccatgttagagcttct

SEQ ID NO: 228735 - DNA, 386 bp, Gossypium hirsutum
atcggggagctccgcgaggctactggtacctgcgtccgcccggcggacggctgctctggtttgtgacttccggacacgacggccatcctctccagaatgaagatcttcttgccggtgctgctggctgcgcttctgggtgtggagcgagccagctcgctgatgtgcttctcctgcctgaaccagaagagcaatctgtactgcctgaagccgaccatctgctccgaccaggacaactactgcgtgaccgtgtctactagtgctggcattgggaatctcgtgacatttggccacagcctgagcaagacctgttccccggcctgccccctcccagaaagcatcaatgttggtgtagcttccatgggcattagctgctgccagagctttct

SEQ ID NO: 228736 - DNA, 164 bp, Gossypium hirsutum
atgtcgtcccttcccccgagttctaaaatccaggggcggtgttgtgggcatcaaggtagacaagggcctggttaccctggcagggacaataggcgagactaccacccaagggtggatggtctgtctgagcgctggcccagtaaagaaggattggttgacttttc

SEQ ID NO: 228737 - DNA, 349 bp, Gossypium hirsutum
gtcaggtgtttacttccccttccgccacttacgtcggcgtctacgacggccatggtggacctgaggcttcccgtttcatcactcaacatttgttcccttttcttcataagtttgcatcagagcatggggggttatcggcagaagtaataaagaaagcctttgatgctactgaggaggagtttctgcacttagtgaaacgatcgtggccagccaggccacaaatcgcttctgttggttcctgttgtcttgttggggcaattgcaaacgatgttttatatgtggctaatcttggtgactcaagggcggttcttggccggagagtgtctccaaatggacctaataatcaagt

SEQ ID NO: 228738 - DNA, 359 bp, Gossypium hirsutum
atccgagatgcgggtcgtggcgccccgaaccctcctcctgctgctctcgggggccctggccctgaccgagacctgggccggctcgcactccatgaggtatttcaccaccgccctgtcccggcccggccgcgggcagccccgcttcatctccgtgggctacgtggacgacacgcagttcgtgcagttcgacagcgacgccgagagtccgaggatggagccgcgggcgcggtggatagagcaggaggggccggagtattgggaagaggagacgcggagagccaagggccacgcacagactgacctagggggcctggggatcctgcgcggctactacaaccagagcgagggggggtctcaca

SEQ ID NO: 228739 - DNA, 209 bp, Gossypium hirsutum
cccacgcgtccgggaagaagaaggagaaggagaagatgaagaagaagaagacaacctcagccggcggagccggcaccagaaggaggaggagcaggggcggaaaagctcataatgcaacaaccttctctgtgccttgaacagaaacttcctggttaaagctttaaccgttgaccacgacatcattaggaaaatccaacgtgtccgaggaa

SEQ ID NO: 228740 - DNA, 339 bp, Gossypium hirsutum
gtttgaattctttttttgttaaatctgtggaggaacttccttacaatatatctgtgattcagatcagcaaggctttgccttctgttgtagctgaggctcctactccagggccaagtgagctgaatatcactggcattatgtcagcacatgggtgtaaagtgtttgctgatacccttttggctaaccctgaagccatgagaacatatgaggataatgttaatggaggattgactgtgttctgccctatggatgatccattcaaagcctttttaccaaagtacaagaacttgacagcttctaagaaagcatctttcctcgaattcttttgtgtgcctgtgt

SEQ ID NO: 228741 - DNA, 364 bp, Gossypium hirsutum
cggacgcgtgggctctttcctgcaaggaataaggaaatagttgcatcttcaaagcatcatcaggaacaccttgttgactaaaggaaacacaaatcaataaaaatgatttaagatgttcccgtgcatcttcatgtggcaatccaacatattgcccattcgaattcagcatttgaaacattactggcttgagttcaaaatttccaacttggattgctggcctaacaactcctgattgtaagtcatccacgacaggtactacaaaatctcgtatagtcctattttgtatttgaacgtcttgtggcaacggtgggtcattagtgttttggtttcgtatcgggggtatgacttcatagtttcttagtaa

SEQ ID NO: 228742 - DNA, 383 bp, Gossypium hirsutum
atggaggcgctgcggctgtaccagcatgcggtggagtacttcctccacgccatcaagtatgaggcccacagcgacaaggccaaggagagcattcgagccaagtgcgtgcagtacctagaccgggctgagaagctgaaggattatttacgaagcaaagagaaacacggcaagaaaccagtcaaagagaaccagagtgagggcaagggcagtgacagtgacagtgaaggggataatccggagaagaagaaactgcaggaacagctgatgggtgccgttgtgatggagaagcccaacatacggtggaacgacgtggccgggctggagggggccaaggaggccctcaaagaagctgtcattttgccaatcaaattcccacacttgtt

SEQ ID NO: 228743 - DNA, 370 bp, Gossypium hirsutum
cggacgcgtgggcagtttacaaacaaacttgaaggaatgttcaaggatattgaactatcaaaggagataaatgaatcattcaagcagtcatcccaagccaggacaaaacttcgatcaggaattgagatgagtgtccatgtcttaacaactgggtactggccaacatatccacctatggatgttaggattccacatgaattgaatgtctatcaggacatcttcaaggagttctacttgagtaagtacagtgggagacgcctaatgtggcaaaattcattgggtcattgtgtgttgaaagcagattttcccaaaggtaaaaaggagctggcagtttccctgttccagactgtagttctgatgttgttcaacg

SEQ ID NO: 228744 - DNA, 344 bp, Gossypium hirsutum
ctcatttagcccctttcattagcatcgaaatcactccagttttctttatcactgaaaaatgtcttgctgtggtggaaactgtggctgcggttctggctgcaagtgtggcagtggctgtggaggatgcaagatgtacccagacctgaacgttgccgagatgaccacaactgagactctggttcttggtgtagcaccccagaaagcacactttgagggagctgagatggaattcggtgctgagaacggctgcaagtgtggagacaactgcacctgcaacccttgcaattgtaaatgattagagaccaaagccaaagctccctggaagcagagacgcctttgtcttt

SEQ ID NO: 228745 - DNA, 386 bp, Gossypium hirsutum
atgaaccagcccgcgaacccaggccgggagggggtttcggcctggggggaaggggattgacatgtctctcgaagacccctttttttgtagtccgaggcgaggtgcagaaggcggtgaacacggcccgcgggctataccagcgctggtgcgagcttctgcaggaaagcgcggcggtcggacgcgaggagctggactggacgaccaatgagctacggaatggcctgcgcagcatcgagtgggacctcgaggacctggaagagaccatcggtatagtggaagccaacccaggcaagttcaagctcccggccggggacctgcaggagagaaaggtgttcgtggagcggatgcgagaggcagtccaggaaatgaaggaccatatggtcagc

SEQ ID NO: 228746 - DNA, 353 bp, Gossypium hirsutum
ggggccttttgggggattggggtaaatggaatttaacaaccctaaaggttctaagaagcccggagggggagcactttctggtttgcttaagaatggaggcacatggtgggcttggcctctatggagttgccaatagtctctacaacattgatgggggggaccccgcacttgttttcaatatgattttgggcatcaaagataaggtgtattcacaggggacgcaccttatgataccatgggttgagagggctatcatatatgatgtccgcgcaagacctcatttagttgagagtactttcgggagtcgtgatctccacatgggcaagattggggttcgtgttctcactcgcccc

SEQ ID NO: 228747 - DNA, 375 bp, Gossypium hirsutum
cccacgcgtccgcatcgtttcgttgggaggcccttatattcctctcaaaactggaagaagagacggtagaaggagcagagcagatgttgtggaggagtatcttccggaccacaatgagaccatctctggcgttcttgacaggtttgccgccatgggtattgacacccctggagtcgttgccctcctaggagctcacagtgtcggcagaactcactgtgtgaagctggtgcatcgtttgtacccagaggttgaccctgccctcaaccccgaccatgttccacacatactccataaatgccctgatcagatcccagaccccaaggccgtccagtatgtgagatacgaccgtgggacacccatggtttttgataacaa

SEQ ID NO: 228748 - DNA, 314 bp, Gossypium hirsutum
atgcacaattggtgtggatttcaaaataagaactatagagttagacgggaaaacaatcaagcttcaaatatgggacacagcaggccaggaaagatttcgaacaatcacctccagttattacagaggagcccatggcatcatagttgtgtatgatgtgacagatcaggagtccttcaataatgttaaacagtggctgcaggaaatagatcgttatgccagtgaaaatgtcaacaaattgttggtagggaacaaatgtgatctgaccacaaagaaagtagtagactacacaacagcaaaggaatttgctgattccc

SEQ ID NO: 228749 - DNA, 347 bp, Gossypium hirsutum
atgccgcgggagacgtggtgccgctgcgggctcgctctgcggtgcgctaggcttggtgggaaggcctgttctcgagtccgcgcttttcgtcaccgccatgtcgggaggtggtgtgattcgtggccccgcagggaacaacgattgccgcatctacgtgggtaacttacctccagacatccgaaccaaggacattgaggacgtgttctacaaatacggcgctatccgcgacatcgacctcaagaatcgccgcgggggaccgcccttcgccttcgttgagttcgaggacccgcgagacgcggaagacgcggtgtatggtcgcgacggctatgattacgatgggtaccgtc

SEQ ID NO: 228750 - DNA, 301 bp, Gossypium hirsutum
cccacgcgtccgcccacgcgtccgcccacgcgtccgcatggggttccaattaagccactttcttttcatttcaaaacaaagtcttcccattgcaacgcatccatttccatgtctgcagcatcacctccaccctatgattttaataatttcaggtttgaccccatcaaggagtccatcgtctcacgtgagatgacacgcaggtacatgatggacatgatcatctatgctgataccgatgtggtggtcgtcggtgccggctccgctgggctctcttgtgcctatgagcttagcaagaacccct

SEQ ID NO: 228751 - DNA, 356 bp, Gossypium hirsutum
  unsure (1)..(356): unsure at all n locations
aaacaatacaataataaaataaacaaaccaaatcctatttattatattaattctataatttgaattttcaaaataggattttagaaatagagatagggataggattctttttagaaatattagaaataaggaataaagaaatcatggataaatccaagcgactctttcttaaatccaagcgatcttttcgtaggcgtttgcccccgatccaatcgggggatcgaattgattatagaaacatgagtttaattagtcgatttattagtgaacaaggaaaaatattatctaggcgangtaatagattgaccttaatacaacaacgattaattactattgctataaaacaagctcgtttt

SEQ ID NO: 228752 - DNA, 366 bp, Gossypium hirsutum
gtcgagcctaaagactcaataccaccctccaaattgaggttggcaaggttgaaagccaatagcgtgtacacggccccatgcaacacctcggtgttgtatcccacaacaggaggcaatatccatcaattcaccgccgtaacaccttgtgcggtgctcgatgtactcggccctccctattctaaagaagacgatcgcgactgctcctattacaaagatttcccatactcagctttctcaaatgagggagaaactacaagagtgagtgaagaagagagagagggacttggatggctagaagaaattgaagcaccagagaatgcaatgatggatagaattgactgggtcctcaaattatagaaaactact

SEQ ID NO: 228753 - DNA, 375 bp, Gossypium hirsutum
aatgactctgtcaccaagagcaagttcgataacttgtatggatgccgtcactctcttcccgatgggttgatgagagctaccgatgtcatgattgctggtaaggtcgctgttgtctgtggttatggtgatgtcggcaagggttgtgctgctgccttgaagcaagccggtgctcgcgtcattgtcaccgagatcgatcccatctgtgcccttcaggctctcatggaaggacttcaagttttgacccttgaggatgttgtctccgaggctgatatctttgtcaccaccactggtaacaaggacatcatcatggttaaccacatgaggaagatgaagaacaatgccattgtttgcaacatcggtcacttcgacaatgaa

SEQ ID NO: 228754 - DNA, 369 bp, Gossypium hirsutum
gttgtaaccaagaaggagttggctcaacgtccctctaatcggaaaggaaaaactagcaaaagagtccattttgtgaggaacttgattagggaagttgctggttttgcaccatatgagaagaggattactgagcttctgaaagttggtaaggacaaacgagcgctcaaggttgctaaaagaaagttgggaactcacaaaagggcaaagaagaagcgtgaggagatgtctagtgtgctccgcaagatgagggctcaccctggaggtggagaaaagaagaagtgaagctctctggtgacaagtcaccttgatgatttcattagagaactttgtttagcatatgttttaacgtattggtttgagactgaaaac

SEQ ID NO: 228755 - DNA, 394 bp, Gossypium hirsutum
tgctgccttcacaggcagtcacgatgcagatgcttcttgtttttgttcttaaaacctgtagtctaacctatttggtgtaagaagtttgaagcaagtatgatgagtttttactttttttttttttttttttggcaggttaaacccatccagagtaatggctgcggccttacccaggaccctgggggagttgcagctgtatagaatattacaaaaagccaatctactttcttatttcgatgcctttatccaacaaggtggtgatgatgtccagcaactctgtgaagcaggagaagaggagtttttggaaatcatggcactcgtgggcatggctagcaagccccttcatgttagaaggctgcaaaaagctttgagagactgggtcacaaaccctggg

SEQ ID NO: 228756 - DNA, 377 bp, Gossypium hirsutum
gacccatccatccacgcacgcgtacgactctatctacaagatgcgcgaattgctgcttcggtaattttcaagcttatggtttccgtgaaccccaacccggctcaaggtttttacttcttcgatccgatgaatatgggtcttcctggtgttaattcggccccgcctgccaatacggtggcgccgccgcttcaggttccacctactcctgccacctccggtgctggtaatactacagtgtatccggaggatcccagtaagaaaatccggaagccttacactattaccaagtctagagagagctggactgagcaggagcacgagaagtttctcgaagctcttcaattatttgatcgtgattggaaaaagattgaaacttt

SEQ ID NO: 228757 - DNA, 190 bp, Gossypium hirsutum
ctggtggcaaagtgaggagaggctacctttaaccttaatgccatgaacaagctccagaccaagaaaccatggtcactctcattctcatttggacgtccccttcagcagagcactttaaaggcctgggctggaaaggaggaaaacgtggaagaaagcacaagatgcttttccttgttaggtgccaaggctt

SEQ ID NO: 228758 - DNA, 374 bp, Gossypium hirsutum
atgtgcccgcgccagagactcagccgcgctcccaccacccacacccaccgggccctcgtgcgcctgttctctaggagccagtccgcgccaccgccgcagcccagcccatggccaccctacgcagccatgaccaccaggtggaccagctaaccaacgacaaagcccgcgtcgaggtggagcgcgacaacctgaccgaggacatcatgcgcctccgggagaaattgcaggaggagatgcttcagagagaggaagccgagaacaccctgcaatctttcagacaggatgttgacaatgcgtctctggcacgtcttgaccttgaacgcaaagtggaatctttgcaagaagagattgcctttttgaaggaactccatgaa

SEQ ID NO: 228759 - DNA, 335 bp, Gossypium hirsutum
atcgcggagcctcccgaacctactcaggcgcccggagccgcgcccggagcccggctatagaggctgcagtcgcagccgggagcccgcagcccgcgccccgagcccgccgccgcccttagagggcgtcccaggccgcgccatggtgaaagtgacgttcaactccgctctggcccagaaggaagccaagaaggatgagcccaagagcggggaggaggcgcttatcatcccccccgacgccgtcgctggggactgcaaggacccaaatgatgtggtaccaaatggccaaagaaaagcctggtgttggtgcatgtgctttggactggcatttatgcttg

SEQ ID NO: 228760 - DNA, 363 bp, Gossypium hirsutum
atcgcggagcctcccaaacctactcaggcgcccggagccgagcccggagcccggctatagaggctgcagtcgcaggcgggagcccgcagcccgcgccccgagcccgccgccgaccttagagggcgtcccacgccgggccatggtgaaagtgacgttcaactccgctctggcccacgaaggaagccaagaaggatgagcccaagagcggcgaggaggcgcttatcatccaccccgacgccggcgctggggactgcaaggacccacatgaagtggtgcacaaccggccaaagaagagcctggtgttggcgcatgagctttggactggcatttatgcttgcaggtgttattctaggatgagcatac

SEQ ID NO: 228761 - DNA, 345 bp, Gossypium hirsutum
atagaagagcggaccagggctgctgccagcacccgccactcagagcgcctctgtcgctgggactctccagaactctttgctcacgagttaccaaaaaaccaaaagccaagatgttggtattgctggctggtatatttgtggtccacatcgccactgttattatgctatttgtttgcaccattgccaatgtctgggtggtttccaacgcgggaaatgcatcagtaggtctttggaataactgtaccaacactctctgcaatgggaccctgtcatacgcccatgaagatgccctgaagacagtgcaagccttcatgattctctctatcatattctctgccatatctc

SEQ ID NO: 228762 - DNA, 385 bp, Gossypium hirsutum
ggcaggatttgttaaagaatacatggccgtcgatgatgttgtaggaactgaattgcacactgttgggaaccgattcacaggcttgttatccagctccggtttgctggtcaagcacaaagctttaaaggcatactttggtgataaaaagccagatgttggccattgaagttcaagcctgcatgaccatcactttatctgcctttgcaaggaagcctatgtggtgcacaaggaagatggtagaaacaatcaaagttgtttgatgccaagggacaagtacccgaagccacttatatttcatgatgggagactagctttcttgccaacaccatttgcaacactttgcatgttcttgtggcttccattagggatagttctcgctatattt

SEQ ID NO: 228763 - DNA, 299 bp, Gossypium hirsutum
  unsure (1)..(299): unsure at all n locations
ggatgtgaactgtccgtaccgtgctcgagtggccaactaccagcgtgacggccccatgtgcatgcaggacaatcagggtggtgctccaaattactaccctaacagctttggtgctccagaacaacaaccttctgtcctggagcatagcacccaatattctggagaagtgcggagattcaacactgccagtgatgataatgttactcaggtgcgggcattctatgtgaacgtgctgaatgaggaacagaggaaacgtctgtgtgagaacattgcangccacctgaaagatgcacaaattt

SEQ ID NO: 228764 - DNA, 399 bp, Gossypium hirsutum
cccacgcgtccgataaccttgagattatcaatttgaagccttcttcgaatttcctcattcaagatgcaaattttcgtcaagaccctcaccggaaagaccatcacattggaggtggagagttctgatactattgacaatgtaaaggccaagattcaggacaaggaaggcatccccccagaccagcaaaggttgatcttcgctggtaagcaacttgaggatggccgcacgttggctgattacaacatccagaaggagtccacactccacttagtgcttcgcctccgtggaggaatgcaaatttttgttaagactttgactgggaagaccattacattggaaggagagagttcaaataccattgataatgttgaagcaaaaattcaagacaaggagggaatt

SEQ ID NO: 228765 - DNA, 368 bp, Gossypium hirsutum
atctggccaagctgggccatgccagtgaccgcatcatcgccctggatggagacaccaaaaattccaccttctcggagatcttcaaaaaggagcacccggaccgcttcatcgagtgctacattgctgagcagaacatggtgagcatcgcggtgggctgtgccacccgcaacaggacggtgcccttctgcagcacttttgcagccttcttcacacgggcctttgaccagattcgcatggccgccatctccgagagcaacatcaacctctgtggctcccactgtggcgtttccatcggggaagacgggccctcccagatggccctggaagatctggccatgtttcgatcagtccccacgtcaactgtcttt

SEQ ID NO: 228766 - DNA, 425 bp, Gossypium hirsutum
atgtttccacttcttgatatgactgagatttatttctctcttttagatgaaattgttgatactttaggtgaaggagcttttggaaaagttgtggagtgcatcgatcataaagcgggaggtagacatgtagcagtaaaaatagttaaaaatgtggatagatactgtgaagctgctcgctcagaaatacaagttctggaacacttgaatacaacagaccccaacagtactttccgctgtgtccagatgttggaatggtttgagcatcatggtcacatttgcattgtttttgaactactgggacttagtacttacgacttcattaaagaaaatggttttctaccatttcgactggatcatatcagaaagatggcatatcagatatgcaagtctgtgaattttttgcacagtaataagttgactcacac

SEQ ID NO: 228767 - DNA, 390 bp, Gossypium hirsutum
accacgcgtacgctcattctactctttacctaccaagatcaagaaaccttaacaatcaacaactaccaactagatttggattaaatgacccaaaaccaatcaaccaaccaagcaaccgagaagcaaaaaaaatggactctgattatggcattcccagagaactttctgatcttcagaaactccgatctcaataccaaccacggcttcctccttgcctcgagggaactactgtcagggttgagtttggtgataccactacatctttagacccggctgatgctcataccatagcccgagcttttcctcacacttatggcaagcccttggctcactttctcaaggcaactgccaaagtacctgatgctcagattataactgagcatccaacta

SEQ ID NO: 228768 - DNA, 392 bp, Gossypium hirsutum
  unsure (1)..(392): unsure at all n locations
accacgcgtacgatcattctactgtttacctaccaagatcaagaaaccttaacaatcaacaactaccaactagatttggattaaatcacccaaaaccaatgaaccaaccaagcaaccgagaagcaaaaaaaatggactctgattatggcatacccagagaactttctgatcttcagaaactccgatctcaataccaaccacggnttcctccttgcctcgagggaactactgtcaaggttgagtttggtgataccactacatctttagacccggatgatgctcataccatagcccgagcttttcctcacacttatggcaagcccttggctcactgtctcagggcaactgccaaagtacctgatgctcagattataactgagcatgcaactatt

SEQ ID NO: 228769 - DNA, 371 bp, Gossypium hirsutum
ctcttaccatcatcataatcatgccgatcaacgatcaaaacagacccatggctcaaaagctctacgactcaactccgtcgtctcgccaggtggctaagttcttgaccgcctcgacgttgggcgcaacgctgatttgcttgtctgggtgaaccttgaccgggacggtcattgccttgataatagctacgccgctgatggttatcttcagtccggttctagtcccggccgggataaccatattcttggtgacgacggggttcttgttttcaggcgggtgtggggtggcggcattaacggcgttgtcgtggatatacaattacgtgcaagggaaacacccaccaagagctgatcagctcgattacgcaagaaac

SEQ ID NO: 228770 - DNA, 338 bp, Gossypium hirsutum
gacttgcacttgttatatccctcttttgccttccgaaaagagcagcaaaatcaagtaaggttgatttaaacccagcttctttatcacagagcttcttcctttctgttcttatctttttgatcaatcgtctctgcttgataatggcaactaggcttcaatttgaaaattcatgtgaagttggagtcttttccaagctgaccaatgcctactgcttggttgcaattggagggtcagaaaacttctatagtacttctagtcggagctggcagaagtcattccacctgttaagacctctattgctggcactagaataataagacgtctatgtgctggaaata

SEQ ID NO: 228771 - DNA, 358 bp, Gossypium hirsutum
ctttttaaaagcttttgcttgtaattttaatggctaccctcattgctcctgaacatacttcagctgttgaagatgctgaaaagcttcaaaaagcttgtaaaggatgggggacagatgagaaggcaataatttcagtgttgggtcacagaaatgcagttcaaaggaagcaaatcaggcttgcttatgaagacctttaccaggaagatctcatcaagcgtcttgaatcagagctttctggtgatttcgagaaagcagtgtatcgttggatattggatccagcagaccgagatgccgtgttagctaatgttgccataaagaaattaagccctgatcaccatgtgatcgttgaaatttcatg

SEQ ID NO: 228772 - DNA, 363 bp, Gossypium hirsutum
tgcttattgtcctattgcacaaggtgcccttaccgggaaatataaaccagaaaatccgccatctggacctagaggccagatttacactccggagtttttaactaagctccaacctctccttatcagaattaaggaaataggagggaattatgggaaaactccaacacaggtggtactcaactggttaatagcacaggagaatgttgtgccaatcccaggagccaaaaatgctgcacaagctgaggaatttgcaggtgcccttggctggagactaagcaacgaagaagtggacgagctacgctcactggcatcagaaataagtcctgttatcggttttcctgtggagaagctgtaattcttttt

SEQ ID NO: 228773 - DNA, 396 bp, Gossypium hirsutum
cgcttatggggctattgcacaaggtgcccttaccgggaaatataaaccagaaaattcgtcatctggacctagaggccagatttacactccggagtttttaactaagctccaacctctacttatcagaattaaggaaataggagggaattatgggaaaactacaacacaggtggtacttaactggttaatagcacaggagaatgttgtgccaataccaggagccataaatgctgcacaagctgaggaatttgcaggtgccctttgctgtagactaagcaacgaaaaagtggacgagctacgctcactggcattagagataagttctgttataagatttacttgggagaaactgtaattatttttgctccaattaaagatgacttaactcttgaatga

SEQ ID NO: 228774 - DNA, 403 bp, Gossypium hirsutum
gcgacaactcttctttgtcatcatccatggctgaccgtaacacgaaccctgaccgaaaccagccttaagagagatagatacttcaccctgcaccccactaccgtaaaacagatccatcaagcacccagattgttgctgtcctcactctactccctgtcagaggctcattgcttgctatggcagcgcttacactcaccggcaccctcatcgggcttagcatcgccatacccctcttcattatcttcagcccagatattgtccctgccaccatcgtcatttccatgtcagaggctggtttcttgtcgacagtagcattctggttgacggcgctgtcttcgctcaactatggggagaagcacatgataagggctaacgcccgcgccggagttggaaaagggcaggc

SEQ ID NO: 228775 - DNA, 330 bp, Gossypium hirsutum
ctcactttgaatactcccattttcttattgattttgcagatcggctctctaatccttttttcgggtgtagcgatgtttatacgcttggttgttgttgaagaagtgctactaccatggctacaaagaagagcgttggggacttgaaggaagctgatttgaagggaaagaaagtgtttgttagagtcgatctgaacgttacattggatgataacttcaacataactgatgacacaaggatccctgccgctgttcccaccatcaagtatttgatgggtcatggctctaaagtcatcctctctagtcatttgggacgcccaaagggtgtcactt

SEQ ID NO: 228776 - DNA, 390 bp, Gossypium hirsutum
atccgggatgtcgagaactgcaagaccacgtttgggcgtggaaatatgaacaggcgctttgagagcagccagaagtacaaagaggggaagtacatcattgaactcaaccacatgatcaaagacaacggctgggactgacccccgctccccgacgcatgtggctccagcccggcctggccgccagggagcgccaccggcttccctccgcccaaagggagctctggaccctcagggcccccgcagaggacggatccagctcctgtacatatattttattgcatgcactgtgaccttggggggagaacagaagggggacgacgcccccgcaccttctgcgatctggctggcttggatctcgtttttaaccccctacttccccgcttgccctat

SEQ ID NO: 228777 - DNA, 401 bp, Gossypium hirsutum
atgccccaggggtctttggacagacagcctttgggcaggcctcagtctttgggcagtcagcgagcagtgccgcaagtggtttttccttcagtcagcctgggttcacttccgtgcctgccttcggtcagcctgcttcctccacccccacatccaccagtggaagtgtctttggtgccgcctcaagtaccagtagctccagttccttctcatttggacagtcttctgccaacacaggaggggggctgtttggccaaagcaaccctcctgcttttgggcagagtcctggctttggacagggaggctctgtatttggtggtacctcagctgccaccacaacagcggcatcctctgggttcagcttttgtcaagcttcaagttttgggtctagtaatactggttct

SEQ ID NO: 228778 - DNA, 408 bp, Gossypium hirsutum
atgccctgggctccgcggcccctgcgtcctccggttagctgtgccactgcatctgagtgtcttctctccccacggctccccgagtttctaactctttctgcctcctcgcctcgaagctgttccttccccgcactcgagaatccccggaggcccggaggcctgcagcaggagcgaccatgaagaagctgatggtggtgctgagcctgatcgctgcagcctgggcagaggagcagaataagttggtgcatggcggaccctgcgacaagatatctcacccctaccaagctgctctctacacctccggtcacttgctgtgtggcggggtccttatccatccactgtgggtcctcacaactggccactgcaaaaaaccgaatctttaggttttactggggaagcataaccttc

SEQ ID NO: 228779 - DNA, 403 bp, Gossypium hirsutum
  unsure (1)..(403): unsure at all n locations
ccccggagcaggcacttggtggtatttacagtgttcttaaccagaagcgtggacatgtatttgaggaaatgcaaagacctggcactccactttacaacatcaaggcataccttcctgtcattgagtcctttggattctctagcactttgagggctgcaacatcaggacaagctttcccacaatgtgtgtttgatcactgggatatgatgtcatcagacccattggaacctggctctcangcagcagcccatgtcgccgaaatccgcaagaggaaaggattgaaggaacagatgaccccactttccgagtacgaagacaaactgtaagctaagagagagtaactgtgattgtgcggcataaccttcgctgcaatttaaattttgtttctgtctggntatatttt

SEQ ID NO: 228780 - DNA, 402 bp, Gossypium hirsutum
gttgaaaaagaacagtgtaacgcttgatattgtaaatttcggtgaagatgatgaagggaagacagagaagctcgaagcgcttcttgctgctgttaacaataatgatactagtcacatcgttcatattcctgctggtcctaatgctctctctgatgtacttctaagtacacccatcttcactggggacggggaaggtggaagtggttttgcagcttcggcagcagcagctgcagctggtggcatctatggttttgagttcggcgtggatcccaaccttgatcctgaactggcccttgctcttagagtttcaatggaagaggagagagccaggcaagaagctgctgctaaaaaggcagcagaagagtcatcgaaacacgaaaagggtggggaagaacaggatgc

SEQ ID NO: 228781 - DNA, 389 bp, Gossypium hirsutum
atcggagtacgacttgactactcgcatcgcgcactttttggatcggcatctagtctttccgctccttgagtttctctctgtaaaggagatatataatgaaaaggaattattacaaggtaaattggaccttcttagtgataccaacatggtagactttgctatggatgtatacaaaaacctttattctgatgatattcctcatgctttgagagagaaaagaaccacagtggttgcacaactgaaacagcttcaggcagaaacagaaccaattgtgaagatgtttgaagatccagaaactacgaggcaaatgcagtcaaccaaggatggtaggatgctctttgactacctggcggacaagcatggttttaagcaagaatatttaaatacac

SEQ ID NO: 228782 - DNA, 351 bp, Gossypium hirsutum
aggtggtacatgaatcttgtctccataaatctgacatttatggcattttttggcgtagttgatacaatccccttccaaagtagaccaataatatccaaacctcatgatttgtctagccatcgcgaaaccattagcgtgcatcccacaaacgccttcgtgaacttcttccaagattaacttagcttccacggcgtcaatacatctcaacagtacttggtcctttcttcttttatacaagatgtccccatccaaaacatagtcgcaagctaatctccttaagttcgcttatcattttcagttacctgttctgggtatttacgatctctcacatatcgcaatatatcctgatac

SEQ ID NO: 228783 - DNA, 380 bp, Gossypium hirsutum
acgggttgtagtgttcatcaagaacttgattaagaacttgacaccgaaactggatgcggaaaagcaagagtgcttcaagaaaaacattgagggagcaaccaagtttttgctttcaaaattgaaggaccttcaatttttcgtaggagagagcatgcatgatgatggatgcttggtgtttgcttactacaaggatggtgctgttgacccaacatttttgtactttgcatatgcattgaaagaggtcaagtgctgaggtttgaagcaaaaaaaaaaaaaagggttgctgaagaatttaatcctttttattattgcttttgtctcttgttttcaagactctgctaaagacataaattatttgtgggttttgatggttttggttt

SEQ ID NO: 228784 - DNA, 410 bp, Gossypium hirsutum
atgctattttaagttaacttttgtataacgtgtaacgtctctgtctaggttcatttttttgcatatagttgttcaatttatccagcactttttactgaaggctatcttctctccattaaattgtctttgcccctttatcaaacttcagttgactatatttatgtggatctatttctcttctctatattctgtttcactgatctgtgtgactatcttcaattagtaatatgctgtcttgattactatagatgtataataagatttgaaattgggtagtgtcattcctccaaatttgttcttctttaatattgcgttggctactctagatctcctgccttttcatataaagtttagaattagtttgttgctatctacaataaccttctgggattttgattgggactgcattg

SEQ ID NO: 228785 - DNA, 406 bp, Gossypium hirsutum
cggtgcggcctttccgggattcccgggatggaatctggacgtgaactgtgtacaaacagcttccacatatatgctgcaaaggatcttgtgagctgacactgctttaaatgaaatatggcatcagtcttaaccaatattgcatccacagattgtcgttgctaatatgccaaacgctcttggaagtgagtggccatgatgcaccaagagcggaagttcaatttgactgttatcgacgacccgtcaatgaaggaacttgtgctcagatacaatggtggcataaacatgtacgttctgctgcctgagaatgacctctgtgaaattgaaaacaaactgacctttgagaatctcatggaatggaccaatccaaggcgaatgacctctaagtatgttgaggtattttttgctc

SEQ ID NO: 228786 - DNA, 396 bp, Gossypium hirsutum
cggacgcgtgggttcttcaccaacttctattctggcttcacctccgatatccccaccttctgagtcacctcctatgtcacccagtggctcatttaactcggtgagtgaacttgctgcttctatgcgaagtttgcagctgggtaagtctaaaatgaatggtgcttgttcctggggcctgcaaatgggatcgggtttcagttctccacgtggttccacactccgacccggtttttgcagctctccttcaactccaactcgtacgccgactcggtctagcctcggtcagtttgacatctgggaattcaacgctgtccaagaggaacctgcaatggaaagagtggagtctgggagaaacctgagggcaaggatgtacgcaaaactgagcaaagaaaattc

SEQ ID NO: 228787 - DNA, 427 bp, Gossypium hirsutum
atctcggattctctgctctcctcgacggagtcctccccgcaggccagcccagagcccctggtactccatgaggagacaccgcccaccaccagcagcgactctgaggaggaacaagaagaggaggaagaaatcgatgttgtttctgtggaaaagaggcaggcccctggcaaaaggtcagagtcgggatcaccttctgctggaggccacagcaaacctcctcacagaccactggtcctcaagaggtgccacgtctgcacacatcagcacaactacgcggcgcctccctccactcggaaggactatcctgctgccaagagggtcaagttggacagtgtcagagtcctgagacagatcagcaacaaccgaaaatgcaccagccccaggtcctcggacaccgaggagaatgacaagaggcgaacacacaacg

SEQ ID NO: 228788 - DNA, 411 bp, Gossypium hirsutum
atctccagtccgcggtgccatggcccccgcccgtctgttcgcgctgctgctgatcttcgtaggcggagtcgccgagtcgatccgagagactgaagtcatcgacccccaggacctcctagaaggacgatacttcttcggagccctaccagatgatgaggatgtagtgggacccgggcaggaatctgatgactttgagctgtctggctctggagatctggatgacttggaagactccacgatcagccctgaagttatccatcccttggtgcctctagataaccatatccctgggaaggcagggtctgggagccaagtccccactgaaaccaagaaactggaggagaatgaggttattgccaagaggatctcacccattgaaacaagtgaggatgtgtctaacaaggtgtgcat

SEQ ID NO: 228789 - DNA, 368 bp, Gossypium hirsutum
atgatggcgggtgaaaaagttgagaagccagatactaaagagaagaaacccgaagccaagaaggctgatgctggtggcaaggtgaaaaagggtaacctcaaggctaagaagcccaagaaggggaagccccattgcagccgcaaccctgtccttgtcagaggaattggcaggtattcccgatctgccatgtattccagaaaggccatgtacaagaggaagtactcagccgctaaatccaaggttgaaaagaaaaagaaggagaaggttcttgcaactcttacaaaaccagttggtggtgacaagaacggcggtacccgggtggttaaacttcgcaaaatgcctagatattatcctactgaagatgtacc

SEQ ID NO: 228790 - DNA, 327 bp, Gossypium hirsutum
atggaatctggacgtgaactttctaaaacagttgccacattcatcctgcaaaagatcttgttagatgacactggtttggcttatatatgtcagacgtatgagcgtttctcccatgttgccatgatcttgggtaagatggtcctgcagctatccaaagagccttctgcccgtctgctgaagcatgtagtgagatgttaccttcggctttcagataaccccaaggcacgtgaagcacttacgcagtgcctccctgaccagctgaaagacacaaccttcgcccaggtgcttaaagatgacaccaccacgaaacgctggcttgcacaactg

SEQ ID NO: 228791 - DNA, 397 bp, Gossypium hirsutum
ttttcaatttgatttggtggttgtgctgcaaaactgttagacccattagtagtaagatttttaagcattgaggatattgatgatacctgagacgcgagtgaagtaagagcgtctacttcatgtattccagcaactcgtattcctgacactgctcggttggttgaccattggtaattgttgctggcaatcctctcgataatttcataagcctcattataagacttagaaaggagagcaccattagcaaaagcgtccactaccatcctcgtgtgagcattgagaccattataaaatgtctcaagttggatgcaatgtgggattccatgatgagggcaatttcgtaataactttttatacctttcccatgcttaatacaaggacttataatccatttgtt

SEQ ID NO: 228792 - DNA, 408 bp, Gossypium hirsutum
  unsure (1)..(408): unsure at all n locations
ataccgtgtaccactgtgaggtcgagagcggagtctatttgctgaccccacagcctgcatcctgcccagaagtgtccagctgcaggggtagcctcaggaaaaccggctgctgctactcctgtgaggaggactcctgtcaggtccgcatcaacacaaccgtcctgtggcaccagggctgcaagactgaggtcaacatcaccttctgtgagggctcctgccccggagagtccaggtactcggcagaggcccaggccatgcagcaccagtgcacctgctgccaggagaggcgggtccacgaggagacggtgcccttgcgctgtcccgacggctcgactgtnctgcacacctacaaccatgtggatgagtgtggctgcacgcccttctgtgtcctgccccatggctccatat

SEQ ID NO: 228793 - DNA, 392 bp, Gossypium hirsutum
tgaattcatagagaaagcaaaggcacgtgcattgaggcgtgttgttggtgatcctttcaggaagggtgtcgaacaaggtcctcagattgacacggagcagtttgagaaagttttaagatacataagagcaggcatcgaaagcaatgcaacccttgaatgcggaggtgacagacttggaacgaaaggatactttgtccaaccaaccgttttctcaaacgttatggatgatatgctgatagcaaaagacgaaatcttcggtccagtacaatctatcctaaagttcaaggatattgatgaagtaattcgaagggcgaacaacacccgttacggtttatcagctggagttttcaccaaaagtgtagagacagcgagtaccttgactcgtgcgttaa

SEQ ID NO: 228794 - DNA, 367 bp, Gossypium hirsutum
ggtacttggagcttgggacgagcatgttgaaattaacgatactgctttaccttctaagtggatctgcgggatcggtcgatcaaaacatgtggtctctacttgtacccggtgaaaaaaatcggatcacttcttatgggttgattgagaatgattttgttataggtcatgacctattaaaagaagaaggagctctggtaggatcctgacggacagaaaaagaatgcggtaagcttgataatgatcgagtgacattgcttctttggtacgagccagggaataccttatatattatgcaaaatggatcttgttctattggcgatcatagaaatttatatgaaaaatacgaatcaaaggttgaagaaaggga

SEQ ID NO: 228795 - DNA, 444 bp, Gossypium hirsutum
acactatagaacaaggggaacgaaaaagcacgctggtaccccgccgcaatttccgggatagaacagatgctggcaaatacatgagaggagaatgaaggaacagtaccttatggctatttcagataaagatcagcagctcagtcatgtgcagaatcttataagggaattgaggtcttattcctaccaggctcagcccctcaaagcgcaataccaaagacaggcatccccagagacatcagcttccccagatgggtcacaaaatctgatttatgagacagaacttctcacgaaccagctcaatgacagcttaaaggaaattcaccaaacggaattaagaattcagcaactgaacagcaagttctctcaactactggaagagaaaaacaccctttccattcagctgtgcgataccagtcaaagtcttcgtgagaaccagcagcacta

SEQ ID NO: 228796 - DNA, 351 bp, Gossypium hirsutum
cccacgcgtccgtttgcacacacttaacttaattaagcaagctcgtaagctgttttcatcaatggccgaccgtgaccgctcttaccgatttgaccaggttgttcgtggtgatagaacgaactatcaaagcggaccatcaacaacccaagttctaaccgtcctcaccctactttccatcggcggcactctccttgcattagccgggctaaccctcaccggcaccgtcatcggcctatgcgtggcaacgccactcttcgtcatcttcagcccggttctgctcccaactgccatcgcggttttcatggctgtggccgagttcttgtcgtccggggcttttgggttgacgggact

SEQ ID NO: 228797 - DNA, 330 bp, Gossypium hirsutum
  unsure (1)..(330): unsure at all n locations
gcgagccactgtaatcttttcctttcgttacaactttctcttcaggtctctttgagtcgaagccatggccaccggacagttgttttctcgaacaactcaagccttattctataactacaaacaacttcctattcaacgcatgcttgatttcgatttcctttgcgggagggatacaccgtccgtcgctggtatcattaatcctggtgccgagggatttcagaaactcttctttggtcaagaagaaatagcgatcccagtgcattcaaccattgaggcagcatgcgctgcacatncaactgccgatgtttntattaactttgcatcatatcg

SEQ ID NO: 228798 - DNA, 448 bp, Gossypium hirsutum; identical to SEQ ID NO: 199155

SEQ ID NO: 228799 - DNA, 344 bp, Gossypium hirsutum
aaacgggagccaacatttcccgtacggtgctattaggtgaagagaaaaacgatcgtttttactcccacgggaaatccttcacgcgcttatcgatacagtccgttatcaaaagcgctgtaacggaccgtacgaaaccgttacccatcaatcccaaaagcgggttgtacctcttgctcacctccgacgatgtgtacgtcgaagatttttgcggccaagtctgtgggttccattacttcacgttcccctcaatcgtggggtacacgctcccgtacgcatgggtgggtaactccgccaagctttgcccaggaatatgcgcttaccctttttgcgtacctcaatacatg

SEQ ID NO: 228800 - DNA, 407 bp, Gossypium hirsutum
cgctggtgcacgctgcggcacctccccgattttcccgatcagcccccaccataataaaggtctgctatcgatcacgaacagatggcatttggtcttaacaaaagaaaactgattcatcttgctgtatttaaagaacttgtgaagctttgcgaccctgcagttaaggactggacacacactaaccgaaaacaaaatgtgactatgtaagatggattgcaacggagtggctaaacaccaacatgttcaaagtcagcgattattaccacaggcaaagttgcaagacctgttaatatgtcagacacttcactgctacgacttttaaccaattaaaacagattgctaccaacacaagaattaccttttattggaactatacataaatcggtcctggttcattgcttatgaag

SEQ ID NO: 228801 - DNA, 387 bp, Gossypium hirsutum
tttgtgatctcagcctttcatctaatctttccttagcttctcttgctactcctccaagcttatcgtcttgataagtctgagttaatatgctcctttgcttttttccccaaataaaacccaagttagtcccaaacataatttcctcgtttgaattttggaaccggaattactgtatatataatcttgaaatttaaagaattacctgtgaagaaacagagctgtgatgagtttcgttgttgcttgtatacaaacaaaaagaggacctccttgttaaaccaatcactgccacacttgacgaatcaaatgaccctccgctttgatggaaccgtcttcttcttgcacattcaacaccaggaagcatgccagccattggtgaaacatataaat

SEQ ID NO: 228802 - DNA, 374 bp, Gossypium hirsutum
gtttaatcagtattatagattgttcatccagagatctaagcttattagcttaagctataaaaatggtgaaaagatcgttgggctttttctttcttctcctcattgtcttagcctcccaatggggggtgcagccaactgaggcaagggtttgccagtcacaaagccataagttccacggtgcatgtgtgagtagccacaactgtgcgatggtgtgcagggacgaaggtttctccggcggcagatgtcgaggattccgtcgccgctgcttctgcactaagctttgctaatgcaagcttgcccttagctcatattttaaggatttttcttgagtaaaagacctttatgtttttcgtgcatgcatgtcaatgtttcaa

SEQ ID NO: 228803 - DNA, 353 bp, Gossypium hirsutum
ataaccacagtactagttgaatcttatacactcccagatggacgtatcatcaaagttgggggagagagatttgaagcaccagaagctttatttcagcctcacttgatcaatgttgaaggagttggtgttgctgaattgctttttaacacaattcaggcggctgacattgataccagatctgaattctacaaacacattgtgctttctggagggtctactatgtatcctggcctgccatcacggttggaacgagaacttaaacagctttacttagaacgagttttgaagggtgatgtggaaaaactttctaaatttaagatccgcattgaagacccaccccgcagaaagcacat

SEQ ID NO: 228804 - DNA, 363 bp, Gossypium hirsutum
atggcggctgcaggccctgcggctggagcgagaggagtacgttctactgaaggccctggcccttgccaattcagactctgtgcacatcgaagatgctgaggctgtggagcagctgcgagaagctctgcatgaggccctgctggagtacgaagccggccgggctggccccggagggggtgctgagcggcggagggcgggcaggctgctgctcacgctaccgctcctccgccagacagcgggcaaagtgctggcccatttctatggggtgaagctggaaggcaaggtgcccatgcacaagctcttcttggaaatgctcgaggccatgatggactgaggcaaggggtggtcctggtgggggttctg

SEQ ID NO: 228805 - DNA, 372 bp, Gossypium hirsutum
cagctggtgtgttttcattaactaatcctgttattgctacgacaaattgagcacatattcatcgattcgacaatgtcggtgttctctccttgggatttgccgttcccgtatgcttcaaaccactcgaatcttcaatgctttcttcggtgcatcactcccgttgttcctactcgattgctacctaagaaatgtaatgaagattcaaattgtggcaatctggaaacaaatgagaaagaaagagatgaagaagggtacagtttgagtgaggtttgggagtcatatagcgagtggagtgcttatggtgttgatgtcccaattgtggtgaacaatggcgactgtgtcgttcagtactattctccttcattatcagct

SEQ ID NO: 228806 - DNA, 318 bp, Gossypium hirsutum
atgcctggaccggggtcttaacctaagatctgacctcgggcctaacccaggtgcttctgacccttgtagggatgccaaggctgctgtggtgactggcatggagctgaaggacatgagctcggaacaggtggatgagatcttagccaactaccaggagattgtctttgcacggacatccccccagcagaagctgatcatagtggagggctgtcagaggcatgatgccgctgctgctgcgacagaggatggagctaatgactctacggctctaaagaaggcaaacatagcggttgccatggggatagcatgttctgacgc

SEQ ID NO: 228807 - DNA, 351 bp, Gossypium hirsutum
tgcgtgttatccttgcatccaaccgtggaaccgttatggaacttgggattacccccattgttacttccggtttggtgatgcaactcttggctggttcaaagatcattgaggttgacaacagtgttcgtgaggatcgtgcgcttttaaatggggctcaaaagctgttggggatcctaattgctgttggtgaggcagtggcgtacgttctgtctggtatgtacggcagtgttggtcagctcggggttggaaatgccattcttattattattcaactttgctttgctggaattgggatctgccttgatgaactcttccaaaaagggtatggtttgggctctgggatctcccttt

SEQ ID NO: 228808 - DNA, 370 bp, Gossypium hirsutum
ccgaataacagtccttcctaatgcatcctcagatgataaggcctgcacgtttgtggggacagccgcttatgttcctcctgaagtcttgaactcttctccagcaacatttggaaatgacctctgggcactcggctgcatcttgtaccaaatgctttcagggacttctccctttaaagatacaagtgaatggcttatatttcaaagaattatagccagagatataagattgccagattatttttctgaagaagccagagacctcattgaaaagctattggtaagatttacgtttacgcatgttgtatttggtttctaatcttcacaaaacttgtttgcttaagactttttgtatatccttttagttcttgtt

SEQ ID NO: 228809 - DNA, 260 bp, Gossypium hirsutum
gttatagttggatcgatggtcttaaggcgcatgctgcggatcatgtgagtgataagatgatggttaatgcttcttgtatctttcctcacaacaccccgaagacaaaagaagcatattactacaggatgattttcgagagattcttccctcagaactcggctagattgacagtccctggaggagctagcgtggcatgcagcactgctaaagctgttgagtgggatgttgcctggaagaacaaccttgatccttcaaggagg

SEQ ID NO: 228810 - DNA, 380 bp, Gossypium hirsutum
atcccgggccgagatgtctcgctcagtggccttagccgtgctggcgctactctctctttctggcctggaggctatccagcgtactccaaagattcaggtttactcacgccatccaccagagaatggaaagccaaatttcctgaattgctatgtgtctggatttcatccatctgatattgaagttgacttactgaagaatggagagaaaatgggaaaagtggagcattcagacttgtctttcagcaaagactggtctttctatctcttgtactacactgaattcacccccaatgaaaaagatgagtatgcctgccgtgtgaaccatgtgactttgtcagggcccaggacagttaagtgggatcgagacatgtaagcagcat

SEQ ID NO: 228811 - DNA, 369 bp, Gossypium hirsutum
atcgctgacgctgctgcaggcggacacggtgcgcggcgcggtgctgggctctcgcggcgcttgggccgtggagttcttcgcctcctggtgcggccactgcatcgccttcgccccgacgtggaaggcgctggccgaagacgtcaaagcctggaggccggccctgaatctcgctgccctggactgtgctgaggagaccaacagcgcagtctgcagagacttcaacatccctggcttcccaactgtgaggttcttcaaggccttttccaagaacggctcgggagcagtatttccagtggctggtgctgacatgcagacgctgcgggagaggctcattgacgccctggagtcccatcatgacacgtggccccc

SEQ ID NO: 228812 - DNA, 399 bp, Gossypium hirsutum
atggacactagatgtagtattctgaactacctaaagctaattaagaagagagcatctggagaactaatgacagttgccagatggatgagggagtttatcgcaaaccatcctgactacaagcaagacagtgtcataactgatgaaatgaattatagccttattttgaagtgtaaccaaattgcaaatgaattatgtgaatgcccagagttacttggatcagcatttatgaaagtaaaatatggtggaagcaaaactgactcatgcaactagacgttctacagaaagaaaaatgcgttactgttttattgacgacactgacgggaggtccatgcctctcaggccatgtgtatgatacgaagacccaatgatagaattgttctgggccagggtaacagaaat

SEQ ID NO: 228813 - DNA, 330 bp, Gossypium hirsutum
gtgctgcaaacgcttgccaaggaccaagccagggtgcagtttttgtccagcctcgtggctaaaaaatctgtggtgcctatagcttcaggcaggcagattgtgcaaaggccaacttacattgtgaagggcaatattggaaccccacctcaaaccatgcttatggccatggatacaagcagtgatgctgcttgggtgccttgcactggctgcattggctgctcttctactgcttttgactttgctaaatccaccactttcaagacccttggctggcaagctgctcaatgcaagcagatgccaaaccccacttgcggtggaagcgcgtgcaca

SEQ ID NO: 228814 - DNA, 299 bp, Gossypium hirsutum
  unsure (1)..(299): unsure at all n locations
cttctttgtagccaaaaagaaaatatgagccgaattaaagaaactttatccaacatttctaattctgccaaacacatttccttcaccaagaaacacaagaaaattttcttggcactatttgcatctttagtcattggtgctgctataatcggcattgttgctggagtgagctcacggaataactccgatgagtccgatacttnccatcatgccgttgtgaaatcagcttgtagtgggtcgttctaccctgatttatgtttctcgggtgttactaccgtccctgctggtactgccaaaaa

SEQ ID NO: 228815 - DNA, 360 bp, Gossypium hirsutum
gccaggaacaaataagggcattgagccaagaagctacttcaccaagggagaaaagtggcgagagattcgccttcaacttattgagccaaacccctcgctactccaaccaaaacggccgcttcttcgaggcttgcccacgtgaattccggcaactcagggacatcaatgtcaccgtttcagccttgcaattaaaccaaggatcaatctttgtgccgcactacaattcaaaggctacattcgtgatccttgttaccgaaggaaatggatacgctgaaatggtttctcctcatcttcctaggcaaagctcatatgaagaagaagaagaagaagacgaagaagaagaacaagaacaagaagagg

SEQ ID NO: 228816 - DNA, 368 bp, Gossypium hirsutum
atccgggccatgctgcctgcagccacagcctccctcctggggcccctcctcactgcctgggccctgctgccttttgcccagggccagacccccaactacaccagacccgtgttcctgtgcggaggggatgtgaagggggaatcaggttacgtggcaagtgaggggttccccaacctctacccccctaataaggagtgcatctggaccataacggtccccgagggtcagactgtgtccctctcattccgagtcttcgacctggagctgcaccccgcctgccgctacgacgcactggaggtcttcgctgggtctgggacttctggccagcggctcggacgcttttgcgggacctttcggcctgcgcccct

SEQ ID NO: 228817 - DNA, 372 bp, Gossypium hirsutum
aaagaagggagccggaggaaggaaaggtggtggcccgaagaagaagcccgtttcaaggtctgtcaaagccggtctccagttcccagttggtaggatcggccgttacttgaagaaaggaaggtattcacagcgggtcgggaccggagccccggtttacttggctgcagttcttgagtacttggccgctgaggttctggaattggctgggaacgctgcacgtgacaacaagaaaaacaggatcatcccaaggcacgtgctacttgccgtgaggaacgacgaagaattagggaagcttctcgccggcgtaaccatcgctcacggtggtgtgttgccgaacattaacccagttcttttgccgaagaagactgaaaa

SEQ ID NO: 228818 - DNA, 238 bp, Gossypium hirsutum
acggccaaggagttggcctttggggtgtcatcgaggttggtggatgagatattcaacaacaacccacaagagtcttacttcgtgtctcgacagaggcagcgtgcatgtgaataaagagttagaggcaataataaccacatagtctcgtgtttacagactaatgtgaaattttctagttttaagcaggcatgttatgaaataaaaatggggacctaatgaaaggaggagacccttggtt

SEQ ID NO: 228819 - DNA, 367 bp, Gossypium hirsutum
ggcagtggctgtggaggatgcaagatgtatccagacctgaacgctgccgagatgaccacaactgagactctggttcttggtgtagcaccccagaaagcacactttgagggagctgagatggaattcggggctgagaacggctgcaagtgtggagacaactgcacctgcaacccttgcaattgtaaatgattagagaccaaagccaaagctccctggaagcagaggcgcctttgtctttaagaaataatatgttttgttgtttatgtgtttttagaataaagtagccatggcttgtcgtaggttttgcctgttgccgccacggttacttggtgcttgccaatagatagagtgaagtactaatatttac

SEQ ID NO: 228820 - DNA, 354 bp, Gossypium hirsutum
atcagccacttgtttcatcccacctgggcattaggttgacttcaaagatgcctcagttactgagaaacattaatgggatcatcgaggccttcaggcgctacgcaaggacggagggcagctgcacagcgctcacccgaggggagctgaaaagactcttggagcaagagtttgccgatgtgattgtgaaaccccacgatccagccactgtggacgaggtcctgcgtctgctggatgaagaccacacagggactgtggaattcaaggaattcctggtcttggtgtttaaagtcgcccaggcctgtttcaagacactgagcgagagtcctgagggagcctgcagctctcaagagtctg

SEQ ID NO: 228821 - DNA, 358 bp, Gossypium hirsutum
ctttgctttcttttagcgtgtgcttgcttgttctcttccatggctgctgtgctcagatagatctcgtcactaaccatcaccaggatccaccttgggggcagcctcagcaacctcagccacgtcaccaatcccaatgccaactccagaacttgaatgctcttcagcctaagcaccggtttaggtcagaggctggtgaaactgagttctgggaccaaaatgaggatcaattccagtgtgctggtgttgctttcctacgtcataagatccagcgcaaaggacttttattgccttcatttaccagtgctcctatgcttttctatgttgaacaaggggagggtattcatggggcggtcttccc

SEQ ID NO: 228822 - DNA, 363 bp, Gossypium hirsutum
gatgacttttctttcaggaggaacttcccgaaaccaatattttgggcactgatactgcttttcgcaatgggtttcattgctggtggttttatttttgcggcagttcacaacgtcattctccttcttgttgttgtggttcttttcagtgctgtcactgcattatatgtttggaactcctgttggaggagaaaagctattacagatttcattgctcgttatccgaatgcagagcttagaaatgcaaagaatgggcaattcgtaaaaatatctggggtggtaacatgtggtaatgtacctcttgagtcatccttccagaaagttcccagatgtgtttatacatctagtccgttgtatgagtaccga

SEQ ID NO: 228823 - DNA, 369 bp, Gossypium hirsutum
gcagaatccccagtttatgaccatggctgagcgccttggtaatgcattaatgcaggatccagctatgtctaccatgcttgacagtttggctaatcctcaacaaaaggaccagattgaggaaaggatggcacgtattaaagaagatccatctttgaagcctattttggaagaaatagaaagtggtggtcccgcagcaatgatgaggtattggaatgataaagacgtcctgcagaagttgggtgaagcaatgggtcttgcagttacaggagatgcagccacttctgctggtaattccgcggcagatgaagaggatgaagcaggaaatgaggatgagtcaattgtacatcattgtgctagtgttggtgatgt

SEQ ID NO: 228824 - DNA, 320 bp, Gossypium hirsutum
tcgggaagggcagaggcgacaaggacgtgaagaggtgggagtagaagaatgagaaccgatatggcagaggcgacaagatagtcaagatagagggatctgaggaagaagaaagagaagaacgaggtagaggaaggagaaggtcatgaaacggcttagtagaaacattctgctcaatgagactgaaacacaggacccctgctttctctgttggtgttttcaacccacgaggtggtcgcatcaccacagttaacagtttcaattttaccattatgcaatacctgcaactcatcgctcgagaggggagtcctttacaataatgc

SEQ ID NO: 228825 - DNA, 395 bp, Gossypium hirsutum
atccgcgggcagccaccgagccgcgaagcgacatggtgctgctcaaggagtatcgagtaatcctgcctgtgtccgtagatgagtatcaagtagggcagctgtattctgtggctgaggccagtaaaaacgaaacgggtggtggtgaaggcgtggaggtcctggtgaacgagccctatgagaaggacggtgagaaaggccagtacacacacaagatctaccacctgcagagcaaagtacccacgtttgttcgaatgctggccccagagggagccctgaatatacacgagaaagcgtggaatgcctacccttattgcagaaccgttatcacaaatgagtacatgaaagaagactttctgattaaaattgaaacctggcacaaaccagatcttggcacg

SEQ ID NO: 228826 - DNA, 343 bp, Gossypium hirsutum
ctacaacagtgtcctctcaactcactcccttttggagcacactgatgtggctgttcttcttgacaatgaggctatctatgacatttgcaggcgctctcttgacattgagcgacccacttacaccaatcttaaccgtcttgtctcccaggtgatctcctctttgactgcttcacttaggttcgatggtgccttgaacgtggatgtaacagaattccagaccaacttggtcccttacccaagaatacacttcatgctttcttcatacgctccagtcatctctgctgagaaggcttaccatgagcagctatcagttgctgaaatcaccaatagtgcctttgagccc

SEQ ID NO: 228827 - DNA, 372 bp, Gossypium hirsutum
gaaaaattcatatcttggttagtggaaacattcctcactagcctttcctcgtctttttcttttgtttctttttctaactcattttctcttctttcttcaacttctttttcaattttcttttctgtttcacattccttttcactctcaatctctttttgctctttttcattctctttttctttttcctcacttgttttaacagaatttctcagtttgatttggtcctcatggacttgttccggagtgagcggcactaaggtaagtttctttccttgatgcttgaaagaatacctattggtacgaccatcgtgagtgacttttcgatccagttgccatggttctcctagcaacaaatggcaggcttgaataggc

SEQ ID NO: 228828 - DNA, 358 bp, Gossypium hirsutum
atcggcggccggcggggcgcgggcggccacgcggggctcctgcagcatggctgtcagcaggaaggactggtccgcgctgtccagccttgcccggcagtggactctggaggatgaggaggagcaggagcgtgagcgcaggcggcggcaccgcaacctgagctccacgacggatgatgaggctcccaggctcagccagaatggggaccggcagacctctgcttctgagagactaccgagcgtggaagaagcagaggtgcccaagccactgcccccagccttcaaagatgagggtgaggacatccagagcatcctcagaacacggcatgagcggaggcagaggcggcaggtggtggaggct

SEQ ID NO: 228829 - DNA, 368 bp, Gossypium hirsutum
gatactttagacatgataaacgttgttaaccttgaaaattgggattgtagttgcagggaatggcagatcaacggattgccatgtttacatgcagtggcaattgaacacgttggcaagaatgtgtatgaggcttttaaagttacatattcagagtctataaacccaataccgccgttagacaggtgcatgaaaagagaatcatcaccggtgcttgtgcatcctccttgtgtgacccgtccggtggggcggcccaaggaaagaaaatacgcacttaaatccaatcaagctgttaagagaacacttcagtgcagcaagtgcaaaaagcttgtgcacaacaaaaggaaatgcaagcaatctgcttagggagt

SEQ ID NO: 228830 - DNA, 390 bp, Gossypium hirsutum
ataagatggcggctgccgcacaatcccgggttgtccgggtcctgccaatgtcacgttctgccattactgcaatagccacatcagtgtgtcatggcccgccctgtcgccagcttcatcatgccgtcatacctcatgggaaaggtggacgttcctcagtcagtgggatcgtggccactgtgtttggagcaacaggattcctggggcgatacgttgtcaaccaccttggacgcatagggtcacaggtaatcataccccatcggtgtgatatatatgacaccatgcaccttcgtcccatgggtgacctgggccagcttctgtttctggaatgggacgcgagagataaagattctatccgacgagcagtggaacacaacaatgtggtcatcaatc

SEQ ID NO: 228831 - DNA, 353 bp, Gossypium hirsutum
gcagctgtcacggtcctgtcctggatttacaggtatgtgacggggaggcacccaccggctgcggatcagttggatagtgcagggatgaaattggctagcaaggcacgggagatgaaagatagggcggcacaactcaccggtgcggcggcttcttaaattagttctctactgcatgcttttgtaaaggagctgtgcaaaagttcaggatcaagtggccataaaccgatccttaatgatgttgttgttatgttgttgatgatgaaaagatgtttttttctaaatttaaaagcagcattagaaacttaactttggggggatgatgtggctgtctgtttatggttaaaactcccgag

SEQ ID NO: 228832 - DNA, 374 bp, Gossypium hirsutum
cccacgcgtccggtggaagacctcctataatggatctgaaaacagcttatgatgttgaactcagtggatctagaattcagcatgaactatggccattagatgaaattgatccgaggaaagcaaagtttccttgctgtctggtttggaccccactcccagttgtctcatggttggcacctttcattggccacgttggcatttgccgagaagctggcgcgattttggacttttcaggatcatattttgtgaatgtcgaggattttgcttttggtgctgcagctcgatacgttcaactcgatagagaaaagtgctgctttcctcccaacctggctggtcacaaatgcaagcacgggtatcagcatgaagagtttggg

SEQ ID NO: 228833 - DNA, 366 bp, Gossypium hirsutum
cggacgcgtgggatcgcctgtgctacagtatctttattatttggcacagattggcttggctatgtctcctctgagcaacaattccttgtttttggactatcatcggaacccttttccaatgtttttcttgcggggtctgaatgtttccctttctacggatgatcctcttcaaatacacttaacaaaggaacctttggtggaagagtatagcatagctgcttctgtgtggaagctgagttcatgtgatctatgtgagattgcccgtaattcagtctaccagtcaggtttttctcatgctttgaagtcccactggattgggaagcactactacaagagagggcctgatgggaatggtatacacaagac

SEQ ID NO: 228834 - DNA, 321 bp, Gossypium hirsutum
aaacactcgaaaatacgtatttaaatacgtacggacgggttactcagcagatcgttacgtatgtggtagcgtcggctgcggttggatatttgatcagatcgcgatccaaatggctgaggacaagtataacctaaagaatccggcggggaagaggatattacaagaggtcaaggagacgcaatccaatccctctgatgatttcacgagcctacctcttgaggagaatatatttgtatggcaactttcaattaggggtccgagggtttctgcatttgtgggagggatttatcatggaaggatacaattacctgctgagtatgc

SEQ ID NO: 228835 - DNA, 328 bp, Gossypium hirsutum
atgtggcggctggtgtggggttgagtcagttgtgagacccggagctggtgacccagcgggtggcccaccgaaccggcgacacagcgacaggcgtcagggctcgggagctgcgagcctggcctcgtcttagagctcggccgagccgccgtcgacccccgcccccagtcagcaaaccgccgccgcgggcgcgcccccgctctgcgctgtctctccgatggcgtccgcctcaggggccatggcgaagcacgagcagatcctggtcctcgacccgcccacagacctcaaattcaaaggccccttcacagatgtagtcactacaaatcttaaa

SEQ ID NO: 228836 - DNA, 374 bp, Gossypium hirsutum
atgggccctcttgcttctctgatagctcccagcttactctctgcagccatgattgccagacagcagtgtgtccgaggcgggtctcggggcttcagctgtggctcagccatcgtaggcagtggcaagagaggtgccttcagctcagtctccgtgtctggaggtgctggccgatgctcttctgggggctttggcagcaggagcctctacaacctcggggggaacaagagcatctccatgagcgtggctgggtcacgacaaggcgcctgctttggaggtgctggaggcttcggcactggtggctttggcggtggatttgggggctccttcagcggtaagggtggccctggcttccctgtcttgcctgctgggggaat

SEQ ID NO: 228837 - DNA, 375 bp, Gossypium hirsutum
cttctggaagagatctcaaatccttctcccaacattttgctgaatcaaggcaacaccagtgacatcaccttacccactcgtggagtagttgatgagcttccaaggcctcctgttatcaacagacctacggagaaacgacagagagtcccctcagcgtacaaccgattcatcaaggacgagatccaacgcatcaaggcaggaaaccctgatataactcacagagaagccttcagtgcagctgcaaagaattgggctcacttcccacatattcactttggcctaatgcctgatcagcctgccaagaggactaacgtgcgccagcaagaaagcgaggacgttctcatgaaagatggattttttgcttcagctaacgtc

SEQ ID NO: 228838 - DNA, 280 bp, Gossypium hirsutum
atcgccgccggagggtcgtcttaaagggcccgcgcgccgacgccccctcggcccgccatgctgctatccgtgccgctgctgctcggcctcctcggcttggccggcgccgagcccgccgtctacttcaaggagcagtttctggacggagacgggtggacttcccgctggatcgaatccaaacacaagtcagattttggcaaattcgtcctcaggtccggcaagttctacggtgacgaggagaaagaaaaaggtttgcagacaagccaagatgcacgctttt

SEQ ID NO: 228839 - DNA, 357 bp, Gossypium hirsutum; identical to SEQ ID NO: 199166

SEQ ID NO: 228840 - DNA, 357 bp, Gossypium hirsutum
gtaaaaaaaggcttaagcttgatatcattagggaaactgatgtttacaagtcggatcctgaggaattacttgggaaatcggtactgaagaatggggatcgacagtggttctttttctgtccaagagacaggaaataccctaatggagcaaggtcaaacagggctaccatacatgggtattggaaggcaacgggaaaggatcgttctattacttgcaattctcgagttgttggaatcaagaaaactttagttttctacagagggcgagcacctaatggcgagcgaactgactgggtgatgcatgaatacacccttgatgaagaggaactaaagaggtgccagaacgtaaaggattata

SEQ ID NO: 228841 - DNA, 276 bp, Gossypium hirsutum
ggggaatgcatcagggttggcagtgatgactgtgatgctggtgacaacatgcctcatgtccctcgttattatcctctgttggaacaagcctcccgctgtagctctttcctttcttcttttctttggttctattgagttgctttacttctcagcttcactcactaagttcacagaaggtgcttggcttcctattctgttggcccttttcctcatgacaatcatgtttgtatggcattatgccaccattaagaaatatgaatttgatctccacaataa

SEQ ID NO: 228842 - DNA, 352 bp, Gossypium hirsutum
gcaatttcttaaagttcttttctttgctgttttagtcaatggctgaccaccacctacaaaacactcaaccaatgactcaccaaatggtgaaagccgctactgccgcaacagccggtggttccctcctcattctctcccgtttaatcctagctggcaccgttattgcactcactatagccactccactcttcgttattttcagtccagctcttgtccctgctctcattgcaacagctctcctagcaacgggtttcgtcgtctccggcggtttctgtgttgcagccgccacggttctgtcctggatttacaggtatgcgaccgtgaggcacccaccggcagcggatcagttgga

SEQ ID NO: 228843 - DNA, 381 bp, Gossypium hirsutum
atgccagggtcaggcctaatggcgtctgtcgtcacggggcgtggtgtgccatgggaaactgttacagcttgcataaagaccacgaaactgctctgaaaaatttccaacgagctgtgcaactgaattcaaaatttgcatatgcacacaccctttgtggtcacgagtatgttgccttagaggattttgagaatggaatcaagtgctaccagaatgcacttcgtattgattcaaggcattataatgcctggtatggtctaggaatgatctatcttcgccaagagaagtttgagttttcagagcatcactttggaatggctttccaaataaatccacgttcttctgttataatgtcctatcttggaactgctcttcatgccttaa

SEQ ID NO: 228844 - DNA, 388 bp, Gossypium hirsutum
atgtcggcgggcattcacgagaccacctacaacagcatcatgaagtgcgacatcgacatcaggaaggacctgtatgcgaacaatgtcatgtcggggggcaccacgatgtaccccgggatcgctgaccgcatgcagaaagagatcaccgcgctggcccccagcaccatgaagatcaagatcatcgccccgccagagcgcaagtactcggtgtggatcggcggctccatcctggcctcgctgtccaccttccagcagatgtggatcaccaagcaggagtacgacgaggccggcccttccatcgtccaccgcaaatgcttctagacacactccaccttcagcgcgagacttctcaggacgacgaatttgctcaatcggctggcgactgacc

SEQ ID NO: 228845 - DNA, 335 bp, Gossypium hirsutum
cccacgcgtccgcgtagcggcaaacctctccactacaaaggctcatccttccaccgggtgatccccaatttcatgtgtcaaggaggcgactttaccgccgcaaacggtaccggaggtgaatccatctatggagccaagttcgcggacgagaacttcatcaagaagcacacgggacctggcatcctttccatggcgaacgctggacccggaacaaacggatctcaattcttcatctgcacgaccaagacggagtggctggacggaaagcacgtggtggtcggacaggtagttgaaggcatggatgtggctaaagcgattgagaaagtggtgtctag

SEQ ID NO: 228846 - DNA, 313 bp, Gossypium hirsutum
gcaatagacactgttaaccaggtttttcatgtgctgactgattggcagaattactatgcaatgaaacattggttcctccggaatacttttagggatgctgttgttcaggtgttgaacattgaagatccagattcctatggtaaagcgactctatctcacctgacattacctgtggagtttcgagtttcctttcctagcaatgatagtgcaccagcaataaataatagaacacaatatgtatccattttttctcattctcattatcttcttcctgagatatttaaaaacttggagaaaggtgtggttttggatg

SEQ ID NO: 228847 - DNA, 352 bp, Gossypium hirsutum
atgcaatcgaatagaaataatatcctctcatttgatggagattatgggacgcagggaatggctacaacctcaagagcactgaggaccccaagagataatgcaagaacaatcacatcgttgcccgtatctccttgttcaagccccttaagatacggtccagtacacaggagttgttttctttctcctcctcatccagcttatcagattgtaggacagagtggtcataacttaggcgacttctctgggaacacatcaagaccaaacccgagatacactcatgatccttggtttgaagcgccacaactaaaagtacaaacaacaagcacctcgtcaagaacaagacctatttgag

SEQ ID NO: 228848 - DNA, 368 bp, Gossypium hirsutum
cggacgcgtgggagaggatccatggaagggagagagagaaaacaagtggagagaagaagaagaggaggaaagtgacgaaggagagcaacaacaaaggaacaacccttactacttccatcgcagatcgttccaagaacgattcagggaagaacatggcaatttcagagtcctccagaggtttgctgccaaacatcatttacttaggggcatcaacgagttccgcattgccattttagaagcaaaccccaacactttcgttctcccacaccattgtgacgcggagaaaatttacgttgtcactaacggaagaggaacaattacgttcgtgacacatgaaaacaaagagtcatacaatgtagctcctggag

SEQ ID NO: 228849 - DNA, 365 bp, Gossypium hirsutum
aactcggaaaatggacccaactgcaccctccgcgtcggtcgtcggcggcggctgtggtggtggcagaggagggccggcacctttccttataaaaacatacgacatggtagacgactcatcgaccgacgacatcgtttcatggagttctaacaaaaagagctttgtggtttggaaccctcctgattttgctcgccttttgcttcccacttatttcaagcacaataatttctccagctttatcaggcagcttaatacctatgggttccggaaaattgatcccgaacgatgggaatttgccaatgaagattttgtgaaagatcaaaggcatcttcttaagaatattcatcgaagaaaacctatttaca

SEQ ID NO: 228850 - DNA, 283 bp, Gossypium hirsutum
ggagcatgcatttccacttgacgagttgagaccgctatcgtgtgaaggagaagatacacttggtggttatgccttgacactgattgattctttagacacattggctttacttggagaccgagaacgctttacagcctctgttgaatggattgaataaaacagtttctatttttgagaccaccatcagggtccttggaggtttactttccgctcatcttattgcaagtgactatgctacgggcatgagaattccttcatatgacaatgaattacttgacttaac

SEQ ID NO: 228851 - DNA, 366 bp, Gossypium hirsutum
ggcagcttctgacaggcagaagtcttatgtggatctaaagagacacgagattgagtattccgtgaaggatttcgtgtttctcaaggtctcgccatagaagaagattttgaggttcggtcgtaagggcaagttaagctctaggtttattggtccatactgtattctgaagcgagtagggctagtcacctatcagttggagctaccttcagagttggatcggattcacgacgtgttccacgtctctatgttgaggcggtaccattctaatcccatgcatattgttcctgttggggaaattgagattcgatcagatctagccttcaaggtggaaccggttaagattctaaaacacgatgttaaagtttt

SEQ ID NO: 228852 - DNA, 365 bp, Gossypium hirsutum
gtttttccatggctgaacttgatgatactggaggtgatattagttgggacattgaagttagtgagttaaagcgtgacaatatgggtgaggaagatgttagcgatgaagagatcagagcggatgaattggagagacgaatgtggaaagattctgttagactcagaaggattaaggagagggaaagggttgcagctcaacaggctgcggaactgaatcaaacctcggaactggctcggaggaagaagatttcccgagtgcaagatgggattcttaagaacatgttgatgttaatggaagtttataatgcgcgtggatttgtgtacggtattgttcctgaaaatggtaaggctgtgagtggtgcttcg

SEQ ID NO: 228853 - DNA, 383 bp, Gossypium hirsutum
atgcgggctgggccgccaaggcaagatggtggactacagcgtgtgggaccacattgaggtgtctgatgatgaagacgagacgcaccccaacatcgacacggccagcctcttccgctggcggcatcaggcccgggtggagcgcatggagcagttccagaaggagaaggaggaactggacaggggctgccgcgagtgcaagcgcaaggtggccgaatgccagaggaagctgaaggagctggaggtggctgagggcggcaaggcagagctggagcggctgcaggccgaggcacagcagctgcgcaaagaggagcggagctgggagcagaagctggaagagatgcgcaagaaggagaagagcatgccctggaacgtggacacgctca

SEQ ID NO: 228854 - DNA, 366 bp, Gossypium hirsutum
atgcggcgtgacctgtggctttggtggaggggctggtagtggctttggaggtggctacggaggtggccttggaggtggctttggtgggggttatgctggtggctttgttgattttggtgcttgtgatggtggcctcctcactggcaatgagaagatcaccatgcagaacctcaacgaccgcctggcttcctacctggagaaggtgcgcgccctggaggaggccaacgccgacctggaggtgaagatccgtgactggcacctgaagcagagcccagctagccctgagcgggactacagcccctaccacaagaccattgaagagctgcgggacaagatcctgaccgccactattgaaaacaaccgggt

SEQ ID NO: 228855 - DNA, 303 bp, Gossypium hirsutum
acgtgtttacttgctttatacataaaaagagaaatattatgatcatatttatttggaaggagaggtttatttttctgggcattgggctgagattgatggagggctcgagaacacaactgagaggtacttgtagattgagagaggggcgccaaagctaaggaggagacatgctttgaaagtgagtgagcaatattcagcttttagggaagaattcctgaaggaagctggtaatgagaaagggagtttgaggagaccattgttcacttatttcacgggttgttagacttgtagtggggaccataa

SEQ ID NO: 228856 - DNA, 297 bp, Gossypium hirsutum
ggagtcgctggtcgtcggttgtggtaaactcgtgtgggacgcacgtgccatcgcttctcattacgttcgttccctcaaaggtttctggtttgatgtctttgtgattctgccggttcctcaggcagtattttggttagttgtaccaaaattaataatggaagagcagatcaagattataatgacaatattgttattaatcttcttgttccaattcttaccaaaggtttttccacatcatttgcttaatgagaagggtgcaaaaaggttacccggttaacatcttttggcaccaatttt

SEQ ID NO: 228857 - DNA, 370 bp, Gossypium hirsutum
atctgcggtcgagcggcagacgcaaacatgcagatctttgtgaagaccctcacgggcaaaaccatcaccctcgaggtcgagcccagtgacaccattgagaatgtcaaagccaaaattcaagacaaggagggtatcccacctgaccagcagcgtctgatatttgctggcaaacagctggaagatggccgcactctctcagactacaacatccagaaagagtccaccctgcacctggtgttgcgcctgcgaggtggcattattgagccttccctccgccagcttgcccagaaatacaactgtgacaagatgatctgccgcaagtgctatgctcgccttcaccctcgtgctgtcaactgccgcaagaagaagt

SEQ ID NO: 228858 - DNA, 330 bp, Gossypium hirsutum
atggagtctcttagtttagacaaaagcccatctgaccaatgacattggagcatcccaggagtgaaggtctagaagtattggagtccagtgcaggggtggggggagtgtttcgtatcatttatgtcttgctctttcaaaaaacatttttttttttttttcactattttaggtatgagaacgagctggccctgcgccagagcgtggaggctgacatcaacggcctgcgccgggtgctggatgagctcaccctgtctaagactgacctggagatgcagatcgagagcctgaatgaggagctggcctacatgaataaaaaccccgagggggtga

SEQ ID NO: 228859 - DNA, 312 bp, Gossypium hirsutum
atagttttgcgaacgctcttggcgcgtcccgggccggaagcattctgcacacgcctttttcccacggcaggatgcccaagaggaaggccagctccgtcgaaagggccgccaaggtagagcccaagaggaaatcggcgcggttggcaactaaacctcctgcccaagttgaagccaaaccgttaaaggcagcaactaatgataaatctttagacaaaaaagtgcaaacaaaagggaaaaggggagcaaaaggtaaacaagccgaagtggctttccgagaaactaaagaagatttacctgccgaaaaccgggaaa

SEQ ID NO: 228860 - DNA, 353 bp, Gossypium hirsutum
cccacgcgtccgaagaattctcatgtcccttatagaaacagcaaactggctcaagttctccagagttctttgggtggccaggcgaaaacccttatgtttgtgcagcttaatcctgatgtagaatcatatgctgaaaccataagtactttgaagtttgccgaaagagtttctggtgttgagttaggtgctgcacggactaacagagaaggaagagatatcagagaacttatggaacaagtttcatcgctcaaagaaaccatcacaaagaaagatcaggagattgagcgtttgcaactgcttaagggtaatggcaatagtactaagcgtggtatgagctcactgaggtacgagtc

SEQ ID NO: 228861 - DNA, 357 bp, Gossypium hirsutum
cccacgcgtccgagaaaatcgcctacgatgctaaattatgtcaactcttagacgagtacacccagatcttaattgcggcagccgacaatgtgggttcgaatcagctccagaacattcgcaaaggtcttcgaggtgactcagttgttctcatgggtaaaaatacaatgatgaaaaggtccgtccgtatgcacgctgagaaaaccggaaaccaggctttccttaaccttatccccttgcttcagggaaatgttggtttgacttttaccaagggtgatttgaaggaagtcagtgaggaagttgccaagtacaaggttggagctcctgctcgtgttggtctggttgcacccattgatgtgg

SEQ ID NO: 228862 - DNA, 310 bp, Gossypium hirsutum
atcgcggagcaagcgagaggtctgcgcgcagtctgagcggcgcgtccagtcccgaggcccacgccagcacgccctcatggcccccgcagcggcgtcggggggcagcaccctgcccagaggcttctcggtcttcaccaccttccccgacttgctcttcatctttgagtttatcttcgggggcctggtgtggatcctggtggcctcctccctggtgccctggcccctggtccagggctgggtgatgttcgtgtctgtgttctgcttcgtggccaccaccaccttgatcattctgtacctaattggaggccac

SEQ ID NO: 228863 - DNA, 363 bp, Gossypium hirsutum
cgaagcagaaaatatctcaaatctcctcctcctcctcagaaatcttagtatcatcaccatggcctcaaatcccaaggtcttctttgacatgactatcggtggtcagcccgctggtcggattgtgatggagcttttcgcagattgcactcctcgcactgctgagaacttccgtgccctctgtaccggcgagaaaggcgtcggccgcagcggtaagcccctccactacaaaggctcctctttccatcgtgtgatccctaactttatgtgccaaggaggtgacttcacggccggaaacggtaccggaggtgaatccatctacggatccaagttcgctgacgagaacttcatcaagaagcacactgg

SEQ ID NO: 228864 - DNA, 383 bp, Gossypium hirsutum
atccgccggccgcccagatctccacctgccaccccagagctgggacagcagccgggctccggcactgggagggagaccccgccgtggcctcttctgccacccacgcccccacccctggcatggccgaccagctgacagaagaacagatcacagaattcaaggaggccttctccctgtttgacaaggacggggacggctgcatcaccacccgcgagctgggcacggtcatgcggtccctgggccagaaccctacggaggccgagctgcgggacatgatgagcgagatcgaccgggacggcaacggcaccgtggacttccccgagttcctgggcatgatggccaggaagatgaaggacacggacaacgaggaggagatccgcgag

SEQ ID NO: 228865 - DNA, 367 bp, Gossypium hirsutum
aagaacttgggcagaaacttgtaacgagaatgcgtgcaatggcaaaccgttttattgcagtccatttgagatttgaaccggatatgcttgcattttctggttgttactttggtggcggtgacaaggagaggaatgagcttggagagatacgaaagagatgggaaacattgacagatgtagatgctgatgaaaagaggaggcgaggtagatgtccacttactcctcatgaagtaggattgatgctgagggcacttggttttgcaaatgactcgtacatctatgttgcatctggagaaatatatggtggagaagagacgcttcgaccactaagagatctctttcccaacttttatacgaaagagatgct

SEQ ID NO: 228866 - DNA, 358 bp, Gossypium hirsutum
atcacattttattgtgcttctctctcagatcttcaagatgtatacgtcaatgaaaaagatccacaaagataaggatgttgaaccaacagaatttgaggaatcagttgcccaggcattcttcgatttggagaataccaacaaggatctgaaaagtgacctcaaggatctctacattaattcagcagtccaaattgatgtgtctgggagccggaaagctgttgttatccatgtcccgtaccgattgaggaaagcttttcgcaaggttcatgttaagcttgtgagggagcttgaaaagaagttcagtggaaaggatgtgattcttattgctacccggaggatattgaggcccccaaagaaa

SEQ ID NO: 228867 - DNA, 360 bp, Gossypium hirsutum
atagcgagtccggagcctggcggatgtggacgcgatcctggcacgtactgtaggagatgtgcgtcgtgccgagcagttattgcaggatgcacggcgggcaaggagccgggctgagggtgagaaacagaaggcggagacagtacaggcagcactggaggaggcccaacgggcacagggtgttgcccaaggtgccatccggggggcagtggctgacacacgggacacagagcagaccctataccaggtacaggagaggatgacaggtgcagagcaggcactgagatctgcaggtgaaagggctcggcagttggatgctctcctggaggctctgaagttgaaatgggcgggaaatagtctggc

SEQ ID NO: 228868 - DNA, 358 bp, Gossypium hirsutum
atcagcagatgagatgacaggcaggtaggtggacggacagatagcagcgacgcggacaggtcgaacagtgacggccacgtagaggatctggcagacaaagagacaagactttggaggtgacccgccatggggcccagcatgtttttgctcctgtgtgttcttggtctcagccaggcagccacaccgaagattttcaatggcaccgagtgtggacgtaacttcacagccgtggcaggtggggttgtttgagggcagcagcctgcgctgcgggggtgtccttattgacagcaggtgggtccttacagcggctcactgcatcggcagcaggtactgggtgcgcctgggggaacacagactt

SEQ ID NO: 228869 - DNA, 275 bp, Gossypium hirsutum
gtaagaattagggttgtgtttagaaatggcggtggcagcgcgcttcagatccactctccctatctttcacaggcttttgagatccgattccctgccttctcacactcccagagctactcttcaccgaactctactttgccccgagctgtcgaggaaatattctacttctctgaagaaggacgagaatgttaaggtgcctttggctttgtttggtggatctggaaactatgcatctgcactgtaccttgcagccgtaaaaggaaatgctctggaca

SEQ ID NO: 228870 - DNA, 382 bp, Gossypium hirsutum
atgtttggccttcttacctctatacagtctgataacggaccagcctttaatagtcaaatcacccaagcagtttctcaggctcttggtattcagtgaaacctttatatcttttactgtcctcaatcttcaggaaaggtagaatggactaatggtcttttaaaaacacaccttaccaagctcagtcaccaacttaaaaaggactagacaatacttttgccactttcctttctcagaattcaggcctgtcctcggaatgctacaggttacagcccatttgagctcctgtgtggacactcctttttattaagccccagtctcattccagacaccagaacaacttgaacggcaccccaaaaacttagagcctaaaaactcactaacc

SEQ ID NO: 228871 - DNA, 366 bp, Gossypium hirsutum
attgagagatactcccaaagtgaaataagatttaacctcatggcagttatcaagaacaggaaagagttgtacactgctgaacttaaggagctccaaaagaagagggaacgcatcttgcagcagttggctaccatacagtctgaaagacccacagacaaaaccagttttgaagcactaaacaagcaactttcagaagttaattcagggattgagggtgccactgagaaaattttgatggaggaggagaaattcaagaagtggagaaccgaaaacattcgaaggaaacacaactacatacccttcttgttcaacttccttaaaattcttgctgaaaagaaacaactgaaaccccttattgagaaagct

SEQ ID NO: 228872 - DNA, 365 bp, Gossypium hirsutum
  unsure (1)..(365): unsure at all n locations
atctcgctccgaggtccccgcgccagagactcagccgcgctcccaccacccacacccaccgcgccctcgtccgcctcttctctaggagccagtccgcgccaccgccgcagcccagcccatcgccaccctccgcagccatgaccaccaggtccgtgtcctcgtcctcctaccgcaggatgttcggcggcccgggcaccgcgagccggccgagctccagccggagctacgtgactacgtncacccgcacctacagcctgggcagcgcgctgcgccccagcaccagccgcagcctctacgcctcgtccccgggcggcgtgtatgccacgcgctcctcttgggtgcgcctgcggagcagcgtgcccggg

SEQ ID NO: 228873 - DNA, 356 bp, Gossypium hirsutum
cggacgcgtgggcgctcgtgggttgcattatcttcactcgggtgcaaaacacatcatcattcatcgagacgtgaagacaacgaacatcttgttggatgagaagtgggtggctaaagtttcggattttgggttgtctagaataggccctaccaacatgtccaaggcacatgttagcacagtggtgaaaggtagctttgggtatttagacccggagtattatcgtcgtcaacaattgacggaaaaatctgacgtatattcatttggtgtggtactatgtgaaatactatgtgcgaggcccccaattagtcgaacggtcgagaaggcgcacataagcttaacagcatgggctcaacaat

SEQ ID NO: 228874 - DNA, 360 bp, Gossypium hirsutum
cccacgcgtacgctttgtttctctcttcatctcctgcactacttgcaaagtaacgagctgaagccgtgctacaataacactagtgttttcaacaataaattaatcatagctgcagcttgtttcttttaaactctaaatataaaggaggccaaacatgccgcctcgtagataccaatttgggagggctgatgaggccactcatcccgactccatgagagccaccttggctgaattcctctccactatcattttcgtctttgccggcgaaggctcaattcttgctcttgacaagatgtacaaggatacgagtgcgacgcctgcaagactggtgatgatagcacttgcgcatgggttgtctct

SEQ ID NO: 228875 - DNA, 377 bp, Gossypium hirsutum
atggcctctgcagagatgggggcagctggtcaggatggccattcgggctcagcacagcaaggcagcccagactcagactggggaagcaaacaggggctggacaggccaggagagcctgtcggacagtgatcctgagatgtgggagttgctgcagagggagaaggacaggcagtgtcgtggcctggagctcattgcctcagagaacttctgcagccgagctgcgctggaggccctggggtcctgtctgaacaacaagtactcggagggttatcctggcaagagatattatgggggagcagaggtggtggatgaaatcgagctgctgtgccagcgccgggccttggaagcctttgacctggatcctgcacagtggggag

SEQ ID NO: 228876 - DNA, 385 bp, Gossypium hirsutum
atgtggacattggcgtcaagtactcggagaagcaggagcggaatttcgatgatgccaccatgaaggccggccagtgtgtcatcgggctgcagatgggcaccaacaaatgcgccagccagtcgggcatgaccgcgtacggcacgaggaggcatctctatgaccccaagaaccatatcctgccccccatggaccactcgaccatcagcctccagatgggcacaaacaagtgtgcgagccaggtgggcatgacggctcccgggacgcggcggcacatttatgacaccaagctgggaaccgacaagtgtgacaacttctccatgttcctgcagatgggctacacgcagggcgccaaccagagcggacaggtctttggcctgggccgaca

SEQ ID NO: 228877 - DNA, 365 bp, Gossypium hirsutum
atcgaagcgtctgcggccgtcgtttgagtcgtcgctgccggtgccactgccacctcgcggatcaggagccagcgttgttcgcctgacgcctcgctgccggtgggaggaagcgagagggaagccgcttgcgggtttgtcgccgctgcttgcccaccgcctgggagagccgagccccgggccacacggtcgcttgccaccgctcgtagccgttacccgttggccgccacagtcttcgggcgggagaggcgcgcgccatggcttctggagccgattcaaaaggtgatgacctatcaacagccattctcaaacagaagaaccgttccaatcggttaattgttgatgaagccatcaatgaggacaacagt

SEQ ID NO: 228878 - DNA, 356 bp, Gossypium hirsutum
cccacgcgtccgcaaaaacttgtggagaatggactgcaatgaagatgatatgtgtcagattgacaaagatgattctatggtaagcaaagtgaggctttgttctgcttcgatgattgataacgttaaccagagctctaatcccacttgtggaacttctcatgatgggaagggcaaatttgatgatgatcctgaagtggtagcagttggtttccctactgcttgtgttgaagggggagatgacttttcatatactggtgggccatcgttctctgaagatgatgatgaactcactgaatcaaaaattagagcctttttagatgagaaggcattagaactaaagaagctacaaacaccat

SEQ ID NO: 228879 - DNA, 375 bp, Gossypium hirsutum
tcggaagtcgtatgacgcattttaaaagaaccttacgctagatatacatgaggactgtcaaaacaggactaaaattgccgaattggtccgctaccactccaccaatagtggtgatgagctgaccagctagcacgactatgtgaccagaatgaatgaggttcagaatgatatttactacattactggtgagagtcaaaaggcagttgagaactctcccttccttgagaagctgaagaagaagggttatgaggtcctttacatgtgtgatgctattgatgagcatgctagtcggacagctcaaagaatttgaggccaaaaagcttgtgtcagctaccaaagaaggtcttaaacttgatgagagtgaggatgagaaga

SEQ ID NO: 228880 - DNA, 362 bp, Gossypium hirsutum
tttttctctccagacccattggactcagtcgcaggaattgcgccaatgcaactccggtgatggatcagtcagttggtgaaaggagctcttcggtccccactattgttgaggtggatttgggtaatcggagttatccgatctacatcggctccgggttgcttgatcagcatgagcttcttcaaaagcatgttcatgggaagaaagttcttgtggtaactaacactacaattgctcctttgtatttggataaagtcgttgatgcgttaacaaagggaaacccgaatgtttctgttgaaaatgtgatactacctgatggtgagaagtacaaaaacatggagactcttatgaaagtttttgacaag

SEQ ID NO: 228881 - DNA, 367 bp, Gossypium hirsutum
gaaagatttccttgtttaatatgatgacattcaagacaatggcgactttcatgccaccaccaccactagcgacttttcttgcattccaccctcaagataacaatattattgctataggcatggacgattcaacgattcagatatataatgttcgtgtggatgaggtgaagagtaagcttaaaggccactccaaaagaataactggccttgccttctctcatgtactgagtgtgcttgtctcatcaggagcagattctcagctttgtgtatggaacactgatggatgggaaaagcagaggtctagattcttgcaggttccatctgggagaacaccaacggcactgtcagacacacgtgtacaattcca

SEQ ID NO: 228882 - DNA, 366 bp, Gossypium hirsutum
atagcgagaacagatcaagctcctcaacaacaagtttgcctccttcatcgacaaggtgcggttcttagagcaacagaataaggtcctggagaccaaatggaagctgctccagcagcagacgaccagcacctccagcaaaaaccttgagcccctctttgagacctacctcagtgtcctgaggaagcaactagataccttggtcaatgacaaagggcgcctgcagtctgagctgaagaccatgcaggacagcgtggaggacttcaagaccaaatatgaagaggagatcaacaaacgcacagcagctgagaatgactttgtggtcctcaagaaggacgtggatgctgcctatatgaacaaggtggagct

SEQ ID NO: 228883 - DNA, 332 bp, Gossypium hirsutum
cggacgcgtgggatttaccttgtcaccaacggaagaggaacgcttacgttcttgacacatgaaaacaaagagtcctacaatatagtaccgggagttgtagtcaaagtcccagcaggaagcactgtgtacttggctaaccaagacaacaaggaaaagctaatcatagcagtgcttcaccgccctgttaataaccctggacaattcgaggaattcttcccagctggaagccaacgccctcagtcatatctccgagcctttagtcgtgaaattcttgagcctgccttcaatacacgaagtgagcagctagacgagctgtttggtgggaggcaaag

SEQ ID NO: 228884 - DNA, 310 bp, Gossypium hirsutum
caaaaaagaaaagaaaaaatacagtgaaaatggcaacccttaaggttccagctcatgtacctgccccttctgaggatgctgagcaacttcgtaaagcttttgaaggatggggtacaaatgagcaattgattatcgacatattggctcacaggaatgcagctcagcgcaatttgattcgtaaaacttatcgtgaagcttatggggaagatctccttaagtctttggatgaggaactttcaagtgactttgagcgagctgtggtgctgtttactttggaccctgcagagcgtgatgcatttctggctcatga

SEQ ID NO: 228885 - DNA, 350 bp, Gossypium hirsutum
gctgatttgagcagcagcagctaaagcagatcccaaaatgaagtttaatatcgcaaatccgactactggttgccagaagaagctcgagatcgatgacgaccagaagcttcgggcatttttcgacaagcggatctcgcaggaggttgctggagatgctttaggcgaggaattcaagggctatgttttcaagatcatgggaggttgcgacaagcaaggattcccgatgaagcagggtgttctgactcctggtcgtgttcggctcttgcttcatagaggtaccccatgcttccgtggatatggaagacgtaatggtgagcgtagaaggaagtctgttcgtggatgcattgtta

SEQ ID NO: 228886 - DNA, 326 bp, Gossypium hirsutum
atggacaacaaccgcaacctggacctggacagcatcatcgccgaggtcaaggcccagtatgaggagatcgccaaccgcagccggaccgaagctgagtcttggtaccagaccaagtatgaggagctgcagcagacagctggccggcatggcgatgacctccgcaacaccaagcatgagatctctgagatgaaccggatgatccagaggctgagagctgagattgacaatgtcaagaaacagtgcgccaacctgcagaacgccattgcggatgccgagcagcgtggggagctggcgctcaaggatgccagaaacaagctggccgagct

SEQ ID NO: 228887 - DNA, 360 bp, Gossypium hirsutum
cggacgcgtgggcccagcatcttctattgaacctggaggtgttgctcccacacagactgaattcctacacagtaatctggataccttcccatcactgctgttctttagatcaaaatcaacccgttcagagagtttccagtctggacctttgtctgaccagaaagatggaatgctagtattgaggaacaagtcaccgaggtggcatgaacaactccagtgctggtgtctgaacttcaatggacgggtaacagttgcatcagtcaaaaactttcagctggttgcatctcctgaaaatgcagctgctggtcaggagcatgagaatgtcattctccaattcggtaaagtgggaaaggatgtatt

SEQ ID NO: 228888 - DNA, 378 bp, Gossypium hirsutum
atctgctgccggagccctgccagctgtccgacgatgtcgtcccacctagtcgagccgccgccgcccctgcacaacaacaacaacaactgcgaggaaagtggccagtctctgccgcagccggccggcctcaatagttcctgggtggagctccccatgagcaacagcaatggcaatgataatggcaatgggaaaaatggggggctggaacacgtaccgtcctcatcctccatccacaatggagacatggagaagattctattggatgcacaacatgaatcaggacagagtagttcaagaggcagttctcactgtgacagcccttcgccacaagaagatgggcagatcatgtttgatgtggaaatgcacacaagcagggac

SEQ ID NO: 228889 - DNA, 380 bp, Gossypium hirsutum
atcgtgactggcacctgaagcagagcccagctagccctgagcgggactacagcccctaccacaagaccattgaagagctgcgggacaagatcctgaccgccactattgaaaacaaccgggtcatcctggagattgacaatgccaggctggctgcggatgacttcaggctcaagtatgagaacgagctggccctgcgccagagcgtggaggctgacatcaacggcctgcgccgggtgctggatgagctcaccctgtctaagactgacctggagatgcagatcgagagcctgaatgaggagctggcctacatgaagaagaaccacgaggaggagatgaaggaattcagcaaccaggtggtcggccaggtcaatgtggagatg

SEQ ID NO: 228890 - DNA, 361 bp, Gossypium hirsutum
atgggatcaatagcctcgtgtcatgcctgctgtttttgttttgttcagaaagtccattgcattcagaagcaacgaacttcttaggaagctcagagctgctggtgttggggataggccggtggtttggatatcacatagcatgggaggtcttctcgtcaaaaagatgctgttggaagcctctaagaagccagaaatgagtgctgttatcaacaataccagaggaataattttttatagtgtccctcatcatggatcacatttggctgaatactctgttaatattcgctatcttctctttccctctttggaagtcaaagaactcagcaaggattctcctgcacttaaaacactgcaagatgac

SEQ ID NO: 228891 - DNA, 320 bp, Gossypium hirsutum
atgtggctttggcggtcgatttgggggctccttcaacggtaagggtggccctggcttccctgtctgccctgctgggggaattcaggaggtaactatcaaccagagcttgctgacccccctccacgtggagattgaccctgagatccaaaaagtccggacagaggagcgagatcagatcaagctcctgaacaacaagattgccttcttcatcgacaaggtgcggctcttagagcaacagaataaggtcctggagaccaaatggaagctgctccagcagcagacgaccagcaccttcagcaaaaaccttgagcccctctttg

SEQ ID NO: 228892 - DNA, 369 bp, Gossypium hirsutum
atggcagactcctctcagcctgccccccagctcagctacccccaggaagagggaggaccttttaagacacccattaaggaaacgctgcccatctcctccaccccgagcaaatctgtcctccccagaacgcctgaatcctggaggctcacgcccccagccaaagtaggggggctggatttcagcccagtacaaaccccccagggcgcctctggccccttgcctgaccccctggagctgatggatctcagcaccactccactgaaaagcgttcccccctttgaatcaccgcaaaggcttctcagttcagaacccttagacctcgcctccgtcccctttggcaactcttctccctcaaatatagaagtcccc

SEQ ID NO: 228893 - DNA, 343 bp, Gossypium hirsutum
ctgcaacaaatgagacttttgcagcaagaaatcagaagttctctgatctggttgtcaaatgccttatcaaactcacaaaggttcttcaaagcacaatttatgatgttgatcttgaccgcatccttcaaagtgtccatgtctacctgcaagaactaggaatggaagaaatccggagaagagctggagctgatgataaaccattacgaatggtaaaaactgttctacatgaacttgtcaaacttagaggggctgcaataaagggtcacctatctttggtgcccatagacatgaagcctcaaccaattattcttgcctatattgatctcaatcttgagactttggc

SEQ ID NO: 228894 - DNA, 351 bp, Gossypium hirsutum
gaaaaatgtcttgctgtggtggaaactgtggctgcggtactggctgcaagtgtggcagtggctgtggaggatgcaagatgtatccagacctgaacgctgccgagatgaccacaactgagactctggttcttggtgtagcaccccagaaagcacactttgagggagctgagatggaattcggggctgagaacggctgcaagtgtggagacaactgcacctgcaacccttgcaattgtaaatgattagagaccaaagccaaagctccctggaagcagaggcgcctttgtctttaagaaataatatgttttgttggttatgtgtttttagaataaagtagccatggcttgtcgt

SEQ ID NO: 228895 - DNA, 360 bp, Gossypium hirsutum
cccaaccccaatcctgtttctcttttgcatcctttgtttctctcttcatctcctgcactacttgcaaaataacgagctgaagccgtgctacaataacactagtgttttcaacaataaattaatcatagccgcagcttgtttcttttaaactctaaatataaaggaggccaaacatgccgcctcgtagataccaatttgggagggctgatgaggccactcatcccgactccatgagagccaccttggctgaattcctctccactatcattttcgtctttgccggcgaaggctcaattcttgctcttgacaagatgtacaaggatacgagtgcgacgcctgcaagactggtgatgatagcac

SEQ ID NO: 228896 - DNA, 355 bp, Gossypium hirsutum
cccacgcgtccgtgctttgagatgaatatactgctctcgtccctcttttcacttgtgattgtgaggtcgcccagcaaaattcgagccatcttcatcaacaacgattgtttcagttcttgatgggtctcaatgagacctatgctgccgttcgtagtcagatcctcttgatgcagcctttaccttcggtaaatagagcttattccatgatcgtccaagaagaaggtcaacggagtctttcctctgttctacctcatgcttccgaacctatcgatttgctttctaccgtttctggcaaccataaaaaattcaatggtacttgtgatttttgtaaagtgaaagggcataagaaggaatc

SEQ ID NO: 228897 - DNA, 355 bp, Gossypium hirsutum
cccacgcgtccggtaggaacatttctcgtcattatgatctgagtaatgaacttttcactctatacttgggtaaaatgatgcaatactcttctggagtctttaggacgggagaagaacatttggacgttgcacagcgtagaaaaatcagctctctaattgagaaagcaaggatagagaaatggcacgaagttctcgacattgggtgcggttggggaagtttagctattgaaactgtgaaaagaacaggatgcaaatatactggcatcactctatcagaacagcaactgaaatatgctcaagaaaaagtgaaagaagctggactccaagataacatcaaaatacttctctgtgacta

SEQ ID NO: 228898 - DNA, 339 bp, Gossypium hirsutum
agcaccttcctttgtttaaaccaactgctcactcgctcacctacgtgctaaacaccatgaccacctgcaggcacctgttcacctcctccagctccatgcagggctactgcggcatcaggcgcggcatcgggggcggctccagccgaatctaccccgtcctggccggagagtactgccgcgcccccagcacctactgcgggggcctgtctgtctcctccttccgcttctcactctgggggagcctgcgggctggggggcggctatagcggtggcttcagcagcagtagcagctctggttgtggcttcaaaggaggatatggtgctggcttttgttctggc

SEQ ID NO: 228899 - DNA, 268 bp, Gossypium hirsutum
caatatcagagccgggtcccatgactatgtacaatgtttgtgggtctgcgaaatgtgttgttgttgtcatctgtggtcggccggttgttgtacagccatttgtctagtcggttgatgcacttgtagctgctcggcttactgagaccgatggccaaggtgtctctcatggcttgtttggtgactccaggttcaccgggcagctagcatggacatggatgaagaccggtgaccagcttgcaatgaatgtctgagatccacattatgaccc

SEQ ID NO: 228900 - DNA, 354 bp, Gossypium hirsutum
tgagttttgaatctagggatttgcgggtggagaagacgagagctcatctctctgcttcaaagctcctgtccaggtagaattctcttcttcctttgcgttgtgttctttgttgttcagtcgccatggcttcaaagcggattttgaaggaactcaaggatttgcagaaagatccacccacttcttgcagtgctggtccagtagctgaagacatgtttcattggcaagcaacaatcatgggaccctcagatagcccttatgctggaggtgtgtttttagttaccatccatttccctccagattatcctttcaagcctcctaaggtcacgtttaggaccaaggtcttccatcctaaca

SEQ ID NO: 228901 - DNA, 360 bp, Gossypium hirsutum
cccacgcgtccgctgacttcggtcgtctcgagatcgagttggccgaggtcgaaatgcccggtctcatggcttgccgagccgagttcggccctgcccaacctttcaagggagccaaaatcaccggttctcttcacatgaccatccagaccgccgtcctcatcgaaaccctcaccgccctcggagctgaagtccgttggtgctcttgcaatatcttctctacccaagaccatgccgccgccgccattgcccgtgactcggcagccgtgttcgcctggaaaggtgagaccctccaggaatactggtggtgtaccgagagagcccttgactggggtcccaccggtggacctgatctgatcgtgg

SEQ ID NO: 228902 - DNA, 354 bp, Gossypium hirsutum
agcacttcgatttattgaagaagtttgataccctgatatagttgactcgggacaccattttccaatctcgaagtcgacagccggtgccttcaaaacctacccacaacatgccggaaccattcgtaagaatggttacatcgtcataaaaaaccgtccctgcaaggttgttgaagtttctacctccaagactgggaagcatggtcatgctaagtgtcactttgttggaattgacatcttcaccgccaagaagctggaagatattgttccctcttcccacaactgtgatgttccacatgttaatcgtacttactaccagttgatcgacatttcttaggatggatttgtgagtttgct

SEQ ID NO: 228903 - DNA, 357 bp, Gossypium hirsutum
cggacgcgtgggtgcccagccaaaagaaactaaaccaaaggctgaaccaaagaaagaagccaaaaaggaggttgagaaacaggcagcaaaggcagaggccgctgaggaggaggaggcaccaaaggccaaaccaaagaatcctcttgatttgctgcctccaagtaagatggtactggatgactggaaaaggctttactctaacacaaagaccaatttccgagaggttgcaattaaaggattctgggacatgtatgatcccgagggatactcactgtggttttgtgactacaagtacaatgaggagaatacagtttcatttgtcacaatgaacaaggttggaggattcctgcagagaat

SEQ ID NO: 228904 - DNA, 374 bp, Gossypium hirsutum
atggcttcggtgctggcttgggtggtggcttgggtggtggcttgggtggtggctttgctggtggtgatgggcttctggtgggcagtgagaaggtgaccatgcataacctcaacgaccgcctggcctcctacctggacaaggtgcgtgctctggaggaggccaacgccgacctggaggtgaagatccgcgactggtaccagaggcagcggcccactgagatcaaagactacagtccctacttcaagaccatcgaggacctgaggaacaagatcattgcagccaccattgataatgcacagcccattttgcagattgacaatgccaggctggcagccgatgacttcaggacaaagtacgagcatgaactggccctg

SEQ ID NO: 228905 - DNA, 354 bp, Gossypium hirsutum
cggacgcgtgggcggacgcgtgggggagcagcgataccgccatacgagaggagggtctcaagataatggcctcgaggaaactttctgctccatgaggatcaaggagaaccttgctgaccctgaacgtgccgacattttcaacccacaagccggtcgtatttccaccctcaacaggtttaacctccccatcctccaacgacttgagctcagcgccgagaggggtgtcctctacaacagagctggtttgattccacaatggaacgtcaacgctcacaaaatactctacatgttaagaggctgtgccagagtccaagtggtgaaccacaacggcgacgcagtgttcgacgataacgt

SEQ ID NO: 228906 - DNA, 376 bp, Gossypium hirsutum
atgtggccatccaggctgtgctgtccctgtacgcctctggccgtaccactggcatcgtgatggactccggtgacggggtcacccacactgtgcccatctacgaggggtatgccctcccccatgccatcctgcgtctggacctggctggccgggacctgactgactacctcatgaagatcctcactgagcgcggctacagcttcaccaccacggccgagcgggaaatcgtgcgtgacattaaggagaagctgtgctatgtcgccctagacttcgagcaggagatggccacggcggcttccagctcctccctggagaagagctacgagctgcccgatggccaggtcatcaccattggcaacgagcggttccgctgccc

SEQ ID NO: 228907 - DNA, 377 bp, Gossypium hirsutum
atcggggcgtgggccggggggccggcggcggggaggccggggcctgcaggccgccggtacgtcaagatccggactccggcccggactacgaggcgctgccggctggagccactgtcaccacgcacatggtggcaggcgccgtggcagggatcctggagcactgcgtgatgtaccccatcgactgcgtcaagacccggatgcagagtctacagcctgacccagctgcccgctatcgcaatgtgttggaagccctctggaggattataagaacggagggcctatggaggcccatgagggggctgaacgtcacagcaacaggcgcagggcctgcccatgccctttattttgcctgctacgaaaagttaaaaaagacattg

SEQ ID NO: 228908 - DNA, 359 bp, Gossypium hirsutum
attttgcgagtgttaaacattgtttgcctttcatttctttctctattccttgctgcttcctcaggcagcctttcggtttctgagtaacccaagattaaaaaggatggggctgtctgttgctaacctgattagtcgactgtttgccaagaaagagacaccaattcttatggtgggtctagaggctgctggtaacactaccattttatacaagctcaagctcggtgtgaatgctactaccattcccaccaccggcttctacgtggtgaccgtaaaatataataacattaacgtcactgtttgggatgttgatggtcacgacaagattcgaccatgtggatgcactatatacaaaacactca

SEQ ID NO: 228909 - DNA, 363 bp, Gossypium hirsutum
gaatttttagtttttttttgtttcagatgatcaaagaaaaacaacaatgtcacaaccagtgggtccatctttgcccctgaacaattcctcttgcatcttctacaagttaattgtggcttccatccttcaagacaagaagctaaggatcccgaataagttcgttaagaaatttggtaatgaactctcttcggttgctacgctcaccgtcccgggtggttgtcaatggctagtggaattgagggaagataacaaaagaatatggctggataatggttggaactcgtttgttgaatactattccatctgcatcgggtacttcgtggtctttaaatacgaagggaattcgcattttggtgttcatgt

SEQ ID NO: 228910 - DNA, 360 bp, Gossypium hirsutum
cgtagatatggcgattaacccttctttgctctttctttcccttctttttctcttcaatggctgcctagctcgccagaccttttcgtcacagcagtcccaaaatgagtgtcaaatcaataggctccgcgcctctgcaccccagacccgaattcgctccgaagccggcaccaccgagtggtggaaccccaactgtcaacagctcaggtgtgctggtgtatctgtaatgaggcagactattgaacctaatggccttgttttgccttccttcaccaatgctcctcagcttctctacattgtccaaggaagaggtattcaaggtattgtgatgcctggatgtgccgaaacattccaggattcaca

SEQ ID NO: 228911 - DNA, 338 bp, Gossypium hirsutum
cgtagatatggcgattaacccttctttgctctttctttcccttctttttctcttcaatggctgcctagctcgccagaccttttcgtcacagcagtcccaaaatgagtgtcaaatcaataggctccgcgcctctgcaccccagacccgaattcgctccgaagccggcaccaccgagtggtggaaccccaactgtcaacagctcaggtgtgctggtgtatctgtaatgaggcagactattgaacctaatggccttgttttgccttccttcaccaatgctcctcagcttctctacattgtccaaggaagaagtattcaaggtattgtgatgcctggatgtg

SEQ ID NO: 228912 - DNA, 344 bp, Gossypium hirsutum
gaagaaccgaagtcaccggaaagtgacgtcaccagcatgagtttcgaggagacgaagctgactttaggattgccaggggagggacgatcgtcggcgggagctgtaaagtgttctgcaaaacgtggcttcgttgagaccgtagtcgatcttaaagtcgggagttctggtaactgcatgcctggtggacgtgatgacactactactgttatcgattccggtgccggaaaacctcctcccgccaaggaacaagttgtgggttggccaccagtgagatcaagtagaaagaaggctataaatgagaggtttaggtatgtgaaagtagccatggatggagctccatttct

SEQ ID NO: 228913 - DNA, 374 bp, Gossypium hirsutum
atcgggcagacatggggatgacctgcgcaacaccaagcaggagattgctgagatcaaccgcatgatccagaggctgagatctgagatcgaccacgtcaagaagcagtgtgccagcctgcaggccgccattgctgatgctgagcagcgtggggaaatggcactcaaggatgccaagaacaagctggaagggctggaggatgccctgcagaaggccaagcaggacctggcccggctgctgaaggagtaccaggagttgatgaacgtgaagctggccctggacgtggagattgccacctaccgcaagctgctggagggcgaggagtgcacgctgaatggcgaatgcgttggacaagtcaacatctctgtggtacaat

SEQ ID NO: 228914 - DNA, 322 bp, Gossypium hirsutum
caaaaccttcttttgttttcttcttctaatcaatggcatcttccatagctacaactctcacttcctcttcaaagctttgcaggaacacttctctcttcgagtcttccttccatggggttccaattaaaccactttcttttcatttcaaaacaaagtcttccccgtgcaacgcatccatttccatgtctgcagcatcacctccaccctatgatctgaataatttcaggtttgaccccatcaaggagtccatcgtctcacgtgagatgacacgcaagtacatgatggacatgatcacctatgctgataccgatgtggtggtcgt

SEQ ID NO: 228915 - DNA, 303 bp, Gossypium hirsutum
cggacgcgtgggcccagttatcaaccggtgacatatttgttgtaccagcatgccatccaatcacattctttgcctgacaaatcaagaacctaagattggtcgagttcggactctacatccgccaagacaacatgaggatcttggtggctgggaaaaccaacaatgtgagacagtgtaatcgacacgccaaagagctgtcgtcaggagtggagatcaaggttgttggatgaggtattcaacaacaacccgatcgaatctaacttagtgaatggacagaatcgtcgtggatttccttagaggtgg

SEQ ID NO: 228916 - DNA, 381 bp, Gossypium hirsutum
atgagaatcgttgtcagagccttactgaggacttggagtttcgcaaaaacatgtatgaagaggagattaatgagaccagaaggaagcatgaaacacgcttggtagaggtggattctgggcgtcaaattgagtatgagtacaagctggctcaggcccttcatgagatgagagagcaacatgatgcccaagtgaggctgtataaggaagagctggagcagacttaccatgccaaacttgagaatgccagactgtcatcagagatgaatacttctactgtcaacagtgccagggaagagctgatggaaagccgcatgagaattgagagtctttcatcccagctttctaatctacagaaagagtctagagcatgtttggaaaggt

SEQ ID NO: 228917 - DNA, 343 bp, Gossypium hirsutum
atgagattccaggcccgatgcctcccctaatccgagagatgctggagaaccctgaaatgtttgaggatgactcctcgcagcctggtccccatcccaatgcctctagcgaggatgaggtccccgggggccagggcaaagggggcctgaagtccccagcctgaccagggcccctgacctctccgctgtgggggttggggctccaggcagcagactgaccatctcccagactgccagtgactgggggaggacctgctctgccctctccccaccccttccaatgagctccttgtttttgccaaagtttccaggggtgcctctgtgttcatccccttcccgatctaac

SEQ ID NO: 228918 - DNA, 363 bp, Gossypium hirsutum
ggaagtcactgctttggaacaggattcagttgttccaaaagaaaagaccgatgaacataatttagaaaacggggttgaaggcattcctgatgaattgattcttaaaagagttaactctagaaaagaaatgaagtcctatcaattagggaagcagttgtcatgcaagtggactacaggagcagggccccggattggttatctgagggactatcccttggaactccaattccaggctttggagcatgtgaaattgtccccaagaagtgcaagctattcaaaattgtactttttcttctgggtctactagtagcctcagtcaaaagtttccacaccagcaagtgcaagtgaagaaatgagaaccct

SEQ ID NO: 228919 - DNA, 360 bp, Gossypium hirsutum
ggaagaagaaggagaaggagaagaagaagaagaagacaaccccagccgccgcagccgccaccaggaggaggaggagcaggggcgggaaagctcatcatgcaacaaccttctctgtgccttcgacagaaacttcctcgctcaagctttcaacgttgaccacgacatcattaggaaaatccaacgtgtacgaggaaatagaggcaccatcatcagagtcagggacagactccaagtcgtaacaccacccagaatggaggaagaagaacgtgaggagcgccagcaggagcagcgataccgccatacgagaggagggtctcaagataatggcctcgaggaaactttctgctccatgaggatcaa

SEQ ID NO: 228920 - DNA, 368 bp, Gossypium hirsutum
gcctgagacacccattgattggccaacaaggatgagaatagcaaagggtgttacaagaggtctgatgtaccttcacactcaagaaaacatcatccatgggaaccttacatcaagcaatgtcttacttgatgaggacacaagtgctaaaatatcagattttggcctttctcgtctaatgacagctgctgcaaatgcaaatgtaattgcgaccgcaggagcgttaggttaccgagcaccggagctttcgaagctcaagaaagccaacacaaaaactgatgcctatagccttggtgttatcatattagaactcctaacagggaagtcccccggagaggcaatgaatggagtggatttgccacaatgggttg

SEQ ID NO: 228921 - DNA, 308 bp, Gossypium hirsutum
gcctgagacacccattgattggccaacaaggatgagaatagcaaagggtgttacaagaggtctgatgtaccttcacactcaagaaaacatcatccatgggaaccttacatcaagcaatgtcttacttgatgaggacacaagtgctaaaatatcagattttggcctttctcgtctaatgacagctgctgcaaatgcaaatgtaattgcgaccgcaggagcgttaggttaccgagcaccggaacctttcgaagctcaagaaagccaacacaaaaactgatgcctatagccctggtgttatcatattaaaa

SEQ ID NO: 228922 - DNA, 354 bp, Gossypium hirsutum
gcagagtgtgtgagaatattcctattgttctatgtggaaacaaggttgatgtaaagaacaggcaggtcaaggcaaagcaagtcacattccacaggaagaagaatctgcaatactatgaaatttcggccaagagtaactacaatttcgagaaacctttcttgtaccttgctaggaagcttgcagggtaatatataacattgtatttgttgtgcaattaatgttttaatgctgatgcctcgatcaatgtctaaaattggtgttgttttgatgattctagtgatcctaatctccacttcgtggagtctcctgcacttgctcctccggaagtacacattgacttggctgcacagcaac

SEQ ID NO: 228923 - DNA, 359 bp, Gossypium hirsutum
tgctccagctgcggccgacgcgtcgagcagtacatcaacaaccttaggaggcagctggacagcatcgttggggaacggtgccgcctggactcggagctcaaaggcatgcaggacctggtggaggacttcaagaacaaatatgaggatgaaatcaacaagcgcgcagcatcagagaatgaatttgtgactctgaagaaagacgtggatgctgcctacatgaacaaggttgaactgcaagccatggcagacactctcacagacgagatcaacttcctgagagccttgtatgaagcagagctgtcccagatgcagacccacatctgagacacattcgtggtgctgtccatggacaacaaccg

SEQ ID NO: 228924 - DNA, 347 bp, Gossypium hirsutum
tttcagtttcagcgtctctgtcaacaacaagttgttttttattttcttcctattttttttttttttgcttaaacaaggttaacaagagatggcggatgaggatattcaacctcttgtgtgtgacaatggaactggaatggtcaaggctggttttgctggtgatgatgcccctagggcagtcttccctagtattgtcggtcgtccacgccacacaggtgtcatggttgggatgggtcaaaaggatgcttatgtaggtgatgaagcccagtcaaagagaggtatcctcactttaaagtaccctatcgaacattgcattgtcagcaattgggatgaccttgagaagattt

SEQ ID NO: 228925 - DNA, 413 bp, Gossypium hirsutum
acacgcgatgtcttccgtgatctaatagcctgaaaatggaccgcaccatacaacgagtgcgtaccgaggaacatgaacagatcaagaccctcaacaacaagttcgcctccttcatcgacaaggagcagggcaccaagaccgtgaggcagaacctggagccattgttcgagcagtacatcaacaacctcaggaggcagctggacagcatcgttggggaacggggccgcctggactcggagctcagaggcatgcaggacctggtggaggacttcaagaacaaatatgaggatgaaatcaacaagcgcacagcagcagagaatgaatttgtgactctgaagaaggacgtggatgctgcctacatgaacaaggttgaactgcaagccaaggcagacactctcacagacgagatcaat

SEQ ID NO: 228926 - DNA, 358 bp, Gossypium hirsutum
atgacattaaaaagtgtgctgcggtgacagagcgtgttcttgctgcttgctacaaggctttgaatgatcaccatgtcatgctagaaggtactcttttgaagcctaacatggtgacccctggttccgactccccgaaggttgccccagaggttattgctgagtacactgtccgtgccttgcagcgtaccgtccctgctgcagtccctgctattgtgttcttgtctggtgggcaaagtgaggaggaggctacccttaaccttaatgccatgaacaagctccagaccaagaaaccatggtcactctcattctcatttggacgtgcccttcagcagagcactctcaaggcctgggctggaaa

SEQ ID NO: 228927 - DNA, 361 bp, Gossypium hirsutum
gcggttcaaacgaaggaaatgttgtcgaaacaagctgttaagatcgctaaacaagctgaagaacacgagcgctttatcaataaggtgactcatcttttgggggttcttggatttggagggttttgctttctattgggagcaagaccacaagatattccttatgtatattgtgtgttctatgttacctttgttcctcttagatggatatactaccgttttaagaaatggcattattatcttctggatttctgctattatgccaacacaatcttcttggttgaccttcttctgtatccgaagaatgaaaaacttttcatgatttgtttctcatttgccgagggaccgctagcgtgggcgctca

SEQ ID NO: 228928 - DNA, 395 bp, Gossypium hirsutum
  unsure (1)..(395): unsure at all n locations
tagcgtacgaccacgcgtacggtctgagcgaatttgcggtttgttagttcgtgtgtgaaagaggttataaaaggaaaaaaacgatgggtgttttcacatttgtgtgcaggagcaaaggcggtgagtggtctgccaagcagttggagggagagattgaaagctctgctgcttccacttacgagctccagcggaaactcgtccaggctgccaccgcctgcgactcctctggtggtgtcacctcctctttctctgtcgttacccctaattctgccgttttccaggtggttattggaggtgctgtaggcggagccttcatcggnggtggaggtgctgctgctgctccggctggaggcgctgccgctgccgctgaagctcctgcagctgaggagaaaaag

SEQ ID NO: 228929 - DNA, 406 bp, Gossypium hirsutum
attccaagatctgcagcgaggacatcgagtgcagtgggctgaccatccccaaggctgtgcagtacctgagctcccaggatgagaagtaccaggccattggggcctattacatccagcatacctgcttccaggatgaatctgccaagcaacaggtctatcagctgggaggcatctgcaagctggtggacctcctccgcagccccaaccagaacgtccagcaggccgcggcgggggccctgcgcaacctggtgttcaggagcaccaccaacaagctggagacccggaggcagaatgggatccgcgaggcagtcaccctcctgaggagaactgggaacgccgagatccagaagcagctgactggactgctctggaacctgtcttccactgacgagctgaaggaggagct

SEQ ID NO: 228930 - DNA, 354 bp, Gossypium hirsutum
gcggccacgcgttcggttgagcgagaataagattgacggggttgatttaagtggccagacacaggaaaaagtgcaattaattccatataattcgaaagtggcgtcagatcgacagaaatcttacgcatatttgaaactgaaagatattgagtttcacatcggggataaagtgtttttaaaagtgtcaccgtggaagaaaataatctgattcaatcgtaaatgcacattatagtcccagattcatcagaccatatgaaattatcgcacgagttggactagtggattatcgaatttcattaccgattgaattagaaatgatacataatgtatgccatgtgtcgatgcttccatcat

SEQ ID NO: 228931 - DNA, 378 bp, Gossypium hirsutum
  unsure (1)..(378): unsure at all n locations
atcggccctgcaggccaagtcagtagctgtcaagaccacacgatttgcctcattccctgactacctggtcatccagatcaagaagttcaccttcggcttagactgggtgcccaagaaactggatgtgtccatcgagatgccagaggagcttgacatctcccagttgaggggcacagggctgcagcctggagaggaggagctgccagacattgccccacccctggtcactccggatgagcccaaagcacccatgctggatgaatccgtcatcatccagttggtggagatgggcttccctatggacgcctgccgcaaagctgtctactacacgggcaacagcggngccgaggccgccatgaactgggtcatgtcacacat

SEQ ID NO: 228932 - DNA, 363 bp, Gossypium hirsutum
gctccttcaagtttttgaaaaacgcaatatattaaaaaaaggataactaaaaacacctttttgaggttttgcgatggcatcgaagcggatcttgaaggaattgaaggatttgcagaaggaccctcctacatcatgcagtgctggtcctgttgctgaagacatgtttcattggcaggcaacaatcatgggtccaccagacagtccatattctgggggtgttttcctagtgactattcattttcctccagattatccctttaagcctcccaaggtggcatttaggacaaaggtattccaccccaatattaacagcaacggaagcatttgcctagacatcttgaaggagcaatggagtcctgcact

SEQ ID NO: 228933 - DNA, 408 bp, Gossypium hirsutum
atcagcgtctgcagcgctcttgtctactgcggctctcggtgcccgctccttttcgtttccggaaacatggcctccggtgtggctgtctctgatggtgtcatcaaggtgttcaacgacatgaaggtgcgtaagtcttcaacgccagaggaggtgaagaagcgcaagaaggcggtgctcttctgcctgagtgaggacaagaagaacatcatcctggaggagggcaaggagatcttggtgggcgatgtgggccagactgtcgacgacccctatgccacctttgtcaagatgctgccagacaaggactgccgctacgccctctatgacgcaacctatgagaccaaagagagcaagaaggaggacctggtgtttatcttctgggcccctgagtgtgcgccccttaagagcaaa

SEQ ID NO: 228934 - DNA, 386 bp, Gossypium hirsutum
atgtgcagagcagcagccgccggcgtcctcggatgttgtgttacccgccatcatgagctacacaggctttgtccagggatctgaaaccactttgcagtcgacatactcggataccagtgctcagcccacctgtgattatggatatggaacttggaactctgggacaaatagaggctacgagggctatggctatggctatggctatggccaggataacaccaccaactatgggtatggtatggccacttcacactcttgggaaatgcctagctctgacacaaatgcaaacactagtgcctcgggtagcgccagtgccgattccgttttatccagaattaaccagcgcttagatatggtgccgcatttggagacagacatgatgcaag

SEQ ID NO: 228935 - DNA, 382 bp, Gossypium hirsutum
cccttccacgctttaatttgtttctgcatctctcgttttatttctcgtatattaatgacgggtcggggtaagactctcggatccggagcctcgaagaaggcaacatcaaggagtagcaaggctgggcttcagtttccggtgggtcgtattgctcggttccttaaagctgggaaatatgctgagcgggtcggagctggagctccggtttacctcgccgccgttcttgaatatcttgccgctgaggttcttgaactagcagggaatgcagccagggacaacaagaaaacccgaatcgtgccacgtcacatccaacttgccgtaaggaacgacgaagagctgagcaagctgctcggcgatgtgacgatcgccaatggtggtgtga

SEQ ID NO: 228936 - DNA, 385 bp, Gossypium hirsutum
cccacgcgtccggaacaaataagaaaaaatggcaaaagcttcacagagggccctggtttcaatggcaatctgcttattgccttccctcgttggcttcgcctatgccagcagtctcggcaacaagttcgtcgtactcggcaaagtttattgcgacacttgccgcgtagagttcgaaaccaaactcagcgaacccataccaggtgccaaggtgaagttggagtgcaggaaagaaggggacgaaactgttacgtacagccacgaaggcggaacagacgcaaacggtgtgtacaagatcccggtggaaggcgaccactaggaacagatttgcgcagtgagcacagtgagcagtccaagggcagattgtaacgagaagatggaagcattt

SEQ ID NO: 228937 - DNA, 337 bp, Gossypium hirsutum
ggggaaaggtagcgagggatacgccttcaacttattgagccaaacccctcgctactccaaccaaaacggccgcttttacgaggcttgccctcgtaatttccagcagcaactccgagaagtggattcctccgttgttgccttcgaaataaacaaaggatcgatcttcgtaccgcactacaattcaaaggctacattcgtggtcctcgtcaccgaaggaaacggccacgtcgaaatggtctgccctcacctttctaggcagagctcacactggtcctcccgagaggaagaagaacaagaagaacaagaagttgaaaggagaagtggacaatacaagaga

SEQ ID NO: 228938 - DNA, 410 bp, Gossypium hirsutum
atgaatttccccttagttctttgcaagaaggtagagataaagacactttttcaaaaatggcaatggtatcagaattcctcaagcaggcctggtttattgaaaatgaagagcaggaatatgttcaaactgtgaaatcatccaaaggtggtcctggatcagcagtgagcccctatcctaccttcaatccatcctcggatgtcgctgccttgcacaaggccataatggttaaaggtgtggatgaagcaaccatcattgacattctaactaagcgaaacaatgcacagcgtcaacagatcaaagcagcatatctccaggaaacaggaaagcccctggatgaaacactgaagaaagcccttatgggtcaccttgaggaggttgttttagctctgctaaaaactccagcgcaattt

SEQ ID NO: 228939 - DNA, 386 bp, Gossypium hirsutum
attctataatttgaattttcaaaataggattttagaaatagagatagggataggattctttttagaaatattagaaataaggaataaagaaatcatggataaatccaagcgactctttcttaaatccaagcgatcttttcgtaggcgtttgcccccgatccaatcgggggatcgaattgattatagaaacatgagtttaattagtcgatttattagtgaacaaggaaaaatattatctaggcgagtaaatagattgaccttaaaacaacaacgattaattactattgctataaaacaagctcgtattttatcttcgttaccctttcttaataatgagaaacagtttgaaagaagcgagtcgaccactagaactactgctcttagaa

SEQ ID NO: 228940 - DNA, 371 bp, Gossypium hirsutum
atcccgtctttgggttctcagatttaagcagtttacgaagctccaagatcgaattttctgaaagttaagattcgtaagatttgggtttttctcgcggtttttaagaagatggatatcatttcccaattacaagaacaagtaaattcaatagcatccctaactttcaacacatttgggacactgcaacgagatgctccacccgttaggctctcccctaattacccagaaccccctcccaaccccaccgaggactctgccaattttgccgaccaacctaagctcatgagtgctgctcttgttaaggctgctaaacagttcgatgcattggttgctgcacttccaccttcagagggcggtgaagaagctcaact

SEQ ID NO: 228941 - DNA, 386 bp, Gossypium hirsutum
aagagcttccttttttttttgtctcctgttccaccgccgtcgatctcgatccttatcctcgttttcaaacaagctcgaaaaagatggccaacgctgcatcgggaatggctgtgcatgatgattgcaagttgaagttcttggagctcaaggcaaaaagaacccaccgcttcattgttttcaaaattgaggagaagcaaaagcaagttattgtggagaagcttggtgaaccaaccgaaagctatgaggattttactaaatgtctccccgctgatgaatgtcgatatgctgcgtacgattttgattttctaacggccgagaacgtaccgaagagcagaatctttttcatagcatggtctcccgacacgtcaaggatcaggagcaagatg

SEQ ID NO: 228942 - DNA, 372 bp, Gossypium hirsutum
gtggttttgctgctcagattgcggtaggatccattctacactacagaagttgctcattcatggagctgaaaggctccctgactcccttttggatgtattaaagaagaaatatgtggaaaaaggtttagatgctgatatcaatattgatgtgagatggaggcttcttagcggcaaattcgcttctcctgaaactagattgttgctttctcaagcagttggtatcttccatgaatgtttcaaccccatagttgatgcagcaactgggagggaccttatcccgtgcatggtttatggaaggaacttaaaaggccaagaatatggaggaatgtattgtgctgtattgacaattaactcattcgttgtatcagctgg

SEQ ID NO: 228943 - DNA, 358 bp, Gossypium hirsutum
gccatgttctcgaggttactgttgttggatgcaatagattgaaagataccgaatggctttcaaggcaagatccttacgtttgtcttgaatatggcagcactaaataccgtactagaacttgcactgatggtggcaaagcacctgtattccaagagaggttcacattcacattgattgaagggcttagagagatcaatgttgtggtttggaacagcaatacattgacttatgacgattttatcggcagtggaaagattcaattgcagaaggttctttctcagggttttgatgatactgcttggtcacttcagactaaaaccggaagatatgccggagaagtacggctgataatgcatta

SEQ ID NO: 228944 - DNA, 167 bp, Gossypium hirsutum
aagacattgcccaaaatctaacaaaactggttacagagcaagattgcccgcatttactcttctatggaccatctgggtctggcaagaaaaccctaatcatggcccttcttagacaaatatttggtcccagtgctgaaaaggtgaaagtggagaataggaaatggaaa

SEQ ID NO: 228945 - DNA, 397 bp, Gossypium hirsutum
atccgcccctcacgccctctcttcctctcagccttctgcccggtgaggaagcccggggtggccgctccgccgtcggggccgcgccgccgagccccggccgccccgggccgtccccgcacgccgcccccatgcattccttctacacccgggccgacaccatgataggcgagatcgccgccgccgtgtccttcatcttcaagttcctccgtaccaaggggctcacgagcgagcgacagctgcagaccttcagccagagcctgcaggagctgctggcagaacattataaacatcactggttcccagaaaagccatgcaagggatcgggttaccggtgtattcgcatcaaccataaaatggatcctctgattggacaggcagcacagcggattggactgag

SEQ ID NO: 228946 - DNA, 388 bp, Gossypium hirsutum
atttcatactcatttagcccctttcattagcatcgaaatcactccagttttctttatcactgaaaaatgtcttgctgtggtggaaactgtggctgcggttctggctgcaagtgtggcagtggctgtggaggatgcaagatgtacccagacctgaacgttgccgagatgaccacaactgagactctggttcttggtgtagcaccccagaaagcacactttgagggagctgagatggaattcggggctgagaacggctgcaagtgtggagacaactgcacctgcaacccttgcaattgtaaatgattagagaccaaagccaaagctccctggaagcagagacgcctttgtctttaagaaataatatgttttgttggttatgtgtttttag

SEQ ID NO: 228947 - DNA, 364 bp, Gossypium hirsutum
atgccgccggcaggacgtccggcatggaaaccccatcaggcagtgccgtgggttcaactccaatgccaacaagaatgccgtggagtctgtgcagtatggcgtggccggcagtgcagccttcctggagtgccagccccgctcgccccaagccactgttaagtggctgttccagcgagatcctggtgaccggcgccgagagattcgtgcagaggaccgcttcctgcgcacagagcagggcttgttgctccgtgccctgcagctcagcgatcgtggcctctactcctgcacagccactgagaacaactttaagcacgtcgtcacacgagtgcagctgcatgtactgggccgggaagccgtccatgct

SEQ ID NO: 228948 - DNA, 395 bp, Gossypium hirsutum
atcgagaatgagtttgtgatgctgaagaaggatgtagatgctgcctacatgaacaaggtggagctagaggccagggtcgatgcactgatggatgagattaacttcatgaagatgttctttgatgcggagctgtcccagatgcagacgcacgtctctgacaccttcgtggtcctctacatggacaacaaccgcaacctggacctggacagcatcatcgccgaggtcaaggcccagtatgaggagatcgccaaccgcagcctgaccgaagctgagtcttggtaccagaccaagtatgaggagctgcagcagacagctggccggcatggcgatgaccttcgcaacaccaagcatgagatctctgagatgaactcgatgatccagaggctgagagctga

SEQ ID NO: 228949 - DNA, 343 bp, Gossypium hirsutum
atgccgggttctgaggcgttggttctctttacttttccacttcaggccacgatgccgcagtaccagacctgggaggagttcagccgcgctgccgaaaaactttacctcgctgatcctatgaaggcacgtgtggttctcaaatataggcattctgatgggaacttgtgtgttaaagtaacagatgatttagtttgtttggtgtataaaacagagcaagctcaagatgtaaagaagattgagaaattccacagtcaactaatgcgacttatggtagccaaggaatcccgcaatgttaccatgggaactgagtgactggtttgaaatgaagactttgtcatgtact

SEQ ID NO: 228950 - DNA, 400 bp, Gossypium hirsutum
atgcggccacatggcgggttcgggagctggtgaccctctggatgctaagcgtggagaggccactttcgctcagcgtatcgaccagacgcgggagaagctgacatcctagcaactgtattgcatgcggcgggcgcaattagcccagtggcagaaggtcctaccgcatcggtggacccggaacatcgtgaccggtctaggcatcgtggccctggtgttagctatttatggatacactatctactcgatctcccaggagcgtttcctagatgagctagaagacgaggccaaagctgcccgagctcgagctctggcgagggcatcaagatcctaatctggatgggtattgatcatgtccaacctgctggagcccattcacatggtggatgatgccccatgaccc

SEQ ID NO: 228951 - DNA, 369 bp, Gossypium hirsutum
  unsure (1)..(369): unsure at all n locations
cccacgcgtncgctactattacacttccggaaaaaaatcatggccaccgtcacgacgcaagcctctgccgctgttttccggccatgtgcatcgaaaacacggttccttactggttcttccggtaagttaaaccgagacgtttcatttaaaccagtggcttctacatcgactagctcattcaaagttgaagcaaagaaaggggagtggttacctggtcttccttcaccagcttacctcaatggcagtcttccaggtgataatggctttgatcctcttggattggctgaggaccctgagaacttaagatggtatgtacaagctgagcttgtgaatggacgttgggctatgttgggtgttgcanggatgctt

SEQ ID NO: 228952 - DNA, 330 bp, Gossypium hirsutum
cggacgcgtgcggtcgatttacattgtggtaaccaaaaaattctcagctggatccgtctccccctccgaacagttgtcaccggagtccgtaattcagataagtgtatatgaatggagaagtccccaacataaagaaatgggttgtttactatcctggctatatcaattccgagctaacactaagttggggaaggcgaatgagactggctaaagcatgtgaaaataccacttgcgttgaaattgctgattgctgcaaccatctcatagtccctaatgccattgagattggtcaggcgtaccctcgtgatttcatgccaagagggagagtga

SEQ ID NO: 228953 - DNA, 267 bp, Gossypium hirsutum
cccacgcgtccgctcgaagtcgagagttccgacacgatcgacaacgttaaggcgaatattcaagacaaggaagggatcccaccagaccaacaacgtctcatcttctccggaaaacagctcgaatatggccggaccttggccgattacaacatccagagggagtacaccctgcatctcgaacttcgtctacgtggtggcatgcacatctttgtcaaaacagtgaccggcaaaaccataactttggaagttgacagctctgataccatt

SEQ ID NO: 228954 - DNA, 388 bp, Gossypium hirsutum
cttatagtaatcatggtgaggaacaagtcagttttcgtagttttgctcttttctcttttcctttcctttggcttgctttgctctgccaaagacttccccggcagaagaagcgaggatgatcctcaacagaggtacgaggactgccggaagcgatgccaattggagacacgtggacaaacggagcaagacaagtgtgaagacaggtgtgaaacgcagttgaaggaggagcagcagcgtgacggagaagatcctcagaggagataccaggattgccgacaacactgccaacaggaagaaagaaggctgcgtccacattgcgaacaaagctgcagggaacaatacgagaaacagcagcagcagcagcctgacaagcaattcaaggagtgtc

SEQ ID NO: 228955 - DNA, 380 bp, Gossypium hirsutum
  unsure (1)..(380): unsure at all n locations
caactgtgcactactctactctactcaactcaactcaactcagcgccatctttgctctattttctcaccacacgaaaaatggcagctaatattataacccaatcatctctgcttcagccaaaacctgcactttctgctaaaacccttcaaatcccatctctgcatcgcttatccggcctacctcctccatcaagggttggcttttttctggaaaagaaaacggggattgttggaaaagctccattaaaatcggctgtatcggactcaacctcgtcagttttggagaacatgaaaaacagcaagaatcccattgtcgtcattgacaattacgacagtttcacttacaatctttgccagtatattggagagctnggatgtta

SEQ ID NO: 228956 - DNA, 365 bp, Gossypium hirsutum
ggcggagcagacagaggaggaggcggcggcggagaaagaggaggaaacgatgtggagctggtttgcaaaacacttcaggtagaacacaagctgttctacttcgatctcaaggagaacccacgcgggcgttatcttaaaatctcggaaaagacatcggctaccaggtcaaccatcatcgtcccttcttccggcatctcctggttcctcgatcttttcaattactacgtcaactccgacgaccacgacctcttcagcaaggaattgcagcttgacactaaagtcttttactttgacattggcgagaaccggaggggtcgtttcttgaaggtgtctgaagcatctgtgagcagaaaccgcagtaccat

SEQ ID NO: 228957 - DNA, 334 bp, Gossypium hirsutum
atgcggccgtagcgagcagccctctacatcctcggggacaaagcctatattaagggtgtgcggccagacccactgcagcatggggagctggtgcccattgaggtatttgaggcacggcaggtgaaggccagcttaaagaatctgctgaaggcgtgtgtccaaggctgccctgctgctgagcccaacccagcctccttcctgcgctcgctggaggactcgtaatggctgatccagatccacaagctgctgcaggtgtctgtgctggtggaggagctcctggattcacgctcctctgtgctggtgggcctggaggacgactggaacatcaccaccc

SEQ ID NO: 228958 - DNA, 351 bp, Gossypium hirsutum
gttctttgggccttttgtgtttatttggaagcagtttcagtgatgccacagcttcgtatgatgcagaatgcaaagatgattgaaccatttacagcccattatgtgtttgcacttggtatggccagattcctagcctgcgctcattggattatccaggtgtatgagacaggagggaggtatctgttcttggtgggatatggttacctttggtttcccatggctatacttgcagaaattgttcaaacattcatcttggttgacttctgttactattatattaagagtttcatgcagggccaactgataattagaatgccagtttagatgtattgaaattatgttagacaaaga

SEQ ID NO: 228959 - DNA, 379 bp, Gossypium hirsutum
gaccttcaaatcagtacagtattttgtgacagtcagagtgccatcttctttacaaagatcaaatgcttcatgagagaacaaaaacacattgatgttcggtatcatttggttcgtgatattattgctcgtggtgatattgttctaagcaaaattagtactaatgaaaatcctacaaatatgatgactaagtcacatttcataaccaagtttgagcattgcttagacttggttggtgttcattgttgaagttaacccttaaggggttttctggaagaggtggagaacttgttcgttgagagttcgagataaagaacttgttcattgagagttcacgatgaagaacttgttcattgagaattcgcgatgaagaaattgttca

SEQ ID NO: 228960 - DNA, 360 bp, Gossypium hirsutum
gtatagaaaaatggctactccatcaacactttgctgtgctatacttctcttcctatttccattacaattcatggcaacaacaaccccttcttgccccggtgattgcgagcctaatgatgccgatgacaatgatcgatttcattttgctcaaaacttagagttccttgaagctgagttcttcttgtatggtgcacttggcaaaggcctcgacgcctttgaacccgaatttgctaaaggcggaccacctccgattggtggcagacgggccaatctcgactaccttacccgtcggatcatcgaggaattcggttatcaagaaatcggtcataatagggaaattgtgagaagaaccggtgggat

SEQ ID NO: 228961 - DNA, 388 bp, Gossypium hirsutum
cttttatatctaagatggcttacattaataccctactcatcatgttctttgttttctgttttccttcaatggttctttccgaatcgttccgatcgattcaattgccaccgaatgtcacgggtcccgaatccattgccttgagctggcaactggacgattttacgtcggtgtaactgatggtagaattttgcaatataacggaccaactgttggatttatggagtttggttccaccggtcgaaataggactaagacgatgtgcgatggcattactgatccggatttgggtccgatgtgtggaagaccattaggtttagggttccattacgctacgaatcagttgtatgtttgtgatgcataccttggtctcatggtgttagggtccggc

SEQ ID NO: 228962 - DNA, 387 bp, Gossypium hirsutum
ggtctgtcaaagccggtctccagttcccagttggtaggatcggccgttacttgaagaaaggaaggtattcacagcgggtcgggaccggagccccggtttacttggctgcagttcttgagtacttggccgctgaggttctggaattggctgggaacgctgcacgtgacaacaagaaaaacaggatcatcccaaggcacgtgctacttgccgtgaggaacgacgaagaattagggaagcttctcgccggcgtaaccatcgctcacggtggtgtgttgccgaacattaacccagttcttttgccgaagaagactgaaaggccgccggcaaagaacccaaatctccatcaaaggccaccaagtctcctaagaaagcttaaattgatttaac

SEQ ID NO: 228963 - DNA, 367 bp, Gossypium hirsutum
gagcctggcatctttgctgatcctgaaggaaagggtcttcgggcacttaccaaagcccagttggatgagattctaggtccagctgaatgcaccattgtttcttcattatctaacaagcaagtggactcctatgtcctttctgagtctagcctctttgtctatccatacaagattataatcaaaacctgtgggacaactaagttgcttcttgctatcccacccatcttgaaattggctggcagtctatcccttgctgtaaaatctgttaggtatactcgtgggagttttatattccctggtgctcagccatttcctcaccgaaacttctctgaagaggttgctgttcttgataactatttcgggaagc

SEQ ID NO: 228964 - DNA, 368 bp, Gossypium hirsutum
atagtttgcctccttcatcgacaaggtgcggttcttagagcaacagaataaggtcctggagaccaaatggaagctgctccagcagcagacgaccagcacctccagcaaaaaccttgagcccctctttgagacctacctcagtgtcctgaggaagcaactagataccttggtcaatgacaaagggcgcctgcagtctgagctgaagaccatgcaggacagcgtggaggacttcaagaccaaatatgaagaggagatcaacaaacgcacagcagctgagaatgactttgtggtcctcaagaaggacgtggatgctgcctatatgaacaaggtggagctggaggccaaagtggacagtcttaatgatgaga

SEQ ID NO: 228965 - DNA, 375 bp, Gossypium hirsutum
cggacgcgtgggtgaatgcccacagcattgtttacatcacaaggggaaatggaaggattcaaattgtgtcggaaaatggagaggcgatattcgatgagcaggttgagaggggtcaggtcataaccgtaccccagaatcatgcagtggtgaaaaaagcaggaaggcgagggtttgaatggatagcattcaagacaaatgccaatgctaagattagtcagattgctggacgtgtctccattatgcgaggattgccggtggacgtgctggccaactcctttggtatatcccgggaggaggccatgaggttgaagcataacagacaggaggtgtcggtttttagcccaaggcaaggctcgcaacagtagatcaaacaac

SEQ ID NO: 228966 - DNA, 337 bp, Gossypium hirsutum
cccacgcgtccgagaaagaacatctatggcaagcgaggcggctgtggaagttaacgccatatcggcggcggcgccagaggcggcaacaacaacaggggcagagaagcaaccacataagctcgagagaaagtggaccttttggtttgataaccaaacagggcataaacaaggcgccgattggggtacctctctacgcaaggtttacacatttgacaccgcagaagaatgctggtgtttgcatgatcaactattcaagcccaccacggtggccaaaaatactgactatcagttgtgcaaggccgggaacgggcccaaatgggcagatcccctgtgtgct

SEQ ID NO: 228967 - DNA, 402 bp, Gossypium hirsutum
atggcaggccccggggcccgcccgtgactacagccagtaccacaggacgatcgaggagctgcagaacaagatcctcacagccaccgtggacaatgccaacatcctgttgcagatcgacaatgcccgtctggctgctgatgacttccgcaccaagtttgagacagagcaggccctgcgcctgagcgtggaggccgacatcaatggcctgcgcagggtgctggatgagctgaccctggccagagccgacctggagatgcagattgagaacctcaaggaggagctggcctacctgaagaagaaccacgaggaggagatgaatgccctgcgaggccaggtgggcggtgagatcaatgtggagatggacgctgccccaggtgtggacctgagccgcatcctgaacga

SEQ ID NO: 228968 - DNA, 314 bp, Gossypium hirsutum
acgcgtgtctgtcactccgctcagcttcggccctttacagccaaatacctttctcgagcgtttcttttttaactctccaggtcttcacgaatccataaaatttcaccaagaagaagaagaagatgtcgtggcaaacatatgtagatgagcacttgatgtgcgaaatcgatggcaatcatctctcctccgccgccatcgtcggccacgatggcagcatttgggcccagagctccaatttccctcagttcaaacaagaagagattaatgccatcatgaatgacttttctgaacctgggtcacttgcttcaactgga

SEQ ID NO: 228969 - DNA, 255 bp, Gossypium hirsutum
gcagaaaatatcacaaatcttcttctccttctcagaaatcttagtatcatcactatggcctcaaatcccaaggtcttctttgacatgacgatcggtggtcagcccgctggtcggattgtgatggagcttttcgcagattgcactcctcgcactgcggagaacttccgtgccctctgtactggctaaaaaagccgtcggccccaacggtgagcccctccactactaaagctcttctttccatcgtgtgatccctaa

SEQ ID NO: 228970 - DNA, 361 bp, Gossypium hirsutum
cccacgcgttcataatcactacacatcggattgtttccagaaatgaaagaggtttaatctataaacaatttgataggagtcctgtcctaaccgtaccccaaacacgtgcggtagttattatatgggtagttattacatgcaaagaaacatcttctaataccaaggctcatgctaagatatgtcaaattgcttgacgtttctccaatcatctaggattgcctgtcgacgtgctggccaacttcttttgtatatccccggaggaggccatgaggtttaaacataacaaacatgaagtgttggtttttaacccaatgccatgcccatgtcgagttcatacacagttccccagatgggagacaca

SEQ ID NO: 228971 - DNA, 387 bp, Gossypium hirsutum
atcaccctgaaaaccacaaaagcttgagtgattcttcttttcatcatcttctcagtcacaccatcatcctttttgtttggtgtggccaacgctacaaatgaacctgtgctcgacactgatggcaacgaactccaaacaggcaccgaatactacgttgtgtcggcgatatggggcgctggtggtggtgggcttgccctaggcaggccaagctggaacccatgcccggaagtcgttgctcaaagacgatctggcgacgacggtataccggtgatattttctagttcgcactccgacgatggagtagcgcgcctatcctctgtcataaacatagagtttgctccgctcagacccagactttgtcgaacaacaacggtgtcgaaggtcgat

SEQ ID NO: 228972 - DNA, 371 bp, Gossypium hirsutum
atcaccactattattattattaataataattacacataggattgttgtaagaattgaaagaggttaaatatgtcaaatatttgttaagagtacttgtcatataataagccataagcgtgtggtagttattatatgggtagttattacatgcaaagaagcatttgctaatttcatgaatctttttattttatgttattttaattttagtcacagcaacagtgaaagtaaatttgccatttgggaagcctagggtactgcagaagaacgtggacaactgtctcctttaccacatggaatatgtcagtcgatttggaaaagctatgacgatgcgcatgtggagttcatacacagttccgcagttatgagacaca

SEQ ID NO: 228973 - DNA, 379 bp, Gossypium hirsutum
atttgccccttggaaattataagataattcattttgttgttgtgcaagttgaaaggagtttaagtaccgaactgatgtcgattcttgggttaatttgtaggaatgttgcatttgcctttctgcttacgatgatggagttgagctacgggaacttcgttgcggtcaccattttcattgtgcctgtgtagataagtggctacgcatcaatgctacctgtccactctgcaaatacaacattttaaagagtagtagccacgaggaagtgtagtaagaagggaaacaaatatttagggtcacatctacaacctctgattgctattttagctcgacagaatatatgcacggcattcaatattggcctttgtgggggtcttatcat

SEQ ID NO: 228974 - DNA, 369 bp, Gossypium hirsutum
gtgatggtgaaattagatactggagtatcaaccacgggagctgtgcaagagttttcaagggtggtactgctcctggtacggcccagttaagatttcaacctcgctttggaaagtatcttgctttagctgcggagaatgttgtatcaatattggatgccgaaactcaaacttgtcgacactcattacagggacatacaaagctgatccattccgtatgctgggacttgtcaggtgagcttctagcatctgtcagtgaggactctgtcagagtttggagctttagatcagggagtgaaggggaatgtgttcatgaatggagttgtaatggcaacaagtttcactcttgtgttttcaatcctacgagtcctt

SEQ ID NO: 228975 - DNA, 380 bp, Gossypium hirsutum
tgcaaatgtgggagtcttgaacttgcagtgagagttttcaatcaggtgaaggaaaggaatatagtgacatacaacacaataatctctgctcatgggatttatggacttggagaacatgtttttcagttctttgaggaaatgaaggaggcaagaattaaacccaataaagtcacatttatcgcgctcttgacagcttgcaatcattgtggtcttcttgatagaagctggtcaatgtatcatgctatgatgtatgattacaatattccactaggcatggaacattactcgtgcattgtggaccttcttggtagagcagggcaccttgatgatgcatatgatctcataaaaaaaatgccagcggaacctgacatgaacatttt

SEQ ID NO: 228976 - DNA, 388 bp, Gossypium hirsutum
ctcttttagaacggataacaacaccacccttttcaagaacatcaactcagcttacttagatgccattaccatagccgatgaaaatgaaacacccccatccgacgactgtttagagactgtcatccgtggtttaaggtctgataggctgttcttcaagcctggtgaaaccagttcaatcatggaagaagcaacaaaaccaagtgaagaagaagaagaagaagaagaagaagaagaagatggggtgccttttaaagaaagtgtggtcttatcaatggagtcacgagatccatacgttgatttcagggaatccatggaagaaatggttgaagctcaagggttaaatgattgggaagagcttgaacaactcttgggttggtatttaaaagct

SEQ ID NO: 228977 - DNA, 381 bp, Gossypium hirsutum
ctctacttttaggaaagcgttcctcaccgagtttcaaccaaacccttttgagttttccacagatttcaccagtttatctggtatctcactcgatcaaaacagggtctccaaggtctctcgtgggtagtttgagatttgatcatactatggctgctgagtcctccaaggggtcagttcatgacttcactgttaaggatgcaaaaggaaatgacgtcgatttaagcatttacaagggcaaggtcctcttgattgtcaatgttgcatctcaatgtggcttgaccaactccaactacactgagctgagtaaattgtatgagaaatataaagatcaaggtttcgagattctggcatttccatgtaaccagtttgggggtcaagagc

SEQ ID NO: 228978 - DNA, 388 bp, Gossypium hirsutum
gtcaaagtttctctctctctctctctctctctattgttgaagttcataagcttttgtatcaatggctgaagtccgtgaccgcaacctgcctcaccaagttcaagttcacccacagtaccgtttcgacaatacaaccggaggcggttacggtgcaaagaactatcacagtggaccatcaacaagccaagttctagccgtccttacacttctccccattggtggtacactgcttgcattagccgggttaacactggccggcaccgtcattgggctgatgctagccacaccgctgttcatcatcttcagcccagttcttgtcccagctgccattgccattgccatggcagtgacggggttcttgtcgtcgggggcgtttgggttaacaggg

SEQ ID NO: 228979 - DNA, 275 bp, Gossypium hirsutum
acgcggacgcgtgggcggacgcgtggggagagattagaggatcaaaggcttattgatgatatatgtaagcataatgatgctgtattgcatttgttggtcccgaaatctgccaaagttagggctaagcctggtgccaagaatttcgagttgtctatcatggcaccaaaatcgaaaggtaagcgagataatgatgttggtgagacaaacggtggagtacaatatgaagctgatagaaagtttgtaccaagaaaaccttccgagagggatgttatatt

SEQ ID NO: 228980 - DNA, 334 bp, Gossypium hirsutum
atcaaccgcaacctggacctggacagcatcatcgccgaggtcaaggcccagtatgaggagatcgccaaccgcagccggaccgaagctgagtcttggtaccagaccaagtatgaggagctgcagcagacagctggccggcatggcgatgacctccgcaacaccaagcatgagatctctgagatgaaccggatgatccagaggctgagagctgagattgacaatgtcaagaaacagtgtgccaacctgcaaaacgccattgcggatgccgagcagcgtggggagctggcgctcaaagacgccagaaacaagctggccgagctggaggaggccctgc

SEQ ID NO: 228981 - DNA, 402 bp, Gossypium hirsutum
atgacttggtgtgtctcgccccaggaaggagctgaaggaccccgaccagctctacacaaccctcaaaaacctgctggcccaaatcaaggtggggagaccaggttgcctttccggggcccctgcaccaatggctgtggcctcttgatgcagtgtgaggtgggtggcgttctcgggctggcgtgggtgcagcaaggctgtccccagctcggctcttctctccagtcgcaccccattgcctggcccttcatggagcctgtgaagaagtcggaggcccctgactactacgaggtcatccgcttccccattggtgaggaccctccattccatcttcttcccccctcttccatccccatacctgctcctgccctcactgggccctgcagccccatggggcccaccccg

SEQ ID NO: 228982 - DNA, 391 bp, Gossypium hirsutum
aatcggtcgaaacttttctgacatttttttgagcattcaaactcaacatctttttgaagtagtttcgtcatcggtgtagctatcatcgaaaaaccctttacaaaccgttggtagtaaccagcaagtcccaaaaagctcctaacttcagtagcattccttggaggcttccaatcgagtatggccgaaattttgctcggatcaactctaatacccgatacggatactacatgccccaaaaagctaacctctctcaaccaaaactcgcatttattgaattccgcgtataactgcttgtctcgtaaaatctgtaatactaatatcaaatgcttggcatgttcagtttcatctcgtgaataaatcaagatgtcatctataaacacaaccacaatcc

SEQ ID NO: 228983 - DNA, 396 bp, Gossypium hirsutum
atcattgatgccccaggacacagagacttcatcaaaaacatgattacagggacatctcaggctgactgtgctgtcctgattgttgctgctggtgttggtgaatttgaagctggtatctccaagaatgggcagacccgagagcatgctcttctggcttacacactgggtgtgaaacaactaattgttggtgttaacaaaatggattccactgagccaccctacagccagaagagatacgaggaaattgttaaggaagtcagcacttacattaagaaaattggctacaaccccgacacagtagcatttgtgccaatttctggttggaatggtgacaacatgctggagccaagtgctaacatgccttggttcaagggatggaaggtcacccgtaaggat

SEQ ID NO: 228984 - DNA, 388 bp, Gossypium hirsutum
ctcaacactttattcttctctctccattaatcttcattgaaagaaaatcatctttgctttcgcccatgaccactgtttatgacccttcacaccatctcacctccaaaaatttgtgtttcaaggaccttgaaatccctccaaggaaaaagcaactccattgttgccccaacgccgccgccatggaacttccccaccacgaagctaggctccacaaatacctcccctccaatgaagacgatgacggtaccgatgatccatacggcaccgaccatttccgtatgtacgagttcaaagtaagaaggtgtacaaggagccgtagccatgactggactgactgtcccttcgctcatccaggtgaaaaagcccgccgtcgtgaccctactcggta

SEQ ID NO: 228985 - DNA, 286 bp, Gossypium hirsutum
gaaactttctgctccatgaggatcaaggagaaccttgctgaccctgaacgtgccgacattttcaacccacaagccggtcgtatttccaccctcaacaggtttaacctgcccatcctccaacgacttgagctcaacgccgagaggggtgtcctctacaacagaactggtttgattccacaatggaacgtcaacgctcacaaaatactctacatgttaagaggctgcgccagaagccaagtggtgaaccacaacagtgacagcaggttcgacgataacgtggagcaag

SEQ ID NO: 228986 - DNA, 370 bp, Gossypium hirsutum
atggatgagtcatggagggaggagcagcctggcttctgacagcatcccagcctccctgggccaggtgtgtgcatcctgtccccctgatggatccctccctccatcagtgccatctccctcttctacgagctctcggagaatgacttgaacttcatcaagcagagcaaggacggcgccggcttcctcattaacctcatcgactcccccgggcacgtcgacttctcctcggaggtgaccgctgccctccgagtcactgatggtgcattggttgtggtggactgcgtgtcaagcgtgtgtgtgcagacggagacagtgctgcggcaggccattgcggagcgcatcaagcctgtgctgatgatgaacaagatgg

SEQ ID NO: 228987 - DNA, 326 bp, Gossypium hirsutum
gagaaacggcgcctccgccctacaacaatggttcacgtctccttttaccgcaactatgggaagacatttaagaagcctcgtcgtccttatgaaaaggaacgattggatgctgagttgaggctggtgggagagtacgggctgcgatgcaagagggaactctggagagttcagtatgctttaagccgaatcagaaatgctgctagggatctattgaccctcgatgagaagaacccgcgtcggatctttgagggtgaagcccttcttcgcaggatgaatcgataccgactattggatgagagccagaacaagcttgattatgtcttggc

SEQ ID NO: 228988 - DNA, 390 bp, Gossypium hirsutum
gaagaacatggcaatttcagggtcctccaaaggtttgcttcaaggcatcctattcttaggggcatcaatgagttccgcttatctatcttagaagcaaaccccaacactttcgttctcccacaccattgtgacgctgagaaaatttaccttgtcaccaacggaagaggaacgcttacgttcttgacacatgaaaacaaagagtcctacaatatagtaccgggagttgtagtcaaagtcccagcaggaagcactgtgtacttggctaaccaagacaacaaggaaaagctaatcatagcagtgcttcaccgccctgttaataaccctggacaattcgaggaattcttcccagctggaagccaacgccctcagtcatatctccgagcctttagt

SEQ ID NO: 228989 - DNA, 342 bp, Gossypium hirsutum
gtccaaaaatgatgatcggagaatcaatccaaccaaatcccaccatcaaaatccccgtaggggacccattcaacgatccgacggctagctttcactccgttaactttaactacaacaatgcagtcagtagtccttgccccgtcgattacctcgggtctctccaccgttacctaccgtcaaacgactacgagtccgattcgctgagtgatgattcggacttacctgttgatgcattctcatgcgaccatttccggatgtacgagttaaaggtgaggaggtgtgctcgtggaaggtcacatgactggactggggtcccgacccctaacctggttgggaaggccc

SEQ ID NO: 228990 - DNA, 365 bp, Gossypium hirsutum
atcacccaccttcaccatgtctgacgaggaagttgaacaggtggaggagcagtacgaagaagaagaggaagcccaggaggaagaggaagttcaagaagaggagaaaccaagacccaaactcactgctcctaagattccagaaggggagaaagtggacttcgatgacatccagaagaagcgtcagaacaaagatctaatggagctccaggccctcatcgacagccactttgaagcccggaagaaggaggaggaggagctggtcgccctcaaggagagaattgagaagcgccgtgcggagagagcggagcaacaaaagattcgtgcagagaaagagagggagcgccagaacagactggcggaggaaa

SEQ ID NO: 228991 - DNA, 396 bp, Gossypium hirsutum
atcggactgcggcccgctgatttctgtggtcatgcatgttagatagtcttccggcctccactgcctcatcttcctgcccactgacgacacgtgggactggttactggccaatatacatgtgcgcaatgtccagttcttcttccatgaagccctcacacatctgatgcacttacacctgatacatagtgacttaaccctgactaccctgcgccagttgtgcgactgacacattgtcttcaagatgctgattccgcacacccggtacacgctacacatcaacatgctcgcacgtgagcttgtaatcgtgacactccatgatgcggacaaattcacaggcatcgaggtcgaacgcttctctgagattgttccaacgaacatgctgcagctcgactatta

SEQ ID NO: 228992 - DNA, 288 bp, Gossypium hirsutum
aaacgatgttatcccaaattttgcttttggatgtattaacagcatctctggtaattcaatcccaccccaagggctattgggtatgggccggggacccatgtcactactttcacaatccgggtcgctatacaaaagtgtgttttcctattgtttgcccagtttcaagtccaattacttttcgggctcccttatactcgggcctgcaggtcaacccaagaatattcgaaccaccccgctgttaaaaagcccacaccggcccttcctttactacgtaaacctaaccgaggt

SEQ ID NO: 228993 - DNA, 378 bp, Gossypium hirsutum
  unsure (1)..(378): unsure at all n locations
atttgaaagaaaaaattcgagttgattcgaataactcgattaactcgaataactcgattcgtttaatttgaaatttgaatttttttcattttttcgagtcaaatcgagttttgctcacccctagttttgagatgctcgactaatggagtttttacggttaactcagcttatagttctctcatggaaaatattttacatcttattgagggaaaatggaggctttcttggcatttcgatggcccattacctgtcagacaattcctttggttggttattagagaacggttacttactaatgctgaacactacataagaggtatgtctgataacgcttcatgtaagctntgtggtactgctgatgagtctattatccatgtt

SEQ ID NO: 228994 - DNA, 402 bp, Gossypium hirsutum
atgtggattcgagaagtgacaggctatgtcctcgtggccatgaatgagttctctactctaccattgcccaacctccgagtggtgcgagggacccaggtctacgatgggaagtttgccatcttcgtcatgttgaactataacaccaactccagccacgctctgcgccagctacgcttgactcagctcaccgagattctgtcagggggtgtttatattgagaagaatgataagctgtgtcacatggacacaattgactggaaggacatcgtgagggaccaagacgctgagatagtggtgaaggacaatggcagaagctgtcccctctgtcatgaggtatgcaaggggcgatgctggggtcctggaccagaagactgccaaacattgacccataccatctgtgct

SEQ ID NO: 228995 - DNA, 365 bp, Gossypium hirsutum
atccgcctgtccgctcgcgccgctcttcgctctgctcaacaactgggtggagatccgcctggacgcgcgcaagttcgtctgcgagtaccggcgcccggtggccgagcgcgcccaggacatcggcatctggttccacatcctggcgggcatcacgcacctggcggtcaccagcaacgccttcctcctggccttctcgtccgacttcctgccgcgcgcctactaccagtggaccagcgcccacgacctgcgcggctttgtcaacttcacgctggcgcgcgccccgccctcgttctccgcggcgcacaaccgcacgtgcaggtatcgggctttccgggatgatgatgggcattattcccagacctact

SEQ ID NO: 228996 - DNA, 394 bp, Gossypium hirsutum
atctttggattccaggaacagctaagcctgggcgctggacttacacactgaacaatacccaccattctctgcaagccctgaaagtggcagtgacctctcgtgcctccaactcagctgtgcccccagccactgtggaagcctttgtggaaagagacagcctccattttccccagcctgtgatgatttatgccaatgtgagacagggattttatcccattcttaatgccactgtcactgccacagttgagccagagactggagatcctgttacactgagacttctcgatgatggagcaggtgctgatgttataaaaaatgatggaatttactcgaggtattttttctcctttgctgtaaatggtagatatagcttgaaagtgcatgtcaatcactc

SEQ ID NO: 228997 - DNA, 352 bp, Gossypium hirsutum
cccacgcgtccgactggcgcaccttgtagagaatgaaattaataagcgcctgaaagcaggcacttacaaggggaagaaatttaatgctatttgccacttctttggctatcaagctcgtggatccttaccatcaaaatttgattgtgactatgcctatgttcttggacatatctgctatcatattcttgcagctggtctaaatggttatatggcaactataaccaacctaaagaatcctgtgaacaagtggcgttgtggtgctgcacctcttccagcaatgatgactgtgaagcgctggtctcaaaatcccaatgccgcgtcaattggaaaacctgctatacatccagctact

SEQ ID NO: 228998 - DNA, 386 bp, Gossypium hirsutum
cccacgcgtccgaaattcttcccttctggacaggaaaatcctcagtcatatttacgaatcttcagccgtgaaattcttgaggctgtcttcaatacacgaagtgagcagctagacgagctgtttggtgggaggcaaagccatcgaaggcagcagggacagggaatgttccgtaaagccagccaagaacaaataagggcattgagccaagaagctacttcaccaaggggaaaaggtagcgagggatacgccttcaacttattgagccaaacccctcgctactccaaccaaaacggccgcttctatgaggcttgccctcgtaatttccagcagcaactccaaaaaagggattcctccgttgttgccttcgaaataaacaaaagatcgat

SEQ ID NO: 228999 - DNA, 379 bp, Gossypium hirsutum
atgtgaatgggaaggggtcactcaagggacagcccggagacatctaccaccagacctgggccagatactttgtgaagttcctggatgcctatgccgagcacaagttacagttctgggcagtgacagctgaaaatgagccttctgctgggctattgagtggataccccttccagtgcctgggcttcacccctgaacatcagcgagactttattgcccgtgacctaagtcctaccctcgccaacagtactcaccacaatgtccgcctgctcatgctggatgaccaacgcttgctgctgccccactgggcaaaggtggtactgacagacccagaggcagctaagtatgttcatggcattgctgtacattggtacctggactt

SEQ ID NO: 229000 - DNA, 384 bp, Gossypium hirsutum
atgctttgctggtggtgatgggcttctggtgggcagtgagaaggtgaccatgcagaacctcaacgaccgcctggcctcctacctggacaaggtgcgtgctctggaggaggccaacgccgacctggaggtgaagatccgtgactggtaccagaggcagcggcccgctgagatcaaagactacagtccctacttcaagaccattgaggacctgaggaacaagattctgacggacacagtggacaatgccaacgtacttctgcagattgacaatgcccgtctggccgcggatgactttcgcaccaagtatgagacagagctgaacctgcgcatgagtgtggaggccgacatcaatggcctgcgcaaggtgctggatgaactgaccct

SEQ ID NO: 229001 - DNA, 362 bp, Gossypium hirsutum
acgggcaggttccaggaccagcaccagaaagtccgacggttccgccagggtgacatcattgctttgccgcagggtgtggttcactggagctacaatgatggcaatgagcgtgttgatactatcaatctacttgacactggcaacagtgctaatcatctcgacaacatacctagaagatttcatcttgctggtaacccagaagaggaacagatgcaactgaggaggctggcacagcagatgcaaggaagaagtgtgaggtgctaggagtttgtagaatatgatattgtgcgacttttggaatttaatgctgacaattccattcgacacttattcaaaaaatttgttgatgacactttcacaca

SEQ ID NO: 229002 - DNA, 321 bp, Gossypium hirsutum
attgcgggaccagactattgtgacctggagaatgtacaggaattattcactgtgcaggatcaacacgatctcctcactctaggatggattcatacccatcccactcaaactgcattcttatccaccgttgatcttaacactcactgttgctatcaactcatgtcaccagcggccattgccattgtttgctcaccaaagcataaagacactggcatcttcaggctcaccaatgctggcatgcttgaggtttctgctcgtaaaaaaaagggcttgcatccacacaccaaggagcccacgctgctcagtatatgcaaacatgtg

SEQ ID NO: 229003 - DNA, 380 bp, Gossypium hirsutum
atgccatttctgttggagcaacctcttttctctttactgaatacaagtatcttggtatcttcatgtgtgtatttggtgctatcatattcctcttccttggttcagttaagggcttcagcaccaaaagcgaaccatgcacatacagccagggaaacacttgcaaaccagccctggcaaatgccatctttagcacaattgctttcttgctaggggctcttacttcagtcctctcaggttatctagggatgaagattgcaacttatgccaatgccagaacaacattagaagcaaggaaaggtgttggcaaggcatttataacagctttccgctctggagctgtcatgggtttcctgcttgcagccaatggccttttggtgctc

SEQ ID NO: 229004 - DNA, 401 bp, Gossypium hirsutum
atgtttttatgtggatagtgatatggtcaatgaattcaagttggaattggtagaaaaactttttgctgaagacacagaagcaaagaacccattttccactcaggacacagatttagacttggagatgttagctccctatatcccaatggatgatgacttccagttacgttccttcgatcagttgtcaccattagaaagcagttccgcaagccctgaaagcgcaagtcctcaaagcacagttacagtattccagcagactcaaatacaagaacctactgctaatgccaccactaccactgccaccactgatgaattaaaaacagtgacaaaagaccgtatggaagacattaaaatattgattgcatctccatcttctacccacatacataaagaaactacta

SEQ ID NO: 229005 - DNA, 339 bp, Gossypium hirsutum
cccacgcgtccgttcatttaatattgtgcagatgtatacaccattaatgtttcaaaagggaagaactatcttctcagaatcatcaatgcagcccttaacatggagcactttttcatggttgctaaccatactatgactgttgtggaaactgatggagaatacacaaaacccttcaaaaccacgttcctaatgctgactccaggccagacatacaacgtcttgatcaaagcagacctgtccattggcaaaaacatggcaatggcccctcacatgccagccaaaaacgtccccttcttgatgaaaacttcttgtgggattctccgttatgcatcacccaca

SEQ ID NO: 229006 - DNA, 352 bp, Gossypium hirsutum
cggacgcgtgggcggatccacctcgggtgagaaaggtaagttcgggttgacaacgatccagattttaagggttgttaaaaagcttcaggattcggggatgcttgattgtctgcaattgctacacttccatattggatcccaaatcccttcaacagctttgcttcaagctggtgtcgtcgaagctgctcaaatctattccgaattagcccgtcttggtgctgacatgaaagttattgacattggaggcggccttggaatcgattacgacgggtcaaaatccggtaattctgatctctctgtttcttatggccttcaggaatatgcttcaacttgtgttaatgctgttcgggtt

SEQ ID NO: 229007 - DNA, 403 bp, Gossypium hirsutum
attgctagtctgtcccaagtttttcttcacctatccaccttggatcgtagtgtgatttggtctaaatctatactgaatgcgcgctgcaagatatgtagaaagaaaggcgatgctgaaaacatggttctttgtgatggctgtgataggggtcatcatacctactgtgttcgaccaaagctcaagactgtgcctgaaggagattggttttgtccagaatgtcgaccaaagcaacgtcctagaagactctcctctagacagagaccatccttggaaagtgatgaagatgtggaagacagtatgggaggtgaggatgatgaagttgatggtgatgaaaaagaaggtcaaagtgaggaggaagagtatgaggtagaacaagatgaagatgactctcaagaagaggaag

SEQ ID NO: 229008 - DNA, 288 bp, Gossypium hirsutum
acactgtcgaacaagttggaacgctaaagcgcgctggtgcccggccccagtttccgggatgtgagacttgtacctgctcacttagaattatctctgcaccaaccatggccacctttgtgcagctcagtaccaaacccaacatgcctattgtgggcctgggcacttgtacgtctactgttcataaactgaaagaagcagcgaaggtggacactgatgcatgggctcgacacattgactgagcctatgcctatgagaatgaacatgacgtggcggatgccatgcacgaga

SEQ ID NO: 229009 - DNA, 376 bp, Gossypium hirsutum
gctgcagctatggttgccgctcatgtttctgaactatttagacagtcaaaggcttgtatgcatgcgctctctgtcctaatgcgatgcaagtgggacaatgaaatttacactagggcatcatcgttatacaatctcattgacattcacagcaaggcagttgcgtccatcgttgacaaggctgaacctttagaagcacaattgatatatgcacctgtttgttttgatagcagaacacaatgcaagcgtacaaatactgcttgctgggatcctctgcgagtatcttcttcagaatatgaagattcaattcattcagccaataatcttagatgtcagatggtgttaacatcagatgaacgcttaggaaatccacgggaaa

SEQ ID NO: 229010 - DNA, 307 bp, Gossypium hirsutum
cccacgcgtccgcaaagacttccccggcagaagaagcgaggatgatcctcgacagaggtacgaggactgccagaggcgatgccagtcggagacacgtggacaaacggagcaagacaagtgtgaagacaggtgtgaaaggcagtttaaggaggagcagcagcgtgacggagacgatcctcagaggagataccaggattgccgacaacactgccaacaggaagaaagaaggctgcgtccacagtgcgaacaaagctgccaggaacaatacgagagacaacagcagcagcagcctgacaagcgattcaag

SEQ ID NO: 229011 - DNA, 342 bp, Gossypium hirsutum
cccacgcgtccgactggcgcaccttgtagagaatgaaattaataagcgcctgaaagcaggcacttacaaggggaagaaatttaatgctatttgccacttctttggctatcaagctcgtggatccttaccatcaaaatttgattgtgactatgcctatgttcttggacatatctgctatcatattcttgcagctggtctaaatggttatatggcaactataaccaacctaaagaatcctgtgaacaagtggcgttgtggtgctgcacctcttccagcaatgatgactgtgaagcgctggtctcaaaatcccaatgccgcgtcaattggaaaacctgctataca

SEQ ID NO: 229012 - DNA, 396 bp, Gossypium hirsutum
atcgttgggctggtggggaggccaagtttgggagcaaatagggtctgattgagcttgtgttgcactggagggacagccctgggtctaggggagagaatccctgagtgtgagacccgccttccctggccccagcccctcccagttcccccagcgacggccacttcctggtccccgacgcaaccatggctgaagaacaaccgcaggtcgaattgttcgtgaaggctggtagtgatggggccaagattgggaactgcccgttctcccagagactgttcatggtactgtggctcaagggagtcaccttcaatgttaccaccgttgacaccaaaaggcggaccgagacagtgcagaagctgtgcccaggagggcagctcccattcctgctgtatggcactg

SEQ ID NO: 229013 - DNA, 378 bp, Gossypium hirsutum
cgcttctcgaaatttgcaaatccgctaatccccagccagccgttgtctgggcctcctccagttccgtttacggtctcaacgaaaaggttcctttctctgaggccgacaggaccgaccagccggctagtttgtatgccgccaccaagaaggcaggcgaagaaataacccacacttataatcatatctacgggctttcagttactggattaagatttttcaccgtgtacggtccatggggaaggcctgatatggcgtatttttcgtttacgagaaatattctgcaggggaagcccatcaccatttatcggggaaagaatcgggttgatttggcacgagattttacctacattgacgatatcgtgaaaagctgtttgggat

SEQ ID NO: 229014 - DNA, 407 bp, Gossypium hirsutum
atgcggctggctcaattaagatgaggcttctgctgcttctcctagtggcggcgtcggcgatggtccggagcgaggcctcggccaatctgggcggcgtgcccagcaagagattaaagatgcagtacgccacggggccgctgctcaagttccagatttgtgtctcctgaggttataggcgggtgtttgaggagtacatgcgggttatcagccagcggtacccagacatccgcattgaaggagagaattacctgcctcaaccaatatatagacacatagcatctttcctatcagtcttcaaactagtattaataggcttaataattgttggcaaggatccttttgctttctttggcatgcaagctgctaacatctggcagtggggccaagaaaataaggtctatgcatgt

SEQ ID NO: 229015 - DNA, 383 bp, Gossypium hirsutum
cccacgcgtccgcgagaatcatcagaatcagaaaaaagggaaaagggtgattaaagaaaagactcccatccccactgattctggccttgcttcccaacacgtagcatctaaccataacgcctgaaatccaccactcctctatttatttcaaaaccacttggattaaactccccctccgctccattccactctcccaaaaccaacacgccttctttgcctcgtgtttcatcagctggcgttaaactgctttctttaaagcctgcaaaatgggtgccggtggtaggatgctagttgacggtaaaaaggaggaaaaacgaggctcggtcaatcgagttccgatcgagaggcctccgtttacgctcggtcagatcaagcaagccatt

SEQ ID NO: 229016 - DNA, 382 bp, Gossypium hirsutum
cccacgcgtccgaaaaaattgaccaagataacaatgttattcaagttgtcatacttgttccaacacgagaactggctcttcagacatcacaagtgtgcaaggagctcgggaagcatttacaaattcaagtcatggtcacaactggaggtaccagtctcaaggatgatatcatgcgactgtatcaaccagttcatttgctggttggaactactggcaaaattcttgaccttgctaaaaagggtgtttgcattttgaaagattgttcaatgctgattatggacgaagcagataaacttctgtctgcagagtttcaaccttctatagagcaggtgatacattttcttgcagcaaatcgtcaaattttgatgttttcagccacatt

SEQ ID NO: 229017 - DNA, 272 bp, Gossypium hirsutum
cggacgcgtgggggataaaggcaccagtggtttgcttgttgttgcaaaggatgaacattcccatgcccatttgtcggaacagtttaagcaacacactatccagagggtctacattagtcttacttgtggagtgccttcagcttctgctgggcgtgtggacattcccattggccgtgattcaaataaccgcattcggatggttgctgtaccatgattaagtcatcatggtcgggctcgtcatgctgctagtagatataaagtaattgaagtgc

SEQ ID NO: 229018 - DNA, 397 bp, Gossypium hirsutum
attacctggcctctgtcaaagccatgcacgaggcttccaagaagctgaatgagtgtctgcaggaggtgtatgagcctgactggcctggtagggatgaggcaaacaagattgcagagaacaacgacctgctgtggatggattaccaccagaagctggtggaccaggcgctgctgaccatggacacgtacctgggccagttccctgacatcaagtcacgcatcgccaaacgggggcgcaagctggtggactacgacagtgcccggcaccactacgagtcccttcaaactgccaaaaagaaggatgaagccaaaatcgccaaggccgaggaggagctcatcaaagcccagaaagtgtttgaggagatgaatgtggatctgcaagaagagctggcctccct

SEQ ID NO: 229019 - DNA, 385 bp, Gossypium hirsutum
ggctgtacttggaggcaatgcctctccttcagctgatgatcttaagaacattcttgccagcgttggagctgacgctgaagaggaaaggctccagcttcttttatctgaagtgaagggaaaagatataaccgagcttattgcatctgggagggaaaagcttgcctctgttcccagcggtggtggtgttgctgtggcggcatctgcacccggagccgccgccgccgccgctcctgctgcagctgagactaagaaggaagagaaagttgaggagaaagaggaatccgatgatgatatgggcttcagtctcttcgactaaaactaccacgcaccgccagcaacctatcaatgaaatacggatggtttttggtttctacggaggatttct

SEQ ID NO: 229020 - DNA, 370 bp, Gossypium hirsutum
ttgacgcgtgggcggcaagcattggccttgggaatcttgggtttttctgcaaaaatgttggcggtttttgagaaagcaacaggaaatccaccggaggagctcaggcttccttcaattggattggattctgacggtaagggaactcgagaagaaatcttgcagactttcaggttgctgtggccagagtcgaccttttaccacctttcaaatggaaatttcatgacactgtcacatggagctcagagtcctttgcatccaaggtccatggttgtcatggatgacatcttctgcatctttattgggactcttgtgaacatttgcgaactcaggcgacattacggcttgtccagacaagcaacagaagccatgc

SEQ ID NO: 229021 - DNA, 306 bp, Gossypium hirsutum
atgttactgaggtctccagcgtcttctccctcctgtgtaaaatggcaactcttaaggaaaaactcattgcaccagttgcggaagaagaggcaacagtcccaaacaataagatcactgtagtgggtgttggacaagttggtatggcgtgtgctatcagcattctgggaaagtctctggctgatgaacttgctcttgtggatgttttggaagataagcttaaaggagaaatgatggatctgcagcatgggagcttatttcttcagacgcctaaaattgtggcagataaagattattctgggacttgcc

SEQ ID NO: 229022 - DNA, 318 bp, Gossypium hirsutum
atgctggaggctacggaggcggcgtgacctgtggctttggtggaggggctggtagtggctttggaggtggctacggaggtggccttggaggtggctttggtgggggttatgctggtggctttgttgattttggtgcttgtgatggtggcctactcactggcaatgagaagatcaccatgcagaacctcaacgaccgactggcttcctacctggagaaggtgcgcgccctggaggaggccaacgccgacctggaggtgaagatccgggactggcacctgaagcaaaagccagctagccctgagcgggactacagcccct

SEQ ID NO: 229023 - DNA, 326 bp, Gossypium hirsutum
cagatttttgggataaatggagggagtttgaggtgcaacatggtaatgaagataccttcagagaaatgttgcgtattaaacggagtgtctctgcaagttatagccagacacacttcattctccctgagtatctgatgcagaaggatcagaacatcgatgaagctaacgacaaaatgaaacaggctggtatctctgaggatgaaatggctgctcttgaaaggcagttactacctgcggctgataatgctattgccaaagacaactctaggaaagtagggtttgtgagtgctgcagttgagtcacaagccgatggtgggttgaaaaca

SEQ ID NO: 229024 - DNA, 396 bp, Gossypium hirsutum
atctctgatagctcccagcttactctctgcagccatgattgccagacagcagtgtgtccgaggcgggtctcggggcttcagctgtggctcagccatcgtaggcagtggcaagagaggtgccttcagctcagtctccgtgtctggaggtgctggccgatgctcttctgggggctttggcagcaggagcctctacaacctcggggggaacaagagcatctccatgagcgtggctgggtcacgacaaggcgcctgctttggaggtgctggaggcttcagcactggtggctttggcggtggatttgggggctccttcagcggtaagggtggccctggcttccctgtctgccctgctgggggaattcaggaggtcactatcaaccagagcttgctgacccc

SEQ ID NO: 229025 - DNA, 365 bp, Gossypium hirsutum
gtggagacatatttgtagtcccagcaaactttccagttacattcgttgcatcccaaaaccagaacctgaggatgactgggttcggtctttacaaccagaacattaacccagaccataaccagaggatcttcgtggctgggaaaatcaaccatgtgagacaatgggatagccaagccaaggagttggcctttggggtgtcatcgaggttggtggatgagatattcaacagcaacccacaagagtcttacttcgtgtctcgacagaggcagcgtgcatctgaataaagagttaaaggcaataataatcacatagtctcgtgtttatggactaatgtgaaattttctagttttaagcaggcatgtaat

SEQ ID NO: 229026 - DNA, 376 bp, Gossypium hirsutum
gttgattatgcttgcacaccatgtagaaagtgcacctacatttgcattcttgtggcactgtaaacagagtaactattctgacggacaagtatggacaaccgaaaggattcgcttatgtaaagttgctggaagcaaaagctgttcaagaggctcgtgtgctgaatgaatctgaattacatgaccgacagttgaaggtaatgcctaaaaggactaatgttcctgggatgaagcaatgaccgtcaatgcgattcaatccttacatgggctaccggatcatgagggcctatataccgccttattcctattctccttatggattctgcaagattcctagattcacgaggccgatgcggtatatgccctactactagaagac

SEQ ID NO: 229027 - DNA, 365 bp, Gossypium hirsutum
ccctgagaccacaggtcctaacatggtggttgatatgtgtaagggagttcagtacctgaacgaaattaaggattctgtagtcgctgggttccaatgggcatcaaaggaaggtgcaatggccgaagagaacatgaggggtatatgctttgaagtttgtgatgtggttcttcatactgatgctatccatagaggtgggggtcagatcattccaactgctaggagggttttctatgcttctcagctgactgccaagccgaggctgcttgagccagtgtacttggtggagatccaagccccagagcaagcacttggtggtatttacagtgttcttaaccagaagcgaggacatgtgtttgaggagatgc

SEQ ID NO: 229028 - DNA, 457 bp, Gossypium hirsutum
taggtcccactatagaacaagtaggtgcaacaaagcaggctgctgccgccgccgtaattcccgggattcccagcggagcctgagaagaggctgaggacggcgaaacatggctgctctaggactccagagtatcaactggcacacagtctttaaccgacaagcgcatcacacacacaagttctctagccgggagctcatcttgcggagaggccaaaacttccaggtcttaatgctcatgaacaaaggccttgtctctaacgaaagactggagtgcattgtctacacagggccttacccctgcgagtcggccatgacgaacgctgtgtttccactcttcaatggcacttacggtggctggagtgcggagctccaggccatcaatggcaatactctgactattagcatctccagtcctgccagcgcacccataggacagtacacaatggcccttcagatc

SEQ ID NO: 229029 - DNA, 360 bp, Gossypium hirsutum
ccattttccaccacaagcgtgtccagaaggttcagagattttagagagaacaaacaacaatggctgctacatctggggctgtactaaatggattaggctcttcatttctttgtgggggaaagaggagccaagcccttttgggtgccagcattggggccaaaggctcgccctcccctactgctggaactagaaagttgatcgttgtggcagccgccgcacctaaaaagtcttggatccctgctgttagaggtggtggcaacttcattgaccctgaatggctcgatggatcgctccctggagactacggatttgacccactaggtcttggaaaagacccagcattcctcaaatggtaccgag

SEQ ID NO: 229030 - DNA, 364 bp, Gossypium hirsutum
attgagtaaagaaactggcgtgctcgctctaaacagaacccttgccaagccttgtttatcagatattgagcaagtcttggctggccagggtgctggtgacggtctcaatcaagtttgttcgattcattcatcaaaccttactgaagcatcttgtcccgtaaaagatgttgatgaatttgagaacatggtaaactcttctgagcttcttgcttgatgtgaaaagattgatcctgttaaagaatgttgtgaccaagtctgtcaaggtgcaatatctgatgctgcaacaagacttgcattgaaagcttctgatcctctaagcatggatggacctcatgttttacctgagcacacaacaaggataaat

SEQ ID NO: 229031 - DNA, 360 bp, Gossypium hirsutum
tcgcccacgcgtccgcccacgcgtgcgcggacgcgtgggttccttttttatcaaaaaaccagatgtgcttggatgagcaattgagttgccagaactgcatcgatttgaaagtggatagtgaagatgcttattcatcgtgcattctggatataaacattgagaaagagactcccgacctactgaaatctaatgatgaaactgttggttattcaaaaagtgaaggcgtggttacacatttgcagaaggtgttacagagacaagcaagcttaaacagaaatcatcgaacgagagggttcatgatgcaccaagcaacagatggagaagatacaaaagagctgcatcatttgattcgaggaaaat

SEQ ID NO: 229032 - DNA, 335 bp, Gossypium hirsutum
caacgtggttatactgagctgcttgagtataagcttgttttgcaaaaggctggtgagttttttacttctgctcagcgcagtgctacagctcagcagagagaaatggaatcacagcaaatgggtgatgaaaccctagaaactcctttattgcgtgagcaagaaaccgcaacagatttatcaaagcaagtgaaattggggtttattactggtcttgttcctagggaaaaatctatggcatttgagaggattttatttcgtgcaaccaggggtaatgtgttcctcaagcaagttcctgcagaggaacccatcacagatcctgtttctggagagaagat

SEQ ID NO: 229033 - DNA, 392 bp, Gossypium hirsutum
atcagattagaatattggaagataaagggacaagtactgaattagttagagaaaatcagaaacttaagcagcatttggaagaggaaaagcagaaaaaacacagctttcttagtcaaagagagactctgttggcagaagcaaagatgctaaagagggaactggagagagaacgactagtaactacggctttaaggggggaactccagcagataagtggtagtcaggtacatggcaagtcagattctcccaatgtatacactgaaaaaaaggaaatagcagtcttacgggaaagactctctgagctggaacggaagctaaccttcgaacagcagcgttctgatttgtgggaaagattgtatgttgaggcgaaagatcaaagtggaaaacaagaa

SEQ ID NO: 229034 - DNA, 371 bp, Gossypium hirsutum
caagttcaaggttctgtacaatgcgtaaaatttcatgttgctgagaaaagatcaaagcttaagcttgagctaggtccagctttcaagaagttgaaatttgataagatgggtgaagacgttgcatctgcttggaaggaaggagaacagaagatgttttcgaatatagtgaagtcaaatccttcatcacaacagaaatgtttctgggatgagatctgcaaacattttcgtaacaaaagtagggaagaacttgtttgctattactacaatgtctttcttttgcagcgtagagcataccagaatcgggtcactccaagcaacattgacagtgatgatgaacctgaatctgcattagttgctaaaggcattgggca

SEQ ID NO: 229035 - DNA, 355 bp, Gossypium hirsutum
atggcagccggtgtgtggtctcgcgcccgacctccggaggcctagtcgagccgtgacccttcctgccgcctgcaccccaccttgccttcatgcaccttagccggctagcgctattcccattcgtggcgctgtttatcgacaagtgccgaatgatcgctgcctccgatgtgttagaactcacggacgacaacttcgatagtcgcgtatccgacacgggctctgggggcctcatgctcgtggagttacttaccccctggtgtgtacactgcaagatacttgctcctgaatattaagctgcagctacctatataaaaggaatggtcccattagcaaaggttgagtgcactgtcaacac

SEQ ID NO: 229036 - DNA, 389 bp, Gossypium hirsutum
atagaggcgcaccggggccgccagctggggtcggagcggagcggggtcaggatggacgaggacgtgctgacgaccctgaagatcctcatcatcggcgagagtggggtgggcaagtccagcctgctcttgaggttcacagatgatacatttgatccagaacttgcagcaacaataggtgttgactttaaggtgaaaacaatttcagtggatggaaataaggctaaacttgcaatatgggatactgctggtcaagagaggtttagaacattaactcccagctattatagaggtgcacagggtgttatattagctcatgatgtcacaagaagagacacatttgctaaactggataattggttaaatgaattggaaacatactgtacaagaaa

SEQ ID NO: 229037 - DNA, 386 bp, Gossypium hirsutum
atcagagggtgacgaccgaggagcgtgagcagatcaagaccctcaacaacaagttcgcctccttcatcgacaaggtgcggtacctggagcagcagaacaaggttctggacaccaagtggaccctgctgcaagagcagggcaccaagaccgcgaggcagaacctggagccattgtttgagcagtacatcaacaacctcatgaggcagctggacagtatcgtcggggaacggagccgcctggactcagagctgagaaacatgcatgacctggtggaggacttcaagaacaagtatgaggatgaaatcaacaagcgcaccactgccgagaatgaggtttgtgatgctgaagaaggatgtagatgctgcctacatgaacaaggtggagct

SEQ ID NO: 229038 - DNA, 366 bp, Gossypium hirsutum
aaattttattagtgaaaatcaagaaaataatgaggtgaccgccattgatgagacgagcaagagacaggcaaaaaagaaagcaaaggaagagagggagagtgaaattagagctgctgaggaaagacaattggagaaggatgtaccaagaactactgatgaattcgagaaacttgttaggagctctcctaatagtagttttgtgtggattaaatacatggctttcatgcttaattcagctaatatcgagaaagctcgtgctattgctgaaagggctttgagaaccattaacattcgagaagaaacggagaagctaaatatctgggtggcttactttaatttggagaatcagtatgggaatcctccaga

SEQ ID NO: 229039 - DNA, 369 bp, Gossypium hirsutum
catagagctcctcgaccgggcgggcgaggtccctgtggacctcctcgggccagctgaatccatgtcctatcctgatcatgagccgccacctcctcctccctttccagcagcactgaaaccaccgcttccgctttataagcagcgatcctggtcacccgacatcatccgtaacgaagcatggcttagaagaaaaggaaagagcaagaaccggcgaagcaagagtgtaacagacgaagaccttgatgaactcagggcttgtattgagttaggatttgggtttgattccctagagatagatcaacgcttgtcgaatactttgccagctcttggtctttaccaagcagttaacaagaactacaaccacaccat

SEQ ID NO: 229040 - DNA, 367 bp, Gossypium hirsutum
gtagatatggcgattaacccttctttgctctttctttcccttctttttctcttcaatggctgcctagctcgccagaccttttcgtcacagcagtcccaaaatgagtgtcaaatcaataggctccgcgcctctgcaccccagacccgaattcgctccgaagccggcaccaccgagtggtggaaccccaactgtcaacagctcaggtgtgctggtgtatctgtaatgaggcagactattgaacctaatggccttgttttgccttccttcaccaatgctcctcagcttctctacattgtccaaggaagaggtattcaaggtatttgtgatgcctggatgtgccgaaacattccaggattcacagcaatgg

SEQ ID NO: 229041 - DNA, 367 bp, Gossypium hirsutum
tgagccaagaagccacttcttcaagggagaaaagtggcgagagattcgccttcaacttattgtaccaaacccctcgctactccaaccaaaacggccggttctatgaggcttgcccacgtgaattccggcaactcagggacatcaatgtcaccgtttcagccttgcaattaaaccaaggatcaatctttgtgccgcactacaattcaaaggctacattcgtggtccttgttaacgaaggaaatggatacgttgaaatggtttctcctcatcttcctaggcaaagctcatttgaagaagaagaagaacaacaacaggaacaagaacaagaagaggaaaggagaagtgggcaatacaggaaaataaggtc

SEQ ID NO: 229042 - DNA, 369 bp, Gossypium hirsutum
ctcaaaaccttcattccatcccactcaccccgaacaacctctctgcaccaacatggggaaaacacgtggtatgggagcggagcgcaagctgaggacccaccgcaggaggcagaggtgggctgataaggcatacaagaagtctaaccttggaaatgaatggaagaagccatttgccggttcttcccatgctaaaggaattgtccttgagaagataggtatcgaggctaagcagccgaactctgccatccgaaagtgtgctagagttcaattgatcaaaaacggcaagaagattgctgcttttgttccaaatgatggttgcttaaactacattgaagagaatgatgaggtgttgattgctggatttggacg

SEQ ID NO: 229043 - DNA, 370 bp, Gossypium hirsutum
tggaaaggagcccaacaagggtgttaacccagatgaagctgttgcttatggtgctgcagtacaaggaggcatcctgagtggagagggtggtgatgaaacgaaagatattcttctccttgacgtggctccacttacccttggcattgagactgttggtggagtaatgaccaagttgattcctagaaacactgttatcccaaccaagaagtcacaagttttcaccacttatcaggaccagcagactaccgtctcgattcaggtctttgaaggtgaaaggagtctcacaaaagattgtaggttgttgggaaaattcgatcttactggaattcctccagccccaagaggaacccctcaaattgaagtcacattt

SEQ ID NO: 229044 - DNA, 360 bp, Gossypium hirsutum
gctgtgaaatcaacaatggaggatgttggagagaaacacgggaaggaaggacatactctgcttgtattgatgatcattcacatggttgcaagtgcccatacggattcaggggtgatggagtcaagagctgtgaagatgttgatgagtgcaaggagaagctggcctgccaatgtcctggttgcaaatgcaaaaatacctggggcagttatgagtgcagctgtagtggtggttcattgtacatgcgagagcatgacacatgtatcagtaagaatgttaaaacagaggtaagctggggctctgtttgggtaataattcttggattggttgctgctggagctggagggtatgccatttacaaat

SEQ ID NO: 229045 - DNA, 368 bp, Gossypium hirsutum
cggacgcgtgggctgcaagagcaaggagtgcaggaagcacactttgcacaaggttacacagtacaagaagggcaaagatagtttggctgctcaagggaagcgccgttacgatcgcaaacaatcaggttatggtggtcagaccaaaccagtgttccacaagaaggccaagaccaccaagaagattgtgctgaggctgcaatgccagggttgcaagcatgtatcccaacatccaatcaagaggtgcaagcattttgaaattggtggcgacaagaaggggaagggaacatctcttttctaaatggtgtttatttatttcatgtcatgtcatggttgtgggaaccttttaagacagtattgaatttttggtt

SEQ ID NO: 229046 - DNA, 385 bp, Gossypium hirsutum
atgagcaatgcacggagtggacctgtaggcgacttgcatcatcttcaacatgaagatagccacagtgtcagtgcttctgcccttggctctttgcctcatacaagatgctgccagtgagaatgaagatcaggaaatatgccatgaatttcaggcatttatgaaaaatggaaaactgttctgtccccaggataagaaattttttctaagtcttgatggaataatgttcatcaataaatgtgccacatgcaaaatgatactggaaaaagaagcaaaatcacagaagagggtcaggcatttagcaagagctaccaaggctactgctccaacagagctgaattgtgatgattttaaaaaaggagaaagagatggggattttatctgtccc

SEQ ID NO: 229047 - DNA, 385 bp, Gossypium hirsutum
atgtcagggggaaggctgggggtgcagtttggggagtggagtgctgggcctgggctctccctgtgccctccggggggcatccaagaagtgaccattaaccagaatctgctgaccccactgaagattgagatcgacccccagttccaggtggtgcggacgcaggagacccaggagatcaggaccctcaacaaccagtttgcttccttcattgacaaggtgcggttcctggagcagcataacaaggtcctggagaccaagtggcacctgctgcagcaacaggggttgagtggcagccagcagggcctggagcctgtctttgaggcctgcctggatcagctcatgaagcagctgcagcagctccagggagaacgaggggctctggatg

SEQ ID NO: 229048 - DNA, 366 bp, Gossypium hirsutum
cccacgcgtccgcccacgcgtacggagaaaaaaagggaaaacacaacaaacatgggcagaagtggtaacttgaaaaatgctatagtagcatttcttgttcctctcccttcaattctcttctatctttttttccttgaccatttccacagtaatagtagttctctttcttctctttggtcgtggtgcttccatcaccctctcctattagccaatgtcttctttttcttcaatgtcaacgtcctcttctggatcatcggtcacatccaatccagcaactggatgattgatttgtattggactgtgataccggtgttgctaattcattactatgcaacccacccttcggcgcaatttgatgggttgaga

SEQ ID NO: 229049 - DNA, 349 bp, Gossypium hirsutum
gagccaaccgagcttgcaatccaagaaaatgccaacgggctagctatgtatgctgccatctgccagcaatgtggccttgtccccattgttgagcctgaaattcttgttgacggatcacatgacattaaaaagtgtgctgcggtgacagagcgtgttcttgctgcttgctacaaggctttgaatgatcaccatgtcatgctagaaggtactcttttgaagcctaacatggtgacccctggttccgactccccgaaggttgccccagaggttattgctgagtacactgtccgtgccttgcagcgtaccgtccctgctgcagtccctgctattgtgttcttgtctggtgggc

SEQ ID NO: 229050 - DNA, 381 bp, Gossypium hirsutum
atccaagatgctggatgccgaagacatcgttggaactgcccgaccggatgagaaagccatcatgacttacgtgtctagcttctaccacgccttctctggagcccagaaggcggagacagcagccaatcgcatctgcaaggtgttggccgtcaaccaggagaacgagcagcttatggaagactacgagaagctggccagtgatctgttggagtggatccgccgcaccatcccgtggctggagaaccgggtgcccgagaacaccatgcatgccatgcagcagaagctggaggacttccgggactaccggcgcctgcacaagccgcccaaggtgcaggagaagtgccagctggagatcaacttcaacacgctgcagaccaagct

SEQ ID NO: 229051 - DNA, 384 bp, Gossypium hirsutum
atctctgaagctcaagggcatattcatctgcttctccatgctgaaggctgctctcagtgggagttacgtcaattttggagtctttcgtctctatggagatgatgccctggacaatgctctgcataccttcatcaagctgctcctctctattccccacagtgatctcttggattaccccaagctcagccagtcttattattcactactggaagtcctgacccaggaccatatgaactttattgcaagcctggaacctcgtgtcatcatgtatattctctcttccatttctgaaggacttactgcacttgacaccatggtgtgcacaggctgctgctcctgcctggaccatattgtaacatacctcttcaagcagctatcacgtag

SEQ ID NO: 229052 - DNA, 365 bp, Gossypium hirsutum
acgcccacgcgtccgatctgctgtgattgaggagcagaagcaaataatgcaaaagcatggaagcaaggttgatcatgatatcttatctgagatggacaccttgtatcggtgcattaaggaagctctgagacttcaccctccactgattatgcttgtacgtagttcacacagtgattttagtgtaaaaacgcgagatgggaaagaatatgacatcccaaagggtcacatcgttgcaacatctacagcatttgccaacaggcttccttacatttacaaggatcctgacacatatgatcctgatagattctctgttgggaggggagaaaacaaggtagctggggctttctcatatatttgctttggag

SEQ ID NO: 229053 - DNA, 360 bp, Gossypium hirsutum
atgcccagtgagatcaaagactacagtccctacttcaagaccatcgaggacctgaggaacaagatcattgcagccaccattgagaatgcgcagcccattttgcagattgacaatgccaggctggcagccgatgacttcaggacaaagtacgagcatgaactggccctgcggcagaccgtggaggccgatgtcaatggcctgcgccgggtgttggatgagctgaccctggccaggaccgacctggagatgcagatcgaaggcctgaaggaggagctggcctacctgaggaagaaccatgaggaggagatgcttgctcttcgaggtcagagcggtggagatgtgaacgtggagatggatgcc

SEQ ID NO: 229054 - DNA, 381 bp, Gossypium hirsutum
tgcgttccatggttcaaaatttggtccacaacttccggagcctttttgttggggaaaatcccaaaaaccgggccttcttgaaaactgttttgacccaatttattgggaaattctttggattagaggcttccttagaaaacaaatttacaaacatttccctaaggttatatatgaaaacagacattttaatggtgttgctgaacttcttgaaatattaggaagtattatcaatggctttgcattgccctgaaagcagaacataaacaatttctaatgaagggtcttattcctatgcatactgcaaaaggattagctttgtttcatgctcagctagcatattgtgtcgtacagttcctggagaaagatacaacacttacagag

SEQ ID NO: 229055 - DNA, 390 bp, Gossypium hirsutum
atcgagctgtgaggggattcacttgtgtgcggaattcctcggaactatggcgtccctttcccttgcacctgttaacatcttcaaggcaggagctgatgaagagagagcagagacagctcgcctgacttcttttattggtgccatcgccattggagacttggtaaagagcaccttgggacccaaaggcatggacaaaattcttctaagcagcggacgagatgcctctcttatggtaaccaatgatggtgccactattctgaaaaacattggtgttgacaatccagcagctaaagttttagttgatatgtcaagggttcaagatgatgaagttggtgatggcactacctctgttaccgttttagcagcagaattattaagggaagcagaatc

SEQ ID NO: 229056 - DNA, 365 bp, Gossypium hirsutum
ggtatcggcaaaggatttgcctttcaactggctaggaaagggcttaatcttgtcttggtgggccggaatcctgataaactcaaagacctttcccattcaatcttggcccaatatgcccagattccgatcaagacagttgttgtggacttcactggcgatcttgatgaaggcgtgaagaagataaaagaaactattgaaggactggatgtgggggttttgattaacaatgttgggatttcatatccttatgccaggttcttccacgaggttgatgaggagctgttgatgaatttgattaaagttaatgttgaaggtaccacataggttactcaagctgttttgcctgggatggtgaaaagaaagag

SEQ ID NO: 229057 - DNA, 217 bp, Gossypium hirsutum
attgcagacccacatctcagacacatccgtggtgctgtccatggacaacaaccgcaacctggacctggacagcatcatcgctgaggtcaaggcccaatatgaggagattgctcagaggagccgggctgaggccgaatcctggtaccagaccaagtccgaggtgctgcatatcacagcggcctgacatggggatgacctgcgcaacaccaatcatgag

SEQ ID NO: 229058 - DNA, 385 bp, Gossypium hirsutum
atggcacgtggtgcggaaccggcgccgcgctttctgctgaaccttcaagatctgcggtctgggctttggttgaaagatggcggccctcacgaccctgtttaagtacattgatgaaaatcaggatcgctacattaagaaactcgcaaaatgggtagctatccagagtgtgtccgcgtggcccgagaagagaggcgaaatcaggaggatgatggaggttgctgccgcagatgttaagcagttgggcggctctgtggaactggtggatatcggaaaacaaaagctccctgatggctcggagatcccgctccctcctattctgctcggcaaactgggctccgacccacagaagaagacggtgtgcatttacgggcacctggacgtgcag

SEQ ID NO: 229059 - DNA, 369 bp, Gossypium hirsutum
cggacgcgtgggtaatctctcttctgctttgtcgccacgatttcagcttcagatcgcttctatttcttagcttgaagctaatactgcagaatgggcacggaaaagactcacattaacattgtcgtaattggccatgtcgactctggaaagtcaaccaccactggccacttgatctacaagcttggaggtattgacaagcgtgtcattgaaaggtttgagaaggaagctgccgagatgaacaagaggtcattcaagtatgcttgggtgcttgacaagttgaaggctgagcgtgaacgtggtattaccattgacattgccctgtggaagtttgagaccaccaaatattactgcactgtcatcgatgcccct

SEQ ID NO: 229060 - DNA, 320 bp, Gossypium hirsutum
ccgcgcttggcttcagcggcctttggcgtaatgttgcgaggtttttaagttcactttcagtcgttcctttggtatctctagttggttttgggctttacgaatttggctttcctggggttgccaaatgtgtggagattggactgactcagctaattcttatagtatttgtctcacagcacgcgcctcatgtgataaagtctggaagaaatgtctttgatcgatttgctgtcttgttttcagtggtgattgcttggatttatgctcatttactcactgtgggtggagcttataatggttcagcaccaaaaacacaaacaagc

SEQ ID NO: 229061 - DNA, 364 bp, Gossypium hirsutum
ggaaaatcctcagtcatacttacgaatcttcagccgtgaaattcttgaggctgtcttcaatacacgaagtgagcagctagacgagctgtttggtgggaggcaaagccatcgaaggcagcagggacagggaatgttccgtaaagccagccaagaacaaataagggcattgagccaaggagctacttcaccaagggggaaaggtagcgagggatacgccttcaacttattgagccaaacccctcgctactccaaccaaaacggccgcttttacgaggcttgccctcgtaatttccagcagcaactccgagaagtggattcctccgttgttgccttcgaaataaacaaaggatcgatcttcgtaccg

SEQ ID NO: 229062 - DNA, 369 bp, Gossypium hirsutum
cccacgcgtccgcactatttgggaaaggaattggtccaaaacctgctggttcttcgttttgcaaatctcttcttcttacccctttggaatcttgacaacattgataatgtacagattgtgttcagagaggactctggaactgaaggtctaggtggatattttgatgaatacagctgtgtttgatatcatatattttgcctagcatcttgtatgtgacttctatggtacagatttgcttattagttcattttccttttgcgctctttgtgcagcattatccgcgatattatccaaaatcacctgttgcatgtcctttgacttgttgctatggagaagcctgtatctctcatacctgatcgcattcgtgat

SEQ ID NO: 229063 - DNA, 363 bp, Gossypium hirsutum
ggaccaccatagctgaaaaagaaaaagaagggatgggagttttaggcaaagtggtggatgggattctattgctaacattcgtgtccatgtcggtggtgccagcgtgcttggacgcccaggtacttttgcctaaagcgcttttccccgatgtgctgggtcgtgtatattcatggtatacgaccacataccaagattatttgctgttggatgagcctcattttttcatggcacttatgaaattggagcttgttttagtattgccgcttgctatacttaacacttatggcttgttgacctccaagccctggttcaacaccacctgcctcatcttcggttctgctcttgttacctccacgacagcta

SEQ ID NO: 229064 - DNA, 391 bp, Gossypium hirsutum
atgggggatcagctggaggctacggaggcggcgtgacctgtggctttggtggaggggctggtagtggctttggaggtggctacggaggtggccttggaggtggctttggtgggggttatgctggtggctttgttgattttggtgcttgtgatggtggcctcctcactggcaatgagaagatcaccatgcagaacctcaacgaccgcctggcttcctacctggagaaggtgcgcgccctggaggaggccaacgccgacctggaggtgaagatccgtgactggcacctgaagcagagcccagctagccctgagcgggactacagcccctaccacaagaccattgaagagctgcgggacaagatcctgaccgacactattgaaaacaaccgggt

SEQ ID NO: 229065 - DNA, 380 bp, Gossypium hirsutum
atcggagacacgcggcggtgtcctgttgaccatggccgactacctgattagtgggggcacgtcctacgtgccagacgacggactcacagcacagcagctcttcaactgcggagacggcctcacctacaatgactttctcattctccctgggtacatcgacttcactgcagaccaggtggacctgacttctgctctgaccaagaaaatcactcttaagaccccactggtttcctctcccatggacacagtcacagaggctgggatggccatagcaatggcgcttacaggtggtattggcttcatccaccacaactgtacacctgaattccaggccaatgaagttcggaaagtgaagaaatacgaacagggattcatcacag

SEQ ID NO: 229066 - DNA, 361 bp, Gossypium hirsutum
atcttctctgatagctcccagcttactctctgcagccatgattgccagacagcagtgtgtccgaggcgggcctcggggcttcagctgtggctcagccatcgtaggcagtggcaagagaggtgccttcagctcagtctccgtgtctggaggtgctggccgatgctcttctgggggctttggcagcaggagcctctacaacctcggggggaacaagagcatctccatgagtgtggctgggtcacgacaaggcgcctgctttggaggtgctggaggcttcggcactggtggctttggcggtggatttgggggctccttcagcggtaagggtggccctggcttccctgtctgccctggtggggga

SEQ ID NO: 229067 - DNA, 345 bp, Gossypium hirsutum
cccacgcgtccgcaacaaaatcatgaggagcatttgtgttgtgcttcttatctctttgcctttccttctccgcattgcccagggtttcgatttccacgacaaggatttagcgtcggaggatagtttgtgggatctatacgagcgctggcggagccaccacacggtttccaggagtctcgacgagaaacatcggaggttcaatgtgttcaagcagaatgttttgcatgttcacaacaccaacaacaaggacaaaccttataagttgaagatcaacaagtttgctgatatgaccaaccacgaatttaggaatgcttacgctagttccaagattaaacatcataagat

SEQ ID NO: 229068 - DNA, 397 bp, Gossypium hirsutum
atcctggaggcccggcctggccgctcccggccctggggggcacatcggccctgagtctcgtcccaggctctgggctcaggcagctgccgccaccgctgcccagggcgtcgggcctcctgccttcctcccaggcccccacgctgctggccgcctggccgagtggccgccatgcgcctgccttgggccacctctgcccccggcctggcctgggggcctctggtgctgggcctcttcgggctcctggcagcatcccagccccaggtgcctccatacgggtcggagaaccagacctgcagggaccaggaaaaggaatactatgagcccaggcaccgcatctgctgctcccgctgcccgccaggcacctatgtctcagctaaatgtagccgcagccgggaca

SEQ ID NO: 229069 - DNA, 289 bp, Gossypium hirsutum
caaagatccttcatttaatcaaatggccgagcagctcactaaaacgtttcaaggggcagcagctgaagagaccacgccgcagtttgatccacagcagtattattctactatgcaacaggttatgcataatccccagtttatgaccatggctgagcgccttggtaatgcattaatgcaggatccagctatgtctaccatgcttgacagtttggctaatcctcaacaaaaggaccagattgaggaaaggatggcacgtattaaagaagatccatctttgaagcctattttg

SEQ ID NO: 229070 - DNA, 375 bp, Gossypium hirsutum
atgaggacctgaggaacaagattctcacggccacagtggacaatgccaacgtccttctgcagattgacaatgcccgtctggccggggatgacttccgcaccaagtatgagacagagctgaacctgcgcatgagtgtggaggccgacatcaatggcctgcgcagggtgctggatgaactgaccctggccagagctgacctggagatgcagattgagagcctgaaggaggagctggcctacctgaaaaagaaccacgaggaggagatgaatgccctgagaggccaggtgggtggagatgtcaacgtagagatggacgctgcacctggcgtggacctgatccggattctgaacgagatgcgtgaccagtttgagaaga

SEQ ID NO: 229071 - DNA, 344 bp, Gossypium hirsutum
tgaacagcagataaggaagcaagcccacctgaagcactgccagaagtacatggaggaagagtggggtggcgaaggcagcgacaatatagccggcgggtacattgactcatgttgccagcagctagagaagatggatacgcaatgcagatgtcaaggtctaagacatgcaacgatgcaacagatgcaacagatgcaagaacaaatggggagcaaacagatgcgagagatcatgcaaaaggttaccaagaatataatgtccgaatgtgagatggagcctgggaggtgtgacacgccatctcgcagtttgatttaaacaaaatatgttctcaagaataaatgtaatg

SEQ ID NO: 229072 - DNA, 338 bp, Gossypium hirsutum
attttggcaagaatggtgggttgcaaactcattggattttaacaaggactatgatgccagtgttttcgagacaaccataagagttgtaggtggacttcttagtgcatatgatctttcaagggacaacgttttcctcgaaaaagctagagatattgcagatagattgctacctgcttgggatactactactgggatcccttataatgttatcaacttggctcatggaaatgcacataaccctggttgggctgggggtcaaagtattcttgcagactcagggactgagcaactagagtttattgctctttctcaaagaacaggagatcccaagtatcaag

SEQ ID NO: 229073 - DNA, 384 bp, Gossypium hirsutum
cacacacttaacttaattaagcaagctcgtaagctgttttcatcaatggccgaccgtgaccgctcttaccgatttgaccaggttgttcgtggtgatagaacgaactatcaaagcggaccatcaacaacccaagttctaaccgtcctcaccctccttcccatcggcggcactctccttgcattagccgggctaaccctcaccggcaccgtcatcggcctatgcgtggcaacgccactcttcgtcatcttcagcccggttctgctcccagctgccatcgcggttttcatggctgtggccggtttcttgtcgtccggggcttttgggttgacgggactgtcctcgctctcctacgtatttaaccgcttcagacaggcgactggcacc

SEQ ID NO: 229074 - DNA, 347 bp, Gossypium hirsutum
atcgccagctccgtttggggaccagagccattcagaacctgagtcctggaatgcagcccagcactgccaacagggccggtcccaagggggctggggccaccggctggatggcttcccacctgggcggccttctccagaaaatctgaaccaaatctgccttcctgaccgtcagcatgtggtatatggtccctggaacctaccacagtccggctactcccacctcactcgccagggtgagaccctcaatttcctggagattggatattcccgctgctgccactgccgcagccacacaaaccggctagagtgtgccaaacttgtggtaaggttgggttcttgatgccggg

SEQ ID NO: 229075 - DNA, 367 bp, Gossypium hirsutum
cggatttacaaaaagaaatcgactgaaagtttccagtcactgtcataccaggttgcattgttcaactgcatgctatggctgtattacgcgttgattaaaaagggtgctttccttgtgatcaccatcaactcttttggatgtgttgttgagactatttatatatctatgttctgggcttatgctttaaagaataccaggatgtcggctatgaaactttatatatcaatgaacctggggctcttctctttcattctcatcctcacacactttctgctgtaaagctcgattcgcatccaagttcttggctggatttgagttgccatctctgtatccgtctttgcagcacccttaaacattatggcaagag

SEQ ID NO: 229076 - DNA, 345 bp, Gossypium hirsutum
tacaactagtaactaatcccaacattgaagtattgaacaaactcatataagcaaaaaatctcaaatatccttcatcatgagacatataattgtcactataaataagaacaaaaattccaacagtagtgattaatattgacataatagaggtaagtgaatcaataaagtagccaaactcgaaagaaaaatcattattgatggtccaagaccatacatattgatagatagaacttctatttatttgctgaatagacagatcgagtgaaaaaatcataactatacttaacaataaaatattgggaaaagcccacataccacgaaaattttttgttgccgtccgaaaaa

SEQ ID NO: 229077 - DNA, 381 bp, Gossypium hirsutum
ccgatctttttaaacccctctctcgctctctctcgccgccgcctgcgtctctctcttcatctctctgaacctaaaagtctttagcttttcgcttcgagagagaccatgttggtttaccaggatctcatctccggtgacgagcttctttctgactcattcccctacaaggaaatcgagaatgggatgctgtgggaagttgagggaaagtgggttgtgcaaggagctattgatgttgacattggtgccaatccttcagccgaagatgctgatgaggatgaaggtgttgatgaccaatctgtgaaggttgttgacattgttgacactttcaggcttcaggagcaaccccctttcgacaagaagcagtttgtcgtgttcatgaag

SEQ ID NO: 229078 - DNA, 377 bp, Gossypium hirsutum
atgcactcaaggccaagaacatcaagcagacggaactggtggctgacctccgggaagccatcctgcgcgtggcgcgtcacttccagtgcgcagaccccaaaaactgcagcgtggagctgactccagactacagcatggagagccaccagcgggaccacgagaactacgtggcatgttcacgcggccaccggcgccgagccaaggccctgctggacttcgagcggcacgacgacgatgagctgggcttccgcaagaacgacatcatcacaatcgtgtctcagaaggacgagcactgctgggtgggggagctcaacggccttcgaggcgtggttccagccaagtttgtggaagtcctggatgagcgcagcaaagagtat

SEQ ID NO: 229079 - DNA, 378 bp, Gossypium hirsutum
gcagcttaggcaaccagttcgcagccatggtgaagtattcgaaggagtcagataatcccaccaagtcctgcaaggcaaggggctctgatctcagggttcatttcaagaacacaagggagactgcgtttgctatcaggaagttgcctttgggtaaggctaagaggtatttggaggatgttatggctcacaaacaggccgtacccttcagacgcttctgtggtggtgttggacgtacagctcaggcaaagaacaggcattctaacggacaaggtcgctggcctgtaaaatctgccaaattcattctagatttgctgaagaatgctgagagcaatgccgaggtcaagggtttggatgtggatgcactctatatttctcaca

SEQ ID NO: 229080 - DNA, 393 bp, Gossypium hirsutum
atgcagaacctcaacgaccgcctggcctcctacctggacaaggtgcgtgctctggaggaggccaacgccgacctggaggtgaagatccgcgactggtaccagaggcagcggcccgctgagatcaaagactacagtccctacttcaagaccatcgaggacctgaggaacaagatcattgcagccaccattgagaatgcgcagcccattttgcagattgacaatgccaggctggcagccgatgacttcaggacaaagtacgagcatgaactggccctgcggcagaccgtggaggccgatgtcaatggcctgcgccgggtgttggatgagctgaccctggccaggaccgacctggagatgcagatcgaaggcctgaaggaggagctggcctacctg

SEQ ID NO: 229081 - DNA, 295 bp, Gossypium hirsutum
ggttggtccaaatgcggccgtcattcattactcacctcagcctgaaacatgtgctgagcttgatccagatagcatttatctatttgattcaggagcgcaggtattctatcacatcctaatattttgcttctatcattaaccaaaaccatcagtaaagcctactatttcttattctagattcttagtctgattcttaatctataactgacaatcttgatggcatcattgaagtatctagatggaacaactgatataactcggacagttcattttggaaagccttcagaacatgaga

SEQ ID NO: 229082 - DNA, 380 bp, Gossypium hirsutum
cggacgcgtgggcggacgcgtgggggcgattaacccttctttgctctttctttcccttctttttctcttcaatggctgcctagctcgccagaccttttcgtcacagcagtcccaaaatgagtgtcaaatcaataggctccgcgcctctgcaccccagacccgaattcgctccgaagccggcaccaccgagtggtggaaccccaactgtcaacagctcaggtgtgctggtgtatctgtaatgaggcagactattgaacctaatggccttgttttgccttccttcaccaatgctcctcagcttctctacattgtccaaggaagaggtattcaaggtattgtgatgcctggatgtgccgaaacattccaggattcacagcaat

SEQ ID NO: 229083 - DNA, 380 bp, Gossypium hirsutum
ttcaactgatgtcttgcgtgaatttgccaaaacccagatggattacatccttggcaaaaatcctcggaaaatgagctatgttgtgggttttggtaaccattacccaaaacatgttcaccatagaggtgcatctatccctaagaataagatcagatataactgtaaggggggatggaaatggagggattcaaaaaagccaaacccgaatacgctggtgggagccatggttgctggacctgacaagcatgatggatttcacgatgttcgcaccaactacaactacactgaaccaactcttgcaggcaatgctggtttggttgctgcacttgtggcattgtctggtgacaagtcaactggaattgacaagaataccatatttt

SEQ ID NO: 229084 - DNA, 375 bp, Gossypium hirsutum
ctctcatcattttcctccgggaccgtcagtcttcccaaacaccttctttccgagaaaaaaaaagctcaagagagaagaccatggccgatcaacttacggacgatcagatctctgagttcaaggaggctttcagcctctttgacaaggatggcgatggttgcattactaccaaggagctggggactgtgatgcggtcacttggtcagaaccctactgaggcagaactccaagatatgatcaatgaagttgatgctgatggaaatgggaccattgattttcctgaattccttaacctaatggcaaggaagatgaaggatactgattccgaggaagaacttaaagaggctttcagggtgtttgacaaggaccagaatg

SEQ ID NO: 229085 - DNA, 381 bp, Gossypium hirsutum
gttttgtatttcatactcatttagcccctttcattagcatcgaaatcactccagttttctttatcactgaaaaatgtcttgctgtggtggaaactgtggctgcggttctggctgcaagtgtggcagtggctgtggaggatgcaagatgtacccagacctgaacgttgccgagatgaccacaactgagactctggttcttggtgtagcaccccagaaagcacactttgagggagctgagatggaattcggggctgagaacggctgcaagtgtggagacaactgcacctgcaacccttgcaattgtaaatgattagagaccaaagccaaagctccctggaagcagagacgcctttgtctttaagaaataatatgttttggtgg

SEQ ID NO: 229086 - DNA, 399 bp, Gossypium hirsutum
atgctgagctcagcaaacacccgcttcgccttggacctgttcctggccttgagtgagcacaatccggctggaaatatcttcatctctcccttcagcatttcatctgcgatggccatggtctttctggggaccagagggaacacggcagcacagctgtccaagacttttcatttcaacacggttgaagagattcattcaagattccagagtctgaacgctgagatcaacaaacctggagcgtcttatattctgaaacttgctaatagattatatggagagaaaacttacaatttcctccctgagttcttggcttcgactcagaaaacatatggtgctgacctggccagtgtggattttcagcatgccactgaagaggcaaggaagaccataaaccagtgg

SEQ ID NO: 229087 - DNA, 334 bp, Gossypium hirsutum
atcgcggctgtccggccaccgcaagtaggcttatctctgactgcctctccttctgccaggccggggagctgcttatgctgaccctgacttttccttacagggcaagcccccagggccattcctggcacacagagatgctggacttcaagccccaggccccttccctgccccagatggtgacaagggggaccttctgctccaggcagtgcaacagagctgactggcggaccatctgctgacagcgtaatggggggcagacccagtcccagcccaagctcctggagagggacacgagggtcttaccctgactggggcccgtgctggaggtgtgggc

SEQ ID NO: 229088 - DNA, 314 bp, Gossypium hirsutum
atgcggcggcggcggcaactggggacagggcgggtggcgcatcaccggcgcggaggcaggaggagcagtctcattgttccgggagccgtcaccacagtaggtcctcggctcgctcggcccagcccctctcagtcctccccaacccccacaaccgccggcggctctgagacgcggctccggcggcggcagcagcagctgcagcatcatctccacccgccagccatggaagacctggaccagtcgcctctggtctcgtcctcggacagcccaccccggccgcagcccgcgttcaagtaccagttcgtgagggagcc

SEQ ID NO: 229089 - DNA, 393 bp, Gossypium hirsutum
atgtcagccgcattttctcttgcatcgccagcgcatccctgagacaccatggggaaggtgaaggtcggagtcaacggatttggtcgtattgggcgcctggtcaccagggctgcttttaactctggtaaagtggatattgttgccatcaatgaccccttcattgacctcaactacatggtttacatgttccagtatgattccacccatggcaagttccatggcaccgtgaaggctgagaacgggaagctcgtcatcaatggaagccccatcaccatcttccaggagcgagatccctccaaaatcaagtggggcgatgctggcgctgagtacgtcctggagtccactggcgtcttcaccaccacggagaaggctggggctcatttgcagggggga

SEQ ID NO: 229090 - DNA, 391 bp, Gossypium hirsutum
aaggtgcggttcttagagcaacagaataaggtcctggagaccaaatggaagctgctccagcagcagacgaccagcacctccagcaaaaaccttgagcccctctttgagacctacctcagtgtcctgaggaagcaactagataccttggtcaatgacaaagggcgcctgcagtctgagctgaagaccatgcaggacagcgtggaggacttcaagaccaaatatgaagaggagatcaacaaacgcacagcagctgagaatgactttgtggtcctcaagaaggacgtggatgctgcctatatgaacaaggtggagctggaggccaaggtggacagtcttaatgatgagatcaacttcctgaaggtcctctatgatgcggagctgtcccagatgc

SEQ ID NO: 229091 - DNA, 379 bp, Gossypium hirsutum
gtttttctcaaaaagaacattggttttttttcctaacctgttgttcctgtttctaagatctcattaaagttatggtttttgtatagtttgtctttttcttaagagctaaaagattttggacggctaagatggaccgggaaggaggatcccacggcggatcttgctactacactattctcgggattcgcaaggacgcctccttctccgatatccgtactgcttaccgtaagcttgctctgaaatggcacccggacagatacgtcacaaatccggcggtagccggcgaagcgaaactcacgtttcagcaaatccaacaagcttattccgttctctcaaacgggtgcaagagatcaatgtatgacgccagtctctacgatcc

SEQ ID NO: 229092 - DNA, 384 bp, Gossypium hirsutum
atgtgaagctggccctggacatcgagatcgccacctaccgcaaactcctggagggcgaggagtgcagaatgtctggagaatgccagagtgccgtgagcatctctgtggttggaggtagcaccagcactggaggcatcagtggaggattaggaagtggctctgggtttggcctgagtagtggctttggctccggctctggaagtggctttgggtttggtggcagtgtctctggcagttccagtagcaagatcatgtctaccaccaccctgaacaagagacgatagaagaaatgaggtcccttgagcttactgtgtcccgctgggcccagcactggtatctctgggcttacttcaatttaacttcaatcttcctcttttgggcctg

SEQ ID NO: 229093 - DNA, 358 bp, Gossypium hirsutum
tttttctacttattttttgtgcagggtagtgatgccttgtcaatggctgaaggacaaaatgaaatgcaaaagcttttcaaggaatatggcgtgactccatttactctgctgaaagggatttttattcagggtcccatctttgtgtctgagtcacaaaaaagactacctacagaagataaaagtggtgctggtatcagaattcatgataacaatgaaggagaggaatccgcggcaaggggaagtgtcactgggagatttaatatggctcaaactccttggggaaacatggtggcctgcagtggtatgcctattgctgtggttgtttgatctagcaactagttctctttttcggcctttt

SEQ ID NO: 229094 - DNA, 367 bp, Gossypium hirsutum
aacatcagcagagtttcatcctacccactgtaatacgttggcatatagcagttcaaagggctcaattcgcgtaattgatttgcggcagtcagcattgtgtgattctcatgccaaattgtaagtgttttgcttgatttatgtacatttttactaagaaaagcatgctatggatcttgatctgtgagggtatatttgcaattagcttttggtatcctttactaataatgattgctattctatgccacaggtttgaagaaccagaggcacctggttctagatcattttttacagagataattgcctcaatctccgatatcaaatttgcaagggatggaagatatattctaagccgtgattacatgactct

SEQ ID NO: 229095 - DNA, 370 bp, Gossypium hirsutum
atgtggatgctgcctacatgaacaaggttgaactgcaagccaaggcagacactctcacagacgagatcaacttcctgagagccttgtatgaagcagagctgtcccagatgcagacccacatctcagacacatccgtggtgctgtccatggacaacaaccgcaacctggacctggacagcatcatcgctgaggtcaaggcccaatacgaggagattgctcagaggagccgggctgaggccgagtcctggtaccagaccaagtacgaggagctgcaggtcacagcgggcagacatggggacgacctgcgcaacaccaagcaggagaatgctgagatcaaccgcatgatccagaggctgagatctgagatcga

SEQ ID NO: 229096 - DNA, 389 bp, Gossypium hirsutum
atgaaaacctcttgccatctgatggtgacttctggattgggctcaggaggcgtgaggagaaacaaagcaatagcacagcctgcgaggacctttatgcttggactgatggcagcatatcacaatttaggaactggtatgtggatgagccgtcctgcggcagcgaggtctgtgtggtcatgtaccatcagccatcggcacccgccggcatcggaggcccctacatgttccagtggaatgatgaccggtgcaacatgaaaaacaatttcatttgcaaatattctgatgagaaaccagcagttccttctagagaacctgaaagtgaggaaacagagccgacaacacctgtacttctagaagaaacacaggaggaagatgccaaaaaaacattt

SEQ ID NO: 229097 - DNA, 369 bp, Gossypium hirsutum
aaaaaagacttcttttttttctttttcattgtacaacgaccaattttaaaaaccataggatttgatttttttttattcatgaaaactatctataaaaataattatatagaatagtttcgactttctcacctgataatgagagaacgaaatccggataaataccaatacctattactggtagaaagatagagatcgaaacaaataactctcgtggtccagaatcaaaaaaataagaacttggagcattaaatagcttgtatccatagaacatttgacgtgacatagataatgaataaataggagttaatatcattcccaatgccctttacgaaagtaattatattttttgcattaaaaaataattttggc

SEQ ID NO: 229098 - DNA, 399 bp, Gossypium hirsutum
atccgggtcctgccaatgtcacgttctgccattactgcaatagccacatcagtgtgtcatggcccgccctgtcgccagcttcatcatgccgtcatacctcatgggaaaggtggacgttcctcagtcagtgggatcgtggccactgtgtttggagcaacaggattcctggggcgatacgttgtcaaccaccttggacgcatagggtcacaggtaatcataccccatcggtgtgatatatatgacaccatgcaccttcgtcccatgggtgacctgggccagcttctgtttctggaatgggacgcgagagataaagattctatccgacgagcagtggaacacagcaatgtggtcatcaatcttattggacgagactgggaaaccaaaaacttcgattttgat

SEQ ID NO: 229099 - DNA, 396 bp, Gossypium hirsutum
atggcccagactggcggcggcgatggcctcggcggctgtggagagcttcgtgaccaagcagctggacctgctggagctcgagagagacgcggaggtggaggagcgcaggtcctggcaggagaacatctctctgaaagagctccagagccgaggcgtgtgtttgctgaagctccaggtatccagtcagcgcactgggctgtatggacggctgctggtcacctttgagcccaggcgatgcgggtctgtggcagctcttcccagtaacagctttacttctggtgatatagtgggcctgtatgatgctgctaatgagggcagtcagctggccaccgggatcctgacccgggtcacccagaagtcggtcacggtggcctttgatgagtcccacgatttcca

SEQ ID NO: 229100 - DNA, 380 bp, Gossypium hirsutum
cggacgcgtgggctggaatattggaatcacatagagtcttgactgtaagcccatactatgcccaggagcttgtatctggtgaagacaaaggtgtagaacttgataacatcattcgtaaaactggcatcaccggcattgtgaatggcatggatgttcaagaatggaatcctgcctctgacaaatacatcagtgtcaaatatgatgcaacaactgtaatgaaggcaaagccattgttaaaggaagctcttcaagctgaggtgggattgccttgcgacggagatgttcctttgatcggattcattggtaggctagaagagcagaagggttcagatattttggcagaagctattccgaaattagttgctgaaaattgccagatt

SEQ ID NO: 229101 - DNA, 342 bp, Gossypium hirsutum
attgacacactgaaattgggtgcttgtgtggatctgctgggagggttggtgcacattggactaggtgacccggttgtgaaccaatgttgtgcggttctttcaggactcgccgagctcgaagctgcggtctgcttgtgcaccaccctcaaacttaaggttctcaaccttaaaatttatgtgccactggctcttcaactccttgtcacatgtgggaaaacaccccctcctggttacacttgctctcttttaaaaccaaggttgctagggtgatggactctatatgatggaatggccatgaaaggatgtcgagcttttctctttgttcttaagttggatgggaaa

SEQ ID NO: 229102 - DNA, 324 bp, Gossypium hirsutum
atcctatctacaccccagggcagcaagtactccatggtggaactacaggatccaaacagcaacaggattgcacagtggctggaagtggcacctgagcaaggcattgtagacctgtccttccaactggcaccagaggcaatgctgggcacctacactgtggcagtggctgagggcaagacctttggcactttcagtgtggaggaatatgtgctgccgaagtttaaggtggaagtggtggaacccaaagagttatcaacggtgcaggaatctttcttagtaaaaaattggtggaaggtacacctatggaaggcccatgctaggggc

SEQ ID NO: 229103 - DNA, 367 bp, Gossypium hirsutum
atttccaagcgataagttttagggttttgagttctattctcttgacaatggctgcgatttacagtctttacataatcaacaaatcaggaggtttgatattttataaggattatggatccaagggcgcatggatacgaatgatagcttgagagtggctagtctatggcattcgatgcacgctatctcacagcagctatcgcctaccactggttgttctggaattgagctacttgaagctgatacatttgatctccattgttttcaatctcttaccgggacaaagttctttgtagtttgcgaacctgggacacaacacaatgaggctctctttgaaagtgtttatgagctctacacagattatgttttg

SEQ ID NO: 229104 - DNA, 332 bp, Gossypium hirsutum
cttgaggctgtcttcaatacacgaagtgagcagctagacgagctgtttggtgggaggcaaagccatcgaaggcagcagggacagggaatgttccgtaaagccagccaagaacaaataagggcattgagccaagaagctacttcaccaaggggaaaaggtagcgagggatacgccttcaacttattgagccaaacccctcgctactccaaccaaaacggccgcttctatgaggcttgccctcgtaatttccagcagcaactccaagaagtggattcctccgttgttgccttcgaaataaacaaaggatcgatctttcgtccggactacaattc

SEQ ID NO: 229105 - DNA, 304 bp, Gossypium hirsutum
  unsure (1)..(304): unsure at all n locations
ctttgttccttcatccttctgatacatcgggaacggttcttgtttctcatcgtttgactggtgttgaaaatgacactgtttggagtcgctcgcttcggattgctttgctcgcgaagaacaagctcgaattcattgatggtgtttgccttcgttcggtttatcccgaatctctccgtgctcaatgggatcggtgtaatacttttgtgctttcctggattntcaacactgtcagtccagatttgtcagcgggactcgtctttgcttctgatgctgctgcagtttggaaagatctcaaggatcattt

SEQ ID NO: 229106 - DNA, 349 bp, Gossypium hirsutum
ctttgctttcttttagcgtttgcttgcttgttctcttccatggctgctgtgctcagatagatctcgtcactaaccatcaccaggatccaccttgggggcagcctcaccaacctcagccacgtcaccaatcccaatgccaactccagaacttgaatgctcttcagcctaagcaccggtttaggtcagaggctggtgaaactgagttctgggaccaaaatgaggatcaattccagtgtgctggtgttgctttcctacgtcataagatccagcgcaaaggacttttattgccttcatttaccagtgctcctatgcttttctatgttgaacaaggggagggtattcatggggc

SEQ ID NO: 229107 - DNA, 376 bp, Gossypium hirsutum
ctgaactgaaacatcgatttgagcagacaatgaaagaggcagcggattaatttcaaggagcgaacttgtatgtcaagaattcggatgatagcataagtgacgaaaagcttaaagagctattctctcaatatggtaccataacatcatgcaaggttatgcgggaccctagtggaataagtaaaggatcagggtttgttgcgttttcaaccccagaagaagcttctagagctcttgcagagatgaatggcaaaatggttgtcaacaaacctctctatgttgcacaggctcaaaagaaggaagacaggagggccaggttgcacgctcagttttctcaaatgcgaccacttacaatggcaccttctgttgcaccacgaat

SEQ ID NO: 229108 - DNA, 353 bp, Gossypium hirsutum
atcaaacagcccccagaggcattttgaaattcatcccaactgtaggctgagtgatcggcaggtgggacggactgccaaagtccaaaagcttcagcatttcctcagtgtcaggatctacttcaatgatctcctgatccggggctgagaccttgggaacataatcgtctctcctttctctctccttctcctgcagcttaatggaaacacctctcaatgggcccctctgcatccgcttcatcagatgattgacacagcctgctatgttattacggagcttcttgctggggataatggccatctcctcacgcatgcatttgtttctgtggaagttgttacctacgcacatgtaatac

SEQ ID NO: 229109 - DNA, 289 bp, Gossypium hirsutum
ctctgccaagagttcatatcgagttccaacccccaagcaccgtcctgagaaatccagtgtctccctaactgtcatctcaccatggtgaaggtcatgttgacttatataagcacttgtcctttgagggatgaattcatgaaattcatgaccacaataagtaatttttcctgatacctattcaaggattgaacattgttcatcagtaaacttaaccaaacgtttcaaggcatgttatttataattattataattattattattattattattattattattattattaata

SEQ ID NO: 229110 - DNA, 397 bp, Gossypium hirsutum
atcaacgaccgcctggcttcctacctggagaaggtgcgcgccctggaggaggccaacgccgacctggaggtgaagatccgtgactggcacctgaagcagagcccagctagccctgagcgggactacagcccctaccacaagaccattgaagagctgcgggacaagatcctgaccgccactattgaaaacaaccgggtcatcctggagattgacaatgccaggctggctgcggatgacttcaggctcaagtatgagaacgagctggccctgcgccagagcgtggaggctgacatcaacggcctgcgccgggtgctggatgagctcaccctgtctaagactgacctggagatgcagatcgagagcctgaatgaggagctggcctacatgaagaagaacc

SEQ ID NO: 229111 - DNA, 379 bp, Gossypium hirsutum
tggatcagaagataatgctgaaaatgcaaatgatgactatttgctaaaattgaggtggttaaaaaggtttctttctgcaaaatttggttggaaactacgagatgaattccggcatttgagaaaactatccattcttcgagaactttgccataaggttggtctagagttggttcctaaagactatgacatggaatgcaaagaacctttcaaaggttgcaatattattagcatttatcctgtttgtaagcatatagtatgcacttctgccgatggcagaacattgttagagtcatccaaagcggctcttgacaaaggaaaactagaggatgcggttaattatgggacaaaggcattagcaaagatgatagctgtatgtggt

SEQ ID NO: 229112 - DNA, 286 bp, Gossypium hirsutum
ctcaacggtgttttgtgattaaaaaaactaccaagattgtggcaaaacaagatggcttccctgcatgaaccatggctagtggagaacgggttgaaggggtctagcaaggagattcgccatggcaggactgcacacaacatgtcgtcttcgtcgttgcggaaaaaatcggacctgacgcttgtttccaaggttcggtatgcaatgcttaggcagttcctcgccaatcttcaagaggtcatattatggaccaagctctccgttctcttaccagctattccattggcca

SEQ ID NO: 229113 - DNA, 334 bp, Gossypium hirsutum
gccaaccaaaaaattaaaccatgtatcaccctcaagttccaggcgagcccacccaaaccaccacttccctcgtcgagaccgccaccggcgccatccaaagcttccgccctatcaaacaaatccatcaacacctctgcgcatttcatttctatggctacgacatgacccgtcaagtgcaagcgcaccatttctgcgcacatcaaaacgaagaaatgcgacaatgtctcatatatgacacccccgaagccgatgcaaagctcatcggattggagtacatcatatcggagaatttgtttttgacgttgccggaccaagaagaaccgctttggcattc

SEQ ID NO: 229114 - DNA, 395 bp, Gossypium hirsutum
  unsure (1)..(395): unsure at all n locations
atcatcactggagatgagggaggcagctgccacggagatccgccgagccatcacaggtcgcatcccagaaagcttaagaaactgtgtgaacaaggaattttttgtcacatcagcgccttggtcagtaatagaccagcaagcaattcatcctgagctcaatggtgccacatacagatatccgccaggcatcgtgggggtggctccaagaggacttcctgcagccatggaagggatcatccctggaggcatcccagtgactcacaacctcccgacagtggcacattcttnccaagcgccctcttccaaccagcccacaaaacatggggacaatcgagagcaccccaacgagcaatagcagagaatgccagaaggtaatcattcagatacacttggga

SEQ ID NO: 229115 - DNA, 289 bp, Gossypium hirsutum
acgggcgattaacccgtctttgcgctttctttcccgtgtttttctcttcaaaggatgcctagctcgccagaccttttcgtcacagcaatgccaaaatgagtgtctaatcaataggctccgcgcctgtggaccccagacccgaattcgctccgaagccggcaccaccgagtggtggaaccccaactgtcaacagctcaggtgtgctggtgtatctgtaatgaggcagactattgaacctaatggccttgttttgccttccttcaccaatgctcctcagcttctctacatt

SEQ ID NO: 229116 - DNA, 378 bp, Gossypium hirsutum
cccacgcgttcttcagatcagtggcgaaggagttggatggattctatttcgagcaaaggcatgcaaaggccacggtgaaaatgggtagagtttggaggaacataaatggatgccgccacttcatagtcgaatggaatgttaacatcagcttgctttccaattgcgttgccgcttatgtacgctatgacaaacatgacatagtggctactgacaccatgaaaaactctgtttattgtcaagcaaaggaatgttcagaacgaacctctgccagagaattagctattctactttgctcgcacttcacattattttatacacaggttgttactgcaattgtttatatagcggaaaagccatcggaacgcatttctgtctatg

SEQ ID NO: 229117 - DNA, 305 bp, Gossypium hirsutum
cccacgcgtccgcgctttaccatcaaaaccagctagctaaatcaaccgcatttcaccaggatggctagaggattgaagaaacacttgaagaggctcaatgcccctaggcattggatgcttgacaagcttggtggtgcttttgcacccaagccatcatctggaccccacaaatccagggaatgcttgccattaattctcattctgcgaaacagattgaagtatgctctcacgtacagagaagttattgctattctcatgcagaggcatgtcatggctgatgggaaggttcggaccgataagactta

SEQ ID NO: 229118 - DNA, 387 bp, Gossypium hirsutum
atggacagccccgggccccgcgggccgtccgttcggctccggggtgtgttacccaaagaatgataaagttggttttatttcaagaagtcgatcgaaaagaaagcctcagcgtctagagttcagctgacgggaaagggggtgcgcagcctccagtttgagagctatccggagccccaaaacaggggtgggcgccagctccctgcacgccctgagcttctatcgtaggccggaccatgggaaccccaaagccacggatcctgccctggctggtgtcgcagctggacctggggcaactggagggcgtggcctgggtgaacgagagccgcacgcgcttccgcatcccttggaagcacggcctacggcaggatgcacaggaggaggatttca

SEQ ID NO: 229119 - DNA, 376 bp, Gossypium hirsutum
aagaaatttcatgtacatttctttatttttctcagatttttctcactctctgcctcctttttctctccaatgttagttgaatcgatccaggaggaaaaaccattcttatcagggatggtggatggaagcaccaatttgccagtcaacctttcttgctttgagctgattaaaccaagcttggatgagaccaaccagcattgttctcttgatgtcttgcctattctactagaggaaacttcattttcagcaagagaaaaatgcagcttaaacacttcacaaggccaggatgtctatagcatttctgtcttgcctgaggaaggaaacatgaatccaaaatgcacaccacagttaacttttttgagcctcttagaagttc

SEQ ID NO: 229120 - DNA, 368 bp, Gossypium hirsutum
caacaattctcatgcgggtcttgaagaatgatctcattaagtacggtcaagatgaagaagcagctgatgatcaagaagagactggatggaagtatattcatggagacgtattccgtttcccaaagtacaaatctctctttgctgctgctctcggatctggaacacagctgttcactttaacggtcttcatttttatgcttgcactggttggtgtcttttatccatacaacagaggagctctatttactgccctggtggtaatatatgcccttacgtcagggattgcaggctacgtagcaacttctttttactgtcagcttgaagggacaaactgggttaggaatctgttattgactggctgccttttc

SEQ ID NO: 229121 - DNA, 378 bp, Gossypium hirsutum
cggacgcgtggggaaaccctaaaacaacaaaaatgaaaccaggagggcaaagcttagctctaaccaccaccaccatagccattcaaatcttaaccttcagcctaattttttcgttcagcttcgctctcctcaaaaccccacaagaaccaaccatacaccaagtcactgaaaattcagatatcccaactctgaagaccaaattctggagaaaccacgtccacaaacagttccgagttttcatggaaacgtacggaaagaactattcgaccagggaggagtacatgcaccgcctcgggatctttgcgaagaacttggtgagggctgctgagcaccagctgcttgatcctatggctgtgcatggtgtgactcagttctctg

SEQ ID NO: 229122 - DNA, 365 bp, Gossypium hirsutum
ggcgaatcgttcacgacaacgacgccgagtccaagctcgacgacgatgtttccagcatatctaaatccctcgacctacatggcagcatcgaaaagggtgatgttagcagtctacccagtaaagatttcggcggtctttattcggttaagcccttgttcttaatcaaaccctctggagcggaagatataagtcggatcgttaagctcgcatcgaggacctccaatttgacggtggcggcaaggggtaacggccactcaattaacggtcaggcgatggccgagggggggctcgtgatagacatgtcttcgacggagaaaaaccatttcgaattcttgccaatcaatggctctcattatatcgatgtt

SEQ ID NO: 229123 - DNA, 385 bp, Gossypium hirsutum
cggacgcgtgggggctagccaagctgccttccagtatttcggagttgaagaaagccaagttcctctaatcatcattcagagtgatgatgggaagaagtattttaaaccaaatttgaaggctgatgacattgcaccatgggtgaaggatttcaaggaaggaaaagttgcaccgtatgtgaagtctgaacctattcccaaggagaacaatgaaccagtgaaagtggtggttgctgacacccttcaagacatggttttgaaatcagggaaaaatgttctgctcgagttctatgccccttggtgtggacattgcaaaaaattggcaccaatcttggatgaagttgctgtccattatgaaaaagatgccgatgttttaatcgcaaaactt

SEQ ID NO: 229124 - DNA, 385 bp, Gossypium hirsutum
acgcccacgcgtacggtttgattcaccagagaggaactgaggatgcgatgaactatctatctaaagaagctgcaaaagggaaagtgaaaagtatcgttttcctaatgccttgccatgccacaccctactattccactctgcataacaacctgcctatgcgtttcttggattgtgcacccagtaagggaatgcctgctgaatcggaccgtttcatgatggatccagttagttttgcggtagattttgcaaaaaattggtctcgccctagtcacattgtattgtttgattcaaaggagaggcacttgaaagattttctagtttcacattcttttagaagaggtagaaggttcttccatgctcactttaaggtggaccgtgatcttca

SEQ ID NO: 229125 - DNA, 385 bp, Gossypium hirsutum
ggagaagtgggcaatacaggaaaataaggtcccagttgtcgcgtggagacatatttgtagtcccagcaaacttcccagttacattcgttgcatcccaaaaccagaacctgcggatgactgggttcggtctttacaaccagaacattaacccagaccataaccagaggatcttcgtggctggaaaaatcaaccatgtgagacaatgggatagccaagccaaggagttggcctttggggtgtcatcgaggttggtggatgagatattcaacaacaacccacaagagtcttacttcgtgtctcgacagaggcagcgtgcatctgaataaagagttagaggcaataataaccacatagtctcgtgtttacggactaatgtgaaattttc

SEQ ID NO: 229126 - DNA, 387 bp, Gossypium hirsutum
atcaacgaccggctggctttctacctggagaaggtgcgcgccctggaggaggccaacgccgacctggaggtgaagatccgtgactggcacctgaagcagagcccagctagccctgagcgggactacagcccctaccacaagaccattgaagagctgcgggacaagatcctgaccgccactattgaaaacaaccgggtcatcctggagattgacaatgccaggctggctgcggatgacttcaggctcaagtatgagaacaagctggccctgcgccagagcgtggaggctgacatcaacggcctgcgccgggtgctggatgagctcaccctgtctaagactgacctggagatgcagatcgagagcctgaatgaagagctggcctacatg

SEQ ID NO: 229127 - DNA, 379 bp, Gossypium hirsutum
gtgcacgattctgaaattttgcctgccgctccatctctacatcacaggaatggcgacagatgttgcagcccccgccaccgtcgcacccaaagacccaacccaacctcaccttgaagtaaaactcttcaaccgctggagcttcgaggaagttcaggttgctgatatctccttgagtgattacattggtgtccaagcttcgaagcatgctacctatgtgccacacactgctgggaggtactcagttaaacgtttcaggaaggctcagtgcccaattgttgaaaggcttacaaactcacttatgatgcatggccgaaacaatgggaagaagcttatggcagccaggattgtgaagcatgccatggatattatttatctcttg

SEQ ID NO: 229128 - DNA, 252 bp, Gossypium hirsutum
atgctaggacatggtgcgtgggctgctgcccttgctcaatcctgaggtcccagatcagttctacaggctctggctgtctctttttctacacgctgtcgtggtgcactgcctcgtgtctgtggtctttcaaatgaccatcctgagggacctggagaagctggccggctggcaccgtatcgacatcatcttcatcctcagcagcatcacaggcaacctcgccagcgccatattccttccataccggtcagaggt

SEQ ID NO: 229129 - DNA, 335 bp, Gossypium hirsutum
cttcgcaaagatccaaaacaaggaagggattccaccaaaccaacaaaagctcatattttccgggaaacaacttgaggacggtcgcacctttgccgatttcaacatccaaaaggagtccaccctccatttggtattgaggcttcgtggtgggatgcagattttcgtcaagacgttgactgggaaaaccataactttggaggtggagagttccgatacgatcgacaatgttaaggcgaagattcaggacaaagaaggaattccaccagatcagcaaaggttgattttcgctgggaaacaattggaagatggaaggaacttggctgattacaatattc
